United States Patent Application Publication US 2011/0177960 A1 - sequence listing, part 23

SEQ ID NO: 410104 - DNA, 25 bp, Artificial
  probe
  misc_feature (1)..(25): SEQ ID NO: 5422; WAN024DP2; Start 43; Stop 67
atagtgtttctaaattgtgaatcaa

SEQ ID NO: 410105 - DNA, 25 bp, Artificial
  probe
  misc_feature (1)..(25): SEQ ID NO: 5422; WAN024DP2; Start 47; Stop 71
tgtttctaaattgtgaatcaatcaa

SEQ ID NO: 410106 - DNA, 25 bp, Artificial
  probe
  misc_feature (1)..(25): SEQ ID NO: 5422; WAN024DP2; Start 67; Stop 91
atcaaaactgattgtgatggggcta

SEQ ID NO: 410107 - DNA, 25 bp, Artificial
  probe
  misc_feature (1)..(25): SEQ ID NO: 5422; WAN024DP2; Start 44; Stop 68
tagtgtttctaaattgtgaatcaat

SEQ ID NO: 410108 - DNA, 25 bp, Artificial
  probe
  misc_feature (1)..(25): SEQ ID NO: 5422; WAN024DP2; Start 48; Stop 72
gtttctaaattgtgaatcaatcaaa

SEQ ID NO: 410109 - DNA, 25 bp, Artificial
  probe
  misc_feature (1)..(25): SEQ ID NO: 5422; WAN024DP2; Start 25; Stop 49
tttaacaggagtgaaactatagtgt

SEQ ID NO: 410110 - DNA, 25 bp, Artificial
  probe
  misc_feature (1)..(25): SEQ ID NO: 5422; WAN024DP2; Start 81; Stop 105
tgatggggctattctagctttagaa

SEQ ID NO: 410111 - DNA, 25 bp, Artificial
  probe
  misc_feature (1)..(25): SEQ ID NO: 5422; WAN024DP2; Start 78; Stop 102
ttgtgatggggctattctagcttta

SEQ ID NO: 410112 - DNA, 25 bp, Artificial
  probe
  misc_feature (1)..(25): SEQ ID NO: 5422; WAN024DP2; Start 54; Stop 78
aaattgtgaatcaatcaaaactgat

SEQ ID NO: 410113 - DNA, 25 bp, Artificial
  probe
  misc_feature (1)..(25): SEQ ID NO: 5422; WAN024DP2; Start 80; Stop 104
gtgatggggctattctagctttaga

SEQ ID NO: 410114 - DNA, 25 bp, Artificial
  probe
  misc_feature (1)..(25): SEQ ID NO: 5422; WAN024DP2; Start 79; Stop 103
tgtgatggggctattctagctttag

SEQ ID NO: 410115 - DNA, 25 bp, Artificial
  probe
  misc_feature (1)..(25): SEQ ID NO: 5422; WAN024DP2; Start 53; Stop 77
taaattgtgaatcaatcaaaactga

SEQ ID NO: 410116 - DNA, 25 bp, Artificial
  probe
  misc_feature (1)..(25): SEQ ID NO: 5422; WAN024DP2; Start 77; Stop 101
attgtgatggggctattctagcttt

SEQ ID NO: 410117 - DNA, 25 bp, Artificial
  probe
  misc_feature (1)..(25): SEQ ID NO: 5422; WAN024DP2; Start 52; Stop 76
ctaaattgtgaatcaatcaaaactg

SEQ ID NO: 410118 - DNA, 25 bp, Artificial
  probe
  misc_feature (1)..(25): SEQ ID NO: 5422; WAN024DP2; Start 51; Stop 75
tctaaattgtgaatcaatcaaaact

SEQ ID NO: 410119 - DNA, 25 bp, Artificial
  probe
  misc_feature (1)..(25): SEQ ID NO: 5422; WAN024DP2; Start 76; Stop 100
gattgtgatggggctattctagctt

SEQ ID NO: 410120 - DNA, 25 bp, Artificial
  probe
  misc_feature (1)..(25): SEQ ID NO: 5422; WAN024DP2; Start 74; Stop 98
ctgattgtgatggggctattctagc

SEQ ID NO: 410121 - DNA, 25 bp, Artificial
  probe
  misc_feature (1)..(25): SEQ ID NO: 5422; WAN024DP2; Start 27; Stop 51
taacaggagtgaaactatagtgttt

SEQ ID NO: 410122 - DNA, 25 bp, Artificial
  probe
  misc_feature (1)..(25): SEQ ID NO: 5422; WAN024DP2; Start 26; Stop 50
ttaacaggagtgaaactatagtgtt

SEQ ID NO: 410123 - DNA, 25 bp, Artificial
  probe
  misc_feature (1)..(25): SEQ ID NO: 5422; WAN024DP2; Start 75; Stop 99
tgattgtgatggggctattctagct

SEQ ID NO: 410124 - DNA, 25 bp, Artificial
  probe
  misc_feature (1)..(25): SEQ ID NO: 5422; WAN024DP2; Start 50; Stop 74
ttctaaattgtgaatcaatcaaaac

SEQ ID NO: 410125 - DNA, 25 bp, Artificial
  probe
  misc_feature (1)..(25): SEQ ID NO: 5422; WAN024DP2; Start 24; Stop 48
ttttaacaggagtgaaactatagtg

SEQ ID NO: 410126 - DNA, 25 bp, Artificial
  probe
  misc_feature (1)..(25): SEQ ID NO: 5422; WAN024DP2; Start 66; Stop 90
aatcaaaactgattgtgatggggct

SEQ ID NO: 410127 - DNA, 25 bp, Artificial
  probe
  misc_feature (1)..(25): SEQ ID NO: 5422; WAN024DP2; Start 55; Stop 79
aattgtgaatcaatcaaaactgatt

SEQ ID NO: 410128 - DNA, 25 bp, Artificial
  probe
  misc_feature (1)..(25): SEQ ID NO: 5422; WAN024DP2; Start 23; Stop 47
attttaacaggagtgaaactatagt

SEQ ID NO: 410129 - DNA, 25 bp, Artificial
  probe
  misc_feature (1)..(25): SEQ ID NO: 5423; WAN024F2T; Start 160; Stop 184
aaaccatttagaaaggctatcccat

SEQ ID NO: 410130 - DNA, 25 bp, Artificial
  probe
  misc_feature (1)..(25): SEQ ID NO: 5423; WAN024F2T; Start 200; Stop 224
cacaaatcaaacaactttaccacct

SEQ ID NO: 410131 - DNA, 25 bp, Artificial
  probe
  misc_feature (1)..(25): SEQ ID NO: 5423; WAN024F2T; Start 199; Stop 223
acacaaatcaaacaactttaccacc

SEQ ID NO: 410132 - DNA, 25 bp, Artificial
  probe
  misc_feature (1)..(25): SEQ ID NO: 5423; WAN024F2T; Start 201; Stop 225
acaaatcaaacaactttaccaccta

SEQ ID NO: 410133 - DNA, 25 bp, Artificial
  probe
  misc_feature (1)..(25): SEQ ID NO: 5423; WAN024F2T; Start 151; Stop 175
ttgcccaataaaccatttagaaagg

SEQ ID NO: 410134 - DNA, 25 bp, Artificial
  probe
  misc_feature (1)..(25): SEQ ID NO: 5423; WAN024F2T; Start 159; Stop 183
taaaccatttagaaaggctatccca

SEQ ID NO: 410135 - DNA, 25 bp, Artificial
  probe
  misc_feature (1)..(25): SEQ ID NO: 5423; WAN024F2T; Start 154; Stop 178
cccaataaaccatttagaaaggcta

SEQ ID NO: 410136 - DNA, 25 bp, Artificial
  probe
  misc_feature (1)..(25): SEQ ID NO: 5423; WAN024F2T; Start 158; Stop 182
ataaaccatttagaaaggctatccc

SEQ ID NO: 410137 - DNA, 25 bp, Artificial
  probe
  misc_feature (1)..(25): SEQ ID NO: 5423; WAN024F2T; Start 60; Stop 84
agtctgggacaatagtctcttatct

SEQ ID NO: 410138 - DNA, 25 bp, Artificial
  probe
  misc_feature (1)..(25): SEQ ID NO: 5423; WAN024F2T; Start 61; Stop 85
gtctgggacaatagtctcttatctc

SEQ ID NO: 410139 - DNA, 25 bp, Artificial
  probe
  misc_feature (1)..(25): SEQ ID NO: 5423; WAN024F2T; Start 59; Stop 83
gagtctgggacaatagtctcttatc

SEQ ID NO: 410140 - DNA, 25 bp, Artificial
  probe
  misc_feature (1)..(25): SEQ ID NO: 5423; WAN024F2T; Start 147; Stop 171
agaattgcccaataaaccatttaga

SEQ ID NO: 410141 - DNA, 25 bp, Artificial
  probe
  misc_feature (1)..(25): SEQ ID NO: 5423; WAN024F2T; Start 161; Stop 185
aaccatttagaaaggctatcccatg

SEQ ID NO: 410142 - DNA, 25 bp, Artificial
  probe
  misc_feature (1)..(25): SEQ ID NO: 5423; WAN024F2T; Start 150; Stop 174
attgcccaataaaccatttagaaag

SEQ ID NO: 410143 - DNA, 25 bp, Artificial
  probe
  misc_feature (1)..(25): SEQ ID NO: 5423; WAN024F2T; Start 148; Stop 172
gaattgcccaataaaccatttagaa

SEQ ID NO: 410144 - DNA, 25 bp, Artificial
  probe
  misc_feature (1)..(25): SEQ ID NO: 5423; WAN024F2T; Start 65; Stop 89
gggacaatagtctcttatctccaaa

SEQ ID NO: 410145 - DNA, 25 bp, Artificial
  probe
  misc_feature (1)..(25): SEQ ID NO: 5423; WAN024F2T; Start 62; Stop 86
tctgggacaatagtctcttatctcc

SEQ ID NO: 410146 - DNA, 25 bp, Artificial
  probe
  misc_feature (1)..(25): SEQ ID NO: 5423; WAN024F2T; Start 64; Stop 88
tgggacaatagtctcttatctccaa

SEQ ID NO: 410147 - DNA, 25 bp, Artificial
  probe
  misc_feature (1)..(25): SEQ ID NO: 5423; WAN024F2T; Start 143; Stop 167
aaatagaattgcccaataaaccatt

SEQ ID NO: 410148 - DNA, 25 bp, Artificial
  probe
  misc_feature (1)..(25): SEQ ID NO: 5423; WAN024F2T; Start 144; Stop 168
aatagaattgcccaataaaccattt

SEQ ID NO: 410149 - DNA, 25 bp, Artificial
  probe
  misc_feature (1)..(25): SEQ ID NO: 5423; WAN024F2T; Start 63; Stop 87
ctgggacaatagtctcttatctcca

SEQ ID NO: 410150 - DNA, 25 bp, Artificial
  probe
  misc_feature (1)..(25): SEQ ID NO: 5423; WAN024F2T; Start 149; Stop 173
aattgcccaataaaccatttagaaa

SEQ ID NO: 410151 - DNA, 25 bp, Artificial
  probe
  misc_feature (1)..(25): SEQ ID NO: 5423; WAN024F2T; Start 146; Stop 170
tagaattgcccaataaaccatttag

SEQ ID NO: 410152 - DNA, 25 bp, Artificial
  probe
  misc_feature (1)..(25): SEQ ID NO: 5423; WAN024F2T; Start 155; Stop 179
ccaataaaccatttagaaaggctat

SEQ ID NO: 410153 - DNA, 25 bp, Artificial
  probe
  misc_feature (1)..(25): SEQ ID NO: 5423; WAN024F2T; Start 157; Stop 181
aataaaccatttagaaaggctatcc

SEQ ID NO: 410154 - DNA, 25 bp, Artificial
  probe
  misc_feature (1)..(25): SEQ ID NO: 5423; WAN024F2T; Start 162; Stop 186
accatttagaaaggctatcccatgc

SEQ ID NO: 410155 - DNA, 25 bp, Artificial
  probe
  misc_feature (1)..(25): SEQ ID NO: 5423; WAN024F2T; Start 145; Stop 169
atagaattgcccaataaaccattta

SEQ ID NO: 410156 - DNA, 25 bp, Artificial
  probe
  misc_feature (1)..(25): SEQ ID NO: 5423; WAN024F2T; Start 132; Stop 156
tagtcttggtaaaatagaattgccc

SEQ ID NO: 410157 - DNA, 25 bp, Artificial
  probe
  misc_feature (1)..(25): SEQ ID NO: 5423; WAN024F2T; Start 52; Stop 76
aagaaaagagtctgggacaatagtc

SEQ ID NO: 410158 - DNA, 25 bp, Artificial
  probe
  misc_feature (1)..(25): SEQ ID NO: 5423; WAN024F2T; Start 51; Stop 75
aaagaaaagagtctgggacaatagt

SEQ ID NO: 410159 - DNA, 25 bp, Artificial
  probe
  misc_feature (1)..(25): SEQ ID NO: 5423; WAN024F2T; Start 49; Stop 73
acaaagaaaagagtctgggacaata

SEQ ID NO: 410160 - DNA, 25 bp, Artificial
  probe
  misc_feature (1)..(25): SEQ ID NO: 5423; WAN024F2T; Start 48; Stop 72
tacaaagaaaagagtctgggacaat

SEQ ID NO: 410161 - DNA, 25 bp, Artificial
  probe
  misc_feature (1)..(25): SEQ ID NO: 5423; WAN024F2T; Start 47; Stop 71
atacaaagaaaagagtctgggacaa

SEQ ID NO: 410162 - DNA, 25 bp, Artificial
  probe
  misc_feature (1)..(25): SEQ ID NO: 5424; WAN024DOO; Start 26; Stop 50
aatggtatactagacttcctgcaaa

SEQ ID NO: 410163 - DNA, 25 bp, Artificial
  probe
  misc_feature (1)..(25): SEQ ID NO: 5424; WAN024DOO; Start 25; Stop 49
aaatggtatactagacttcctgcaa

SEQ ID NO: 410164 - DNA, 25 bp, Artificial
  probe
  misc_feature (1)..(25): SEQ ID NO: 5424; WAN024DOO; Start 119; Stop 143
atcaacgaaaatcaaatagcaaact

SEQ ID NO: 410165 - DNA, 25 bp, Artificial
  probe
  misc_feature (1)..(25): SEQ ID NO: 5424; WAN024DOO; Start 52; Stop 76
ctaggaagtaaatgtgtaagaatca

SEQ ID NO: 410166 - DNA, 25 bp, Artificial
  probe
  misc_feature (1)..(25): SEQ ID NO: 5424; WAN024DOO; Start 120; Stop 144
tcaacgaaaatcaaatagcaaacta

SEQ ID NO: 410167 - DNA, 25 bp, Artificial
  probe
  misc_feature (1)..(25): SEQ ID NO: 5424; WAN024DOO; Start 53; Stop 77
taggaagtaaatgtgtaagaatcac

SEQ ID NO: 410168 - DNA, 25 bp, Artificial
  probe
  misc_feature (1)..(25): SEQ ID NO: 5424; WAN024DOO; Start 51; Stop 75
actaggaagtaaatgtgtaagaatc

SEQ ID NO: 410169 - DNA, 25 bp, Artificial
  probe
  misc_feature (1)..(25): SEQ ID NO: 5424; WAN024DOO; Start 49; Stop 73
aaactaggaagtaaatgtgtaagaa

SEQ ID NO: 410170 - DNA, 25 bp, Artificial
  probe
  misc_feature (1)..(25): SEQ ID NO: 5424; WAN024DOO; Start 46; Stop 70
gcaaaactaggaagtaaatgtgtaa

SEQ ID NO: 410171 - DNA, 25 bp, Artificial
  probe
  misc_feature (1)..(25): SEQ ID NO: 5424; WAN024DOO; Start 29; Stop 53
ggtatactagacttcctgcaaaact

SEQ ID NO: 410172 - DNA, 25 bp, Artificial
  probe
  misc_feature (1)..(25): SEQ ID NO: 5424; WAN024DOO; Start 28; Stop 52
tggtatactagacttcctgcaaaac

SEQ ID NO: 410173 - DNA, 25 bp, Artificial
  probe
  misc_feature (1)..(25): SEQ ID NO: 5424; WAN024DOO; Start 27; Stop 51
atggtatactagacttcctgcaaaa

SEQ ID NO: 410174 - DNA, 25 bp, Artificial
  probe
  misc_feature (1)..(25): SEQ ID NO: 5424; WAN024DOO; Start 24; Stop 48
aaaatggtatactagacttcctgca

SEQ ID NO: 410175 - DNA, 25 bp, Artificial
  probe
  misc_feature (1)..(25): SEQ ID NO: 5424; WAN024DOO; Start 118; Stop 142
tatcaacgaaaatcaaatagcaaac

SEQ ID NO: 410176 - DNA, 25 bp, Artificial
  probe
  misc_feature (1)..(25): SEQ ID NO: 5424; WAN024DOO; Start 50; Stop 74
aactaggaagtaaatgtgtaagaat

SEQ ID NO: 410177 - DNA, 25 bp, Artificial
  probe
  misc_feature (1)..(25): SEQ ID NO: 5424; WAN024DOO; Start 44; Stop 68
ctgcaaaactaggaagtaaatgtgt

SEQ ID NO: 410178 - DNA, 25 bp, Artificial
  probe
  misc_feature (1)..(25): SEQ ID NO: 5424; WAN024DOO; Start 45; Stop 69
tgcaaaactaggaagtaaatgtgta

SEQ ID NO: 410179 - DNA, 25 bp, Artificial
  probe
  misc_feature (1)..(25): SEQ ID NO: 5424; WAN024DOO; Start 43; Stop 67
cctgcaaaactaggaagtaaatgtg

SEQ ID NO: 410180 - DNA, 25 bp, Artificial
  probe
  misc_feature (1)..(25): SEQ ID NO: 5424; WAN024DOO; Start 30; Stop 54
gtatactagacttcctgcaaaacta

SEQ ID NO: 410181 - DNA, 25 bp, Artificial
  probe
  misc_feature (1)..(25): SEQ ID NO: 5424; WAN024DOO; Start 117; Stop 141
ttatcaacgaaaatcaaatagcaaa

SEQ ID NO: 410182 - DNA, 25 bp, Artificial
  probe
  misc_feature (1)..(25): SEQ ID NO: 5424; WAN024DOO; Start 116; Stop 140
tttatcaacgaaaatcaaatagcaa

SEQ ID NO: 410183 - DNA, 25 bp, Artificial
  probe
  misc_feature (1)..(25): SEQ ID NO: 5424; WAN024DOO; Start 32; Stop 56
atactagacttcctgcaaaactagg

SEQ ID NO: 410184 - DNA, 25 bp, Artificial
  probe
  misc_feature (1)..(25): SEQ ID NO: 5424; WAN024DOO; Start 92; Stop 116
ttccgtcttggaggagcatttcttt

SEQ ID NO: 410185 - DNA, 25 bp, Artificial
  probe
  misc_feature (1)..(25): SEQ ID NO: 5424; WAN024DOO; Start 91; Stop 115
cttccgtcttggaggagcatttctt

SEQ ID NO: 410186 - DNA, 25 bp, Artificial
  probe
  misc_feature (1)..(25): SEQ ID NO: 5424; WAN024DOO; Start 47; Stop 71
caaaactaggaagtaaatgtgtaag

SEQ ID NO: 410187 - DNA, 25 bp, Artificial
  probe
  misc_feature (1)..(25): SEQ ID NO: 5424; WAN024DOO; Start 115; Stop 139
ttttatcaacgaaaatcaaatagca

SEQ ID NO: 410188 - DNA, 25 bp, Artificial
  probe
  misc_feature (1)..(25): SEQ ID NO: 5424; WAN024DOO; Start 54; Stop 78
aggaagtaaatgtgtaagaatcaca

SEQ ID NO: 410189 - DNA, 25 bp, Artificial
  probe
  misc_feature (1)..(25): SEQ ID NO: 5424; WAN024DOO; Start 55; Stop 79
ggaagtaaatgtgtaagaatcacag

SEQ ID NO: 410190 - DNA, 25 bp, Artificial
  probe
  misc_feature (1)..(25): SEQ ID NO: 5424; WAN024DOO; Start 48; Stop 72
aaaactaggaagtaaatgtgtaaga

SEQ ID NO: 410191 - DNA, 25 bp, Artificial
  probe
  misc_feature (1)..(25): SEQ ID NO: 5424; WAN024DOO; Start 31; Stop 55
tatactagacttcctgcaaaactag

SEQ ID NO: 410192 - DNA, 25 bp, Artificial
  probe
  misc_feature (1)..(25): SEQ ID NO: 5424; WAN024DOO; Start 56; Stop 80
gaagtaaatgtgtaagaatcacagt

SEQ ID NO: 410193 - DNA, 25 bp, Artificial
  probe
  misc_feature (1)..(25): SEQ ID NO: 5424; WAN024DOO; Start 42; Stop 66
tcctgcaaaactaggaagtaaatgt

SEQ ID NO: 410194 - DNA, 25 bp, Artificial
  probe
  misc_feature (1)..(25): SEQ ID NO: 5424; WAN024DOO; Start 93; Stop 117
tccgtcttggaggagcatttctttt

SEQ ID NO: 410195 - DNA, 25 bp, Artificial
  probe
  misc_feature (1)..(25): SEQ ID NO: 5425; WAN024GA7; Start 18; Stop 42
cgtcaagaataagaactatcggatt

SEQ ID NO: 410196 - DNA, 25 bp, Artificial
  probe
  misc_feature (1)..(25): SEQ ID NO: 5425; WAN024GA7; Start 15; Stop 39
caacgtcaagaataagaactatcgg

SEQ ID NO: 410197 - DNA, 25 bp, Artificial
  probe
  misc_feature (1)..(25): SEQ ID NO: 5425; WAN024GA7; Start 17; Stop 41
acgtcaagaataagaactatcggat

SEQ ID NO: 410198 - DNA, 25 bp, Artificial
  probe
  misc_feature (1)..(25): SEQ ID NO: 5425; WAN024GA7; Start 16; Stop 40
aacgtcaagaataagaactatcgga

SEQ ID NO: 410199 - DNA, 25 bp, Artificial
  probe
  misc_feature (1)..(25): SEQ ID NO: 5425; WAN024GA7; Start 14; Stop 38
acaacgtcaagaataagaactatcg

SEQ ID NO: 410200 - DNA, 25 bp, Artificial
  probe
  misc_feature (1)..(25): SEQ ID NO: 5425; WAN024GA7; Start 23; Stop 47
agaataagaactatcggattaagga

SEQ ID NO: 410201 - DNA, 25 bp, Artificial
  probe
  misc_feature (1)..(25): SEQ ID NO: 5425; WAN024GA7; Start 11; Stop 35
cggacaacgtcaagaataagaacta

SEQ ID NO: 410202 - DNA, 25 bp, Artificial
  probe
  misc_feature (1)..(25): SEQ ID NO: 5425; WAN024GA7; Start 12; Stop 36
ggacaacgtcaagaataagaactat

SEQ ID NO: 410203 - DNA, 25 bp, Artificial
  probe
  misc_feature (1)..(25): SEQ ID NO: 5425; WAN024GA7; Start 9; Stop 33
ttcggacaacgtcaagaataagaac

SEQ ID NO: 410204 - DNA, 25 bp, Artificial
  probe
  misc_feature (1)..(25): SEQ ID NO: 5425; WAN024GA7; Start 19; Stop 43
gtcaagaataagaactatcggatta

SEQ ID NO: 410205 - DNA, 25 bp, Artificial
  probe
  misc_feature (1)..(25): SEQ ID NO: 5425; WAN024GA7; Start 24; Stop 48
gaataagaactatcggattaaggaa

SEQ ID NO: 410206 - DNA, 25 bp, Artificial
  probe
  misc_feature (1)..(25): SEQ ID NO: 5425; WAN024GA7; Start 22; Stop 46
aagaataagaactatcggattaagg

SEQ ID NO: 410207 - DNA, 25 bp, Artificial
  probe
  misc_feature (1)..(25): SEQ ID NO: 5425; WAN024GA7; Start 13; Stop 37
gacaacgtcaagaataagaactatc

SEQ ID NO: 410208 - DNA, 25 bp, Artificial
  probe
  misc_feature (1)..(25): SEQ ID NO: 5425; WAN024GA7; Start 10; Stop 34
tcggacaacgtcaagaataagaact

SEQ ID NO: 410209 - DNA, 25 bp, Artificial
  probe
  misc_feature (1)..(25): SEQ ID NO: 5425; WAN024GA7; Start 6; Stop 30
gatttcggacaacgtcaagaataag

SEQ ID NO: 410210 - DNA, 25 bp, Artificial
  probe
  misc_feature (1)..(25): SEQ ID NO: 5425; WAN024GA7; Start 55; Stop 79
tcccttaatccttttgttttgtctg

SEQ ID NO: 410211 - DNA, 25 bp, Artificial
  probe
  misc_feature (1)..(25): SEQ ID NO: 5425; WAN024GA7; Start 53; Stop 77
actcccttaatccttttgttttgtc

SEQ ID NO: 410212 - DNA, 25 bp, Artificial
  probe
  misc_feature (1)..(25): SEQ ID NO: 5425; WAN024GA7; Start 54; Stop 78
ctcccttaatccttttgttttgtct

SEQ ID NO: 410213 - DNA, 25 bp, Artificial
  probe
  misc_feature (1)..(25): SEQ ID NO: 5425; WAN024GA7; Start 7; Stop 31
atttcggacaacgtcaagaataaga

SEQ ID NO: 410214 - DNA, 25 bp, Artificial
  probe
  misc_feature (1)..(25): SEQ ID NO: 5425; WAN024GA7; Start 20; Stop 44
tcaagaataagaactatcggattaa

SEQ ID NO: 410215 - DNA, 25 bp, Artificial
  probe
  misc_feature (1)..(25): SEQ ID NO: 5425; WAN024GA7; Start 8; Stop 32
tttcggacaacgtcaagaataagaa

SEQ ID NO: 410216 - DNA, 25 bp, Artificial
  probe
  misc_feature (1)..(25): SEQ ID NO: 5425; WAN024GA7; Start 21; Stop 45
caagaataagaactatcggattaag

SEQ ID NO: 410217 - DNA, 25 bp, Artificial
  probe
  misc_feature (1)..(25): SEQ ID NO: 5425; WAN024GA7; Start 25; Stop 49
aataagaactatcggattaaggaaa

SEQ ID NO: 410218 - DNA, 25 bp, Artificial
  probe
  misc_feature (1)..(25): SEQ ID NO: 5425; WAN024GA7; Start 27; Stop 51
taagaactatcggattaaggaaatt

SEQ ID NO: 410219 - DNA, 25 bp, Artificial
  probe
  misc_feature (1)..(25): SEQ ID NO: 5425; WAN024GA7; Start 26; Stop 50
ataagaactatcggattaaggaaat

SEQ ID NO: 410220 - DNA, 25 bp, Artificial
  probe
  misc_feature (1)..(25): SEQ ID NO: 5426; WAN024DFG; Start 862; Stop 886
tatgtcttcacgccttatactatgg

SEQ ID NO: 410221 - DNA, 25 bp, Artificial
  probe
  misc_feature (1)..(25): SEQ ID NO: 5426; WAN024DFG; Start 865; Stop 889
gtcttcacgccttatactatggtaa

SEQ ID NO: 410222 - DNA, 25 bp, Artificial
  probe
  misc_feature (1)..(25): SEQ ID NO: 5426; WAN024DFG; Start 858; Stop 882
ttcttatgtcttcacgccttatact

SEQ ID NO: 410223 - DNA, 25 bp, Artificial
  probe
  misc_feature (1)..(25): SEQ ID NO: 5426; WAN024DFG; Start 857; Stop 881
gttcttatgtcttcacgccttatac

SEQ ID NO: 410224 - DNA, 25 bp, Artificial
  probe
  misc_feature (1)..(25): SEQ ID NO: 5426; WAN024DFG; Start 917; Stop 941
ctcaggtagataaggttatggatgg

SEQ ID NO: 410225 - DNA, 25 bp, Artificial
  probe
  misc_feature (1)..(25): SEQ ID NO: 5426; WAN024DFG; Start 916; Stop 940
gctcaggtagataaggttatggatg

SEQ ID NO: 410226 - DNA, 25 bp, Artificial
  probe
  misc_feature (1)..(25): SEQ ID NO: 5426; WAN024DFG; Start 915; Stop 939
tgctcaggtagataaggttatggat

SEQ ID NO: 410227 - DNA, 25 bp, Artificial
  probe
  misc_feature (1)..(25): SEQ ID NO: 5426; WAN024DFG; Start 914; Stop 938
ttgctcaggtagataaggttatgga

SEQ ID NO: 410228 - DNA, 25 bp, Artificial
  probe
  misc_feature (1)..(25): SEQ ID NO: 5426; WAN024DFG; Start 913; Stop 937
gttgctcaggtagataaggttatgg

SEQ ID NO: 410229 - DNA, 25 bp, Artificial
  probe
  misc_feature (1)..(25): SEQ ID NO: 5426; WAN024DFG; Start 912; Stop 936
ggttgctcaggtagataaggttatg

SEQ ID NO: 410230 - DNA, 25 bp, Artificial
  probe
  misc_feature (1)..(25): SEQ ID NO: 5426; WAN024DFG; Start 911; Stop 935
aggttgctcaggtagataaggttat

SEQ ID NO: 410231 - DNA, 25 bp, Artificial
  probe
  misc_feature (1)..(25): SEQ ID NO: 5426; WAN024DFG; Start 864; Stop 888
tgtcttcacgccttatactatggta

SEQ ID NO: 410232 - DNA, 25 bp, Artificial
  probe
  misc_feature (1)..(25): SEQ ID NO: 5426; WAN024DFG; Start 198; Stop 222
cgaacttgataagataatgaccagc

SEQ ID NO: 410233 - DNA, 25 bp, Artificial
  probe
  misc_feature (1)..(25): SEQ ID NO: 5426; WAN024DFG; Start 859; Stop 883
tcttatgtcttcacgccttatacta

SEQ ID NO: 410234 - DNA, 25 bp, Artificial
  probe
  misc_feature (1)..(25): SEQ ID NO: 5426; WAN024DFG; Start 197; Stop 221
ccgaacttgataagataatgaccag

SEQ ID NO: 410235 - DNA, 25 bp, Artificial
  probe
  misc_feature (1)..(25): SEQ ID NO: 5426; WAN024DFG; Start 195; Stop 219
agccgaacttgataagataatgacc

SEQ ID NO: 410236 - DNA, 25 bp, Artificial
  probe
  misc_feature (1)..(25): SEQ ID NO: 5426; WAN024DFG; Start 196; Stop 220
gccgaacttgataagataatgacca

SEQ ID NO: 410237 - DNA, 25 bp, Artificial
  probe
  misc_feature (1)..(25): SEQ ID NO: 5426; WAN024DFG; Start 863; Stop 887
atgtcttcacgccttatactatggt

SEQ ID NO: 410238 - DNA, 25 bp, Artificial
  probe
  misc_feature (1)..(25): SEQ ID NO: 5426; WAN024DFG; Start 319; Stop 343
ggtgatatgttgcttcgtatgtata

SEQ ID NO: 410239 - DNA, 25 bp, Artificial
  probe
  misc_feature (1)..(25): SEQ ID NO: 5426; WAN024DFG; Start 962; Stop 986
atgcttatctcaagtggcgaattag

SEQ ID NO: 410240 - DNA, 25 bp, Artificial
  probe
  misc_feature (1)..(25): SEQ ID NO: 5426; WAN024DFG; Start 861; Stop 885
ttatgtcttcacgccttatactatg

SEQ ID NO: 410241 - DNA, 25 bp, Artificial
  probe
  misc_feature (1)..(25): SEQ ID NO: 5426; WAN024DFG; Start 961; Stop 985
gatgcttatctcaagtggcgaatta

SEQ ID NO: 410242 - DNA, 25 bp, Artificial
  probe
  misc_feature (1)..(25): SEQ ID NO: 5426; WAN024DFG; Start 194; Stop 218
tagccgaacttgataagataatgac

SEQ ID NO: 410243 - DNA, 25 bp, Artificial
  probe
  misc_feature (1)..(25): SEQ ID NO: 5426; WAN024DFG; Start 860; Stop 884
cttatgtcttcacgccttatactat

SEQ ID NO: 410244 - DNA, 25 bp, Artificial
  probe
  misc_feature (1)..(25): SEQ ID NO: 5426; WAN024DFG; Start 244; Stop 268
tcagaaccttatgaccacaacaatg

SEQ ID NO: 410245 - DNA, 25 bp, Artificial
  probe
  misc_feature (1)..(25): SEQ ID NO: 5426; WAN024DFG; Start 400; Stop 424
gatgaggctggtattaagtcggtaa

SEQ ID NO: 410246 - DNA, 25 bp, Artificial
  probe
  misc_feature (1)..(25): SEQ ID NO: 5426; WAN024DFG; Start 251; Stop 275
cttatgaccacaacaatgccatctt

SEQ ID NO: 410247 - DNA, 25 bp, Artificial
  probe
  misc_feature (1)..(25): SEQ ID NO: 5426; WAN024DFG; Start 910; Stop 934
gaggttgctcaggtagataaggtta

SEQ ID NO: 410248 - DNA, 25 bp, Artificial
  probe
  misc_feature (1)..(25): SEQ ID NO: 5426; WAN024DFG; Start 401; Stop 425
atgaggctggtattaagtcggtaac

SEQ ID NO: 410249 - DNA, 25 bp, Artificial
  probe
  misc_feature (1)..(25): SEQ ID NO: 5426; WAN024DFG; Start 443; Stop 467
ctaatgcctatggtctcctcaagtc

SEQ ID NO: 410250 - DNA, 25 bp, Artificial
  probe
  misc_feature (1)..(25): SEQ ID NO: 5426; WAN024DFG; Start 193; Stop 217
ttagccgaacttgataagataatga

SEQ ID NO: 410251 - DNA, 25 bp, Artificial
  probe
  misc_feature (1)..(25): SEQ ID NO: 5426; WAN024DFG; Start 252; Stop 276
ttatgaccacaacaatgccatcttg

SEQ ID NO: 410252 - DNA, 25 bp, Artificial
  probe
  misc_feature (1)..(25): SEQ ID NO: 5426; WAN024DFG; Start 192; Stop 216
gttagccgaacttgataagataatg

SEQ ID NO: 410253 - DNA, 25 bp, Artificial
  probe
  misc_feature (1)..(25): SEQ ID NO: 5427; WAN024FUT; Start 370; Stop 394
tagacatcatagccgattggaatag

SEQ ID NO: 410254 - DNA, 25 bp, Artificial
  probe
  misc_feature (1)..(25): SEQ ID NO: 5427; WAN024FUT; Start 368; Stop 392
gatagacatcatagccgattggaat

SEQ ID NO: 410255 - DNA, 25 bp, Artificial
  probe
  misc_feature (1)..(25): SEQ ID NO: 5427; WAN024FUT; Start 369; Stop 393
atagacatcatagccgattggaata

SEQ ID NO: 410256 - DNA, 25 bp, Artificial
  probe
  misc_feature (1)..(25): SEQ ID NO: 5427; WAN024FUT; Start 367; Stop 391
agatagacatcatagccgattggaa

SEQ ID NO: 410257 - DNA, 25 bp, Artificial
  probe
  misc_feature (1)..(25): SEQ ID NO: 5427; WAN024FUT; Start 364; Stop 388
ctgagatagacatcatagccgattg

SEQ ID NO: 410258 - DNA, 25 bp, Artificial
  probe
  misc_feature (1)..(25): SEQ ID NO: 5427; WAN024FUT; Start 363; Stop 387
tctgagatagacatcatagccgatt

SEQ ID NO: 410259 - DNA, 25 bp, Artificial
  probe
  misc_feature (1)..(25): SEQ ID NO: 5427; WAN024FUT; Start 362; Stop 386
ttctgagatagacatcatagccgat

SEQ ID NO: 410260 - DNA, 25 bp, Artificial
  probe
  misc_feature (1)..(25): SEQ ID NO: 5427; WAN024FUT; Start 359; Stop 383
cagttctgagatagacatcatagcc

SEQ ID NO: 410261 - DNA, 25 bp, Artificial
  probe
  misc_feature (1)..(25): SEQ ID NO: 5427; WAN024FUT; Start 366; Stop 390
gagatagacatcatagccgattgga

SEQ ID NO: 410262 - DNA, 25 bp, Artificial
  probe
  misc_feature (1)..(25): SEQ ID NO: 5427; WAN024FUT; Start 357; Stop 381
agcagttctgagatagacatcatag

SEQ ID NO: 410263 - DNA, 25 bp, Artificial
  probe
  misc_feature (1)..(25): SEQ ID NO: 5427; WAN024FUT; Start 172; Stop 196
caatggttgatagaatcttctctgc

SEQ ID NO: 410264 - DNA, 25 bp, Artificial
  probe
  misc_feature (1)..(25): SEQ ID NO: 5427; WAN024FUT; Start 358; Stop 382
gcagttctgagatagacatcatagc

SEQ ID NO: 410265 - DNA, 25 bp, Artificial
  probe
  misc_feature (1)..(25): SEQ ID NO: 5427; WAN024FUT; Start 356; Stop 380
aagcagttctgagatagacatcata

SEQ ID NO: 410266 - DNA, 25 bp, Artificial
  probe
  misc_feature (1)..(25): SEQ ID NO: 5427; WAN024FUT; Start 371; Stop 395
agacatcatagccgattggaatagg

SEQ ID NO: 410267 - DNA, 25 bp, Artificial
  probe
  misc_feature (1)..(25): SEQ ID NO: 5427; WAN024FUT; Start 361; Stop 385
gttctgagatagacatcatagccga

SEQ ID NO: 410268 - DNA, 25 bp, Artificial
  probe
  misc_feature (1)..(25): SEQ ID NO: 5427; WAN024FUT; Start 360; Stop 384
agttctgagatagacatcatagccg

SEQ ID NO: 410269 - DNA, 25 bp, Artificial
  probe
  misc_feature (1)..(25): SEQ ID NO: 5427; WAN024FUT; Start 171; Stop 195
acaatggttgatagaatcttctctg

SEQ ID NO: 410270 - DNA, 25 bp, Artificial
  probe
  misc_feature (1)..(25): SEQ ID NO: 5427; WAN024FUT; Start 365; Stop 389
tgagatagacatcatagccgattgg

SEQ ID NO: 410271 - DNA, 25 bp, Artificial
  probe
  misc_feature (1)..(25): SEQ ID NO: 5427; WAN024FUT; Start 170; Stop 194
aacaatggttgatagaatcttctct

SEQ ID NO: 410272 - DNA, 25 bp, Artificial
  probe
  misc_feature (1)..(25): SEQ ID NO: 5427; WAN024FUT; Start 248; Stop 272
caccatattctcccttgtattctgt

SEQ ID NO: 410273 - DNA, 25 bp, Artificial
  probe
  misc_feature (1)..(25): SEQ ID NO: 5427; WAN024FUT; Start 113; Stop 137
gtcaaagtgctccatttcaagaata

SEQ ID NO: 410274 - DNA, 25 bp, Artificial
  probe
  misc_feature (1)..(25): SEQ ID NO: 5427; WAN024FUT; Start 247; Stop 271
ccaccatattctcccttgtattctg

SEQ ID NO: 410275 - DNA, 25 bp, Artificial
  probe
  misc_feature (1)..(25): SEQ ID NO: 5427; WAN024FUT; Start 173; Stop 197
aatggttgatagaatcttctctgca

SEQ ID NO: 410276 - DNA, 25 bp, Artificial
  probe
  misc_feature (1)..(25): SEQ ID NO: 5427; WAN024FUT; Start 244; Stop 268
tagccaccatattctcccttgtatt

SEQ ID NO: 410277 - DNA, 25 bp, Artificial
  probe
  misc_feature (1)..(25): SEQ ID NO: 5427; WAN024FUT; Start 243; Stop 267
ttagccaccatattctcccttgtat

SEQ ID NO: 410278 - DNA, 25 bp, Artificial
  probe
  misc_feature (1)..(25): SEQ ID NO: 5427; WAN024FUT; Start 174; Stop 198
atggttgatagaatcttctctgcac

SEQ ID NO: 410279 - DNA, 25 bp, Artificial
  probe
  misc_feature (1)..(25): SEQ ID NO: 5427; WAN024FUT; Start 97; Stop 121
cagattcatatcccttgtcaaagtg

SEQ ID NO: 410280 - DNA, 25 bp, Artificial
  probe
  misc_feature (1)..(25): SEQ ID NO: 5427; WAN024FUT; Start 117; Stop 141
aagtgctccatttcaagaatatcaa

SEQ ID NO: 410281 - DNA, 25 bp, Artificial
  probe
  misc_feature (1)..(25): SEQ ID NO: 5427; WAN024FUT; Start 116; Stop 140
aaagtgctccatttcaagaatatca

SEQ ID NO: 410282 - DNA, 25 bp, Artificial
  probe
  misc_feature (1)..(25): SEQ ID NO: 5427; WAN024FUT; Start 114; Stop 138
tcaaagtgctccatttcaagaatat

SEQ ID NO: 410283 - DNA, 25 bp, Artificial
  probe
  misc_feature (1)..(25): SEQ ID NO: 5427; WAN024FUT; Start 118; Stop 142
agtgctccatttcaagaatatcaat

SEQ ID NO: 410284 - DNA, 25 bp, Artificial
  probe
  misc_feature (1)..(25): SEQ ID NO: 5427; WAN024FUT; Start 115; Stop 139
caaagtgctccatttcaagaatatc

SEQ ID NO: 410285 - DNA, 25 bp, Artificial
  probe
  misc_feature (1)..(25): SEQ ID NO: 5427; WAN024FUT; Start 249; Stop 273
accatattctcccttgtattctgta

SEQ ID NO: 410286 - DNA, 25 bp, Artificial
  probe
  misc_feature (1)..(25): SEQ ID NO: 5428; WAN024DUG; Start 163; Stop 187
agattcacgaatatcagacaagacc

SEQ ID NO: 410287 - DNA, 25 bp, Artificial
  probe
  misc_feature (1)..(25): SEQ ID NO: 5428; WAN024DUG; Start 162; Stop 186
cagattcacgaatatcagacaagac

SEQ ID NO: 410288 - DNA, 25 bp, Artificial
  probe
  misc_feature (1)..(25): SEQ ID NO: 5428; WAN024DUG; Start 161; Stop 185
ccagattcacgaatatcagacaaga

SEQ ID NO: 410289 - DNA, 25 bp, Artificial
  probe
  misc_feature (1)..(25): SEQ ID NO: 5428; WAN024DUG; Start 164; Stop 188
gattcacgaatatcagacaagaccg

SEQ ID NO: 410290 - DNA, 25 bp, Artificial
  probe
  misc_feature (1)..(25): SEQ ID NO: 5428; WAN024DUG; Start 234; Stop 258
gagcgattactggaaccttcaattc

SEQ ID NO: 410291 - DNA, 25 bp, Artificial
  probe
  misc_feature (1)..(25): SEQ ID NO: 5428; WAN024DUG; Start 233; Stop 257
agagcgattactggaaccttcaatt

SEQ ID NO: 410292 - DNA, 25 bp, Artificial
  probe
  misc_feature (1)..(25): SEQ ID NO: 5428; WAN024DUG; Start 151; Stop 175
ctcaatagacccagattcacgaata

SEQ ID NO: 410293 - DNA, 25 bp, Artificial
  probe
  misc_feature (1)..(25): SEQ ID NO: 5428; WAN024DUG; Start 155; Stop 179
atagacccagattcacgaatatcag

SEQ ID NO: 410294 - DNA, 25 bp, Artificial
  probe
  misc_feature (1)..(25): SEQ ID NO: 5428; WAN024DUG; Start 152; Stop 176
tcaatagacccagattcacgaatat

SEQ ID NO: 410295 - DNA, 25 bp, Artificial
  probe
  misc_feature (1)..(25): SEQ ID NO: 5428; WAN024DUG; Start 156; Stop 180
tagacccagattcacgaatatcaga

SEQ ID NO: 410296 - DNA, 25 bp, Artificial
  probe
  misc_feature (1)..(25): SEQ ID NO: 5428; WAN024DUG; Start 154; Stop 178
aatagacccagattcacgaatatca

SEQ ID NO: 410297 - DNA, 25 bp, Artificial
  probe
  misc_feature (1)..(25): SEQ ID NO: 5428; WAN024DUG; Start 153; Stop 177
caatagacccagattcacgaatatc

SEQ ID NO: 410298 - DNA, 25 bp, Artificial
  probe
  misc_feature (1)..(25): SEQ ID NO: 5428; WAN024DUG; Start 160; Stop 184
cccagattcacgaatatcagacaag

SEQ ID NO: 410299 - DNA, 25 bp, Artificial
  probe
  misc_feature (1)..(25): SEQ ID NO: 5428; WAN024DUG; Start 232; Stop 256
cagagcgattactggaaccttcaat

SEQ ID NO: 410300 - DNA, 25 bp, Artificial
  probe
  misc_feature (1)..(25): SEQ ID NO: 5428; WAN024DUG; Start 159; Stop 183
acccagattcacgaatatcagacaa

SEQ ID NO: 410301 - DNA, 25 bp, Artificial
  probe
  misc_feature (1)..(25): SEQ ID NO: 5428; WAN024DUG; Start 88; Stop 112
ttcttcaccaccacgttcatagtag

SEQ ID NO: 410302 - DNA, 25 bp, Artificial
  probe
  misc_feature (1)..(25): SEQ ID NO: 5428; WAN024DUG; Start 87; Stop 111
cttcttcaccaccacgttcatagta

SEQ ID NO: 410303 - DNA, 25 bp, Artificial
  probe
  misc_feature (1)..(25): SEQ ID NO: 5428; WAN024DUG; Start 157; Stop 181
agacccagattcacgaatatcagac

SEQ ID NO: 410304 - DNA, 25 bp, Artificial
  probe
  misc_feature (1)..(25): SEQ ID NO: 5428; WAN024DUG; Start 158; Stop 182
gacccagattcacgaatatcagaca

SEQ ID NO: 410305 - DNA, 25 bp, Artificial
  probe
  misc_feature (1)..(25): SEQ ID NO: 5428; WAN024DUG; Start 44; Stop 68
ttctcgataataacttccaccttat

SEQ ID NO: 410306 - DNA, 25 bp, Artificial
  probe
  misc_feature (1)..(25): SEQ ID NO: 5428; WAN024DUG; Start 57; Stop 81
cttccaccttattatttgggatacc

SEQ ID NO: 410307 - DNA, 25 bp, Artificial
  probe
  misc_feature (1)..(25): SEQ ID NO: 5428; WAN024DUG; Start 93; Stop 117
caccaccacgttcatagtagtcatc

SEQ ID NO: 410308 - DNA, 25 bp, Artificial
  probe
  misc_feature (1)..(25): SEQ ID NO: 5428; WAN024DUG; Start 90; Stop 114
cttcaccaccacgttcatagtagtc

SEQ ID NO: 410309 - DNA, 25 bp, Artificial
  probe
  misc_feature (1)..(25): SEQ ID NO: 5428; WAN024DUG; Start 150; Stop 174
gctcaatagacccagattcacgaat

SEQ ID NO: 410310 - DNA, 25 bp, Artificial
  probe
  misc_feature (1)..(25): SEQ ID NO: 5428; WAN024DUG; Start 89; Stop 113
tcttcaccaccacgttcatagtagt

SEQ ID NO: 410311 - DNA, 25 bp, Artificial
  probe
  misc_feature (1)..(25): SEQ ID NO: 5428; WAN024DUG; Start 85; Stop 109
ctcttcttcaccaccacgttcatag

SEQ ID NO: 410312 - DNA, 25 bp, Artificial
  probe
  misc_feature (1)..(25): SEQ ID NO: 5428; WAN024DUG; Start 56; Stop 80
acttccaccttattatttgggatac

SEQ ID NO: 410313 - DNA, 25 bp, Artificial
  probe
  misc_feature (1)..(25): SEQ ID NO: 5428; WAN024DUG; Start 92; Stop 116
tcaccaccacgttcatagtagtcat

SEQ ID NO: 410314 - DNA, 25 bp, Artificial
  probe
  misc_feature (1)..(25): SEQ ID NO: 5428; WAN024DUG; Start 231; Stop 255
tcagagcgattactggaaccttcaa

SEQ ID NO: 410315 - DNA, 25 bp, Artificial
  probe
  misc_feature (1)..(25): SEQ ID NO: 5428; WAN024DUG; Start 91; Stop 115
ttcaccaccacgttcatagtagtca

SEQ ID NO: 410316 - DNA, 25 bp, Artificial
  probe
  misc_feature (1)..(25): SEQ ID NO: 5428; WAN024DUG; Start 165; Stop 189
attcacgaatatcagacaagaccgg

SEQ ID NO: 410317 - DNA, 25 bp, Artificial
  probe
  misc_feature (1)..(25): SEQ ID NO: 5428; WAN024DUG; Start 189; Stop 213
gtctcttgtcctgacgttgttctac

SEQ ID NO: 410318 - DNA, 25 bp, Artificial
  probe
  misc_feature (1)..(25): SEQ ID NO: 5428; WAN024DUG; Start 238; Stop 262
gattactggaaccttcaattccttg

SEQ ID NO: 410319 - DNA, 25 bp, Artificial
  probe
  misc_feature (1)..(25): SEQ ID NO: 5429; WAN024AZG; Start 50; Stop 74
cattgccagttctatcagtttcttt

SEQ ID NO: 410320 - DNA, 25 bp, Artificial
  probe
  misc_feature (1)..(25): SEQ ID NO: 5429; WAN024AZG; Start 51; Stop 75
attgccagttctatcagtttctttc

SEQ ID NO: 410321 - DNA, 25 bp, Artificial
  probe
  misc_feature (1)..(25): SEQ ID NO: 5429; WAN024AZG; Start 55; Stop 79
ccagttctatcagtttctttccaaa

SEQ ID NO: 410322 - DNA, 25 bp, Artificial
  probe
  misc_feature (1)..(25): SEQ ID NO: 5429; WAN024AZG; Start 54; Stop 78
gccagttctatcagtttctttccaa

SEQ ID NO: 410323 - DNA, 25 bp, Artificial
  probe
  misc_feature (1)..(25): SEQ ID NO: 5429; WAN024AZG; Start 52; Stop 76
ttgccagttctatcagtttctttcc

SEQ ID NO: 410324 - DNA, 25 bp, Artificial
  probe
  misc_feature (1)..(25): SEQ ID NO: 5429; WAN024AZG; Start 53; Stop 77
tgccagttctatcagtttctttcca

SEQ ID NO: 410325 - DNA, 25 bp, Artificial
  probe
  misc_feature (1)..(25): SEQ ID NO: 5429; WAN024AZG; Start 49; Stop 73
gcattgccagttctatcagtttctt

SEQ ID NO: 410326 - DNA, 25 bp, Artificial
  probe
  misc_feature (1)..(25): SEQ ID NO: 5429; WAN024AZG; Start 112; Stop 136
caaagaagaaccaaatatggagtcc

SEQ ID NO: 410327 - DNA, 25 bp, Artificial
  probe
  misc_feature (1)..(25): SEQ ID NO: 5429; WAN024AZG; Start 108; Stop 132
tcctcaaagaagaaccaaatatgga

SEQ ID NO: 410328 - DNA, 25 bp, Artificial
  probe
  misc_feature (1)..(25): SEQ ID NO: 5429; WAN024AZG; Start 109; Stop 133
cctcaaagaagaaccaaatatggag

SEQ ID NO: 410329 - DNA, 25 bp, Artificial
  probe
  misc_feature (1)..(25): SEQ ID NO: 5429; WAN024AZG; Start 107; Stop 131
ttcctcaaagaagaaccaaatatgg

SEQ ID NO: 410330 - DNA, 25 bp, Artificial
  probe
  misc_feature (1)..(25): SEQ ID NO: 5429; WAN024AZG; Start 113; Stop 137
aaagaagaaccaaatatggagtccg

SEQ ID NO: 410331 - DNA, 25 bp, Artificial
  probe
  misc_feature (1)..(25): SEQ ID NO: 5429; WAN024AZG; Start 111; Stop 135
tcaaagaagaaccaaatatggagtc

SEQ ID NO: 410332 - DNA, 25 bp, Artificial
  probe
  misc_feature (1)..(25): SEQ ID NO: 5429; WAN024AZG; Start 110; Stop 134
ctcaaagaagaaccaaatatggagt

SEQ ID NO: 410333 - DNA, 25 bp, Artificial
  probe
  misc_feature (1)..(25): SEQ ID NO: 5429; WAN024AZG; Start 18; Stop 42
aaagaatcaaaggacagttgcatac

SEQ ID NO: 410334 - DNA, 25 bp, Artificial
  probe
  misc_feature (1)..(25): SEQ ID NO: 5429; WAN024AZG; Start 20; Stop 44
agaatcaaaggacagttgcatactt

SEQ ID NO: 410335 - DNA, 25 bp, Artificial
  probe
  misc_feature (1)..(25): SEQ ID NO: 5429; WAN024AZG; Start 19; Stop 43
aagaatcaaaggacagttgcatact

SEQ ID NO: 410336 - DNA, 25 bp, Artificial
  probe
  misc_feature (1)..(25): SEQ ID NO: 5429; WAN024AZG; Start 60; Stop 84
tctatcagtttctttccaaacaagc

SEQ ID NO: 410337 - DNA, 25 bp, Artificial
  probe
  misc_feature (1)..(25): SEQ ID NO: 5429; WAN024AZG; Start 114; Stop 138
aagaagaaccaaatatggagtccgt

SEQ ID NO: 410338 - DNA, 25 bp, Artificial
  probe
  misc_feature (1)..(25): SEQ ID NO: 5429; WAN024AZG; Start 61; Stop 85
ctatcagtttctttccaaacaagcg

SEQ ID NO: 410339 - DNA, 25 bp, Artificial
  probe
  misc_feature (1)..(25): SEQ ID NO: 5429; WAN024AZG; Start 62; Stop 86
tatcagtttctttccaaacaagcga

SEQ ID NO: 410340 - DNA, 25 bp, Artificial
  probe
  misc_feature (1)..(25): SEQ ID NO: 5429; WAN024AZG; Start 57; Stop 81
agttctatcagtttctttccaaaca

SEQ ID NO: 410341 - DNA, 25 bp, Artificial
  probe
  misc_feature (1)..(25): SEQ ID NO: 5429; WAN024AZG; Start 56; Stop 80
cagttctatcagtttctttccaaac

SEQ ID NO: 410342 - DNA, 25 bp, Artificial
  probe
  misc_feature (1)..(25): SEQ ID NO: 5429; WAN024AZG; Start 14; Stop 38
atcaaaagaatcaaaggacagttgc

SEQ ID NO: 410343 - DNA, 25 bp, Artificial
  probe
  misc_feature (1)..(25): SEQ ID NO: 5429; WAN024AZG; Start 116; Stop 140
gaagaaccaaatatggagtccgtga

SEQ ID NO: 410344 - DNA, 25 bp, Artificial
  probe
  misc_feature (1)..(25): SEQ ID NO: 5429; WAN024AZG; Start 115; Stop 139
agaagaaccaaatatggagtccgtg

SEQ ID NO: 410345 - DNA, 25 bp, Artificial
  probe
  misc_feature (1)..(25): SEQ ID NO: 5429; WAN024AZG; Start 12; Stop 36
cgatcaaaagaatcaaaggacagtt

SEQ ID NO: 410346 - DNA, 25 bp, Artificial
  probe
  misc_feature (1)..(25): SEQ ID NO: 5429; WAN024AZG; Start 58; Stop 82
gttctatcagtttctttccaaacaa

SEQ ID NO: 410347 - DNA, 25 bp, Artificial
  probe
  misc_feature (1)..(25): SEQ ID NO: 5429; WAN024AZG; Start 105; Stop 129
gcttcctcaaagaagaaccaaatat

SEQ ID NO: 410348 - DNA, 25 bp, Artificial
  probe
  misc_feature (1)..(25): SEQ ID NO: 5429; WAN024AZG; Start 117; Stop 141
aagaaccaaatatggagtccgtgac

SEQ ID NO: 410349 - DNA, 25 bp, Artificial
  probe
  misc_feature (1)..(25): SEQ ID NO: 5429; WAN024AZG; Start 22; Stop 46
aatcaaaggacagttgcatactttc

SEQ ID NO: 410350 - DNA, 25 bp, Artificial
  probe
  misc_feature (1)..(25): SEQ ID NO: 5429; WAN024AZG; Start 21; Stop 45
gaatcaaaggacagttgcatacttt

SEQ ID NO: 410351 - DNA, 25 bp, Artificial
  probe
  misc_feature (1)..(25): SEQ ID NO: 5429; WAN024AZG; Start 63; Stop 87
atcagtttctttccaaacaagcgag

SEQ ID NO: 410352 - DNA, 25 bp, Artificial
  probe
  misc_feature (1)..(25): SEQ ID NO: 5430; WAN024DCI; Start 510; Stop 534
ttatactctcatttacactctgggc

SEQ ID NO: 410353 - DNA, 25 bp, Artificial
  probe
  misc_feature (1)..(25): SEQ ID NO: 5430; WAN024DCI; Start 183; Stop 207
ctttatcgctggtatctctctcatt

SEQ ID NO: 410354 - DNA, 25 bp, Artificial
  probe
  misc_feature (1)..(25): SEQ ID NO: 5430; WAN024DCI; Start 184; Stop 208
tttatcgctggtatctctctcattt

SEQ ID NO: 410355 - DNA, 25 bp, Artificial
  probe
  misc_feature (1)..(25): SEQ ID NO: 5430; WAN024DCI; Start 511; Stop 535
tatactctcatttacactctgggca

SEQ ID NO: 410356 - DNA, 25 bp, Artificial
  probe
  misc_feature (1)..(25): SEQ ID NO: 5430; WAN024DCI; Start 229; Stop 253
gctggttactttggtcatattctct

SEQ ID NO: 410357 - DNA, 25 bp, Artificial
  probe
  misc_feature (1)..(25): SEQ ID NO: 5430; WAN024DCI; Start 228; Stop 252
tgctggttactttggtcatattctc

SEQ ID NO: 410358 - DNA, 25 bp, Artificial
  probe
  misc_feature (1)..(25): SEQ ID NO: 5430; WAN024DCI; Start 227; Stop 251
gtgctggttactttggtcatattct

SEQ ID NO: 410359 - DNA, 25 bp, Artificial
  probe
  misc_feature (1)..(25): SEQ ID NO: 5430; WAN024DCI; Start 565; Stop 589
gcttcaggtctagtcatgccatatt

SEQ ID NO: 410360 - DNA, 25 bp, Artificial
  probe
  misc_feature (1)..(25): SEQ ID NO: 5430; WAN024DCI; Start 512; Stop 536
atactctcatttacactctgggcat

SEQ ID NO: 410361 - DNA, 25 bp, Artificial
  probe
  misc_feature (1)..(25): SEQ ID NO: 5430; WAN024DCI; Start 207; Stop 231
tttctttattctaggctttggtgct

SEQ ID NO: 410362 - DNA, 25 bp, Artificial
  probe
  misc_feature (1)..(25): SEQ ID NO: 5430; WAN024DCI; Start 178; Stop 202
ctttgctttatcgctggtatctctc

SEQ ID NO: 410363 - DNA, 25 bp, Artificial
  probe
  misc_feature (1)..(25): SEQ ID NO: 5430; WAN024DCI; Start 208; Stop 232
ttctttattctaggctttggtgctg

SEQ ID NO: 410364 - DNA, 25 bp, Artificial
  probe
  misc_feature (1)..(25): SEQ ID NO: 5430; WAN024DCI; Start 179; Stop 203
tttgctttatcgctggtatctctct

SEQ ID NO: 410365 - DNA, 25 bp, Artificial
  probe
  misc_feature (1)..(25): SEQ ID NO: 5430; WAN024DCI; Start 566; Stop 590
cttcaggtctagtcatgccatattt

SEQ ID NO: 410366 - DNA, 25 bp, Artificial
  probe
  misc_feature (1)..(25): SEQ ID NO: 5430; WAN024DCI; Start 174; Stop 198
aacactttgctttatcgctggtatc

SEQ ID NO: 410367 - DNA, 25 bp, Artificial
  probe
  misc_feature (1)..(25): SEQ ID NO: 5430; WAN024DCI; Start 173; Stop 197
gaacactttgctttatcgctggtat

SEQ ID NO: 410368 - DNA, 25 bp, Artificial
  probe
  misc_feature (1)..(25): SEQ ID NO: 5430; WAN024DCI; Start 226; Stop 250
ggtgctggttactttggtcatattc

SEQ ID NO: 410369 - DNA, 25 bp, Artificial
  probe
  misc_feature (1)..(25): SEQ ID NO: 5430; WAN024DCI; Start 499; Stop 523
caaggagcgatttatactctcattt

SEQ ID NO: 410370 - DNA, 25 bp, Artificial
  probe
  misc_feature (1)..(25): SEQ ID NO: 5430; WAN024DCI; Start 498; Stop 522
gcaaggagcgatttatactctcatt

SEQ ID NO: 410371 - DNA, 25 bp, Artificial
  probe
  misc_feature (1)..(25): SEQ ID NO: 5430; WAN024DCI; Start 182; Stop 206
gctttatcgctggtatctctctcat

SEQ ID NO: 410372 - DNA, 25 bp, Artificial
  probe
  misc_feature (1)..(25): SEQ ID NO: 5430; WAN024DCI; Start 176; Stop 200
cactttgctttatcgctggtatctc

SEQ ID NO: 410373 - DNA, 25 bp, Artificial
  probe
  misc_feature (1)..(25): SEQ ID NO: 5430; WAN024DCI; Start 563; Stop 587
tagcttcaggtctagtcatgccata

SEQ ID NO: 410374 - DNA, 25 bp, Artificial
  probe
  misc_feature (1)..(25): SEQ ID NO: 5430; WAN024DCI; Start 504; Stop 528
agcgatttatactctcatttacact

SEQ ID NO: 410375 - DNA, 25 bp, Artificial
  probe
  misc_feature (1)..(25): SEQ ID NO: 5430; WAN024DCI; Start 177; Stop 201
actttgctttatcgctggtatctct

SEQ ID NO: 410376 - DNA, 25 bp, Artificial
  probe
  misc_feature (1)..(25): SEQ ID NO: 5430; WAN024DCI; Start 509; Stop 533
tttatactctcatttacactctggg

SEQ ID NO: 410377 - DNA, 25 bp, Artificial
  probe
  misc_feature (1)..(25): SEQ ID NO: 5430; WAN024DCI; Start 505; Stop 529
gcgatttatactctcatttacactc

SEQ ID NO: 410378 - DNA, 25 bp, Artificial
  probe
  misc_feature (1)..(25): SEQ ID NO: 5430; WAN024DCI; Start 180; Stop 204
ttgctttatcgctggtatctctctc

SEQ ID NO: 410379 - DNA, 25 bp, Artificial
  probe
  misc_feature (1)..(25): SEQ ID NO: 5430; WAN024DCI; Start 230; Stop 254
ctggttactttggtcatattctcta

SEQ ID NO: 410380 - DNA, 25 bp, Artificial
  probe
  misc_feature (1)..(25): SEQ ID NO: 5430; WAN024DCI; Start 502; Stop 526
ggagcgatttatactctcatttaca

SEQ ID NO: 410381 - DNA, 25 bp, Artificial
  probe
  misc_feature (1)..(25): SEQ ID NO: 5430; WAN024DCI; Start 212; Stop 236
ttattctaggctttggtgctggtta

SEQ ID NO: 410382 - DNA, 25 bp, Artificial
  probe
  misc_feature (1)..(25): SEQ ID NO: 5430; WAN024DCI; Start 501; Stop 525
aggagcgatttatactctcatttac

SEQ ID NO: 410383 - DNA, 25 bp, Artificial
  probe
  misc_feature (1)..(25): SEQ ID NO: 5430; WAN024DCI; Start 225; Stop 249
tggtgctggttactttggtcatatt

SEQ ID NO: 410384 - DNA, 25 bp, Artificial
  probe
  misc_feature (1)..(25): SEQ ID NO: 5430; WAN024DCI; Start 224; Stop 248
ttggtgctggttactttggtcatat

SEQ ID NO: 410385 - DNA, 25 bp, Artificial
  probe
  misc_feature (1)..(25): SEQ ID NO: 5431; WAN024FTZ; Start 762; Stop 786
cgacttagttaatgatgaggttgaa

SEQ ID NO: 410386 - DNA, 25 bp, Artificial
  probe
  misc_feature (1)..(25): SEQ ID NO: 5431; WAN024FTZ; Start 761; Stop 785
tcgacttagttaatgatgaggttga

SEQ ID NO: 410387 - DNA, 25 bp, Artificial
  probe
  misc_feature (1)..(25): SEQ ID NO: 5431; WAN024FTZ; Start 760; Stop 784
ttcgacttagttaatgatgaggttg

SEQ ID NO: 410388 - DNA, 25 bp, Artificial
  probe
  misc_feature (1)..(25): SEQ ID NO: 5431; WAN024FTZ; Start 58; Stop 82
agtgttattgttccaacctataaga

SEQ ID NO: 410389 - DNA, 25 bp, Artificial
  probe
  misc_feature (1)..(25): SEQ ID NO: 5431; WAN024FTZ; Start 59; Stop 83
gtgttattgttccaacctataagat

SEQ ID NO: 410390 - DNA, 25 bp, Artificial
  probe
  misc_feature (1)..(25): SEQ ID NO: 5431; WAN024FTZ; Start 57; Stop 81
tagtgttattgttccaacctataag

SEQ ID NO: 410391 - DNA, 25 bp, Artificial
  probe
  misc_feature (1)..(25): SEQ ID NO: 5431; WAN024FTZ; Start 563; Stop 587
aaatttatcgtaatgagtttgtgcg

SEQ ID NO: 410392 - DNA, 25 bp, Artificial
  probe
  misc_feature (1)..(25): SEQ ID NO: 5431; WAN024FTZ; Start 763; Stop 787
gacttagttaatgatgaggttgaaa

SEQ ID NO: 410393 - DNA, 25 bp, Artificial
  probe
  misc_feature (1)..(25): SEQ ID NO: 5431; WAN024FTZ; Start 759; Stop 783
tttcgacttagttaatgatgaggtt

SEQ ID NO: 410394 - DNA, 25 bp, Artificial
  probe
  misc_feature (1)..(25): SEQ ID NO: 5431; WAN024FTZ; Start 80; Stop 104
agatatcagaatctaatctacgcca

SEQ ID NO: 410395 - DNA, 25 bp, Artificial
  probe
  misc_feature (1)..(25): SEQ ID NO: 5431; WAN024FTZ; Start 565; Stop 589
atttatcgtaatgagtttgtgcgag

SEQ ID NO: 410396 - DNA, 25 bp, Artificial
  probe
  misc_feature (1)..(25): SEQ ID NO: 5431; WAN024FTZ; Start 564; Stop 588
aatttatcgtaatgagtttgtgcga

SEQ ID NO: 410397 - DNA, 25 bp, Artificial
  probe
  misc_feature (1)..(25): SEQ ID NO: 5431; WAN024FTZ; Start 758; Stop 782
atttcgacttagttaatgatgaggt

SEQ ID NO: 410398 - DNA, 25 bp, Artificial
  probe
  misc_feature (1)..(25): SEQ ID NO: 5431; WAN024FTZ; Start 66; Stop 90
tgttccaacctataagatatcagaa

SEQ ID NO: 410399 - DNA, 25 bp, Artificial
  probe
  misc_feature (1)..(25): SEQ ID NO: 5431; WAN024FTZ; Start 56; Stop 80
ttagtgttattgttccaacctataa

SEQ ID NO: 410400 - DNA, 25 bp, Artificial
  probe
  misc_feature (1)..(25): SEQ ID NO: 5431; WAN024FTZ; Start 65; Stop 89
ttgttccaacctataagatatcaga

SEQ ID NO: 410401 - DNA, 25 bp, Artificial
  probe
  misc_feature (1)..(25): SEQ ID NO: 5431; WAN024FTZ; Start 79; Stop 103
aagatatcagaatctaatctacgcc

SEQ ID NO: 410402 - DNA, 25 bp, Artificial
  probe
  misc_feature (1)..(25): SEQ ID NO: 5431; WAN024FTZ; Start 386; Stop 410
atgtgattatattagctgctattgt

SEQ ID NO: 410403 - DNA, 25 bp, Artificial
  probe
  misc_feature (1)..(25): SEQ ID NO: 5431; WAN024FTZ; Start 687; Stop 711
tgagccgatttactattatagaaag

SEQ ID NO: 410404 - DNA, 25 bp, Artificial
  probe
  misc_feature (1)..(25): SEQ ID NO: 5431; WAN024FTZ; Start 916; Stop 940
atgcgacaagaatttcgtgaacttt

SEQ ID NO: 410405 - DNA, 25 bp, Artificial
  probe
  misc_feature (1)..(25): SEQ ID NO: 5431; WAN024FTZ; Start 915; Stop 939
aatgcgacaagaatttcgtgaactt

SEQ ID NO: 410406 - DNA, 25 bp, Artificial
  probe
  misc_feature (1)..(25): SEQ ID NO: 5431; WAN024FTZ; Start 914; Stop 938
aaatgcgacaagaatttcgtgaact

SEQ ID NO: 410407 - DNA, 25 bp, Artificial
  probe
  misc_feature (1)..(25): SEQ ID NO: 5431; WAN024FTZ; Start 60; Stop 84
tgttattgttccaacctataagata

SEQ ID NO: 410408 - DNA, 25 bp, Artificial
  probe
  misc_feature (1)..(25): SEQ ID NO: 5431; WAN024FTZ; Start 385; Stop 409
gatgtgattatattagctgctattg

SEQ ID NO: 410409 - DNA, 25 bp, Artificial
  probe
  misc_feature (1)..(25): SEQ ID NO: 5431; WAN024FTZ; Start 920; Stop 944
gacaagaatttcgtgaacttttaga

SEQ ID NO: 410410 - DNA, 25 bp, Artificial
  probe
  misc_feature (1)..(25): SEQ ID NO: 5431; WAN024FTZ; Start 689; Stop 713
agccgatttactattatagaaagag

SEQ ID NO: 410411 - DNA, 25 bp, Artificial
  probe
  misc_feature (1)..(25): SEQ ID NO: 5431; WAN024FTZ; Start 688; Stop 712
gagccgatttactattatagaaaga

SEQ ID NO: 410412 - DNA, 25 bp, Artificial
  probe
  misc_feature (1)..(25): SEQ ID NO: 5431; WAN024FTZ; Start 387; Stop 411
tgtgattatattagctgctattgta

SEQ ID NO: 410413 - DNA, 25 bp, Artificial
  probe
  misc_feature (1)..(25): SEQ ID NO: 5431; WAN024FTZ; Start 64; Stop 88
attgttccaacctataagatatcag

SEQ ID NO: 410414 - DNA, 25 bp, Artificial
  probe
  misc_feature (1)..(25): SEQ ID NO: 5431; WAN024FTZ; Start 921; Stop 945
acaagaatttcgtgaacttttagaa

SEQ ID NO: 410415 - DNA, 25 bp, Artificial
  probe
  misc_feature (1)..(25): SEQ ID NO: 5431; WAN024FTZ; Start 67; Stop 91
gttccaacctataagatatcagaat

SEQ ID NO: 410416 - DNA, 25 bp, Artificial
  probe
  misc_feature (1)..(25): SEQ ID NO: 5431; WAN024FTZ; Start 757; Stop 781
tatttcgacttagttaatgatgagg

SEQ ID NO: 410417 - DNA, 25 bp, Artificial
  probe
  misc_feature (1)..(25): SEQ ID NO: 5431; WAN024FTZ; Start 55; Stop 79
tttagtgttattgttccaacctata

SEQ ID NO: 410418 - DNA, 25 bp, Artificial
  probe
  misc_feature (1)..(25): SEQ ID NO: 5432; WAN024G54; Start 44; Stop 68
atgttcatcattggagttggaagaa

SEQ ID NO: 410419 - DNA, 25 bp, Artificial
  probe
  misc_feature (1)..(25): SEQ ID NO: 5432; WAN024G54; Start 43; Stop 67
gatgttcatcattggagttggaaga

SEQ ID NO: 410420 - DNA, 25 bp, Artificial
  probe
  misc_feature (1)..(25): SEQ ID NO: 5432; WAN024G54; Start 250; Stop 274
aatgatagcttcagcaatgatgttg

SEQ ID NO: 410421 - DNA, 25 bp, Artificial
  probe
  misc_feature (1)..(25): SEQ ID NO: 5432; WAN024G54; Start 249; Stop 273
caatgatagcttcagcaatgatgtt

SEQ ID NO: 410422 - DNA, 25 bp, Artificial
  probe
  misc_feature (1)..(25): SEQ ID NO: 5432; WAN024G54; Start 98; Stop 122
taaagtgggatttcaaggtagtcag

SEQ ID NO: 410423 - DNA, 25 bp, Artificial
  probe
  misc_feature (1)..(25): SEQ ID NO: 5432; WAN024G54; Start 97; Stop 121
gtaaagtgggatttcaaggtagtca

SEQ ID NO: 410424 - DNA, 25 bp, Artificial
  probe
  misc_feature (1)..(25): SEQ ID NO: 5432; WAN024G54; Start 96; Stop 120
tgtaaagtgggatttcaaggtagtc

SEQ ID NO: 410425 - DNA, 25 bp, Artificial
  probe
  misc_feature (1)..(25): SEQ ID NO: 5432; WAN024G54; Start 95; Stop 119
ctgtaaagtgggatttcaaggtagt

SEQ ID NO: 410426 - DNA, 25 bp, Artificial
  probe
  misc_feature (1)..(25): SEQ ID NO: 5432; WAN024G54; Start 251; Stop 275
atgatagcttcagcaatgatgttgt

SEQ ID NO: 410427 - DNA, 25 bp, Artificial
  probe
  misc_feature (1)..(25): SEQ ID NO: 5432; WAN024G54; Start 252; Stop 276
tgatagcttcagcaatgatgttgtt

SEQ ID NO: 410428 - DNA, 25 bp, Artificial
  probe
  misc_feature (1)..(25): SEQ ID NO: 5432; WAN024G54; Start 94; Stop 118
gctgtaaagtgggatttcaaggtag

SEQ ID NO: 410429 - DNA, 25 bp, Artificial
  probe
  misc_feature (1)..(25): SEQ ID NO: 5432; WAN024G54; Start 248; Stop 272
ccaatgatagcttcagcaatgatgt

SEQ ID NO: 410430 - DNA, 25 bp, Artificial
  probe
  misc_feature (1)..(25): SEQ ID NO: 5432; WAN024G54; Start 59; Stop 83
gttggaagaactttagtgttgaatc

SEQ ID NO: 410431 - DNA, 25 bp, Artificial
  probe
  misc_feature (1)..(25): SEQ ID NO: 5432; WAN024G54; Start 163; Stop 187
attcgcacccaatttacctttgtta

SEQ ID NO: 410432 - DNA, 25 bp, Artificial
  probe
  misc_feature (1)..(25): SEQ ID NO: 5432; WAN024G54; Start 63; Stop 87
gaagaactttagtgttgaatccacc

SEQ ID NO: 410433 - DNA, 25 bp, Artificial
  probe
  misc_feature (1)..(25): SEQ ID NO: 5432; WAN024G54; Start 66; Stop 90
gaactttagtgttgaatccaccaag

SEQ ID NO: 410434 - DNA, 25 bp, Artificial
  probe
  misc_feature (1)..(25): SEQ ID NO: 5432; WAN024G54; Start 47; Stop 71
ttcatcattggagttggaagaactt

SEQ ID NO: 410435 - DNA, 25 bp, Artificial
  probe
  misc_feature (1)..(25): SEQ ID NO: 5432; WAN024G54; Start 169; Stop 193
acccaatttacctttgttaggagta

SEQ ID NO: 410436 - DNA, 25 bp, Artificial
  probe
  misc_feature (1)..(25): SEQ ID NO: 5432; WAN024G54; Start 65; Stop 89
agaactttagtgttgaatccaccaa

SEQ ID NO: 410437 - DNA, 25 bp, Artificial
  probe
  misc_feature (1)..(25): SEQ ID NO: 5432; WAN024G54; Start 64; Stop 88
aagaactttagtgttgaatccacca

SEQ ID NO: 410438 - DNA, 25 bp, Artificial
  probe
  misc_feature (1)..(25): SEQ ID NO: 5432; WAN024G54; Start 168; Stop 192
cacccaatttacctttgttaggagt

SEQ ID NO: 410439 - DNA, 25 bp, Artificial
  probe
  misc_feature (1)..(25): SEQ ID NO: 5432; WAN024G54; Start 62; Stop 86
ggaagaactttagtgttgaatccac

SEQ ID NO: 410440 - DNA, 25 bp, Artificial
  probe
  misc_feature (1)..(25): SEQ ID NO: 5432; WAN024G54; Start 164; Stop 188
ttcgcacccaatttacctttgttag

SEQ ID NO: 410441 - DNA, 25 bp, Artificial
  probe
  misc_feature (1)..(25): SEQ ID NO: 5432; WAN024G54; Start 60; Stop 84
ttggaagaactttagtgttgaatcc

SEQ ID NO: 410442 - DNA, 25 bp, Artificial
  probe
  misc_feature (1)..(25): SEQ ID NO: 5432; WAN024G54; Start 173; Stop 197
aatttacctttgttaggagtaccgt

SEQ ID NO: 410443 - DNA, 25 bp, Artificial
  probe
  misc_feature (1)..(25): SEQ ID NO: 5432; WAN024G54; Start 174; Stop 198
atttacctttgttaggagtaccgtc

SEQ ID NO: 410444 - DNA, 25 bp, Artificial
  probe
  misc_feature (1)..(25): SEQ ID NO: 5432; WAN024G54; Start 172; Stop 196
caatttacctttgttaggagtaccg

SEQ ID NO: 410445 - DNA, 25 bp, Artificial
  probe
  misc_feature (1)..(25): SEQ ID NO: 5432; WAN024G54; Start 171; Stop 195
ccaatttacctttgttaggagtacc

SEQ ID NO: 410446 - DNA, 25 bp, Artificial
  probe
  misc_feature (1)..(25): SEQ ID NO: 5432; WAN024G54; Start 170; Stop 194
cccaatttacctttgttaggagtac

SEQ ID NO: 410447 - DNA, 25 bp, Artificial
  probe
  misc_feature (1)..(25): SEQ ID NO: 5432; WAN024G54; Start 255; Stop 279
tagcttcagcaatgatgttgtttac

SEQ ID NO: 410448 - DNA, 25 bp, Artificial
  probe
  misc_feature (1)..(25): SEQ ID NO: 5432; WAN024G54; Start 247; Stop 271
gccaatgatagcttcagcaatgatg

SEQ ID NO: 410449 - DNA, 25 bp, Artificial
  probe
  misc_feature (1)..(25): SEQ ID NO: 5432; WAN024G54; Start 253; Stop 277
gatagcttcagcaatgatgttgttt

SEQ ID NO: 410450 - DNA, 25 bp, Artificial
  probe
  misc_feature (1)..(25): SEQ ID NO: 5432; WAN024G54; Start 237; Stop 261
gtacatcgtagccaatgatagcttc

SEQ ID NO: 410451 - DNA, 25 bp, Artificial
  probe
  misc_feature (1)..(25): SEQ ID NO: 5433; WAN024CMG; Start 149; Stop 173
ctatactgtcggttgtggaatctca

SEQ ID NO: 410452 - DNA, 25 bp, Artificial
  probe
  misc_feature (1)..(25): SEQ ID NO: 5433; WAN024CMG; Start 148; Stop 172
actatactgtcggttgtggaatctc

SEQ ID NO: 410453 - DNA, 25 bp, Artificial
  probe
  misc_feature (1)..(25): SEQ ID NO: 5433; WAN024CMG; Start 147; Stop 171
gactatactgtcggttgtggaatct

SEQ ID NO: 410454 - DNA, 25 bp, Artificial
  probe
  misc_feature (1)..(25): SEQ ID NO: 5433; WAN024CMG; Start 146; Stop 170
agactatactgtcggttgtggaatc

SEQ ID NO: 410455 - DNA, 25 bp, Artificial
  probe
  misc_feature (1)..(25): SEQ ID NO: 5433; WAN024CMG; Start 145; Stop 169
cagactatactgtcggttgtggaat

SEQ ID NO: 410456 - DNA, 25 bp, Artificial
  probe
  misc_feature (1)..(25): SEQ ID NO: 5433; WAN024CMG; Start 150; Stop 174
tatactgtcggttgtggaatctcac

SEQ ID NO: 410457 - DNA, 25 bp, Artificial
  probe
  misc_feature (1)..(25): SEQ ID NO: 5433; WAN024CMG; Start 123; Stop 147
tattctttcgtcttctcccatccag

SEQ ID NO: 410458 - DNA, 25 bp, Artificial
  probe
  misc_feature (1)..(25): SEQ ID NO: 5433; WAN024CMG; Start 122; Stop 146
ctattctttcgtcttctcccatcca

SEQ ID NO: 410459 - DNA, 25 bp, Artificial
  probe
  misc_feature (1)..(25): SEQ ID NO: 5433; WAN024CMG; Start 141; Stop 165
catccagactatactgtcggttgtg

SEQ ID NO: 410460 - DNA, 25 bp, Artificial
  probe
  misc_feature (1)..(25): SEQ ID NO: 5433; WAN024CMG; Start 7; Stop 31
aggattcctctatctattctcactt

SEQ ID NO: 410461 - DNA, 25 bp, Artificial
  probe
  misc_feature (1)..(25): SEQ ID NO: 5433; WAN024CMG; Start 6; Stop 30
aaggattcctctatctattctcact

SEQ ID NO: 410462 - DNA, 25 bp, Artificial
  probe
  misc_feature (1)..(25): SEQ ID NO: 5433; WAN024CMG; Start 134; Stop 158
cttctcccatccagactatactgtc

SEQ ID NO: 410463 - DNA, 25 bp, Artificial
  probe
  misc_feature (1)..(25): SEQ ID NO: 5433; WAN024CMG; Start 115; Stop 139
gacaaggctattctttcgtcttctc

SEQ ID NO: 410464 - DNA, 25 bp, Artificial
  probe
  misc_feature (1)..(25): SEQ ID NO: 5433; WAN024CMG; Start 110; Stop 134
aaacagacaaggctattctttcgtc

SEQ ID NO: 410465 - DNA, 25 bp, Artificial
  probe
  misc_feature (1)..(25): SEQ ID NO: 5433; WAN024CMG; Start 133; Stop 157
tcttctcccatccagactatactgt

SEQ ID NO: 410466 - DNA, 25 bp, Artificial
  probe
  misc_feature (1)..(25): SEQ ID NO: 5433; WAN024CMG; Start 116; Stop 140
acaaggctattctttcgtcttctcc

SEQ ID NO: 410467 - DNA, 25 bp, Artificial
  probe
  misc_feature (1)..(25): SEQ ID NO: 5433; WAN024CMG; Start 8; Stop 32
ggattcctctatctattctcacttt

SEQ ID NO: 410468 - DNA, 25 bp, Artificial
  probe
  misc_feature (1)..(25): SEQ ID NO: 5433; WAN024CMG; Start 70; Stop 94
aaacaaagcaagtggttacaatccg

SEQ ID NO: 410469 - DNA, 25 bp, Artificial
  probe
  misc_feature (1)..(25): SEQ ID NO: 5433; WAN024CMG; Start 121; Stop 145
gctattctttcgtcttctcccatcc

SEQ ID NO: 410470 - DNA, 25 bp, Artificial
  probe
  misc_feature (1)..(25): SEQ ID NO: 5433; WAN024CMG; Start 120; Stop 144
ggctattctttcgtcttctcccatc

SEQ ID NO: 410471 - DNA, 25 bp, Artificial
  probe
  misc_feature (1)..(25): SEQ ID NO: 5433; WAN024CMG; Start 140; Stop 164
ccatccagactatactgtcggttgt

SEQ ID NO: 410472 - DNA, 25 bp, Artificial
  probe
  misc_feature (1)..(25): SEQ ID NO: 5433; WAN024CMG; Start 119; Stop 143
aggctattctttcgtcttctcccat

SEQ ID NO: 410473 - DNA, 25 bp, Artificial
  probe
  misc_feature (1)..(25): SEQ ID NO: 5433; WAN024CMG; Start 117; Stop 141
caaggctattctttcgtcttctccc

SEQ ID NO: 410474 - DNA, 25 bp, Artificial
  probe
  misc_feature (1)..(25): SEQ ID NO: 5433; WAN024CMG; Start 124; Stop 148
attctttcgtcttctcccatccaga

SEQ ID NO: 410475 - DNA, 25 bp, Artificial
  probe
  misc_feature (1)..(25): SEQ ID NO: 5433; WAN024CMG; Start 142; Stop 166
atccagactatactgtcggttgtgg

SEQ ID NO: 410476 - DNA, 25 bp, Artificial
  probe
  misc_feature (1)..(25): SEQ ID NO: 5433; WAN024CMG; Start 107; Stop 131
tcaaaacagacaaggctattctttc

SEQ ID NO: 410477 - DNA, 25 bp, Artificial
  probe
  misc_feature (1)..(25): SEQ ID NO: 5433; WAN024CMG; Start 79; Stop 103
aagtggttacaatccggctataaat

SEQ ID NO: 410478 - DNA, 25 bp, Artificial
  probe
  misc_feature (1)..(25): SEQ ID NO: 5433; WAN024CMG; Start 118; Stop 142
aaggctattctttcgtcttctccca

SEQ ID NO: 410479 - DNA, 25 bp, Artificial
  probe
  misc_feature (1)..(25): SEQ ID NO: 5433; WAN024CMG; Start 135; Stop 159
ttctcccatccagactatactgtcg

SEQ ID NO: 410480 - DNA, 25 bp, Artificial
  probe
  misc_feature (1)..(25): SEQ ID NO: 5433; WAN024CMG; Start 144; Stop 168
ccagactatactgtcggttgtggaa

SEQ ID NO: 410481 - DNA, 25 bp, Artificial
  probe
  misc_feature (1)..(25): SEQ ID NO: 5433; WAN024CMG; Start 82; Stop 106
tggttacaatccggctataaatcta

SEQ ID NO: 410482 - DNA, 25 bp, Artificial
  probe
  misc_feature (1)..(25): SEQ ID NO: 5433; WAN024CMG; Start 81; Stop 105
gtggttacaatccggctataaatct

SEQ ID NO: 410483 - DNA, 25 bp, Artificial
  probe
  misc_feature (1)..(25): SEQ ID NO: 5433; WAN024CMG; Start 80; Stop 104
agtggttacaatccggctataaatc

SEQ ID NO: 410484 - DNA, 25 bp, Artificial
  probe
  misc_feature (1)..(25): SEQ ID NO: 5434; WAN024FSH; Start 333; Stop 357
gtttggtctgatttatgatgtggtc

SEQ ID NO: 410485 - DNA, 25 bp, Artificial
  probe
  misc_feature (1)..(25): SEQ ID NO: 5434; WAN024FSH; Start 182; Stop 206
ataagatttgtgctgaagaaggttg

SEQ ID NO: 410486 - DNA, 25 bp, Artificial
  probe
  misc_feature (1)..(25): SEQ ID NO: 5434; WAN024FSH; Start 177; Stop 201
tgaggataagatttgtgctgaagaa

SEQ ID NO: 410487 - DNA, 25 bp, Artificial
  probe
  misc_feature (1)..(25): SEQ ID NO: 5434; WAN024FSH; Start 178; Stop 202
gaggataagatttgtgctgaagaag

SEQ ID NO: 410488 - DNA, 25 bp, Artificial
  probe
  misc_feature (1)..(25): SEQ ID NO: 5434; WAN024FSH; Start 332; Stop 356
agtttggtctgatttatgatgtggt

SEQ ID NO: 410489 - DNA, 25 bp, Artificial
  probe
  misc_feature (1)..(25): SEQ ID NO: 5434; WAN024FSH; Start 181; Stop 205
gataagatttgtgctgaagaaggtt

SEQ ID NO: 410490 - DNA, 25 bp, Artificial
  probe
  misc_feature (1)..(25): SEQ ID NO: 5434; WAN024FSH; Start 518; Stop 542
ttcttggtgttcgtgtctatggaag

SEQ ID NO: 410491 - DNA, 25 bp, Artificial
  probe
  misc_feature (1)..(25): SEQ ID NO: 5434; WAN024FSH; Start 176; Stop 200
ctgaggataagatttgtgctgaaga

SEQ ID NO: 410492 - DNA, 25 bp, Artificial
  probe
  misc_feature (1)..(25): SEQ ID NO: 5434; WAN024FSH; Start 183; Stop 207
taagatttgtgctgaagaaggttgt

SEQ ID NO: 410493 - DNA, 25 bp, Artificial
  probe
  misc_feature (1)..(25): SEQ ID NO: 5434; WAN024FSH; Start 179; Stop 203
aggataagatttgtgctgaagaagg

SEQ ID NO: 410494 - DNA, 25 bp, Artificial
  probe
  misc_feature (1)..(25): SEQ ID NO: 5434; WAN024FSH; Start 180; Stop 204
ggataagatttgtgctgaagaaggt

SEQ ID NO: 410495 - DNA, 25 bp, Artificial
  probe
  misc_feature (1)..(25): SEQ ID NO: 5434; WAN024FSH; Start 517; Stop 541
gttcttggtgttcgtgtctatggaa

SEQ ID NO: 410496 - DNA, 25 bp, Artificial
  probe
  misc_feature (1)..(25): SEQ ID NO: 5434; WAN024FSH; Start 338; Stop 362
gtctgatttatgatgtggtcaaagg

SEQ ID NO: 410497 - DNA, 25 bp, Artificial
  probe
  misc_feature (1)..(25): SEQ ID NO: 5434; WAN024FSH; Start 337; Stop 361
ggtctgatttatgatgtggtcaaag

SEQ ID NO: 410498 - DNA, 25 bp, Artificial
  probe
  misc_feature (1)..(25): SEQ ID NO: 5434; WAN024FSH; Start 336; Stop 360
tggtctgatttatgatgtggtcaaa

SEQ ID NO: 410499 - DNA, 25 bp, Artificial
  probe
  misc_feature (1)..(25): SEQ ID NO: 5434; WAN024FSH; Start 335; Stop 359
ttggtctgatttatgatgtggtcaa

SEQ ID NO: 410500 - DNA, 25 bp, Artificial
  probe
  misc_feature (1)..(25): SEQ ID NO: 5434; WAN024FSH; Start 334; Stop 358
tttggtctgatttatgatgtggtca

SEQ ID NO: 410501 - DNA, 25 bp, Artificial
  probe
  misc_feature (1)..(25): SEQ ID NO: 5434; WAN024FSH; Start 339; Stop 363
tctgatttatgatgtggtcaaaggg

SEQ ID NO: 410502 - DNA, 25 bp, Artificial
  probe
  misc_feature (1)..(25): SEQ ID NO: 5434; WAN024FSH; Start 175; Stop 199
cctgaggataagatttgtgctgaag

SEQ ID NO: 410503 - DNA, 25 bp, Artificial
  probe
  misc_feature (1)..(25): SEQ ID NO: 5434; WAN024FSH; Start 52; Stop 76
tacattcttgaccatatgcaggaag

SEQ ID NO: 410504 - DNA, 25 bp, Artificial
  probe
  misc_feature (1)..(25): SEQ ID NO: 5434; WAN024FSH; Start 184; Stop 208
aagatttgtgctgaagaaggttgtc

SEQ ID NO: 410505 - DNA, 25 bp, Artificial
  probe
  misc_feature (1)..(25): SEQ ID NO: 5434; WAN024FSH; Start 51; Stop 75
gtacattcttgaccatatgcaggaa

SEQ ID NO: 410506 - DNA, 25 bp, Artificial
  probe
  misc_feature (1)..(25): SEQ ID NO: 5434; WAN024FSH; Start 331; Stop 355
cagtttggtctgatttatgatgtgg

SEQ ID NO: 410507 - DNA, 25 bp, Artificial
  probe
  misc_feature (1)..(25): SEQ ID NO: 5434; WAN024FSH; Start 328; Stop 352
ggacagtttggtctgatttatgatg

SEQ ID NO: 410508 - DNA, 25 bp, Artificial
  probe
  misc_feature (1)..(25): SEQ ID NO: 5434; WAN024FSH; Start 330; Stop 354
acagtttggtctgatttatgatgtg

SEQ ID NO: 410509 - DNA, 25 bp, Artificial
  probe
  misc_feature (1)..(25): SEQ ID NO: 5434; WAN024FSH; Start 329; Stop 353
gacagtttggtctgatttatgatgt

SEQ ID NO: 410510 - DNA, 25 bp, Artificial
  probe
  misc_feature (1)..(25): SEQ ID NO: 5434; WAN024FSH; Start 327; Stop 351
gggacagtttggtctgatttatgat

SEQ ID NO: 410511 - DNA, 25 bp, Artificial
  probe
  misc_feature (1)..(25): SEQ ID NO: 5434; WAN024FSH; Start 50; Stop 74
agtacattcttgaccatatgcagga

SEQ ID NO: 410512 - DNA, 25 bp, Artificial
  probe
  misc_feature (1)..(25): SEQ ID NO: 5434; WAN024FSH; Start 49; Stop 73
cagtacattcttgaccatatgcagg

SEQ ID NO: 410513 - DNA, 25 bp, Artificial
  probe
  misc_feature (1)..(25): SEQ ID NO: 5434; WAN024FSH; Start 520; Stop 544
cttggtgttcgtgtctatggaagtg

SEQ ID NO: 410514 - DNA, 25 bp, Artificial
  probe
  misc_feature (1)..(25): SEQ ID NO: 5434; WAN024FSH; Start 519; Stop 543
tcttggtgttcgtgtctatggaagt

SEQ ID NO: 410515 - DNA, 25 bp, Artificial
  probe
  misc_feature (1)..(25): SEQ ID NO: 5434; WAN024FSH; Start 326; Stop 350
agggacagtttggtctgatttatga

SEQ ID NO: 410516 - DNA, 25 bp, Artificial
  probe
  misc_feature (1)..(25): SEQ ID NO: 5434; WAN024FSH; Start 325; Stop 349
cagggacagtttggtctgatttatg

SEQ ID NO: 410517 - DNA, 25 bp, Artificial
  probe
  misc_feature (1)..(25): SEQ ID NO: 5435; WAN024CS3; Start 124; Stop 148
gtcgtcaacagaaccattaagataa

SEQ ID NO: 410518 - DNA, 25 bp, Artificial
  probe
  misc_feature (1)..(25): SEQ ID NO: 5435; WAN024CS3; Start 123; Stop 147
cgtcgtcaacagaaccattaagata

SEQ ID NO: 410519 - DNA, 25 bp, Artificial
  probe
  misc_feature (1)..(25): SEQ ID NO: 5435; WAN024CS3; Start 41; Stop 65
ttcttaatctcttcagtcgcaaggt

SEQ ID NO: 410520 - DNA, 25 bp, Artificial
  probe
  misc_feature (1)..(25): SEQ ID NO: 5435; WAN024CS3; Start 42; Stop 66
tcttaatctcttcagtcgcaaggtc

SEQ ID NO: 410521 - DNA, 25 bp, Artificial
  probe
  misc_feature (1)..(25): SEQ ID NO: 5435; WAN024CS3; Start 43; Stop 67
cttaatctcttcagtcgcaaggtca

SEQ ID NO: 410522 - DNA, 25 bp, Artificial
  probe
  misc_feature (1)..(25): SEQ ID NO: 5435; WAN024CS3; Start 119; Stop 143
tatgcgtcgtcaacagaaccattaa

SEQ ID NO: 410523 - DNA, 25 bp, Artificial
  probe
  misc_feature (1)..(25): SEQ ID NO: 5435; WAN024CS3; Start 44; Stop 68
ttaatctcttcagtcgcaaggtcac

SEQ ID NO: 410524 - DNA, 25 bp, Artificial
  probe
  misc_feature (1)..(25): SEQ ID NO: 5435; WAN024CS3; Start 40; Stop 64
tttcttaatctcttcagtcgcaagg

SEQ ID NO: 410525 - DNA, 25 bp, Artificial
  probe
  misc_feature (1)..(25): SEQ ID NO: 5435; WAN024CS3; Start 125; Stop 149
tcgtcaacagaaccattaagataaa

SEQ ID NO: 410526 - DNA, 25 bp, Artificial
  probe
  misc_feature (1)..(25): SEQ ID NO: 5435; WAN024CS3; Start 126; Stop 150
cgtcaacagaaccattaagataaag

SEQ ID NO: 410527 - DNA, 25 bp, Artificial
  probe
  misc_feature (1)..(25): SEQ ID NO: 5435; WAN024CS3; Start 141; Stop 165
taagataaagatcaagtgctgcttc

SEQ ID NO: 410528 - DNA, 25 bp, Artificial
  probe
  misc_feature (1)..(25): SEQ ID NO: 5435; WAN024CS3; Start 140; Stop 164
ttaagataaagatcaagtgctgctt

SEQ ID NO: 410529 - DNA, 25 bp, Artificial
  probe
  misc_feature (1)..(25): SEQ ID NO: 5435; WAN024CS3; Start 118; Stop 142
gtatgcgtcgtcaacagaaccatta

SEQ ID NO: 410530 - DNA, 25 bp, Artificial
  probe
  misc_feature (1)..(25): SEQ ID NO: 5435; WAN024CS3; Start 139; Stop 163
attaagataaagatcaagtgctgct

SEQ ID NO: 410531 - DNA, 25 bp, Artificial
  probe
  misc_feature (1)..(25): SEQ ID NO: 5435; WAN024CS3; Start 138; Stop 162
cattaagataaagatcaagtgctgc

SEQ ID NO: 410532 - DNA, 25 bp, Artificial
  probe
  misc_feature (1)..(25): SEQ ID NO: 5435; WAN024CS3; Start 122; Stop 146
gcgtcgtcaacagaaccattaagat

SEQ ID NO: 410533 - DNA, 25 bp, Artificial
  probe
  misc_feature (1)..(25): SEQ ID NO: 5435; WAN024CS3; Start 136; Stop 160
accattaagataaagatcaagtgct

SEQ ID NO: 410534 - DNA, 25 bp, Artificial
  probe
  misc_feature (1)..(25): SEQ ID NO: 5435; WAN024CS3; Start 137; Stop 161
ccattaagataaagatcaagtgctg

SEQ ID NO: 410535 - DNA, 25 bp, Artificial
  probe
  misc_feature (1)..(25): SEQ ID NO: 5435; WAN024CS3; Start 120; Stop 144
atgcgtcgtcaacagaaccattaag

SEQ ID NO: 410536 - DNA, 25 bp, Artificial
  probe
  misc_feature (1)..(25): SEQ ID NO: 5435; WAN024CS3; Start 80; Stop 104
aaatagtggttaatttgctcatcca

SEQ ID NO: 410537 - DNA, 25 bp, Artificial
  probe
  misc_feature (1)..(25): SEQ ID NO: 5435; WAN024CS3; Start 81; Stop 105
aatagtggttaatttgctcatccat

SEQ ID NO: 410538 - DNA, 25 bp, Artificial
  probe
  misc_feature (1)..(25): SEQ ID NO: 5435; WAN024CS3; Start 135; Stop 159
aaccattaagataaagatcaagtgc

SEQ ID NO: 410539 - DNA, 25 bp, Artificial
  probe
  misc_feature (1)..(25): SEQ ID NO: 5435; WAN024CS3; Start 127; Stop 151
gtcaacagaaccattaagataaaga

SEQ ID NO: 410540 - DNA, 25 bp, Artificial
  probe
  misc_feature (1)..(25): SEQ ID NO: 5435; WAN024CS3; Start 82; Stop 106
atagtggttaatttgctcatccatg

SEQ ID NO: 410541 - DNA, 25 bp, Artificial
  probe
  misc_feature (1)..(25): SEQ ID NO: 5435; WAN024CS3; Start 62; Stop 86
aggtcacggatagtttcaaaatagt

SEQ ID NO: 410542 - DNA, 25 bp, Artificial
  probe
  misc_feature (1)..(25): SEQ ID NO: 5435; WAN024CS3; Start 60; Stop 84
caaggtcacggatagtttcaaaata

SEQ ID NO: 410543 - DNA, 25 bp, Artificial
  probe
  misc_feature (1)..(25): SEQ ID NO: 5435; WAN024CS3; Start 61; Stop 85
aaggtcacggatagtttcaaaatag

SEQ ID NO: 410544 - DNA, 25 bp, Artificial
  probe
  misc_feature (1)..(25): SEQ ID NO: 5435; WAN024CS3; Start 39; Stop 63
ttttcttaatctcttcagtcgcaag

SEQ ID NO: 410545 - DNA, 25 bp, Artificial
  probe
  misc_feature (1)..(25): SEQ ID NO: 5435; WAN024CS3; Start 4; Stop 28
gaaataatcacgacccgtaacaatg

SEQ ID NO: 410546 - DNA, 25 bp, Artificial
  probe
  misc_feature (1)..(25): SEQ ID NO: 5435; WAN024CS3; Start 45; Stop 69
taatctcttcagtcgcaaggtcacg

SEQ ID NO: 410547 - DNA, 25 bp, Artificial
  probe
  misc_feature (1)..(25): SEQ ID NO: 5435; WAN024CS3; Start 67; Stop 91
acggatagtttcaaaatagtggtta

SEQ ID NO: 410548 - DNA, 25 bp, Artificial
  probe
  misc_feature (1)..(25): SEQ ID NO: 5435; WAN024CS3; Start 3; Stop 27
ggaaataatcacgacccgtaacaat

SEQ ID NO: 410549 - DNA, 25 bp, Artificial
  probe
  misc_feature (1)..(25): SEQ ID NO: 5435; WAN024CS3; Start 121; Stop 145
tgcgtcgtcaacagaaccattaaga

SEQ ID NO: 410550 - DNA, 25 bp, Artificial
  probe
  misc_feature (1)..(25): SEQ ID NO: 5436; WAN024BE4; Start 168; Stop 192
tatacatacgacaaggcgatactac

SEQ ID NO: 410551 - DNA, 25 bp, Artificial
  probe
  misc_feature (1)..(25): SEQ ID NO: 5436; WAN024BE4; Start 167; Stop 191
atatacatacgacaaggcgatacta

SEQ ID NO: 410552 - DNA, 25 bp, Artificial
  probe
  misc_feature (1)..(25): SEQ ID NO: 5436; WAN024BE4; Start 13; Stop 37
accatccgatcacttcttcttaatt

SEQ ID NO: 410553 - DNA, 25 bp, Artificial
  probe
  misc_feature (1)..(25): SEQ ID NO: 5436; WAN024BE4; Start 12; Stop 36
aaccatccgatcacttcttcttaat

SEQ ID NO: 410554 - DNA, 25 bp, Artificial
  probe
  misc_feature (1)..(25): SEQ ID NO: 5436; WAN024BE4; Start 11; Stop 35
caaccatccgatcacttcttcttaa

SEQ ID NO: 410555 - DNA, 25 bp, Artificial
  probe
  misc_feature (1)..(25): SEQ ID NO: 5436; WAN024BE4; Start 169; Stop 193
atacatacgacaaggcgatactacc

SEQ ID NO: 410556 - DNA, 25 bp, Artificial
  probe
  misc_feature (1)..(25): SEQ ID NO: 5436; WAN024BE4; Start 163; Stop 187
gcatatatacatacgacaaggcgat

SEQ ID NO: 410557 - DNA, 25 bp, Artificial
  probe
  misc_feature (1)..(25): SEQ ID NO: 5436; WAN024BE4; Start 166; Stop 190
tatatacatacgacaaggcgatact

SEQ ID NO: 410558 - DNA, 25 bp, Artificial
  probe
  misc_feature (1)..(25): SEQ ID NO: 5436; WAN024BE4; Start 10; Stop 34
acaaccatccgatcacttcttctta

SEQ ID NO: 410559 - DNA, 25 bp, Artificial
  probe
  misc_feature (1)..(25): SEQ ID NO: 5436; WAN024BE4; Start 165; Stop 189
atatatacatacgacaaggcgatac

SEQ ID NO: 410560 - DNA, 25 bp, Artificial
  probe
  misc_feature (1)..(25): SEQ ID NO: 5436; WAN024BE4; Start 164; Stop 188
catatatacatacgacaaggcgata

SEQ ID NO: 410561 - DNA, 25 bp, Artificial
  probe
  misc_feature (1)..(25): SEQ ID NO: 5436; WAN024BE4; Start 161; Stop 185
ctgcatatatacatacgacaaggcg

SEQ ID NO: 410562 - DNA, 25 bp, Artificial
  probe
  misc_feature (1)..(25): SEQ ID NO: 5436; WAN024BE4; Start 9; Stop 33
gacaaccatccgatcacttcttctt

SEQ ID NO: 410563 - DNA, 25 bp, Artificial
  probe
  misc_feature (1)..(25): SEQ ID NO: 5436; WAN024BE4; Start 6; Stop 30
aatgacaaccatccgatcacttctt

SEQ ID NO: 410564 - DNA, 25 bp, Artificial
  probe
  misc_feature (1)..(25): SEQ ID NO: 5436; WAN024BE4; Start 162; Stop 186
tgcatatatacatacgacaaggcga

SEQ ID NO: 410565 - DNA, 25 bp, Artificial
  probe
  misc_feature (1)..(25): SEQ ID NO: 5436; WAN024BE4; Start 14; Stop 38
ccatccgatcacttcttcttaattt

SEQ ID NO: 410566 - DNA, 25 bp, Artificial
  probe
  misc_feature (1)..(25): SEQ ID NO: 5436; WAN024BE4; Start 139; Stop 163
actgacaaaccctgtaatatacctg

SEQ ID NO: 410567 - DNA, 25 bp, Artificial
  probe
  misc_feature (1)..(25): SEQ ID NO: 5436; WAN024BE4; Start 131; Stop 155
tcaatagaactgacaaaccctgtaa

SEQ ID NO: 410568 - DNA, 25 bp, Artificial
  probe
  misc_feature (1)..(25): SEQ ID NO: 5436; WAN024BE4; Start 159; Stop 183
acctgcatatatacatacgacaagg

SEQ ID NO: 410569 - DNA, 25 bp, Artificial
  probe
  misc_feature (1)..(25): SEQ ID NO: 5436; WAN024BE4; Start 138; Stop 162
aactgacaaaccctgtaatatacct

SEQ ID NO: 410570 - DNA, 25 bp, Artificial
  probe
  misc_feature (1)..(25): SEQ ID NO: 5436; WAN024BE4; Start 158; Stop 182
tacctgcatatatacatacgacaag

SEQ ID NO: 410571 - DNA, 25 bp, Artificial
  probe
  misc_feature (1)..(25): SEQ ID NO: 5436; WAN024BE4; Start 137; Stop 161
gaactgacaaaccctgtaatatacc

SEQ ID NO: 410572 - DNA, 25 bp, Artificial
  probe
  misc_feature (1)..(25): SEQ ID NO: 5436; WAN024BE4; Start 7; Stop 31
atgacaaccatccgatcacttcttc

SEQ ID NO: 410573 - DNA, 25 bp, Artificial
  probe
  misc_feature (1)..(25): SEQ ID NO: 5436; WAN024BE4; Start 132; Stop 156
caatagaactgacaaaccctgtaat

SEQ ID NO: 410574 - DNA, 25 bp, Artificial
  probe
  misc_feature (1)..(25): SEQ ID NO: 5436; WAN024BE4; Start 140; Stop 164
ctgacaaaccctgtaatatacctgc

SEQ ID NO: 410575 - DNA, 25 bp, Artificial
  probe
  misc_feature (1)..(25): SEQ ID NO: 5436; WAN024BE4; Start 160; Stop 184
cctgcatatatacatacgacaaggc

SEQ ID NO: 410576 - DNA, 25 bp, Artificial
  probe
  misc_feature (1)..(25): SEQ ID NO: 5436; WAN024BE4; Start 17; Stop 41
tccgatcacttcttcttaatttcat

SEQ ID NO: 410577 - DNA, 25 bp, Artificial
  probe
  misc_feature (1)..(25): SEQ ID NO: 5436; WAN024BE4; Start 16; Stop 40
atccgatcacttcttcttaatttca

SEQ ID NO: 410578 - DNA, 25 bp, Artificial
  probe
  misc_feature (1)..(25): SEQ ID NO: 5436; WAN024BE4; Start 15; Stop 39
catccgatcacttcttcttaatttc

SEQ ID NO: 410579 - DNA, 25 bp, Artificial
  probe
  misc_feature (1)..(25): SEQ ID NO: 5436; WAN024BE4; Start 136; Stop 160
agaactgacaaaccctgtaatatac

SEQ ID NO: 410580 - DNA, 25 bp, Artificial
  probe
  misc_feature (1)..(25): SEQ ID NO: 5436; WAN024BE4; Start 157; Stop 181
atacctgcatatatacatacgacaa

SEQ ID NO: 410581 - DNA, 25 bp, Artificial
  probe
  misc_feature (1)..(25): SEQ ID NO: 5436; WAN024BE4; Start 184; Stop 208
cgatactaccctagtttgaagagat

SEQ ID NO: 410582 - DNA, 25 bp, Artificial
  probe
  misc_feature (1)..(25): SEQ ID NO: 5436; WAN024BE4; Start 18; Stop 42
ccgatcacttcttcttaatttcatt

SEQ ID NO: 410583 - DNA, 25 bp, Artificial
  probe
  misc_feature (1)..(25): SEQ ID NO: 5437; WAN024DFX; Start 240; Stop 264
agttgtatatcgtagaagagcatcc

SEQ ID NO: 410584 - DNA, 25 bp, Artificial
  probe
  misc_feature (1)..(25): SEQ ID NO: 5437; WAN024DFX; Start 236; Stop 260
tagcagttgtatatcgtagaagagc

SEQ ID NO: 410585 - DNA, 25 bp, Artificial
  probe
  misc_feature (1)..(25): SEQ ID NO: 5437; WAN024DFX; Start 238; Stop 262
gcagttgtatatcgtagaagagcat

SEQ ID NO: 410586 - DNA, 25 bp, Artificial
  probe
  misc_feature (1)..(25): SEQ ID NO: 5437; WAN024DFX; Start 241; Stop 265
gttgtatatcgtagaagagcatccg

SEQ ID NO: 410587 - DNA, 25 bp, Artificial
  probe
  misc_feature (1)..(25): SEQ ID NO: 5437; WAN024DFX; Start 239; Stop 263
cagttgtatatcgtagaagagcatc

SEQ ID NO: 410588 - DNA, 25 bp, Artificial
  probe
  misc_feature (1)..(25): SEQ ID NO: 5437; WAN024DFX; Start 437; Stop 461
tgaatgcttgtgtgttagtcttgtt

SEQ ID NO: 410589 - DNA, 25 bp, Artificial
  probe
  misc_feature (1)..(25): SEQ ID NO: 5437; WAN024DFX; Start 436; Stop 460
ttgaatgcttgtgtgttagtcttgt

SEQ ID NO: 410590 - DNA, 25 bp, Artificial
  probe
  misc_feature (1)..(25): SEQ ID NO: 5437; WAN024DFX; Start 102; Stop 126
aggattatggtattggttagaagga

SEQ ID NO: 410591 - DNA, 25 bp, Artificial
  probe
  misc_feature (1)..(25): SEQ ID NO: 5437; WAN024DFX; Start 237; Stop 261
agcagttgtatatcgtagaagagca

SEQ ID NO: 410592 - DNA, 25 bp, Artificial
  probe
  misc_feature (1)..(25): SEQ ID NO: 5437; WAN024DFX; Start 28; Stop 52
atgtggaggttgaatcagataatct

SEQ ID NO: 410593 - DNA, 25 bp, Artificial
  probe
  misc_feature (1)..(25): SEQ ID NO: 5437; WAN024DFX; Start 27; Stop 51
catgtggaggttgaatcagataatc

SEQ ID NO: 410594 - DNA, 25 bp, Artificial
  probe
  misc_feature (1)..(25): SEQ ID NO: 5437; WAN024DFX; Start 29; Stop 53
tgtggaggttgaatcagataatcta

SEQ ID NO: 410595 - DNA, 25 bp, Artificial
  probe
  misc_feature (1)..(25): SEQ ID NO: 5437; WAN024DFX; Start 103; Stop 127
ggattatggtattggttagaaggaa

SEQ ID NO: 410596 - DNA, 25 bp, Artificial
  probe
  misc_feature (1)..(25): SEQ ID NO: 5437; WAN024DFX; Start 235; Stop 259
ctagcagttgtatatcgtagaagag

SEQ ID NO: 410597 - DNA, 25 bp, Artificial
  probe
  misc_feature (1)..(25): SEQ ID NO: 5437; WAN024DFX; Start 191; Stop 215
tatctatatggttgcttcattggtt

SEQ ID NO: 410598 - DNA, 25 bp, Artificial
  probe
  misc_feature (1)..(25): SEQ ID NO: 5437; WAN024DFX; Start 190; Stop 214
ttatctatatggttgcttcattggt

SEQ ID NO: 410599 - DNA, 25 bp, Artificial
  probe
  misc_feature (1)..(25): SEQ ID NO: 5437; WAN024DFX; Start 189; Stop 213
cttatctatatggttgcttcattgg

SEQ ID NO: 410600 - DNA, 25 bp, Artificial
  probe
  misc_feature (1)..(25): SEQ ID NO: 5437; WAN024DFX; Start 30; Stop 54
gtggaggttgaatcagataatctat

SEQ ID NO: 410601 - DNA, 25 bp, Artificial
  probe
  misc_feature (1)..(25): SEQ ID NO: 5437; WAN024DFX; Start 101; Stop 125
taggattatggtattggttagaagg

SEQ ID NO: 410602 - DNA, 25 bp, Artificial
  probe
  misc_feature (1)..(25): SEQ ID NO: 5437; WAN024DFX; Start 532; Stop 556
atgattgtgtttggtggtctatttg

SEQ ID NO: 410603 - DNA, 25 bp, Artificial
  probe
  misc_feature (1)..(25): SEQ ID NO: 5437; WAN024DFX; Start 434; Stop 458
ctttgaatgcttgtgtgttagtctt

SEQ ID NO: 410604 - DNA, 25 bp, Artificial
  probe
  misc_feature (1)..(25): SEQ ID NO: 5437; WAN024DFX; Start 539; Stop 563
tgtttggtggtctatttgtaggaaa

SEQ ID NO: 410605 - DNA, 25 bp, Artificial
  probe
  misc_feature (1)..(25): SEQ ID NO: 5437; WAN024DFX; Start 535; Stop 559
attgtgtttggtggtctatttgtag

SEQ ID NO: 410606 - DNA, 25 bp, Artificial
  probe
  misc_feature (1)..(25): SEQ ID NO: 5437; WAN024DFX; Start 534; Stop 558
gattgtgtttggtggtctatttgta

SEQ ID NO: 410607 - DNA, 25 bp, Artificial
  probe
  misc_feature (1)..(25): SEQ ID NO: 5437; WAN024DFX; Start 438; Stop 462
gaatgcttgtgtgttagtcttgttt

SEQ ID NO: 410608 - DNA, 25 bp, Artificial
  probe
  misc_feature (1)..(25): SEQ ID NO: 5437; WAN024DFX; Start 435; Stop 459
tttgaatgcttgtgtgttagtcttg

SEQ ID NO: 410609 - DNA, 25 bp, Artificial
  probe
  misc_feature (1)..(25): SEQ ID NO: 5437; WAN024DFX; Start 599; Stop 623
ggaatggagatataggacgagattt

SEQ ID NO: 410610 - DNA, 25 bp, Artificial
  probe
  misc_feature (1)..(25): SEQ ID NO: 5437; WAN024DFX; Start 186; Stop 210
agtcttatctatatggttgcttcat

SEQ ID NO: 410611 - DNA, 25 bp, Artificial
  probe
  misc_feature (1)..(25): SEQ ID NO: 5437; WAN024DFX; Start 2; Stop 26
tggaaatgggaaagttaagtagtca

SEQ ID NO: 410612 - DNA, 25 bp, Artificial
  probe
  misc_feature (1)..(25): SEQ ID NO: 5437; WAN024DFX; Start 3; Stop 27
ggaaatgggaaagttaagtagtcac

SEQ ID NO: 410613 - DNA, 25 bp, Artificial
  probe
  misc_feature (1)..(25): SEQ ID NO: 5437; WAN024DFX; Start 538; Stop 562
gtgtttggtggtctatttgtaggaa

SEQ ID NO: 410614 - DNA, 25 bp, Artificial
  probe
  misc_feature (1)..(25): SEQ ID NO: 5437; WAN024DFX; Start 433; Stop 457
tctttgaatgcttgtgtgttagtct

SEQ ID NO: 410615 - DNA, 25 bp, Artificial
  probe
  misc_feature (1)..(25): SEQ ID NO: 5437; WAN024DFX; Start 432; Stop 456
ttctttgaatgcttgtgtgttagtc

SEQ ID NO: 410616 - DNA, 25 bp, Artificial
  probe
  misc_feature (1)..(25): SEQ ID NO: 5438; WAN024DZ7; Start 143; Stop 167
aagaagaaatattggaggaagaaca

SEQ ID NO: 410617 - DNA, 25 bp, Artificial
  probe
  misc_feature (1)..(25): SEQ ID NO: 5438; WAN024DZ7; Start 145; Stop 169
gaagaaatattggaggaagaacatg

SEQ ID NO: 410618 - DNA, 25 bp, Artificial
  probe
  misc_feature (1)..(25): SEQ ID NO: 5438; WAN024DZ7; Start 144; Stop 168
agaagaaatattggaggaagaacat

SEQ ID NO: 410619 - DNA, 25 bp, Artificial
  probe
  misc_feature (1)..(25): SEQ ID NO: 5438; WAN024DZ7; Start 150; Stop 174
aatattggaggaagaacatgtcaca

SEQ ID NO: 410620 - DNA, 25 bp, Artificial
  probe
  misc_feature (1)..(25): SEQ ID NO: 5438; WAN024DZ7; Start 154; Stop 178
ttggaggaagaacatgtcacatatt

SEQ ID NO: 410621 - DNA, 25 bp, Artificial
  probe
  misc_feature (1)..(25): SEQ ID NO: 5438; WAN024DZ7; Start 153; Stop 177
attggaggaagaacatgtcacatat

SEQ ID NO: 410622 - DNA, 25 bp, Artificial
  probe
  misc_feature (1)..(25): SEQ ID NO: 5438; WAN024DZ7; Start 151; Stop 175
atattggaggaagaacatgtcacat

SEQ ID NO: 410623 - DNA, 25 bp, Artificial
  probe
  misc_feature (1)..(25): SEQ ID NO: 5438; WAN024DZ7; Start 155; Stop 179
tggaggaagaacatgtcacatatta

SEQ ID NO: 410624 - DNA, 25 bp, Artificial
  probe
  misc_feature (1)..(25): SEQ ID NO: 5438; WAN024DZ7; Start 152; Stop 176
tattggaggaagaacatgtcacata

SEQ ID NO: 410625 - DNA, 25 bp, Artificial
  probe
  misc_feature (1)..(25): SEQ ID NO: 5438; WAN024DZ7; Start 120; Stop 144
cgaaggtaagcgttatgatagaaaa

SEQ ID NO: 410626 - DNA, 25 bp, Artificial
  probe
  misc_feature (1)..(25): SEQ ID NO: 5438; WAN024DZ7; Start 6; Stop 30
acatctggtcgttctttcttttatt

SEQ ID NO: 410627 - DNA, 25 bp, Artificial
  probe
  misc_feature (1)..(25): SEQ ID NO: 5438; WAN024DZ7; Start 156; Stop 180
ggaggaagaacatgtcacatattaa

SEQ ID NO: 410628 - DNA, 25 bp, Artificial
  probe
  misc_feature (1)..(25): SEQ ID NO: 5438; WAN024DZ7; Start 142; Stop 166
aaagaagaaatattggaggaagaac

SEQ ID NO: 410629 - DNA, 25 bp, Artificial
  probe
  misc_feature (1)..(25): SEQ ID NO: 5438; WAN024DZ7; Start 119; Stop 143
acgaaggtaagcgttatgatagaaa

SEQ ID NO: 410630 - DNA, 25 bp, Artificial
  probe
  misc_feature (1)..(25): SEQ ID NO: 5438; WAN024DZ7; Start 5; Stop 29
aacatctggtcgttctttcttttat

SEQ ID NO: 410631 - DNA, 25 bp, Artificial
  probe
  misc_feature (1)..(25): SEQ ID NO: 5438; WAN024DZ7; Start 123; Stop 147
aggtaagcgttatgatagaaaagaa

SEQ ID NO: 410632 - DNA, 25 bp, Artificial
  probe
  misc_feature (1)..(25): SEQ ID NO: 5438; WAN024DZ7; Start 122; Stop 146
aaggtaagcgttatgatagaaaaga

SEQ ID NO: 410633 - DNA, 25 bp, Artificial
  probe
  misc_feature (1)..(25): SEQ ID NO: 5438; WAN024DZ7; Start 7; Stop 31
catctggtcgttctttcttttattt

SEQ ID NO: 410634 - DNA, 25 bp, Artificial
  probe
  misc_feature (1)..(25): SEQ ID NO: 5438; WAN024DZ7; Start 124; Stop 148
ggtaagcgttatgatagaaaagaag

SEQ ID NO: 410635 - DNA, 25 bp, Artificial
  probe
  misc_feature (1)..(25): SEQ ID NO: 5438; WAN024DZ7; Start 121; Stop 145
gaaggtaagcgttatgatagaaaag

SEQ ID NO: 410636 - DNA, 25 bp, Artificial
  probe
  misc_feature (1)..(25): SEQ ID NO: 5438; WAN024DZ7; Start 149; Stop 173
aaatattggaggaagaacatgtcac

SEQ ID NO: 410637 - DNA, 25 bp, Artificial
  probe
  misc_feature (1)..(25): SEQ ID NO: 5438; WAN024DZ7; Start 148; Stop 172
gaaatattggaggaagaacatgtca

SEQ ID NO: 410638 - DNA, 25 bp, Artificial
  probe
  misc_feature (1)..(25): SEQ ID NO: 5438; WAN024DZ7; Start 147; Stop 171
agaaatattggaggaagaacatgtc

SEQ ID NO: 410639 - DNA, 25 bp, Artificial
  probe
  misc_feature (1)..(25): SEQ ID NO: 5438; WAN024DZ7; Start 127; Stop 151
aagcgttatgatagaaaagaagaaa

SEQ ID NO: 410640 - DNA, 25 bp, Artificial
  probe
  misc_feature (1)..(25): SEQ ID NO: 5438; WAN024DZ7; Start 146; Stop 170
aagaaatattggaggaagaacatgt

SEQ ID NO: 410641 - DNA, 25 bp, Artificial
  probe
  misc_feature (1)..(25): SEQ ID NO: 5438; WAN024DZ7; Start 125; Stop 149
gtaagcgttatgatagaaaagaaga

SEQ ID NO: 410642 - DNA, 25 bp, Artificial
  probe
  misc_feature (1)..(25): SEQ ID NO: 5438; WAN024DZ7; Start 42; Stop 66
tttagaatgtggcattttacgcaaa

SEQ ID NO: 410643 - DNA, 25 bp, Artificial
  probe
  misc_feature (1)..(25): SEQ ID NO: 5438; WAN024DZ7; Start 41; Stop 65
ttttagaatgtggcattttacgcaa

SEQ ID NO: 410644 - DNA, 25 bp, Artificial
  probe
  misc_feature (1)..(25): SEQ ID NO: 5438; WAN024DZ7; Start 128; Stop 152
agcgttatgatagaaaagaagaaat

SEQ ID NO: 410645 - DNA, 25 bp, Artificial
  probe
  misc_feature (1)..(25): SEQ ID NO: 5438; WAN024DZ7; Start 43; Stop 67
ttagaatgtggcattttacgcaaac

SEQ ID NO: 410646 - DNA, 25 bp, Artificial
  probe
  misc_feature (1)..(25): SEQ ID NO: 5438; WAN024DZ7; Start 118; Stop 142
aacgaaggtaagcgttatgatagaa

SEQ ID NO: 410647 - DNA, 25 bp, Artificial
  probe
  misc_feature (1)..(25): SEQ ID NO: 5438; WAN024DZ7; Start 2; Stop 26
tggaacatctggtcgttctttcttt

SEQ ID NO: 410648 - DNA, 25 bp, Artificial
  probe
  misc_feature (1)..(25): SEQ ID NO: 5438; WAN024DZ7; Start 1; Stop 25
ttggaacatctggtcgttctttctt

SEQ ID NO: 410649 - DNA, 25 bp, Artificial
  probe
  misc_feature (1)..(25): SEQ ID NO: 5439; WAN024CQA; Start 202; Stop 226
ctcttggataatggtcacaatacgg

SEQ ID NO: 410650 - DNA, 25 bp, Artificial
  probe
  misc_feature (1)..(25): SEQ ID NO: 5439; WAN024CQA; Start 204; Stop 228
cttggataatggtcacaatacggtc

SEQ ID NO: 410651 - DNA, 25 bp, Artificial
  probe
  misc_feature (1)..(25): SEQ ID NO: 5439; WAN024CQA; Start 206; Stop 230
tggataatggtcacaatacggtcaa

SEQ ID NO: 410652 - DNA, 25 bp, Artificial
  probe
  misc_feature (1)..(25): SEQ ID NO: 5439; WAN024CQA; Start 203; Stop 227
tcttggataatggtcacaatacggt

SEQ ID NO: 410653 - DNA, 25 bp, Artificial
  probe
  misc_feature (1)..(25): SEQ ID NO: 5439; WAN024CQA; Start 201; Stop 225
gctcttggataatggtcacaatacg

SEQ ID NO: 410654 - DNA, 25 bp, Artificial
  probe
  misc_feature (1)..(25): SEQ ID NO: 5439; WAN024CQA; Start 200; Stop 224
cgctcttggataatggtcacaatac

SEQ ID NO: 410655 - DNA, 25 bp, Artificial
  probe
  misc_feature (1)..(25): SEQ ID NO: 5439; WAN024CQA; Start 199; Stop 223
tcgctcttggataatggtcacaata

SEQ ID NO: 410656 - DNA, 25 bp, Artificial
  probe
  misc_feature (1)..(25): SEQ ID NO: 5439; WAN024CQA; Start 205; Stop 229
ttggataatggtcacaatacggtca

SEQ ID NO: 410657 - DNA, 25 bp, Artificial
  probe
  misc_feature (1)..(25): SEQ ID NO: 5439; WAN024CQA; Start 207; Stop 231
ggataatggtcacaatacggtcaaa

SEQ ID NO: 410658 - DNA, 25 bp, Artificial
  probe
  misc_feature (1)..(25): SEQ ID NO: 5439; WAN024CQA; Start 54; Stop 78
tttggagttggtcaatttcttcatc

SEQ ID NO: 410659 - DNA, 25 bp, Artificial
  probe
  misc_feature (1)..(25): SEQ ID NO: 5439; WAN024CQA; Start 114; Stop 138
agataaactccatcaagtcaacaga

SEQ ID NO: 410660 - DNA, 25 bp, Artificial
  probe
  misc_feature (1)..(25): SEQ ID NO: 5439; WAN024CQA; Start 109; Stop 133
agtcaagataaactccatcaagtca

SEQ ID NO: 410661 - DNA, 25 bp, Artificial
  probe
  misc_feature (1)..(25): SEQ ID NO: 5439; WAN024CQA; Start 112; Stop 136
caagataaactccatcaagtcaaca

SEQ ID NO: 410662 - DNA, 25 bp, Artificial
  probe
  misc_feature (1)..(25): SEQ ID NO: 5439; WAN024CQA; Start 117; Stop 141
taaactccatcaagtcaacagaatc

SEQ ID NO: 410663 - DNA, 25 bp, Artificial
  probe
  misc_feature (1)..(25): SEQ ID NO: 5439; WAN024CQA; Start 115; Stop 139
gataaactccatcaagtcaacagaa

SEQ ID NO: 410664 - DNA, 25 bp, Artificial
  probe
  misc_feature (1)..(25): SEQ ID NO: 5439; WAN024CQA; Start 113; Stop 137
aagataaactccatcaagtcaacag

SEQ ID NO: 410665 - DNA, 25 bp, Artificial
  probe
  misc_feature (1)..(25): SEQ ID NO: 5439; WAN024CQA; Start 111; Stop 135
tcaagataaactccatcaagtcaac

SEQ ID NO: 410666 - DNA, 25 bp, Artificial
  probe
  misc_feature (1)..(25): SEQ ID NO: 5439; WAN024CQA; Start 110; Stop 134
gtcaagataaactccatcaagtcaa

SEQ ID NO: 410667 - DNA, 25 bp, Artificial
  probe
  misc_feature (1)..(25): SEQ ID NO: 5439; WAN024CQA; Start 119; Stop 143
aactccatcaagtcaacagaatccg

SEQ ID NO: 410668 - DNA, 25 bp, Artificial
  probe
  misc_feature (1)..(25): SEQ ID NO: 5439; WAN024CQA; Start 63; Stop 87
ggtcaatttcttcatcgctgatttc

SEQ ID NO: 410669 - DNA, 25 bp, Artificial
  probe
  misc_feature (1)..(25): SEQ ID NO: 5439; WAN024CQA; Start 198; Stop 222
gtcgctcttggataatggtcacaat

SEQ ID NO: 410670 - DNA, 25 bp, Artificial
  probe
  misc_feature (1)..(25): SEQ ID NO: 5439; WAN024CQA; Start 118; Stop 142
aaactccatcaagtcaacagaatcc

SEQ ID NO: 410671 - DNA, 25 bp, Artificial
  probe
  misc_feature (1)..(25): SEQ ID NO: 5439; WAN024CQA; Start 64; Stop 88
gtcaatttcttcatcgctgatttcg

SEQ ID NO: 410672 - DNA, 25 bp, Artificial
  probe
  misc_feature (1)..(25): SEQ ID NO: 5439; WAN024CQA; Start 91; Stop 115
actaaattcatcttccagagtcaag

SEQ ID NO: 410673 - DNA, 25 bp, Artificial
  probe
  misc_feature (1)..(25): SEQ ID NO: 5439; WAN024CQA; Start 62; Stop 86
tggtcaatttcttcatcgctgattt

SEQ ID NO: 410674 - DNA, 25 bp, Artificial
  probe
  misc_feature (1)..(25): SEQ ID NO: 5439; WAN024CQA; Start 61; Stop 85
ttggtcaatttcttcatcgctgatt

SEQ ID NO: 410675 - DNA, 25 bp, Artificial
  probe
  misc_feature (1)..(25): SEQ ID NO: 5439; WAN024CQA; Start 116; Stop 140
ataaactccatcaagtcaacagaat

SEQ ID NO: 410676 - DNA, 25 bp, Artificial
  probe
  misc_feature (1)..(25): SEQ ID NO: 5439; WAN024CQA; Start 322; Stop 346
cgaatcgtactataaacagccttgg

SEQ ID NO: 410677 - DNA, 25 bp, Artificial
  probe
  misc_feature (1)..(25): SEQ ID NO: 5439; WAN024CQA; Start 55; Stop 79
ttggagttggtcaatttcttcatcg

SEQ ID NO: 410678 - DNA, 25 bp, Artificial
  probe
  misc_feature (1)..(25): SEQ ID NO: 5439; WAN024CQA; Start 87; Stop 111
cgatactaaattcatcttccagagt

SEQ ID NO: 410679 - DNA, 25 bp, Artificial
  probe
  misc_feature (1)..(25): SEQ ID NO: 5439; WAN024CQA; Start 60; Stop 84
gttggtcaatttcttcatcgctgat

SEQ ID NO: 410680 - DNA, 25 bp, Artificial
  probe
  misc_feature (1)..(25): SEQ ID NO: 5439; WAN024CQA; Start 323; Stop 347
gaatcgtactataaacagccttggc

SEQ ID NO: 410681 - DNA, 25 bp, Artificial
  probe
  misc_feature (1)..(25): SEQ ID NO: 5439; WAN024CQA; Start 58; Stop 82
gagttggtcaatttcttcatcgctg

SEQ ID NO: 410682 - DNA, 25 bp, Artificial
  probe
  misc_feature (1)..(25): SEQ ID NO: 5440; WAN024GCK; Start 76; Stop 100
attgaggaatggaatatcgtgcgaa

SEQ ID NO: 410683 - DNA, 25 bp, Artificial
  probe
  misc_feature (1)..(25): SEQ ID NO: 5440; WAN024GCK; Start 88; Stop 112
aatatcgtgcgaaatgagaacaaag

SEQ ID NO: 410684 - DNA, 25 bp, Artificial
  probe
  misc_feature (1)..(25): SEQ ID NO: 5440; WAN024GCK; Start 87; Stop 111
gaatatcgtgcgaaatgagaacaaa

SEQ ID NO: 410685 - DNA, 25 bp, Artificial
  probe
  misc_feature (1)..(25): SEQ ID NO: 5440; WAN024GCK; Start 83; Stop 107
aatggaatatcgtgcgaaatgagaa

SEQ ID NO: 410686 - DNA, 25 bp, Artificial
  probe
  misc_feature (1)..(25): SEQ ID NO: 5440; WAN024GCK; Start 82; Stop 106
gaatggaatatcgtgcgaaatgaga

SEQ ID NO: 410687 - DNA, 25 bp, Artificial
  probe
  misc_feature (1)..(25): SEQ ID NO: 5440; WAN024GCK; Start 72; Stop 96
cgtcattgaggaatggaatatcgtg

SEQ ID NO: 410688 - DNA, 25 bp, Artificial
  probe
  misc_feature (1)..(25): SEQ ID NO: 5440; WAN024GCK; Start 84; Stop 108
atggaatatcgtgcgaaatgagaac

SEQ ID NO: 410689 - DNA, 25 bp, Artificial
  probe
  misc_feature (1)..(25): SEQ ID NO: 5440; WAN024GCK; Start 73; Stop 97
gtcattgaggaatggaatatcgtgc

SEQ ID NO: 410690 - DNA, 25 bp, Artificial
  probe
  misc_feature (1)..(25): SEQ ID NO: 5440; WAN024GCK; Start 89; Stop 113
atatcgtgcgaaatgagaacaaagg

SEQ ID NO: 410691 - DNA, 25 bp, Artificial
  probe
  misc_feature (1)..(25): SEQ ID NO: 5440; WAN024GCK; Start 86; Stop 110
ggaatatcgtgcgaaatgagaacaa

SEQ ID NO: 410692 - DNA, 25 bp, Artificial
  probe
  misc_feature (1)..(25): SEQ ID NO: 5440; WAN024GCK; Start 81; Stop 105
ggaatggaatatcgtgcgaaatgag

SEQ ID NO: 410693 - DNA, 25 bp, Artificial
  probe
  misc_feature (1)..(25): SEQ ID NO: 5440; WAN024GCK; Start 79; Stop 103
gaggaatggaatatcgtgcgaaatg

SEQ ID NO: 410694 - DNA, 25 bp, Artificial
  probe
  misc_feature (1)..(25): SEQ ID NO: 5440; WAN024GCK; Start 70; Stop 94
aacgtcattgaggaatggaatatcg

SEQ ID NO: 410695 - DNA, 25 bp, Artificial
  probe
  misc_feature (1)..(25): SEQ ID NO: 5440; WAN024GCK; Start 69; Stop 93
taacgtcattgaggaatggaatatc

SEQ ID NO: 410696 - DNA, 25 bp, Artificial
  probe
  misc_feature (1)..(25): SEQ ID NO: 5440; WAN024GCK; Start 80; Stop 104
aggaatggaatatcgtgcgaaatga

SEQ ID NO: 410697 - DNA, 25 bp, Artificial
  probe
  misc_feature (1)..(25): SEQ ID NO: 5440; WAN024GCK; Start 78; Stop 102
tgaggaatggaatatcgtgcgaaat

SEQ ID NO: 410698 - DNA, 25 bp, Artificial
  probe
  misc_feature (1)..(25): SEQ ID NO: 5440; WAN024GCK; Start 65; Stop 89
ttaataacgtcattgaggaatggaa

SEQ ID NO: 410699 - DNA, 25 bp, Artificial
  probe
  misc_feature (1)..(25): SEQ ID NO: 5440; WAN024GCK; Start 85; Stop 109
tggaatatcgtgcgaaatgagaaca

SEQ ID NO: 410700 - DNA, 25 bp, Artificial
  probe
  misc_feature (1)..(25): SEQ ID NO: 5440; WAN024GCK; Start 77; Stop 101
ttgaggaatggaatatcgtgcgaaa

SEQ ID NO: 410701 - DNA, 25 bp, Artificial
  probe
  misc_feature (1)..(25): SEQ ID NO: 5440; WAN024GCK; Start 67; Stop 91
aataacgtcattgaggaatggaata

SEQ ID NO: 410702 - DNA, 25 bp, Artificial
  probe
  misc_feature (1)..(25): SEQ ID NO: 5440; WAN024GCK; Start 66; Stop 90
taataacgtcattgaggaatggaat

SEQ ID NO: 410703 - DNA, 25 bp, Artificial
  probe
  misc_feature (1)..(25): SEQ ID NO: 5440; WAN024GCK; Start 64; Stop 88
attaataacgtcattgaggaatgga

SEQ ID NO: 410704 - DNA, 25 bp, Artificial
  probe
  misc_feature (1)..(25): SEQ ID NO: 5440; WAN024GCK; Start 68; Stop 92
ataacgtcattgaggaatggaatat

SEQ ID NO: 410705 - DNA, 25 bp, Artificial
  probe
  misc_feature (1)..(25): SEQ ID NO: 5440; WAN024GCK; Start 74; Stop 98
tcattgaggaatggaatatcgtgcg

SEQ ID NO: 410706 - DNA, 25 bp, Artificial
  probe
  misc_feature (1)..(25): SEQ ID NO: 5440; WAN024GCK; Start 75; Stop 99
cattgaggaatggaatatcgtgcga

SEQ ID NO: 410707 - DNA, 25 bp, Artificial
  probe
  misc_feature (1)..(25): SEQ ID NO: 5440; WAN024GCK; Start 197; Stop 221
atatcaggcttttcaaggagaagtt

SEQ ID NO: 410708 - DNA, 25 bp, Artificial
  probe
  misc_feature (1)..(25): SEQ ID NO: 5440; WAN024GCK; Start 198; Stop 222
tatcaggcttttcaaggagaagttt

SEQ ID NO: 410709 - DNA, 25 bp, Artificial
  probe
  misc_feature (1)..(25): SEQ ID NO: 5440; WAN024GCK; Start 199; Stop 223
atcaggcttttcaaggagaagtttt

SEQ ID NO: 410710 - DNA, 25 bp, Artificial
  probe
  misc_feature (1)..(25): SEQ ID NO: 5440; WAN024GCK; Start 71; Stop 95
acgtcattgaggaatggaatatcgt

SEQ ID NO: 410711 - DNA, 25 bp, Artificial
  probe
  misc_feature (1)..(25): SEQ ID NO: 5440; WAN024GCK; Start 205; Stop 229
cttttcaaggagaagttttgccaaa

SEQ ID NO: 410712 - DNA, 25 bp, Artificial
  probe
  misc_feature (1)..(25): SEQ ID NO: 5440; WAN024GCK; Start 200; Stop 224
tcaggcttttcaaggagaagttttg

SEQ ID NO: 410713 - DNA, 25 bp, Artificial
  probe
  misc_feature (1)..(25): SEQ ID NO: 5440; WAN024GCK; Start 36; Stop 60
gctgttgattttccacatgatagac

SEQ ID NO: 410714 - DNA, 25 bp, Artificial
  probe
  misc_feature (1)..(25): SEQ ID NO: 5440; WAN024GCK; Start 37; Stop 61
ctgttgattttccacatgatagaca

SEQ ID NO: 410715 - DNA, 25 bp, Artificial
  probe
  misc_feature (1)..(25): SEQ ID NO: 5441; WAN024DTW; Start 45; Stop 69
acatagatccaagcataacagcatt

SEQ ID NO: 410716 - DNA, 25 bp, Artificial
  probe
  misc_feature (1)..(25): SEQ ID NO: 5441; WAN024DTW; Start 44; Stop 68
aacatagatccaagcataacagcat

SEQ ID NO: 410717 - DNA, 25 bp, Artificial
  probe
  misc_feature (1)..(25): SEQ ID NO: 5441; WAN024DTW; Start 206; Stop 230
atcacacgagtagtacagatagaac

SEQ ID NO: 410718 - DNA, 25 bp, Artificial
  probe
  misc_feature (1)..(25): SEQ ID NO: 5441; WAN024DTW; Start 204; Stop 228
caatcacacgagtagtacagataga

SEQ ID NO: 410719 - DNA, 25 bp, Artificial
  probe
  misc_feature (1)..(25): SEQ ID NO: 5441; WAN024DTW; Start 203; Stop 227
gcaatcacacgagtagtacagatag

SEQ ID NO: 410720 - DNA, 25 bp, Artificial
  probe
  misc_feature (1)..(25): SEQ ID NO: 5441; WAN024DTW; Start 208; Stop 232
cacacgagtagtacagatagaacct

SEQ ID NO: 410721 - DNA, 25 bp, Artificial
  probe
  misc_feature (1)..(25): SEQ ID NO: 5441; WAN024DTW; Start 207; Stop 231
tcacacgagtagtacagatagaacc

SEQ ID NO: 410722 - DNA, 25 bp, Artificial
  probe
  misc_feature (1)..(25): SEQ ID NO: 5441; WAN024DTW; Start 202; Stop 226
agcaatcacacgagtagtacagata

SEQ ID NO: 410723 - DNA, 25 bp, Artificial
  probe
  misc_feature (1)..(25): SEQ ID NO: 5441; WAN024DTW; Start 205; Stop 229
aatcacacgagtagtacagatagaa

SEQ ID NO: 410724 - DNA, 25 bp, Artificial
  probe
  misc_feature (1)..(25): SEQ ID NO: 5441; WAN024DTW; Start 389; Stop 413
gtatcaataacaatcgcatccgctc

SEQ ID NO: 410725 - DNA, 25 bp, Artificial
  probe
  misc_feature (1)..(25): SEQ ID NO: 5441; WAN024DTW; Start 218; Stop 242
gtacagatagaacctggtccaatac

SEQ ID NO: 410726 - DNA, 25 bp, Artificial
  probe
  misc_feature (1)..(25): SEQ ID NO: 5441; WAN024DTW; Start 217; Stop 241
agtacagatagaacctggtccaata

SEQ ID NO: 410727 - DNA, 25 bp, Artificial
  probe
  misc_feature (1)..(25): SEQ ID NO: 5441; WAN024DTW; Start 216; Stop 240
tagtacagatagaacctggtccaat

SEQ ID NO: 410728 - DNA, 25 bp, Artificial
  probe
  misc_feature (1)..(25): SEQ ID NO: 5441; WAN024DTW; Start 215; Stop 239
gtagtacagatagaacctggtccaa

SEQ ID NO: 410729 - DNA, 25 bp, Artificial
  probe
  misc_feature (1)..(25): SEQ ID NO: 5441; WAN024DTW; Start 213; Stop 237
gagtagtacagatagaacctggtcc

SEQ ID NO: 410730 - DNA, 25 bp, Artificial
  probe
  misc_feature (1)..(25): SEQ ID NO: 5441; WAN024DTW; Start 209; Stop 233
acacgagtagtacagatagaacctg

SEQ ID NO: 410731 - DNA, 25 bp, Artificial
  probe
  misc_feature (1)..(25): SEQ ID NO: 5441; WAN024DTW; Start 388; Stop 412
agtatcaataacaatcgcatccgct

SEQ ID NO: 410732 - DNA, 25 bp, Artificial
  probe
  misc_feature (1)..(25): SEQ ID NO: 5441; WAN024DTW; Start 387; Stop 411
cagtatcaataacaatcgcatccgc

SEQ ID NO: 410733 - DNA, 25 bp, Artificial
  probe
  misc_feature (1)..(25): SEQ ID NO: 5441; WAN024DTW; Start 386; Stop 410
gcagtatcaataacaatcgcatccg

SEQ ID NO: 410734 - DNA, 25 bp, Artificial
  probe
  misc_feature (1)..(25): SEQ ID NO: 5441; WAN024DTW; Start 237; Stop 261
caataccaaccttaacaacgtctac

SEQ ID NO: 410735 - DNA, 25 bp, Artificial
  probe
  misc_feature (1)..(25): SEQ ID NO: 5441; WAN024DTW; Start 238; Stop 262
aataccaaccttaacaacgtctaca

SEQ ID NO: 410736 - DNA, 25 bp, Artificial
  probe
  misc_feature (1)..(25): SEQ ID NO: 5441; WAN024DTW; Start 219; Stop 243
tacagatagaacctggtccaatacc

SEQ ID NO: 410737 - DNA, 25 bp, Artificial
  probe
  misc_feature (1)..(25): SEQ ID NO: 5441; WAN024DTW; Start 212; Stop 236
cgagtagtacagatagaacctggtc

SEQ ID NO: 410738 - DNA, 25 bp, Artificial
  probe
  misc_feature (1)..(25): SEQ ID NO: 5441; WAN024DTW; Start 239; Stop 263
ataccaaccttaacaacgtctacac

SEQ ID NO: 410739 - DNA, 25 bp, Artificial
  probe
  misc_feature (1)..(25): SEQ ID NO: 5441; WAN024DTW; Start 236; Stop 260
ccaataccaaccttaacaacgtcta

SEQ ID NO: 410740 - DNA, 25 bp, Artificial
  probe
  misc_feature (1)..(25): SEQ ID NO: 5441; WAN024DTW; Start 92; Stop 116
acaatatctccagaatacttgatcc

SEQ ID NO: 410741 - DNA, 25 bp, Artificial
  probe
  misc_feature (1)..(25): SEQ ID NO: 5441; WAN024DTW; Start 214; Stop 238
agtagtacagatagaacctggtcca

SEQ ID NO: 410742 - DNA, 25 bp, Artificial
  probe
  misc_feature (1)..(25): SEQ ID NO: 5441; WAN024DTW; Start 201; Stop 225
cagcaatcacacgagtagtacagat

SEQ ID NO: 410743 - DNA, 25 bp, Artificial
  probe
  misc_feature (1)..(25): SEQ ID NO: 5441; WAN024DTW; Start 210; Stop 234
cacgagtagtacagatagaacctgg

SEQ ID NO: 410744 - DNA, 25 bp, Artificial
  probe
  misc_feature (1)..(25): SEQ ID NO: 5441; WAN024DTW; Start 302; Stop 326
atatttccagcaatcaaagtccgat

SEQ ID NO: 410745 - DNA, 25 bp, Artificial
  probe
  misc_feature (1)..(25): SEQ ID NO: 5441; WAN024DTW; Start 28; Stop 52
ttcatcagttccagcaaacatagat

SEQ ID NO: 410746 - DNA, 25 bp, Artificial
  probe
  misc_feature (1)..(25): SEQ ID NO: 5441; WAN024DTW; Start 373; Stop 397
agaatgaccatgtgcagtatcaata

SEQ ID NO: 410747 - DNA, 25 bp, Artificial
  probe
  misc_feature (1)..(25): SEQ ID NO: 5441; WAN024DTW; Start 375; Stop 399
aatgaccatgtgcagtatcaataac

SEQ ID NO: 410748 - DNA, 25 bp, Artificial
  probe
  misc_feature (1)..(25): SEQ ID NO: 5442; WAN024EZR; Start 43; Stop 67
caagttcaagttagccatccagaag

SEQ ID NO: 410749 - DNA, 25 bp, Artificial
  probe
  misc_feature (1)..(25): SEQ ID NO: 5442; WAN024EZR; Start 41; Stop 65
ttcaagttcaagttagccatccaga

SEQ ID NO: 410750 - DNA, 25 bp, Artificial
  probe
  misc_feature (1)..(25): SEQ ID NO: 5442; WAN024EZR; Start 47; Stop 71
ttcaagttagccatccagaagtctt

SEQ ID NO: 410751 - DNA, 25 bp, Artificial
  probe
  misc_feature (1)..(25): SEQ ID NO: 5442; WAN024EZR; Start 44; Stop 68
aagttcaagttagccatccagaagt

SEQ ID NO: 410752 - DNA, 25 bp, Artificial
  probe
  misc_feature (1)..(25): SEQ ID NO: 5442; WAN024EZR; Start 42; Stop 66
tcaagttcaagttagccatccagaa

SEQ ID NO: 410753 - DNA, 25 bp, Artificial
  probe
  misc_feature (1)..(25): SEQ ID NO: 5442; WAN024EZR; Start 45; Stop 69
agttcaagttagccatccagaagtc

SEQ ID NO: 410754 - DNA, 25 bp, Artificial
  probe
  misc_feature (1)..(25): SEQ ID NO: 5442; WAN024EZR; Start 46; Stop 70
gttcaagttagccatccagaagtct

SEQ ID NO: 410755 - DNA, 25 bp, Artificial
  probe
  misc_feature (1)..(25): SEQ ID NO: 5442; WAN024EZR; Start 48; Stop 72
tcaagttagccatccagaagtcttc

SEQ ID NO: 410756 - DNA, 25 bp, Artificial
  probe
  misc_feature (1)..(25): SEQ ID NO: 5442; WAN024EZR; Start 38; Stop 62
aatttcaagttcaagttagccatcc

SEQ ID NO: 410757 - DNA, 25 bp, Artificial
  probe
  misc_feature (1)..(25): SEQ ID NO: 5442; WAN024EZR; Start 39; Stop 63
atttcaagttcaagttagccatcca

SEQ ID NO: 410758 - DNA, 25 bp, Artificial
  probe
  misc_feature (1)..(25): SEQ ID NO: 5442; WAN024EZR; Start 40; Stop 64
tttcaagttcaagttagccatccag

SEQ ID NO: 410759 - DNA, 25 bp, Artificial
  probe
  misc_feature (1)..(25): SEQ ID NO: 5442; WAN024EZR; Start 37; Stop 61
aaatttcaagttcaagttagccatc

SEQ ID NO: 410760 - DNA, 25 bp, Artificial
  probe
  misc_feature (1)..(25): SEQ ID NO: 5442; WAN024EZR; Start 50; Stop 74
aagttagccatccagaagtcttctc

SEQ ID NO: 410761 - DNA, 25 bp, Artificial
  probe
  misc_feature (1)..(25): SEQ ID NO: 5442; WAN024EZR; Start 49; Stop 73
caagttagccatccagaagtcttct

SEQ ID NO: 410762 - DNA, 25 bp, Artificial
  probe
  misc_feature (1)..(25): SEQ ID NO: 5442; WAN024EZR; Start 36; Stop 60
taaatttcaagttcaagttagccat

SEQ ID NO: 410763 - DNA, 25 bp, Artificial
  probe
  misc_feature (1)..(25): SEQ ID NO: 5442; WAN024EZR; Start 35; Stop 59
ctaaatttcaagttcaagttagcca

SEQ ID NO: 410764 - DNA, 25 bp, Artificial
  probe
  misc_feature (1)..(25): SEQ ID NO: 5442; WAN024EZR; Start 51; Stop 75
agttagccatccagaagtcttctct

SEQ ID NO: 410765 - DNA, 25 bp, Artificial
  probe
  misc_feature (1)..(25): SEQ ID NO: 5442; WAN024EZR; Start 52; Stop 76
gttagccatccagaagtcttctctg

SEQ ID NO: 410766 - DNA, 25 bp, Artificial
  probe
  misc_feature (1)..(25): SEQ ID NO: 5442; WAN024EZR; Start 32; Stop 56
ttgctaaatttcaagttcaagttag

SEQ ID NO: 410767 - DNA, 25 bp, Artificial
  probe
  misc_feature (1)..(25): SEQ ID NO: 5442; WAN024EZR; Start 31; Stop 55
tttgctaaatttcaagttcaagtta

SEQ ID NO: 410768 - DNA, 25 bp, Artificial
  probe
  misc_feature (1)..(25): SEQ ID NO: 5442; WAN024EZR; Start 26; Stop 50
tccattttgctaaatttcaagttca

SEQ ID NO: 410769 - DNA, 25 bp, Artificial
  probe
  misc_feature (1)..(25): SEQ ID NO: 5442; WAN024EZR; Start 27; Stop 51
ccattttgctaaatttcaagttcaa

SEQ ID NO: 410770 - DNA, 25 bp, Artificial
  probe
  misc_feature (1)..(25): SEQ ID NO: 5442; WAN024EZR; Start 25; Stop 49
ttccattttgctaaatttcaagttc

SEQ ID NO: 410771 - DNA, 25 bp, Artificial
  probe
  misc_feature (1)..(25): SEQ ID NO: 5442; WAN024EZR; Start 30; Stop 54
ttttgctaaatttcaagttcaagtt

SEQ ID NO: 410772 - DNA, 25 bp, Artificial
  probe
  misc_feature (1)..(25): SEQ ID NO: 5442; WAN024EZR; Start 24; Stop 48
tttccattttgctaaatttcaagtt

SEQ ID NO: 410773 - DNA, 25 bp, Artificial
  probe
  misc_feature (1)..(25): SEQ ID NO: 5442; WAN024EZR; Start 29; Stop 53
attttgctaaatttcaagttcaagt

SEQ ID NO: 410774 - DNA, 25 bp, Artificial
  probe
  misc_feature (1)..(25): SEQ ID NO: 5442; WAN024EZR; Start 23; Stop 47
atttccattttgctaaatttcaagt

SEQ ID NO: 410775 - DNA, 25 bp, Artificial
  probe
  misc_feature (1)..(25): SEQ ID NO: 5442; WAN024EZR; Start 28; Stop 52
cattttgctaaatttcaagttcaag

SEQ ID NO: 410776 - DNA, 25 bp, Artificial
  probe
  misc_feature (1)..(25): SEQ ID NO: 5442; WAN024EZR; Start 22; Stop 46
tatttccattttgctaaatttcaag

SEQ ID NO: 410777 - DNA, 25 bp, Artificial
  probe
  misc_feature (1)..(25): SEQ ID NO: 5443; WAN024DHD; Start 90; Stop 114
taggtatgaacaaggaatcagtcag

SEQ ID NO: 410778 - DNA, 25 bp, Artificial
  probe
  misc_feature (1)..(25): SEQ ID NO: 5443; WAN024DHD; Start 92; Stop 116
ggtatgaacaaggaatcagtcagaa

SEQ ID NO: 410779 - DNA, 25 bp, Artificial
  probe
  misc_feature (1)..(25): SEQ ID NO: 5443; WAN024DHD; Start 79; Stop 103
ttgattgaggctaggtatgaacaag

SEQ ID NO: 410780 - DNA, 25 bp, Artificial
  probe
  misc_feature (1)..(25): SEQ ID NO: 5443; WAN024DHD; Start 89; Stop 113
ctaggtatgaacaaggaatcagtca

SEQ ID NO: 410781 - DNA, 25 bp, Artificial
  probe
  misc_feature (1)..(25): SEQ ID NO: 5443; WAN024DHD; Start 91; Stop 115
aggtatgaacaaggaatcagtcaga

SEQ ID NO: 410782 - DNA, 25 bp, Artificial
  probe
  misc_feature (1)..(25): SEQ ID NO: 5443; WAN024DHD; Start 78; Stop 102
gttgattgaggctaggtatgaacaa

SEQ ID NO: 410783 - DNA, 25 bp, Artificial
  probe
  misc_feature (1)..(25): SEQ ID NO: 5443; WAN024DHD; Start 76; Stop 100
gagttgattgaggctaggtatgaac

SEQ ID NO: 410784 - DNA, 25 bp, Artificial
  probe
  misc_feature (1)..(25): SEQ ID NO: 5443; WAN024DHD; Start 88; Stop 112
gctaggtatgaacaaggaatcagtc

SEQ ID NO: 410785 - DNA, 25 bp, Artificial
  probe
  misc_feature (1)..(25): SEQ ID NO: 5443; WAN024DHD; Start 77; Stop 101
agttgattgaggctaggtatgaaca

SEQ ID NO: 410786 - DNA, 25 bp, Artificial
  probe
  misc_feature (1)..(25): SEQ ID NO: 5443; WAN024DHD; Start 84; Stop 108
tgaggctaggtatgaacaaggaatc

SEQ ID NO: 410787 - DNA, 25 bp, Artificial
  probe
  misc_feature (1)..(25): SEQ ID NO: 5443; WAN024DHD; Start 83; Stop 107
ttgaggctaggtatgaacaaggaat

SEQ ID NO: 410788 - DNA, 25 bp, Artificial
  probe
  misc_feature (1)..(25): SEQ ID NO: 5443; WAN024DHD; Start 82; Stop 106
attgaggctaggtatgaacaaggaa

SEQ ID NO: 410789 - DNA, 25 bp, Artificial
  probe
  misc_feature (1)..(25): SEQ ID NO: 5443; WAN024DHD; Start 75; Stop 99
cgagttgattgaggctaggtatgaa

SEQ ID NO: 410790 - DNA, 25 bp, Artificial
  probe
  misc_feature (1)..(25): SEQ ID NO: 5443; WAN024DHD; Start 81; Stop 105
gattgaggctaggtatgaacaagga

SEQ ID NO: 410791 - DNA, 25 bp, Artificial
  probe
  misc_feature (1)..(25): SEQ ID NO: 5443; WAN024DHD; Start 86; Stop 110
aggctaggtatgaacaaggaatcag

SEQ ID NO: 410792 - DNA, 25 bp, Artificial
  probe
  misc_feature (1)..(25): SEQ ID NO: 5443; WAN024DHD; Start 85; Stop 109
gaggctaggtatgaacaaggaatca

SEQ ID NO: 410793 - DNA, 25 bp, Artificial
  probe
  misc_feature (1)..(25): SEQ ID NO: 5443; WAN024DHD; Start 80; Stop 104
tgattgaggctaggtatgaacaagg

SEQ ID NO: 410794 - DNA, 25 bp, Artificial
  probe
  misc_feature (1)..(25): SEQ ID NO: 5443; WAN024DHD; Start 87; Stop 111
ggctaggtatgaacaaggaatcagt

SEQ ID NO: 410795 - DNA, 25 bp, Artificial
  probe
  misc_feature (1)..(25): SEQ ID NO: 5443; WAN024DHD; Start 37; Stop 61
gaaatccttgaaagtgatatgcgag

SEQ ID NO: 410796 - DNA, 25 bp, Artificial
  probe
  misc_feature (1)..(25): SEQ ID NO: 5443; WAN024DHD; Start 38; Stop 62
aaatccttgaaagtgatatgcgagt

SEQ ID NO: 410797 - DNA, 25 bp, Artificial
  probe
  misc_feature (1)..(25): SEQ ID NO: 5443; WAN024DHD; Start 39; Stop 63
aatccttgaaagtgatatgcgagtg

SEQ ID NO: 410798 - DNA, 25 bp, Artificial
  probe
  misc_feature (1)..(25): SEQ ID NO: 5443; WAN024DHD; Start 93; Stop 117
gtatgaacaaggaatcagtcagaaa

SEQ ID NO: 410799 - DNA, 25 bp, Artificial
  probe
  misc_feature (1)..(25): SEQ ID NO: 5443; WAN024DHD; Start 36; Stop 60
ggaaatccttgaaagtgatatgcga

SEQ ID NO: 410800 - DNA, 25 bp, Artificial
  probe
  misc_feature (1)..(25): SEQ ID NO: 5443; WAN024DHD; Start 44; Stop 68
ttgaaagtgatatgcgagtggctat

SEQ ID NO: 410801 - DNA, 25 bp, Artificial
  probe
  misc_feature (1)..(25): SEQ ID NO: 5443; WAN024DHD; Start 34; Stop 58
gaggaaatccttgaaagtgatatgc

SEQ ID NO: 410802 - DNA, 25 bp, Artificial
  probe
  misc_feature (1)..(25): SEQ ID NO: 5443; WAN024DHD; Start 43; Stop 67
cttgaaagtgatatgcgagtggcta

SEQ ID NO: 410803 - DNA, 25 bp, Artificial
  probe
  misc_feature (1)..(25): SEQ ID NO: 5443; WAN024DHD; Start 40; Stop 64
atccttgaaagtgatatgcgagtgg

SEQ ID NO: 410804 - DNA, 25 bp, Artificial
  probe
  misc_feature (1)..(25): SEQ ID NO: 5443; WAN024DHD; Start 33; Stop 57
ggaggaaatccttgaaagtgatatg

SEQ ID NO: 410805 - DNA, 25 bp, Artificial
  probe
  misc_feature (1)..(25): SEQ ID NO: 5443; WAN024DHD; Start 35; Stop 59
aggaaatccttgaaagtgatatgcg

SEQ ID NO: 410806 - DNA, 25 bp, Artificial
  probe
  misc_feature (1)..(25): SEQ ID NO: 5443; WAN024DHD; Start 74; Stop 98
gcgagttgattgaggctaggtatga

SEQ ID NO: 410807 - DNA, 25 bp, Artificial
  probe
  misc_feature (1)..(25): SEQ ID NO: 5443; WAN024DHD; Start 45; Stop 69
tgaaagtgatatgcgagtggctatc

SEQ ID NO: 410808 - DNA, 25 bp, Artificial
  probe
  misc_feature (1)..(25): SEQ ID NO: 5443; WAN024DHD; Start 94; Stop 118
tatgaacaaggaatcagtcagaaaa

SEQ ID NO: 410809 - DNA, 25 bp, Artificial
  probe
  misc_feature (1)..(25): SEQ ID NO: 5443; WAN024DHD; Start 72; Stop 96
gagcgagttgattgaggctaggtat

SEQ ID NO: 410810 - DNA, 25 bp, Artificial
  probe
  misc_feature (1)..(25): SEQ ID NO: 5444; WAN024ETX; Start 123; Stop 147
aattggattgtatgtgacgatcatt

SEQ ID NO: 410811 - DNA, 25 bp, Artificial
  probe
  misc_feature (1)..(25): SEQ ID NO: 5444; WAN024ETX; Start 306; Stop 330
tgtggtttatcagattctcggtaat

SEQ ID NO: 410812 - DNA, 25 bp, Artificial
  probe
  misc_feature (1)..(25): SEQ ID NO: 5444; WAN024ETX; Start 305; Stop 329
atgtggtttatcagattctcggtaa

SEQ ID NO: 410813 - DNA, 25 bp, Artificial
  probe
  misc_feature (1)..(25): SEQ ID NO: 5444; WAN024ETX; Start 303; Stop 327
ttatgtggtttatcagattctcggt

SEQ ID NO: 410814 - DNA, 25 bp, Artificial
  probe
  misc_feature (1)..(25): SEQ ID NO: 5444; WAN024ETX; Start 180; Stop 204
tttaacaatgggattagtgggaagt

SEQ ID NO: 410815 - DNA, 25 bp, Artificial
  probe
  misc_feature (1)..(25): SEQ ID NO: 5444; WAN024ETX; Start 153; Stop 177
gttaggagctgatgtctattctctt

SEQ ID NO: 410816 - DNA, 25 bp, Artificial
  probe
  misc_feature (1)..(25): SEQ ID NO: 5444; WAN024ETX; Start 302; Stop 326
cttatgtggtttatcagattctcgg

SEQ ID NO: 410817 - DNA, 25 bp, Artificial
  probe
  misc_feature (1)..(25): SEQ ID NO: 5444; WAN024ETX; Start 304; Stop 328
tatgtggtttatcagattctcggta

SEQ ID NO: 410818 - DNA, 25 bp, Artificial
  probe
  misc_feature (1)..(25): SEQ ID NO: 5444; WAN024ETX; Start 182; Stop 206
taacaatgggattagtgggaagttt

SEQ ID NO: 410819 - DNA, 25 bp, Artificial
  probe
  misc_feature (1)..(25): SEQ ID NO: 5444; WAN024ETX; Start 269; Stop 293
ggaactggtcatttgtcttctactt

SEQ ID NO: 410820 - DNA, 25 bp, Artificial
  probe
  misc_feature (1)..(25): SEQ ID NO: 5444; WAN024ETX; Start 181; Stop 205
ttaacaatgggattagtgggaagtt

SEQ ID NO: 410821 - DNA, 25 bp, Artificial
  probe
  misc_feature (1)..(25): SEQ ID NO: 5444; WAN024ETX; Start 152; Stop 176
ggttaggagctgatgtctattctct

SEQ ID NO: 410822 - DNA, 25 bp, Artificial
  probe
  misc_feature (1)..(25): SEQ ID NO: 5444; WAN024ETX; Start 156; Stop 180
aggagctgatgtctattctcttatt

SEQ ID NO: 410823 - DNA, 25 bp, Artificial
  probe
  misc_feature (1)..(25): SEQ ID NO: 5444; WAN024ETX; Start 307; Stop 331
gtggtttatcagattctcggtaatt

SEQ ID NO: 410824 - DNA, 25 bp, Artificial
  probe
  misc_feature (1)..(25): SEQ ID NO: 5444; WAN024ETX; Start 301; Stop 325
acttatgtggtttatcagattctcg

SEQ ID NO: 410825 - DNA, 25 bp, Artificial
  probe
  misc_feature (1)..(25): SEQ ID NO: 5444; WAN024ETX; Start 275; Stop 299
ggtcatttgtcttctacttatttgc

SEQ ID NO: 410826 - DNA, 25 bp, Artificial
  probe
  misc_feature (1)..(25): SEQ ID NO: 5444; WAN024ETX; Start 267; Stop 291
ctggaactggtcatttgtcttctac

SEQ ID NO: 410827 - DNA, 25 bp, Artificial
  probe
  misc_feature (1)..(25): SEQ ID NO: 5444; WAN024ETX; Start 183; Stop 207
aacaatgggattagtgggaagtttc

SEQ ID NO: 410828 - DNA, 25 bp, Artificial
  probe
  misc_feature (1)..(25): SEQ ID NO: 5444; WAN024ETX; Start 270; Stop 294
gaactggtcatttgtcttctactta

SEQ ID NO: 410829 - DNA, 25 bp, Artificial
  probe
  misc_feature (1)..(25): SEQ ID NO: 5444; WAN024ETX; Start 154; Stop 178
ttaggagctgatgtctattctctta

SEQ ID NO: 410830 - DNA, 25 bp, Artificial
  probe
  misc_feature (1)..(25): SEQ ID NO: 5444; WAN024ETX; Start 268; Stop 292
tggaactggtcatttgtcttctact

SEQ ID NO: 410831 - DNA, 25 bp, Artificial
  probe
  misc_feature (1)..(25): SEQ ID NO: 5444; WAN024ETX; Start 298; Stop 322
gcaacttatgtggtttatcagattc

SEQ ID NO: 410832 - DNA, 25 bp, Artificial
  probe
  misc_feature (1)..(25): SEQ ID NO: 5444; WAN024ETX; Start 308; Stop 332
tggtttatcagattctcggtaattt

SEQ ID NO: 410833 - DNA, 25 bp, Artificial
  probe
  misc_feature (1)..(25): SEQ ID NO: 5444; WAN024ETX; Start 155; Stop 179
taggagctgatgtctattctcttat

SEQ ID NO: 410834 - DNA, 25 bp, Artificial
  probe
  misc_feature (1)..(25): SEQ ID NO: 5444; WAN024ETX; Start 272; Stop 296
actggtcatttgtcttctacttatt

SEQ ID NO: 410835 - DNA, 25 bp, Artificial
  probe
  misc_feature (1)..(25): SEQ ID NO: 5444; WAN024ETX; Start 271; Stop 295
aactggtcatttgtcttctacttat

SEQ ID NO: 410836 - DNA, 25 bp, Artificial
  probe
  misc_feature (1)..(25): SEQ ID NO: 5444; WAN024ETX; Start 124; Stop 148
attggattgtatgtgacgatcattt

SEQ ID NO: 410837 - DNA, 25 bp, Artificial
  probe
  misc_feature (1)..(25): SEQ ID NO: 5444; WAN024ETX; Start 148; Stop 172
ttagggttaggagctgatgtctatt

SEQ ID NO: 410838 - DNA, 25 bp, Artificial
  probe
  misc_feature (1)..(25): SEQ ID NO: 5444; WAN024ETX; Start 147; Stop 171
tttagggttaggagctgatgtctat

SEQ ID NO: 410839 - DNA, 25 bp, Artificial
  probe
  misc_feature (1)..(25): SEQ ID NO: 5444; WAN024ETX; Start 149; Stop 173
tagggttaggagctgatgtctattc

SEQ ID NO: 410840 - DNA, 25 bp, Artificial
  probe
  misc_feature (1)..(25): SEQ ID NO: 5444; WAN024ETX; Start 274; Stop 298
tggtcatttgtcttctacttatttg

SEQ ID NO: 410841 - DNA, 25 bp, Artificial
  probe
  misc_feature (1)..(25): SEQ ID NO: 5444; WAN024ETX; Start 266; Stop 290
gctggaactggtcatttgtcttcta

SEQ ID NO: 410842 - DNA, 25 bp, Artificial
  probe
  misc_feature (1)..(25): SEQ ID NO: 5444; WAN024ETX; Start 99; Stop 123
actatctacctatttaccacaaaca

SEQ ID NO: 410843 - DNA, 25 bp, Artificial
  probe
  misc_feature (1)..(25): SEQ ID NO: 5445; WAN024FIO; Start 41; Stop 65
atctcaacaagaaccaagtcctcat

SEQ ID NO: 410844 - DNA, 25 bp, Artificial
  probe
  misc_feature (1)..(25): SEQ ID NO: 5445; WAN024FIO; Start 39; Stop 63
caatctcaacaagaaccaagtcctc

SEQ ID NO: 410845 - DNA, 25 bp, Artificial
  probe
  misc_feature (1)..(25): SEQ ID NO: 5445; WAN024FIO; Start 184; Stop 208
aatactcatatcatgctcaacaggc

SEQ ID NO: 410846 - DNA, 25 bp, Artificial
  probe
  misc_feature (1)..(25): SEQ ID NO: 5445; WAN024FIO; Start 40; Stop 64
aatctcaacaagaaccaagtcctca

SEQ ID NO: 410847 - DNA, 25 bp, Artificial
  probe
  misc_feature (1)..(25): SEQ ID NO: 5445; WAN024FIO; Start 43; Stop 67
ctcaacaagaaccaagtcctcatct

SEQ ID NO: 410848 - DNA, 25 bp, Artificial
  probe
  misc_feature (1)..(25): SEQ ID NO: 5445; WAN024FIO; Start 42; Stop 66
tctcaacaagaaccaagtcctcatc

SEQ ID NO: 410849 - DNA, 25 bp, Artificial
  probe
  misc_feature (1)..(25): SEQ ID NO: 5445; WAN024FIO; Start 91; Stop 115
aataatcaaagaaccaaggcgaatc

SEQ ID NO: 410850 - DNA, 25 bp, Artificial
  probe
  misc_feature (1)..(25): SEQ ID NO: 5445; WAN024FIO; Start 84; Stop 108
tacgccaaataatcaaagaaccaag

SEQ ID NO: 410851 - DNA, 25 bp, Artificial
  probe
  misc_feature (1)..(25): SEQ ID NO: 5445; WAN024FIO; Start 210; Stop 234
agtttgcttctgtttcgtaaatcat

SEQ ID NO: 410852 - DNA, 25 bp, Artificial
  probe
  misc_feature (1)..(25): SEQ ID NO: 5445; WAN024FIO; Start 90; Stop 114
aaataatcaaagaaccaaggcgaat

SEQ ID NO: 410853 - DNA, 25 bp, Artificial
  probe
  misc_feature (1)..(25): SEQ ID NO: 5445; WAN024FIO; Start 83; Stop 107
ttacgccaaataatcaaagaaccaa

SEQ ID NO: 410854 - DNA, 25 bp, Artificial
  probe
  misc_feature (1)..(25): SEQ ID NO: 5445; WAN024FIO; Start 89; Stop 113
caaataatcaaagaaccaaggcgaa

SEQ ID NO: 410855 - DNA, 25 bp, Artificial
  probe
  misc_feature (1)..(25): SEQ ID NO: 5445; WAN024FIO; Start 209; Stop 233
aagtttgcttctgtttcgtaaatca

SEQ ID NO: 410856 - DNA, 25 bp, Artificial
  probe
  misc_feature (1)..(25): SEQ ID NO: 5445; WAN024FIO; Start 218; Stop 242
tctgtttcgtaaatcatattagccc

SEQ ID NO: 410857 - DNA, 25 bp, Artificial
  probe
  misc_feature (1)..(25): SEQ ID NO: 5445; WAN024FIO; Start 208; Stop 232
caagtttgcttctgtttcgtaaatc

SEQ ID NO: 410858 - DNA, 25 bp, Artificial
  probe
  misc_feature (1)..(25): SEQ ID NO: 5445; WAN024FIO; Start 82; Stop 106
attacgccaaataatcaaagaacca

SEQ ID NO: 410859 - DNA, 25 bp, Artificial
  probe
  misc_feature (1)..(25): SEQ ID NO: 5445; WAN024FIO; Start 268; Stop 292
cttagtttggaagaattgctctacg

SEQ ID NO: 410860 - DNA, 25 bp, Artificial
  probe
  misc_feature (1)..(25): SEQ ID NO: 5445; WAN024FIO; Start 81; Stop 105
cattacgccaaataatcaaagaacc

SEQ ID NO: 410861 - DNA, 25 bp, Artificial
  probe
  misc_feature (1)..(25): SEQ ID NO: 5445; WAN024FIO; Start 211; Stop 235
gtttgcttctgtttcgtaaatcata

SEQ ID NO: 410862 - DNA, 25 bp, Artificial
  probe
  misc_feature (1)..(25): SEQ ID NO: 5445; WAN024FIO; Start 92; Stop 116
ataatcaaagaaccaaggcgaatcc

SEQ ID NO: 410863 - DNA, 25 bp, Artificial
  probe
  misc_feature (1)..(25): SEQ ID NO: 5445; WAN024FIO; Start 80; Stop 104
tcattacgccaaataatcaaagaac

SEQ ID NO: 410864 - DNA, 25 bp, Artificial
  probe
  misc_feature (1)..(25): SEQ ID NO: 5445; WAN024FIO; Start 119; Stop 143
gatacatgaatcggtgcaatagtcg

SEQ ID NO: 410865 - DNA, 25 bp, Artificial
  probe
  misc_feature (1)..(25): SEQ ID NO: 5445; WAN024FIO; Start 88; Stop 112
ccaaataatcaaagaaccaaggcga

SEQ ID NO: 410866 - DNA, 25 bp, Artificial
  probe
  misc_feature (1)..(25): SEQ ID NO: 5445; WAN024FIO; Start 269; Stop 293
ttagtttggaagaattgctctacgc

SEQ ID NO: 410867 - DNA, 25 bp, Artificial
  probe
  misc_feature (1)..(25): SEQ ID NO: 5445; WAN024FIO; Start 38; Stop 62
gcaatctcaacaagaaccaagtcct

SEQ ID NO: 410868 - DNA, 25 bp, Artificial
  probe
  misc_feature (1)..(25): SEQ ID NO: 5445; WAN024FIO; Start 183; Stop 207
aaatactcatatcatgctcaacagg

SEQ ID NO: 410869 - DNA, 25 bp, Artificial
  probe
  misc_feature (1)..(25): SEQ ID NO: 5445; WAN024FIO; Start 85; Stop 109
acgccaaataatcaaagaaccaagg

SEQ ID NO: 410870 - DNA, 25 bp, Artificial
  probe
  misc_feature (1)..(25): SEQ ID NO: 5445; WAN024FIO; Start 45; Stop 69
caacaagaaccaagtcctcatcttc

SEQ ID NO: 410871 - DNA, 25 bp, Artificial
  probe
  misc_feature (1)..(25): SEQ ID NO: 5445; WAN024FIO; Start 120; Stop 144
atacatgaatcggtgcaatagtcgt

SEQ ID NO: 410872 - DNA, 25 bp, Artificial
  probe
  misc_feature (1)..(25): SEQ ID NO: 5445; WAN024FIO; Start 33; Stop 57
tactggcaatctcaacaagaaccaa

SEQ ID NO: 410873 - DNA, 25 bp, Artificial
  probe
  misc_feature (1)..(25): SEQ ID NO: 5445; WAN024FIO; Start 213; Stop 237
ttgcttctgtttcgtaaatcatatt

SEQ ID NO: 410874 - DNA, 25 bp, Artificial
  probe
  misc_feature (1)..(25): SEQ ID NO: 5445; WAN024FIO; Start 212; Stop 236
tttgcttctgtttcgtaaatcatat

SEQ ID NO: 410875 - DNA, 25 bp, Artificial
  probe
  misc_feature (1)..(25): SEQ ID NO: 5445; WAN024FIO; Start 44; Stop 68
tcaacaagaaccaagtcctcatctt

SEQ ID NO: 410876 - DNA, 25 bp, Artificial
  probe
  misc_feature (1)..(25): SEQ ID NO: 5446; WAN024DOL; Start 1; Stop 25
ttggaatacatgaaagttcttgaaa

SEQ ID NO: 410877 - DNA, 25 bp, Artificial
  probe
  misc_feature (1)..(25): SEQ ID NO: 5446; WAN024DOL; Start 31; Stop 55
catgggtttctagctaaggaagtag

SEQ ID NO: 410878 - DNA, 25 bp, Artificial
  probe
  misc_feature (1)..(25): SEQ ID NO: 5446; WAN024DOL; Start 28; Stop 52
tttcatgggtttctagctaaggaag

SEQ ID NO: 410879 - DNA, 25 bp, Artificial
  probe
  misc_feature (1)..(25): SEQ ID NO: 5446; WAN024DOL; Start 30; Stop 54
tcatgggtttctagctaaggaagta

SEQ ID NO: 410880 - DNA, 25 bp, Artificial
  probe
  misc_feature (1)..(25): SEQ ID NO: 5446; WAN024DOL; Start 34; Stop 58
gggtttctagctaaggaagtaggaa

SEQ ID NO: 410881 - DNA, 25 bp, Artificial
  probe
  misc_feature (1)..(25): SEQ ID NO: 5446; WAN024DOL; Start 32; Stop 56
atgggtttctagctaaggaagtagg

SEQ ID NO: 410882 - DNA, 25 bp, Artificial
  probe
  misc_feature (1)..(25): SEQ ID NO: 5446; WAN024DOL; Start 29; Stop 53
ttcatgggtttctagctaaggaagt

SEQ ID NO: 410883 - DNA, 25 bp, Artificial
  probe
  misc_feature (1)..(25): SEQ ID NO: 5446; WAN024DOL; Start 43; Stop 67
gctaaggaagtaggaaaagtatgta

SEQ ID NO: 410884 - DNA, 25 bp, Artificial
  probe
  misc_feature (1)..(25): SEQ ID NO: 5446; WAN024DOL; Start 42; Stop 66
agctaaggaagtaggaaaagtatgt

SEQ ID NO: 410885 - DNA, 25 bp, Artificial
  probe
  misc_feature (1)..(25): SEQ ID NO: 5446; WAN024DOL; Start 33; Stop 57
tgggtttctagctaaggaagtagga

SEQ ID NO: 410886 - DNA, 25 bp, Artificial
  probe
  misc_feature (1)..(25): SEQ ID NO: 5446; WAN024DOL; Start 47; Stop 71
aggaagtaggaaaagtatgtatcca

SEQ ID NO: 410887 - DNA, 25 bp, Artificial
  probe
  misc_feature (1)..(25): SEQ ID NO: 5446; WAN024DOL; Start 48; Stop 72
ggaagtaggaaaagtatgtatccag

SEQ ID NO: 410888 - DNA, 25 bp, Artificial
  probe
  misc_feature (1)..(25): SEQ ID NO: 5446; WAN024DOL; Start 35; Stop 59
ggtttctagctaaggaagtaggaaa

SEQ ID NO: 410889 - DNA, 25 bp, Artificial
  probe
  misc_feature (1)..(25): SEQ ID NO: 5446; WAN024DOL; Start 46; Stop 70
aaggaagtaggaaaagtatgtatcc

SEQ ID NO: 410890 - DNA, 25 bp, Artificial
  probe
  misc_feature (1)..(25): SEQ ID NO: 5446; WAN024DOL; Start 2; Stop 26
tggaatacatgaaagttcttgaaaa

SEQ ID NO: 410891 - DNA, 25 bp, Artificial
  probe
  misc_feature (1)..(25): SEQ ID NO: 5446; WAN024DOL; Start 52; Stop 76
gtaggaaaagtatgtatccagatga

SEQ ID NO: 410892 - DNA, 25 bp, Artificial
  probe
  misc_feature (1)..(25): SEQ ID NO: 5446; WAN024DOL; Start 51; Stop 75
agtaggaaaagtatgtatccagatg

SEQ ID NO: 410893 - DNA, 25 bp, Artificial
  probe
  misc_feature (1)..(25): SEQ ID NO: 5446; WAN024DOL; Start 49; Stop 73
gaagtaggaaaagtatgtatccaga

SEQ ID NO: 410894 - DNA, 25 bp, Artificial
  probe
  misc_feature (1)..(25): SEQ ID NO: 5446; WAN024DOL; Start 26; Stop 50
attttcatgggtttctagctaagga

SEQ ID NO: 410895 - DNA, 25 bp, Artificial
  probe
  misc_feature (1)..(25): SEQ ID NO: 5446; WAN024DOL; Start 25; Stop 49
aattttcatgggtttctagctaagg

SEQ ID NO: 410896 - DNA, 25 bp, Artificial
  probe
  misc_feature (1)..(25): SEQ ID NO: 5446; WAN024DOL; Start 27; Stop 51
ttttcatgggtttctagctaaggaa

SEQ ID NO: 410897 - DNA, 25 bp, Artificial
  probe
  misc_feature (1)..(25): SEQ ID NO: 5446; WAN024DOL; Start 38; Stop 62
ttctagctaaggaagtaggaaaagt

SEQ ID NO: 410898 - DNA, 25 bp, Artificial
  probe
  misc_feature (1)..(25): SEQ ID NO: 5446; WAN024DOL; Start 50; Stop 74
aagtaggaaaagtatgtatccagat

SEQ ID NO: 410899 - DNA, 25 bp, Artificial
  probe
  misc_feature (1)..(25): SEQ ID NO: 5446; WAN024DOL; Start 39; Stop 63
tctagctaaggaagtaggaaaagta

SEQ ID NO: 410900 - DNA, 25 bp, Artificial
  probe
  misc_feature (1)..(25): SEQ ID NO: 5446; WAN024DOL; Start 54; Stop 78
aggaaaagtatgtatccagatgata

SEQ ID NO: 410901 - DNA, 25 bp, Artificial
  probe
  misc_feature (1)..(25): SEQ ID NO: 5446; WAN024DOL; Start 53; Stop 77
taggaaaagtatgtatccagatgat

SEQ ID NO: 410902 - DNA, 25 bp, Artificial
  probe
  misc_feature (1)..(25): SEQ ID NO: 5446; WAN024DOL; Start 55; Stop 79
ggaaaagtatgtatccagatgatag

SEQ ID NO: 410903 - DNA, 25 bp, Artificial
  probe
  misc_feature (1)..(25): SEQ ID NO: 5446; WAN024DOL; Start 24; Stop 48
aaattttcatgggtttctagctaag

SEQ ID NO: 410904 - DNA, 25 bp, Artificial
  probe
  misc_feature (1)..(25): SEQ ID NO: 5446; WAN024DOL; Start 3; Stop 27
ggaatacatgaaagttcttgaaaat

SEQ ID NO: 410905 - DNA, 25 bp, Artificial
  probe
  misc_feature (1)..(25): SEQ ID NO: 5446; WAN024DOL; Start 41; Stop 65
tagctaaggaagtaggaaaagtatg

SEQ ID NO: 410906 - DNA, 25 bp, Artificial
  probe
  misc_feature (1)..(25): SEQ ID NO: 5446; WAN024DOL; Start 45; Stop 69
taaggaagtaggaaaagtatgtatc

SEQ ID NO: 410907 - DNA, 25 bp, Artificial
  probe
  misc_feature (1)..(25): SEQ ID NO: 5446; WAN024DOL; Start 44; Stop 68
ctaaggaagtaggaaaagtatgtat

SEQ ID NO: 410908 - DNA, 25 bp, Artificial
  probe
  misc_feature (1)..(25): SEQ ID NO: 5446; WAN024DOL; Start 56; Stop 80
gaaaagtatgtatccagatgatagt

SEQ ID NO: 410909 - DNA, 25 bp, Artificial
  probe
  misc_feature (1)..(25): SEQ ID NO: 5447; WAN024GHO; Start 532; Stop 556
actaactaccactacatcgttccta

SEQ ID NO: 410910 - DNA, 25 bp, Artificial
  probe
  misc_feature (1)..(25): SEQ ID NO: 5447; WAN024GHO; Start 529; Stop 553
aacactaactaccactacatcgttc

SEQ ID NO: 410911 - DNA, 25 bp, Artificial
  probe
  misc_feature (1)..(25): SEQ ID NO: 5447; WAN024GHO; Start 533; Stop 557
ctaactaccactacatcgttcctaa

SEQ ID NO: 410912 - DNA, 25 bp, Artificial
  probe
  misc_feature (1)..(25): SEQ ID NO: 5447; WAN024GHO; Start 1855; Stop 1879
cgtgaagacatctctatcaaggatt

SEQ ID NO: 410913 - DNA, 25 bp, Artificial
  probe
  misc_feature (1)..(25): SEQ ID NO: 5447; WAN024GHO; Start 1856; Stop 1880
gtgaagacatctctatcaaggattc

SEQ ID NO: 410914 - DNA, 25 bp, Artificial
  probe
  misc_feature (1)..(25): SEQ ID NO: 5447; WAN024GHO; Start 531; Stop 555
cactaactaccactacatcgttcct

SEQ ID NO: 410915 - DNA, 25 bp, Artificial
  probe
  misc_feature (1)..(25): SEQ ID NO: 5447; WAN024GHO; Start 530; Stop 554
acactaactaccactacatcgttcc

SEQ ID NO: 410916 - DNA, 25 bp, Artificial
  probe
  misc_feature (1)..(25): SEQ ID NO: 5447; WAN024GHO; Start 1652; Stop 1676
acttgtcaggatacctcttctctaa

SEQ ID NO: 410917 - DNA, 25 bp, Artificial
  probe
  misc_feature (1)..(25): SEQ ID NO: 5447; WAN024GHO; Start 1651; Stop 1675
aacttgtcaggatacctcttctcta

SEQ ID NO: 410918 - DNA, 25 bp, Artificial
  probe
  misc_feature (1)..(25): SEQ ID NO: 5447; WAN024GHO; Start 1616; Stop 1640
ttgagcgtaatgacatggttgagta

SEQ ID NO: 410919 - DNA, 25 bp, Artificial
  probe
  misc_feature (1)..(25): SEQ ID NO: 5447; WAN024GHO; Start 1173; Stop 1197
taatgaagaatttgaaccagcactc

SEQ ID NO: 410920 - DNA, 25 bp, Artificial
  probe
  misc_feature (1)..(25): SEQ ID NO: 5447; WAN024GHO; Start 1172; Stop 1196
ctaatgaagaatttgaaccagcact

SEQ ID NO: 410921 - DNA, 25 bp, Artificial
  probe
  misc_feature (1)..(25): SEQ ID NO: 5447; WAN024GHO; Start 536; Stop 560
actaccactacatcgttcctaaatt

SEQ ID NO: 410922 - DNA, 25 bp, Artificial
  probe
  misc_feature (1)..(25): SEQ ID NO: 5447; WAN024GHO; Start 1167; Stop 1191
aactgctaatgaagaatttgaacca

SEQ ID NO: 410923 - DNA, 25 bp, Artificial
  probe
  misc_feature (1)..(25): SEQ ID NO: 5447; WAN024GHO; Start 535; Stop 559
aactaccactacatcgttcctaaat

SEQ ID NO: 410924 - DNA, 25 bp, Artificial
  probe
  misc_feature (1)..(25): SEQ ID NO: 5447; WAN024GHO; Start 534; Stop 558
taactaccactacatcgttcctaaa

SEQ ID NO: 410925 - DNA, 25 bp, Artificial
  probe
  misc_feature (1)..(25): SEQ ID NO: 5447; WAN024GHO; Start 896; Stop 920
ttcaaacttatttcggtgatgttcg

SEQ ID NO: 410926 - DNA, 25 bp, Artificial
  probe
  misc_feature (1)..(25): SEQ ID NO: 5447; WAN024GHO; Start 1396; Stop 1420
gaacgtgaagctatccaagaagaag

SEQ ID NO: 410927 - DNA, 25 bp, Artificial
  probe
  misc_feature (1)..(25): SEQ ID NO: 5447; WAN024GHO; Start 1854; Stop 1878
acgtgaagacatctctatcaaggat

SEQ ID NO: 410928 - DNA, 25 bp, Artificial
  probe
  misc_feature (1)..(25): SEQ ID NO: 5447; WAN024GHO; Start 1166; Stop 1190
caactgctaatgaagaatttgaacc

SEQ ID NO: 410929 - DNA, 25 bp, Artificial
  probe
  misc_feature (1)..(25): SEQ ID NO: 5447; WAN024GHO; Start 899; Stop 923
aaacttatttcggtgatgttcgtga

SEQ ID NO: 410930 - DNA, 25 bp, Artificial
  probe
  misc_feature (1)..(25): SEQ ID NO: 5447; WAN024GHO; Start 898; Stop 922
caaacttatttcggtgatgttcgtg

SEQ ID NO: 410931 - DNA, 25 bp, Artificial
  probe
  misc_feature (1)..(25): SEQ ID NO: 5447; WAN024GHO; Start 2172; Stop 2196
aaaccttgaaatcttggacgaactc

SEQ ID NO: 410932 - DNA, 25 bp, Artificial
  probe
  misc_feature (1)..(25): SEQ ID NO: 5447; WAN024GHO; Start 1174; Stop 1198
aatgaagaatttgaaccagcactct

SEQ ID NO: 410933 - DNA, 25 bp, Artificial
  probe
  misc_feature (1)..(25): SEQ ID NO: 5447; WAN024GHO; Start 1812; Stop 1836
tatgttgactggacctgttaccatc

SEQ ID NO: 410934 - DNA, 25 bp, Artificial
  probe
  misc_feature (1)..(25): SEQ ID NO: 5447; WAN024GHO; Start 1395; Stop 1419
agaacgtgaagctatccaagaagaa

SEQ ID NO: 410935 - DNA, 25 bp, Artificial
  probe
  misc_feature (1)..(25): SEQ ID NO: 5447; WAN024GHO; Start 1617; Stop 1641
tgagcgtaatgacatggttgagtac

SEQ ID NO: 410936 - DNA, 25 bp, Artificial
  probe
  misc_feature (1)..(25): SEQ ID NO: 5447; WAN024GHO; Start 897; Stop 921
tcaaacttatttcggtgatgttcgt

SEQ ID NO: 410937 - DNA, 25 bp, Artificial
  probe
  misc_feature (1)..(25): SEQ ID NO: 5447; WAN024GHO; Start 1811; Stop 1835
gtatgttgactggacctgttaccat

SEQ ID NO: 410938 - DNA, 25 bp, Artificial
  probe
  misc_feature (1)..(25): SEQ ID NO: 5447; WAN024GHO; Start 852; Stop 876
ttacaacaaactcttggctgacaaa

SEQ ID NO: 410939 - DNA, 25 bp, Artificial
  probe
  misc_feature (1)..(25): SEQ ID NO: 5447; WAN024GHO; Start 851; Stop 875
tttacaacaaactcttggctgacaa

SEQ ID NO: 410940 - DNA, 25 bp, Artificial
  probe
  misc_feature (1)..(25): SEQ ID NO: 5447; WAN024GHO; Start 1165; Stop 1189
acaactgctaatgaagaatttgaac

SEQ ID NO: 410941 - DNA, 25 bp, Artificial
  probe
  misc_feature (1)..(25): SEQ ID NO: 5447; WAN024GHO; Start 1168; Stop 1192
actgctaatgaagaatttgaaccag

SEQ ID NO: 410942 - DNA, 25 bp, Artificial
  probe
  misc_feature (1)..(25): SEQ ID NO: 5448; WAN024B6F; Start 11; Stop 35
ttggctctataatttctgtagtggg

SEQ ID NO: 410943 - DNA, 25 bp, Artificial
  probe
  misc_feature (1)..(25): SEQ ID NO: 5448; WAN024B6F; Start 201; Stop 225
tgttctgaaataccaaacccatcta

SEQ ID NO: 410944 - DNA, 25 bp, Artificial
  probe
  misc_feature (1)..(25): SEQ ID NO: 5448; WAN024B6F; Start 204; Stop 228
tctgaaataccaaacccatctagtc

SEQ ID NO: 410945 - DNA, 25 bp, Artificial
  probe
  misc_feature (1)..(25): SEQ ID NO: 5448; WAN024B6F; Start 146; Stop 170
ttaagaataccacagatttgctcgg

SEQ ID NO: 410946 - DNA, 25 bp, Artificial
  probe
  misc_feature (1)..(25): SEQ ID NO: 5448; WAN024B6F; Start 203; Stop 227
ttctgaaataccaaacccatctagt

SEQ ID NO: 410947 - DNA, 25 bp, Artificial
  probe
  misc_feature (1)..(25): SEQ ID NO: 5448; WAN024B6F; Start 47; Stop 71
caggaattatagggtcgtttcttgt

SEQ ID NO: 410948 - DNA, 25 bp, Artificial
  probe
  misc_feature (1)..(25): SEQ ID NO: 5448; WAN024B6F; Start 195; Stop 219
cttgtctgttctgaaataccaaacc

SEQ ID NO: 410949 - DNA, 25 bp, Artificial
  probe
  misc_feature (1)..(25): SEQ ID NO: 5448; WAN024B6F; Start 194; Stop 218
tcttgtctgttctgaaataccaaac

SEQ ID NO: 410950 - DNA, 25 bp, Artificial
  probe
  misc_feature (1)..(25): SEQ ID NO: 5448; WAN024B6F; Start 200; Stop 224
ctgttctgaaataccaaacccatct

SEQ ID NO: 410951 - DNA, 25 bp, Artificial
  probe
  misc_feature (1)..(25): SEQ ID NO: 5448; WAN024B6F; Start 48; Stop 72
aggaattatagggtcgtttcttgta

SEQ ID NO: 410952 - DNA, 25 bp, Artificial
  probe
  misc_feature (1)..(25): SEQ ID NO: 5448; WAN024B6F; Start 191; Stop 215
aaatcttgtctgttctgaaatacca

SEQ ID NO: 410953 - DNA, 25 bp, Artificial
  probe
  misc_feature (1)..(25): SEQ ID NO: 5448; WAN024B6F; Start 199; Stop 223
tctgttctgaaataccaaacccatc

SEQ ID NO: 410954 - DNA, 25 bp, Artificial
  probe
  misc_feature (1)..(25): SEQ ID NO: 5448; WAN024B6F; Start 49; Stop 73
ggaattatagggtcgtttcttgtag

SEQ ID NO: 410955 - DNA, 25 bp, Artificial
  probe
  misc_feature (1)..(25): SEQ ID NO: 5448; WAN024B6F; Start 10; Stop 34
tttggctctataatttctgtagtgg

SEQ ID NO: 410956 - DNA, 25 bp, Artificial
  probe
  misc_feature (1)..(25): SEQ ID NO: 5448; WAN024B6F; Start 198; Stop 222
gtctgttctgaaataccaaacccat

SEQ ID NO: 410957 - DNA, 25 bp, Artificial
  probe
  misc_feature (1)..(25): SEQ ID NO: 5448; WAN024B6F; Start 46; Stop 70
ccaggaattatagggtcgtttcttg

SEQ ID NO: 410958 - DNA, 25 bp, Artificial
  probe
  misc_feature (1)..(25): SEQ ID NO: 5448; WAN024B6F; Start 202; Stop 226
gttctgaaataccaaacccatctag

SEQ ID NO: 410959 - DNA, 25 bp, Artificial
  probe
  misc_feature (1)..(25): SEQ ID NO: 5448; WAN024B6F; Start 864; Stop 888
tatgaaccgagtacgaatccaaatc

SEQ ID NO: 410960 - DNA, 25 bp, Artificial
  probe
  misc_feature (1)..(25): SEQ ID NO: 5448; WAN024B6F; Start 863; Stop 887
ctatgaaccgagtacgaatccaaat

SEQ ID NO: 410961 - DNA, 25 bp, Artificial
  probe
  misc_feature (1)..(25): SEQ ID NO: 5448; WAN024B6F; Start 549; Stop 573
gagggaatttaagtttgaaaccgat

SEQ ID NO: 410962 - DNA, 25 bp, Artificial
  probe
  misc_feature (1)..(25): SEQ ID NO: 5448; WAN024B6F; Start 205; Stop 229
ctgaaataccaaacccatctagtcg

SEQ ID NO: 410963 - DNA, 25 bp, Artificial
  probe
  misc_feature (1)..(25): SEQ ID NO: 5448; WAN024B6F; Start 555; Stop 579
atttaagtttgaaaccgattggacc

SEQ ID NO: 410964 - DNA, 25 bp, Artificial
  probe
  misc_feature (1)..(25): SEQ ID NO: 5448; WAN024B6F; Start 208; Stop 232
aaataccaaacccatctagtcgttc

SEQ ID NO: 410965 - DNA, 25 bp, Artificial
  probe
  misc_feature (1)..(25): SEQ ID NO: 5448; WAN024B6F; Start 207; Stop 231
gaaataccaaacccatctagtcgtt

SEQ ID NO: 410966 - DNA, 25 bp, Artificial
  probe
  misc_feature (1)..(25): SEQ ID NO: 5448; WAN024B6F; Start 147; Stop 171
taagaataccacagatttgctcgga

SEQ ID NO: 410967 - DNA, 25 bp, Artificial
  probe
  misc_feature (1)..(25): SEQ ID NO: 5448; WAN024B6F; Start 552; Stop 576
ggaatttaagtttgaaaccgattgg

SEQ ID NO: 410968 - DNA, 25 bp, Artificial
  probe
  misc_feature (1)..(25): SEQ ID NO: 5448; WAN024B6F; Start 551; Stop 575
gggaatttaagtttgaaaccgattg

SEQ ID NO: 410969 - DNA, 25 bp, Artificial
  probe
  misc_feature (1)..(25): SEQ ID NO: 5448; WAN024B6F; Start 550; Stop 574
agggaatttaagtttgaaaccgatt

SEQ ID NO: 410970 - DNA, 25 bp, Artificial
  probe
  misc_feature (1)..(25): SEQ ID NO: 5448; WAN024B6F; Start 547; Stop 571
ctgagggaatttaagtttgaaaccg

SEQ ID NO: 410971 - DNA, 25 bp, Artificial
  probe
  misc_feature (1)..(25): SEQ ID NO: 5448; WAN024B6F; Start 291; Stop 315
atacgacttccagaaagcctctaaa

SEQ ID NO: 410972 - DNA, 25 bp, Artificial
  probe
  misc_feature (1)..(25): SEQ ID NO: 5448; WAN024B6F; Start 290; Stop 314
aatacgacttccagaaagcctctaa

SEQ ID NO: 410973 - DNA, 25 bp, Artificial
  probe
  misc_feature (1)..(25): SEQ ID NO: 5448; WAN024B6F; Start 289; Stop 313
aaatacgacttccagaaagcctcta

SEQ ID NO: 410974 - DNA, 25 bp, Artificial
  probe
  misc_feature (1)..(25): SEQ ID NO: 5448; WAN024B6F; Start 113; Stop 137
ccaactcattagaaagggttcatat

SEQ ID NO: 410975 - DNA, 25 bp, Artificial
  probe
  misc_feature (1)..(25): SEQ ID NO: 5449; WAN024GJN; Start 34; Stop 58
tcagatgaacgatacctttacttgg

SEQ ID NO: 410976 - DNA, 25 bp, Artificial
  probe
  misc_feature (1)..(25): SEQ ID NO: 5449; WAN024GJN; Start 15; Stop 39
ttaccttcaaattcgctgttcagat

SEQ ID NO: 410977 - DNA, 25 bp, Artificial
  probe
  misc_feature (1)..(25): SEQ ID NO: 5449; WAN024GJN; Start 14; Stop 38
tttaccttcaaattcgctgttcaga

SEQ ID NO: 410978 - DNA, 25 bp, Artificial
  probe
  misc_feature (1)..(25): SEQ ID NO: 5449; WAN024GJN; Start 16; Stop 40
taccttcaaattcgctgttcagatg

SEQ ID NO: 410979 - DNA, 25 bp, Artificial
  probe
  misc_feature (1)..(25): SEQ ID NO: 5449; WAN024GJN; Start 33; Stop 57
ttcagatgaacgatacctttacttg

SEQ ID NO: 410980 - DNA, 25 bp, Artificial
  probe
  misc_feature (1)..(25): SEQ ID NO: 5449; WAN024GJN; Start 207; Stop 231
ttatcataagttgctacacttccga

SEQ ID NO: 410981 - DNA, 25 bp, Artificial
  probe
  misc_feature (1)..(25): SEQ ID NO: 5449; WAN024GJN; Start 210; Stop 234
tcataagttgctacacttccgatac

SEQ ID NO: 410982 - DNA, 25 bp, Artificial
  probe
  misc_feature (1)..(25): SEQ ID NO: 5449; WAN024GJN; Start 209; Stop 233
atcataagttgctacacttccgata

SEQ ID NO: 410983 - DNA, 25 bp, Artificial
  probe
  misc_feature (1)..(25): SEQ ID NO: 5449; WAN024GJN; Start 208; Stop 232
tatcataagttgctacacttccgat

SEQ ID NO: 410984 - DNA, 25 bp, Artificial
  probe
  misc_feature (1)..(25): SEQ ID NO: 5449; WAN024GJN; Start 211; Stop 235
cataagttgctacacttccgatacc

SEQ ID NO: 410985 - DNA, 25 bp, Artificial
  probe
  misc_feature (1)..(25): SEQ ID NO: 5449; WAN024GJN; Start 212; Stop 236
ataagttgctacacttccgatacca

SEQ ID NO: 410986 - DNA, 25 bp, Artificial
  probe
  misc_feature (1)..(25): SEQ ID NO: 5449; WAN024GJN; Start 213; Stop 237
taagttgctacacttccgataccag

SEQ ID NO: 410987 - DNA, 25 bp, Artificial
  probe
  misc_feature (1)..(25): SEQ ID NO: 5449; WAN024GJN; Start 17; Stop 41
accttcaaattcgctgttcagatga

SEQ ID NO: 410988 - DNA, 25 bp, Artificial
  probe
  misc_feature (1)..(25): SEQ ID NO: 5449; WAN024GJN; Start 13; Stop 37
ttttaccttcaaattcgctgttcag

SEQ ID NO: 410989 - DNA, 25 bp, Artificial
  probe
  misc_feature (1)..(25): SEQ ID NO: 5449; WAN024GJN; Start 18; Stop 42
ccttcaaattcgctgttcagatgaa

SEQ ID NO: 410990 - DNA, 25 bp, Artificial
  probe
  misc_feature (1)..(25): SEQ ID NO: 5449; WAN024GJN; Start 24; Stop 48
aattcgctgttcagatgaacgatac

SEQ ID NO: 410991 - DNA, 25 bp, Artificial
  probe
  misc_feature (1)..(25): SEQ ID NO: 5449; WAN024GJN; Start 31; Stop 55
tgttcagatgaacgatacctttact

SEQ ID NO: 410992 - DNA, 25 bp, Artificial
  probe
  misc_feature (1)..(25): SEQ ID NO: 5449; WAN024GJN; Start 30; Stop 54
ctgttcagatgaacgatacctttac

SEQ ID NO: 410993 - DNA, 25 bp, Artificial
  probe
  misc_feature (1)..(25): SEQ ID NO: 5449; WAN024GJN; Start 29; Stop 53
gctgttcagatgaacgataccttta

SEQ ID NO: 410994 - DNA, 25 bp, Artificial
  probe
  misc_feature (1)..(25): SEQ ID NO: 5449; WAN024GJN; Start 32; Stop 56
gttcagatgaacgatacctttactt

SEQ ID NO: 410995 - DNA, 25 bp, Artificial
  probe
  misc_feature (1)..(25): SEQ ID NO: 5449; WAN024GJN; Start 23; Stop 47
aaattcgctgttcagatgaacgata

SEQ ID NO: 410996 - DNA, 25 bp, Artificial
  probe
  misc_feature (1)..(25): SEQ ID NO: 5449; WAN024GJN; Start 224; Stop 248
acttccgataccagcttgctgaatt

SEQ ID NO: 410997 - DNA, 25 bp, Artificial
  probe
  misc_feature (1)..(25): SEQ ID NO: 5449; WAN024GJN; Start 19; Stop 43
cttcaaattcgctgttcagatgaac

SEQ ID NO: 410998 - DNA, 25 bp, Artificial
  probe
  misc_feature (1)..(25): SEQ ID NO: 5449; WAN024GJN; Start 225; Stop 249
cttccgataccagcttgctgaattt

SEQ ID NO: 410999 - DNA, 25 bp, Artificial
  probe
  misc_feature (1)..(25): SEQ ID NO: 5449; WAN024GJN; Start 25; Stop 49
attcgctgttcagatgaacgatacc

SEQ ID NO: 411000 - DNA, 25 bp, Artificial
  probe
  misc_feature (1)..(25): SEQ ID NO: 5449; WAN024GJN; Start 214; Stop 238
aagttgctacacttccgataccagc

SEQ ID NO: 411001 - DNA, 25 bp, Artificial
  probe
  misc_feature (1)..(25): SEQ ID NO: 5449; WAN024GJN; Start 22; Stop 46
caaattcgctgttcagatgaacgat

SEQ ID NO: 411002 - DNA, 25 bp, Artificial
  probe
  misc_feature (1)..(25): SEQ ID NO: 5449; WAN024GJN; Start 217; Stop 241
ttgctacacttccgataccagcttg

SEQ ID NO: 411003 - DNA, 25 bp, Artificial
  probe
  misc_feature (1)..(25): SEQ ID NO: 5449; WAN024GJN; Start 216; Stop 240
gttgctacacttccgataccagctt

SEQ ID NO: 411004 - DNA, 25 bp, Artificial
  probe
  misc_feature (1)..(25): SEQ ID NO: 5449; WAN024GJN; Start 20; Stop 44
ttcaaattcgctgttcagatgaacg

SEQ ID NO: 411005 - DNA, 25 bp, Artificial
  probe
  misc_feature (1)..(25): SEQ ID NO: 5449; WAN024GJN; Start 27; Stop 51
tcgctgttcagatgaacgatacctt

SEQ ID NO: 411006 - DNA, 25 bp, Artificial
  probe
  misc_feature (1)..(25): SEQ ID NO: 5449; WAN024GJN; Start 26; Stop 50
ttcgctgttcagatgaacgatacct

SEQ ID NO: 411007 - DNA, 25 bp, Artificial
  probe
  misc_feature (1)..(25): SEQ ID NO: 5449; WAN024GJN; Start 226; Stop 250
ttccgataccagcttgctgaatttt

SEQ ID NO: 411008 - DNA, 25 bp, Artificial
  probe
  misc_feature (1)..(25): SEQ ID NO: 5450; WAN024DP4; Start 77; Stop 101
tttcttcatcatctgctaaatctct

SEQ ID NO: 411009 - DNA, 25 bp, Artificial
  probe
  misc_feature (1)..(25): SEQ ID NO: 5450; WAN024DP4; Start 22; Stop 46
tattataccatgattagcctcgtaa

SEQ ID NO: 411010 - DNA, 25 bp, Artificial
  probe
  misc_feature (1)..(25): SEQ ID NO: 5450; WAN024DP4; Start 20; Stop 44
tatattataccatgattagcctcgt

SEQ ID NO: 411011 - DNA, 25 bp, Artificial
  probe
  misc_feature (1)..(25): SEQ ID NO: 5450; WAN024DP4; Start 21; Stop 45
atattataccatgattagcctcgta

SEQ ID NO: 411012 - DNA, 25 bp, Artificial
  probe
  misc_feature (1)..(25): SEQ ID NO: 5450; WAN024DP4; Start 81; Stop 105
ttcatcatctgctaaatctctaact

SEQ ID NO: 411013 - DNA, 25 bp, Artificial
  probe
  misc_feature (1)..(25): SEQ ID NO: 5450; WAN024DP4; Start 80; Stop 104
cttcatcatctgctaaatctctaac

SEQ ID NO: 411014 - DNA, 25 bp, Artificial
  probe
  misc_feature (1)..(25): SEQ ID NO: 5450; WAN024DP4; Start 79; Stop 103
tcttcatcatctgctaaatctctaa

SEQ ID NO: 411015 - DNA, 25 bp, Artificial
  probe
  misc_feature (1)..(25): SEQ ID NO: 5450; WAN024DP4; Start 78; Stop 102
ttcttcatcatctgctaaatctcta

SEQ ID NO: 411016 - DNA, 25 bp, Artificial
  probe
  misc_feature (1)..(25): SEQ ID NO: 5450; WAN024DP4; Start 19; Stop 43
ctatattataccatgattagcctcg

SEQ ID NO: 411017 - DNA, 25 bp, Artificial
  probe
  misc_feature (1)..(25): SEQ ID NO: 5450; WAN024DP4; Start 24; Stop 48
ttataccatgattagcctcgtaaat

SEQ ID NO: 411018 - DNA, 25 bp, Artificial
  probe
  misc_feature (1)..(25): SEQ ID NO: 5450; WAN024DP4; Start 23; Stop 47
attataccatgattagcctcgtaaa

SEQ ID NO: 411019 - DNA, 25 bp, Artificial
  probe
  misc_feature (1)..(25): SEQ ID NO: 5450; WAN024DP4; Start 27; Stop 51
taccatgattagcctcgtaaatctg

SEQ ID NO: 411020 - DNA, 25 bp, Artificial
  probe
  misc_feature (1)..(25): SEQ ID NO: 5450; WAN024DP4; Start 26; Stop 50
ataccatgattagcctcgtaaatct

SEQ ID NO: 411021 - DNA, 25 bp, Artificial
  probe
  misc_feature (1)..(25): SEQ ID NO: 5450; WAN024DP4; Start 29; Stop 53
ccatgattagcctcgtaaatctgtt

SEQ ID NO: 411022 - DNA, 25 bp, Artificial
  probe
  misc_feature (1)..(25): SEQ ID NO: 5450; WAN024DP4; Start 32; Stop 56
tgattagcctcgtaaatctgttaaa

SEQ ID NO: 411023 - DNA, 25 bp, Artificial
  probe
  misc_feature (1)..(25): SEQ ID NO: 5450; WAN024DP4; Start 82; Stop 106
tcatcatctgctaaatctctaacta

SEQ ID NO: 411024 - DNA, 25 bp, Artificial
  probe
  misc_feature (1)..(25): SEQ ID NO: 5450; WAN024DP4; Start 30; Stop 54
catgattagcctcgtaaatctgtta

SEQ ID NO: 411025 - DNA, 25 bp, Artificial
  probe
  misc_feature (1)..(25): SEQ ID NO: 5450; WAN024DP4; Start 31; Stop 55
atgattagcctcgtaaatctgttaa

SEQ ID NO: 411026 - DNA, 25 bp, Artificial
  probe
  misc_feature (1)..(25): SEQ ID NO: 5450; WAN024DP4; Start 69; Stop 93
tcctttcttttcttcatcatctgct

SEQ ID NO: 411027 - DNA, 25 bp, Artificial
  probe
  misc_feature (1)..(25): SEQ ID NO: 5450; WAN024DP4; Start 68; Stop 92
atcctttcttttcttcatcatctgc

SEQ ID NO: 411028 - DNA, 25 bp, Artificial
  probe
  misc_feature (1)..(25): SEQ ID NO: 5450; WAN024DP4; Start 65; Stop 89
gccatcctttcttttcttcatcatc

SEQ ID NO: 411029 - DNA, 25 bp, Artificial
  probe
  misc_feature (1)..(25): SEQ ID NO: 5450; WAN024DP4; Start 16; Stop 40
accctatattataccatgattagcc

SEQ ID NO: 411030 - DNA, 25 bp, Artificial
  probe
  misc_feature (1)..(25): SEQ ID NO: 5450; WAN024DP4; Start 18; Stop 42
cctatattataccatgattagcctc

SEQ ID NO: 411031 - DNA, 25 bp, Artificial
  probe
  misc_feature (1)..(25): SEQ ID NO: 5450; WAN024DP4; Start 70; Stop 94
cctttcttttcttcatcatctgcta

SEQ ID NO: 411032 - DNA, 25 bp, Artificial
  probe
  misc_feature (1)..(25): SEQ ID NO: 5450; WAN024DP4; Start 66; Stop 90
ccatcctttcttttcttcatcatct

SEQ ID NO: 411033 - DNA, 25 bp, Artificial
  probe
  misc_feature (1)..(25): SEQ ID NO: 5450; WAN024DP4; Start 28; Stop 52
accatgattagcctcgtaaatctgt

SEQ ID NO: 411034 - DNA, 25 bp, Artificial
  probe
  misc_feature (1)..(25): SEQ ID NO: 5450; WAN024DP4; Start 25; Stop 49
tataccatgattagcctcgtaaatc

SEQ ID NO: 411035 - DNA, 25 bp, Artificial
  probe
  misc_feature (1)..(25): SEQ ID NO: 5450; WAN024DP4; Start 17; Stop 41
ccctatattataccatgattagcct

SEQ ID NO: 411036 - DNA, 25 bp, Artificial
  probe
  misc_feature (1)..(25): SEQ ID NO: 5450; WAN024DP4; Start 67; Stop 91
catcctttcttttcttcatcatctg

SEQ ID NO: 411037 - DNA, 25 bp, Artificial
  probe
  misc_feature (1)..(25): SEQ ID NO: 5450; WAN024DP4; Start 83; Stop 107
catcatctgctaaatctctaactaa

SEQ ID NO: 411038 - DNA, 25 bp, Artificial
  probe
  misc_feature (1)..(25): SEQ ID NO: 5450; WAN024DP4; Start 15; Stop 39
caccctatattataccatgattagc

SEQ ID NO: 411039 - DNA, 25 bp, Artificial
  probe
  misc_feature (1)..(25): SEQ ID NO: 5450; WAN024DP4; Start 71; Stop 95
ctttcttttcttcatcatctgctaa

SEQ ID NO: 411040 - DNA, 25 bp, Artificial
  probe
  misc_feature (1)..(25): SEQ ID NO: 5450; WAN024DP4; Start 76; Stop 100
ttttcttcatcatctgctaaatctc

SEQ ID NO: 411041 - DNA, 25 bp, Artificial
  probe
  misc_feature (1)..(25): SEQ ID NO: 5451; WAN024DGS; Start 57; Stop 81
tgcttgccaattcctattagaacaa

SEQ ID NO: 411042 - DNA, 25 bp, Artificial
  probe
  misc_feature (1)..(25): SEQ ID NO: 5451; WAN024DGS; Start 56; Stop 80
gtgcttgccaattcctattagaaca

SEQ ID NO: 411043 - DNA, 25 bp, Artificial
  probe
  misc_feature (1)..(25): SEQ ID NO: 5451; WAN024DGS; Start 61; Stop 85
tgccaattcctattagaacaaggtt

SEQ ID NO: 411044 - DNA, 25 bp, Artificial
  probe
  misc_feature (1)..(25): SEQ ID NO: 5451; WAN024DGS; Start 60; Stop 84
ttgccaattcctattagaacaaggt

SEQ ID NO: 411045 - DNA, 25 bp, Artificial
  probe
  misc_feature (1)..(25): SEQ ID NO: 5451; WAN024DGS; Start 62; Stop 86
gccaattcctattagaacaaggtta

SEQ ID NO: 411046 - DNA, 25 bp, Artificial
  probe
  misc_feature (1)..(25): SEQ ID NO: 5451; WAN024DGS; Start 55; Stop 79
cgtgcttgccaattcctattagaac

SEQ ID NO: 411047 - DNA, 25 bp, Artificial
  probe
  misc_feature (1)..(25): SEQ ID NO: 5451; WAN024DGS; Start 82; Stop 106
ggttataatgttatcaatgtccagg

SEQ ID NO: 411048 - DNA, 25 bp, Artificial
  probe
  misc_feature (1)..(25): SEQ ID NO: 5451; WAN024DGS; Start 85; Stop 109
tataatgttatcaatgtccagggtg

SEQ ID NO: 411049 - DNA, 25 bp, Artificial
  probe
  misc_feature (1)..(25): SEQ ID NO: 5451; WAN024DGS; Start 111; Stop 135
catgttagcctttgaagaacttcta

SEQ ID NO: 411050 - DNA, 25 bp, Artificial
  probe
  misc_feature (1)..(25): SEQ ID NO: 5451; WAN024DGS; Start 86; Stop 110
ataatgttatcaatgtccagggtgg

SEQ ID NO: 411051 - DNA, 25 bp, Artificial
  probe
  misc_feature (1)..(25): SEQ ID NO: 5451; WAN024DGS; Start 110; Stop 134
gcatgttagcctttgaagaacttct

SEQ ID NO: 411052 - DNA, 25 bp, Artificial
  probe
  misc_feature (1)..(25): SEQ ID NO: 5451; WAN024DGS; Start 117; Stop 141
agcctttgaagaacttctaactaat

SEQ ID NO: 411053 - DNA, 25 bp, Artificial
  probe
  misc_feature (1)..(25): SEQ ID NO: 5451; WAN024DGS; Start 81; Stop 105
aggttataatgttatcaatgtccag

SEQ ID NO: 411054 - DNA, 25 bp, Artificial
  probe
  misc_feature (1)..(25): SEQ ID NO: 5451; WAN024DGS; Start 112; Stop 136
atgttagcctttgaagaacttctaa

SEQ ID NO: 411055 - DNA, 25 bp, Artificial
  probe
  misc_feature (1)..(25): SEQ ID NO: 5451; WAN024DGS; Start 54; Stop 78
gcgtgcttgccaattcctattagaa

SEQ ID NO: 411056 - DNA, 25 bp, Artificial
  probe
  misc_feature (1)..(25): SEQ ID NO: 5451; WAN024DGS; Start 3; Stop 27
ggacaaagatcgcttgcattatatt

SEQ ID NO: 411057 - DNA, 25 bp, Artificial
  probe
  misc_feature (1)..(25): SEQ ID NO: 5451; WAN024DGS; Start 59; Stop 83
cttgccaattcctattagaacaagg

SEQ ID NO: 411058 - DNA, 25 bp, Artificial
  probe
  misc_feature (1)..(25): SEQ ID NO: 5451; WAN024DGS; Start 58; Stop 82
gcttgccaattcctattagaacaag

SEQ ID NO: 411059 - DNA, 25 bp, Artificial
  probe
  misc_feature (1)..(25): SEQ ID NO: 5451; WAN024DGS; Start 84; Stop 108
ttataatgttatcaatgtccagggt

SEQ ID NO: 411060 - DNA, 25 bp, Artificial
  probe
  misc_feature (1)..(25): SEQ ID NO: 5451; WAN024DGS; Start 63; Stop 87
ccaattcctattagaacaaggttat

SEQ ID NO: 411061 - DNA, 25 bp, Artificial
  probe
  misc_feature (1)..(25): SEQ ID NO: 5451; WAN024DGS; Start 116; Stop 140
tagcctttgaagaacttctaactaa

SEQ ID NO: 411062 - DNA, 25 bp, Artificial
  probe
  misc_feature (1)..(25): SEQ ID NO: 5451; WAN024DGS; Start 2; Stop 26
tggacaaagatcgcttgcattatat

SEQ ID NO: 411063 - DNA, 25 bp, Artificial
  probe
  misc_feature (1)..(25): SEQ ID NO: 5451; WAN024DGS; Start 1; Stop 25
ttggacaaagatcgcttgcattata

SEQ ID NO: 411064 - DNA, 25 bp, Artificial
  probe
  misc_feature (1)..(25): SEQ ID NO: 5451; WAN024DGS; Start 83; Stop 107
gttataatgttatcaatgtccaggg

SEQ ID NO: 411065 - DNA, 25 bp, Artificial
  probe
  misc_feature (1)..(25): SEQ ID NO: 5451; WAN024DGS; Start 80; Stop 104
aaggttataatgttatcaatgtcca

SEQ ID NO: 411066 - DNA, 25 bp, Artificial
  probe
  misc_feature (1)..(25): SEQ ID NO: 5451; WAN024DGS; Start 79; Stop 103
caaggttataatgttatcaatgtcc

SEQ ID NO: 411067 - DNA, 25 bp, Artificial
  probe
  misc_feature (1)..(25): SEQ ID NO: 5451; WAN024DGS; Start 115; Stop 139
ttagcctttgaagaacttctaacta

SEQ ID NO: 411068 - DNA, 25 bp, Artificial
  probe
  misc_feature (1)..(25): SEQ ID NO: 5451; WAN024DGS; Start 4; Stop 28
gacaaagatcgcttgcattatatta

SEQ ID NO: 411069 - DNA, 25 bp, Artificial
  probe
  misc_feature (1)..(25): SEQ ID NO: 5451; WAN024DGS; Start 87; Stop 111
taatgttatcaatgtccagggtggc

SEQ ID NO: 411070 - DNA, 25 bp, Artificial
  probe
  misc_feature (1)..(25): SEQ ID NO: 5451; WAN024DGS; Start 5; Stop 29
acaaagatcgcttgcattatattat

SEQ ID NO: 411071 - DNA, 25 bp, Artificial
  probe
  misc_feature (1)..(25): SEQ ID NO: 5451; WAN024DGS; Start 9; Stop 33
agatcgcttgcattatattatttgc

SEQ ID NO: 411072 - DNA, 25 bp, Artificial
  probe
  misc_feature (1)..(25): SEQ ID NO: 5451; WAN024DGS; Start 78; Stop 102
acaaggttataatgttatcaatgtc

SEQ ID NO: 411073 - DNA, 25 bp, Artificial
  probe
  misc_feature (1)..(25): SEQ ID NO: 5451; WAN024DGS; Start 8; Stop 32
aagatcgcttgcattatattatttg

SEQ ID NO: 411074 - DNA, 25 bp, Artificial
  probe
  misc_feature (1)..(25): SEQ ID NO: 5452; WAN024E2X; Start 119; Stop 143
ataatctcagtaccacggtttacag

SEQ ID NO: 411075 - DNA, 25 bp, Artificial
  probe
  misc_feature (1)..(25): SEQ ID NO: 5452; WAN024E2X; Start 118; Stop 142
cataatctcagtaccacggtttaca

SEQ ID NO: 411076 - DNA, 25 bp, Artificial
  probe
  misc_feature (1)..(25): SEQ ID NO: 5452; WAN024E2X; Start 120; Stop 144
taatctcagtaccacggtttacagt

SEQ ID NO: 411077 - DNA, 25 bp, Artificial
  probe
  misc_feature (1)..(25): SEQ ID NO: 5452; WAN024E2X; Start 165; Stop 189
ctacatccgcaaagatttggtaaac

SEQ ID NO: 411078 - DNA, 25 bp, Artificial
  probe
  misc_feature (1)..(25): SEQ ID NO: 5452; WAN024E2X; Start 164; Stop 188
tctacatccgcaaagatttggtaaa

SEQ ID NO: 411079 - DNA, 25 bp, Artificial
  probe
  misc_feature (1)..(25): SEQ ID NO: 5452; WAN024E2X; Start 163; Stop 187
ttctacatccgcaaagatttggtaa

SEQ ID NO: 411080 - DNA, 25 bp, Artificial
  probe
  misc_feature (1)..(25): SEQ ID NO: 5452; WAN024E2X; Start 117; Stop 141
gcataatctcagtaccacggtttac

SEQ ID NO: 411081 - DNA, 25 bp, Artificial
  probe
  misc_feature (1)..(25): SEQ ID NO: 5452; WAN024E2X; Start 166; Stop 190
tacatccgcaaagatttggtaaaca

SEQ ID NO: 411082 - DNA, 25 bp, Artificial
  probe
  misc_feature (1)..(25): SEQ ID NO: 5452; WAN024E2X; Start 34; Stop 58
ctcgtagaagagccacattactttg

SEQ ID NO: 411083 - DNA, 25 bp, Artificial
  probe
  misc_feature (1)..(25): SEQ ID NO: 5452; WAN024E2X; Start 162; Stop 186
gttctacatccgcaaagatttggta

SEQ ID NO: 411084 - DNA, 25 bp, Artificial
  probe
  misc_feature (1)..(25): SEQ ID NO: 5452; WAN024E2X; Start 107; Stop 131
ttgaaggcacgcataatctcagtac

SEQ ID NO: 411085 - DNA, 25 bp, Artificial
  probe
  misc_feature (1)..(25): SEQ ID NO: 5452; WAN024E2X; Start 168; Stop 192
catccgcaaagatttggtaaacaac

SEQ ID NO: 411086 - DNA, 25 bp, Artificial
  probe
  misc_feature (1)..(25): SEQ ID NO: 5452; WAN024E2X; Start 121; Stop 145
aatctcagtaccacggtttacagtt

SEQ ID NO: 411087 - DNA, 25 bp, Artificial
  probe
  misc_feature (1)..(25): SEQ ID NO: 5452; WAN024E2X; Start 178; Stop 202
gatttggtaaacaaccttattgcga

SEQ ID NO: 411088 - DNA, 25 bp, Artificial
  probe
  misc_feature (1)..(25): SEQ ID NO: 5452; WAN024E2X; Start 177; Stop 201
agatttggtaaacaaccttattgcg

SEQ ID NO: 411089 - DNA, 25 bp, Artificial
  probe
  misc_feature (1)..(25): SEQ ID NO: 5452; WAN024E2X; Start 179; Stop 203
atttggtaaacaaccttattgcgac

SEQ ID NO: 411090 - DNA, 25 bp, Artificial
  probe
  misc_feature (1)..(25): SEQ ID NO: 5452; WAN024E2X; Start 128; Stop 152
gtaccacggtttacagttgtgatat

SEQ ID NO: 411091 - DNA, 25 bp, Artificial
  probe
  misc_feature (1)..(25): SEQ ID NO: 5452; WAN024E2X; Start 167; Stop 191
acatccgcaaagatttggtaaacaa

SEQ ID NO: 411092 - DNA, 25 bp, Artificial
  probe
  misc_feature (1)..(25): SEQ ID NO: 5452; WAN024E2X; Start 99; Stop 123
tatctggtttgaaggcacgcataat

SEQ ID NO: 411093 - DNA, 25 bp, Artificial
  probe
  misc_feature (1)..(25): SEQ ID NO: 5452; WAN024E2X; Start 172; Stop 196
cgcaaagatttggtaaacaacctta

SEQ ID NO: 411094 - DNA, 25 bp, Artificial
  probe
  misc_feature (1)..(25): SEQ ID NO: 5452; WAN024E2X; Start 224; Stop 248
atacgatcaaggaaaccaagctcta

SEQ ID NO: 411095 - DNA, 25 bp, Artificial
  probe
  misc_feature (1)..(25): SEQ ID NO: 5452; WAN024E2X; Start 91; Stop 115
gatgatggtatctggtttgaaggca

SEQ ID NO: 411096 - DNA, 25 bp, Artificial
  probe
  misc_feature (1)..(25): SEQ ID NO: 5452; WAN024E2X; Start 106; Stop 130
tttgaaggcacgcataatctcagta

SEQ ID NO: 411097 - DNA, 25 bp, Artificial
  probe
  misc_feature (1)..(25): SEQ ID NO: 5452; WAN024E2X; Start 213; Stop 237
gttgttcgatgatacgatcaaggaa

SEQ ID NO: 411098 - DNA, 25 bp, Artificial
  probe
  misc_feature (1)..(25): SEQ ID NO: 5452; WAN024E2X; Start 122; Stop 146
atctcagtaccacggtttacagttg

SEQ ID NO: 411099 - DNA, 25 bp, Artificial
  probe
  misc_feature (1)..(25): SEQ ID NO: 5452; WAN024E2X; Start 176; Stop 200
aagatttggtaaacaaccttattgc

SEQ ID NO: 411100 - DNA, 25 bp, Artificial
  probe
  misc_feature (1)..(25): SEQ ID NO: 5452; WAN024E2X; Start 92; Stop 116
atgatggtatctggtttgaaggcac

SEQ ID NO: 411101 - DNA, 25 bp, Artificial
  probe
  misc_feature (1)..(25): SEQ ID NO: 5452; WAN024E2X; Start 127; Stop 151
agtaccacggtttacagttgtgata

SEQ ID NO: 411102 - DNA, 25 bp, Artificial
  probe
  misc_feature (1)..(25): SEQ ID NO: 5452; WAN024E2X; Start 116; Stop 140
cgcataatctcagtaccacggttta

SEQ ID NO: 411103 - DNA, 25 bp, Artificial
  probe
  misc_feature (1)..(25): SEQ ID NO: 5452; WAN024E2X; Start 173; Stop 197
gcaaagatttggtaaacaaccttat

SEQ ID NO: 411104 - DNA, 25 bp, Artificial
  probe
  misc_feature (1)..(25): SEQ ID NO: 5452; WAN024E2X; Start 88; Stop 112
tgcgatgatggtatctggtttgaag

SEQ ID NO: 411105 - DNA, 25 bp, Artificial
  probe
  misc_feature (1)..(25): SEQ ID NO: 5452; WAN024E2X; Start 211; Stop 235
cagttgttcgatgatacgatcaagg

SEQ ID NO: 411106 - DNA, 25 bp, Artificial
  probe
  misc_feature (1)..(25): SEQ ID NO: 5452; WAN024E2X; Start 210; Stop 234
ccagttgttcgatgatacgatcaag

SEQ ID NO: 411107 - DNA, 25 bp, Artificial
  probe
  misc_feature (1)..(25): SEQ ID NO: 5453; WAN024GOB; Start 96; Stop 120
attcttcaatcaagtcctcatcctc

SEQ ID NO: 411108 - DNA, 25 bp, Artificial
  probe
  misc_feature (1)..(25): SEQ ID NO: 5453; WAN024GOB; Start 97; Stop 121
ttcttcaatcaagtcctcatcctcg

SEQ ID NO: 411109 - DNA, 25 bp, Artificial
  probe
  misc_feature (1)..(25): SEQ ID NO: 5453; WAN024GOB; Start 95; Stop 119
gattcttcaatcaagtcctcatcct

SEQ ID NO: 411110 - DNA, 25 bp, Artificial
  probe
  misc_feature (1)..(25): SEQ ID NO: 5453; WAN024GOB; Start 87; Stop 111
agacatccgattcttcaatcaagtc

SEQ ID NO: 411111 - DNA, 25 bp, Artificial
  probe
  misc_feature (1)..(25): SEQ ID NO: 5453; WAN024GOB; Start 71; Stop 95
ttagaaagggtaatcaagacatccg

SEQ ID NO: 411112 - DNA, 25 bp, Artificial
  probe
  misc_feature (1)..(25): SEQ ID NO: 5453; WAN024GOB; Start 70; Stop 94
gttagaaagggtaatcaagacatcc

SEQ ID NO: 411113 - DNA, 25 bp, Artificial
  probe
  misc_feature (1)..(25): SEQ ID NO: 5453; WAN024GOB; Start 176; Stop 200
cgtttaacttcatccaattcgtctt

SEQ ID NO: 411114 - DNA, 25 bp, Artificial
  probe
  misc_feature (1)..(25): SEQ ID NO: 5453; WAN024GOB; Start 218; Stop 242
cgttcaggcttagcaagaatatctg

SEQ ID NO: 411115 - DNA, 25 bp, Artificial
  probe
  misc_feature (1)..(25): SEQ ID NO: 5453; WAN024GOB; Start 72; Stop 96
tagaaagggtaatcaagacatccga

SEQ ID NO: 411116 - DNA, 25 bp, Artificial
  probe
  misc_feature (1)..(25): SEQ ID NO: 5453; WAN024GOB; Start 94; Stop 118
cgattcttcaatcaagtcctcatcc

SEQ ID NO: 411117 - DNA, 25 bp, Artificial
  probe
  misc_feature (1)..(25): SEQ ID NO: 5453; WAN024GOB; Start 93; Stop 117
ccgattcttcaatcaagtcctcatc

SEQ ID NO: 411118 - DNA, 25 bp, Artificial
  probe
  misc_feature (1)..(25): SEQ ID NO: 5453; WAN024GOB; Start 90; Stop 114
catccgattcttcaatcaagtcctc

SEQ ID NO: 411119 - DNA, 25 bp, Artificial
  probe
  misc_feature (1)..(25): SEQ ID NO: 5453; WAN024GOB; Start 92; Stop 116
tccgattcttcaatcaagtcctcat

SEQ ID NO: 411120 - DNA, 25 bp, Artificial
  probe
  misc_feature (1)..(25): SEQ ID NO: 5453; WAN024GOB; Start 91; Stop 115
atccgattcttcaatcaagtcctca

SEQ ID NO: 411121 - DNA, 25 bp, Artificial
  probe
  misc_feature (1)..(25): SEQ ID NO: 5453; WAN024GOB; Start 88; Stop 112
gacatccgattcttcaatcaagtcc

SEQ ID NO: 411122 - DNA, 25 bp, Artificial
  probe
  misc_feature (1)..(25): SEQ ID NO: 5453; WAN024GOB; Start 85; Stop 109
caagacatccgattcttcaatcaag

SEQ ID NO: 411123 - DNA, 25 bp, Artificial
  probe
  misc_feature (1)..(25): SEQ ID NO: 5453; WAN024GOB; Start 83; Stop 107
atcaagacatccgattcttcaatca

SEQ ID NO: 411124 - DNA, 25 bp, Artificial
  probe
  misc_feature (1)..(25): SEQ ID NO: 5453; WAN024GOB; Start 86; Stop 110
aagacatccgattcttcaatcaagt

SEQ ID NO: 411125 - DNA, 25 bp, Artificial
  probe
  misc_feature (1)..(25): SEQ ID NO: 5453; WAN024GOB; Start 84; Stop 108
tcaagacatccgattcttcaatcaa

SEQ ID NO: 411126 - DNA, 25 bp, Artificial
  probe
  misc_feature (1)..(25): SEQ ID NO: 5453; WAN024GOB; Start 82; Stop 106
aatcaagacatccgattcttcaatc

SEQ ID NO: 411127 - DNA, 25 bp, Artificial
  probe
  misc_feature (1)..(25): SEQ ID NO: 5453; WAN024GOB; Start 66; Stop 90
ctctgttagaaagggtaatcaagac

SEQ ID NO: 411128 - DNA, 25 bp, Artificial
  probe
  misc_feature (1)..(25): SEQ ID NO: 5453; WAN024GOB; Start 73; Stop 97
agaaagggtaatcaagacatccgat

SEQ ID NO: 411129 - DNA, 25 bp, Artificial
  probe
  misc_feature (1)..(25): SEQ ID NO: 5453; WAN024GOB; Start 79; Stop 103
ggtaatcaagacatccgattcttca

SEQ ID NO: 411130 - DNA, 25 bp, Artificial
  probe
  misc_feature (1)..(25): SEQ ID NO: 5453; WAN024GOB; Start 80; Stop 104
gtaatcaagacatccgattcttcaa

SEQ ID NO: 411131 - DNA, 25 bp, Artificial
  probe
  misc_feature (1)..(25): SEQ ID NO: 5453; WAN024GOB; Start 89; Stop 113
acatccgattcttcaatcaagtcct

SEQ ID NO: 411132 - DNA, 25 bp, Artificial
  probe
  misc_feature (1)..(25): SEQ ID NO: 5453; WAN024GOB; Start 179; Stop 203
ttaacttcatccaattcgtctttga

SEQ ID NO: 411133 - DNA, 25 bp, Artificial
  probe
  misc_feature (1)..(25): SEQ ID NO: 5453; WAN024GOB; Start 177; Stop 201
gtttaacttcatccaattcgtcttt

SEQ ID NO: 411134 - DNA, 25 bp, Artificial
  probe
  misc_feature (1)..(25): SEQ ID NO: 5453; WAN024GOB; Start 182; Stop 206
acttcatccaattcgtctttgataa

SEQ ID NO: 411135 - DNA, 25 bp, Artificial
  probe
  misc_feature (1)..(25): SEQ ID NO: 5453; WAN024GOB; Start 181; Stop 205
aacttcatccaattcgtctttgata

SEQ ID NO: 411136 - DNA, 25 bp, Artificial
  probe
  misc_feature (1)..(25): SEQ ID NO: 5453; WAN024GOB; Start 180; Stop 204
taacttcatccaattcgtctttgat

SEQ ID NO: 411137 - DNA, 25 bp, Artificial
  probe
  misc_feature (1)..(25): SEQ ID NO: 5453; WAN024GOB; Start 67; Stop 91
tctgttagaaagggtaatcaagaca

SEQ ID NO: 411138 - DNA, 25 bp, Artificial
  probe
  misc_feature (1)..(25): SEQ ID NO: 5453; WAN024GOB; Start 216; Stop 240
cacgttcaggcttagcaagaatatc

SEQ ID NO: 411139 - DNA, 25 bp, Artificial
  probe
  misc_feature (1)..(25): SEQ ID NO: 5453; WAN024GOB; Start 178; Stop 202
tttaacttcatccaattcgtctttg

SEQ ID NO: 411140 - DNA, 25 bp, Artificial
  probe
  misc_feature (1)..(25): SEQ ID NO: 5454; WAN024G2I; Start 71; Stop 95
catcaatttcaaccatcttaccagc

SEQ ID NO: 411141 - DNA, 25 bp, Artificial
  probe
  misc_feature (1)..(25): SEQ ID NO: 5454; WAN024G2I; Start 70; Stop 94
gcatcaatttcaaccatcttaccag

SEQ ID NO: 411142 - DNA, 25 bp, Artificial
  probe
  misc_feature (1)..(25): SEQ ID NO: 5454; WAN024G2I; Start 72; Stop 96
atcaatttcaaccatcttaccagca

SEQ ID NO: 411143 - DNA, 25 bp, Artificial
  probe
  misc_feature (1)..(25): SEQ ID NO: 5454; WAN024G2I; Start 203; Stop 227
caaactcatcaaagagaatcaaggt

SEQ ID NO: 411144 - DNA, 25 bp, Artificial
  probe
  misc_feature (1)..(25): SEQ ID NO: 5454; WAN024G2I; Start 102; Stop 126
ttcggcaataattggaaagaagttt

SEQ ID NO: 411145 - DNA, 25 bp, Artificial
  probe
  misc_feature (1)..(25): SEQ ID NO: 5454; WAN024G2I; Start 202; Stop 226
gcaaactcatcaaagagaatcaagg

SEQ ID NO: 411146 - DNA, 25 bp, Artificial
  probe
  misc_feature (1)..(25): SEQ ID NO: 5454; WAN024G2I; Start 201; Stop 225
ggcaaactcatcaaagagaatcaag

SEQ ID NO: 411147 - DNA, 25 bp, Artificial
  probe
  misc_feature (1)..(25): SEQ ID NO: 5454; WAN024G2I; Start 205; Stop 229
aactcatcaaagagaatcaaggttc

SEQ ID NO: 411148 - DNA, 25 bp, Artificial
  probe
  misc_feature (1)..(25): SEQ ID NO: 5454; WAN024G2I; Start 11; Stop 35
aacctcgtttaagaacttctctagc

SEQ ID NO: 411149 - DNA, 25 bp, Artificial
  probe
  misc_feature (1)..(25): SEQ ID NO: 5454; WAN024G2I; Start 198; Stop 222
gttggcaaactcatcaaagagaatc

SEQ ID NO: 411150 - DNA, 25 bp, Artificial
  probe
  misc_feature (1)..(25): SEQ ID NO: 5454; WAN024G2I; Start 73; Stop 97
tcaatttcaaccatcttaccagcac

SEQ ID NO: 411151 - DNA, 25 bp, Artificial
  probe
  misc_feature (1)..(25): SEQ ID NO: 5454; WAN024G2I; Start 103; Stop 127
tcggcaataattggaaagaagttta

SEQ ID NO: 411152 - DNA, 25 bp, Artificial
  probe
  misc_feature (1)..(25): SEQ ID NO: 5454; WAN024G2I; Start 200; Stop 224
tggcaaactcatcaaagagaatcaa

SEQ ID NO: 411153 - DNA, 25 bp, Artificial
  probe
  misc_feature (1)..(25): SEQ ID NO: 5454; WAN024G2I; Start 199; Stop 223
ttggcaaactcatcaaagagaatca

SEQ ID NO: 411154 - DNA, 25 bp, Artificial
  probe
  misc_feature (1)..(25): SEQ ID NO: 5454; WAN024G2I; Start 204; Stop 228
aaactcatcaaagagaatcaaggtt

SEQ ID NO: 411155 - DNA, 25 bp, Artificial
  probe
  misc_feature (1)..(25): SEQ ID NO: 5454; WAN024G2I; Start 197; Stop 221
tgttggcaaactcatcaaagagaat

SEQ ID NO: 411156 - DNA, 25 bp, Artificial
  probe
  misc_feature (1)..(25): SEQ ID NO: 5454; WAN024G2I; Start 196; Stop 220
ttgttggcaaactcatcaaagagaa

SEQ ID NO: 411157 - DNA, 25 bp, Artificial
  probe
  misc_feature (1)..(25): SEQ ID NO: 5454; WAN024G2I; Start 104; Stop 128
cggcaataattggaaagaagtttaa

SEQ ID NO: 411158 - DNA, 25 bp, Artificial
  probe
  misc_feature (1)..(25): SEQ ID NO: 5454; WAN024G2I; Start 13; Stop 37
cctcgtttaagaacttctctagctt

SEQ ID NO: 411159 - DNA, 25 bp, Artificial
  probe
  misc_feature (1)..(25): SEQ ID NO: 5454; WAN024G2I; Start 195; Stop 219
gttgttggcaaactcatcaaagaga

SEQ ID NO: 411160 - DNA, 25 bp, Artificial
  probe
  misc_feature (1)..(25): SEQ ID NO: 5454; WAN024G2I; Start 38; Stop 62
ttatctggcgaggagtggttagaac

SEQ ID NO: 411161 - DNA, 25 bp, Artificial
  probe
  misc_feature (1)..(25): SEQ ID NO: 5454; WAN024G2I; Start 14; Stop 38
ctcgtttaagaacttctctagcttt

SEQ ID NO: 411162 - DNA, 25 bp, Artificial
  probe
  misc_feature (1)..(25): SEQ ID NO: 5454; WAN024G2I; Start 12; Stop 36
acctcgtttaagaacttctctagct

SEQ ID NO: 411163 - DNA, 25 bp, Artificial
  probe
  misc_feature (1)..(25): SEQ ID NO: 5454; WAN024G2I; Start 69; Stop 93
tgcatcaatttcaaccatcttacca

SEQ ID NO: 411164 - DNA, 25 bp, Artificial
  probe
  misc_feature (1)..(25): SEQ ID NO: 5454; WAN024G2I; Start 68; Stop 92
ttgcatcaatttcaaccatcttacc

SEQ ID NO: 411165 - DNA, 25 bp, Artificial
  probe
  misc_feature (1)..(25): SEQ ID NO: 5454; WAN024G2I; Start 74; Stop 98
caatttcaaccatcttaccagcacg

SEQ ID NO: 411166 - DNA, 25 bp, Artificial
  probe
  misc_feature (1)..(25): SEQ ID NO: 5454; WAN024G2I; Start 65; Stop 89
cctttgcatcaatttcaaccatctt

SEQ ID NO: 411167 - DNA, 25 bp, Artificial
  probe
  misc_feature (1)..(25): SEQ ID NO: 5454; WAN024G2I; Start 206; Stop 230
actcatcaaagagaatcaaggttct

SEQ ID NO: 411168 - DNA, 25 bp, Artificial
  probe
  misc_feature (1)..(25): SEQ ID NO: 5454; WAN024G2I; Start 67; Stop 91
tttgcatcaatttcaaccatcttac

SEQ ID NO: 411169 - DNA, 25 bp, Artificial
  probe
  misc_feature (1)..(25): SEQ ID NO: 5454; WAN024G2I; Start 66; Stop 90
ctttgcatcaatttcaaccatctta

SEQ ID NO: 411170 - DNA, 25 bp, Artificial
  probe
  misc_feature (1)..(25): SEQ ID NO: 5454; WAN024G2I; Start 207; Stop 231
ctcatcaaagagaatcaaggttctt

SEQ ID NO: 411171 - DNA, 25 bp, Artificial
  probe
  misc_feature (1)..(25): SEQ ID NO: 5454; WAN024G2I; Start 37; Stop 61
tttatctggcgaggagtggttagaa

SEQ ID NO: 411172 - DNA, 25 bp, Artificial
  probe
  misc_feature (1)..(25): SEQ ID NO: 5454; WAN024G2I; Start 10; Stop 34
aaacctcgtttaagaacttctctag

SEQ ID NO: 411173 - DNA, 25 bp, Artificial
  probe
  misc_feature (1)..(25): SEQ ID NO: 5455; WAN024CQY; Start 1476; Stop 1500
tgataatgaacgactaacgatggaa

SEQ ID NO: 411174 - DNA, 25 bp, Artificial
  probe
  misc_feature (1)..(25): SEQ ID NO: 5455; WAN024CQY; Start 1547; Stop 1571
attcggtagatacattcacttcgtt

SEQ ID NO: 411175 - DNA, 25 bp, Artificial
  probe
  misc_feature (1)..(25): SEQ ID NO: 5455; WAN024CQY; Start 1546; Stop 1570
gattcggtagatacattcacttcgt

SEQ ID NO: 411176 - DNA, 25 bp, Artificial
  probe
  misc_feature (1)..(25): SEQ ID NO: 5455; WAN024CQY; Start 1475; Stop 1499
ctgataatgaacgactaacgatgga

SEQ ID NO: 411177 - DNA, 25 bp, Artificial
  probe
  misc_feature (1)..(25): SEQ ID NO: 5455; WAN024CQY; Start 1474; Stop 1498
tctgataatgaacgactaacgatgg

SEQ ID NO: 411178 - DNA, 25 bp, Artificial
  probe
  misc_feature (1)..(25): SEQ ID NO: 5455; WAN024CQY; Start 1464; Stop 1488
tgattctctgtctgataatgaacga

SEQ ID NO: 411179 - DNA, 25 bp, Artificial
  probe
  misc_feature (1)..(25): SEQ ID NO: 5455; WAN024CQY; Start 160; Stop 184
caggcatctatccaagtctatgaag

SEQ ID NO: 411180 - DNA, 25 bp, Artificial
  probe
  misc_feature (1)..(25): SEQ ID NO: 5455; WAN024CQY; Start 162; Stop 186
ggcatctatccaagtctatgaagaa

SEQ ID NO: 411181 - DNA, 25 bp, Artificial
  probe
  misc_feature (1)..(25): SEQ ID NO: 5455; WAN024CQY; Start 1444; Stop 1468
attgttcgtcttgttggaattgatt

SEQ ID NO: 411182 - DNA, 25 bp, Artificial
  probe
  misc_feature (1)..(25): SEQ ID NO: 5455; WAN024CQY; Start 161; Stop 185
aggcatctatccaagtctatgaaga

SEQ ID NO: 411183 - DNA, 25 bp, Artificial
  probe
  misc_feature (1)..(25): SEQ ID NO: 5455; WAN024CQY; Start 1168; Stop 1192
gaaggaacgattactgctattggag

SEQ ID NO: 411184 - DNA, 25 bp, Artificial
  probe
  misc_feature (1)..(25): SEQ ID NO: 5455; WAN024CQY; Start 1463; Stop 1487
ttgattctctgtctgataatgaacg

SEQ ID NO: 411185 - DNA, 25 bp, Artificial
  probe
  misc_feature (1)..(25): SEQ ID NO: 5455; WAN024CQY; Start 1453; Stop 1477
cttgttggaattgattctctgtctg

SEQ ID NO: 411186 - DNA, 25 bp, Artificial
  probe
  misc_feature (1)..(25): SEQ ID NO: 5455; WAN024CQY; Start 1452; Stop 1476
tcttgttggaattgattctctgtct

SEQ ID NO: 411187 - DNA, 25 bp, Artificial
  probe
  misc_feature (1)..(25): SEQ ID NO: 5455; WAN024CQY; Start 1451; Stop 1475
gtcttgttggaattgattctctgtc

SEQ ID NO: 411188 - DNA, 25 bp, Artificial
  probe
  misc_feature (1)..(25): SEQ ID NO: 5455; WAN024CQY; Start 1395; Stop 1419
aataactcgtgcgatgaactactta

SEQ ID NO: 411189 - DNA, 25 bp, Artificial
  probe
  misc_feature (1)..(25): SEQ ID NO: 5455; WAN024CQY; Start 652; Stop 676
ttaatcacaggtcaacgagttattg

SEQ ID NO: 411190 - DNA, 25 bp, Artificial
  probe
  misc_feature (1)..(25): SEQ ID NO: 5455; WAN024CQY; Start 1455; Stop 1479
tgttggaattgattctctgtctgat

SEQ ID NO: 411191 - DNA, 25 bp, Artificial
  probe
  misc_feature (1)..(25): SEQ ID NO: 5455; WAN024CQY; Start 1454; Stop 1478
ttgttggaattgattctctgtctga

SEQ ID NO: 411192 - DNA, 25 bp, Artificial
  probe
  misc_feature (1)..(25): SEQ ID NO: 5455; WAN024CQY; Start 1445; Stop 1469
ttgttcgtcttgttggaattgattc

SEQ ID NO: 411193 - DNA, 25 bp, Artificial
  probe
  misc_feature (1)..(25): SEQ ID NO: 5455; WAN024CQY; Start 1545; Stop 1569
tgattcggtagatacattcacttcg

SEQ ID NO: 411194 - DNA, 25 bp, Artificial
  probe
  misc_feature (1)..(25): SEQ ID NO: 5455; WAN024CQY; Start 1448; Stop 1472
ttcgtcttgttggaattgattctct

SEQ ID NO: 411195 - DNA, 25 bp, Artificial
  probe
  misc_feature (1)..(25): SEQ ID NO: 5455; WAN024CQY; Start 1447; Stop 1471
gttcgtcttgttggaattgattctc

SEQ ID NO: 411196 - DNA, 25 bp, Artificial
  probe
  misc_feature (1)..(25): SEQ ID NO: 5455; WAN024CQY; Start 158; Stop 182
atcaggcatctatccaagtctatga

SEQ ID NO: 411197 - DNA, 25 bp, Artificial
  probe
  misc_feature (1)..(25): SEQ ID NO: 5455; WAN024CQY; Start 1396; Stop 1420
ataactcgtgcgatgaactacttac

SEQ ID NO: 411198 - DNA, 25 bp, Artificial
  probe
  misc_feature (1)..(25): SEQ ID NO: 5455; WAN024CQY; Start 1166; Stop 1190
gtgaaggaacgattactgctattgg

SEQ ID NO: 411199 - DNA, 25 bp, Artificial
  probe
  misc_feature (1)..(25): SEQ ID NO: 5455; WAN024CQY; Start 890; Stop 914
ggacagttctgattgctaatacttc

SEQ ID NO: 411200 - DNA, 25 bp, Artificial
  probe
  misc_feature (1)..(25): SEQ ID NO: 5455; WAN024CQY; Start 159; Stop 183
tcaggcatctatccaagtctatgaa

SEQ ID NO: 411201 - DNA, 25 bp, Artificial
  probe
  misc_feature (1)..(25): SEQ ID NO: 5455; WAN024CQY; Start 887; Stop 911
aacggacagttctgattgctaatac

SEQ ID NO: 411202 - DNA, 25 bp, Artificial
  probe
  misc_feature (1)..(25): SEQ ID NO: 5455; WAN024CQY; Start 1167; Stop 1191
tgaaggaacgattactgctattgga

SEQ ID NO: 411203 - DNA, 25 bp, Artificial
  probe
  misc_feature (1)..(25): SEQ ID NO: 5455; WAN024CQY; Start 157; Stop 181
gatcaggcatctatccaagtctatg

SEQ ID NO: 411204 - DNA, 25 bp, Artificial
  probe
  misc_feature (1)..(25): SEQ ID NO: 5455; WAN024CQY; Start 889; Stop 913
cggacagttctgattgctaatactt

SEQ ID NO: 411205 - DNA, 25 bp, Artificial
  probe
  misc_feature (1)..(25): SEQ ID NO: 5455; WAN024CQY; Start 886; Stop 910
caacggacagttctgattgctaata

SEQ ID NO: 411206 - DNA, 25 bp, Artificial
  probe
  misc_feature (1)..(25): SEQ ID NO: 5456; WAN024GHP; Start 10; Stop 34
ggctattccaagttcctctttcaaa

SEQ ID NO: 411207 - DNA, 25 bp, Artificial
  probe
  misc_feature (1)..(25): SEQ ID NO: 5456; WAN024GHP; Start 50; Stop 74
taatgcgtccctatgagagcttatt

SEQ ID NO: 411208 - DNA, 25 bp, Artificial
  probe
  misc_feature (1)..(25): SEQ ID NO: 5456; WAN024GHP; Start 49; Stop 73
ttaatgcgtccctatgagagcttat

SEQ ID NO: 411209 - DNA, 25 bp, Artificial
  probe
  misc_feature (1)..(25): SEQ ID NO: 5456; WAN024GHP; Start 48; Stop 72
tttaatgcgtccctatgagagctta

SEQ ID NO: 411210 - DNA, 25 bp, Artificial
  probe
  misc_feature (1)..(25): SEQ ID NO: 5456; WAN024GHP; Start 51; Stop 75
aatgcgtccctatgagagcttattt

SEQ ID NO: 411211 - DNA, 25 bp, Artificial
  probe
  misc_feature (1)..(25): SEQ ID NO: 5456; WAN024GHP; Start 47; Stop 71
atttaatgcgtccctatgagagctt

SEQ ID NO: 411212 - DNA, 25 bp, Artificial
  probe
  misc_feature (1)..(25): SEQ ID NO: 5456; WAN024GHP; Start 9; Stop 33
tggctattccaagttcctctttcaa

SEQ ID NO: 411213 - DNA, 25 bp, Artificial
  probe
  misc_feature (1)..(25): SEQ ID NO: 5456; WAN024GHP; Start 11; Stop 35
gctattccaagttcctctttcaaaa

SEQ ID NO: 411214 - DNA, 25 bp, Artificial
  probe
  misc_feature (1)..(25): SEQ ID NO: 5456; WAN024GHP; Start 46; Stop 70
catttaatgcgtccctatgagagct

SEQ ID NO: 411215 - DNA, 25 bp, Artificial
  probe
  misc_feature (1)..(25): SEQ ID NO: 5456; WAN024GHP; Start 12; Stop 36
ctattccaagttcctctttcaaaag

SEQ ID NO: 411216 - DNA, 25 bp, Artificial
  probe
  misc_feature (1)..(25): SEQ ID NO: 5456; WAN024GHP; Start 14; Stop 38
attccaagttcctctttcaaaaggt

SEQ ID NO: 411217 - DNA, 25 bp, Artificial
  probe
  misc_feature (1)..(25): SEQ ID NO: 5456; WAN024GHP; Start 13; Stop 37
tattccaagttcctctttcaaaagg

SEQ ID NO: 411218 - DNA, 25 bp, Artificial
  probe
  misc_feature (1)..(25): SEQ ID NO: 5456; WAN024GHP; Start 15; Stop 39
ttccaagttcctctttcaaaaggtg

SEQ ID NO: 411219 - DNA, 25 bp, Artificial
  probe
  misc_feature (1)..(25): SEQ ID NO: 5456; WAN024GHP; Start 52; Stop 76
atgcgtccctatgagagcttatttt

SEQ ID NO: 411220 - DNA, 25 bp, Artificial
  probe
  misc_feature (1)..(25): SEQ ID NO: 5456; WAN024GHP; Start 29; Stop 53
ttcaaaaggtggcagtgcatttaat

SEQ ID NO: 411221 - DNA, 25 bp, Artificial
  probe
  misc_feature (1)..(25): SEQ ID NO: 5456; WAN024GHP; Start 7; Stop 31
tttggctattccaagttcctctttc

SEQ ID NO: 411222 - DNA, 25 bp, Artificial
  probe
  misc_feature (1)..(25): SEQ ID NO: 5456; WAN024GHP; Start 6; Stop 30
ctttggctattccaagttcctcttt

SEQ ID NO: 411223 - DNA, 25 bp, Artificial
  probe
  misc_feature (1)..(25): SEQ ID NO: 5456; WAN024GHP; Start 28; Stop 52
tttcaaaaggtggcagtgcatttaa

SEQ ID NO: 411224 - DNA, 25 bp, Artificial
  probe
  misc_feature (1)..(25): SEQ ID NO: 5456; WAN024GHP; Start 8; Stop 32
ttggctattccaagttcctctttca

SEQ ID NO: 411225 - DNA, 25 bp, Artificial
  probe
  misc_feature (1)..(25): SEQ ID NO: 5456; WAN024GHP; Start 5; Stop 29
actttggctattccaagttcctctt

SEQ ID NO: 411226 - DNA, 25 bp, Artificial
  probe
  misc_feature (1)..(25): SEQ ID NO: 5456; WAN024GHP; Start 30; Stop 54
tcaaaaggtggcagtgcatttaatg

SEQ ID NO: 411227 - DNA, 25 bp, Artificial
  probe
  misc_feature (1)..(25): SEQ ID NO: 5456; WAN024GHP; Start 27; Stop 51
ctttcaaaaggtggcagtgcattta

SEQ ID NO: 411228 - DNA, 25 bp, Artificial
  probe
  misc_feature (1)..(25): SEQ ID NO: 5456; WAN024GHP; Start 16; Stop 40
tccaagttcctctttcaaaaggtgg

SEQ ID NO: 411229 - DNA, 25 bp, Artificial
  probe
  misc_feature (1)..(25): SEQ ID NO: 5456; WAN024GHP; Start 4; Stop 28
gactttggctattccaagttcctct

SEQ ID NO: 411230 - DNA, 25 bp, Artificial
  probe
  misc_feature (1)..(25): SEQ ID NO: 5456; WAN024GHP; Start 19; Stop 43
aagttcctctttcaaaaggtggcag

SEQ ID NO: 411231 - DNA, 25 bp, Artificial
  probe
  misc_feature (1)..(25): SEQ ID NO: 5456; WAN024GHP; Start 18; Stop 42
caagttcctctttcaaaaggtggca

SEQ ID NO: 411232 - DNA, 25 bp, Artificial
  probe
  misc_feature (1)..(25): SEQ ID NO: 5456; WAN024GHP; Start 3; Stop 27
ggactttggctattccaagttcctc

SEQ ID NO: 411233 - DNA, 25 bp, Artificial
  probe
  misc_feature (1)..(25): SEQ ID NO: 5456; WAN024GHP; Start 26; Stop 50
tctttcaaaaggtggcagtgcattt

SEQ ID NO: 411234 - DNA, 25 bp, Artificial
  probe
  misc_feature (1)..(25): SEQ ID NO: 5456; WAN024GHP; Start 21; Stop 45
gttcctctttcaaaaggtggcagtg

SEQ ID NO: 411235 - DNA, 25 bp, Artificial
  probe
  misc_feature (1)..(25): SEQ ID NO: 5456; WAN024GHP; Start 20; Stop 44
agttcctctttcaaaaggtggcagt

SEQ ID NO: 411236 - DNA, 25 bp, Artificial
  probe
  misc_feature (1)..(25): SEQ ID NO: 5456; WAN024GHP; Start 17; Stop 41
ccaagttcctctttcaaaaggtggc

SEQ ID NO: 411237 - DNA, 25 bp, Artificial
  probe
  misc_feature (1)..(25): SEQ ID NO: 5456; WAN024GHP; Start 25; Stop 49
ctctttcaaaaggtggcagtgcatt

SEQ ID NO: 411238 - DNA, 25 bp, Artificial
  probe
  misc_feature (1)..(25): SEQ ID NO: 5456; WAN024GHP; Start 2; Stop 26
tggactttggctattccaagttcct

SEQ ID NO: 411239 - DNA, 25 bp, Artificial
  probe
  misc_feature (1)..(25): SEQ ID NO: 5457; WAN024B5Y; Start 962; Stop 986
tcttggattgtagtgtgaattggaa

SEQ ID NO: 411240 - DNA, 25 bp, Artificial
  probe
  misc_feature (1)..(25): SEQ ID NO: 5457; WAN024B5Y; Start 959; Stop 983
aagtcttggattgtagtgtgaattg

SEQ ID NO: 411241 - DNA, 25 bp, Artificial
  probe
  misc_feature (1)..(25): SEQ ID NO: 5457; WAN024B5Y; Start 651; Stop 675
aaccattgaagataagcatacgaat

SEQ ID NO: 411242 - DNA, 25 bp, Artificial
  probe
  misc_feature (1)..(25): SEQ ID NO: 5457; WAN024B5Y; Start 649; Stop 673
ctaaccattgaagataagcatacga

SEQ ID NO: 411243 - DNA, 25 bp, Artificial
  probe
  misc_feature (1)..(25): SEQ ID NO: 5457; WAN024B5Y; Start 644; Stop 668
ccagtctaaccattgaagataagca

SEQ ID NO: 411244 - DNA, 25 bp, Artificial
  probe
  misc_feature (1)..(25): SEQ ID NO: 5457; WAN024B5Y; Start 961; Stop 985
gtcttggattgtagtgtgaattgga

SEQ ID NO: 411245 - DNA, 25 bp, Artificial
  probe
  misc_feature (1)..(25): SEQ ID NO: 5457; WAN024B5Y; Start 960; Stop 984
agtcttggattgtagtgtgaattgg

SEQ ID NO: 411246 - DNA, 25 bp, Artificial
  probe
  misc_feature (1)..(25): SEQ ID NO: 5457; WAN024B5Y; Start 652; Stop 676
accattgaagataagcatacgaatt

SEQ ID NO: 411247 - DNA, 25 bp, Artificial
  probe
  misc_feature (1)..(25): SEQ ID NO: 5457; WAN024B5Y; Start 645; Stop 669
cagtctaaccattgaagataagcat

SEQ ID NO: 411248 - DNA, 25 bp, Artificial
  probe
  misc_feature (1)..(25): SEQ ID NO: 5457; WAN024B5Y; Start 650; Stop 674
taaccattgaagataagcatacgaa

SEQ ID NO: 411249 - DNA, 25 bp, Artificial
  probe
  misc_feature (1)..(25): SEQ ID NO: 5457; WAN024B5Y; Start 648; Stop 672
tctaaccattgaagataagcatacg

SEQ ID NO: 411250 - DNA, 25 bp, Artificial
  probe
  misc_feature (1)..(25): SEQ ID NO: 5457; WAN024B5Y; Start 642; Stop 666
cgccagtctaaccattgaagataag

SEQ ID NO: 411251 - DNA, 25 bp, Artificial
  probe
  misc_feature (1)..(25): SEQ ID NO: 5457; WAN024B5Y; Start 643; Stop 667
gccagtctaaccattgaagataagc

SEQ ID NO: 411252 - DNA, 25 bp, Artificial
  probe
  misc_feature (1)..(25): SEQ ID NO: 5457; WAN024B5Y; Start 958; Stop 982
caagtcttggattgtagtgtgaatt

SEQ ID NO: 411253 - DNA, 25 bp, Artificial
  probe
  misc_feature (1)..(25): SEQ ID NO: 5457; WAN024B5Y; Start 619; Stop 643
ttaacagatgctaatatgcgtcacg

SEQ ID NO: 411254 - DNA, 25 bp, Artificial
  probe
  misc_feature (1)..(25): SEQ ID NO: 5457; WAN024B5Y; Start 641; Stop 665
acgccagtctaaccattgaagataa

SEQ ID NO: 411255 - DNA, 25 bp, Artificial
  probe
  misc_feature (1)..(25): SEQ ID NO: 5457; WAN024B5Y; Start 647; Stop 671
gtctaaccattgaagataagcatac

SEQ ID NO: 411256 - DNA, 25 bp, Artificial
  probe
  misc_feature (1)..(25): SEQ ID NO: 5457; WAN024B5Y; Start 303; Stop 327
taattacagccaagagagtgaggac

SEQ ID NO: 411257 - DNA, 25 bp, Artificial
  probe
  misc_feature (1)..(25): SEQ ID NO: 5457; WAN024B5Y; Start 646; Stop 670
agtctaaccattgaagataagcata

SEQ ID NO: 411258 - DNA, 25 bp, Artificial
  probe
  misc_feature (1)..(25): SEQ ID NO: 5457; WAN024B5Y; Start 548; Stop 572
ttctcttgattacagcggatacgag

SEQ ID NO: 411259 - DNA, 25 bp, Artificial
  probe
  misc_feature (1)..(25): SEQ ID NO: 5457; WAN024B5Y; Start 640; Stop 664
cacgccagtctaaccattgaagata

SEQ ID NO: 411260 - DNA, 25 bp, Artificial
  probe
  misc_feature (1)..(25): SEQ ID NO: 5457; WAN024B5Y; Start 352; Stop 376
ttgggagtagacggctttattattc

SEQ ID NO: 411261 - DNA, 25 bp, Artificial
  probe
  misc_feature (1)..(25): SEQ ID NO: 5457; WAN024B5Y; Start 351; Stop 375
cttgggagtagacggctttattatt

SEQ ID NO: 411262 - DNA, 25 bp, Artificial
  probe
  misc_feature (1)..(25): SEQ ID NO: 5457; WAN024B5Y; Start 729; Stop 753
tctggtatttatccctaactgttgg

SEQ ID NO: 411263 - DNA, 25 bp, Artificial
  probe
  misc_feature (1)..(25): SEQ ID NO: 5457; WAN024B5Y; Start 614; Stop 638
atgctttaacagatgctaatatgcg

SEQ ID NO: 411264 - DNA, 25 bp, Artificial
  probe
  misc_feature (1)..(25): SEQ ID NO: 5457; WAN024B5Y; Start 618; Stop 642
tttaacagatgctaatatgcgtcac

SEQ ID NO: 411265 - DNA, 25 bp, Artificial
  probe
  misc_feature (1)..(25): SEQ ID NO: 5457; WAN024B5Y; Start 617; Stop 641
ctttaacagatgctaatatgcgtca

SEQ ID NO: 411266 - DNA, 25 bp, Artificial
  probe
  misc_feature (1)..(25): SEQ ID NO: 5457; WAN024B5Y; Start 354; Stop 378
gggagtagacggctttattattcag

SEQ ID NO: 411267 - DNA, 25 bp, Artificial
  probe
  misc_feature (1)..(25): SEQ ID NO: 5457; WAN024B5Y; Start 966; Stop 990
ggattgtagtgtgaattggaaagag

SEQ ID NO: 411268 - DNA, 25 bp, Artificial
  probe
  misc_feature (1)..(25): SEQ ID NO: 5457; WAN024B5Y; Start 965; Stop 989
tggattgtagtgtgaattggaaaga

SEQ ID NO: 411269 - DNA, 25 bp, Artificial
  probe
  misc_feature (1)..(25): SEQ ID NO: 5457; WAN024B5Y; Start 964; Stop 988
ttggattgtagtgtgaattggaaag

SEQ ID NO: 411270 - DNA, 25 bp, Artificial
  probe
  misc_feature (1)..(25): SEQ ID NO: 5457; WAN024B5Y; Start 963; Stop 987
cttggattgtagtgtgaattggaaa

SEQ ID NO: 411271 - DNA, 25 bp, Artificial
  probe
  misc_feature (1)..(25): SEQ ID NO: 5457; WAN024B5Y; Start 616; Stop 640
gctttaacagatgctaatatgcgtc

SEQ ID NO: 411272 - DNA, 25 bp, Artificial
  probe
  misc_feature (1)..(25): SEQ ID NO: 5458; WAN024G5C; Start 93; Stop 117
acaaattataagtccccaggtcaaa

SEQ ID NO: 411273 - DNA, 25 bp, Artificial
  probe
  misc_feature (1)..(25): SEQ ID NO: 5458; WAN024G5C; Start 94; Stop 118
caaattataagtccccaggtcaaaa

SEQ ID NO: 411274 - DNA, 25 bp, Artificial
  probe
  misc_feature (1)..(25): SEQ ID NO: 5458; WAN024G5C; Start 92; Stop 116
gacaaattataagtccccaggtcaa

SEQ ID NO: 411275 - DNA, 25 bp, Artificial
  probe
  misc_feature (1)..(25): SEQ ID NO: 5458; WAN024G5C; Start 76; Stop 100
acaggaaaattagttggacaaatta

SEQ ID NO: 411276 - DNA, 25 bp, Artificial
  probe
  misc_feature (1)..(25): SEQ ID NO: 5458; WAN024G5C; Start 132; Stop 156
aaaatggagaaagaaactaaaactt

SEQ ID NO: 411277 - DNA, 25 bp, Artificial
  probe
  misc_feature (1)..(25): SEQ ID NO: 5458; WAN024G5C; Start 77; Stop 101
caggaaaattagttggacaaattat

SEQ ID NO: 411278 - DNA, 25 bp, Artificial
  probe
  misc_feature (1)..(25): SEQ ID NO: 5458; WAN024G5C; Start 133; Stop 157
aaatggagaaagaaactaaaacttt

SEQ ID NO: 411279 - DNA, 25 bp, Artificial
  probe
  misc_feature (1)..(25): SEQ ID NO: 5458; WAN024G5C; Start 50; Stop 74
agcttgaagtcaaagaaggtctttt

SEQ ID NO: 411280 - DNA, 25 bp, Artificial
  probe
  misc_feature (1)..(25): SEQ ID NO: 5458; WAN024G5C; Start 84; Stop 108
attagttggacaaattataagtccc

SEQ ID NO: 411281 - DNA, 25 bp, Artificial
  probe
  misc_feature (1)..(25): SEQ ID NO: 5458; WAN024G5C; Start 87; Stop 111
agttggacaaattataagtccccag

SEQ ID NO: 411282 - DNA, 25 bp, Artificial
  probe
  misc_feature (1)..(25): SEQ ID NO: 5458; WAN024G5C; Start 86; Stop 110
tagttggacaaattataagtcccca

SEQ ID NO: 411283 - DNA, 25 bp, Artificial
  probe
  misc_feature (1)..(25): SEQ ID NO: 5458; WAN024G5C; Start 88; Stop 112
gttggacaaattataagtccccagg

SEQ ID NO: 411284 - DNA, 25 bp, Artificial
  probe
  misc_feature (1)..(25): SEQ ID NO: 5458; WAN024G5C; Start 85; Stop 109
ttagttggacaaattataagtcccc

SEQ ID NO: 411285 - DNA, 25 bp, Artificial
  probe
  misc_feature (1)..(25): SEQ ID NO: 5458; WAN024G5C; Start 89; Stop 113
ttggacaaattataagtccccaggt

SEQ ID NO: 411286 - DNA, 25 bp, Artificial
  probe
  misc_feature (1)..(25): SEQ ID NO: 5458; WAN024G5C; Start 91; Stop 115
ggacaaattataagtccccaggtca

SEQ ID NO: 411287 - DNA, 25 bp, Artificial
  probe
  misc_feature (1)..(25): SEQ ID NO: 5458; WAN024G5C; Start 90; Stop 114
tggacaaattataagtccccaggtc

SEQ ID NO: 411288 - DNA, 25 bp, Artificial
  probe
  misc_feature (1)..(25): SEQ ID NO: 5458; WAN024G5C; Start 83; Stop 107
aattagttggacaaattataagtcc

SEQ ID NO: 411289 - DNA, 25 bp, Artificial
  probe
  misc_feature (1)..(25): SEQ ID NO: 5459; WAN024EY4; Start 1462; Stop 1486
ccaagataaggaattgtctgtcaac

SEQ ID NO: 411290 - DNA, 25 bp, Artificial
  probe
  misc_feature (1)..(25): SEQ ID NO: 5459; WAN024EY4; Start 1461; Stop 1485
accaagataaggaattgtctgtcaa

SEQ ID NO: 411291 - DNA, 25 bp, Artificial
  probe
  misc_feature (1)..(25): SEQ ID NO: 5459; WAN024EY4; Start 1460; Stop 1484
aaccaagataaggaattgtctgtca

SEQ ID NO: 411292 - DNA, 25 bp, Artificial
  probe
  misc_feature (1)..(25): SEQ ID NO: 5459; WAN024EY4; Start 1406; Stop 1430
ctcaatatggtcaagactagcaagg

SEQ ID NO: 411293 - DNA, 25 bp, Artificial
  probe
  misc_feature (1)..(25): SEQ ID NO: 5459; WAN024EY4; Start 799; Stop 823
ctatgatctgattgctattcgttgt

SEQ ID NO: 411294 - DNA, 25 bp, Artificial
  probe
  misc_feature (1)..(25): SEQ ID NO: 5459; WAN024EY4; Start 1851; Stop 1875
gtgacgatattgttggctacattac

SEQ ID NO: 411295 - DNA, 25 bp, Artificial
  probe
  misc_feature (1)..(25): SEQ ID NO: 5459; WAN024EY4; Start 798; Stop 822
tctatgatctgattgctattcgttg

SEQ ID NO: 411296 - DNA, 25 bp, Artificial
  probe
  misc_feature (1)..(25): SEQ ID NO: 5459; WAN024EY4; Start 1580; Stop 1604
aagaccagttacaagacagaagact

SEQ ID NO: 411297 - DNA, 25 bp, Artificial
  probe
  misc_feature (1)..(25): SEQ ID NO: 5459; WAN024EY4; Start 1463; Stop 1487
caagataaggaattgtctgtcaaca

SEQ ID NO: 411298 - DNA, 25 bp, Artificial
  probe
  misc_feature (1)..(25): SEQ ID NO: 5459; WAN024EY4; Start 802; Stop 826
tgatctgattgctattcgttgtatt

SEQ ID NO: 411299 - DNA, 25 bp, Artificial
  probe
  misc_feature (1)..(25): SEQ ID NO: 5459; WAN024EY4; Start 1090; Stop 1114
tattggaatgaactggatcaaggag

SEQ ID NO: 411300 - DNA, 25 bp, Artificial
  probe
  misc_feature (1)..(25): SEQ ID NO: 5459; WAN024EY4; Start 1089; Stop 1113
ctattggaatgaactggatcaagga

SEQ ID NO: 411301 - DNA, 25 bp, Artificial
  probe
  misc_feature (1)..(25): SEQ ID NO: 5459; WAN024EY4; Start 1852; Stop 1876
tgacgatattgttggctacattacc

SEQ ID NO: 411302 - DNA, 25 bp, Artificial
  probe
  misc_feature (1)..(25): SEQ ID NO: 5459; WAN024EY4; Start 1850; Stop 1874
ggtgacgatattgttggctacatta

SEQ ID NO: 411303 - DNA, 25 bp, Artificial
  probe
  misc_feature (1)..(25): SEQ ID NO: 5459; WAN024EY4; Start 801; Stop 825
atgatctgattgctattcgttgtat

SEQ ID NO: 411304 - DNA, 25 bp, Artificial
  probe
  misc_feature (1)..(25): SEQ ID NO: 5459; WAN024EY4; Start 1401; Stop 1425
actggctcaatatggtcaagactag

SEQ ID NO: 411305 - DNA, 25 bp, Artificial
  probe
  misc_feature (1)..(25): SEQ ID NO: 5459; WAN024EY4; Start 1581; Stop 1605
agaccagttacaagacagaagactc

SEQ ID NO: 411306 - DNA, 25 bp, Artificial
  probe
  misc_feature (1)..(25): SEQ ID NO: 5459; WAN024EY4; Start 1815; Stop 1839
tagtgcggattgctaagtgttgtaa

SEQ ID NO: 411307 - DNA, 25 bp, Artificial
  probe
  misc_feature (1)..(25): SEQ ID NO: 5459; WAN024EY4; Start 800; Stop 824
tatgatctgattgctattcgttgta

SEQ ID NO: 411308 - DNA, 25 bp, Artificial
  probe
  misc_feature (1)..(25): SEQ ID NO: 5459; WAN024EY4; Start 797; Stop 821
atctatgatctgattgctattcgtt

SEQ ID NO: 411309 - DNA, 25 bp, Artificial
  probe
  misc_feature (1)..(25): SEQ ID NO: 5459; WAN024EY4; Start 1092; Stop 1116
ttggaatgaactggatcaaggagat

SEQ ID NO: 411310 - DNA, 25 bp, Artificial
  probe
  misc_feature (1)..(25): SEQ ID NO: 5459; WAN024EY4; Start 1091; Stop 1115
attggaatgaactggatcaaggaga

SEQ ID NO: 411311 - DNA, 25 bp, Artificial
  probe
  misc_feature (1)..(25): SEQ ID NO: 5459; WAN024EY4; Start 1088; Stop 1112
gctattggaatgaactggatcaagg

SEQ ID NO: 411312 - DNA, 25 bp, Artificial
  probe
  misc_feature (1)..(25): SEQ ID NO: 5459; WAN024EY4; Start 1400; Stop 1424
gactggctcaatatggtcaagacta

SEQ ID NO: 411313 - DNA, 25 bp, Artificial
  probe
  misc_feature (1)..(25): SEQ ID NO: 5459; WAN024EY4; Start 242; Stop 266
catgatgtggtggaagatacagatg

SEQ ID NO: 411314 - DNA, 25 bp, Artificial
  probe
  misc_feature (1)..(25): SEQ ID NO: 5459; WAN024EY4; Start 1079; Stop 1103
aaggaatcagctattggaatgaact

SEQ ID NO: 411315 - DNA, 25 bp, Artificial
  probe
  misc_feature (1)..(25): SEQ ID NO: 5459; WAN024EY4; Start 1078; Stop 1102
caaggaatcagctattggaatgaac

SEQ ID NO: 411316 - DNA, 25 bp, Artificial
  probe
  misc_feature (1)..(25): SEQ ID NO: 5459; WAN024EY4; Start 1853; Stop 1877
gacgatattgttggctacattacca

SEQ ID NO: 411317 - DNA, 25 bp, Artificial
  probe
  misc_feature (1)..(25): SEQ ID NO: 5459; WAN024EY4; Start 157; Stop 181
gccttatatcattcaccctatccaa

SEQ ID NO: 411318 - DNA, 25 bp, Artificial
  probe
  misc_feature (1)..(25): SEQ ID NO: 5459; WAN024EY4; Start 155; Stop 179
gagccttatatcattcaccctatcc

SEQ ID NO: 411319 - DNA, 25 bp, Artificial
  probe
  misc_feature (1)..(25): SEQ ID NO: 5459; WAN024EY4; Start 154; Stop 178
cgagccttatatcattcaccctatc

SEQ ID NO: 411320 - DNA, 25 bp, Artificial
  probe
  misc_feature (1)..(25): SEQ ID NO: 5459; WAN024EY4; Start 1579; Stop 1603
aaagaccagttacaagacagaagac

SEQ ID NO: 411321 - DNA, 25 bp, Artificial
  probe
  misc_feature (1)..(25): SEQ ID NO: 5459; WAN024EY4; Start 2148; Stop 2172
gtattgccaacctctctacactgac

SEQ ID NO: 411322 - DNA, 25 bp, Artificial
  probe
  misc_feature (1)..(25): SEQ ID NO: 5460; WAN024CBG; Start 71; Stop 95
tagatgtagtaggtgttcaagactt

SEQ ID NO: 411323 - DNA, 25 bp, Artificial
  probe
  misc_feature (1)..(25): SEQ ID NO: 5460; WAN024CBG; Start 70; Stop 94
ttagatgtagtaggtgttcaagact

SEQ ID NO: 411324 - DNA, 25 bp, Artificial
  probe
  misc_feature (1)..(25): SEQ ID NO: 5460; WAN024CBG; Start 375; Stop 399
tacagaaggaatacctatgtgtgtt

SEQ ID NO: 411325 - DNA, 25 bp, Artificial
  probe
  misc_feature (1)..(25): SEQ ID NO: 5460; WAN024CBG; Start 374; Stop 398
atacagaaggaatacctatgtgtgt

SEQ ID NO: 411326 - DNA, 25 bp, Artificial
  probe
  misc_feature (1)..(25): SEQ ID NO: 5460; WAN024CBG; Start 372; Stop 396
tgatacagaaggaatacctatgtgt

SEQ ID NO: 411327 - DNA, 25 bp, Artificial
  probe
  misc_feature (1)..(25): SEQ ID NO: 5460; WAN024CBG; Start 373; Stop 397
gatacagaaggaatacctatgtgtg

SEQ ID NO: 411328 - DNA, 25 bp, Artificial
  probe
  misc_feature (1)..(25): SEQ ID NO: 5460; WAN024CBG; Start 488; Stop 512
tatttgagaaggaagatgttgaggg

SEQ ID NO: 411329 - DNA, 25 bp, Artificial
  probe
  misc_feature (1)..(25): SEQ ID NO: 5460; WAN024CBG; Start 229; Stop 253
attatggctggaaatggtagtatgt

SEQ ID NO: 411330 - DNA, 25 bp, Artificial
  probe
  misc_feature (1)..(25): SEQ ID NO: 5460; WAN024CBG; Start 64; Stop 88
agcgatttagatgtagtaggtgttc

SEQ ID NO: 411331 - DNA, 25 bp, Artificial
  probe
  misc_feature (1)..(25): SEQ ID NO: 5460; WAN024CBG; Start 371; Stop 395
ctgatacagaaggaatacctatgtg

SEQ ID NO: 411332 - DNA, 25 bp, Artificial
  probe
  misc_feature (1)..(25): SEQ ID NO: 5460; WAN024CBG; Start 65; Stop 89
gcgatttagatgtagtaggtgttca

SEQ ID NO: 411333 - DNA, 25 bp, Artificial
  probe
  misc_feature (1)..(25): SEQ ID NO: 5460; WAN024CBG; Start 230; Stop 254
ttatggctggaaatggtagtatgtg

SEQ ID NO: 411334 - DNA, 25 bp, Artificial
  probe
  misc_feature (1)..(25): SEQ ID NO: 5460; WAN024CBG; Start 63; Stop 87
tagcgatttagatgtagtaggtgtt

SEQ ID NO: 411335 - DNA, 25 bp, Artificial
  probe
  misc_feature (1)..(25): SEQ ID NO: 5460; WAN024CBG; Start 132; Stop 156
catttgttatgttggaaggttggat

SEQ ID NO: 411336 - DNA, 25 bp, Artificial
  probe
  misc_feature (1)..(25): SEQ ID NO: 5460; WAN024CBG; Start 130; Stop 154
atcatttgttatgttggaaggttgg

SEQ ID NO: 411337 - DNA, 25 bp, Artificial
  probe
  misc_feature (1)..(25): SEQ ID NO: 5460; WAN024CBG; Start 62; Stop 86
atagcgatttagatgtagtaggtgt

SEQ ID NO: 411338 - DNA, 25 bp, Artificial
  probe
  misc_feature (1)..(25): SEQ ID NO: 5460; WAN024CBG; Start 487; Stop 511
ttatttgagaaggaagatgttgagg

SEQ ID NO: 411339 - DNA, 25 bp, Artificial
  probe
  misc_feature (1)..(25): SEQ ID NO: 5460; WAN024CBG; Start 131; Stop 155
tcatttgttatgttggaaggttgga

SEQ ID NO: 411340 - DNA, 25 bp, Artificial
  probe
  misc_feature (1)..(25): SEQ ID NO: 5460; WAN024CBG; Start 446; Stop 470
gcgggttaagtgaaattattgaaca

SEQ ID NO: 411341 - DNA, 25 bp, Artificial
  probe
  misc_feature (1)..(25): SEQ ID NO: 5460; WAN024CBG; Start 444; Stop 468
tggcgggttaagtgaaattattgaa

SEQ ID NO: 411342 - DNA, 25 bp, Artificial
  probe
  misc_feature (1)..(25): SEQ ID NO: 5460; WAN024CBG; Start 443; Stop 467
ttggcgggttaagtgaaattattga

SEQ ID NO: 411343 - DNA, 25 bp, Artificial
  probe
  misc_feature (1)..(25): SEQ ID NO: 5460; WAN024CBG; Start 442; Stop 466
gttggcgggttaagtgaaattattg

SEQ ID NO: 411344 - DNA, 25 bp, Artificial
  probe
  misc_feature (1)..(25): SEQ ID NO: 5460; WAN024CBG; Start 440; Stop 464
atgttggcgggttaagtgaaattat

SEQ ID NO: 411345 - DNA, 25 bp, Artificial
  probe
  misc_feature (1)..(25): SEQ ID NO: 5460; WAN024CBG; Start 302; Stop 326
tcaggttacttggtgaaatctatcc

SEQ ID NO: 411346 - DNA, 25 bp, Artificial
  probe
  misc_feature (1)..(25): SEQ ID NO: 5460; WAN024CBG; Start 399; Stop 423
tttagagtcaatgtcacaaggaact

SEQ ID NO: 411347 - DNA, 25 bp, Artificial
  probe
  misc_feature (1)..(25): SEQ ID NO: 5460; WAN024CBG; Start 489; Stop 513
atttgagaaggaagatgttgaggga

SEQ ID NO: 411348 - DNA, 25 bp, Artificial
  probe
  misc_feature (1)..(25): SEQ ID NO: 5460; WAN024CBG; Start 445; Stop 469
ggcgggttaagtgaaattattgaac

SEQ ID NO: 411349 - DNA, 25 bp, Artificial
  probe
  misc_feature (1)..(25): SEQ ID NO: 5460; WAN024CBG; Start 66; Stop 90
cgatttagatgtagtaggtgttcaa

SEQ ID NO: 411350 - DNA, 25 bp, Artificial
  probe
  misc_feature (1)..(25): SEQ ID NO: 5460; WAN024CBG; Start 441; Stop 465
tgttggcgggttaagtgaaattatt

SEQ ID NO: 411351 - DNA, 25 bp, Artificial
  probe
  misc_feature (1)..(25): SEQ ID NO: 5460; WAN024CBG; Start 439; Stop 463
aatgttggcgggttaagtgaaatta

SEQ ID NO: 411352 - DNA, 25 bp, Artificial
  probe
  misc_feature (1)..(25): SEQ ID NO: 5460; WAN024CBG; Start 438; Stop 462
taatgttggcgggttaagtgaaatt

SEQ ID NO: 411353 - DNA, 25 bp, Artificial
  probe
  misc_feature (1)..(25): SEQ ID NO: 5460; WAN024CBG; Start 133; Stop 157
atttgttatgttggaaggttggatc

SEQ ID NO: 411354 - DNA, 25 bp, Artificial
  probe
  misc_feature (1)..(25): SEQ ID NO: 5460; WAN024CBG; Start 72; Stop 96
agatgtagtaggtgttcaagacttt

SEQ ID NO: 411355 - DNA, 25 bp, Artificial
  probe
  misc_feature (1)..(25): SEQ ID NO: 5461; WAN024ERS; Start 72; Stop 96
gatgccttcttatgctcaagtagtg

SEQ ID NO: 411356 - DNA, 25 bp, Artificial
  probe
  misc_feature (1)..(25): SEQ ID NO: 5461; WAN024ERS; Start 121; Stop 145
tctgttagtaataatgagacggaca

SEQ ID NO: 411357 - DNA, 25 bp, Artificial
  probe
  misc_feature (1)..(25): SEQ ID NO: 5461; WAN024ERS; Start 120; Stop 144
ctctgttagtaataatgagacggac

SEQ ID NO: 411358 - DNA, 25 bp, Artificial
  probe
  misc_feature (1)..(25): SEQ ID NO: 5461; WAN024ERS; Start 535; Stop 559
caacagagagttcttgatattgtga

SEQ ID NO: 411359 - DNA, 25 bp, Artificial
  probe
  misc_feature (1)..(25): SEQ ID NO: 5461; WAN024ERS; Start 73; Stop 97
atgccttcttatgctcaagtagtga

SEQ ID NO: 411360 - DNA, 25 bp, Artificial
  probe
  misc_feature (1)..(25): SEQ ID NO: 5461; WAN024ERS; Start 612; Stop 636
tattgtggtagcagcggttatgatt

SEQ ID NO: 411361 - DNA, 25 bp, Artificial
  probe
  misc_feature (1)..(25): SEQ ID NO: 5461; WAN024ERS; Start 343; Stop 367
cgtgtaatcaatgatgaagatgaca

SEQ ID NO: 411362 - DNA, 25 bp, Artificial
  probe
  misc_feature (1)..(25): SEQ ID NO: 5461; WAN024ERS; Start 349; Stop 373
atcaatgatgaagatgacatggagg

SEQ ID NO: 411363 - DNA, 25 bp, Artificial
  probe
  misc_feature (1)..(25): SEQ ID NO: 5461; WAN024ERS; Start 348; Stop 372
aatcaatgatgaagatgacatggag

SEQ ID NO: 411364 - DNA, 25 bp, Artificial
  probe
  misc_feature (1)..(25): SEQ ID NO: 5461; WAN024ERS; Start 122; Stop 146
ctgttagtaataatgagacggacaa

SEQ ID NO: 411365 - DNA, 25 bp, Artificial
  probe
  misc_feature (1)..(25): SEQ ID NO: 5461; WAN024ERS; Start 69; Stop 93
aacgatgccttcttatgctcaagta

SEQ ID NO: 411366 - DNA, 25 bp, Artificial
  probe
  misc_feature (1)..(25): SEQ ID NO: 5461; WAN024ERS; Start 351; Stop 375
caatgatgaagatgacatggaggac

SEQ ID NO: 411367 - DNA, 25 bp, Artificial
  probe
  misc_feature (1)..(25): SEQ ID NO: 5461; WAN024ERS; Start 541; Stop 565
agagttcttgatattgtgattacct

SEQ ID NO: 411368 - DNA, 25 bp, Artificial
  probe
  misc_feature (1)..(25): SEQ ID NO: 5461; WAN024ERS; Start 352; Stop 376
aatgatgaagatgacatggaggaca

SEQ ID NO: 411369 - DNA, 25 bp, Artificial
  probe
  misc_feature (1)..(25): SEQ ID NO: 5461; WAN024ERS; Start 611; Stop 635
ctattgtggtagcagcggttatgat

SEQ ID NO: 411370 - DNA, 25 bp, Artificial
  probe
  misc_feature (1)..(25): SEQ ID NO: 5461; WAN024ERS; Start 350; Stop 374
tcaatgatgaagatgacatggagga

SEQ ID NO: 411371 - DNA, 25 bp, Artificial
  probe
  misc_feature (1)..(25): SEQ ID NO: 5461; WAN024ERS; Start 537; Stop 561
acagagagttcttgatattgtgatt

SEQ ID NO: 411372 - DNA, 25 bp, Artificial
  probe
  misc_feature (1)..(25): SEQ ID NO: 5461; WAN024ERS; Start 536; Stop 560
aacagagagttcttgatattgtgat

SEQ ID NO: 411373 - DNA, 25 bp, Artificial
  probe
  misc_feature (1)..(25): SEQ ID NO: 5461; WAN024ERS; Start 540; Stop 564
gagagttcttgatattgtgattacc

SEQ ID NO: 411374 - DNA, 25 bp, Artificial
  probe
  misc_feature (1)..(25): SEQ ID NO: 5461; WAN024ERS; Start 733; Stop 757
atttacgaggctatctggattgtag

SEQ ID NO: 411375 - DNA, 25 bp, Artificial
  probe
  misc_feature (1)..(25): SEQ ID NO: 5461; WAN024ERS; Start 731; Stop 755
ttatttacgaggctatctggattgt

SEQ ID NO: 411376 - DNA, 25 bp, Artificial
  probe
  misc_feature (1)..(25): SEQ ID NO: 5461; WAN024ERS; Start 71; Stop 95
cgatgccttcttatgctcaagtagt

SEQ ID NO: 411377 - DNA, 25 bp, Artificial
  probe
  misc_feature (1)..(25): SEQ ID NO: 5461; WAN024ERS; Start 70; Stop 94
acgatgccttcttatgctcaagtag

SEQ ID NO: 411378 - DNA, 25 bp, Artificial
  probe
  misc_feature (1)..(25): SEQ ID NO: 5461; WAN024ERS; Start 353; Stop 377
atgatgaagatgacatggaggacag

SEQ ID NO: 411379 - DNA, 25 bp, Artificial
  probe
  misc_feature (1)..(25): SEQ ID NO: 5461; WAN024ERS; Start 347; Stop 371
taatcaatgatgaagatgacatgga

SEQ ID NO: 411380 - DNA, 25 bp, Artificial
  probe
  misc_feature (1)..(25): SEQ ID NO: 5461; WAN024ERS; Start 346; Stop 370
gtaatcaatgatgaagatgacatgg

SEQ ID NO: 411381 - DNA, 25 bp, Artificial
  probe
  misc_feature (1)..(25): SEQ ID NO: 5461; WAN024ERS; Start 175; Stop 199
acaaatgaacagggattaacgattc

SEQ ID NO: 411382 - DNA, 25 bp, Artificial
  probe
  misc_feature (1)..(25): SEQ ID NO: 5461; WAN024ERS; Start 414; Stop 438
tttgaaagaggctggatttacgaaa

SEQ ID NO: 411383 - DNA, 25 bp, Artificial
  probe
  misc_feature (1)..(25): SEQ ID NO: 5461; WAN024ERS; Start 732; Stop 756
tatttacgaggctatctggattgta

SEQ ID NO: 411384 - DNA, 25 bp, Artificial
  probe
  misc_feature (1)..(25): SEQ ID NO: 5461; WAN024ERS; Start 188; Stop 212
gattaacgattccaagcagtttact

SEQ ID NO: 411385 - DNA, 25 bp, Artificial
  probe
  misc_feature (1)..(25): SEQ ID NO: 5461; WAN024ERS; Start 730; Stop 754
tttatttacgaggctatctggattg

SEQ ID NO: 411386 - DNA, 25 bp, Artificial
  probe
  misc_feature (1)..(25): SEQ ID NO: 5461; WAN024ERS; Start 342; Stop 366
acgtgtaatcaatgatgaagatgac

SEQ ID NO: 411387 - DNA, 25 bp, Artificial
  probe
  misc_feature (1)..(25): SEQ ID NO: 5461; WAN024ERS; Start 542; Stop 566
gagttcttgatattgtgattacctt

SEQ ID NO: 411388 - DNA, 25 bp, Artificial
  probe
  misc_feature (1)..(25): SEQ ID NO: 5462; WAN024FM5; Start 760; Stop 784
gagttaggctatgagtataatccaa

SEQ ID NO: 411389 - DNA, 25 bp, Artificial
  probe
  misc_feature (1)..(25): SEQ ID NO: 5462; WAN024FM5; Start 759; Stop 783
ggagttaggctatgagtataatcca

SEQ ID NO: 411390 - DNA, 25 bp, Artificial
  probe
  misc_feature (1)..(25): SEQ ID NO: 5462; WAN024FM5; Start 758; Stop 782
tggagttaggctatgagtataatcc

SEQ ID NO: 411391 - DNA, 25 bp, Artificial
  probe
  misc_feature (1)..(25): SEQ ID NO: 5462; WAN024FM5; Start 757; Stop 781
atggagttaggctatgagtataatc

SEQ ID NO: 411392 - DNA, 25 bp, Artificial
  probe
  misc_feature (1)..(25): SEQ ID NO: 5462; WAN024FM5; Start 108; Stop 132
agctgcacgactatcaagatataat

SEQ ID NO: 411393 - DNA, 25 bp, Artificial
  probe
  misc_feature (1)..(25): SEQ ID NO: 5462; WAN024FM5; Start 107; Stop 131
tagctgcacgactatcaagatataa

SEQ ID NO: 411394 - DNA, 25 bp, Artificial
  probe
  misc_feature (1)..(25): SEQ ID NO: 5462; WAN024FM5; Start 109; Stop 133
gctgcacgactatcaagatataatt

SEQ ID NO: 411395 - DNA, 25 bp, Artificial
  probe
  misc_feature (1)..(25): SEQ ID NO: 5462; WAN024FM5; Start 931; Stop 955
gtaagcgataaattggacacatact

SEQ ID NO: 411396 - DNA, 25 bp, Artificial
  probe
  misc_feature (1)..(25): SEQ ID NO: 5462; WAN024FM5; Start 600; Stop 624
tgaaacctatcctaagtatgttgcg

SEQ ID NO: 411397 - DNA, 25 bp, Artificial
  probe
  misc_feature (1)..(25): SEQ ID NO: 5462; WAN024FM5; Start 933; Stop 957
aagcgataaattggacacatacttt

SEQ ID NO: 411398 - DNA, 25 bp, Artificial
  probe
  misc_feature (1)..(25): SEQ ID NO: 5462; WAN024FM5; Start 761; Stop 785
agttaggctatgagtataatccaat

SEQ ID NO: 411399 - DNA, 25 bp, Artificial
  probe
  misc_feature (1)..(25): SEQ ID NO: 5462; WAN024FM5; Start 756; Stop 780
aatggagttaggctatgagtataat

SEQ ID NO: 411400 - DNA, 25 bp, Artificial
  probe
  misc_feature (1)..(25): SEQ ID NO: 5462; WAN024FM5; Start 601; Stop 625
gaaacctatcctaagtatgttgcgg

SEQ ID NO: 411401 - DNA, 25 bp, Artificial
  probe
  misc_feature (1)..(25): SEQ ID NO: 5462; WAN024FM5; Start 599; Stop 623
atgaaacctatcctaagtatgttgc

SEQ ID NO: 411402 - DNA, 25 bp, Artificial
  probe
  misc_feature (1)..(25): SEQ ID NO: 5462; WAN024FM5; Start 932; Stop 956
taagcgataaattggacacatactt

SEQ ID NO: 411403 - DNA, 25 bp, Artificial
  probe
  misc_feature (1)..(25): SEQ ID NO: 5462; WAN024FM5; Start 106; Stop 130
atagctgcacgactatcaagatata

SEQ ID NO: 411404 - DNA, 25 bp, Artificial
  probe
  misc_feature (1)..(25): SEQ ID NO: 5462; WAN024FM5; Start 930; Stop 954
tgtaagcgataaattggacacatac

SEQ ID NO: 411405 - DNA, 25 bp, Artificial
  probe
  misc_feature (1)..(25): SEQ ID NO: 5462; WAN024FM5; Start 349; Stop 373
gctgaaagatttggttatgaataca

SEQ ID NO: 411406 - DNA, 25 bp, Artificial
  probe
  misc_feature (1)..(25): SEQ ID NO: 5462; WAN024FM5; Start 348; Stop 372
tgctgaaagatttggttatgaatac

SEQ ID NO: 411407 - DNA, 25 bp, Artificial
  probe
  misc_feature (1)..(25): SEQ ID NO: 5462; WAN024FM5; Start 927; Stop 951
atatgtaagcgataaattggacaca

SEQ ID NO: 411408 - DNA, 25 bp, Artificial
  probe
  misc_feature (1)..(25): SEQ ID NO: 5462; WAN024FM5; Start 507; Stop 531
tggtatctggttcgatgcaactatt

SEQ ID NO: 411409 - DNA, 25 bp, Artificial
  probe
  misc_feature (1)..(25): SEQ ID NO: 5462; WAN024FM5; Start 340; Stop 364
aaagaatatgctgaaagatttggtt

SEQ ID NO: 411410 - DNA, 25 bp, Artificial
  probe
  misc_feature (1)..(25): SEQ ID NO: 5462; WAN024FM5; Start 755; Stop 779
taatggagttaggctatgagtataa

SEQ ID NO: 411411 - DNA, 25 bp, Artificial
  probe
  misc_feature (1)..(25): SEQ ID NO: 5462; WAN024FM5; Start 591; Stop 615
gaagggagatgaaacctatcctaag

SEQ ID NO: 411412 - DNA, 25 bp, Artificial
  probe
  misc_feature (1)..(25): SEQ ID NO: 5462; WAN024FM5; Start 593; Stop 617
agggagatgaaacctatcctaagta

SEQ ID NO: 411413 - DNA, 25 bp, Artificial
  probe
  misc_feature (1)..(25): SEQ ID NO: 5462; WAN024FM5; Start 592; Stop 616
aagggagatgaaacctatcctaagt

SEQ ID NO: 411414 - DNA, 25 bp, Artificial
  probe
  misc_feature (1)..(25): SEQ ID NO: 5462; WAN024FM5; Start 754; Stop 778
ttaatggagttaggctatgagtata

SEQ ID NO: 411415 - DNA, 25 bp, Artificial
  probe
  misc_feature (1)..(25): SEQ ID NO: 5462; WAN024FM5; Start 596; Stop 620
gagatgaaacctatcctaagtatgt

SEQ ID NO: 411416 - DNA, 25 bp, Artificial
  probe
  misc_feature (1)..(25): SEQ ID NO: 5462; WAN024FM5; Start 594; Stop 618
gggagatgaaacctatcctaagtat

SEQ ID NO: 411417 - DNA, 25 bp, Artificial
  probe
  misc_feature (1)..(25): SEQ ID NO: 5462; WAN024FM5; Start 590; Stop 614
cgaagggagatgaaacctatcctaa

SEQ ID NO: 411418 - DNA, 25 bp, Artificial
  probe
  misc_feature (1)..(25): SEQ ID NO: 5462; WAN024FM5; Start 576; Stop 600
ttatactattcgtgcgaagggagat

SEQ ID NO: 411419 - DNA, 25 bp, Artificial
  probe
  misc_feature (1)..(25): SEQ ID NO: 5462; WAN024FM5; Start 602; Stop 626
aaacctatcctaagtatgttgcgga

SEQ ID NO: 411420 - DNA, 25 bp, Artificial
  probe
  misc_feature (1)..(25): SEQ ID NO: 5462; WAN024FM5; Start 575; Stop 599
tttatactattcgtgcgaagggaga

SEQ ID NO: 411421 - DNA, 25 bp, Artificial
  probe
  misc_feature (1)..(25): SEQ ID NO: 5463; WAN024CRE; Start 193; Stop 217
ccaaatcatcctctaaactatagcg

SEQ ID NO: 411422 - DNA, 25 bp, Artificial
  probe
  misc_feature (1)..(25): SEQ ID NO: 5463; WAN024CRE; Start 71; Stop 95
atgaccttcttccagactccacaag

SEQ ID NO: 411423 - DNA, 25 bp, Artificial
  probe
  misc_feature (1)..(25): SEQ ID NO: 5463; WAN024CRE; Start 192; Stop 216
accaaatcatcctctaaactatagc

SEQ ID NO: 411424 - DNA, 25 bp, Artificial
  probe
  misc_feature (1)..(25): SEQ ID NO: 5463; WAN024CRE; Start 76; Stop 100
cttcttccagactccacaagatttc

SEQ ID NO: 411425 - DNA, 25 bp, Artificial
  probe
  misc_feature (1)..(25): SEQ ID NO: 5463; WAN024CRE; Start 65; Stop 89
ttcttcatgaccttcttccagactc

SEQ ID NO: 411426 - DNA, 25 bp, Artificial
  probe
  misc_feature (1)..(25): SEQ ID NO: 5463; WAN024CRE; Start 74; Stop 98
accttcttccagactccacaagatt

SEQ ID NO: 411427 - DNA, 25 bp, Artificial
  probe
  misc_feature (1)..(25): SEQ ID NO: 5463; WAN024CRE; Start 79; Stop 103
cttccagactccacaagatttcctg

SEQ ID NO: 411428 - DNA, 25 bp, Artificial
  probe
  misc_feature (1)..(25): SEQ ID NO: 5463; WAN024CRE; Start 70; Stop 94
catgaccttcttccagactccacaa

SEQ ID NO: 411429 - DNA, 25 bp, Artificial
  probe
  misc_feature (1)..(25): SEQ ID NO: 5463; WAN024CRE; Start 80; Stop 104
ttccagactccacaagatttcctga

SEQ ID NO: 411430 - DNA, 25 bp, Artificial
  probe
  misc_feature (1)..(25): SEQ ID NO: 5463; WAN024CRE; Start 95; Stop 119
gatttcctgaccacgctcatcattt

SEQ ID NO: 411431 - DNA, 25 bp, Artificial
  probe
  misc_feature (1)..(25): SEQ ID NO: 5463; WAN024CRE; Start 77; Stop 101
ttcttccagactccacaagatttcc

SEQ ID NO: 411432 - DNA, 25 bp, Artificial
  probe
  misc_feature (1)..(25): SEQ ID NO: 5463; WAN024CRE; Start 75; Stop 99
ccttcttccagactccacaagattt

SEQ ID NO: 411433 - DNA, 25 bp, Artificial
  probe
  misc_feature (1)..(25): SEQ ID NO: 5463; WAN024CRE; Start 73; Stop 97
gaccttcttccagactccacaagat

SEQ ID NO: 411434 - DNA, 25 bp, Artificial
  probe
  misc_feature (1)..(25): SEQ ID NO: 5463; WAN024CRE; Start 242; Stop 266
gtagagccgattgttcttttccttg

SEQ ID NO: 411435 - DNA, 25 bp, Artificial
  probe
  misc_feature (1)..(25): SEQ ID NO: 5463; WAN024CRE; Start 84; Stop 108
agactccacaagatttcctgaccac

SEQ ID NO: 411436 - DNA, 25 bp, Artificial
  probe
  misc_feature (1)..(25): SEQ ID NO: 5463; WAN024CRE; Start 243; Stop 267
tagagccgattgttcttttccttga

SEQ ID NO: 411437 - DNA, 25 bp, Artificial
  probe
  misc_feature (1)..(25): SEQ ID NO: 5463; WAN024CRE; Start 195; Stop 219
aaatcatcctctaaactatagcgca

SEQ ID NO: 411438 - DNA, 25 bp, Artificial
  probe
  misc_feature (1)..(25): SEQ ID NO: 5463; WAN024CRE; Start 196; Stop 220
aatcatcctctaaactatagcgcag

SEQ ID NO: 411439 - DNA, 25 bp, Artificial
  probe
  misc_feature (1)..(25): SEQ ID NO: 5463; WAN024CRE; Start 194; Stop 218
caaatcatcctctaaactatagcgc

SEQ ID NO: 411440 - DNA, 25 bp, Artificial
  probe
  misc_feature (1)..(25): SEQ ID NO: 5463; WAN024CRE; Start 190; Stop 214
aaaccaaatcatcctctaaactata

SEQ ID NO: 411441 - DNA, 25 bp, Artificial
  probe
  misc_feature (1)..(25): SEQ ID NO: 5463; WAN024CRE; Start 64; Stop 88
tttcttcatgaccttcttccagact

SEQ ID NO: 411442 - DNA, 25 bp, Artificial
  probe
  misc_feature (1)..(25): SEQ ID NO: 5463; WAN024CRE; Start 81; Stop 105
tccagactccacaagatttcctgac

SEQ ID NO: 411443 - DNA, 25 bp, Artificial
  probe
  misc_feature (1)..(25): SEQ ID NO: 5463; WAN024CRE; Start 78; Stop 102
tcttccagactccacaagatttcct

SEQ ID NO: 411444 - DNA, 25 bp, Artificial
  probe
  misc_feature (1)..(25): SEQ ID NO: 5463; WAN024CRE; Start 94; Stop 118
agatttcctgaccacgctcatcatt

SEQ ID NO: 411445 - DNA, 25 bp, Artificial
  probe
  misc_feature (1)..(25): SEQ ID NO: 5463; WAN024CRE; Start 93; Stop 117
aagatttcctgaccacgctcatcat

SEQ ID NO: 411446 - DNA, 25 bp, Artificial
  probe
  misc_feature (1)..(25): SEQ ID NO: 5463; WAN024CRE; Start 66; Stop 90
tcttcatgaccttcttccagactcc

SEQ ID NO: 411447 - DNA, 25 bp, Artificial
  probe
  misc_feature (1)..(25): SEQ ID NO: 5463; WAN024CRE; Start 83; Stop 107
cagactccacaagatttcctgacca

SEQ ID NO: 411448 - DNA, 25 bp, Artificial
  probe
  misc_feature (1)..(25): SEQ ID NO: 5463; WAN024CRE; Start 197; Stop 221
atcatcctctaaactatagcgcagt

SEQ ID NO: 411449 - DNA, 25 bp, Artificial
  probe
  misc_feature (1)..(25): SEQ ID NO: 5463; WAN024CRE; Start 67; Stop 91
cttcatgaccttcttccagactcca

SEQ ID NO: 411450 - DNA, 25 bp, Artificial
  probe
  misc_feature (1)..(25): SEQ ID NO: 5463; WAN024CRE; Start 191; Stop 215
aaccaaatcatcctctaaactatag

SEQ ID NO: 411451 - DNA, 25 bp, Artificial
  probe
  misc_feature (1)..(25): SEQ ID NO: 5463; WAN024CRE; Start 149; Stop 173
cacacagtagcccctcttttgaaaa

SEQ ID NO: 411452 - DNA, 25 bp, Artificial
  probe
  misc_feature (1)..(25): SEQ ID NO: 5463; WAN024CRE; Start 241; Stop 265
cgtagagccgattgttcttttcctt

SEQ ID NO: 411453 - DNA, 25 bp, Artificial
  probe
  misc_feature (1)..(25): SEQ ID NO: 5463; WAN024CRE; Start 96; Stop 120
atttcctgaccacgctcatcatttt

SEQ ID NO: 411454 - DNA, 25 bp, Artificial
  probe
  misc_feature (1)..(25): SEQ ID NO: 5464; WAN024C58; Start 145; Stop 169
ttggtcgtggtacatattggacata

SEQ ID NO: 411455 - DNA, 25 bp, Artificial
  probe
  misc_feature (1)..(25): SEQ ID NO: 5464; WAN024C58; Start 148; Stop 172
gtcgtggtacatattggacatacac

SEQ ID NO: 411456 - DNA, 25 bp, Artificial
  probe
  misc_feature (1)..(25): SEQ ID NO: 5464; WAN024C58; Start 152; Stop 176
tggtacatattggacatacacgttg

SEQ ID NO: 411457 - DNA, 25 bp, Artificial
  probe
  misc_feature (1)..(25): SEQ ID NO: 5464; WAN024C58; Start 147; Stop 171
ggtcgtggtacatattggacataca

SEQ ID NO: 411458 - DNA, 25 bp, Artificial
  probe
  misc_feature (1)..(25): SEQ ID NO: 5464; WAN024C58; Start 146; Stop 170
tggtcgtggtacatattggacatac

SEQ ID NO: 411459 - DNA, 25 bp, Artificial
  probe
  misc_feature (1)..(25): SEQ ID NO: 5464; WAN024C58; Start 139; Stop 163
attgatttggtcgtggtacatattg

SEQ ID NO: 411460 - DNA, 25 bp, Artificial
  probe
  misc_feature (1)..(25): SEQ ID NO: 5464; WAN024C58; Start 138; Stop 162
cattgatttggtcgtggtacatatt

SEQ ID NO: 411461 - DNA, 25 bp, Artificial
  probe
  misc_feature (1)..(25): SEQ ID NO: 5464; WAN024C58; Start 309; Stop 333
aatgaagataagaatcaattccgtt

SEQ ID NO: 411462 - DNA, 25 bp, Artificial
  probe
  misc_feature (1)..(25): SEQ ID NO: 5464; WAN024C58; Start 154; Stop 178
gtacatattggacatacacgttgcc

SEQ ID NO: 411463 - DNA, 25 bp, Artificial
  probe
  misc_feature (1)..(25): SEQ ID NO: 5464; WAN024C58; Start 153; Stop 177
ggtacatattggacatacacgttgc

SEQ ID NO: 411464 - DNA, 25 bp, Artificial
  probe
  misc_feature (1)..(25): SEQ ID NO: 5464; WAN024C58; Start 140; Stop 164
ttgatttggtcgtggtacatattgg

SEQ ID NO: 411465 - DNA, 25 bp, Artificial
  probe
  misc_feature (1)..(25): SEQ ID NO: 5464; WAN024C58; Start 151; Stop 175
gtggtacatattggacatacacgtt

SEQ ID NO: 411466 - DNA, 25 bp, Artificial
  probe
  misc_feature (1)..(25): SEQ ID NO: 5464; WAN024C58; Start 18; Stop 42
caatcatgttgacatcatcaaggtc

SEQ ID NO: 411467 - DNA, 25 bp, Artificial
  probe
  misc_feature (1)..(25): SEQ ID NO: 5464; WAN024C58; Start 17; Stop 41
tcaatcatgttgacatcatcaaggt

SEQ ID NO: 411468 - DNA, 25 bp, Artificial
  probe
  misc_feature (1)..(25): SEQ ID NO: 5464; WAN024C58; Start 141; Stop 165
tgatttggtcgtggtacatattgga

SEQ ID NO: 411469 - DNA, 25 bp, Artificial
  probe
  misc_feature (1)..(25): SEQ ID NO: 5464; WAN024C58; Start 383; Stop 407
tgtgtaatgacaacggaaccaacaa

SEQ ID NO: 411470 - DNA, 25 bp, Artificial
  probe
  misc_feature (1)..(25): SEQ ID NO: 5464; WAN024C58; Start 308; Stop 332
taatgaagataagaatcaattccgt

SEQ ID NO: 411471 - DNA, 25 bp, Artificial
  probe
  misc_feature (1)..(25): SEQ ID NO: 5464; WAN024C58; Start 380; Stop 404
tattgtgtaatgacaacggaaccaa

SEQ ID NO: 411472 - DNA, 25 bp, Artificial
  probe
  misc_feature (1)..(25): SEQ ID NO: 5464; WAN024C58; Start 142; Stop 166
gatttggtcgtggtacatattggac

SEQ ID NO: 411473 - DNA, 25 bp, Artificial
  probe
  misc_feature (1)..(25): SEQ ID NO: 5464; WAN024C58; Start 384; Stop 408
gtgtaatgacaacggaaccaacaaa

SEQ ID NO: 411474 - DNA, 25 bp, Artificial
  probe
  misc_feature (1)..(25): SEQ ID NO: 5464; WAN024C58; Start 137; Stop 161
ccattgatttggtcgtggtacatat

SEQ ID NO: 411475 - DNA, 25 bp, Artificial
  probe
  misc_feature (1)..(25): SEQ ID NO: 5464; WAN024C58; Start 100; Stop 124
agggaaggtttcaaatttagcgtag

SEQ ID NO: 411476 - DNA, 25 bp, Artificial
  probe
  misc_feature (1)..(25): SEQ ID NO: 5464; WAN024C58; Start 379; Stop 403
gtattgtgtaatgacaacggaacca

SEQ ID NO: 411477 - DNA, 25 bp, Artificial
  probe
  misc_feature (1)..(25): SEQ ID NO: 5464; WAN024C58; Start 155; Stop 179
tacatattggacatacacgttgcca

SEQ ID NO: 411478 - DNA, 25 bp, Artificial
  probe
  misc_feature (1)..(25): SEQ ID NO: 5464; WAN024C58; Start 144; Stop 168
tttggtcgtggtacatattggacat

SEQ ID NO: 411479 - DNA, 25 bp, Artificial
  probe
  misc_feature (1)..(25): SEQ ID NO: 5464; WAN024C58; Start 143; Stop 167
atttggtcgtggtacatattggaca

SEQ ID NO: 411480 - DNA, 25 bp, Artificial
  probe
  misc_feature (1)..(25): SEQ ID NO: 5464; WAN024C58; Start 104; Stop 128
aaggtttcaaatttagcgtagccag

SEQ ID NO: 411481 - DNA, 25 bp, Artificial
  probe
  misc_feature (1)..(25): SEQ ID NO: 5464; WAN024C58; Start 310; Stop 334
atgaagataagaatcaattccgttt

SEQ ID NO: 411482 - DNA, 25 bp, Artificial
  probe
  misc_feature (1)..(25): SEQ ID NO: 5464; WAN024C58; Start 103; Stop 127
gaaggtttcaaatttagcgtagcca

SEQ ID NO: 411483 - DNA, 25 bp, Artificial
  probe
  misc_feature (1)..(25): SEQ ID NO: 5464; WAN024C58; Start 381; Stop 405
attgtgtaatgacaacggaaccaac

SEQ ID NO: 411484 - DNA, 25 bp, Artificial
  probe
  misc_feature (1)..(25): SEQ ID NO: 5464; WAN024C58; Start 69; Stop 93
taactggatgatgaaggggaagatt

SEQ ID NO: 411485 - DNA, 25 bp, Artificial
  probe
  misc_feature (1)..(25): SEQ ID NO: 5464; WAN024C58; Start 68; Stop 92
ttaactggatgatgaaggggaagat

SEQ ID NO: 411486 - DNA, 25 bp, Artificial
  probe
  misc_feature (1)..(25): SEQ ID NO: 5464; WAN024C58; Start 378; Stop 402
cgtattgtgtaatgacaacggaacc

SEQ ID NO: 411487 - DNA, 25 bp, Artificial
  probe
  misc_feature (1)..(25): SEQ ID NO: 5465; WAN024FG5; Start 122; Stop 146
gcattactgaggatgatgtattctt

SEQ ID NO: 411488 - DNA, 25 bp, Artificial
  probe
  misc_feature (1)..(25): SEQ ID NO: 5465; WAN024FG5; Start 164; Stop 188
tggatagcagacatttgaacataga

SEQ ID NO: 411489 - DNA, 25 bp, Artificial
  probe
  misc_feature (1)..(25): SEQ ID NO: 5465; WAN024FG5; Start 165; Stop 189
ggatagcagacatttgaacatagac

SEQ ID NO: 411490 - DNA, 25 bp, Artificial
  probe
  misc_feature (1)..(25): SEQ ID NO: 5465; WAN024FG5; Start 121; Stop 145
tgcattactgaggatgatgtattct

SEQ ID NO: 411491 - DNA, 25 bp, Artificial
  probe
  misc_feature (1)..(25): SEQ ID NO: 5465; WAN024FG5; Start 120; Stop 144
ctgcattactgaggatgatgtattc

SEQ ID NO: 411492 - DNA, 25 bp, Artificial
  probe
  misc_feature (1)..(25): SEQ ID NO: 5465; WAN024FG5; Start 158; Stop 182
atcgtatggatagcagacatttgaa

SEQ ID NO: 411493 - DNA, 25 bp, Artificial
  probe
  misc_feature (1)..(25): SEQ ID NO: 5465; WAN024FG5; Start 168; Stop 192
tagcagacatttgaacatagacatc

SEQ ID NO: 411494 - DNA, 25 bp, Artificial
  probe
  misc_feature (1)..(25): SEQ ID NO: 5465; WAN024FG5; Start 166; Stop 190
gatagcagacatttgaacatagaca

SEQ ID NO: 411495 - DNA, 25 bp, Artificial
  probe
  misc_feature (1)..(25): SEQ ID NO: 5465; WAN024FG5; Start 169; Stop 193
agcagacatttgaacatagacatct

SEQ ID NO: 411496 - DNA, 25 bp, Artificial
  probe
  misc_feature (1)..(25): SEQ ID NO: 5465; WAN024FG5; Start 170; Stop 194
gcagacatttgaacatagacatctt

SEQ ID NO: 411497 - DNA, 25 bp, Artificial
  probe
  misc_feature (1)..(25): SEQ ID NO: 5465; WAN024FG5; Start 161; Stop 185
gtatggatagcagacatttgaacat

SEQ ID NO: 411498 - DNA, 25 bp, Artificial
  probe
  misc_feature (1)..(25): SEQ ID NO: 5465; WAN024FG5; Start 157; Stop 181
catcgtatggatagcagacatttga

SEQ ID NO: 411499 - DNA, 25 bp, Artificial
  probe
  misc_feature (1)..(25): SEQ ID NO: 5465; WAN024FG5; Start 276; Stop 300
aaccacgcataaagagtttaacatc

SEQ ID NO: 411500 - DNA, 25 bp, Artificial
  probe
  misc_feature (1)..(25): SEQ ID NO: 5465; WAN024FG5; Start 163; Stop 187
atggatagcagacatttgaacatag

SEQ ID NO: 411501 - DNA, 25 bp, Artificial
  probe
  misc_feature (1)..(25): SEQ ID NO: 5465; WAN024FG5; Start 159; Stop 183
tcgtatggatagcagacatttgaac

SEQ ID NO: 411502 - DNA, 25 bp, Artificial
  probe
  misc_feature (1)..(25): SEQ ID NO: 5465; WAN024FG5; Start 277; Stop 301
accacgcataaagagtttaacatct

SEQ ID NO: 411503 - DNA, 25 bp, Artificial
  probe
  misc_feature (1)..(25): SEQ ID NO: 5465; WAN024FG5; Start 160; Stop 184
cgtatggatagcagacatttgaaca

SEQ ID NO: 411504 - DNA, 25 bp, Artificial
  probe
  misc_feature (1)..(25): SEQ ID NO: 5465; WAN024FG5; Start 279; Stop 303
cacgcataaagagtttaacatctcc

SEQ ID NO: 411505 - DNA, 25 bp, Artificial
  probe
  misc_feature (1)..(25): SEQ ID NO: 5465; WAN024FG5; Start 278; Stop 302
ccacgcataaagagtttaacatctc

SEQ ID NO: 411506 - DNA, 25 bp, Artificial
  probe
  misc_feature (1)..(25): SEQ ID NO: 5465; WAN024FG5; Start 167; Stop 191
atagcagacatttgaacatagacat

SEQ ID NO: 411507 - DNA, 25 bp, Artificial
  probe
  misc_feature (1)..(25): SEQ ID NO: 5465; WAN024FG5; Start 281; Stop 305
cgcataaagagtttaacatctccat

SEQ ID NO: 411508 - DNA, 25 bp, Artificial
  probe
  misc_feature (1)..(25): SEQ ID NO: 5465; WAN024FG5; Start 280; Stop 304
acgcataaagagtttaacatctcca

SEQ ID NO: 411509 - DNA, 25 bp, Artificial
  probe
  misc_feature (1)..(25): SEQ ID NO: 5465; WAN024FG5; Start 181; Stop 205
aacatagacatctttaacctgtgga

SEQ ID NO: 411510 - DNA, 25 bp, Artificial
  probe
  misc_feature (1)..(25): SEQ ID NO: 5465; WAN024FG5; Start 186; Stop 210
agacatctttaacctgtggataacg

SEQ ID NO: 411511 - DNA, 25 bp, Artificial
  probe
  misc_feature (1)..(25): SEQ ID NO: 5465; WAN024FG5; Start 182; Stop 206
acatagacatctttaacctgtggat

SEQ ID NO: 411512 - DNA, 25 bp, Artificial
  probe
  misc_feature (1)..(25): SEQ ID NO: 5465; WAN024FG5; Start 180; Stop 204
gaacatagacatctttaacctgtgg

SEQ ID NO: 411513 - DNA, 25 bp, Artificial
  probe
  misc_feature (1)..(25): SEQ ID NO: 5465; WAN024FG5; Start 243; Stop 267
ctttacttgtagcaacctgaagatc

SEQ ID NO: 411514 - DNA, 25 bp, Artificial
  probe
  misc_feature (1)..(25): SEQ ID NO: 5465; WAN024FG5; Start 119; Stop 143
cctgcattactgaggatgatgtatt

SEQ ID NO: 411515 - DNA, 25 bp, Artificial
  probe
  misc_feature (1)..(25): SEQ ID NO: 5465; WAN024FG5; Start 179; Stop 203
tgaacatagacatctttaacctgtg

SEQ ID NO: 411516 - DNA, 25 bp, Artificial
  probe
  misc_feature (1)..(25): SEQ ID NO: 5465; WAN024FG5; Start 156; Stop 180
gcatcgtatggatagcagacatttg

SEQ ID NO: 411517 - DNA, 25 bp, Artificial
  probe
  misc_feature (1)..(25): SEQ ID NO: 5465; WAN024FG5; Start 240; Stop 264
cgtctttacttgtagcaacctgaag

SEQ ID NO: 411518 - DNA, 25 bp, Artificial
  probe
  misc_feature (1)..(25): SEQ ID NO: 5465; WAN024FG5; Start 230; Stop 254
gtcactcctccgtctttacttgtag

SEQ ID NO: 411519 - DNA, 25 bp, Artificial
  probe
  misc_feature (1)..(25): SEQ ID NO: 5465; WAN024FG5; Start 118; Stop 142
acctgcattactgaggatgatgtat

SEQ ID NO: 411520 - DNA, 25 bp, Artificial
  probe
  misc_feature (1)..(25): SEQ ID NO: 5466; WAN024FVU; Start 64; Stop 88
atccttgaattgaacgaccttgtaa

SEQ ID NO: 411521 - DNA, 25 bp, Artificial
  probe
  misc_feature (1)..(25): SEQ ID NO: 5466; WAN024FVU; Start 63; Stop 87
aatccttgaattgaacgaccttgta

SEQ ID NO: 411522 - DNA, 25 bp, Artificial
  probe
  misc_feature (1)..(25): SEQ ID NO: 5466; WAN024FVU; Start 65; Stop 89
tccttgaattgaacgaccttgtaaa

SEQ ID NO: 411523 - DNA, 25 bp, Artificial
  probe
  misc_feature (1)..(25): SEQ ID NO: 5466; WAN024FVU; Start 62; Stop 86
caatccttgaattgaacgaccttgt

SEQ ID NO: 411524 - DNA, 25 bp, Artificial
  probe
  misc_feature (1)..(25): SEQ ID NO: 5466; WAN024FVU; Start 90; Stop 114
agctatcgaagaagaatttggtgta

SEQ ID NO: 411525 - DNA, 25 bp, Artificial
  probe
  misc_feature (1)..(25): SEQ ID NO: 5466; WAN024FVU; Start 88; Stop 112
aaagctatcgaagaagaatttggtg

SEQ ID NO: 411526 - DNA, 25 bp, Artificial
  probe
  misc_feature (1)..(25): SEQ ID NO: 5466; WAN024FVU; Start 94; Stop 118
atcgaagaagaatttggtgtaactg

SEQ ID NO: 411527 - DNA, 25 bp, Artificial
  probe
  misc_feature (1)..(25): SEQ ID NO: 5466; WAN024FVU; Start 262; Stop 286
aaagaagctaaagaacttgttgacg

SEQ ID NO: 411528 - DNA, 25 bp, Artificial
  probe
  misc_feature (1)..(25): SEQ ID NO: 5466; WAN024FVU; Start 91; Stop 115
gctatcgaagaagaatttggtgtaa

SEQ ID NO: 411529 - DNA, 25 bp, Artificial
  probe
  misc_feature (1)..(25): SEQ ID NO: 5466; WAN024FVU; Start 89; Stop 113
aagctatcgaagaagaatttggtgt

SEQ ID NO: 411530 - DNA, 25 bp, Artificial
  probe
  misc_feature (1)..(25): SEQ ID NO: 5466; WAN024FVU; Start 178; Stop 202
tcattcgacgttgaattgacatctg

SEQ ID NO: 411531 - DNA, 25 bp, Artificial
  probe
  misc_feature (1)..(25): SEQ ID NO: 5466; WAN024FVU; Start 263; Stop 287
aagaagctaaagaacttgttgacgg

SEQ ID NO: 411532 - DNA, 25 bp, Artificial
  probe
  misc_feature (1)..(25): SEQ ID NO: 5466; WAN024FVU; Start 95; Stop 119
tcgaagaagaatttggtgtaactgc

SEQ ID NO: 411533 - DNA, 25 bp, Artificial
  probe
  misc_feature (1)..(25): SEQ ID NO: 5466; WAN024FVU; Start 93; Stop 117
tatcgaagaagaatttggtgtaact

SEQ ID NO: 411534 - DNA, 25 bp, Artificial
  probe
  misc_feature (1)..(25): SEQ ID NO: 5466; WAN024FVU; Start 358; Stop 382
gctggagcttcagttactcttaaat

SEQ ID NO: 411535 - DNA, 25 bp, Artificial
  probe
  misc_feature (1)..(25): SEQ ID NO: 5466; WAN024FVU; Start 92; Stop 116
ctatcgaagaagaatttggtgtaac

SEQ ID NO: 411536 - DNA, 25 bp, Artificial
  probe
  misc_feature (1)..(25): SEQ ID NO: 5466; WAN024FVU; Start 329; Stop 353
ctgaagaaatcaaagctaaattgga

SEQ ID NO: 411537 - DNA, 25 bp, Artificial
  probe
  misc_feature (1)..(25): SEQ ID NO: 5466; WAN024FVU; Start 261; Stop 285
taaagaagctaaagaacttgttgac

SEQ ID NO: 411538 - DNA, 25 bp, Artificial
  probe
  misc_feature (1)..(25): SEQ ID NO: 5466; WAN024FVU; Start 177; Stop 201
ttcattcgacgttgaattgacatct

SEQ ID NO: 411539 - DNA, 25 bp, Artificial
  probe
  misc_feature (1)..(25): SEQ ID NO: 5466; WAN024FVU; Start 96; Stop 120
cgaagaagaatttggtgtaactgca

SEQ ID NO: 411540 - DNA, 25 bp, Artificial
  probe
  misc_feature (1)..(25): SEQ ID NO: 5466; WAN024FVU; Start 66; Stop 90
ccttgaattgaacgaccttgtaaaa

SEQ ID NO: 411541 - DNA, 25 bp, Artificial
  probe
  misc_feature (1)..(25): SEQ ID NO: 5466; WAN024FVU; Start 158; Stop 182
atgctggtgctgctaaagattcatt

SEQ ID NO: 411542 - DNA, 25 bp, Artificial
  probe
  misc_feature (1)..(25): SEQ ID NO: 5466; WAN024FVU; Start 167; Stop 191
ctgctaaagattcattcgacgttga

SEQ ID NO: 411543 - DNA, 25 bp, Artificial
  probe
  misc_feature (1)..(25): SEQ ID NO: 5466; WAN024FVU; Start 359; Stop 383
ctggagcttcagttactcttaaata

SEQ ID NO: 411544 - DNA, 25 bp, Artificial
  probe
  misc_feature (1)..(25): SEQ ID NO: 5466; WAN024FVU; Start 265; Stop 289
gaagctaaagaacttgttgacggtg

SEQ ID NO: 411545 - DNA, 25 bp, Artificial
  probe
  misc_feature (1)..(25): SEQ ID NO: 5466; WAN024FVU; Start 68; Stop 92
ttgaattgaacgaccttgtaaaagc

SEQ ID NO: 411546 - DNA, 25 bp, Artificial
  probe
  misc_feature (1)..(25): SEQ ID NO: 5466; WAN024FVU; Start 67; Stop 91
cttgaattgaacgaccttgtaaaag

SEQ ID NO: 411547 - DNA, 25 bp, Artificial
  probe
  misc_feature (1)..(25): SEQ ID NO: 5466; WAN024FVU; Start 17; Stop 41
tggcattgaacattgaaaacattat

SEQ ID NO: 411548 - DNA, 25 bp, Artificial
  probe
  misc_feature (1)..(25): SEQ ID NO: 5466; WAN024FVU; Start 360; Stop 384
tggagcttcagttactcttaaataa

SEQ ID NO: 411549 - DNA, 25 bp, Artificial
  probe
  misc_feature (1)..(25): SEQ ID NO: 5466; WAN024FVU; Start 330; Stop 354
tgaagaaatcaaagctaaattggaa

SEQ ID NO: 411550 - DNA, 25 bp, Artificial
  probe
  misc_feature (1)..(25): SEQ ID NO: 5466; WAN024FVU; Start 264; Stop 288
agaagctaaagaacttgttgacggt

SEQ ID NO: 411551 - DNA, 25 bp, Artificial
  probe
  misc_feature (1)..(25): SEQ ID NO: 5466; WAN024FVU; Start 249; Stop 273
tggtcttggtcttaaagaagctaaa

SEQ ID NO: 411552 - DNA, 25 bp, Artificial
  probe
  misc_feature (1)..(25): SEQ ID NO: 5466; WAN024FVU; Start 157; Stop 181
gatgctggtgctgctaaagattcat

SEQ ID NO: 411553 - DNA, 25 bp, Artificial
  probe
  misc_feature (1)..(25): SEQ ID NO: 5467; WAN024ESN; Start 1502; Stop 1526
atccgattattgtagttctaacgcc

SEQ ID NO: 411554 - DNA, 25 bp, Artificial
  probe
  misc_feature (1)..(25): SEQ ID NO: 5467; WAN024ESN; Start 1073; Stop 1097
ttactgaagaacggttagccaatac

SEQ ID NO: 411555 - DNA, 25 bp, Artificial
  probe
  misc_feature (1)..(25): SEQ ID NO: 5467; WAN024ESN; Start 1827; Stop 1851
tcttgctggtatgacaatctatgag

SEQ ID NO: 411556 - DNA, 25 bp, Artificial
  probe
  misc_feature (1)..(25): SEQ ID NO: 5467; WAN024ESN; Start 1501; Stop 1525
gatccgattattgtagttctaacgc

SEQ ID NO: 411557 - DNA, 25 bp, Artificial
  probe
  misc_feature (1)..(25): SEQ ID NO: 5467; WAN024ESN; Start 1325; Stop 1349
agtctgtctactaccaaggattgtt

SEQ ID NO: 411558 - DNA, 25 bp, Artificial
  probe
  misc_feature (1)..(25): SEQ ID NO: 5467; WAN024ESN; Start 719; Stop 743
aactggtcatcattgctcttctact

SEQ ID NO: 411559 - DNA, 25 bp, Artificial
  probe
  misc_feature (1)..(25): SEQ ID NO: 5467; WAN024ESN; Start 610; Stop 634
agaccagtgttagaagatgtgagac

SEQ ID NO: 411560 - DNA, 25 bp, Artificial
  probe
  misc_feature (1)..(25): SEQ ID NO: 5467; WAN024ESN; Start 609; Stop 633
cagaccagtgttagaagatgtgaga

SEQ ID NO: 411561 - DNA, 25 bp, Artificial
  probe
  misc_feature (1)..(25): SEQ ID NO: 5467; WAN024ESN; Start 57; Stop 81
ttatatggtgataacttccgttgac

SEQ ID NO: 411562 - DNA, 25 bp, Artificial
  probe
  misc_feature (1)..(25): SEQ ID NO: 5467; WAN024ESN; Start 1074; Stop 1098
tactgaagaacggttagccaataca

SEQ ID NO: 411563 - DNA, 25 bp, Artificial
  probe
  misc_feature (1)..(25): SEQ ID NO: 5467; WAN024ESN; Start 605; Stop 629
ctctcagaccagtgttagaagatgt

SEQ ID NO: 411564 - DNA, 25 bp, Artificial
  probe
  misc_feature (1)..(25): SEQ ID NO: 5467; WAN024ESN; Start 606; Stop 630
tctcagaccagtgttagaagatgtg

SEQ ID NO: 411565 - DNA, 25 bp, Artificial
  probe
  misc_feature (1)..(25): SEQ ID NO: 5467; WAN024ESN; Start 1826; Stop 1850
gtcttgctggtatgacaatctatga

SEQ ID NO: 411566 - DNA, 25 bp, Artificial
  probe
  misc_feature (1)..(25): SEQ ID NO: 5467; WAN024ESN; Start 1507; Stop 1531
attattgtagttctaacgccgcaag

SEQ ID NO: 411567 - DNA, 25 bp, Artificial
  probe
  misc_feature (1)..(25): SEQ ID NO: 5467; WAN024ESN; Start 1506; Stop 1530
gattattgtagttctaacgccgcaa

SEQ ID NO: 411568 - DNA, 25 bp, Artificial
  probe
  misc_feature (1)..(25): SEQ ID NO: 5467; WAN024ESN; Start 718; Stop 742
caactggtcatcattgctcttctac

SEQ ID NO: 411569 - DNA, 25 bp, Artificial
  probe
  misc_feature (1)..(25): SEQ ID NO: 5467; WAN024ESN; Start 1324; Stop 1348
cagtctgtctactaccaaggattgt

SEQ ID NO: 411570 - DNA, 25 bp, Artificial
  probe
  misc_feature (1)..(25): SEQ ID NO: 5467; WAN024ESN; Start 608; Stop 632
tcagaccagtgttagaagatgtgag

SEQ ID NO: 411571 - DNA, 25 bp, Artificial
  probe
  misc_feature (1)..(25): SEQ ID NO: 5467; WAN024ESN; Start 607; Stop 631
ctcagaccagtgttagaagatgtga

SEQ ID NO: 411572 - DNA, 25 bp, Artificial
  probe
  misc_feature (1)..(25): SEQ ID NO: 5467; WAN024ESN; Start 1500; Stop 1524
agatccgattattgtagttctaacg

SEQ ID NO: 411573 - DNA, 25 bp, Artificial
  probe
  misc_feature (1)..(25): SEQ ID NO: 5467; WAN024ESN; Start 1081; Stop 1105
gaacggttagccaatacagactctt

SEQ ID NO: 411574 - DNA, 25 bp, Artificial
  probe
  misc_feature (1)..(25): SEQ ID NO: 5467; WAN024ESN; Start 1079; Stop 1103
aagaacggttagccaatacagactc

SEQ ID NO: 411575 - DNA, 25 bp, Artificial
  probe
  misc_feature (1)..(25): SEQ ID NO: 5467; WAN024ESN; Start 1078; Stop 1102
gaagaacggttagccaatacagact

SEQ ID NO: 411576 - DNA, 25 bp, Artificial
  probe
  misc_feature (1)..(25): SEQ ID NO: 5467; WAN024ESN; Start 1825; Stop 1849
cgtcttgctggtatgacaatctatg

SEQ ID NO: 411577 - DNA, 25 bp, Artificial
  probe
  misc_feature (1)..(25): SEQ ID NO: 5467; WAN024ESN; Start 58; Stop 82
tatatggtgataacttccgttgacc

SEQ ID NO: 411578 - DNA, 25 bp, Artificial
  probe
  misc_feature (1)..(25): SEQ ID NO: 5467; WAN024ESN; Start 612; Stop 636
accagtgttagaagatgtgagacag

SEQ ID NO: 411579 - DNA, 25 bp, Artificial
  probe
  misc_feature (1)..(25): SEQ ID NO: 5467; WAN024ESN; Start 611; Stop 635
gaccagtgttagaagatgtgagaca

SEQ ID NO: 411580 - DNA, 25 bp, Artificial
  probe
  misc_feature (1)..(25): SEQ ID NO: 5467; WAN024ESN; Start 1832; Stop 1856
ctggtatgacaatctatgagcttca

SEQ ID NO: 411581 - DNA, 25 bp, Artificial
  probe
  misc_feature (1)..(25): SEQ ID NO: 5467; WAN024ESN; Start 1748; Stop 1772
tgtctacggctatcttgttatttga

SEQ ID NO: 411582 - DNA, 25 bp, Artificial
  probe
  misc_feature (1)..(25): SEQ ID NO: 5467; WAN024ESN; Start 1747; Stop 1771
ctgtctacggctatcttgttatttg

SEQ ID NO: 411583 - DNA, 25 bp, Artificial
  probe
  misc_feature (1)..(25): SEQ ID NO: 5467; WAN024ESN; Start 1746; Stop 1770
cctgtctacggctatcttgttattt

SEQ ID NO: 411584 - DNA, 25 bp, Artificial
  probe
  misc_feature (1)..(25): SEQ ID NO: 5467; WAN024ESN; Start 1189; Stop 1213
tcagggaatgttatctatgtctcac

SEQ ID NO: 411585 - DNA, 25 bp, Artificial
  probe
  misc_feature (1)..(25): SEQ ID NO: 5467; WAN024ESN; Start 1188; Stop 1212
gtcagggaatgttatctatgtctca

SEQ ID NO: 411586 - DNA, 25 bp, Artificial
  probe
  misc_feature (1)..(25): SEQ ID NO: 5468; WAN024DI6; Start 217; Stop 241
cttcttaacagccaaggagtgaata

SEQ ID NO: 411587 - DNA, 25 bp, Artificial
  probe
  misc_feature (1)..(25): SEQ ID NO: 5468; WAN024DI6; Start 218; Stop 242
ttcttaacagccaaggagtgaatac

SEQ ID NO: 411588 - DNA, 25 bp, Artificial
  probe
  misc_feature (1)..(25): SEQ ID NO: 5468; WAN024DI6; Start 222; Stop 246
taacagccaaggagtgaatacttac

SEQ ID NO: 411589 - DNA, 25 bp, Artificial
  probe
  misc_feature (1)..(25): SEQ ID NO: 5468; WAN024DI6; Start 221; Stop 245
ttaacagccaaggagtgaatactta

SEQ ID NO: 411590 - DNA, 25 bp, Artificial
  probe
  misc_feature (1)..(25): SEQ ID NO: 5468; WAN024DI6; Start 220; Stop 244
cttaacagccaaggagtgaatactt

SEQ ID NO: 411591 - DNA, 25 bp, Artificial
  probe
  misc_feature (1)..(25): SEQ ID NO: 5468; WAN024DI6; Start 226; Stop 250
agccaaggagtgaatacttacattg

SEQ ID NO: 411592 - DNA, 25 bp, Artificial
  probe
  misc_feature (1)..(25): SEQ ID NO: 5468; WAN024DI6; Start 225; Stop 249
cagccaaggagtgaatacttacatt

SEQ ID NO: 411593 - DNA, 25 bp, Artificial
  probe
  misc_feature (1)..(25): SEQ ID NO: 5468; WAN024DI6; Start 229; Stop 253
caaggagtgaatacttacattggtt

SEQ ID NO: 411594 - DNA, 25 bp, Artificial
  probe
  misc_feature (1)..(25): SEQ ID NO: 5468; WAN024DI6; Start 219; Stop 243
tcttaacagccaaggagtgaatact

SEQ ID NO: 411595 - DNA, 25 bp, Artificial
  probe
  misc_feature (1)..(25): SEQ ID NO: 5468; WAN024DI6; Start 224; Stop 248
acagccaaggagtgaatacttacat

SEQ ID NO: 411596 - DNA, 25 bp, Artificial
  probe
  misc_feature (1)..(25): SEQ ID NO: 5468; WAN024DI6; Start 223; Stop 247
aacagccaaggagtgaatacttaca

SEQ ID NO: 411597 - DNA, 25 bp, Artificial
  probe
  misc_feature (1)..(25): SEQ ID NO: 5468; WAN024DI6; Start 455; Stop 479
gactttccaactacctaatgaccat

SEQ ID NO: 411598 - DNA, 25 bp, Artificial
  probe
  misc_feature (1)..(25): SEQ ID NO: 5468; WAN024DI6; Start 126; Stop 150
atttagtatcttgccagtccttgtg

SEQ ID NO: 411599 - DNA, 25 bp, Artificial
  probe
  misc_feature (1)..(25): SEQ ID NO: 5468; WAN024DI6; Start 125; Stop 149
aatttagtatcttgccagtccttgt

SEQ ID NO: 411600 - DNA, 25 bp, Artificial
  probe
  misc_feature (1)..(25): SEQ ID NO: 5468; WAN024DI6; Start 124; Stop 148
gaatttagtatcttgccagtccttg

SEQ ID NO: 411601 - DNA, 25 bp, Artificial
  probe
  misc_feature (1)..(25): SEQ ID NO: 5468; WAN024DI6; Start 243; Stop 267
ttacattggtttgccgatgaatatc

SEQ ID NO: 411602 - DNA, 25 bp, Artificial
  probe
  misc_feature (1)..(25): SEQ ID NO: 5468; WAN024DI6; Start 242; Stop 266
cttacattggtttgccgatgaatat

SEQ ID NO: 411603 - DNA, 25 bp, Artificial
  probe
  misc_feature (1)..(25): SEQ ID NO: 5468; WAN024DI6; Start 288; Stop 312
catcgtatttgctttgatttggaaa

SEQ ID NO: 411604 - DNA, 25 bp, Artificial
  probe
  misc_feature (1)..(25): SEQ ID NO: 5468; WAN024DI6; Start 236; Stop 260
tgaatacttacattggtttgccgat

SEQ ID NO: 411605 - DNA, 25 bp, Artificial
  probe
  misc_feature (1)..(25): SEQ ID NO: 5468; WAN024DI6; Start 387; Stop 411
tctcaactatgtttatgctgttcct

SEQ ID NO: 411606 - DNA, 25 bp, Artificial
  probe
  misc_feature (1)..(25): SEQ ID NO: 5468; WAN024DI6; Start 384; Stop 408
ggttctcaactatgtttatgctgtt

SEQ ID NO: 411607 - DNA, 25 bp, Artificial
  probe
  misc_feature (1)..(25): SEQ ID NO: 5468; WAN024DI6; Start 383; Stop 407
tggttctcaactatgtttatgctgt

SEQ ID NO: 411608 - DNA, 25 bp, Artificial
  probe
  misc_feature (1)..(25): SEQ ID NO: 5468; WAN024DI6; Start 237; Stop 261
gaatacttacattggtttgccgatg

SEQ ID NO: 411609 - DNA, 25 bp, Artificial
  probe
  misc_feature (1)..(25): SEQ ID NO: 5468; WAN024DI6; Start 123; Stop 147
cgaatttagtatcttgccagtcctt

SEQ ID NO: 411610 - DNA, 25 bp, Artificial
  probe
  misc_feature (1)..(25): SEQ ID NO: 5468; WAN024DI6; Start 515; Stop 539
tttccgtttcattctggttgttgta

SEQ ID NO: 411611 - DNA, 25 bp, Artificial
  probe
  misc_feature (1)..(25): SEQ ID NO: 5468; WAN024DI6; Start 388; Stop 412
ctcaactatgtttatgctgttcctt

SEQ ID NO: 411612 - DNA, 25 bp, Artificial
  probe
  misc_feature (1)..(25): SEQ ID NO: 5468; WAN024DI6; Start 386; Stop 410
ttctcaactatgtttatgctgttcc

SEQ ID NO: 411613 - DNA, 25 bp, Artificial
  probe
  misc_feature (1)..(25): SEQ ID NO: 5468; WAN024DI6; Start 382; Stop 406
ttggttctcaactatgtttatgctg

SEQ ID NO: 411614 - DNA, 25 bp, Artificial
  probe
  misc_feature (1)..(25): SEQ ID NO: 5468; WAN024DI6; Start 241; Stop 265
acttacattggtttgccgatgaata

SEQ ID NO: 411615 - DNA, 25 bp, Artificial
  probe
  misc_feature (1)..(25): SEQ ID NO: 5468; WAN024DI6; Start 240; Stop 264
tacttacattggtttgccgatgaat

SEQ ID NO: 411616 - DNA, 25 bp, Artificial
  probe
  misc_feature (1)..(25): SEQ ID NO: 5468; WAN024DI6; Start 239; Stop 263
atacttacattggtttgccgatgaa

SEQ ID NO: 411617 - DNA, 25 bp, Artificial
  probe
  misc_feature (1)..(25): SEQ ID NO: 5468; WAN024DI6; Start 238; Stop 262
aatacttacattggtttgccgatga

SEQ ID NO: 411618 - DNA, 25 bp, Artificial
  probe
  misc_feature (1)..(25): SEQ ID NO: 5468; WAN024DI6; Start 391; Stop 415
aactatgtttatgctgttcctttgt

SEQ ID NO: 411619 - DNA, 25 bp, Artificial
  probe
  misc_feature (1)..(25): SEQ ID NO: 5469; WAN024CO8; Start 3; Stop 27
ggaggaactgatgaagaacaatgaa

SEQ ID NO: 411620 - DNA, 25 bp, Artificial
  probe
  misc_feature (1)..(25): SEQ ID NO: 5469; WAN024CO8; Start 114; Stop 138
ttctgatggctatgtgattgaagtt

SEQ ID NO: 411621 - DNA, 25 bp, Artificial
  probe
  misc_feature (1)..(25): SEQ ID NO: 5469; WAN024CO8; Start 115; Stop 139
tctgatggctatgtgattgaagttg

SEQ ID NO: 411622 - DNA, 25 bp, Artificial
  probe
  misc_feature (1)..(25): SEQ ID NO: 5469; WAN024CO8; Start 121; Stop 145
ggctatgtgattgaagttgcttata

SEQ ID NO: 411623 - DNA, 25 bp, Artificial
  probe
  misc_feature (1)..(25): SEQ ID NO: 5469; WAN024CO8; Start 120; Stop 144
tggctatgtgattgaagttgcttat

SEQ ID NO: 411624 - DNA, 25 bp, Artificial
  probe
  misc_feature (1)..(25): SEQ ID NO: 5469; WAN024CO8; Start 119; Stop 143
atggctatgtgattgaagttgctta

SEQ ID NO: 411625 - DNA, 25 bp, Artificial
  probe
  misc_feature (1)..(25): SEQ ID NO: 5469; WAN024CO8; Start 1; Stop 25
ttggaggaactgatgaagaacaatg

SEQ ID NO: 411626 - DNA, 25 bp, Artificial
  probe
  misc_feature (1)..(25): SEQ ID NO: 5469; WAN024CO8; Start 2; Stop 26
tggaggaactgatgaagaacaatga

SEQ ID NO: 411627 - DNA, 25 bp, Artificial
  probe
  misc_feature (1)..(25): SEQ ID NO: 5469; WAN024CO8; Start 118; Stop 142
gatggctatgtgattgaagttgctt

SEQ ID NO: 411628 - DNA, 25 bp, Artificial
  probe
  misc_feature (1)..(25): SEQ ID NO: 5469; WAN024CO8; Start 126; Stop 150
tgtgattgaagttgcttataaccag

SEQ ID NO: 411629 - DNA, 25 bp, Artificial
  probe
  misc_feature (1)..(25): SEQ ID NO: 5469; WAN024CO8; Start 127; Stop 151
gtgattgaagttgcttataaccaga

SEQ ID NO: 411630 - DNA, 25 bp, Artificial
  probe
  misc_feature (1)..(25): SEQ ID NO: 5469; WAN024CO8; Start 233; Stop 257
atatagatgccactagcttgagaac

SEQ ID NO: 411631 - DNA, 25 bp, Artificial
  probe
  misc_feature (1)..(25): SEQ ID NO: 5469; WAN024CO8; Start 232; Stop 256
gatatagatgccactagcttgagaa

SEQ ID NO: 411632 - DNA, 25 bp, Artificial
  probe
  misc_feature (1)..(25): SEQ ID NO: 5469; WAN024CO8; Start 125; Stop 149
atgtgattgaagttgcttataacca

SEQ ID NO: 411633 - DNA, 25 bp, Artificial
  probe
  misc_feature (1)..(25): SEQ ID NO: 5469; WAN024CO8; Start 116; Stop 140
ctgatggctatgtgattgaagttgc

SEQ ID NO: 411634 - DNA, 25 bp, Artificial
  probe
  misc_feature (1)..(25): SEQ ID NO: 5469; WAN024CO8; Start 234; Stop 258
tatagatgccactagcttgagaaca

SEQ ID NO: 411635 - DNA, 25 bp, Artificial
  probe
  misc_feature (1)..(25): SEQ ID NO: 5469; WAN024CO8; Start 231; Stop 255
ggatatagatgccactagcttgaga

SEQ ID NO: 411636 - DNA, 25 bp, Artificial
  probe
  misc_feature (1)..(25): SEQ ID NO: 5469; WAN024CO8; Start 128; Stop 152
tgattgaagttgcttataaccagat

SEQ ID NO: 411637 - DNA, 25 bp, Artificial
  probe
  misc_feature (1)..(25): SEQ ID NO: 5469; WAN024CO8; Start 117; Stop 141
tgatggctatgtgattgaagttgct

SEQ ID NO: 411638 - DNA, 25 bp, Artificial
  probe
  misc_feature (1)..(25): SEQ ID NO: 5469; WAN024CO8; Start 82; Stop 106
aggctttatttaggcagttcagata

SEQ ID NO: 411639 - DNA, 25 bp, Artificial
  probe
  misc_feature (1)..(25): SEQ ID NO: 5469; WAN024CO8; Start 60; Stop 84
tttaggattgagggaagttagaagg

SEQ ID NO: 411640 - DNA, 25 bp, Artificial
  probe
  misc_feature (1)..(25): SEQ ID NO: 5469; WAN024CO8; Start 75; Stop 99
agttagaaggctttatttaggcagt

SEQ ID NO: 411641 - DNA, 25 bp, Artificial
  probe
  misc_feature (1)..(25): SEQ ID NO: 5469; WAN024CO8; Start 6; Stop 30
ggaactgatgaagaacaatgaaaga

SEQ ID NO: 411642 - DNA, 25 bp, Artificial
  probe
  misc_feature (1)..(25): SEQ ID NO: 5469; WAN024CO8; Start 5; Stop 29
aggaactgatgaagaacaatgaaag

SEQ ID NO: 411643 - DNA, 25 bp, Artificial
  probe
  misc_feature (1)..(25): SEQ ID NO: 5469; WAN024CO8; Start 4; Stop 28
gaggaactgatgaagaacaatgaaa

SEQ ID NO: 411644 - DNA, 25 bp, Artificial
  probe
  misc_feature (1)..(25): SEQ ID NO: 5469; WAN024CO8; Start 81; Stop 105
aaggctttatttaggcagttcagat

SEQ ID NO: 411645 - DNA, 25 bp, Artificial
  probe
  misc_feature (1)..(25): SEQ ID NO: 5469; WAN024CO8; Start 76; Stop 100
gttagaaggctttatttaggcagtt

SEQ ID NO: 411646 - DNA, 25 bp, Artificial
  probe
  misc_feature (1)..(25): SEQ ID NO: 5469; WAN024CO8; Start 252; Stop 276
gagaacaactttgactttagacaca

SEQ ID NO: 411647 - DNA, 25 bp, Artificial
  probe
  misc_feature (1)..(25): SEQ ID NO: 5469; WAN024CO8; Start 251; Stop 275
tgagaacaactttgactttagacac

SEQ ID NO: 411648 - DNA, 25 bp, Artificial
  probe
  misc_feature (1)..(25): SEQ ID NO: 5469; WAN024CO8; Start 218; Stop 242
ttagtgaaagcgtggatatagatgc

SEQ ID NO: 411649 - DNA, 25 bp, Artificial
  probe
  misc_feature (1)..(25): SEQ ID NO: 5469; WAN024CO8; Start 208; Stop 232
ataagtgaaattagtgaaagcgtgg

SEQ ID NO: 411650 - DNA, 25 bp, Artificial
  probe
  misc_feature (1)..(25): SEQ ID NO: 5469; WAN024CO8; Start 212; Stop 236
gtgaaattagtgaaagcgtggatat

SEQ ID NO: 411651 - DNA, 25 bp, Artificial
  probe
  misc_feature (1)..(25): SEQ ID NO: 5469; WAN024CO8; Start 78; Stop 102
tagaaggctttatttaggcagttca

SEQ ID NO: 411652 - DNA, 25 bp, Artificial
  probe
  misc_feature (1)..(25): SEQ ID NO: 5470; WAN024G3E; Start 172; Stop 196
accaatcacatcttcaatctctgta

SEQ ID NO: 411653 - DNA, 25 bp, Artificial
  probe
  misc_feature (1)..(25): SEQ ID NO: 5470; WAN024G3E; Start 171; Stop 195
aaccaatcacatcttcaatctctgt

SEQ ID NO: 411654 - DNA, 25 bp, Artificial
  probe
  misc_feature (1)..(25): SEQ ID NO: 5470; WAN024G3E; Start 174; Stop 198
caatcacatcttcaatctctgtacg

SEQ ID NO: 411655 - DNA, 25 bp, Artificial
  probe
  misc_feature (1)..(25): SEQ ID NO: 5470; WAN024G3E; Start 173; Stop 197
ccaatcacatcttcaatctctgtac

SEQ ID NO: 411656 - DNA, 25 bp, Artificial
  probe
  misc_feature (1)..(25): SEQ ID NO: 5470; WAN024G3E; Start 175; Stop 199
aatcacatcttcaatctctgtacgc

SEQ ID NO: 411657 - DNA, 25 bp, Artificial
  probe
  misc_feature (1)..(25): SEQ ID NO: 5470; WAN024G3E; Start 252; Stop 276
tttccaaatcattatccaaagccag

SEQ ID NO: 411658 - DNA, 25 bp, Artificial
  probe
  misc_feature (1)..(25): SEQ ID NO: 5470; WAN024G3E; Start 166; Stop 190
atccaaaccaatcacatcttcaatc

SEQ ID NO: 411659 - DNA, 25 bp, Artificial
  probe
  misc_feature (1)..(25): SEQ ID NO: 5470; WAN024G3E; Start 165; Stop 189
catccaaaccaatcacatcttcaat

SEQ ID NO: 411660 - DNA, 25 bp, Artificial
  probe
  misc_feature (1)..(25): SEQ ID NO: 5470; WAN024G3E; Start 168; Stop 192
ccaaaccaatcacatcttcaatctc

SEQ ID NO: 411661 - DNA, 25 bp, Artificial
  probe
  misc_feature (1)..(25): SEQ ID NO: 5470; WAN024G3E; Start 170; Stop 194
aaaccaatcacatcttcaatctctg

SEQ ID NO: 411662 - DNA, 25 bp, Artificial
  probe
  misc_feature (1)..(25): SEQ ID NO: 5470; WAN024G3E; Start 169; Stop 193
caaaccaatcacatcttcaatctct

SEQ ID NO: 411663 - DNA, 25 bp, Artificial
  probe
  misc_feature (1)..(25): SEQ ID NO: 5470; WAN024G3E; Start 167; Stop 191
tccaaaccaatcacatcttcaatct

SEQ ID NO: 411664 - DNA, 25 bp, Artificial
  probe
  misc_feature (1)..(25): SEQ ID NO: 5470; WAN024G3E; Start 253; Stop 277
ttccaaatcattatccaaagccaga

SEQ ID NO: 411665 - DNA, 25 bp, Artificial
  probe
  misc_feature (1)..(25): SEQ ID NO: 5470; WAN024G3E; Start 254; Stop 278
tccaaatcattatccaaagccagat

SEQ ID NO: 411666 - DNA, 25 bp, Artificial
  probe
  misc_feature (1)..(25): SEQ ID NO: 5470; WAN024G3E; Start 251; Stop 275
atttccaaatcattatccaaagcca

SEQ ID NO: 411667 - DNA, 25 bp, Artificial
  probe
  misc_feature (1)..(25): SEQ ID NO: 5470; WAN024G3E; Start 176; Stop 200
atcacatcttcaatctctgtacgca

SEQ ID NO: 411668 - DNA, 25 bp, Artificial
  probe
  misc_feature (1)..(25): SEQ ID NO: 5470; WAN024G3E; Start 255; Stop 279
ccaaatcattatccaaagccagata

SEQ ID NO: 411669 - DNA, 25 bp, Artificial
  probe
  misc_feature (1)..(25): SEQ ID NO: 5470; WAN024G3E; Start 113; Stop 137
atttcttcaatcccaataccagcct

SEQ ID NO: 411670 - DNA, 25 bp, Artificial
  probe
  misc_feature (1)..(25): SEQ ID NO: 5470; WAN024G3E; Start 164; Stop 188
gcatccaaaccaatcacatcttcaa

SEQ ID NO: 411671 - DNA, 25 bp, Artificial
  probe
  misc_feature (1)..(25): SEQ ID NO: 5470; WAN024G3E; Start 114; Stop 138
tttcttcaatcccaataccagcctt

SEQ ID NO: 411672 - DNA, 25 bp, Artificial
  probe
  misc_feature (1)..(25): SEQ ID NO: 5470; WAN024G3E; Start 177; Stop 201
tcacatcttcaatctctgtacgcac

SEQ ID NO: 411673 - DNA, 25 bp, Artificial
  probe
  misc_feature (1)..(25): SEQ ID NO: 5470; WAN024G3E; Start 112; Stop 136
gatttcttcaatcccaataccagcc

SEQ ID NO: 411674 - DNA, 25 bp, Artificial
  probe
  misc_feature (1)..(25): SEQ ID NO: 5470; WAN024G3E; Start 115; Stop 139
ttcttcaatcccaataccagccttg

SEQ ID NO: 411675 - DNA, 25 bp, Artificial
  probe
  misc_feature (1)..(25): SEQ ID NO: 5470; WAN024G3E; Start 250; Stop 274
gatttccaaatcattatccaaagcc

SEQ ID NO: 411676 - DNA, 25 bp, Artificial
  probe
  misc_feature (1)..(25): SEQ ID NO: 5470; WAN024G3E; Start 236; Stop 260
ttaatgataggcatgatttccaaat

SEQ ID NO: 411677 - DNA, 25 bp, Artificial
  probe
  misc_feature (1)..(25): SEQ ID NO: 5470; WAN024G3E; Start 178; Stop 202
cacatcttcaatctctgtacgcacg

SEQ ID NO: 411678 - DNA, 25 bp, Artificial
  probe
  misc_feature (1)..(25): SEQ ID NO: 5470; WAN024G3E; Start 163; Stop 187
ggcatccaaaccaatcacatcttca

SEQ ID NO: 411679 - DNA, 25 bp, Artificial
  probe
  misc_feature (1)..(25): SEQ ID NO: 5470; WAN024G3E; Start 235; Stop 259
attaatgataggcatgatttccaaa

SEQ ID NO: 411680 - DNA, 25 bp, Artificial
  probe
  misc_feature (1)..(25): SEQ ID NO: 5470; WAN024G3E; Start 259; Stop 283
atcattatccaaagccagataaacg

SEQ ID NO: 411681 - DNA, 25 bp, Artificial
  probe
  misc_feature (1)..(25): SEQ ID NO: 5470; WAN024G3E; Start 19; Stop 43
gtaagcatcgtaaacagagtcgaaa

SEQ ID NO: 411682 - DNA, 25 bp, Artificial
  probe
  misc_feature (1)..(25): SEQ ID NO: 5470; WAN024G3E; Start 237; Stop 261
taatgataggcatgatttccaaatc

SEQ ID NO: 411683 - DNA, 25 bp, Artificial
  probe
  misc_feature (1)..(25): SEQ ID NO: 5470; WAN024G3E; Start 234; Stop 258
tattaatgataggcatgatttccaa

SEQ ID NO: 411684 - DNA, 25 bp, Artificial
  probe
  misc_feature (1)..(25): SEQ ID NO: 5470; WAN024G3E; Start 233; Stop 257
ttattaatgataggcatgatttcca

SEQ ID NO: 411685 - DNA, 25 bp, Artificial
  probe
  misc_feature (1)..(25): SEQ ID NO: 5471; WAN024FDU; Start 421; Stop 445
agcaagcgtaatattgtaccaagta

SEQ ID NO: 411686 - DNA, 25 bp, Artificial
  probe
  misc_feature (1)..(25): SEQ ID NO: 5471; WAN024FDU; Start 422; Stop 446
gcaagcgtaatattgtaccaagtat

SEQ ID NO: 411687 - DNA, 25 bp, Artificial
  probe
  misc_feature (1)..(25): SEQ ID NO: 5471; WAN024FDU; Start 420; Stop 444
aagcaagcgtaatattgtaccaagt

SEQ ID NO: 411688 - DNA, 25 bp, Artificial
  probe
  misc_feature (1)..(25): SEQ ID NO: 5471; WAN024FDU; Start 121; Stop 145
gttaccttagtctttgatgatggca

SEQ ID NO: 411689 - DNA, 25 bp, Artificial
  probe
  misc_feature (1)..(25): SEQ ID NO: 5471; WAN024FDU; Start 122; Stop 146
ttaccttagtctttgatgatggcat

SEQ ID NO: 411690 - DNA, 25 bp, Artificial
  probe
  misc_feature (1)..(25): SEQ ID NO: 5471; WAN024FDU; Start 107; Stop 131
aagaagaggatgaggttaccttagt

SEQ ID NO: 411691 - DNA, 25 bp, Artificial
  probe
  misc_feature (1)..(25): SEQ ID NO: 5471; WAN024FDU; Start 109; Stop 133
gaagaggatgaggttaccttagtct

SEQ ID NO: 411692 - DNA, 25 bp, Artificial
  probe
  misc_feature (1)..(25): SEQ ID NO: 5471; WAN024FDU; Start 108; Stop 132
agaagaggatgaggttaccttagtc

SEQ ID NO: 411693 - DNA, 25 bp, Artificial
  probe
  misc_feature (1)..(25): SEQ ID NO: 5471; WAN024FDU; Start 489; Stop 513
ccagtttgactctatcatagtagcc

SEQ ID NO: 411694 - DNA, 25 bp, Artificial
  probe
  misc_feature (1)..(25): SEQ ID NO: 5471; WAN024FDU; Start 488; Stop 512
accagtttgactctatcatagtagc

SEQ ID NO: 411695 - DNA, 25 bp, Artificial
  probe
  misc_feature (1)..(25): SEQ ID NO: 5471; WAN024FDU; Start 102; Stop 126
cttgaaagaagaggatgaggttacc

SEQ ID NO: 411696 - DNA, 25 bp, Artificial
  probe
  misc_feature (1)..(25): SEQ ID NO: 5471; WAN024FDU; Start 490; Stop 514
cagtttgactctatcatagtagcct

SEQ ID NO: 411697 - DNA, 25 bp, Artificial
  probe
  misc_feature (1)..(25): SEQ ID NO: 5471; WAN024FDU; Start 101; Stop 125
gcttgaaagaagaggatgaggttac

SEQ ID NO: 411698 - DNA, 25 bp, Artificial
  probe
  misc_feature (1)..(25): SEQ ID NO: 5471; WAN024FDU; Start 486; Stop 510
ggaccagtttgactctatcatagta

SEQ ID NO: 411699 - DNA, 25 bp, Artificial
  probe
  misc_feature (1)..(25): SEQ ID NO: 5471; WAN024FDU; Start 120; Stop 144
ggttaccttagtctttgatgatggc

SEQ ID NO: 411700 - DNA, 25 bp, Artificial
  probe
  misc_feature (1)..(25): SEQ ID NO: 5471; WAN024FDU; Start 485; Stop 509
tggaccagtttgactctatcatagt

SEQ ID NO: 411701 - DNA, 25 bp, Artificial
  probe
  misc_feature (1)..(25): SEQ ID NO: 5471; WAN024FDU; Start 423; Stop 447
caagcgtaatattgtaccaagtatt

SEQ ID NO: 411702 - DNA, 25 bp, Artificial
  probe
  misc_feature (1)..(25): SEQ ID NO: 5471; WAN024FDU; Start 110; Stop 134
aagaggatgaggttaccttagtctt

SEQ ID NO: 411703 - DNA, 25 bp, Artificial
  probe
  misc_feature (1)..(25): SEQ ID NO: 5471; WAN024FDU; Start 195; Stop 219
ggtccaagaattaaatgacaatgtg

SEQ ID NO: 411704 - DNA, 25 bp, Artificial
  probe
  misc_feature (1)..(25): SEQ ID NO: 5471; WAN024FDU; Start 203; Stop 227
aattaaatgacaatgtggaactacc

SEQ ID NO: 411705 - DNA, 25 bp, Artificial
  probe
  misc_feature (1)..(25): SEQ ID NO: 5471; WAN024FDU; Start 194; Stop 218
tggtccaagaattaaatgacaatgt

SEQ ID NO: 411706 - DNA, 25 bp, Artificial
  probe
  misc_feature (1)..(25): SEQ ID NO: 5471; WAN024FDU; Start 184; Stop 208
cagtttgagttggtccaagaattaa

SEQ ID NO: 411707 - DNA, 25 bp, Artificial
  probe
  misc_feature (1)..(25): SEQ ID NO: 5471; WAN024FDU; Start 419; Stop 443
aaagcaagcgtaatattgtaccaag

SEQ ID NO: 411708 - DNA, 25 bp, Artificial
  probe
  misc_feature (1)..(25): SEQ ID NO: 5471; WAN024FDU; Start 418; Stop 442
caaagcaagcgtaatattgtaccaa

SEQ ID NO: 411709 - DNA, 25 bp, Artificial
  probe
  misc_feature (1)..(25): SEQ ID NO: 5471; WAN024FDU; Start 183; Stop 207
tcagtttgagttggtccaagaatta

SEQ ID NO: 411710 - DNA, 25 bp, Artificial
  probe
  misc_feature (1)..(25): SEQ ID NO: 5471; WAN024FDU; Start 517; Stop 541
gaagaatcagctaaagaaggagaag

SEQ ID NO: 411711 - DNA, 25 bp, Artificial
  probe
  misc_feature (1)..(25): SEQ ID NO: 5471; WAN024FDU; Start 491; Stop 515
agtttgactctatcatagtagccta

SEQ ID NO: 411712 - DNA, 25 bp, Artificial
  probe
  misc_feature (1)..(25): SEQ ID NO: 5471; WAN024FDU; Start 487; Stop 511
gaccagtttgactctatcatagtag

SEQ ID NO: 411713 - DNA, 25 bp, Artificial
  probe
  misc_feature (1)..(25): SEQ ID NO: 5471; WAN024FDU; Start 185; Stop 209
agtttgagttggtccaagaattaaa

SEQ ID NO: 411714 - DNA, 25 bp, Artificial
  probe
  misc_feature (1)..(25): SEQ ID NO: 5471; WAN024FDU; Start 206; Stop 230
taaatgacaatgtggaactaccagt

SEQ ID NO: 411715 - DNA, 25 bp, Artificial
  probe
  misc_feature (1)..(25): SEQ ID NO: 5471; WAN024FDU; Start 199; Stop 223
caagaattaaatgacaatgtggaac

SEQ ID NO: 411716 - DNA, 25 bp, Artificial
  probe
  misc_feature (1)..(25): SEQ ID NO: 5471; WAN024FDU; Start 188; Stop 212
ttgagttggtccaagaattaaatga

SEQ ID NO: 411717 - DNA, 25 bp, Artificial
  probe
  misc_feature (1)..(25): SEQ ID NO: 5471; WAN024FDU; Start 100; Stop 124
cgcttgaaagaagaggatgaggtta

SEQ ID NO: 411718 - DNA, 25 bp, Artificial
  probe
  misc_feature (1)..(25): SEQ ID NO: 5472; WAN024GJC-5; Start 333; Stop 357
tatccttgtagtagcttcaactgac

SEQ ID NO: 411719 - DNA, 25 bp, Artificial
  probe
  misc_feature (1)..(25): SEQ ID NO: 5472; WAN024GJC-5; Start 332; Stop 356
ctatccttgtagtagcttcaactga

SEQ ID NO: 411720 - DNA, 25 bp, Artificial
  probe
  misc_feature (1)..(25): SEQ ID NO: 5472; WAN024GJC-5; Start 56; Stop 80
ttaacattggtactatcggacacgt

SEQ ID NO: 411721 - DNA, 25 bp, Artificial
  probe
  misc_feature (1)..(25): SEQ ID NO: 5472; WAN024GJC-5; Start 57; Stop 81
taacattggtactatcggacacgtt

SEQ ID NO: 411722 - DNA, 25 bp, Artificial
  probe
  misc_feature (1)..(25): SEQ ID NO: 5472; WAN024GJC-5; Start 149; Stop 173
ttaaccaacctaaagactatgcgtc

SEQ ID NO: 411723 - DNA, 25 bp, Artificial
  probe
  misc_feature (1)..(25): SEQ ID NO: 5472; WAN024GJC-5; Start 334; Stop 358
atccttgtagtagcttcaactgacg

SEQ ID NO: 411724 - DNA, 25 bp, Artificial
  probe
  misc_feature (1)..(25): SEQ ID NO: 5472; WAN024GJC-5; Start 55; Stop 79
gttaacattggtactatcggacacg

SEQ ID NO: 411725 - DNA, 25 bp, Artificial
  probe
  misc_feature (1)..(25): SEQ ID NO: 5472; WAN024GJC-5; Start 54; Stop 78
cgttaacattggtactatcggacac

SEQ ID NO: 411726 - DNA, 25 bp, Artificial
  probe
  misc_feature (1)..(25): SEQ ID NO: 5472; WAN024GJC-5; Start 52; Stop 76
cacgttaacattggtactatcggac

SEQ ID NO: 411727 - DNA, 25 bp, Artificial
  probe
  misc_feature (1)..(25): SEQ ID NO: 5472; WAN024GJC-5; Start 53; Stop 77
acgttaacattggtactatcggaca

SEQ ID NO: 411728 - DNA, 25 bp, Artificial
  probe
  misc_feature (1)..(25): SEQ ID NO: 5472; WAN024GJC-5; Start 51; Stop 75
acacgttaacattggtactatcgga

SEQ ID NO: 411729 - DNA, 25 bp, Artificial
  probe
  misc_feature (1)..(25): SEQ ID NO: 5472; WAN024GJC-5; Start 50; Stop 74
cacacgttaacattggtactatcgg

SEQ ID NO: 411730 - DNA, 25 bp, Artificial
  probe
  misc_feature (1)..(25): SEQ ID NO: 5472; WAN024GJC-5; Start 321; Stop 345
aatggacggagctatccttgtagta

SEQ ID NO: 411731 - DNA, 25 bp, Artificial
  probe
  misc_feature (1)..(25): SEQ ID NO: 5472; WAN024GJC-5; Start 137; Stop 161
tgccttcatcagttaaccaacctaa

SEQ ID NO: 411732 - DNA, 25 bp, Artificial
  probe
  misc_feature (1)..(25): SEQ ID NO: 5472; WAN024GJC-5; Start 337; Stop 361
cttgtagtagcttcaactgacggac

SEQ ID NO: 411733 - DNA, 25 bp, Artificial
  probe
  misc_feature (1)..(25): SEQ ID NO: 5472; WAN024GJC-5; Start 136; Stop 160
ttgccttcatcagttaaccaaccta

SEQ ID NO: 411734 - DNA, 25 bp, Artificial
  probe
  misc_feature (1)..(25): SEQ ID NO: 5472; WAN024GJC-5; Start 58; Stop 82
aacattggtactatcggacacgttg

SEQ ID NO: 411735 - DNA, 25 bp, Artificial
  probe
  misc_feature (1)..(25): SEQ ID NO: 5472; WAN024GJC-5; Start 322; Stop 346
atggacggagctatccttgtagtag

SEQ ID NO: 411736 - DNA, 25 bp, Artificial
  probe
  misc_feature (1)..(25): SEQ ID NO: 5472; WAN024GJC-5; Start 60; Stop 84
cattggtactatcggacacgttgac

SEQ ID NO: 411737 - DNA, 25 bp, Artificial
  probe
  misc_feature (1)..(25): SEQ ID NO: 5472; WAN024GJC-5; Start 341; Stop 365
tagtagcttcaactgacggaccaat

SEQ ID NO: 411738 - DNA, 25 bp, Artificial
  probe
  misc_feature (1)..(25): SEQ ID NO: 5472; WAN024GJC-5; Start 49; Stop 73
ccacacgttaacattggtactatcg

SEQ ID NO: 411739 - DNA, 25 bp, Artificial
  probe
  misc_feature (1)..(25): SEQ ID NO: 5472; WAN024GJC-5; Start 139; Stop 163
ccttcatcagttaaccaacctaaag

SEQ ID NO: 411740 - DNA, 25 bp, Artificial
  probe
  misc_feature (1)..(25): SEQ ID NO: 5472; WAN024GJC-5; Start 371; Stop 395
aaactcgtgagcacatccttctttc

SEQ ID NO: 411741 - DNA, 25 bp, Artificial
  probe
  misc_feature (1)..(25): SEQ ID NO: 5472; WAN024GJC-5; Start 59; Stop 83
acattggtactatcggacacgttga

SEQ ID NO: 411742 - DNA, 25 bp, Artificial
  probe
  misc_feature (1)..(25): SEQ ID NO: 5472; WAN024GJC-5; Start 146; Stop 170
cagttaaccaacctaaagactatgc

SEQ ID NO: 411743 - DNA, 25 bp, Artificial
  probe
  misc_feature (1)..(25): SEQ ID NO: 5472; WAN024GJC-5; Start 142; Stop 166
tcatcagttaaccaacctaaagact

SEQ ID NO: 411744 - DNA, 25 bp, Artificial
  probe
  misc_feature (1)..(25): SEQ ID NO: 5472; WAN024GJC-5; Start 141; Stop 165
ttcatcagttaaccaacctaaagac

SEQ ID NO: 411745 - DNA, 25 bp, Artificial
  probe
  misc_feature (1)..(25): SEQ ID NO: 5472; WAN024GJC-5; Start 148; Stop 172
gttaaccaacctaaagactatgcgt

SEQ ID NO: 411746 - DNA, 25 bp, Artificial
  probe
  misc_feature (1)..(25): SEQ ID NO: 5472; WAN024GJC-5; Start 147; Stop 171
agttaaccaacctaaagactatgcg

SEQ ID NO: 411747 - DNA, 25 bp, Artificial
  probe
  misc_feature (1)..(25): SEQ ID NO: 5472; WAN024GJC-5; Start 138; Stop 162
gccttcatcagttaaccaacctaaa

SEQ ID NO: 411748 - DNA, 25 bp, Artificial
  probe
  misc_feature (1)..(25): SEQ ID NO: 5472; WAN024GJC-5; Start 140; Stop 164
cttcatcagttaaccaacctaaaga

SEQ ID NO: 411749 - DNA, 25 bp, Artificial
  probe
  misc_feature (1)..(25): SEQ ID NO: 5472; WAN024GJC-5; Start 370; Stop 394
caaactcgtgagcacatccttcttt

SEQ ID NO: 411750 - DNA, 25 bp, Artificial
  probe
  misc_feature (1)..(25): SEQ ID NO: 5472; WAN024GJC-5; Start 331; Stop 355
gctatccttgtagtagcttcaactg

SEQ ID NO: 411751 - DNA, 25 bp, Artificial
  probe
  misc_feature (1)..(25): SEQ ID NO: 5473; WAN024CEY; Start 99; Stop 123
tggtattacaaggcagtatctaagc

SEQ ID NO: 411752 - DNA, 25 bp, Artificial
  probe
  misc_feature (1)..(25): SEQ ID NO: 5473; WAN024CEY; Start 101; Stop 125
gtattacaaggcagtatctaagcga

SEQ ID NO: 411753 - DNA, 25 bp, Artificial
  probe
  misc_feature (1)..(25): SEQ ID NO: 5473; WAN024CEY; Start 102; Stop 126
tattacaaggcagtatctaagcgat

SEQ ID NO: 411754 - DNA, 25 bp, Artificial
  probe
  misc_feature (1)..(25): SEQ ID NO: 5473; WAN024CEY; Start 100; Stop 124
ggtattacaaggcagtatctaagcg

SEQ ID NO: 411755 - DNA, 25 bp, Artificial
  probe
  misc_feature (1)..(25): SEQ ID NO: 5473; WAN024CEY; Start 517; Stop 541
cttgaccttgccattaacgataaga

SEQ ID NO: 411756 - DNA, 25 bp, Artificial
  probe
  misc_feature (1)..(25): SEQ ID NO: 5473; WAN024CEY; Start 518; Stop 542
ttgaccttgccattaacgataagac

SEQ ID NO: 411757 - DNA, 25 bp, Artificial
  probe
  misc_feature (1)..(25): SEQ ID NO: 5473; WAN024CEY; Start 108; Stop 132
aaggcagtatctaagcgatattgaa

SEQ ID NO: 411758 - DNA, 25 bp, Artificial
  probe
  misc_feature (1)..(25): SEQ ID NO: 5473; WAN024CEY; Start 107; Stop 131
caaggcagtatctaagcgatattga

SEQ ID NO: 411759 - DNA, 25 bp, Artificial
  probe
  misc_feature (1)..(25): SEQ ID NO: 5473; WAN024CEY; Start 105; Stop 129
tacaaggcagtatctaagcgatatt

SEQ ID NO: 411760 - DNA, 25 bp, Artificial
  probe
  misc_feature (1)..(25): SEQ ID NO: 5473; WAN024CEY; Start 104; Stop 128
ttacaaggcagtatctaagcgatat

SEQ ID NO: 411761 - DNA, 25 bp, Artificial
  probe
  misc_feature (1)..(25): SEQ ID NO: 5473; WAN024CEY; Start 103; Stop 127
attacaaggcagtatctaagcgata

SEQ ID NO: 411762 - DNA, 25 bp, Artificial
  probe
  misc_feature (1)..(25): SEQ ID NO: 5473; WAN024CEY; Start 520; Stop 544
gaccttgccattaacgataagacag

SEQ ID NO: 411763 - DNA, 25 bp, Artificial
  probe
  misc_feature (1)..(25): SEQ ID NO: 5473; WAN024CEY; Start 106; Stop 130
acaaggcagtatctaagcgatattg

SEQ ID NO: 411764 - DNA, 25 bp, Artificial
  probe
  misc_feature (1)..(25): SEQ ID NO: 5473; WAN024CEY; Start 516; Stop 540
ccttgaccttgccattaacgataag

SEQ ID NO: 411765 - DNA, 25 bp, Artificial
  probe
  misc_feature (1)..(25): SEQ ID NO: 5473; WAN024CEY; Start 519; Stop 543
tgaccttgccattaacgataagaca

SEQ ID NO: 411766 - DNA, 25 bp, Artificial
  probe
  misc_feature (1)..(25): SEQ ID NO: 5473; WAN024CEY; Start 98; Stop 122
ctggtattacaaggcagtatctaag

SEQ ID NO: 411767 - DNA, 25 bp, Artificial
  probe
  misc_feature (1)..(25): SEQ ID NO: 5473; WAN024CEY; Start 927; Stop 951
tgattggaaactgaatgaagaatgg

SEQ ID NO: 411768 - DNA, 25 bp, Artificial
  probe
  misc_feature (1)..(25): SEQ ID NO: 5473; WAN024CEY; Start 835; Stop 859
ttactcgtctatgacaatccagagc

SEQ ID NO: 411769 - DNA, 25 bp, Artificial
  probe
  misc_feature (1)..(25): SEQ ID NO: 5473; WAN024CEY; Start 897; Stop 921
tgtagataaagacgattccaaacct

SEQ ID NO: 411770 - DNA, 25 bp, Artificial
  probe
  misc_feature (1)..(25): SEQ ID NO: 5473; WAN024CEY; Start 838; Stop 862
ctcgtctatgacaatccagagcata

SEQ ID NO: 411771 - DNA, 25 bp, Artificial
  probe
  misc_feature (1)..(25): SEQ ID NO: 5473; WAN024CEY; Start 574; Stop 598
aagtgccaacaggaagaatgtatct

SEQ ID NO: 411772 - DNA, 25 bp, Artificial
  probe
  misc_feature (1)..(25): SEQ ID NO: 5473; WAN024CEY; Start 209; Stop 233
cccttgaaatgctgtttgattatgt

SEQ ID NO: 411773 - DNA, 25 bp, Artificial
  probe
  misc_feature (1)..(25): SEQ ID NO: 5473; WAN024CEY; Start 1247; Stop 1271
atataatgggagataagacggttcg

SEQ ID NO: 411774 - DNA, 25 bp, Artificial
  probe
  misc_feature (1)..(25): SEQ ID NO: 5473; WAN024CEY; Start 928; Stop 952
gattggaaactgaatgaagaatggg

SEQ ID NO: 411775 - DNA, 25 bp, Artificial
  probe
  misc_feature (1)..(25): SEQ ID NO: 5473; WAN024CEY; Start 898; Stop 922
gtagataaagacgattccaaacctc

SEQ ID NO: 411776 - DNA, 25 bp, Artificial
  probe
  misc_feature (1)..(25): SEQ ID NO: 5473; WAN024CEY; Start 939; Stop 963
gaatgaagaatgggcttggtttatt

SEQ ID NO: 411777 - DNA, 25 bp, Artificial
  probe
  misc_feature (1)..(25): SEQ ID NO: 5473; WAN024CEY; Start 940; Stop 964
aatgaagaatgggcttggtttattg

SEQ ID NO: 411778 - DNA, 25 bp, Artificial
  probe
  misc_feature (1)..(25): SEQ ID NO: 5473; WAN024CEY; Start 839; Stop 863
tcgtctatgacaatccagagcatac

SEQ ID NO: 411779 - DNA, 25 bp, Artificial
  probe
  misc_feature (1)..(25): SEQ ID NO: 5473; WAN024CEY; Start 1063; Stop 1087
aaggttgcgattaaacttgatgaaa

SEQ ID NO: 411780 - DNA, 25 bp, Artificial
  probe
  misc_feature (1)..(25): SEQ ID NO: 5473; WAN024CEY; Start 1062; Stop 1086
aaaggttgcgattaaacttgatgaa

SEQ ID NO: 411781 - DNA, 25 bp, Artificial
  probe
  misc_feature (1)..(25): SEQ ID NO: 5473; WAN024CEY; Start 139; Stop 163
aaagtcaagccatcagaggatttac

SEQ ID NO: 411782 - DNA, 25 bp, Artificial
  probe
  misc_feature (1)..(25): SEQ ID NO: 5473; WAN024CEY; Start 20; Stop 44
atgaacaaacttggttacagcattt

SEQ ID NO: 411783 - DNA, 25 bp, Artificial
  probe
  misc_feature (1)..(25): SEQ ID NO: 5473; WAN024CEY; Start 1064; Stop 1088
aggttgcgattaaacttgatgaaat

SEQ ID NO: 411784 - DNA, 25 bp, Artificial
  probe
  misc_feature (1)..(25): SEQ ID NO: 5474; WAN024ERG; Start 246; Stop 270
gattatcaaggttccaacagaagtg

SEQ ID NO: 411785 - DNA, 25 bp, Artificial
  probe
  misc_feature (1)..(25): SEQ ID NO: 5474; WAN024ERG; Start 245; Stop 269
agattatcaaggttccaacagaagt

SEQ ID NO: 411786 - DNA, 25 bp, Artificial
  probe
  misc_feature (1)..(25): SEQ ID NO: 5474; WAN024ERG; Start 244; Stop 268
aagattatcaaggttccaacagaag

SEQ ID NO: 411787 - DNA, 25 bp, Artificial
  probe
  misc_feature (1)..(25): SEQ ID NO: 5474; WAN024ERG; Start 151; Stop 175
aatgaattgagtcaagagcagattg

SEQ ID NO: 411788 - DNA, 25 bp, Artificial
  probe
  misc_feature (1)..(25): SEQ ID NO: 5474; WAN024ERG; Start 247; Stop 271
attatcaaggttccaacagaagtgg

SEQ ID NO: 411789 - DNA, 25 bp, Artificial
  probe
  misc_feature (1)..(25): SEQ ID NO: 5474; WAN024ERG; Start 210; Stop 234
taagatttctggtatggaacgcttt

SEQ ID NO: 411790 - DNA, 25 bp, Artificial
  probe
  misc_feature (1)..(25): SEQ ID NO: 5474; WAN024ERG; Start 209; Stop 233
ttaagatttctggtatggaacgctt

SEQ ID NO: 411791 - DNA, 25 bp, Artificial
  probe
  misc_feature (1)..(25): SEQ ID NO: 5474; WAN024ERG; Start 206; Stop 230
atgttaagatttctggtatggaacg

SEQ ID NO: 411792 - DNA, 25 bp, Artificial
  probe
  misc_feature (1)..(25): SEQ ID NO: 5474; WAN024ERG; Start 171; Stop 195
gattgatgcagcggatgtagttatt

SEQ ID NO: 411793 - DNA, 25 bp, Artificial
  probe
  misc_feature (1)..(25): SEQ ID NO: 5474; WAN024ERG; Start 208; Stop 232
gttaagatttctggtatggaacgct

SEQ ID NO: 411794 - DNA, 25 bp, Artificial
  probe
  misc_feature (1)..(25): SEQ ID NO: 5474; WAN024ERG; Start 243; Stop 267
aaagattatcaaggttccaacagaa

SEQ ID NO: 411795 - DNA, 25 bp, Artificial
  probe
  misc_feature (1)..(25): SEQ ID NO: 5474; WAN024ERG; Start 207; Stop 231
tgttaagatttctggtatggaacgc

SEQ ID NO: 411796 - DNA, 25 bp, Artificial
  probe
  misc_feature (1)..(25): SEQ ID NO: 5474; WAN024ERG; Start 211; Stop 235
aagatttctggtatggaacgctttg

SEQ ID NO: 411797 - DNA, 25 bp, Artificial
  probe
  misc_feature (1)..(25): SEQ ID NO: 5474; WAN024ERG; Start 202; Stop 226
gttgatgttaagatttctggtatgg

SEQ ID NO: 411798 - DNA, 25 bp, Artificial
  probe
  misc_feature (1)..(25): SEQ ID NO: 5474; WAN024ERG; Start 198; Stop 222
agcagttgatgttaagatttctggt

SEQ ID NO: 411799 - DNA, 25 bp, Artificial
  probe
  misc_feature (1)..(25): SEQ ID NO: 5474; WAN024ERG; Start 170; Stop 194
agattgatgcagcggatgtagttat

SEQ ID NO: 411800 - DNA, 25 bp, Artificial
  probe
  misc_feature (1)..(25): SEQ ID NO: 5474; WAN024ERG; Start 203; Stop 227
ttgatgttaagatttctggtatgga

SEQ ID NO: 411801 - DNA, 25 bp, Artificial
  probe
  misc_feature (1)..(25): SEQ ID NO: 5474; WAN024ERG; Start 199; Stop 223
gcagttgatgttaagatttctggta

SEQ ID NO: 411802 - DNA, 25 bp, Artificial
  probe
  misc_feature (1)..(25): SEQ ID NO: 5474; WAN024ERG; Start 154; Stop 178
gaattgagtcaagagcagattgatg

SEQ ID NO: 411803 - DNA, 25 bp, Artificial
  probe
  misc_feature (1)..(25): SEQ ID NO: 5474; WAN024ERG; Start 150; Stop 174
aaatgaattgagtcaagagcagatt

SEQ ID NO: 411804 - DNA, 25 bp, Artificial
  probe
  misc_feature (1)..(25): SEQ ID NO: 5474; WAN024ERG; Start 197; Stop 221
tagcagttgatgttaagatttctgg

SEQ ID NO: 411805 - DNA, 25 bp, Artificial
  probe
  misc_feature (1)..(25): SEQ ID NO: 5474; WAN024ERG; Start 153; Stop 177
tgaattgagtcaagagcagattgat

SEQ ID NO: 411806 - DNA, 25 bp, Artificial
  probe
  misc_feature (1)..(25): SEQ ID NO: 5474; WAN024ERG; Start 152; Stop 176
atgaattgagtcaagagcagattga

SEQ ID NO: 411807 - DNA, 25 bp, Artificial
  probe
  misc_feature (1)..(25): SEQ ID NO: 5474; WAN024ERG; Start 79; Stop 103
aaattagagaatgccgcaaaggtag

SEQ ID NO: 411808 - DNA, 25 bp, Artificial
  probe
  misc_feature (1)..(25): SEQ ID NO: 5474; WAN024ERG; Start 204; Stop 228
tgatgttaagatttctggtatggaa

SEQ ID NO: 411809 - DNA, 25 bp, Artificial
  probe
  misc_feature (1)..(25): SEQ ID NO: 5474; WAN024ERG; Start 213; Stop 237
gatttctggtatggaacgctttgag

SEQ ID NO: 411810 - DNA, 25 bp, Artificial
  probe
  misc_feature (1)..(25): SEQ ID NO: 5474; WAN024ERG; Start 296; Stop 320
ttgctaaagctgttgagattgttac

SEQ ID NO: 411811 - DNA, 25 bp, Artificial
  probe
  misc_feature (1)..(25): SEQ ID NO: 5474; WAN024ERG; Start 301; Stop 325
aaagctgttgagattgttacgaaat

SEQ ID NO: 411812 - DNA, 25 bp, Artificial
  probe
  misc_feature (1)..(25): SEQ ID NO: 5474; WAN024ERG; Start 299; Stop 323
ctaaagctgttgagattgttacgaa

SEQ ID NO: 411813 - DNA, 25 bp, Artificial
  probe
  misc_feature (1)..(25): SEQ ID NO: 5474; WAN024ERG; Start 294; Stop 318
gattgctaaagctgttgagattgtt

SEQ ID NO: 411814 - DNA, 25 bp, Artificial
  probe
  misc_feature (1)..(25): SEQ ID NO: 5474; WAN024ERG; Start 292; Stop 316
ctgattgctaaagctgttgagattg

SEQ ID NO: 411815 - DNA, 25 bp, Artificial
  probe
  misc_feature (1)..(25): SEQ ID NO: 5474; WAN024ERG; Start 300; Stop 324
taaagctgttgagattgttacgaaa

SEQ ID NO: 411816 - DNA, 25 bp, Artificial
  probe
  misc_feature (1)..(25): SEQ ID NO: 5474; WAN024ERG; Start 295; Stop 319
attgctaaagctgttgagattgtta

SEQ ID NO: 411817 - DNA, 25 bp, Artificial
  probe
  misc_feature (1)..(25): SEQ ID NO: 5475; WAN024GNP; Start 589; Stop 613
ttctctctactcttggcttctctag

SEQ ID NO: 411818 - DNA, 25 bp, Artificial
  probe
  misc_feature (1)..(25): SEQ ID NO: 5475; WAN024GNP; Start 488; Stop 512
ttctcttgaccttctatctctatcc

SEQ ID NO: 411819 - DNA, 25 bp, Artificial
  probe
  misc_feature (1)..(25): SEQ ID NO: 5475; WAN024GNP; Start 592; Stop 616
tctctactcttggcttctctagttc

SEQ ID NO: 411820 - DNA, 25 bp, Artificial
  probe
  misc_feature (1)..(25): SEQ ID NO: 5475; WAN024GNP; Start 591; Stop 615
ctctctactcttggcttctctagtt

SEQ ID NO: 411821 - DNA, 25 bp, Artificial
  probe
  misc_feature (1)..(25): SEQ ID NO: 5475; WAN024GNP; Start 590; Stop 614
tctctctactcttggcttctctagt

SEQ ID NO: 411822 - DNA, 25 bp, Artificial
  probe
  misc_feature (1)..(25): SEQ ID NO: 5475; WAN024GNP; Start 593; Stop 617
ctctactcttggcttctctagttcg

SEQ ID NO: 411823 - DNA, 25 bp, Artificial
  probe
  misc_feature (1)..(25): SEQ ID NO: 5475; WAN024GNP; Start 559; Stop 583
cttggacaagaaggaatctactgtg

SEQ ID NO: 411824 - DNA, 25 bp, Artificial
  probe
  misc_feature (1)..(25): SEQ ID NO: 5475; WAN024GNP; Start 588; Stop 612
tttctctctactcttggcttctcta

SEQ ID NO: 411825 - DNA, 25 bp, Artificial
  probe
  misc_feature (1)..(25): SEQ ID NO: 5475; WAN024GNP; Start 489; Stop 513
tctcttgaccttctatctctatccc

SEQ ID NO: 411826 - DNA, 25 bp, Artificial
  probe
  misc_feature (1)..(25): SEQ ID NO: 5475; WAN024GNP; Start 313; Stop 337
tttctcttggatttgaccttgattg

SEQ ID NO: 411827 - DNA, 25 bp, Artificial
  probe
  misc_feature (1)..(25): SEQ ID NO: 5475; WAN024GNP; Start 268; Stop 292
ttctcttatcttcctttggtagcac

SEQ ID NO: 411828 - DNA, 25 bp, Artificial
  probe
  misc_feature (1)..(25): SEQ ID NO: 5475; WAN024GNP; Start 573; Stop 597
aatctactgtgctcctttctctcta

SEQ ID NO: 411829 - DNA, 25 bp, Artificial
  probe
  misc_feature (1)..(25): SEQ ID NO: 5475; WAN024GNP; Start 311; Stop 335
catttctcttggatttgaccttgat

SEQ ID NO: 411830 - DNA, 25 bp, Artificial
  probe
  misc_feature (1)..(25): SEQ ID NO: 5475; WAN024GNP; Start 267; Stop 291
attctcttatcttcctttggtagca

SEQ ID NO: 411831 - DNA, 25 bp, Artificial
  probe
  misc_feature (1)..(25): SEQ ID NO: 5475; WAN024GNP; Start 263; Stop 287
gcgtattctcttatcttcctttggt

SEQ ID NO: 411832 - DNA, 25 bp, Artificial
  probe
  misc_feature (1)..(25): SEQ ID NO: 5475; WAN024GNP; Start 556; Stop 580
ttgcttggacaagaaggaatctact

SEQ ID NO: 411833 - DNA, 25 bp, Artificial
  probe
  misc_feature (1)..(25): SEQ ID NO: 5475; WAN024GNP; Start 574; Stop 598
atctactgtgctcctttctctctac

SEQ ID NO: 411834 - DNA, 25 bp, Artificial
  probe
  misc_feature (1)..(25): SEQ ID NO: 5475; WAN024GNP; Start 312; Stop 336
atttctcttggatttgaccttgatt

SEQ ID NO: 411835 - DNA, 25 bp, Artificial
  probe
  misc_feature (1)..(25): SEQ ID NO: 5475; WAN024GNP; Start 269; Stop 293
tctcttatcttcctttggtagcaca

SEQ ID NO: 411836 - DNA, 25 bp, Artificial
  probe
  misc_feature (1)..(25): SEQ ID NO: 5475; WAN024GNP; Start 587; Stop 611
ctttctctctactcttggcttctct

SEQ ID NO: 411837 - DNA, 25 bp, Artificial
  probe
  misc_feature (1)..(25): SEQ ID NO: 5475; WAN024GNP; Start 529; Stop 553
ttaaagaaacatccactcccactag

SEQ ID NO: 411838 - DNA, 25 bp, Artificial
  probe
  misc_feature (1)..(25): SEQ ID NO: 5475; WAN024GNP; Start 271; Stop 295
tcttatcttcctttggtagcacaag

SEQ ID NO: 411839 - DNA, 25 bp, Artificial
  probe
  misc_feature (1)..(25): SEQ ID NO: 5475; WAN024GNP; Start 270; Stop 294
ctcttatcttcctttggtagcacaa

SEQ ID NO: 411840 - DNA, 25 bp, Artificial
  probe
  misc_feature (1)..(25): SEQ ID NO: 5475; WAN024GNP; Start 310; Stop 334
tcatttctcttggatttgaccttga

SEQ ID NO: 411841 - DNA, 25 bp, Artificial
  probe
  misc_feature (1)..(25): SEQ ID NO: 5475; WAN024GNP; Start 309; Stop 333
ttcatttctcttggatttgaccttg

SEQ ID NO: 411842 - DNA, 25 bp, Artificial
  probe
  misc_feature (1)..(25): SEQ ID NO: 5475; WAN024GNP; Start 576; Stop 600
ctactgtgctcctttctctctactc

SEQ ID NO: 411843 - DNA, 25 bp, Artificial
  probe
  misc_feature (1)..(25): SEQ ID NO: 5475; WAN024GNP; Start 557; Stop 581
tgcttggacaagaaggaatctactg

SEQ ID NO: 411844 - DNA, 25 bp, Artificial
  probe
  misc_feature (1)..(25): SEQ ID NO: 5475; WAN024GNP; Start 314; Stop 338
ttctcttggatttgaccttgattgc

SEQ ID NO: 411845 - DNA, 25 bp, Artificial
  probe
  misc_feature (1)..(25): SEQ ID NO: 5475; WAN024GNP; Start 560; Stop 584
ttggacaagaaggaatctactgtgc

SEQ ID NO: 411846 - DNA, 25 bp, Artificial
  probe
  misc_feature (1)..(25): SEQ ID NO: 5475; WAN024GNP; Start 308; Stop 332
tttcatttctcttggatttgacctt

SEQ ID NO: 411847 - DNA, 25 bp, Artificial
  probe
  misc_feature (1)..(25): SEQ ID NO: 5475; WAN024GNP; Start 572; Stop 596
gaatctactgtgctcctttctctct

SEQ ID NO: 411848 - DNA, 25 bp, Artificial
  probe
  misc_feature (1)..(25): SEQ ID NO: 5475; WAN024GNP; Start 562; Stop 586
ggacaagaaggaatctactgtgctc

SEQ ID NO: 411849 - DNA, 25 bp, Artificial
  probe
  misc_feature (1)..(25): SEQ ID NO: 5475; WAN024GNP; Start 577; Stop 601
tactgtgctcctttctctctactct

SEQ ID NO: 411850 - DNA, 25 bp, Artificial
  probe
  misc_feature (1)..(25): SEQ ID NO: 5476; WAN024BFM; Start 369; Stop 393
cttggttggagtaggttcttctatc

SEQ ID NO: 411851 - DNA, 25 bp, Artificial
  probe
  misc_feature (1)..(25): SEQ ID NO: 5476; WAN024BFM; Start 373; Stop 397
gttggagtaggttcttctatctgtg

SEQ ID NO: 411852 - DNA, 25 bp, Artificial
  probe
  misc_feature (1)..(25): SEQ ID NO: 5476; WAN024BFM; Start 1067; Stop 1091
cgtaggtatatgttactgacttcgt

SEQ ID NO: 411853 - DNA, 25 bp, Artificial
  probe
  misc_feature (1)..(25): SEQ ID NO: 5476; WAN024BFM; Start 285; Stop 309
tgtcatcctgtccactatctcaata

SEQ ID NO: 411854 - DNA, 25 bp, Artificial
  probe
  misc_feature (1)..(25): SEQ ID NO: 5476; WAN024BFM; Start 1066; Stop 1090
ccgtaggtatatgttactgacttcg

SEQ ID NO: 411855 - DNA, 25 bp, Artificial
  probe
  misc_feature (1)..(25): SEQ ID NO: 5476; WAN024BFM; Start 370; Stop 394
ttggttggagtaggttcttctatct

SEQ ID NO: 411856 - DNA, 25 bp, Artificial
  probe
  misc_feature (1)..(25): SEQ ID NO: 5476; WAN024BFM; Start 1065; Stop 1089
gccgtaggtatatgttactgacttc

SEQ ID NO: 411857 - DNA, 25 bp, Artificial
  probe
  misc_feature (1)..(25): SEQ ID NO: 5476; WAN024BFM; Start 1062; Stop 1086
cttgccgtaggtatatgttactgac

SEQ ID NO: 411858 - DNA, 25 bp, Artificial
  probe
  misc_feature (1)..(25): SEQ ID NO: 5476; WAN024BFM; Start 1064; Stop 1088
tgccgtaggtatatgttactgactt

SEQ ID NO: 411859 - DNA, 25 bp, Artificial
  probe
  misc_feature (1)..(25): SEQ ID NO: 5476; WAN024BFM; Start 1063; Stop 1087
ttgccgtaggtatatgttactgact

SEQ ID NO: 411860 - DNA, 25 bp, Artificial
  probe
  misc_feature (1)..(25): SEQ ID NO: 5476; WAN024BFM; Start 372; Stop 396
ggttggagtaggttcttctatctgt

SEQ ID NO: 411861 - DNA, 25 bp, Artificial
  probe
  misc_feature (1)..(25): SEQ ID NO: 5476; WAN024BFM; Start 371; Stop 395
tggttggagtaggttcttctatctg

SEQ ID NO: 411862 - DNA, 25 bp, Artificial
  probe
  misc_feature (1)..(25): SEQ ID NO: 5476; WAN024BFM; Start 192; Stop 216
tagttccaagaagttgctccaatat

SEQ ID NO: 411863 - DNA, 25 bp, Artificial
  probe
  misc_feature (1)..(25): SEQ ID NO: 5476; WAN024BFM; Start 191; Stop 215
ttagttccaagaagttgctccaata

SEQ ID NO: 411864 - DNA, 25 bp, Artificial
  probe
  misc_feature (1)..(25): SEQ ID NO: 5476; WAN024BFM; Start 799; Stop 823
ctcactacactactcacctctctag

SEQ ID NO: 411865 - DNA, 25 bp, Artificial
  probe
  misc_feature (1)..(25): SEQ ID NO: 5476; WAN024BFM; Start 311; Stop 335
ctctgattattgcctacctcttcca

SEQ ID NO: 411866 - DNA, 25 bp, Artificial
  probe
  misc_feature (1)..(25): SEQ ID NO: 5476; WAN024BFM; Start 284; Stop 308
ctgtcatcctgtccactatctcaat

SEQ ID NO: 411867 - DNA, 25 bp, Artificial
  probe
  misc_feature (1)..(25): SEQ ID NO: 5476; WAN024BFM; Start 798; Stop 822
cctcactacactactcacctctcta

SEQ ID NO: 411868 - DNA, 25 bp, Artificial
  probe
  misc_feature (1)..(25): SEQ ID NO: 5476; WAN024BFM; Start 193; Stop 217
agttccaagaagttgctccaatatg

SEQ ID NO: 411869 - DNA, 25 bp, Artificial
  probe
  misc_feature (1)..(25): SEQ ID NO: 5476; WAN024BFM; Start 286; Stop 310
gtcatcctgtccactatctcaatag

SEQ ID NO: 411870 - DNA, 25 bp, Artificial
  probe
  misc_feature (1)..(25): SEQ ID NO: 5476; WAN024BFM; Start 70; Stop 94
ctatcttggtacttaggaggattct

SEQ ID NO: 411871 - DNA, 25 bp, Artificial
  probe
  misc_feature (1)..(25): SEQ ID NO: 5476; WAN024BFM; Start 287; Stop 311
tcatcctgtccactatctcaatagc

SEQ ID NO: 411872 - DNA, 25 bp, Artificial
  probe
  misc_feature (1)..(25): SEQ ID NO: 5476; WAN024BFM; Start 307; Stop 331
atagctctgattattgcctacctct

SEQ ID NO: 411873 - DNA, 25 bp, Artificial
  probe
  misc_feature (1)..(25): SEQ ID NO: 5476; WAN024BFM; Start 308; Stop 332
tagctctgattattgcctacctctt

SEQ ID NO: 411874 - DNA, 25 bp, Artificial
  probe
  misc_feature (1)..(25): SEQ ID NO: 5476; WAN024BFM; Start 1068; Stop 1092
gtaggtatatgttactgacttcgtc

SEQ ID NO: 411875 - DNA, 25 bp, Artificial
  probe
  misc_feature (1)..(25): SEQ ID NO: 5476; WAN024BFM; Start 312; Stop 336
tctgattattgcctacctcttccag

SEQ ID NO: 411876 - DNA, 25 bp, Artificial
  probe
  misc_feature (1)..(25): SEQ ID NO: 5476; WAN024BFM; Start 306; Stop 330
aatagctctgattattgcctacctc

SEQ ID NO: 411877 - DNA, 25 bp, Artificial
  probe
  misc_feature (1)..(25): SEQ ID NO: 5476; WAN024BFM; Start 368; Stop 392
ccttggttggagtaggttcttctat

SEQ ID NO: 411878 - DNA, 25 bp, Artificial
  probe
  misc_feature (1)..(25): SEQ ID NO: 5476; WAN024BFM; Start 310; Stop 334
gctctgattattgcctacctcttcc

SEQ ID NO: 411879 - DNA, 25 bp, Artificial
  probe
  misc_feature (1)..(25): SEQ ID NO: 5476; WAN024BFM; Start 796; Stop 820
ctcctcactacactactcacctctc

SEQ ID NO: 411880 - DNA, 25 bp, Artificial
  probe
  misc_feature (1)..(25): SEQ ID NO: 5476; WAN024BFM; Start 794; Stop 818
ctctcctcactacactactcacctc

SEQ ID NO: 411881 - DNA, 25 bp, Artificial
  probe
  misc_feature (1)..(25): SEQ ID NO: 5476; WAN024BFM; Start 792; Stop 816
ctctctcctcactacactactcacc

SEQ ID NO: 411882 - DNA, 25 bp, Artificial
  probe
  misc_feature (1)..(25): SEQ ID NO: 5476; WAN024BFM; Start 791; Stop 815
cctctctcctcactacactactcac

SEQ ID NO: 411883 - DNA, 25 bp, Artificial
  probe
  misc_feature (1)..(25): SEQ ID NO: 5477; WAN024GFT; Start 63; Stop 87
ggtagccaattccttgatatacagg

SEQ ID NO: 411884 - DNA, 25 bp, Artificial
  probe
  misc_feature (1)..(25): SEQ ID NO: 5477; WAN024GFT; Start 62; Stop 86
gggtagccaattccttgatatacag

SEQ ID NO: 411885 - DNA, 25 bp, Artificial
  probe
  misc_feature (1)..(25): SEQ ID NO: 5477; WAN024GFT; Start 64; Stop 88
gtagccaattccttgatatacaggg

SEQ ID NO: 411886 - DNA, 25 bp, Artificial
  probe
  misc_feature (1)..(25): SEQ ID NO: 5477; WAN024GFT; Start 61; Stop 85
agggtagccaattccttgatataca

SEQ ID NO: 411887 - DNA, 25 bp, Artificial
  probe
  misc_feature (1)..(25): SEQ ID NO: 5477; WAN024GFT; Start 8; Stop 32
atgctcgtgatgttaaaatgaatct

SEQ ID NO: 411888 - DNA, 25 bp, Artificial
  probe
  misc_feature (1)..(25): SEQ ID NO: 5477; WAN024GFT; Start 5; Stop 29
agtatgctcgtgatgttaaaatgaa

SEQ ID NO: 411889 - DNA, 25 bp, Artificial
  probe
  misc_feature (1)..(25): SEQ ID NO: 5477; WAN024GFT; Start 24; Stop 48
aatgaatctatcaaacagaatgtgt

SEQ ID NO: 411890 - DNA, 25 bp, Artificial
  probe
  misc_feature (1)..(25): SEQ ID NO: 5477; WAN024GFT; Start 9; Stop 33
tgctcgtgatgttaaaatgaatcta

SEQ ID NO: 411891 - DNA, 25 bp, Artificial
  probe
  misc_feature (1)..(25): SEQ ID NO: 5477; WAN024GFT; Start 3; Stop 27
ggagtatgctcgtgatgttaaaatg

SEQ ID NO: 411892 - DNA, 25 bp, Artificial
  probe
  misc_feature (1)..(25): SEQ ID NO: 5477; WAN024GFT; Start 4; Stop 28
gagtatgctcgtgatgttaaaatga

SEQ ID NO: 411893 - DNA, 25 bp, Artificial
  probe
  misc_feature (1)..(25): SEQ ID NO: 5477; WAN024GFT; Start 2; Stop 26
tggagtatgctcgtgatgttaaaat

SEQ ID NO: 411894 - DNA, 25 bp, Artificial
  probe
  misc_feature (1)..(25): SEQ ID NO: 5477; WAN024GFT; Start 6; Stop 30
gtatgctcgtgatgttaaaatgaat

SEQ ID NO: 411895 - DNA, 25 bp, Artificial
  probe
  misc_feature (1)..(25): SEQ ID NO: 5477; WAN024GFT; Start 1; Stop 25
ttggagtatgctcgtgatgttaaaa

SEQ ID NO: 411896 - DNA, 25 bp, Artificial
  probe
  misc_feature (1)..(25): SEQ ID NO: 5477; WAN024GFT; Start 7; Stop 31
tatgctcgtgatgttaaaatgaatc

SEQ ID NO: 411897 - DNA, 25 bp, Artificial
  probe
  misc_feature (1)..(25): SEQ ID NO: 5477; WAN024GFT; Start 26; Stop 50
tgaatctatcaaacagaatgtgtaa

SEQ ID NO: 411898 - DNA, 25 bp, Artificial
  probe
  misc_feature (1)..(25): SEQ ID NO: 5477; WAN024GFT; Start 10; Stop 34
gctcgtgatgttaaaatgaatctat

SEQ ID NO: 411899 - DNA, 25 bp, Artificial
  probe
  misc_feature (1)..(25): SEQ ID NO: 5477; WAN024GFT; Start 68; Stop 92
ccaattccttgatatacaggggatt

SEQ ID NO: 411900 - DNA, 25 bp, Artificial
  probe
  misc_feature (1)..(25): SEQ ID NO: 5477; WAN024GFT; Start 25; Stop 49
atgaatctatcaaacagaatgtgta

SEQ ID NO: 411901 - DNA, 25 bp, Artificial
  probe
  misc_feature (1)..(25): SEQ ID NO: 5477; WAN024GFT; Start 72; Stop 96
ttccttgatatacaggggattgatt

SEQ ID NO: 411902 - DNA, 25 bp, Artificial
  probe
  misc_feature (1)..(25): SEQ ID NO: 5477; WAN024GFT; Start 70; Stop 94
aattccttgatatacaggggattga

SEQ ID NO: 411903 - DNA, 25 bp, Artificial
  probe
  misc_feature (1)..(25): SEQ ID NO: 5477; WAN024GFT; Start 71; Stop 95
attccttgatatacaggggattgat

SEQ ID NO: 411904 - DNA, 25 bp, Artificial
  probe
  misc_feature (1)..(25): SEQ ID NO: 5477; WAN024GFT; Start 23; Stop 47
aaatgaatctatcaaacagaatgtg

SEQ ID NO: 411905 - DNA, 25 bp, Artificial
  probe
  misc_feature (1)..(25): SEQ ID NO: 5477; WAN024GFT; Start 65; Stop 89
tagccaattccttgatatacagggg

SEQ ID NO: 411906 - DNA, 25 bp, Artificial
  probe
  misc_feature (1)..(25): SEQ ID NO: 5477; WAN024GFT; Start 73; Stop 97
tccttgatatacaggggattgatta

SEQ ID NO: 411907 - DNA, 25 bp, Artificial
  probe
  misc_feature (1)..(25): SEQ ID NO: 5477; WAN024GFT; Start 60; Stop 84
aagggtagccaattccttgatatac

SEQ ID NO: 411908 - DNA, 25 bp, Artificial
  probe
  misc_feature (1)..(25): SEQ ID NO: 5477; WAN024GFT; Start 59; Stop 83
aaagggtagccaattccttgatata

SEQ ID NO: 411909 - DNA, 25 bp, Artificial
  probe
  misc_feature (1)..(25): SEQ ID NO: 5477; WAN024GFT; Start 69; Stop 93
caattccttgatatacaggggattg

SEQ ID NO: 411910 - DNA, 25 bp, Artificial
  probe
  misc_feature (1)..(25): SEQ ID NO: 5477; WAN024GFT; Start 74; Stop 98
ccttgatatacaggggattgattat

SEQ ID NO: 411911 - DNA, 25 bp, Artificial
  probe
  misc_feature (1)..(25): SEQ ID NO: 5477; WAN024GFT; Start 67; Stop 91
gccaattccttgatatacaggggat

SEQ ID NO: 411912 - DNA, 25 bp, Artificial
  probe
  misc_feature (1)..(25): SEQ ID NO: 5477; WAN024GFT; Start 27; Stop 51
gaatctatcaaacagaatgtgtaaa

SEQ ID NO: 411913 - DNA, 25 bp, Artificial
  probe
  misc_feature (1)..(25): SEQ ID NO: 5477; WAN024GFT; Start 87; Stop 111
gggattgattatcctttacttgttt

SEQ ID NO: 411914 - DNA, 25 bp, Artificial
  probe
  misc_feature (1)..(25): SEQ ID NO: 5477; WAN024GFT; Start 11; Stop 35
ctcgtgatgttaaaatgaatctatc

SEQ ID NO: 411915 - DNA, 25 bp, Artificial
  probe
  misc_feature (1)..(25): SEQ ID NO: 5477; WAN024GFT; Start 66; Stop 90
agccaattccttgatatacagggga

SEQ ID NO: 411916 - DNA, 25 bp, Artificial
  probe
  misc_feature (1)..(25): SEQ ID NO: 5478; WAN024DCG; Start 1335; Stop 1359
agttgcgttgttagtaggaagtatt

SEQ ID NO: 411917 - DNA, 25 bp, Artificial
  probe
  misc_feature (1)..(25): SEQ ID NO: 5478; WAN024DCG; Start 1334; Stop 1358
tagttgcgttgttagtaggaagtat

SEQ ID NO: 411918 - DNA, 25 bp, Artificial
  probe
  misc_feature (1)..(25): SEQ ID NO: 5478; WAN024DCG; Start 935; Stop 959
tagtggctatcttgaccttgattac

SEQ ID NO: 411919 - DNA, 25 bp, Artificial
  probe
  misc_feature (1)..(25): SEQ ID NO: 5478; WAN024DCG; Start 933; Stop 957
attagtggctatcttgaccttgatt

SEQ ID NO: 411920 - DNA, 25 bp, Artificial
  probe
  misc_feature (1)..(25): SEQ ID NO: 5478; WAN024DCG; Start 932; Stop 956
cattagtggctatcttgaccttgat

SEQ ID NO: 411921 - DNA, 25 bp, Artificial
  probe
  misc_feature (1)..(25): SEQ ID NO: 5478; WAN024DCG; Start 939; Stop 963
ggctatcttgaccttgattacagtt

SEQ ID NO: 411922 - DNA, 25 bp, Artificial
  probe
  misc_feature (1)..(25): SEQ ID NO: 5478; WAN024DCG; Start 798; Stop 822
tatcgtaaccattctctatgccttg

SEQ ID NO: 411923 - DNA, 25 bp, Artificial
  probe
  misc_feature (1)..(25): SEQ ID NO: 5478; WAN024DCG; Start 797; Stop 821
ctatcgtaaccattctctatgcctt

SEQ ID NO: 411924 - DNA, 25 bp, Artificial
  probe
  misc_feature (1)..(25): SEQ ID NO: 5478; WAN024DCG; Start 795; Stop 819
ttctatcgtaaccattctctatgcc

SEQ ID NO: 411925 - DNA, 25 bp, Artificial
  probe
  misc_feature (1)..(25): SEQ ID NO: 5478; WAN024DCG; Start 934; Stop 958
ttagtggctatcttgaccttgatta

SEQ ID NO: 411926 - DNA, 25 bp, Artificial
  probe
  misc_feature (1)..(25): SEQ ID NO: 5478; WAN024DCG; Start 1336; Stop 1360
gttgcgttgttagtaggaagtatta

SEQ ID NO: 411927 - DNA, 25 bp, Artificial
  probe
  misc_feature (1)..(25): SEQ ID NO: 5478; WAN024DCG; Start 1071; Stop 1095
gaatgctactatcttgacaggtcta

SEQ ID NO: 411928 - DNA, 25 bp, Artificial
  probe
  misc_feature (1)..(25): SEQ ID NO: 5478; WAN024DCG; Start 796; Stop 820
tctatcgtaaccattctctatgcct

SEQ ID NO: 411929 - DNA, 25 bp, Artificial
  probe
  misc_feature (1)..(25): SEQ ID NO: 5478; WAN024DCG; Start 731; Stop 755
ctatggctgtagatgaagtcaagac

SEQ ID NO: 411930 - DNA, 25 bp, Artificial
  probe
  misc_feature (1)..(25): SEQ ID NO: 5478; WAN024DCG; Start 1333; Stop 1357
ctagttgcgttgttagtaggaagta

SEQ ID NO: 411931 - DNA, 25 bp, Artificial
  probe
  misc_feature (1)..(25): SEQ ID NO: 5478; WAN024DCG; Start 924; Stop 948
ctatgtgtcattagtggctatcttg

SEQ ID NO: 411932 - DNA, 25 bp, Artificial
  probe
  misc_feature (1)..(25): SEQ ID NO: 5478; WAN024DCG; Start 937; Stop 961
gtggctatcttgaccttgattacag

SEQ ID NO: 411933 - DNA, 25 bp, Artificial
  probe
  misc_feature (1)..(25): SEQ ID NO: 5478; WAN024DCG; Start 1072; Stop 1096
aatgctactatcttgacaggtctag

SEQ ID NO: 411934 - DNA, 25 bp, Artificial
  probe
  misc_feature (1)..(25): SEQ ID NO: 5478; WAN024DCG; Start 938; Stop 962
tggctatcttgaccttgattacagt

SEQ ID NO: 411935 - DNA, 25 bp, Artificial
  probe
  misc_feature (1)..(25): SEQ ID NO: 5478; WAN024DCG; Start 936; Stop 960
agtggctatcttgaccttgattaca

SEQ ID NO: 411936 - DNA, 25 bp, Artificial
  probe
  misc_feature (1)..(25): SEQ ID NO: 5478; WAN024DCG; Start 1070; Stop 1094
agaatgctactatcttgacaggtct

SEQ ID NO: 411937 - DNA, 25 bp, Artificial
  probe
  misc_feature (1)..(25): SEQ ID NO: 5478; WAN024DCG; Start 925; Stop 949
tatgtgtcattagtggctatcttga

SEQ ID NO: 411938 - DNA, 25 bp, Artificial
  probe
  misc_feature (1)..(25): SEQ ID NO: 5478; WAN024DCG; Start 1338; Stop 1362
tgcgttgttagtaggaagtattatt

SEQ ID NO: 411939 - DNA, 25 bp, Artificial
  probe
  misc_feature (1)..(25): SEQ ID NO: 5478; WAN024DCG; Start 1337; Stop 1361
ttgcgttgttagtaggaagtattat

SEQ ID NO: 411940 - DNA, 25 bp, Artificial
  probe
  misc_feature (1)..(25): SEQ ID NO: 5478; WAN024DCG; Start 931; Stop 955
tcattagtggctatcttgaccttga

SEQ ID NO: 411941 - DNA, 25 bp, Artificial
  probe
  misc_feature (1)..(25): SEQ ID NO: 5478; WAN024DCG; Start 1037; Stop 1061
ttaaggaactgacgaagactagcaa

SEQ ID NO: 411942 - DNA, 25 bp, Artificial
  probe
  misc_feature (1)..(25): SEQ ID NO: 5478; WAN024DCG; Start 1038; Stop 1062
taaggaactgacgaagactagcaag

SEQ ID NO: 411943 - DNA, 25 bp, Artificial
  probe
  misc_feature (1)..(25): SEQ ID NO: 5478; WAN024DCG; Start 1076; Stop 1100
ctactatcttgacaggtctagcttc

SEQ ID NO: 411944 - DNA, 25 bp, Artificial
  probe
  misc_feature (1)..(25): SEQ ID NO: 5478; WAN024DCG; Start 729; Stop 753
ctctatggctgtagatgaagtcaag

SEQ ID NO: 411945 - DNA, 25 bp, Artificial
  probe
  misc_feature (1)..(25): SEQ ID NO: 5478; WAN024DCG; Start 738; Stop 762
tgtagatgaagtcaagactcctcaa

SEQ ID NO: 411946 - DNA, 25 bp, Artificial
  probe
  misc_feature (1)..(25): SEQ ID NO: 5478; WAN024DCG; Start 730; Stop 754
tctatggctgtagatgaagtcaaga

SEQ ID NO: 411947 - DNA, 25 bp, Artificial
  probe
  misc_feature (1)..(25): SEQ ID NO: 5478; WAN024DCG; Start 728; Stop 752
tctctatggctgtagatgaagtcaa

SEQ ID NO: 411948 - DNA, 25 bp, Artificial
  probe
  misc_feature (1)..(25): SEQ ID NO: 5478; WAN024DCG; Start 732; Stop 756
tatggctgtagatgaagtcaagact

SEQ ID NO: 411949 - DNA, 25 bp, Artificial
  probe
  misc_feature (1)..(25): SEQ ID NO: 5479; WAN024CDX; Start 536; Stop 560
aacaattatccatccacaaccaatc

SEQ ID NO: 411950 - DNA, 25 bp, Artificial
  probe
  misc_feature (1)..(25): SEQ ID NO: 5479; WAN024CDX; Start 538; Stop 562
caattatccatccacaaccaatctt

SEQ ID NO: 411951 - DNA, 25 bp, Artificial
  probe
  misc_feature (1)..(25): SEQ ID NO: 5479; WAN024CDX; Start 537; Stop 561
acaattatccatccacaaccaatct

SEQ ID NO: 411952 - DNA, 25 bp, Artificial
  probe
  misc_feature (1)..(25): SEQ ID NO: 5479; WAN024CDX; Start 391; Stop 415
aatccagatgaattacaacaccatt

SEQ ID NO: 411953 - DNA, 25 bp, Artificial
  probe
  misc_feature (1)..(25): SEQ ID NO: 5479; WAN024CDX; Start 233; Stop 257
ttgactcagaagaagaagtaggaat

SEQ ID NO: 411954 - DNA, 25 bp, Artificial
  probe
  misc_feature (1)..(25): SEQ ID NO: 5479; WAN024CDX; Start 234; Stop 258
tgactcagaagaagaagtaggaatt

SEQ ID NO: 411955 - DNA, 25 bp, Artificial
  probe
  misc_feature (1)..(25): SEQ ID NO: 5479; WAN024CDX; Start 423; Stop 447
tatctatggtgttcagactgatgac

SEQ ID NO: 411956 - DNA, 25 bp, Artificial
  probe
  misc_feature (1)..(25): SEQ ID NO: 5479; WAN024CDX; Start 422; Stop 446
ttatctatggtgttcagactgatga

SEQ ID NO: 411957 - DNA, 25 bp, Artificial
  probe
  misc_feature (1)..(25): SEQ ID NO: 5479; WAN024CDX; Start 427; Stop 451
tatggtgttcagactgatgacaatc

SEQ ID NO: 411958 - DNA, 25 bp, Artificial
  probe
  misc_feature (1)..(25): SEQ ID NO: 5479; WAN024CDX; Start 426; Stop 450
ctatggtgttcagactgatgacaat

SEQ ID NO: 411959 - DNA, 25 bp, Artificial
  probe
  misc_feature (1)..(25): SEQ ID NO: 5479; WAN024CDX; Start 424; Stop 448
atctatggtgttcagactgatgaca

SEQ ID NO: 411960 - DNA, 25 bp, Artificial
  probe
  misc_feature (1)..(25): SEQ ID NO: 5479; WAN024CDX; Start 425; Stop 449
tctatggtgttcagactgatgacaa

SEQ ID NO: 411961 - DNA, 25 bp, Artificial
  probe
  misc_feature (1)..(25): SEQ ID NO: 5479; WAN024CDX; Start 496; Stop 520
gaagaaatgcttgctgagtttagaa

SEQ ID NO: 411962 - DNA, 25 bp, Artificial
  probe
  misc_feature (1)..(25): SEQ ID NO: 5479; WAN024CDX; Start 494; Stop 518
aagaagaaatgcttgctgagtttag

SEQ ID NO: 411963 - DNA, 25 bp, Artificial
  probe
  misc_feature (1)..(25): SEQ ID NO: 5479; WAN024CDX; Start 235; Stop 259
gactcagaagaagaagtaggaatta

SEQ ID NO: 411964 - DNA, 25 bp, Artificial
  probe
  misc_feature (1)..(25): SEQ ID NO: 5479; WAN024CDX; Start 535; Stop 559
aaacaattatccatccacaaccaat

SEQ ID NO: 411965 - DNA, 25 bp, Artificial
  probe
  misc_feature (1)..(25): SEQ ID NO: 5479; WAN024CDX; Start 497; Stop 521
aagaaatgcttgctgagtttagaaa

SEQ ID NO: 411966 - DNA, 25 bp, Artificial
  probe
  misc_feature (1)..(25): SEQ ID NO: 5479; WAN024CDX; Start 493; Stop 517
aaagaagaaatgcttgctgagttta

SEQ ID NO: 411967 - DNA, 25 bp, Artificial
  probe
  misc_feature (1)..(25): SEQ ID NO: 5479; WAN024CDX; Start 495; Stop 519
agaagaaatgcttgctgagtttaga

SEQ ID NO: 411968 - DNA, 25 bp, Artificial
  probe
  misc_feature (1)..(25): SEQ ID NO: 5479; WAN024CDX; Start 539; Stop 563
aattatccatccacaaccaatcttt

SEQ ID NO: 411969 - DNA, 25 bp, Artificial
  probe
  misc_feature (1)..(25): SEQ ID NO: 5479; WAN024CDX; Start 534; Stop 558
taaacaattatccatccacaaccaa

SEQ ID NO: 411970 - DNA, 25 bp, Artificial
  probe
  misc_feature (1)..(25): SEQ ID NO: 5479; WAN024CDX; Start 533; Stop 557
ttaaacaattatccatccacaacca

SEQ ID NO: 411971 - DNA, 25 bp, Artificial
  probe
  misc_feature (1)..(25): SEQ ID NO: 5479; WAN024CDX; Start 141; Stop 165
tttctatatcacgcctgactttgaa

SEQ ID NO: 411972 - DNA, 25 bp, Artificial
  probe
  misc_feature (1)..(25): SEQ ID NO: 5479; WAN024CDX; Start 392; Stop 416
atccagatgaattacaacaccattt

SEQ ID NO: 411973 - DNA, 25 bp, Artificial
  probe
  misc_feature (1)..(25): SEQ ID NO: 5479; WAN024CDX; Start 390; Stop 414
aaatccagatgaattacaacaccat

SEQ ID NO: 411974 - DNA, 25 bp, Artificial
  probe
  misc_feature (1)..(25): SEQ ID NO: 5479; WAN024CDX; Start 232; Stop 256
tttgactcagaagaagaagtaggaa

SEQ ID NO: 411975 - DNA, 25 bp, Artificial
  probe
  misc_feature (1)..(25): SEQ ID NO: 5479; WAN024CDX; Start 431; Stop 455
gtgttcagactgatgacaatccaac

SEQ ID NO: 411976 - DNA, 25 bp, Artificial
  probe
  misc_feature (1)..(25): SEQ ID NO: 5479; WAN024CDX; Start 142; Stop 166
ttctatatcacgcctgactttgaac

SEQ ID NO: 411977 - DNA, 25 bp, Artificial
  probe
  misc_feature (1)..(25): SEQ ID NO: 5479; WAN024CDX; Start 140; Stop 164
gtttctatatcacgcctgactttga

SEQ ID NO: 411978 - DNA, 25 bp, Artificial
  probe
  misc_feature (1)..(25): SEQ ID NO: 5479; WAN024CDX; Start 145; Stop 169
tatatcacgcctgactttgaacaag

SEQ ID NO: 411979 - DNA, 25 bp, Artificial
  probe
  misc_feature (1)..(25): SEQ ID NO: 5479; WAN024CDX; Start 144; Stop 168
ctatatcacgcctgactttgaacaa

SEQ ID NO: 411980 - DNA, 25 bp, Artificial
  probe
  misc_feature (1)..(25): SEQ ID NO: 5479; WAN024CDX; Start 236; Stop 260
actcagaagaagaagtaggaattat

SEQ ID NO: 411981 - DNA, 25 bp, Artificial
  probe
  misc_feature (1)..(25): SEQ ID NO: 5479; WAN024CDX; Start 185; Stop 209
acaagcaagttgaagtattaaatcg

SEQ ID NO: 411982 - DNA, 25 bp, Artificial
  probe
  misc_feature (1)..(25): SEQ ID NO: 5480; WAN024G2P; Start 10; Stop 34
gaattgaggacgaacaacatacatt

SEQ ID NO: 411983 - DNA, 25 bp, Artificial
  probe
  misc_feature (1)..(25): SEQ ID NO: 5480; WAN024G2P; Start 9; Stop 33
agaattgaggacgaacaacatacat

SEQ ID NO: 411984 - DNA, 25 bp, Artificial
  probe
  misc_feature (1)..(25): SEQ ID NO: 5480; WAN024G2P; Start 8; Stop 32
aagaattgaggacgaacaacataca

SEQ ID NO: 411985 - DNA, 25 bp, Artificial
  probe
  misc_feature (1)..(25): SEQ ID NO: 5480; WAN024G2P; Start 75; Stop 99
agtagtcattatcagcctcaagcat

SEQ ID NO: 411986 - DNA, 25 bp, Artificial
  probe
  misc_feature (1)..(25): SEQ ID NO: 5480; WAN024G2P; Start 74; Stop 98
aagtagtcattatcagcctcaagca

SEQ ID NO: 411987 - DNA, 25 bp, Artificial
  probe
  misc_feature (1)..(25): SEQ ID NO: 5480; WAN024G2P; Start 168; Stop 192
cattcttgtgcttcttctctgttcc

SEQ ID NO: 411988 - DNA, 25 bp, Artificial
  probe
  misc_feature (1)..(25): SEQ ID NO: 5480; WAN024G2P; Start 76; Stop 100
gtagtcattatcagcctcaagcatg

SEQ ID NO: 411989 - DNA, 25 bp, Artificial
  probe
  misc_feature (1)..(25): SEQ ID NO: 5480; WAN024G2P; Start 73; Stop 97
aaagtagtcattatcagcctcaagc

SEQ ID NO: 411990 - DNA, 25 bp, Artificial
  probe
  misc_feature (1)..(25): SEQ ID NO: 5480; WAN024G2P; Start 1; Stop 25
ttggataaagaattgaggacgaaca

SEQ ID NO: 411991 - DNA, 25 bp, Artificial
  probe
  misc_feature (1)..(25): SEQ ID NO: 5480; WAN024G2P; Start 243; Stop 267
tttcatcacactcacggaagataaa

SEQ ID NO: 411992 - DNA, 25 bp, Artificial
  probe
  misc_feature (1)..(25): SEQ ID NO: 5480; WAN024G2P; Start 60; Stop 84
caatccctgtgttaaagtagtcatt

SEQ ID NO: 411993 - DNA, 25 bp, Artificial
  probe
  misc_feature (1)..(25): SEQ ID NO: 5480; WAN024G2P; Start 351; Stop 375
actcactctctgcatactgttctag

SEQ ID NO: 411994 - DNA, 25 bp, Artificial
  probe
  misc_feature (1)..(25): SEQ ID NO: 5480; WAN024G2P; Start 333; Stop 357
aactacgaaccttgttaaactcact

SEQ ID NO: 411995 - DNA, 25 bp, Artificial
  probe
  misc_feature (1)..(25): SEQ ID NO: 5480; WAN024G2P; Start 332; Stop 356
aaactacgaaccttgttaaactcac

SEQ ID NO: 411996 - DNA, 25 bp, Artificial
  probe
  misc_feature (1)..(25): SEQ ID NO: 5480; WAN024G2P; Start 330; Stop 354
cgaaactacgaaccttgttaaactc

SEQ ID NO: 411997 - DNA, 25 bp, Artificial
  probe
  misc_feature (1)..(25): SEQ ID NO: 5480; WAN024G2P; Start 244; Stop 268
ttcatcacactcacggaagataaag

SEQ ID NO: 411998 - DNA, 25 bp, Artificial
  probe
  misc_feature (1)..(25): SEQ ID NO: 5480; WAN024G2P; Start 350; Stop 374
aactcactctctgcatactgttcta

SEQ ID NO: 411999 - DNA, 25 bp, Artificial
  probe
  misc_feature (1)..(25): SEQ ID NO: 5480; WAN024G2P; Start 336; Stop 360
tacgaaccttgttaaactcactctc

SEQ ID NO: 412000 - DNA, 25 bp, Artificial
  probe
  misc_feature (1)..(25): SEQ ID NO: 5480; WAN024G2P; Start 335; Stop 359
ctacgaaccttgttaaactcactct

SEQ ID NO: 412001 - DNA, 25 bp, Artificial
  probe
  misc_feature (1)..(25): SEQ ID NO: 5480; WAN024G2P; Start 331; Stop 355
gaaactacgaaccttgttaaactca

SEQ ID NO: 412002 - DNA, 25 bp, Artificial
  probe
  misc_feature (1)..(25): SEQ ID NO: 5480; WAN024G2P; Start 67; Stop 91
tgtgttaaagtagtcattatcagcc

SEQ ID NO: 412003 - DNA, 25 bp, Artificial
  probe
  misc_feature (1)..(25): SEQ ID NO: 5480; WAN024G2P; Start 334; Stop 358
actacgaaccttgttaaactcactc

SEQ ID NO: 412004 - DNA, 25 bp, Artificial
  probe
  misc_feature (1)..(25): SEQ ID NO: 5480; WAN024G2P; Start 294; Stop 318
ccttgttatccttctcaaagtaagc

SEQ ID NO: 412005 - DNA, 25 bp, Artificial
  probe
  misc_feature (1)..(25): SEQ ID NO: 5480; WAN024G2P; Start 77; Stop 101
tagtcattatcagcctcaagcatgg

SEQ ID NO: 412006 - DNA, 25 bp, Artificial
  probe
  misc_feature (1)..(25): SEQ ID NO: 5480; WAN024G2P; Start 7; Stop 31
aaagaattgaggacgaacaacatac

SEQ ID NO: 412007 - DNA, 25 bp, Artificial
  probe
  misc_feature (1)..(25): SEQ ID NO: 5480; WAN024G2P; Start 3; Stop 27
ggataaagaattgaggacgaacaac

SEQ ID NO: 412008 - DNA, 25 bp, Artificial
  probe
  misc_feature (1)..(25): SEQ ID NO: 5480; WAN024G2P; Start 4; Stop 28
gataaagaattgaggacgaacaaca

SEQ ID NO: 412009 - DNA, 25 bp, Artificial
  probe
  misc_feature (1)..(25): SEQ ID NO: 5480; WAN024G2P; Start 2; Stop 26
tggataaagaattgaggacgaacaa

SEQ ID NO: 412010 - DNA, 25 bp, Artificial
  probe
  misc_feature (1)..(25): SEQ ID NO: 5480; WAN024G2P; Start 68; Stop 92
gtgttaaagtagtcattatcagcct

SEQ ID NO: 412011 - DNA, 25 bp, Artificial
  probe
  misc_feature (1)..(25): SEQ ID NO: 5480; WAN024G2P; Start 11; Stop 35
aattgaggacgaacaacatacattt

SEQ ID NO: 412012 - DNA, 25 bp, Artificial
  probe
  misc_feature (1)..(25): SEQ ID NO: 5480; WAN024G2P; Start 169; Stop 193
attcttgtgcttcttctctgttccg

SEQ ID NO: 412013 - DNA, 25 bp, Artificial
  probe
  misc_feature (1)..(25): SEQ ID NO: 5480; WAN024G2P; Start 291; Stop 315
agaccttgttatccttctcaaagta

SEQ ID NO: 412014 - DNA, 25 bp, Artificial
  probe
  misc_feature (1)..(25): SEQ ID NO: 5480; WAN024G2P; Start 295; Stop 319
cttgttatccttctcaaagtaagca

SEQ ID NO: 412015 - DNA, 25 bp, Artificial
  probe
  misc_feature (1)..(25): SEQ ID NO: 5481; WAN024F3S; Start 125; Stop 149
tagcaatcgtatctggtaagtctct

SEQ ID NO: 412016 - DNA, 25 bp, Artificial
  probe
  misc_feature (1)..(25): SEQ ID NO: 5481; WAN024F3S; Start 128; Stop 152
caatcgtatctggtaagtctcttct

SEQ ID NO: 412017 - DNA, 25 bp, Artificial
  probe
  misc_feature (1)..(25): SEQ ID NO: 5481; WAN024F3S; Start 124; Stop 148
ctagcaatcgtatctggtaagtctc

SEQ ID NO: 412018 - DNA, 25 bp, Artificial
  probe
  misc_feature (1)..(25): SEQ ID NO: 5481; WAN024F3S; Start 129; Stop 153
aatcgtatctggtaagtctcttctt

SEQ ID NO: 412019 - DNA, 25 bp, Artificial
  probe
  misc_feature (1)..(25): SEQ ID NO: 5481; WAN024F3S; Start 127; Stop 151
gcaatcgtatctggtaagtctcttc

SEQ ID NO: 412020 - DNA, 25 bp, Artificial
  probe
  misc_feature (1)..(25): SEQ ID NO: 5481; WAN024F3S; Start 126; Stop 150
agcaatcgtatctggtaagtctctt

SEQ ID NO: 412021 - DNA, 25 bp, Artificial
  probe
  misc_feature (1)..(25): SEQ ID NO: 5481; WAN024F3S; Start 130; Stop 154
atcgtatctggtaagtctcttcttt

SEQ ID NO: 412022 - DNA, 25 bp, Artificial
  probe
  misc_feature (1)..(25): SEQ ID NO: 5481; WAN024F3S; Start 173; Stop 197
agccatgttctaataggaattctgc

SEQ ID NO: 412023 - DNA, 25 bp, Artificial
  probe
  misc_feature (1)..(25): SEQ ID NO: 5481; WAN024F3S; Start 172; Stop 196
aagccatgttctaataggaattctg

SEQ ID NO: 412024 - DNA, 25 bp, Artificial
  probe
  misc_feature (1)..(25): SEQ ID NO: 5481; WAN024F3S; Start 164; Stop 188
catccacaaagccatgttctaatag

SEQ ID NO: 412025 - DNA, 25 bp, Artificial
  probe
  misc_feature (1)..(25): SEQ ID NO: 5481; WAN024F3S; Start 168; Stop 192
cacaaagccatgttctaataggaat

SEQ ID NO: 412026 - DNA, 25 bp, Artificial
  probe
  misc_feature (1)..(25): SEQ ID NO: 5481; WAN024F3S; Start 165; Stop 189
atccacaaagccatgttctaatagg

SEQ ID NO: 412027 - DNA, 25 bp, Artificial
  probe
  misc_feature (1)..(25): SEQ ID NO: 5481; WAN024F3S; Start 167; Stop 191
ccacaaagccatgttctaataggaa

SEQ ID NO: 412028 - DNA, 25 bp, Artificial
  probe
  misc_feature (1)..(25): SEQ ID NO: 5481; WAN024F3S; Start 174; Stop 198
gccatgttctaataggaattctgcc

SEQ ID NO: 412029 - DNA, 25 bp, Artificial
  probe
  misc_feature (1)..(25): SEQ ID NO: 5481; WAN024F3S; Start 169; Stop 193
acaaagccatgttctaataggaatt

SEQ ID NO: 412030 - DNA, 25 bp, Artificial
  probe
  misc_feature (1)..(25): SEQ ID NO: 5481; WAN024F3S; Start 175; Stop 199
ccatgttctaataggaattctgcct

SEQ ID NO: 412031 - DNA, 25 bp, Artificial
  probe
  misc_feature (1)..(25): SEQ ID NO: 5481; WAN024F3S; Start 86; Stop 110
atattcatctaggactccctccatg

SEQ ID NO: 412032 - DNA, 25 bp, Artificial
  probe
  misc_feature (1)..(25): SEQ ID NO: 5481; WAN024F3S; Start 163; Stop 187
gcatccacaaagccatgttctaata

SEQ ID NO: 412033 - DNA, 25 bp, Artificial
  probe
  misc_feature (1)..(25): SEQ ID NO: 5481; WAN024F3S; Start 176; Stop 200
catgttctaataggaattctgcctt

SEQ ID NO: 412034 - DNA, 25 bp, Artificial
  probe
  misc_feature (1)..(25): SEQ ID NO: 5481; WAN024F3S; Start 85; Stop 109
aatattcatctaggactccctccat

SEQ ID NO: 412035 - DNA, 25 bp, Artificial
  probe
  misc_feature (1)..(25): SEQ ID NO: 5481; WAN024F3S; Start 84; Stop 108
caatattcatctaggactccctcca

SEQ ID NO: 412036 - DNA, 25 bp, Artificial
  probe
  misc_feature (1)..(25): SEQ ID NO: 5481; WAN024F3S; Start 284; Stop 308
ccagaatgatatcgccttccatagc

SEQ ID NO: 412037 - DNA, 25 bp, Artificial
  probe
  misc_feature (1)..(25): SEQ ID NO: 5481; WAN024F3S; Start 283; Stop 307
gccagaatgatatcgccttccatag

SEQ ID NO: 412038 - DNA, 25 bp, Artificial
  probe
  misc_feature (1)..(25): SEQ ID NO: 5481; WAN024F3S; Start 166; Stop 190
tccacaaagccatgttctaatagga

SEQ ID NO: 412039 - DNA, 25 bp, Artificial
  probe
  misc_feature (1)..(25): SEQ ID NO: 5481; WAN024F3S; Start 146; Stop 170
ctcttcttttgacaatagcatccac

SEQ ID NO: 412040 - DNA, 25 bp, Artificial
  probe
  misc_feature (1)..(25): SEQ ID NO: 5481; WAN024F3S; Start 145; Stop 169
tctcttcttttgacaatagcatcca

SEQ ID NO: 412041 - DNA, 25 bp, Artificial
  probe
  misc_feature (1)..(25): SEQ ID NO: 5481; WAN024F3S; Start 160; Stop 184
atagcatccacaaagccatgttcta

SEQ ID NO: 412042 - DNA, 25 bp, Artificial
  probe
  misc_feature (1)..(25): SEQ ID NO: 5481; WAN024F3S; Start 147; Stop 171
tcttcttttgacaatagcatccaca

SEQ ID NO: 412043 - DNA, 25 bp, Artificial
  probe
  misc_feature (1)..(25): SEQ ID NO: 5481; WAN024F3S; Start 161; Stop 185
tagcatccacaaagccatgttctaa

SEQ ID NO: 412044 - DNA, 25 bp, Artificial
  probe
  misc_feature (1)..(25): SEQ ID NO: 5481; WAN024F3S; Start 154; Stop 178
ttgacaatagcatccacaaagccat

SEQ ID NO: 412045 - DNA, 25 bp, Artificial
  probe
  misc_feature (1)..(25): SEQ ID NO: 5481; WAN024F3S; Start 132; Stop 156
cgtatctggtaagtctcttcttttg

SEQ ID NO: 412046 - DNA, 25 bp, Artificial
  probe
  misc_feature (1)..(25): SEQ ID NO: 5481; WAN024F3S; Start 131; Stop 155
tcgtatctggtaagtctcttctttt

SEQ ID NO: 412047 - DNA, 25 bp, Artificial
  probe
  misc_feature (1)..(25): SEQ ID NO: 5481; WAN024F3S; Start 148; Stop 172
cttcttttgacaatagcatccacaa

SEQ ID NO: 412048 - DNA, 25 bp, Artificial
  probe
  misc_feature (1)..(25): SEQ ID NO: 5482; WAN024B4X; Start 144; Stop 168
aagtaagcgcgtcataacaaggtat

SEQ ID NO: 412049 - DNA, 25 bp, Artificial
  probe
  misc_feature (1)..(25): SEQ ID NO: 5482; WAN024B4X; Start 138; Stop 162
tatagaaagtaagcgcgtcataaca

SEQ ID NO: 412050 - DNA, 25 bp, Artificial
  probe
  misc_feature (1)..(25): SEQ ID NO: 5482; WAN024B4X; Start 137; Stop 161
atatagaaagtaagcgcgtcataac

SEQ ID NO: 412051 - DNA, 25 bp, Artificial
  probe
  misc_feature (1)..(25): SEQ ID NO: 5482; WAN024B4X; Start 139; Stop 163
atagaaagtaagcgcgtcataacaa

SEQ ID NO: 412052 - DNA, 25 bp, Artificial
  probe
  misc_feature (1)..(25): SEQ ID NO: 5482; WAN024B4X; Start 145; Stop 169
agtaagcgcgtcataacaaggtatc

SEQ ID NO: 412053 - DNA, 25 bp, Artificial
  probe
  misc_feature (1)..(25): SEQ ID NO: 5482; WAN024B4X; Start 133; Stop 157
aattatatagaaagtaagcgcgtca

SEQ ID NO: 412054 - DNA, 25 bp, Artificial
  probe
  misc_feature (1)..(25): SEQ ID NO: 5482; WAN024B4X; Start 140; Stop 164
tagaaagtaagcgcgtcataacaag

SEQ ID NO: 412055 - DNA, 25 bp, Artificial
  probe
  misc_feature (1)..(25): SEQ ID NO: 5482; WAN024B4X; Start 134; Stop 158
attatatagaaagtaagcgcgtcat

SEQ ID NO: 412056 - DNA, 25 bp, Artificial
  probe
  misc_feature (1)..(25): SEQ ID NO: 5482; WAN024B4X; Start 136; Stop 160
tatatagaaagtaagcgcgtcataa

SEQ ID NO: 412057 - DNA, 25 bp, Artificial
  probe
  misc_feature (1)..(25): SEQ ID NO: 5482; WAN024B4X; Start 135; Stop 159
ttatatagaaagtaagcgcgtcata

SEQ ID NO: 412058 - DNA, 25 bp, Artificial
  probe
  misc_feature (1)..(25): SEQ ID NO: 5482; WAN024B4X; Start 131; Stop 155
gtaattatatagaaagtaagcgcgt

SEQ ID NO: 412059 - DNA, 25 bp, Artificial
  probe
  misc_feature (1)..(25): SEQ ID NO: 5482; WAN024B4X; Start 130; Stop 154
tgtaattatatagaaagtaagcgcg

SEQ ID NO: 412060 - DNA, 25 bp, Artificial
  probe
  misc_feature (1)..(25): SEQ ID NO: 5482; WAN024B4X; Start 143; Stop 167
aaagtaagcgcgtcataacaaggta

SEQ ID NO: 412061 - DNA, 25 bp, Artificial
  probe
  misc_feature (1)..(25): SEQ ID NO: 5482; WAN024B4X; Start 132; Stop 156
taattatatagaaagtaagcgcgtc

SEQ ID NO: 412062 - DNA, 25 bp, Artificial
  probe
  misc_feature (1)..(25): SEQ ID NO: 5482; WAN024B4X; Start 69; Stop 93
tggtttgttagataatgaaaatgtt

SEQ ID NO: 412063 - DNA, 25 bp, Artificial
  probe
  misc_feature (1)..(25): SEQ ID NO: 5482; WAN024B4X; Start 68; Stop 92
ttggtttgttagataatgaaaatgt

SEQ ID NO: 412064 - DNA, 25 bp, Artificial
  probe
  misc_feature (1)..(25): SEQ ID NO: 5482; WAN024B4X; Start 141; Stop 165
agaaagtaagcgcgtcataacaagg

SEQ ID NO: 412065 - DNA, 25 bp, Artificial
  probe
  misc_feature (1)..(25): SEQ ID NO: 5482; WAN024B4X; Start 34; Stop 58
ttattgacagtatcaggatatcttt

SEQ ID NO: 412066 - DNA, 25 bp, Artificial
  probe
  misc_feature (1)..(25): SEQ ID NO: 5482; WAN024B4X; Start 33; Stop 57
tttattgacagtatcaggatatctt

SEQ ID NO: 412067 - DNA, 25 bp, Artificial
  probe
  misc_feature (1)..(25): SEQ ID NO: 5482; WAN024B4X; Start 142; Stop 166
gaaagtaagcgcgtcataacaaggt

SEQ ID NO: 412068 - DNA, 25 bp, Artificial
  probe
  misc_feature (1)..(25): SEQ ID NO: 5482; WAN024B4X; Start 129; Stop 153
atgtaattatatagaaagtaagcgc

SEQ ID NO: 412069 - DNA, 25 bp, Artificial
  probe
  misc_feature (1)..(25): SEQ ID NO: 5482; WAN024B4X; Start 35; Stop 59
tattgacagtatcaggatatctttt

SEQ ID NO: 412070 - DNA, 25 bp, Artificial
  probe
  misc_feature (1)..(25): SEQ ID NO: 5482; WAN024B4X; Start 32; Stop 56
ttttattgacagtatcaggatatct

SEQ ID NO: 412071 - DNA, 25 bp, Artificial
  probe
  misc_feature (1)..(25): SEQ ID NO: 5483; WAN024FL5; Start 62; Stop 86
atacaactactggtatgcctgaagc

SEQ ID NO: 412072 - DNA, 25 bp, Artificial
  probe
  misc_feature (1)..(25): SEQ ID NO: 5483; WAN024FL5; Start 65; Stop 89
caactactggtatgcctgaagctaa

SEQ ID NO: 412073 - DNA, 25 bp, Artificial
  probe
  misc_feature (1)..(25): SEQ ID NO: 5483; WAN024FL5; Start 44; Stop 68
ctattgctgcctctgaccatacaac

SEQ ID NO: 412074 - DNA, 25 bp, Artificial
  probe
  misc_feature (1)..(25): SEQ ID NO: 5483; WAN024FL5; Start 77; Stop 101
tgcctgaagctaaatatagtgaagt

SEQ ID NO: 412075 - DNA, 25 bp, Artificial
  probe
  misc_feature (1)..(25): SEQ ID NO: 5483; WAN024FL5; Start 68; Stop 92
ctactggtatgcctgaagctaaata

SEQ ID NO: 412076 - DNA, 25 bp, Artificial
  probe
  misc_feature (1)..(25): SEQ ID NO: 5483; WAN024FL5; Start 78; Stop 102
gcctgaagctaaatatagtgaagtc

SEQ ID NO: 412077 - DNA, 25 bp, Artificial
  probe
  misc_feature (1)..(25): SEQ ID NO: 5483; WAN024FL5; Start 72; Stop 96
tggtatgcctgaagctaaatatagt

SEQ ID NO: 412078 - DNA, 25 bp, Artificial
  probe
  misc_feature (1)..(25): SEQ ID NO: 5483; WAN024FL5; Start 70; Stop 94
actggtatgcctgaagctaaatata

SEQ ID NO: 412079 - DNA, 25 bp, Artificial
  probe
  misc_feature (1)..(25): SEQ ID NO: 5483; WAN024FL5; Start 69; Stop 93
tactggtatgcctgaagctaaatat

SEQ ID NO: 412080 - DNA, 25 bp, Artificial
  probe
  misc_feature (1)..(25): SEQ ID NO: 5483; WAN024FL5; Start 73; Stop 97
ggtatgcctgaagctaaatatagtg

SEQ ID NO: 412081 - DNA, 25 bp, Artificial
  probe
  misc_feature (1)..(25): SEQ ID NO: 5483; WAN024FL5; Start 71; Stop 95
ctggtatgcctgaagctaaatatag

SEQ ID NO: 412082 - DNA, 25 bp, Artificial
  probe
  misc_feature (1)..(25): SEQ ID NO: 5483; WAN024FL5; Start 76; Stop 100
atgcctgaagctaaatatagtgaag

SEQ ID NO: 412083 - DNA, 25 bp, Artificial
  probe
  misc_feature (1)..(25): SEQ ID NO: 5483; WAN024FL5; Start 46; Stop 70
attgctgcctctgaccatacaacta

SEQ ID NO: 412084 - DNA, 25 bp, Artificial
  probe
  misc_feature (1)..(25): SEQ ID NO: 5483; WAN024FL5; Start 45; Stop 69
tattgctgcctctgaccatacaact

SEQ ID NO: 412085 - DNA, 25 bp, Artificial
  probe
  misc_feature (1)..(25): SEQ ID NO: 5483; WAN024FL5; Start 67; Stop 91
actactggtatgcctgaagctaaat

SEQ ID NO: 412086 - DNA, 25 bp, Artificial
  probe
  misc_feature (1)..(25): SEQ ID NO: 5483; WAN024FL5; Start 64; Stop 88
acaactactggtatgcctgaagcta

SEQ ID NO: 412087 - DNA, 25 bp, Artificial
  probe
  misc_feature (1)..(25): SEQ ID NO: 5483; WAN024FL5; Start 63; Stop 87
tacaactactggtatgcctgaagct

SEQ ID NO: 412088 - DNA, 25 bp, Artificial
  probe
  misc_feature (1)..(25): SEQ ID NO: 5483; WAN024FL5; Start 74; Stop 98
gtatgcctgaagctaaatatagtga

SEQ ID NO: 412089 - DNA, 25 bp, Artificial
  probe
  misc_feature (1)..(25): SEQ ID NO: 5483; WAN024FL5; Start 66; Stop 90
aactactggtatgcctgaagctaaa

SEQ ID NO: 412090 - DNA, 25 bp, Artificial
  probe
  misc_feature (1)..(25): SEQ ID NO: 5483; WAN024FL5; Start 79; Stop 103
cctgaagctaaatatagtgaagtct

SEQ ID NO: 412091 - DNA, 25 bp, Artificial
  probe
  misc_feature (1)..(25): SEQ ID NO: 5483; WAN024FL5; Start 14; Stop 38
taccacaattattctccttaatgaa

SEQ ID NO: 412092 - DNA, 25 bp, Artificial
  probe
  misc_feature (1)..(25): SEQ ID NO: 5483; WAN024FL5; Start 75; Stop 99
tatgcctgaagctaaatatagtgaa

SEQ ID NO: 412093 - DNA, 25 bp, Artificial
  probe
  misc_feature (1)..(25): SEQ ID NO: 5483; WAN024FL5; Start 13; Stop 37
ataccacaattattctccttaatga

SEQ ID NO: 412094 - DNA, 25 bp, Artificial
  probe
  misc_feature (1)..(25): SEQ ID NO: 5483; WAN024FL5; Start 15; Stop 39
accacaattattctccttaatgaaa

SEQ ID NO: 412095 - DNA, 25 bp, Artificial
  probe
  misc_feature (1)..(25): SEQ ID NO: 5483; WAN024FL5; Start 2; Stop 26
tggatacaagaataccacaattatt

SEQ ID NO: 412096 - DNA, 25 bp, Artificial
  probe
  misc_feature (1)..(25): SEQ ID NO: 5483; WAN024FL5; Start 1; Stop 25
ttggatacaagaataccacaattat

SEQ ID NO: 412097 - DNA, 25 bp, Artificial
  probe
  misc_feature (1)..(25): SEQ ID NO: 5483; WAN024FL5; Start 16; Stop 40
ccacaattattctccttaatgaaac

SEQ ID NO: 412098 - DNA, 25 bp, Artificial
  probe
  misc_feature (1)..(25): SEQ ID NO: 5483; WAN024FL5; Start 47; Stop 71
ttgctgcctctgaccatacaactac

SEQ ID NO: 412099 - DNA, 25 bp, Artificial
  probe
  misc_feature (1)..(25): SEQ ID NO: 5483; WAN024FL5; Start 26; Stop 50
tctccttaatgaaactagctattgc

SEQ ID NO: 412100 - DNA, 25 bp, Artificial
  probe
  misc_feature (1)..(25): SEQ ID NO: 5483; WAN024FL5; Start 49; Stop 73
gctgcctctgaccatacaactactg

SEQ ID NO: 412101 - DNA, 25 bp, Artificial
  probe
  misc_feature (1)..(25): SEQ ID NO: 5483; WAN024FL5; Start 43; Stop 67
gctattgctgcctctgaccatacaa

SEQ ID NO: 412102 - DNA, 25 bp, Artificial
  probe
  misc_feature (1)..(25): SEQ ID NO: 5483; WAN024FL5; Start 81; Stop 105
tgaagctaaatatagtgaagtcttg

SEQ ID NO: 412103 - DNA, 25 bp, Artificial
  probe
  misc_feature (1)..(25): SEQ ID NO: 5483; WAN024FL5; Start 50; Stop 74
ctgcctctgaccatacaactactgg

SEQ ID NO: 412104 - DNA, 25 bp, Artificial
  probe
  misc_feature (1)..(25): SEQ ID NO: 5484; WAN024G55; Start 112; Stop 136
ttcatccataccatcttcaatagtg

SEQ ID NO: 412105 - DNA, 25 bp, Artificial
  probe
  misc_feature (1)..(25): SEQ ID NO: 5484; WAN024G55; Start 113; Stop 137
tcatccataccatcttcaatagtga

SEQ ID NO: 412106 - DNA, 25 bp, Artificial
  probe
  misc_feature (1)..(25): SEQ ID NO: 5484; WAN024G55; Start 114; Stop 138
catccataccatcttcaatagtgat

SEQ ID NO: 412107 - DNA, 25 bp, Artificial
  probe
  misc_feature (1)..(25): SEQ ID NO: 5484; WAN024G55; Start 20; Stop 44
tagtcagtgtttgttacgaagaagt

SEQ ID NO: 412108 - DNA, 25 bp, Artificial
  probe
  misc_feature (1)..(25): SEQ ID NO: 5484; WAN024G55; Start 19; Stop 43
gtagtcagtgtttgttacgaagaag

SEQ ID NO: 412109 - DNA, 25 bp, Artificial
  probe
  misc_feature (1)..(25): SEQ ID NO: 5484; WAN024G55; Start 18; Stop 42
ggtagtcagtgtttgttacgaagaa

SEQ ID NO: 412110 - DNA, 25 bp, Artificial
  probe
  misc_feature (1)..(25): SEQ ID NO: 5484; WAN024G55; Start 16; Stop 40
aaggtagtcagtgtttgttacgaag

SEQ ID NO: 412111 - DNA, 25 bp, Artificial
  probe
  misc_feature (1)..(25): SEQ ID NO: 5484; WAN024G55; Start 21; Stop 45
agtcagtgtttgttacgaagaagtc

SEQ ID NO: 412112 - DNA, 25 bp, Artificial
  probe
  misc_feature (1)..(25): SEQ ID NO: 5484; WAN024G55; Start 17; Stop 41
aggtagtcagtgtttgttacgaaga

SEQ ID NO: 412113 - DNA, 25 bp, Artificial
  probe
  misc_feature (1)..(25): SEQ ID NO: 5484; WAN024G55; Start 15; Stop 39
caaggtagtcagtgtttgttacgaa

SEQ ID NO: 412114 - DNA, 25 bp, Artificial
  probe
  misc_feature (1)..(25): SEQ ID NO: 5484; WAN024G55; Start 152; Stop 176
ttaaccaattcttcaaggtagtcga

SEQ ID NO: 412115 - DNA, 25 bp, Artificial
  probe
  misc_feature (1)..(25): SEQ ID NO: 5484; WAN024G55; Start 153; Stop 177
taaccaattcttcaaggtagtcgat

SEQ ID NO: 412116 - DNA, 25 bp, Artificial
  probe
  misc_feature (1)..(25): SEQ ID NO: 5484; WAN024G55; Start 154; Stop 178
aaccaattcttcaaggtagtcgatt

SEQ ID NO: 412117 - DNA, 25 bp, Artificial
  probe
  misc_feature (1)..(25): SEQ ID NO: 5484; WAN024G55; Start 38; Stop 62
aagaagtcgtcaccaacaagttgta

SEQ ID NO: 412118 - DNA, 25 bp, Artificial
  probe
  misc_feature (1)..(25): SEQ ID NO: 5484; WAN024G55; Start 111; Stop 135
tttcatccataccatcttcaatagt

SEQ ID NO: 412119 - DNA, 25 bp, Artificial
  probe
  misc_feature (1)..(25): SEQ ID NO: 5484; WAN024G55; Start 116; Stop 140
tccataccatcttcaatagtgatga

SEQ ID NO: 412120 - DNA, 25 bp, Artificial
  probe
  misc_feature (1)..(25): SEQ ID NO: 5484; WAN024G55; Start 160; Stop 184
ttcttcaaggtagtcgatttgttct

SEQ ID NO: 412121 - DNA, 25 bp, Artificial
  probe
  misc_feature (1)..(25): SEQ ID NO: 5484; WAN024G55; Start 156; Stop 180
ccaattcttcaaggtagtcgatttg

SEQ ID NO: 412122 - DNA, 25 bp, Artificial
  probe
  misc_feature (1)..(25): SEQ ID NO: 5484; WAN024G55; Start 157; Stop 181
caattcttcaaggtagtcgatttgt

SEQ ID NO: 412123 - DNA, 25 bp, Artificial
  probe
  misc_feature (1)..(25): SEQ ID NO: 5484; WAN024G55; Start 159; Stop 183
attcttcaaggtagtcgatttgttc

SEQ ID NO: 412124 - DNA, 25 bp, Artificial
  probe
  misc_feature (1)..(25): SEQ ID NO: 5484; WAN024G55; Start 68; Stop 92
ttaccaagacgttcagtaagagctt

SEQ ID NO: 412125 - DNA, 25 bp, Artificial
  probe
  misc_feature (1)..(25): SEQ ID NO: 5484; WAN024G55; Start 161; Stop 185
tcttcaaggtagtcgatttgttctg

SEQ ID NO: 412126 - DNA, 25 bp, Artificial
  probe
  misc_feature (1)..(25): SEQ ID NO: 5484; WAN024G55; Start 40; Stop 64
gaagtcgtcaccaacaagttgtact

SEQ ID NO: 412127 - DNA, 25 bp, Artificial
  probe
  misc_feature (1)..(25): SEQ ID NO: 5484; WAN024G55; Start 39; Stop 63
agaagtcgtcaccaacaagttgtac

SEQ ID NO: 412128 - DNA, 25 bp, Artificial
  probe
  misc_feature (1)..(25): SEQ ID NO: 5484; WAN024G55; Start 120; Stop 144
taccatcttcaatagtgatgattgg

SEQ ID NO: 412129 - DNA, 25 bp, Artificial
  probe
  misc_feature (1)..(25): SEQ ID NO: 5484; WAN024G55; Start 158; Stop 182
aattcttcaaggtagtcgatttgtt

SEQ ID NO: 412130 - DNA, 25 bp, Artificial
  probe
  misc_feature (1)..(25): SEQ ID NO: 5484; WAN024G55; Start 151; Stop 175
gttaaccaattcttcaaggtagtcg

SEQ ID NO: 412131 - DNA, 25 bp, Artificial
  probe
  misc_feature (1)..(25): SEQ ID NO: 5484; WAN024G55; Start 117; Stop 141
ccataccatcttcaatagtgatgat

SEQ ID NO: 412132 - DNA, 25 bp, Artificial
  probe
  misc_feature (1)..(25): SEQ ID NO: 5484; WAN024G55; Start 115; Stop 139
atccataccatcttcaatagtgatg

SEQ ID NO: 412133 - DNA, 25 bp, Artificial
  probe
  misc_feature (1)..(25): SEQ ID NO: 5484; WAN024G55; Start 78; Stop 102
gttcagtaagagctttccaaccatc

SEQ ID NO: 412134 - DNA, 25 bp, Artificial
  probe
  misc_feature (1)..(25): SEQ ID NO: 5484; WAN024G55; Start 150; Stop 174
tgttaaccaattcttcaaggtagtc

SEQ ID NO: 412135 - DNA, 25 bp, Artificial
  probe
  misc_feature (1)..(25): SEQ ID NO: 5484; WAN024G55; Start 108; Stop 132
cgttttcatccataccatcttcaat

SEQ ID NO: 412136 - DNA, 25 bp, Artificial
  probe
  misc_feature (1)..(25): SEQ ID NO: 5484; WAN024G55; Start 107; Stop 131
tcgttttcatccataccatcttcaa

SEQ ID NO: 412137 - DNA, 25 bp, Artificial
  probe
  misc_feature (1)..(25): SEQ ID NO: 5485; WAN024FI8; Start 60; Stop 84
ggtatttggtcaagatgagattgtc

SEQ ID NO: 412138 - DNA, 25 bp, Artificial
  probe
  misc_feature (1)..(25): SEQ ID NO: 5485; WAN024FI8; Start 59; Stop 83
tggtatttggtcaagatgagattgt

SEQ ID NO: 412139 - DNA, 25 bp, Artificial
  probe
  misc_feature (1)..(25): SEQ ID NO: 5485; WAN024FI8; Start 65; Stop 89
ttggtcaagatgagattgtcaaact

SEQ ID NO: 412140 - DNA, 25 bp, Artificial
  probe
  misc_feature (1)..(25): SEQ ID NO: 5485; WAN024FI8; Start 61; Stop 85
gtatttggtcaagatgagattgtca

SEQ ID NO: 412141 - DNA, 25 bp, Artificial
  probe
  misc_feature (1)..(25): SEQ ID NO: 5485; WAN024FI8; Start 58; Stop 82
atggtatttggtcaagatgagattg

SEQ ID NO: 412142 - DNA, 25 bp, Artificial
  probe
  misc_feature (1)..(25): SEQ ID NO: 5485; WAN024FI8; Start 66; Stop 90
tggtcaagatgagattgtcaaactc

SEQ ID NO: 412143 - DNA, 25 bp, Artificial
  probe
  misc_feature (1)..(25): SEQ ID NO: 5485; WAN024FI8; Start 104; Stop 128
ttgaagtcaagttgtggaagagcat

SEQ ID NO: 412144 - DNA, 25 bp, Artificial
  probe
  misc_feature (1)..(25): SEQ ID NO: 5485; WAN024FI8; Start 107; Stop 131
aagtcaagttgtggaagagcatgtt

SEQ ID NO: 412145 - DNA, 25 bp, Artificial
  probe
  misc_feature (1)..(25): SEQ ID NO: 5485; WAN024FI8; Start 62; Stop 86
tatttggtcaagatgagattgtcaa

SEQ ID NO: 412146 - DNA, 25 bp, Artificial
  probe
  misc_feature (1)..(25): SEQ ID NO: 5485; WAN024FI8; Start 113; Stop 137
agttgtggaagagcatgtttgattt

SEQ ID NO: 412147 - DNA, 25 bp, Artificial
  probe
  misc_feature (1)..(25): SEQ ID NO: 5485; WAN024FI8; Start 112; Stop 136
aagttgtggaagagcatgtttgatt

SEQ ID NO: 412148 - DNA, 25 bp, Artificial
  probe
  misc_feature (1)..(25): SEQ ID NO: 5485; WAN024FI8; Start 57; Stop 81
catggtatttggtcaagatgagatt

SEQ ID NO: 412149 - DNA, 25 bp, Artificial
  probe
  misc_feature (1)..(25): SEQ ID NO: 5485; WAN024FI8; Start 106; Stop 130
gaagtcaagttgtggaagagcatgt

SEQ ID NO: 412150 - DNA, 25 bp, Artificial
  probe
  misc_feature (1)..(25): SEQ ID NO: 5485; WAN024FI8; Start 105; Stop 129
tgaagtcaagttgtggaagagcatg

SEQ ID NO: 412151 - DNA, 25 bp, Artificial
  probe
  misc_feature (1)..(25): SEQ ID NO: 5485; WAN024FI8; Start 111; Stop 135
caagttgtggaagagcatgtttgat

SEQ ID NO: 412152 - DNA, 25 bp, Artificial
  probe
  misc_feature (1)..(25): SEQ ID NO: 5485; WAN024FI8; Start 101; Stop 125
cgtttgaagtcaagttgtggaagag

SEQ ID NO: 412153 - DNA, 25 bp, Artificial
  probe
  misc_feature (1)..(25): SEQ ID NO: 5485; WAN024FI8; Start 102; Stop 126
gtttgaagtcaagttgtggaagagc

SEQ ID NO: 412154 - DNA, 25 bp, Artificial
  probe
  misc_feature (1)..(25): SEQ ID NO: 5485; WAN024FI8; Start 64; Stop 88
tttggtcaagatgagattgtcaaac

SEQ ID NO: 412155 - DNA, 25 bp, Artificial
  probe
  misc_feature (1)..(25): SEQ ID NO: 5485; WAN024FI8; Start 4; Stop 28
gatacgaggagtgaggttgtcaaac

SEQ ID NO: 412156 - DNA, 25 bp, Artificial
  probe
  misc_feature (1)..(25): SEQ ID NO: 5485; WAN024FI8; Start 150; Stop 174
tttcagaatcgacatagcccactac

SEQ ID NO: 412157 - DNA, 25 bp, Artificial
  probe
  misc_feature (1)..(25): SEQ ID NO: 5485; WAN024FI8; Start 63; Stop 87
atttggtcaagatgagattgtcaaa

SEQ ID NO: 412158 - DNA, 25 bp, Artificial
  probe
  misc_feature (1)..(25): SEQ ID NO: 5485; WAN024FI8; Start 108; Stop 132
agtcaagttgtggaagagcatgttt

SEQ ID NO: 412159 - DNA, 25 bp, Artificial
  probe
  misc_feature (1)..(25): SEQ ID NO: 5485; WAN024FI8; Start 202; Stop 226
ttctacttcaagagctgggacaaag

SEQ ID NO: 412160 - DNA, 25 bp, Artificial
  probe
  misc_feature (1)..(25): SEQ ID NO: 5485; WAN024FI8; Start 103; Stop 127
tttgaagtcaagttgtggaagagca

SEQ ID NO: 412161 - DNA, 25 bp, Artificial
  probe
  misc_feature (1)..(25): SEQ ID NO: 5485; WAN024FI8; Start 201; Stop 225
gttctacttcaagagctgggacaaa

SEQ ID NO: 412162 - DNA, 25 bp, Artificial
  probe
  misc_feature (1)..(25): SEQ ID NO: 5485; WAN024FI8; Start 109; Stop 133
gtcaagttgtggaagagcatgtttg

SEQ ID NO: 412163 - DNA, 25 bp, Artificial
  probe
  misc_feature (1)..(25): SEQ ID NO: 5485; WAN024FI8; Start 5; Stop 29
atacgaggagtgaggttgtcaaact

SEQ ID NO: 412164 - DNA, 25 bp, Artificial
  probe
  misc_feature (1)..(25): SEQ ID NO: 5485; WAN024FI8; Start 204; Stop 228
ctacttcaagagctgggacaaagag

SEQ ID NO: 412165 - DNA, 25 bp, Artificial
  probe
  misc_feature (1)..(25): SEQ ID NO: 5485; WAN024FI8; Start 191; Stop 215
ctacttgcacgttctacttcaagag

SEQ ID NO: 412166 - DNA, 25 bp, Artificial
  probe
  misc_feature (1)..(25): SEQ ID NO: 5485; WAN024FI8; Start 18; Stop 42
ggttgtcaaactcagcagtctcaaa

SEQ ID NO: 412167 - DNA, 25 bp, Artificial
  probe
  misc_feature (1)..(25): SEQ ID NO: 5485; WAN024FI8; Start 151; Stop 175
ttcagaatcgacatagcccactact

SEQ ID NO: 412168 - DNA, 25 bp, Artificial
  probe
  misc_feature (1)..(25): SEQ ID NO: 5485; WAN024FI8; Start 114; Stop 138
gttgtggaagagcatgtttgatttt

SEQ ID NO: 412169 - DNA, 25 bp, Artificial
  probe
  misc_feature (1)..(25): SEQ ID NO: 5485; WAN024FI8; Start 203; Stop 227
tctacttcaagagctgggacaaaga

SEQ ID NO: 412170 - DNA, 25 bp, Artificial
  probe
  misc_feature (1)..(25): SEQ ID NO: 5486; WAN024C6T; Start 161; Stop 185
ttgatagctggaatgagtgtataag

SEQ ID NO: 412171 - DNA, 25 bp, Artificial
  probe
  misc_feature (1)..(25): SEQ ID NO: 5486; WAN024C6T; Start 83; Stop 107
acgtatggatgagtgttgaagaact

SEQ ID NO: 412172 - DNA, 25 bp, Artificial
  probe
  misc_feature (1)..(25): SEQ ID NO: 5486; WAN024C6T; Start 162; Stop 186
tgatagctggaatgagtgtataagc

SEQ ID NO: 412173 - DNA, 25 bp, Artificial
  probe
  misc_feature (1)..(25): SEQ ID NO: 5486; WAN024C6T; Start 163; Stop 187
gatagctggaatgagtgtataagcc

SEQ ID NO: 412174 - DNA, 25 bp, Artificial
  probe
  misc_feature (1)..(25): SEQ ID NO: 5486; WAN024C6T; Start 81; Stop 105
ctacgtatggatgagtgttgaagaa

SEQ ID NO: 412175 - DNA, 25 bp, Artificial
  probe
  misc_feature (1)..(25): SEQ ID NO: 5486; WAN024C6T; Start 82; Stop 106
tacgtatggatgagtgttgaagaac

SEQ ID NO: 412176 - DNA, 25 bp, Artificial
  probe
  misc_feature (1)..(25): SEQ ID NO: 5486; WAN024C6T; Start 160; Stop 184
tttgatagctggaatgagtgtataa

SEQ ID NO: 412177 - DNA, 25 bp, Artificial
  probe
  misc_feature (1)..(25): SEQ ID NO: 5486; WAN024C6T; Start 80; Stop 104
gctacgtatggatgagtgttgaaga

SEQ ID NO: 412178 - DNA, 25 bp, Artificial
  probe
  misc_feature (1)..(25): SEQ ID NO: 5486; WAN024C6T; Start 79; Stop 103
agctacgtatggatgagtgttgaag

SEQ ID NO: 412179 - DNA, 25 bp, Artificial
  probe
  misc_feature (1)..(25): SEQ ID NO: 5486; WAN024C6T; Start 84; Stop 108
cgtatggatgagtgttgaagaactc

SEQ ID NO: 412180 - DNA, 25 bp, Artificial
  probe
  misc_feature (1)..(25): SEQ ID NO: 5486; WAN024C6T; Start 78; Stop 102
cagctacgtatggatgagtgttgaa

SEQ ID NO: 412181 - DNA, 25 bp, Artificial
  probe
  misc_feature (1)..(25): SEQ ID NO: 5486; WAN024C6T; Start 120; Stop 144
caagagcagcgatttgatcttcttt

SEQ ID NO: 412182 - DNA, 25 bp, Artificial
  probe
  misc_feature (1)..(25): SEQ ID NO: 5486; WAN024C6T; Start 100; Stop 124
gaagaactcaaggtgacgctcaaga

SEQ ID NO: 412183 - DNA, 25 bp, Artificial
  probe
  misc_feature (1)..(25): SEQ ID NO: 5486; WAN024C6T; Start 101; Stop 125
aagaactcaaggtgacgctcaagag

SEQ ID NO: 412184 - DNA, 25 bp, Artificial
  probe
  misc_feature (1)..(25): SEQ ID NO: 5486; WAN024C6T; Start 164; Stop 188
atagctggaatgagtgtataagccc

SEQ ID NO: 412185 - DNA, 25 bp, Artificial
  probe
  misc_feature (1)..(25): SEQ ID NO: 5486; WAN024C6T; Start 99; Stop 123
tgaagaactcaaggtgacgctcaag

SEQ ID NO: 412186 - DNA, 25 bp, Artificial
  probe
  misc_feature (1)..(25): SEQ ID NO: 5486; WAN024C6T; Start 207; Stop 231
gttcaaagttccaagacccttgtaa

SEQ ID NO: 412187 - DNA, 25 bp, Artificial
  probe
  misc_feature (1)..(25): SEQ ID NO: 5486; WAN024C6T; Start 203; Stop 227
atccgttcaaagttccaagaccctt

SEQ ID NO: 412188 - DNA, 25 bp, Artificial
  probe
  misc_feature (1)..(25): SEQ ID NO: 5486; WAN024C6T; Start 172; Stop 196
aatgagtgtataagcccagcccaag

SEQ ID NO: 412189 - DNA, 25 bp, Artificial
  probe
  misc_feature (1)..(25): SEQ ID NO: 5486; WAN024C6T; Start 171; Stop 195
gaatgagtgtataagcccagcccaa

SEQ ID NO: 412190 - DNA, 25 bp, Artificial
  probe
  misc_feature (1)..(25): SEQ ID NO: 5486; WAN024C6T; Start 119; Stop 143
tcaagagcagcgatttgatcttctt

SEQ ID NO: 412191 - DNA, 25 bp, Artificial
  probe
  misc_feature (1)..(25): SEQ ID NO: 5486; WAN024C6T; Start 159; Stop 183
ttttgatagctggaatgagtgtata

SEQ ID NO: 412192 - DNA, 25 bp, Artificial
  probe
  misc_feature (1)..(25): SEQ ID NO: 5486; WAN024C6T; Start 175; Stop 199
gagtgtataagcccagcccaagttt

SEQ ID NO: 412193 - DNA, 25 bp, Artificial
  probe
  misc_feature (1)..(25): SEQ ID NO: 5486; WAN024C6T; Start 118; Stop 142
ctcaagagcagcgatttgatcttct

SEQ ID NO: 412194 - DNA, 25 bp, Artificial
  probe
  misc_feature (1)..(25): SEQ ID NO: 5486; WAN024C6T; Start 165; Stop 189
tagctggaatgagtgtataagccca

SEQ ID NO: 412195 - DNA, 25 bp, Artificial
  probe
  misc_feature (1)..(25): SEQ ID NO: 5486; WAN024C6T; Start 121; Stop 145
aagagcagcgatttgatcttctttt

SEQ ID NO: 412196 - DNA, 25 bp, Artificial
  probe
  misc_feature (1)..(25): SEQ ID NO: 5486; WAN024C6T; Start 202; Stop 226
catccgttcaaagttccaagaccct

SEQ ID NO: 412197 - DNA, 25 bp, Artificial
  probe
  misc_feature (1)..(25): SEQ ID NO: 5486; WAN024C6T; Start 93; Stop 117
gagtgttgaagaactcaaggtgacg

SEQ ID NO: 412198 - DNA, 25 bp, Artificial
  probe
  misc_feature (1)..(25): SEQ ID NO: 5486; WAN024C6T; Start 98; Stop 122
ttgaagaactcaaggtgacgctcaa

SEQ ID NO: 412199 - DNA, 25 bp, Artificial
  probe
  misc_feature (1)..(25): SEQ ID NO: 5486; WAN024C6T; Start 39; Stop 63
gttcttcttcaagcgcaagagtaac

SEQ ID NO: 412200 - DNA, 25 bp, Artificial
  probe
  misc_feature (1)..(25): SEQ ID NO: 5486; WAN024C6T; Start 199; Stop 223
ttgcatccgttcaaagttccaagac

SEQ ID NO: 412201 - DNA, 25 bp, Artificial
  probe
  misc_feature (1)..(25): SEQ ID NO: 5486; WAN024C6T; Start 75; Stop 99
gagcagctacgtatggatgagtgtt

SEQ ID NO: 412202 - DNA, 25 bp, Artificial
  probe
  misc_feature (1)..(25): SEQ ID NO: 5486; WAN024C6T; Start 206; Stop 230
cgttcaaagttccaagacccttgta

SEQ ID NO: 412203 - DNA, 25 bp, Artificial
  probe
  misc_feature (1)..(25): SEQ ID NO: 5487; WAN024FHT; Start 216; Stop 240
ggtagtcagtcaagttgaagtcttc

SEQ ID NO: 412204 - DNA, 25 bp, Artificial
  probe
  misc_feature (1)..(25): SEQ ID NO: 5487; WAN024FHT; Start 278; Stop 302
tcttcttggatttgttctggagtaa

SEQ ID NO: 412205 - DNA, 25 bp, Artificial
  probe
  misc_feature (1)..(25): SEQ ID NO: 5487; WAN024FHT; Start 277; Stop 301
ttcttcttggatttgttctggagta

SEQ ID NO: 412206 - DNA, 25 bp, Artificial
  probe
  misc_feature (1)..(25): SEQ ID NO: 5487; WAN024FHT; Start 276; Stop 300
attcttcttggatttgttctggagt

SEQ ID NO: 412207 - DNA, 25 bp, Artificial
  probe
  misc_feature (1)..(25): SEQ ID NO: 5487; WAN024FHT; Start 150; Stop 174
cccacatctcatcgttatcaaagta

SEQ ID NO: 412208 - DNA, 25 bp, Artificial
  probe
  misc_feature (1)..(25): SEQ ID NO: 5487; WAN024FHT; Start 147; Stop 171
tttcccacatctcatcgttatcaaa

SEQ ID NO: 412209 - DNA, 25 bp, Artificial
  probe
  misc_feature (1)..(25): SEQ ID NO: 5487; WAN024FHT; Start 148; Stop 172
ttcccacatctcatcgttatcaaag

SEQ ID NO: 412210 - DNA, 25 bp, Artificial
  probe
  misc_feature (1)..(25): SEQ ID NO: 5487; WAN024FHT; Start 275; Stop 299
aattcttcttggatttgttctggag

SEQ ID NO: 412211 - DNA, 25 bp, Artificial
  probe
  misc_feature (1)..(25): SEQ ID NO: 5487; WAN024FHT; Start 284; Stop 308
tggatttgttctggagtaacgaata

SEQ ID NO: 412212 - DNA, 25 bp, Artificial
  probe
  misc_feature (1)..(25): SEQ ID NO: 5487; WAN024FHT; Start 279; Stop 303
cttcttggatttgttctggagtaac

SEQ ID NO: 412213 - DNA, 25 bp, Artificial
  probe
  misc_feature (1)..(25): SEQ ID NO: 5487; WAN024FHT; Start 285; Stop 309
ggatttgttctggagtaacgaatag

SEQ ID NO: 412214 - DNA, 25 bp, Artificial
  probe
  misc_feature (1)..(25): SEQ ID NO: 5487; WAN024FHT; Start 283; Stop 307
ttggatttgttctggagtaacgaat

SEQ ID NO: 412215 - DNA, 25 bp, Artificial
  probe
  misc_feature (1)..(25): SEQ ID NO: 5487; WAN024FHT; Start 215; Stop 239
cggtagtcagtcaagttgaagtctt

SEQ ID NO: 412216 - DNA, 25 bp, Artificial
  probe
  misc_feature (1)..(25): SEQ ID NO: 5487; WAN024FHT; Start 282; Stop 306
cttggatttgttctggagtaacgaa

SEQ ID NO: 412217 - DNA, 25 bp, Artificial
  probe
  misc_feature (1)..(25): SEQ ID NO: 5487; WAN024FHT; Start 280; Stop 304
ttcttggatttgttctggagtaacg

SEQ ID NO: 412218 - DNA, 25 bp, Artificial
  probe
  misc_feature (1)..(25): SEQ ID NO: 5487; WAN024FHT; Start 151; Stop 175
ccacatctcatcgttatcaaagtac

SEQ ID NO: 412219 - DNA, 25 bp, Artificial
  probe
  misc_feature (1)..(25): SEQ ID NO: 5487; WAN024FHT; Start 176; Stop 200
ttatgagtatcttgagggtcacgaa

SEQ ID NO: 412220 - DNA, 25 bp, Artificial
  probe
  misc_feature (1)..(25): SEQ ID NO: 5487; WAN024FHT; Start 149; Stop 173
tcccacatctcatcgttatcaaagt

SEQ ID NO: 412221 - DNA, 25 bp, Artificial
  probe
  misc_feature (1)..(25): SEQ ID NO: 5487; WAN024FHT; Start 177; Stop 201
tatgagtatcttgagggtcacgaag

SEQ ID NO: 412222 - DNA, 25 bp, Artificial
  probe
  misc_feature (1)..(25): SEQ ID NO: 5487; WAN024FHT; Start 175; Stop 199
cttatgagtatcttgagggtcacga

SEQ ID NO: 412223 - DNA, 25 bp, Artificial
  probe
  misc_feature (1)..(25): SEQ ID NO: 5487; WAN024FHT; Start 174; Stop 198
acttatgagtatcttgagggtcacg

SEQ ID NO: 412224 - DNA, 25 bp, Artificial
  probe
  misc_feature (1)..(25): SEQ ID NO: 5487; WAN024FHT; Start 281; Stop 305
tcttggatttgttctggagtaacga

SEQ ID NO: 412225 - DNA, 25 bp, Artificial
  probe
  misc_feature (1)..(25): SEQ ID NO: 5487; WAN024FHT; Start 173; Stop 197
tacttatgagtatcttgagggtcac

SEQ ID NO: 412226 - DNA, 25 bp, Artificial
  probe
  misc_feature (1)..(25): SEQ ID NO: 5487; WAN024FHT; Start 211; Stop 235
gaagcggtagtcagtcaagttgaag

SEQ ID NO: 412227 - DNA, 25 bp, Artificial
  probe
  misc_feature (1)..(25): SEQ ID NO: 5487; WAN024FHT; Start 172; Stop 196
gtacttatgagtatcttgagggtca

SEQ ID NO: 412228 - DNA, 25 bp, Artificial
  probe
  misc_feature (1)..(25): SEQ ID NO: 5487; WAN024FHT; Start 219; Stop 243
agtcagtcaagttgaagtcttcata

SEQ ID NO: 412229 - DNA, 25 bp, Artificial
  probe
  misc_feature (1)..(25): SEQ ID NO: 5487; WAN024FHT; Start 218; Stop 242
tagtcagtcaagttgaagtcttcat

SEQ ID NO: 412230 - DNA, 25 bp, Artificial
  probe
  misc_feature (1)..(25): SEQ ID NO: 5487; WAN024FHT; Start 217; Stop 241
gtagtcagtcaagttgaagtcttca

SEQ ID NO: 412231 - DNA, 25 bp, Artificial
  probe
  misc_feature (1)..(25): SEQ ID NO: 5487; WAN024FHT; Start 145; Stop 169
attttcccacatctcatcgttatca

SEQ ID NO: 412232 - DNA, 25 bp, Artificial
  probe
  misc_feature (1)..(25): SEQ ID NO: 5487; WAN024FHT; Start 144; Stop 168
cattttcccacatctcatcgttatc

SEQ ID NO: 412233 - DNA, 25 bp, Artificial
  probe
  misc_feature (1)..(25): SEQ ID NO: 5487; WAN024FHT; Start 146; Stop 170
ttttcccacatctcatcgttatcaa

SEQ ID NO: 412234 - DNA, 25 bp, Artificial
  probe
  misc_feature (1)..(25): SEQ ID NO: 5487; WAN024FHT; Start 220; Stop 244
gtcagtcaagttgaagtcttcataa

SEQ ID NO: 412235 - DNA, 25 bp, Artificial
  probe
  misc_feature (1)..(25): SEQ ID NO: 5487; WAN024FHT; Start 22; Stop 46
ttcttttccaagggcagttttaatc

SEQ ID NO: 412236 - DNA, 25 bp, Artificial
  probe
  misc_feature (1)..(25): SEQ ID NO: 5488; WAN024GD5; Start 133; Stop 157
agttacacgaagacgagtcatacat

SEQ ID NO: 412237 - DNA, 25 bp, Artificial
  probe
  misc_feature (1)..(25): SEQ ID NO: 5488; WAN024GD5; Start 130; Stop 154
aacagttacacgaagacgagtcata

SEQ ID NO: 412238 - DNA, 25 bp, Artificial
  probe
  misc_feature (1)..(25): SEQ ID NO: 5488; WAN024GD5; Start 129; Stop 153
taacagttacacgaagacgagtcat

SEQ ID NO: 412239 - DNA, 25 bp, Artificial
  probe
  misc_feature (1)..(25): SEQ ID NO: 5488; WAN024GD5; Start 128; Stop 152
ttaacagttacacgaagacgagtca

SEQ ID NO: 412240 - DNA, 25 bp, Artificial
  probe
  misc_feature (1)..(25): SEQ ID NO: 5488; WAN024GD5; Start 134; Stop 158
gttacacgaagacgagtcatacatg

SEQ ID NO: 412241 - DNA, 25 bp, Artificial
  probe
  misc_feature (1)..(25): SEQ ID NO: 5488; WAN024GD5; Start 132; Stop 156
cagttacacgaagacgagtcataca

SEQ ID NO: 412242 - DNA, 25 bp, Artificial
  probe
  misc_feature (1)..(25): SEQ ID NO: 5488; WAN024GD5; Start 131; Stop 155
acagttacacgaagacgagtcatac

SEQ ID NO: 412243 - DNA, 25 bp, Artificial
  probe
  misc_feature (1)..(25): SEQ ID NO: 5488; WAN024GD5; Start 183; Stop 207
gtccaccaagaaggttgataatgtt

SEQ ID NO: 412244 - DNA, 25 bp, Artificial
  probe
  misc_feature (1)..(25): SEQ ID NO: 5488; WAN024GD5; Start 127; Stop 151
tttaacagttacacgaagacgagtc

SEQ ID NO: 412245 - DNA, 25 bp, Artificial
  probe
  misc_feature (1)..(25): SEQ ID NO: 5488; WAN024GD5; Start 126; Stop 150
ctttaacagttacacgaagacgagt

SEQ ID NO: 412246 - DNA, 25 bp, Artificial
  probe
  misc_feature (1)..(25): SEQ ID NO: 5488; WAN024GD5; Start 189; Stop 213
caagaaggttgataatgtttacagc

SEQ ID NO: 412247 - DNA, 25 bp, Artificial
  probe
  misc_feature (1)..(25): SEQ ID NO: 5488; WAN024GD5; Start 135; Stop 159
ttacacgaagacgagtcatacatgc

SEQ ID NO: 412248 - DNA, 25 bp, Artificial
  probe
  misc_feature (1)..(25): SEQ ID NO: 5488; WAN024GD5; Start 188; Stop 212
ccaagaaggttgataatgtttacag

SEQ ID NO: 412249 - DNA, 25 bp, Artificial
  probe
  misc_feature (1)..(25): SEQ ID NO: 5488; WAN024GD5; Start 195; Stop 219
ggttgataatgtttacagcttgaga

SEQ ID NO: 412250 - DNA, 25 bp, Artificial
  probe
  misc_feature (1)..(25): SEQ ID NO: 5488; WAN024GD5; Start 194; Stop 218
aggttgataatgtttacagcttgag

SEQ ID NO: 412251 - DNA, 25 bp, Artificial
  probe
  misc_feature (1)..(25): SEQ ID NO: 5488; WAN024GD5; Start 184; Stop 208
tccaccaagaaggttgataatgttt

SEQ ID NO: 412252 - DNA, 25 bp, Artificial
  probe
  misc_feature (1)..(25): SEQ ID NO: 5488; WAN024GD5; Start 185; Stop 209
ccaccaagaaggttgataatgttta

SEQ ID NO: 412253 - DNA, 25 bp, Artificial
  probe
  misc_feature (1)..(25): SEQ ID NO: 5488; WAN024GD5; Start 190; Stop 214
aagaaggttgataatgtttacagct

SEQ ID NO: 412254 - DNA, 25 bp, Artificial
  probe
  misc_feature (1)..(25): SEQ ID NO: 5488; WAN024GD5; Start 193; Stop 217
aaggttgataatgtttacagcttga

SEQ ID NO: 412255 - DNA, 25 bp, Artificial
  probe
  misc_feature (1)..(25): SEQ ID NO: 5488; WAN024GD5; Start 182; Stop 206
cgtccaccaagaaggttgataatgt

SEQ ID NO: 412256 - DNA, 25 bp, Artificial
  probe
  misc_feature (1)..(25): SEQ ID NO: 5488; WAN024GD5; Start 192; Stop 216
gaaggttgataatgtttacagcttg

SEQ ID NO: 412257 - DNA, 25 bp, Artificial
  probe
  misc_feature (1)..(25): SEQ ID NO: 5488; WAN024GD5; Start 191; Stop 215
agaaggttgataatgtttacagctt

SEQ ID NO: 412258 - DNA, 25 bp, Artificial
  probe
  misc_feature (1)..(25): SEQ ID NO: 5488; WAN024GD5; Start 196; Stop 220
gttgataatgtttacagcttgagag

SEQ ID NO: 412259 - DNA, 25 bp, Artificial
  probe
  misc_feature (1)..(25): SEQ ID NO: 5488; WAN024GD5; Start 187; Stop 211
accaagaaggttgataatgtttaca

SEQ ID NO: 412260 - DNA, 25 bp, Artificial
  probe
  misc_feature (1)..(25): SEQ ID NO: 5488; WAN024GD5; Start 186; Stop 210
caccaagaaggttgataatgtttac

SEQ ID NO: 412261 - DNA, 25 bp, Artificial
  probe
  misc_feature (1)..(25): SEQ ID NO: 5488; WAN024GD5; Start 124; Stop 148
atctttaacagttacacgaagacga

SEQ ID NO: 412262 - DNA, 25 bp, Artificial
  probe
  misc_feature (1)..(25): SEQ ID NO: 5488; WAN024GD5; Start 123; Stop 147
catctttaacagttacacgaagacg

SEQ ID NO: 412263 - DNA, 25 bp, Artificial
  probe
  misc_feature (1)..(25): SEQ ID NO: 5488; WAN024GD5; Start 122; Stop 146
gcatctttaacagttacacgaagac

SEQ ID NO: 412264 - DNA, 25 bp, Artificial
  probe
  misc_feature (1)..(25): SEQ ID NO: 5488; WAN024GD5; Start 125; Stop 149
tctttaacagttacacgaagacgag

SEQ ID NO: 412265 - DNA, 25 bp, Artificial
  probe
  misc_feature (1)..(25): SEQ ID NO: 5488; WAN024GD5; Start 120; Stop 144
ctgcatctttaacagttacacgaag

SEQ ID NO: 412266 - DNA, 25 bp, Artificial
  probe
  misc_feature (1)..(25): SEQ ID NO: 5488; WAN024GD5; Start 118; Stop 142
atctgcatctttaacagttacacga

SEQ ID NO: 412267 - DNA, 25 bp, Artificial
  probe
  misc_feature (1)..(25): SEQ ID NO: 5488; WAN024GD5; Start 119; Stop 143
tctgcatctttaacagttacacgaa

SEQ ID NO: 412268 - DNA, 25 bp, Artificial
  probe
  misc_feature (1)..(25): SEQ ID NO: 5488; WAN024GD5; Start 117; Stop 141
tatctgcatctttaacagttacacg

SEQ ID NO: 412269 - DNA, 25 bp, Artificial
  probe
  misc_feature (1)..(25): SEQ ID NO: 5489; WAN024EZ4; Start 203; Stop 227
tcaaccgtatattctactaccacat

SEQ ID NO: 412270 - DNA, 25 bp, Artificial
  probe
  misc_feature (1)..(25): SEQ ID NO: 5489; WAN024EZ4; Start 202; Stop 226
atcaaccgtatattctactaccaca

SEQ ID NO: 412271 - DNA, 25 bp, Artificial
  probe
  misc_feature (1)..(25): SEQ ID NO: 5489; WAN024EZ4; Start 64; Stop 88
ttccagtcgcttcttaatctcatct

SEQ ID NO: 412272 - DNA, 25 bp, Artificial
  probe
  misc_feature (1)..(25): SEQ ID NO: 5489; WAN024EZ4; Start 215; Stop 239
tctactaccacatgataggaacgat

SEQ ID NO: 412273 - DNA, 25 bp, Artificial
  probe
  misc_feature (1)..(25): SEQ ID NO: 5489; WAN024EZ4; Start 108; Stop 132
tgtagttgagagaatgttctatcgt

SEQ ID NO: 412274 - DNA, 25 bp, Artificial
  probe
  misc_feature (1)..(25): SEQ ID NO: 5489; WAN024EZ4; Start 213; Stop 237
attctactaccacatgataggaacg

SEQ ID NO: 412275 - DNA, 25 bp, Artificial
  probe
  misc_feature (1)..(25): SEQ ID NO: 5489; WAN024EZ4; Start 98; Stop 122
ccttggtacttgtagttgagagaat

SEQ ID NO: 412276 - DNA, 25 bp, Artificial
  probe
  misc_feature (1)..(25): SEQ ID NO: 5489; WAN024EZ4; Start 217; Stop 241
tactaccacatgataggaacgatag

SEQ ID NO: 412277 - DNA, 25 bp, Artificial
  probe
  misc_feature (1)..(25): SEQ ID NO: 5489; WAN024EZ4; Start 216; Stop 240
ctactaccacatgataggaacgata

SEQ ID NO: 412278 - DNA, 25 bp, Artificial
  probe
  misc_feature (1)..(25): SEQ ID NO: 5489; WAN024EZ4; Start 214; Stop 238
ttctactaccacatgataggaacga

SEQ ID NO: 412279 - DNA, 25 bp, Artificial
  probe
  misc_feature (1)..(25): SEQ ID NO: 5489; WAN024EZ4; Start 111; Stop 135
agttgagagaatgttctatcgttgc

SEQ ID NO: 412280 - DNA, 25 bp, Artificial
  probe
  misc_feature (1)..(25): SEQ ID NO: 5489; WAN024EZ4; Start 101; Stop 125
tggtacttgtagttgagagaatgtt

SEQ ID NO: 412281 - DNA, 25 bp, Artificial
  probe
  misc_feature (1)..(25): SEQ ID NO: 5489; WAN024EZ4; Start 100; Stop 124
ttggtacttgtagttgagagaatgt

SEQ ID NO: 412282 - DNA, 25 bp, Artificial
  probe
  misc_feature (1)..(25): SEQ ID NO: 5489; WAN024EZ4; Start 204; Stop 228
caaccgtatattctactaccacatg

SEQ ID NO: 412283 - DNA, 25 bp, Artificial
  probe
  misc_feature (1)..(25): SEQ ID NO: 5489; WAN024EZ4; Start 205; Stop 229
aaccgtatattctactaccacatga

SEQ ID NO: 412284 - DNA, 25 bp, Artificial
  probe
  misc_feature (1)..(25): SEQ ID NO: 5489; WAN024EZ4; Start 102; Stop 126
ggtacttgtagttgagagaatgttc

SEQ ID NO: 412285 - DNA, 25 bp, Artificial
  probe
  misc_feature (1)..(25): SEQ ID NO: 5489; WAN024EZ4; Start 99; Stop 123
cttggtacttgtagttgagagaatg

SEQ ID NO: 412286 - DNA, 25 bp, Artificial
  probe
  misc_feature (1)..(25): SEQ ID NO: 5489; WAN024EZ4; Start 110; Stop 134
tagttgagagaatgttctatcgttg

SEQ ID NO: 412287 - DNA, 25 bp, Artificial
  probe
  misc_feature (1)..(25): SEQ ID NO: 5489; WAN024EZ4; Start 109; Stop 133
gtagttgagagaatgttctatcgtt

SEQ ID NO: 412288 - DNA, 25 bp, Artificial
  probe
  misc_feature (1)..(25): SEQ ID NO: 5489; WAN024EZ4; Start 107; Stop 131
ttgtagttgagagaatgttctatcg

SEQ ID NO: 412289 - DNA, 25 bp, Artificial
  probe
  misc_feature (1)..(25): SEQ ID NO: 5489; WAN024EZ4; Start 206; Stop 230
accgtatattctactaccacatgat

SEQ ID NO: 412290 - DNA, 25 bp, Artificial
  probe
  misc_feature (1)..(25): SEQ ID NO: 5489; WAN024EZ4; Start 218; Stop 242
actaccacatgataggaacgatagc

SEQ ID NO: 412291 - DNA, 25 bp, Artificial
  probe
  misc_feature (1)..(25): SEQ ID NO: 5489; WAN024EZ4; Start 112; Stop 136
gttgagagaatgttctatcgttgcc

SEQ ID NO: 412292 - DNA, 25 bp, Artificial
  probe
  misc_feature (1)..(25): SEQ ID NO: 5489; WAN024EZ4; Start 103; Stop 127
gtacttgtagttgagagaatgttct

SEQ ID NO: 412293 - DNA, 25 bp, Artificial
  probe
  misc_feature (1)..(25): SEQ ID NO: 5489; WAN024EZ4; Start 201; Stop 225
tatcaaccgtatattctactaccac

SEQ ID NO: 412294 - DNA, 25 bp, Artificial
  probe
  misc_feature (1)..(25): SEQ ID NO: 5489; WAN024EZ4; Start 200; Stop 224
gtatcaaccgtatattctactacca

SEQ ID NO: 412295 - DNA, 25 bp, Artificial
  probe
  misc_feature (1)..(25): SEQ ID NO: 5489; WAN024EZ4; Start 62; Stop 86
atttccagtcgcttcttaatctcat

SEQ ID NO: 412296 - DNA, 25 bp, Artificial
  probe
  misc_feature (1)..(25): SEQ ID NO: 5489; WAN024EZ4; Start 65; Stop 89
tccagtcgcttcttaatctcatctg

SEQ ID NO: 412297 - DNA, 25 bp, Artificial
  probe
  misc_feature (1)..(25): SEQ ID NO: 5489; WAN024EZ4; Start 219; Stop 243
ctaccacatgataggaacgatagcc

SEQ ID NO: 412298 - DNA, 25 bp, Artificial
  probe
  misc_feature (1)..(25): SEQ ID NO: 5489; WAN024EZ4; Start 61; Stop 85
aatttccagtcgcttcttaatctca

SEQ ID NO: 412299 - DNA, 25 bp, Artificial
  probe
  misc_feature (1)..(25): SEQ ID NO: 5489; WAN024EZ4; Start 58; Stop 82
tgtaatttccagtcgcttcttaatc

SEQ ID NO: 412300 - DNA, 25 bp, Artificial
  probe
  misc_feature (1)..(25): SEQ ID NO: 5489; WAN024EZ4; Start 63; Stop 87
tttccagtcgcttcttaatctcatc

SEQ ID NO: 412301 - DNA, 25 bp, Artificial
  probe
  misc_feature (1)..(25): SEQ ID NO: 5489; WAN024EZ4; Start 72; Stop 96
gcttcttaatctcatctgggaaatc

SEQ ID NO: 412302 - DNA, 25 bp, Artificial
  probe
  misc_feature (1)..(25): SEQ ID NO: 5490; WAN024D3R; Start 265; Stop 289
ttcttcagttcttgtgatgagttct

SEQ ID NO: 412303 - DNA, 25 bp, Artificial
  probe
  misc_feature (1)..(25): SEQ ID NO: 5490; WAN024D3R; Start 164; Stop 188
gagatgtaatgagttcgttcacctt

SEQ ID NO: 412304 - DNA, 25 bp, Artificial
  probe
  misc_feature (1)..(25): SEQ ID NO: 5490; WAN024D3R; Start 161; Stop 185
acagagatgtaatgagttcgttcac

SEQ ID NO: 412305 - DNA, 25 bp, Artificial
  probe
  misc_feature (1)..(25): SEQ ID NO: 5490; WAN024D3R; Start 163; Stop 187
agagatgtaatgagttcgttcacct

SEQ ID NO: 412306 - DNA, 25 bp, Artificial
  probe
  misc_feature (1)..(25): SEQ ID NO: 5490; WAN024D3R; Start 162; Stop 186
cagagatgtaatgagttcgttcacc

SEQ ID NO: 412307 - DNA, 25 bp, Artificial
  probe
  misc_feature (1)..(25): SEQ ID NO: 5490; WAN024D3R; Start 266; Stop 290
tcttcagttcttgtgatgagttctg

SEQ ID NO: 412308 - DNA, 25 bp, Artificial
  probe
  misc_feature (1)..(25): SEQ ID NO: 5490; WAN024D3R; Start 271; Stop 295
agttcttgtgatgagttctggtctg

SEQ ID NO: 412309 - DNA, 25 bp, Artificial
  probe
  misc_feature (1)..(25): SEQ ID NO: 5490; WAN024D3R; Start 267; Stop 291
cttcagttcttgtgatgagttctgg

SEQ ID NO: 412310 - DNA, 25 bp, Artificial
  probe
  misc_feature (1)..(25): SEQ ID NO: 5490; WAN024D3R; Start 185; Stop 209
cctttgactcctgctgtgataatat

SEQ ID NO: 412311 - DNA, 25 bp, Artificial
  probe
  misc_feature (1)..(25): SEQ ID NO: 5490; WAN024D3R; Start 268; Stop 292
ttcagttcttgtgatgagttctggt

SEQ ID NO: 412312 - DNA, 25 bp, Artificial
  probe
  misc_feature (1)..(25): SEQ ID NO: 5490; WAN024D3R; Start 160; Stop 184
tacagagatgtaatgagttcgttca

SEQ ID NO: 412313 - DNA, 25 bp, Artificial
  probe
  misc_feature (1)..(25): SEQ ID NO: 5490; WAN024D3R; Start 157; Stop 181
gagtacagagatgtaatgagttcgt

SEQ ID NO: 412314 - DNA, 25 bp, Artificial
  probe
  misc_feature (1)..(25): SEQ ID NO: 5490; WAN024D3R; Start 156; Stop 180
tgagtacagagatgtaatgagttcg

SEQ ID NO: 412315 - DNA, 25 bp, Artificial
  probe
  misc_feature (1)..(25): SEQ ID NO: 5490; WAN024D3R; Start 184; Stop 208
acctttgactcctgctgtgataata

SEQ ID NO: 412316 - DNA, 25 bp, Artificial
  probe
  misc_feature (1)..(25): SEQ ID NO: 5490; WAN024D3R; Start 153; Stop 177
cagtgagtacagagatgtaatgagt

SEQ ID NO: 412317 - DNA, 25 bp, Artificial
  probe
  misc_feature (1)..(25): SEQ ID NO: 5490; WAN024D3R; Start 158; Stop 182
agtacagagatgtaatgagttcgtt

SEQ ID NO: 412318 - DNA, 25 bp, Artificial
  probe
  misc_feature (1)..(25): SEQ ID NO: 5490; WAN024D3R; Start 119; Stop 143
ctatcaaggactgtttctgttgttt

SEQ ID NO: 412319 - DNA, 25 bp, Artificial
  probe
  misc_feature (1)..(25): SEQ ID NO: 5490; WAN024D3R; Start 270; Stop 294
cagttcttgtgatgagttctggtct

SEQ ID NO: 412320 - DNA, 25 bp, Artificial
  probe
  misc_feature (1)..(25): SEQ ID NO: 5490; WAN024D3R; Start 269; Stop 293
tcagttcttgtgatgagttctggtc

SEQ ID NO: 412321 - DNA, 25 bp, Artificial
  probe
  misc_feature (1)..(25): SEQ ID NO: 5490; WAN024D3R; Start 152; Stop 176
tcagtgagtacagagatgtaatgag

SEQ ID NO: 412322 - DNA, 25 bp, Artificial
  probe
  misc_feature (1)..(25): SEQ ID NO: 5490; WAN024D3R; Start 159; Stop 183
gtacagagatgtaatgagttcgttc

SEQ ID NO: 412323 - DNA, 25 bp, Artificial
  probe
  misc_feature (1)..(25): SEQ ID NO: 5490; WAN024D3R; Start 165; Stop 189
agatgtaatgagttcgttcaccttt

SEQ ID NO: 412324 - DNA, 25 bp, Artificial
  probe
  misc_feature (1)..(25): SEQ ID NO: 5490; WAN024D3R; Start 272; Stop 296
gttcttgtgatgagttctggtctgg

SEQ ID NO: 412325 - DNA, 25 bp, Artificial
  probe
  misc_feature (1)..(25): SEQ ID NO: 5490; WAN024D3R; Start 264; Stop 288
tttcttcagttcttgtgatgagttc

SEQ ID NO: 412326 - DNA, 25 bp, Artificial
  probe
  misc_feature (1)..(25): SEQ ID NO: 5490; WAN024D3R; Start 166; Stop 190
gatgtaatgagttcgttcacctttg

SEQ ID NO: 412327 - DNA, 25 bp, Artificial
  probe
  misc_feature (1)..(25): SEQ ID NO: 5490; WAN024D3R; Start 259; Stop 283
tggaatttcttcagttcttgtgatg

SEQ ID NO: 412328 - DNA, 25 bp, Artificial
  probe
  misc_feature (1)..(25): SEQ ID NO: 5490; WAN024D3R; Start 260; Stop 284
ggaatttcttcagttcttgtgatga

SEQ ID NO: 412329 - DNA, 25 bp, Artificial
  probe
  misc_feature (1)..(25): SEQ ID NO: 5490; WAN024D3R; Start 167; Stop 191
atgtaatgagttcgttcacctttga

SEQ ID NO: 412330 - DNA, 25 bp, Artificial
  probe
  misc_feature (1)..(25): SEQ ID NO: 5490; WAN024D3R; Start 154; Stop 178
agtgagtacagagatgtaatgagtt

SEQ ID NO: 412331 - DNA, 25 bp, Artificial
  probe
  misc_feature (1)..(25): SEQ ID NO: 5490; WAN024D3R; Start 151; Stop 175
ttcagtgagtacagagatgtaatga

SEQ ID NO: 412332 - DNA, 25 bp, Artificial
  probe
  misc_feature (1)..(25): SEQ ID NO: 5490; WAN024D3R; Start 257; Stop 281
aatggaatttcttcagttcttgtga

SEQ ID NO: 412333 - DNA, 25 bp, Artificial
  probe
  misc_feature (1)..(25): SEQ ID NO: 5490; WAN024D3R; Start 155; Stop 179
gtgagtacagagatgtaatgagttc

SEQ ID NO: 412334 - DNA, 25 bp, Artificial
  probe
  misc_feature (1)..(25): SEQ ID NO: 5490; WAN024D3R; Start 263; Stop 287
atttcttcagttcttgtgatgagtt

SEQ ID NO: 412335 - DNA, 25 bp, Artificial
  probe
  misc_feature (1)..(25): SEQ ID NO: 5491; WAN024FLL; Start 1205; Stop 1229
tgagatatagtgacaagtggaggat

SEQ ID NO: 412336 - DNA, 25 bp, Artificial
  probe
  misc_feature (1)..(25): SEQ ID NO: 5491; WAN024FLL; Start 1206; Stop 1230
gagatatagtgacaagtggaggatt

SEQ ID NO: 412337 - DNA, 25 bp, Artificial
  probe
  misc_feature (1)..(25): SEQ ID NO: 5491; WAN024FLL; Start 820; Stop 844
ggtatgcttacaatgagacgctatt

SEQ ID NO: 412338 - DNA, 25 bp, Artificial
  probe
  misc_feature (1)..(25): SEQ ID NO: 5491; WAN024FLL; Start 1204; Stop 1228
ttgagatatagtgacaagtggagga

SEQ ID NO: 412339 - DNA, 25 bp, Artificial
  probe
  misc_feature (1)..(25): SEQ ID NO: 5491; WAN024FLL; Start 1203; Stop 1227
attgagatatagtgacaagtggagg

SEQ ID NO: 412340 - DNA, 25 bp, Artificial
  probe
  misc_feature (1)..(25): SEQ ID NO: 5491; WAN024FLL; Start 815; Stop 839
aatacggtatgcttacaatgagacg

SEQ ID NO: 412341 - DNA, 25 bp, Artificial
  probe
  misc_feature (1)..(25): SEQ ID NO: 5491; WAN024FLL; Start 788; Stop 812
ctgatactccaaggctcacattatt

SEQ ID NO: 412342 - DNA, 25 bp, Artificial
  probe
  misc_feature (1)..(25): SEQ ID NO: 5491; WAN024FLL; Start 1134; Stop 1158
atcgtctattcaatcatcttatccg

SEQ ID NO: 412343 - DNA, 25 bp, Artificial
  probe
  misc_feature (1)..(25): SEQ ID NO: 5491; WAN024FLL; Start 787; Stop 811
tctgatactccaaggctcacattat

SEQ ID NO: 412344 - DNA, 25 bp, Artificial
  probe
  misc_feature (1)..(25): SEQ ID NO: 5491; WAN024FLL; Start 786; Stop 810
ttctgatactccaaggctcacatta

SEQ ID NO: 412345 - DNA, 25 bp, Artificial
  probe
  misc_feature (1)..(25): SEQ ID NO: 5491; WAN024FLL; Start 507; Stop 531
tacgccaggtcaagtaattaatctc

SEQ ID NO: 412346 - DNA, 25 bp, Artificial
  probe
  misc_feature (1)..(25): SEQ ID NO: 5491; WAN024FLL; Start 506; Stop 530
gtacgccaggtcaagtaattaatct

SEQ ID NO: 412347 - DNA, 25 bp, Artificial
  probe
  misc_feature (1)..(25): SEQ ID NO: 5491; WAN024FLL; Start 1125; Stop 1149
tgttgtcttatcgtctattcaatca

SEQ ID NO: 412348 - DNA, 25 bp, Artificial
  probe
  misc_feature (1)..(25): SEQ ID NO: 5491; WAN024FLL; Start 511; Stop 535
ccaggtcaagtaattaatctctcga

SEQ ID NO: 412349 - DNA, 25 bp, Artificial
  probe
  misc_feature (1)..(25): SEQ ID NO: 5491; WAN024FLL; Start 510; Stop 534
gccaggtcaagtaattaatctctcg

SEQ ID NO: 412350 - DNA, 25 bp, Artificial
  probe
  misc_feature (1)..(25): SEQ ID NO: 5491; WAN024FLL; Start 509; Stop 533
cgccaggtcaagtaattaatctctc

SEQ ID NO: 412351 - DNA, 25 bp, Artificial
  probe
  misc_feature (1)..(25): SEQ ID NO: 5491; WAN024FLL; Start 1128; Stop 1152
tgtcttatcgtctattcaatcatct

SEQ ID NO: 412352 - DNA, 25 bp, Artificial
  probe
  misc_feature (1)..(25): SEQ ID NO: 5491; WAN024FLL; Start 505; Stop 529
ggtacgccaggtcaagtaattaatc

SEQ ID NO: 412353 - DNA, 25 bp, Artificial
  probe
  misc_feature (1)..(25): SEQ ID NO: 5491; WAN024FLL; Start 785; Stop 809
cttctgatactccaaggctcacatt

SEQ ID NO: 412354 - DNA, 25 bp, Artificial
  probe
  misc_feature (1)..(25): SEQ ID NO: 5491; WAN024FLL; Start 508; Stop 532
acgccaggtcaagtaattaatctct

SEQ ID NO: 412355 - DNA, 25 bp, Artificial
  probe
  misc_feature (1)..(25): SEQ ID NO: 5491; WAN024FLL; Start 819; Stop 843
cggtatgcttacaatgagacgctat

SEQ ID NO: 412356 - DNA, 25 bp, Artificial
  probe
  misc_feature (1)..(25): SEQ ID NO: 5491; WAN024FLL; Start 821; Stop 845
gtatgcttacaatgagacgctattt

SEQ ID NO: 412357 - DNA, 25 bp, Artificial
  probe
  misc_feature (1)..(25): SEQ ID NO: 5491; WAN024FLL; Start 1202; Stop 1226
tattgagatatagtgacaagtggag

SEQ ID NO: 412358 - DNA, 25 bp, Artificial
  probe
  misc_feature (1)..(25): SEQ ID NO: 5491; WAN024FLL; Start 459; Stop 483
gcatcaagaatatcgctatggttta

SEQ ID NO: 412359 - DNA, 25 bp, Artificial
  probe
  misc_feature (1)..(25): SEQ ID NO: 5491; WAN024FLL; Start 1207; Stop 1231
agatatagtgacaagtggaggattt

SEQ ID NO: 412360 - DNA, 25 bp, Artificial
  probe
  misc_feature (1)..(25): SEQ ID NO: 5491; WAN024FLL; Start 814; Stop 838
aaatacggtatgcttacaatgagac

SEQ ID NO: 412361 - DNA, 25 bp, Artificial
  probe
  misc_feature (1)..(25): SEQ ID NO: 5491; WAN024FLL; Start 512; Stop 536
caggtcaagtaattaatctctcgat

SEQ ID NO: 412362 - DNA, 25 bp, Artificial
  probe
  misc_feature (1)..(25): SEQ ID NO: 5491; WAN024FLL; Start 789; Stop 813
tgatactccaaggctcacattattt

SEQ ID NO: 412363 - DNA, 25 bp, Artificial
  probe
  misc_feature (1)..(25): SEQ ID NO: 5491; WAN024FLL; Start 1126; Stop 1150
gttgtcttatcgtctattcaatcat

SEQ ID NO: 412364 - DNA, 25 bp, Artificial
  probe
  misc_feature (1)..(25): SEQ ID NO: 5491; WAN024FLL; Start 1124; Stop 1148
atgttgtcttatcgtctattcaatc

SEQ ID NO: 412365 - DNA, 25 bp, Artificial
  probe
  misc_feature (1)..(25): SEQ ID NO: 5491; WAN024FLL; Start 816; Stop 840
atacggtatgcttacaatgagacgc

SEQ ID NO: 412366 - DNA, 25 bp, Artificial
  probe
  misc_feature (1)..(25): SEQ ID NO: 5491; WAN024FLL; Start 746; Stop 770
cagtggttgggtttgaacaatttaa

SEQ ID NO: 412367 - DNA, 25 bp, Artificial
  probe
  misc_feature (1)..(25): SEQ ID NO: 5491; WAN024FLL; Start 790; Stop 814
gatactccaaggctcacattattta

SEQ ID NO: 412368 - DNA, 25 bp, Artificial
  probe
  misc_feature (1)..(25): SEQ ID NO: 5492; WAN024G77; Start 573; Stop 597
tcacgagaatgccttactagaataa

SEQ ID NO: 412369 - DNA, 25 bp, Artificial
  probe
  misc_feature (1)..(25): SEQ ID NO: 5492; WAN024G77; Start 572; Stop 596
ttcacgagaatgccttactagaata

SEQ ID NO: 412370 - DNA, 25 bp, Artificial
  probe
  misc_feature (1)..(25): SEQ ID NO: 5492; WAN024G77; Start 214; Stop 238
atgattgaactatctaacacgaaca

SEQ ID NO: 412371 - DNA, 25 bp, Artificial
  probe
  misc_feature (1)..(25): SEQ ID NO: 5492; WAN024G77; Start 215; Stop 239
tgattgaactatctaacacgaacaa

SEQ ID NO: 412372 - DNA, 25 bp, Artificial
  probe
  misc_feature (1)..(25): SEQ ID NO: 5492; WAN024G77; Start 419; Stop 443
tgacggaatcaataatgttagatcg

SEQ ID NO: 412373 - DNA, 25 bp, Artificial
  probe
  misc_feature (1)..(25): SEQ ID NO: 5492; WAN024G77; Start 280; Stop 304
gcagagattgatatgaagctagaag

SEQ ID NO: 412374 - DNA, 25 bp, Artificial
  probe
  misc_feature (1)..(25): SEQ ID NO: 5492; WAN024G77; Start 421; Stop 445
acggaatcaataatgttagatcgac

SEQ ID NO: 412375 - DNA, 25 bp, Artificial
  probe
  misc_feature (1)..(25): SEQ ID NO: 5492; WAN024G77; Start 422; Stop 446
cggaatcaataatgttagatcgact

SEQ ID NO: 412376 - DNA, 25 bp, Artificial
  probe
  misc_feature (1)..(25): SEQ ID NO: 5492; WAN024G77; Start 420; Stop 444
gacggaatcaataatgttagatcga

SEQ ID NO: 412377 - DNA, 25 bp, Artificial
  probe
  misc_feature (1)..(25): SEQ ID NO: 5492; WAN024G77; Start 279; Stop 303
tgcagagattgatatgaagctagaa

SEQ ID NO: 412378 - DNA, 25 bp, Artificial
  probe
  misc_feature (1)..(25): SEQ ID NO: 5492; WAN024G77; Start 278; Stop 302
ttgcagagattgatatgaagctaga

SEQ ID NO: 412379 - DNA, 25 bp, Artificial
  probe
  misc_feature (1)..(25): SEQ ID NO: 5492; WAN024G77; Start 230; Stop 254
acacgaacaaacaataccaagaaat

SEQ ID NO: 412380 - DNA, 25 bp, Artificial
  probe
  misc_feature (1)..(25): SEQ ID NO: 5492; WAN024G77; Start 229; Stop 253
aacacgaacaaacaataccaagaaa

SEQ ID NO: 412381 - DNA, 25 bp, Artificial
  probe
  misc_feature (1)..(25): SEQ ID NO: 5492; WAN024G77; Start 227; Stop 251
ctaacacgaacaaacaataccaaga

SEQ ID NO: 412382 - DNA, 25 bp, Artificial
  probe
  misc_feature (1)..(25): SEQ ID NO: 5492; WAN024G77; Start 226; Stop 250
tctaacacgaacaaacaataccaag

SEQ ID NO: 412383 - DNA, 25 bp, Artificial
  probe
  misc_feature (1)..(25): SEQ ID NO: 5492; WAN024G77; Start 232; Stop 256
acgaacaaacaataccaagaaatca

SEQ ID NO: 412384 - DNA, 25 bp, Artificial
  probe
  misc_feature (1)..(25): SEQ ID NO: 5492; WAN024G77; Start 411; Stop 435
aatgaacatgacggaatcaataatg

SEQ ID NO: 412385 - DNA, 25 bp, Artificial
  probe
  misc_feature (1)..(25): SEQ ID NO: 5492; WAN024G77; Start 231; Stop 255
cacgaacaaacaataccaagaaatc

SEQ ID NO: 412386 - DNA, 25 bp, Artificial
  probe
  misc_feature (1)..(25): SEQ ID NO: 5492; WAN024G77; Start 228; Stop 252
taacacgaacaaacaataccaagaa

SEQ ID NO: 412387 - DNA, 25 bp, Artificial
  probe
  misc_feature (1)..(25): SEQ ID NO: 5492; WAN024G77; Start 225; Stop 249
atctaacacgaacaaacaataccaa

SEQ ID NO: 412388 - DNA, 25 bp, Artificial
  probe
  misc_feature (1)..(25): SEQ ID NO: 5492; WAN024G77; Start 277; Stop 301
attgcagagattgatatgaagctag

SEQ ID NO: 412389 - DNA, 25 bp, Artificial
  probe
  misc_feature (1)..(25): SEQ ID NO: 5492; WAN024G77; Start 219; Stop 243
tgaactatctaacacgaacaaacaa

SEQ ID NO: 412390 - DNA, 25 bp, Artificial
  probe
  misc_feature (1)..(25): SEQ ID NO: 5492; WAN024G77; Start 233; Stop 257
cgaacaaacaataccaagaaatcaa

SEQ ID NO: 412391 - DNA, 25 bp, Artificial
  probe
  misc_feature (1)..(25): SEQ ID NO: 5492; WAN024G77; Start 511; Stop 535
gctagaagattggatttgtttgtga

SEQ ID NO: 412392 - DNA, 25 bp, Artificial
  probe
  misc_feature (1)..(25): SEQ ID NO: 5492; WAN024G77; Start 224; Stop 248
tatctaacacgaacaaacaatacca

SEQ ID NO: 412393 - DNA, 25 bp, Artificial
  probe
  misc_feature (1)..(25): SEQ ID NO: 5492; WAN024G77; Start 571; Stop 595
tttcacgagaatgccttactagaat

SEQ ID NO: 412394 - DNA, 25 bp, Artificial
  probe
  misc_feature (1)..(25): SEQ ID NO: 5492; WAN024G77; Start 570; Stop 594
atttcacgagaatgccttactagaa

SEQ ID NO: 412395 - DNA, 25 bp, Artificial
  probe
  misc_feature (1)..(25): SEQ ID NO: 5492; WAN024G77; Start 569; Stop 593
aatttcacgagaatgccttactaga

SEQ ID NO: 412396 - DNA, 25 bp, Artificial
  probe
  misc_feature (1)..(25): SEQ ID NO: 5492; WAN024G77; Start 276; Stop 300
aattgcagagattgatatgaagcta

SEQ ID NO: 412397 - DNA, 25 bp, Artificial
  probe
  misc_feature (1)..(25): SEQ ID NO: 5492; WAN024G77; Start 213; Stop 237
tatgattgaactatctaacacgaac

SEQ ID NO: 412398 - DNA, 25 bp, Artificial
  probe
  misc_feature (1)..(25): SEQ ID NO: 5492; WAN024G77; Start 218; Stop 242
ttgaactatctaacacgaacaaaca

SEQ ID NO: 412399 - DNA, 25 bp, Artificial
  probe
  misc_feature (1)..(25): SEQ ID NO: 5492; WAN024G77; Start 281; Stop 305
cagagattgatatgaagctagaaga

SEQ ID NO: 412400 - DNA, 25 bp, Artificial
  probe
  misc_feature (1)..(25): SEQ ID NO: 5492; WAN024G77; Start 95; Stop 119
ataattgtttcatcaagggtaggac

SEQ ID NO: 412401 - DNA, 25 bp, Artificial
  probe
  misc_feature (1)..(25): SEQ ID NO: 5493; WAN024F59; Start 185; Stop 209
gtattcatcttatcaacgctacgac

SEQ ID NO: 412402 - DNA, 25 bp, Artificial
  probe
  misc_feature (1)..(25): SEQ ID NO: 5493; WAN024F59; Start 184; Stop 208
agtattcatcttatcaacgctacga

SEQ ID NO: 412403 - DNA, 25 bp, Artificial
  probe
  misc_feature (1)..(25): SEQ ID NO: 5493; WAN024F59; Start 105; Stop 129
ttccagcggtatcaatcatatcatc

SEQ ID NO: 412404 - DNA, 25 bp, Artificial
  probe
  misc_feature (1)..(25): SEQ ID NO: 5493; WAN024F59; Start 110; Stop 134
gcggtatcaatcatatcatcaatca

SEQ ID NO: 412405 - DNA, 25 bp, Artificial
  probe
  misc_feature (1)..(25): SEQ ID NO: 5493; WAN024F59; Start 108; Stop 132
cagcggtatcaatcatatcatcaat

SEQ ID NO: 412406 - DNA, 25 bp, Artificial
  probe
  misc_feature (1)..(25): SEQ ID NO: 5493; WAN024F59; Start 107; Stop 131
ccagcggtatcaatcatatcatcaa

SEQ ID NO: 412407 - DNA, 25 bp, Artificial
  probe
  misc_feature (1)..(25): SEQ ID NO: 5493; WAN024F59; Start 104; Stop 128
gttccagcggtatcaatcatatcat

SEQ ID NO: 412408 - DNA, 25 bp, Artificial
  probe
  misc_feature (1)..(25): SEQ ID NO: 5493; WAN024F59; Start 186; Stop 210
tattcatcttatcaacgctacgacg

SEQ ID NO: 412409 - DNA, 25 bp, Artificial
  probe
  misc_feature (1)..(25): SEQ ID NO: 5493; WAN024F59; Start 109; Stop 133
agcggtatcaatcatatcatcaatc

SEQ ID NO: 412410 - DNA, 25 bp, Artificial
  probe
  misc_feature (1)..(25): SEQ ID NO: 5493; WAN024F59; Start 106; Stop 130
tccagcggtatcaatcatatcatca

SEQ ID NO: 412411 - DNA, 25 bp, Artificial
  probe
  misc_feature (1)..(25): SEQ ID NO: 5493; WAN024F59; Start 292; Stop 316
aaccacatagtcagaaccaaccata

SEQ ID NO: 412412 - DNA, 25 bp, Artificial
  probe
  misc_feature (1)..(25): SEQ ID NO: 5493; WAN024F59; Start 183; Stop 207
tagtattcatcttatcaacgctacg

SEQ ID NO: 412413 - DNA, 25 bp, Artificial
  probe
  misc_feature (1)..(25): SEQ ID NO: 5493; WAN024F59; Start 101; Stop 125
atcgttccagcggtatcaatcatat

SEQ ID NO: 412414 - DNA, 25 bp, Artificial
  probe
  misc_feature (1)..(25): SEQ ID NO: 5493; WAN024F59; Start 296; Stop 320
acatagtcagaaccaaccataccac

SEQ ID NO: 412415 - DNA, 25 bp, Artificial
  probe
  misc_feature (1)..(25): SEQ ID NO: 5493; WAN024F59; Start 295; Stop 319
cacatagtcagaaccaaccatacca

SEQ ID NO: 412416 - DNA, 25 bp, Artificial
  probe
  misc_feature (1)..(25): SEQ ID NO: 5493; WAN024F59; Start 293; Stop 317
accacatagtcagaaccaaccatac

SEQ ID NO: 412417 - DNA, 25 bp, Artificial
  probe
  misc_feature (1)..(25): SEQ ID NO: 5493; WAN024F59; Start 100; Stop 124
aatcgttccagcggtatcaatcata

SEQ ID NO: 412418 - DNA, 25 bp, Artificial
  probe
  misc_feature (1)..(25): SEQ ID NO: 5493; WAN024F59; Start 136; Stop 160
gatacaagtcttgccttcaacctta

SEQ ID NO: 412419 - DNA, 25 bp, Artificial
  probe
  misc_feature (1)..(25): SEQ ID NO: 5493; WAN024F59; Start 137; Stop 161
atacaagtcttgccttcaaccttac

SEQ ID NO: 412420 - DNA, 25 bp, Artificial
  probe
  misc_feature (1)..(25): SEQ ID NO: 5493; WAN024F59; Start 102; Stop 126
tcgttccagcggtatcaatcatatc

SEQ ID NO: 412421 - DNA, 25 bp, Artificial
  probe
  misc_feature (1)..(25): SEQ ID NO: 5493; WAN024F59; Start 294; Stop 318
ccacatagtcagaaccaaccatacc

SEQ ID NO: 412422 - DNA, 25 bp, Artificial
  probe
  misc_feature (1)..(25): SEQ ID NO: 5493; WAN024F59; Start 111; Stop 135
cggtatcaatcatatcatcaatcaa

SEQ ID NO: 412423 - DNA, 25 bp, Artificial
  probe
  misc_feature (1)..(25): SEQ ID NO: 5493; WAN024F59; Start 103; Stop 127
cgttccagcggtatcaatcatatca

SEQ ID NO: 412424 - DNA, 25 bp, Artificial
  probe
  misc_feature (1)..(25): SEQ ID NO: 5493; WAN024F59; Start 291; Stop 315
caaccacatagtcagaaccaaccat

SEQ ID NO: 412425 - DNA, 25 bp, Artificial
  probe
  misc_feature (1)..(25): SEQ ID NO: 5493; WAN024F59; Start 135; Stop 159
agatacaagtcttgccttcaacctt

SEQ ID NO: 412426 - DNA, 25 bp, Artificial
  probe
  misc_feature (1)..(25): SEQ ID NO: 5493; WAN024F59; Start 297; Stop 321
catagtcagaaccaaccataccacg

SEQ ID NO: 412427 - DNA, 25 bp, Artificial
  probe
  misc_feature (1)..(25): SEQ ID NO: 5493; WAN024F59; Start 182; Stop 206
ctagtattcatcttatcaacgctac

SEQ ID NO: 412428 - DNA, 25 bp, Artificial
  probe
  misc_feature (1)..(25): SEQ ID NO: 5493; WAN024F59; Start 138; Stop 162
tacaagtcttgccttcaaccttacc

SEQ ID NO: 412429 - DNA, 25 bp, Artificial
  probe
  misc_feature (1)..(25): SEQ ID NO: 5493; WAN024F59; Start 41; Stop 65
gtacagcttgcatagacttcaacag

SEQ ID NO: 412430 - DNA, 25 bp, Artificial
  probe
  misc_feature (1)..(25): SEQ ID NO: 5493; WAN024F59; Start 180; Stop 204
cactagtattcatcttatcaacgct

SEQ ID NO: 412431 - DNA, 25 bp, Artificial
  probe
  misc_feature (1)..(25): SEQ ID NO: 5493; WAN024F59; Start 179; Stop 203
tcactagtattcatcttatcaacgc

SEQ ID NO: 412432 - DNA, 25 bp, Artificial
  probe
  misc_feature (1)..(25): SEQ ID NO: 5493; WAN024F59; Start 354; Stop 378
ccatcaaatgatccacaggaatatc

SEQ ID NO: 412433 - DNA, 25 bp, Artificial
  probe
  misc_feature (1)..(25): SEQ ID NO: 5493; WAN024F59; Start 353; Stop 377
cccatcaaatgatccacaggaatat

SEQ ID NO: 412434 - DNA, 25 bp, Artificial
  probe
  misc_feature (1)..(25): SEQ ID NO: 5494; WAN024FTD; Start 72; Stop 96
agtggaagccattataggtatcttg

SEQ ID NO: 412435 - DNA, 25 bp, Artificial
  probe
  misc_feature (1)..(25): SEQ ID NO: 5494; WAN024FTD; Start 71; Stop 95
cagtggaagccattataggtatctt

SEQ ID NO: 412436 - DNA, 25 bp, Artificial
  probe
  misc_feature (1)..(25): SEQ ID NO: 5494; WAN024FTD; Start 163; Stop 187
gtctacaggatcaacttcgataacc

SEQ ID NO: 412437 - DNA, 25 bp, Artificial
  probe
  misc_feature (1)..(25): SEQ ID NO: 5494; WAN024FTD; Start 162; Stop 186
ggtctacaggatcaacttcgataac

SEQ ID NO: 412438 - DNA, 25 bp, Artificial
  probe
  misc_feature (1)..(25): SEQ ID NO: 5494; WAN024FTD; Start 73; Stop 97
gtggaagccattataggtatcttgg

SEQ ID NO: 412439 - DNA, 25 bp, Artificial
  probe
  misc_feature (1)..(25): SEQ ID NO: 5494; WAN024FTD; Start 81; Stop 105
cattataggtatcttggcgaccatc

SEQ ID NO: 412440 - DNA, 25 bp, Artificial
  probe
  misc_feature (1)..(25): SEQ ID NO: 5494; WAN024FTD; Start 70; Stop 94
ccagtggaagccattataggtatct

SEQ ID NO: 412441 - DNA, 25 bp, Artificial
  probe
  misc_feature (1)..(25): SEQ ID NO: 5494; WAN024FTD; Start 268; Stop 292
ggcttgaatggcttgaagatagtct

SEQ ID NO: 412442 - DNA, 25 bp, Artificial
  probe
  misc_feature (1)..(25): SEQ ID NO: 5494; WAN024FTD; Start 161; Stop 185
cggtctacaggatcaacttcgataa

SEQ ID NO: 412443 - DNA, 25 bp, Artificial
  probe
  misc_feature (1)..(25): SEQ ID NO: 5494; WAN024FTD; Start 80; Stop 104
ccattataggtatcttggcgaccat

SEQ ID NO: 412444 - DNA, 25 bp, Artificial
  probe
  misc_feature (1)..(25): SEQ ID NO: 5494; WAN024FTD; Start 164; Stop 188
tctacaggatcaacttcgataacct

SEQ ID NO: 412445 - DNA, 25 bp, Artificial
  probe
  misc_feature (1)..(25): SEQ ID NO: 5494; WAN024FTD; Start 269; Stop 293
gcttgaatggcttgaagatagtctt

SEQ ID NO: 412446 - DNA, 25 bp, Artificial
  probe
  misc_feature (1)..(25): SEQ ID NO: 5494; WAN024FTD; Start 144; Stop 168
ctccaagttcaactgtacggtctac

SEQ ID NO: 412447 - DNA, 25 bp, Artificial
  probe
  misc_feature (1)..(25): SEQ ID NO: 5494; WAN024FTD; Start 264; Stop 288
taagggcttgaatggcttgaagata

SEQ ID NO: 412448 - DNA, 25 bp, Artificial
  probe
  misc_feature (1)..(25): SEQ ID NO: 5494; WAN024FTD; Start 143; Stop 167
tctccaagttcaactgtacggtcta

SEQ ID NO: 412449 - DNA, 25 bp, Artificial
  probe
  misc_feature (1)..(25): SEQ ID NO: 5494; WAN024FTD; Start 160; Stop 184
acggtctacaggatcaacttcgata

SEQ ID NO: 412450 - DNA, 25 bp, Artificial
  probe
  misc_feature (1)..(25): SEQ ID NO: 5494; WAN024FTD; Start 159; Stop 183
tacggtctacaggatcaacttcgat

SEQ ID NO: 412451 - DNA, 25 bp, Artificial
  probe
  misc_feature (1)..(25): SEQ ID NO: 5494; WAN024FTD; Start 82; Stop 106
attataggtatcttggcgaccatcg

SEQ ID NO: 412452 - DNA, 25 bp, Artificial
  probe
  misc_feature (1)..(25): SEQ ID NO: 5494; WAN024FTD; Start 69; Stop 93
gccagtggaagccattataggtatc

SEQ ID NO: 412453 - DNA, 25 bp, Artificial
  probe
  misc_feature (1)..(25): SEQ ID NO: 5494; WAN024FTD; Start 261; Stop 285
ctttaagggcttgaatggcttgaag

SEQ ID NO: 412454 - DNA, 25 bp, Artificial
  probe
  misc_feature (1)..(25): SEQ ID NO: 5494; WAN024FTD; Start 213; Stop 237
cagccttgtggttgagaactacatc

SEQ ID NO: 412455 - DNA, 25 bp, Artificial
  probe
  misc_feature (1)..(25): SEQ ID NO: 5494; WAN024FTD; Start 263; Stop 287
ttaagggcttgaatggcttgaagat

SEQ ID NO: 412456 - DNA, 25 bp, Artificial
  probe
  misc_feature (1)..(25): SEQ ID NO: 5494; WAN024FTD; Start 287; Stop 311
tagtcttctttgaaaccatacttgg

SEQ ID NO: 412457 - DNA, 25 bp, Artificial
  probe
  misc_feature (1)..(25): SEQ ID NO: 5494; WAN024FTD; Start 141; Stop 165
gttctccaagttcaactgtacggtc

SEQ ID NO: 412458 - DNA, 25 bp, Artificial
  probe
  misc_feature (1)..(25): SEQ ID NO: 5494; WAN024FTD; Start 262; Stop 286
tttaagggcttgaatggcttgaaga

SEQ ID NO: 412459 - DNA, 25 bp, Artificial
  probe
  misc_feature (1)..(25): SEQ ID NO: 5494; WAN024FTD; Start 284; Stop 308
agatagtcttctttgaaaccatact

SEQ ID NO: 412460 - DNA, 25 bp, Artificial
  probe
  misc_feature (1)..(25): SEQ ID NO: 5494; WAN024FTD; Start 142; Stop 166
ttctccaagttcaactgtacggtct

SEQ ID NO: 412461 - DNA, 25 bp, Artificial
  probe
  misc_feature (1)..(25): SEQ ID NO: 5494; WAN024FTD; Start 136; Stop 160
gaagggttctccaagttcaactgta

SEQ ID NO: 412462 - DNA, 25 bp, Artificial
  probe
  misc_feature (1)..(25): SEQ ID NO: 5494; WAN024FTD; Start 265; Stop 289
aagggcttgaatggcttgaagatag

SEQ ID NO: 412463 - DNA, 25 bp, Artificial
  probe
  misc_feature (1)..(25): SEQ ID NO: 5494; WAN024FTD; Start 68; Stop 92
tgccagtggaagccattataggtat

SEQ ID NO: 412464 - DNA, 25 bp, Artificial
  probe
  misc_feature (1)..(25): SEQ ID NO: 5494; WAN024FTD; Start 67; Stop 91
atgccagtggaagccattataggta

SEQ ID NO: 412465 - DNA, 25 bp, Artificial
  probe
  misc_feature (1)..(25): SEQ ID NO: 5494; WAN024FTD; Start 169; Stop 193
aggatcaacttcgataacctgaaag

SEQ ID NO: 412466 - DNA, 25 bp, Artificial
  probe
  misc_feature (1)..(25): SEQ ID NO: 5494; WAN024FTD; Start 137; Stop 161
aagggttctccaagttcaactgtac

SEQ ID NO: 412467 - DNA, 25 bp, Artificial
  probe
  misc_feature (1)..(25): SEQ ID NO: 5495; WAN024FB4; Start 180; Stop 204
catcaagacctactgtatccatacc

SEQ ID NO: 412468 - DNA, 25 bp, Artificial
  probe
  misc_feature (1)..(25): SEQ ID NO: 5495; WAN024FB4; Start 179; Stop 203
ccatcaagacctactgtatccatac

SEQ ID NO: 412469 - DNA, 25 bp, Artificial
  probe
  misc_feature (1)..(25): SEQ ID NO: 5495; WAN024FB4; Start 36; Stop 60
ctgtataagcatcttggttggtgat

SEQ ID NO: 412470 - DNA, 25 bp, Artificial
  probe
  misc_feature (1)..(25): SEQ ID NO: 5495; WAN024FB4; Start 178; Stop 202
gccatcaagacctactgtatccata

SEQ ID NO: 412471 - DNA, 25 bp, Artificial
  probe
  misc_feature (1)..(25): SEQ ID NO: 5495; WAN024FB4; Start 181; Stop 205
atcaagacctactgtatccataccg

SEQ ID NO: 412472 - DNA, 25 bp, Artificial
  probe
  misc_feature (1)..(25): SEQ ID NO: 5495; WAN024FB4; Start 183; Stop 207
caagacctactgtatccataccgat

SEQ ID NO: 412473 - DNA, 25 bp, Artificial
  probe
  misc_feature (1)..(25): SEQ ID NO: 5495; WAN024FB4; Start 184; Stop 208
aagacctactgtatccataccgatg

SEQ ID NO: 412474 - DNA, 25 bp, Artificial
  probe
  misc_feature (1)..(25): SEQ ID NO: 5495; WAN024FB4; Start 89; Stop 113
gcagccttaatgacatccatatcaa

SEQ ID NO: 412475 - DNA, 25 bp, Artificial
  probe
  misc_feature (1)..(25): SEQ ID NO: 5495; WAN024FB4; Start 46; Stop 70
atcttggttggtgatgataacagga

SEQ ID NO: 412476 - DNA, 25 bp, Artificial
  probe
  misc_feature (1)..(25): SEQ ID NO: 5495; WAN024FB4; Start 182; Stop 206
tcaagacctactgtatccataccga

SEQ ID NO: 412477 - DNA, 25 bp, Artificial
  probe
  misc_feature (1)..(25): SEQ ID NO: 5495; WAN024FB4; Start 186; Stop 210
gacctactgtatccataccgatgtg

SEQ ID NO: 412478 - DNA, 25 bp, Artificial
  probe
  misc_feature (1)..(25): SEQ ID NO: 5495; WAN024FB4; Start 49; Stop 73
ttggttggtgatgataacaggagtt

SEQ ID NO: 412479 - DNA, 25 bp, Artificial
  probe
  misc_feature (1)..(25): SEQ ID NO: 5495; WAN024FB4; Start 185; Stop 209
agacctactgtatccataccgatgt

SEQ ID NO: 412480 - DNA, 25 bp, Artificial
  probe
  misc_feature (1)..(25): SEQ ID NO: 5495; WAN024FB4; Start 47; Stop 71
tcttggttggtgatgataacaggag

SEQ ID NO: 412481 - DNA, 25 bp, Artificial
  probe
  misc_feature (1)..(25): SEQ ID NO: 5495; WAN024FB4; Start 48; Stop 72
cttggttggtgatgataacaggagt

SEQ ID NO: 412482 - DNA, 25 bp, Artificial
  probe
  misc_feature (1)..(25): SEQ ID NO: 5495; WAN024FB4; Start 177; Stop 201
tgccatcaagacctactgtatccat

SEQ ID NO: 412483 - DNA, 25 bp, Artificial
  probe
  misc_feature (1)..(25): SEQ ID NO: 5495; WAN024FB4; Start 200; Stop 224
ataccgatgtggatgagcaattcaa

SEQ ID NO: 412484 - DNA, 25 bp, Artificial
  probe
  misc_feature (1)..(25): SEQ ID NO: 5495; WAN024FB4; Start 52; Stop 76
gttggtgatgataacaggagtttct

SEQ ID NO: 412485 - DNA, 25 bp, Artificial
  probe
  misc_feature (1)..(25): SEQ ID NO: 5495; WAN024FB4; Start 90; Stop 114
cagccttaatgacatccatatcaaa

SEQ ID NO: 412486 - DNA, 25 bp, Artificial
  probe
  misc_feature (1)..(25): SEQ ID NO: 5495; WAN024FB4; Start 28; Stop 52
aatagtcgctgtataagcatcttgg

SEQ ID NO: 412487 - DNA, 25 bp, Artificial
  probe
  misc_feature (1)..(25): SEQ ID NO: 5495; WAN024FB4; Start 174; Stop 198
ctttgccatcaagacctactgtatc

SEQ ID NO: 412488 - DNA, 25 bp, Artificial
  probe
  misc_feature (1)..(25): SEQ ID NO: 5495; WAN024FB4; Start 51; Stop 75
ggttggtgatgataacaggagtttc

SEQ ID NO: 412489 - DNA, 25 bp, Artificial
  probe
  misc_feature (1)..(25): SEQ ID NO: 5495; WAN024FB4; Start 176; Stop 200
ttgccatcaagacctactgtatcca

SEQ ID NO: 412490 - DNA, 25 bp, Artificial
  probe
  misc_feature (1)..(25): SEQ ID NO: 5495; WAN024FB4; Start 53; Stop 77
ttggtgatgataacaggagtttctg

SEQ ID NO: 412491 - DNA, 25 bp, Artificial
  probe
  misc_feature (1)..(25): SEQ ID NO: 5495; WAN024FB4; Start 199; Stop 223
cataccgatgtggatgagcaattca

SEQ ID NO: 412492 - DNA, 25 bp, Artificial
  probe
  misc_feature (1)..(25): SEQ ID NO: 5495; WAN024FB4; Start 137; Stop 161
gtaacgtgatctccttggactacaa

SEQ ID NO: 412493 - DNA, 25 bp, Artificial
  probe
  misc_feature (1)..(25): SEQ ID NO: 5495; WAN024FB4; Start 29; Stop 53
atagtcgctgtataagcatcttggt

SEQ ID NO: 412494 - DNA, 25 bp, Artificial
  probe
  misc_feature (1)..(25): SEQ ID NO: 5495; WAN024FB4; Start 30; Stop 54
tagtcgctgtataagcatcttggtt

SEQ ID NO: 412495 - DNA, 25 bp, Artificial
  probe
  misc_feature (1)..(25): SEQ ID NO: 5495; WAN024FB4; Start 135; Stop 159
ctgtaacgtgatctccttggactac

SEQ ID NO: 412496 - DNA, 25 bp, Artificial
  probe
  misc_feature (1)..(25): SEQ ID NO: 5495; WAN024FB4; Start 50; Stop 74
tggttggtgatgataacaggagttt

SEQ ID NO: 412497 - DNA, 25 bp, Artificial
  probe
  misc_feature (1)..(25): SEQ ID NO: 5495; WAN024FB4; Start 88; Stop 112
tgcagccttaatgacatccatatca

SEQ ID NO: 412498 - DNA, 25 bp, Artificial
  probe
  misc_feature (1)..(25): SEQ ID NO: 5495; WAN024FB4; Start 40; Stop 64
ataagcatcttggttggtgatgata

SEQ ID NO: 412499 - DNA, 25 bp, Artificial
  probe
  misc_feature (1)..(25): SEQ ID NO: 5495; WAN024FB4; Start 39; Stop 63
tataagcatcttggttggtgatgat

SEQ ID NO: 412500 - DNA, 25 bp, Artificial
  probe
  misc_feature (1)..(25): SEQ ID NO: 5496; WAN024GK3; Start 145; Stop 169
aagagtcttgttatctgctgccatt

SEQ ID NO: 412501 - DNA, 25 bp, Artificial
  probe
  misc_feature (1)..(25): SEQ ID NO: 5496; WAN024GK3; Start 146; Stop 170
agagtcttgttatctgctgccattg

SEQ ID NO: 412502 - DNA, 25 bp, Artificial
  probe
  misc_feature (1)..(25): SEQ ID NO: 5496; WAN024GK3; Start 64; Stop 88
gttcttgtcgatgtcaaatgttact

SEQ ID NO: 412503 - DNA, 25 bp, Artificial
  probe
  misc_feature (1)..(25): SEQ ID NO: 5496; WAN024GK3; Start 46; Stop 70
cttaacagacacgataccgttcttg

SEQ ID NO: 412504 - DNA, 25 bp, Artificial
  probe
  misc_feature (1)..(25): SEQ ID NO: 5496; WAN024GK3; Start 66; Stop 90
tcttgtcgatgtcaaatgttacttc

SEQ ID NO: 412505 - DNA, 25 bp, Artificial
  probe
  misc_feature (1)..(25): SEQ ID NO: 5496; WAN024GK3; Start 65; Stop 89
ttcttgtcgatgtcaaatgttactt

SEQ ID NO: 412506 - DNA, 25 bp, Artificial
  probe
  misc_feature (1)..(25): SEQ ID NO: 5496; WAN024GK3; Start 63; Stop 87
cgttcttgtcgatgtcaaatgttac

SEQ ID NO: 412507 - DNA, 25 bp, Artificial
  probe
  misc_feature (1)..(25): SEQ ID NO: 5496; WAN024GK3; Start 147; Stop 171
gagtcttgttatctgctgccattgg

SEQ ID NO: 412508 - DNA, 25 bp, Artificial
  probe
  misc_feature (1)..(25): SEQ ID NO: 5496; WAN024GK3; Start 58; Stop 82
gataccgttcttgtcgatgtcaaat

SEQ ID NO: 412509 - DNA, 25 bp, Artificial
  probe
  misc_feature (1)..(25): SEQ ID NO: 5496; WAN024GK3; Start 47; Stop 71
ttaacagacacgataccgttcttgt

SEQ ID NO: 412510 - DNA, 25 bp, Artificial
  probe
  misc_feature (1)..(25): SEQ ID NO: 5496; WAN024GK3; Start 59; Stop 83
ataccgttcttgtcgatgtcaaatg

SEQ ID NO: 412511 - DNA, 25 bp, Artificial
  probe
  misc_feature (1)..(25): SEQ ID NO: 5496; WAN024GK3; Start 62; Stop 86
ccgttcttgtcgatgtcaaatgtta

SEQ ID NO: 412512 - DNA, 25 bp, Artificial
  probe
  misc_feature (1)..(25): SEQ ID NO: 5496; WAN024GK3; Start 45; Stop 69
ccttaacagacacgataccgttctt

SEQ ID NO: 412513 - DNA, 25 bp, Artificial
  probe
  misc_feature (1)..(25): SEQ ID NO: 5496; WAN024GK3; Start 177; Stop 201
caccttgaagaacgtggatatcaac

SEQ ID NO: 412514 - DNA, 25 bp, Artificial
  probe
  misc_feature (1)..(25): SEQ ID NO: 5496; WAN024GK3; Start 176; Stop 200
tcaccttgaagaacgtggatatcaa

SEQ ID NO: 412515 - DNA, 25 bp, Artificial
  probe
  misc_feature (1)..(25): SEQ ID NO: 5496; WAN024GK3; Start 175; Stop 199
ttcaccttgaagaacgtggatatca

SEQ ID NO: 412516 - DNA, 25 bp, Artificial
  probe
  misc_feature (1)..(25): SEQ ID NO: 5496; WAN024GK3; Start 67; Stop 91
cttgtcgatgtcaaatgttacttcg

SEQ ID NO: 412517 - DNA, 25 bp, Artificial
  probe
  misc_feature (1)..(25): SEQ ID NO: 5496; WAN024GK3; Start 60; Stop 84
taccgttcttgtcgatgtcaaatgt

SEQ ID NO: 412518 - DNA, 25 bp, Artificial
  probe
  misc_feature (1)..(25): SEQ ID NO: 5496; WAN024GK3; Start 79; Stop 103
aaatgttacttcgatttgaggaatt

SEQ ID NO: 412519 - DNA, 25 bp, Artificial
  probe
  misc_feature (1)..(25): SEQ ID NO: 5496; WAN024GK3; Start 80; Stop 104
aatgttacttcgatttgaggaattc

SEQ ID NO: 412520 - DNA, 25 bp, Artificial
  probe
  misc_feature (1)..(25): SEQ ID NO: 5496; WAN024GK3; Start 174; Stop 198
gttcaccttgaagaacgtggatatc

SEQ ID NO: 412521 - DNA, 25 bp, Artificial
  probe
  misc_feature (1)..(25): SEQ ID NO: 5496; WAN024GK3; Start 61; Stop 85
accgttcttgtcgatgtcaaatgtt

SEQ ID NO: 412522 - DNA, 25 bp, Artificial
  probe
  misc_feature (1)..(25): SEQ ID NO: 5496; WAN024GK3; Start 178; Stop 202
accttgaagaacgtggatatcaacg

SEQ ID NO: 412523 - DNA, 25 bp, Artificial
  probe
  misc_feature (1)..(25): SEQ ID NO: 5496; WAN024GK3; Start 136; Stop 160
gaagcgtccaagagtcttgttatct

SEQ ID NO: 412524 - DNA, 25 bp, Artificial
  probe
  misc_feature (1)..(25): SEQ ID NO: 5496; WAN024GK3; Start 48; Stop 72
taacagacacgataccgttcttgtc

SEQ ID NO: 412525 - DNA, 25 bp, Artificial
  probe
  misc_feature (1)..(25): SEQ ID NO: 5496; WAN024GK3; Start 137; Stop 161
aagcgtccaagagtcttgttatctg

SEQ ID NO: 412526 - DNA, 25 bp, Artificial
  probe
  misc_feature (1)..(25): SEQ ID NO: 5496; WAN024GK3; Start 38; Stop 62
tctttggccttaacagacacgatac

SEQ ID NO: 412527 - DNA, 25 bp, Artificial
  probe
  misc_feature (1)..(25): SEQ ID NO: 5496; WAN024GK3; Start 115; Stop 139
agctgggatatcagtcaattggaag

SEQ ID NO: 412528 - DNA, 25 bp, Artificial
  probe
  misc_feature (1)..(25): SEQ ID NO: 5496; WAN024GK3; Start 120; Stop 144
ggatatcagtcaattggaagcgtcc

SEQ ID NO: 412529 - DNA, 25 bp, Artificial
  probe
  misc_feature (1)..(25): SEQ ID NO: 5496; WAN024GK3; Start 144; Stop 168
caagagtcttgttatctgctgccat

SEQ ID NO: 412530 - DNA, 25 bp, Artificial
  probe
  misc_feature (1)..(25): SEQ ID NO: 5496; WAN024GK3; Start 179; Stop 203
ccttgaagaacgtggatatcaacgg

SEQ ID NO: 412531 - DNA, 25 bp, Artificial
  probe
  misc_feature (1)..(25): SEQ ID NO: 5496; WAN024GK3; Start 44; Stop 68
gccttaacagacacgataccgttct

SEQ ID NO: 412532 - DNA, 25 bp, Artificial
  probe
  misc_feature (1)..(25): SEQ ID NO: 5496; WAN024GK3; Start 140; Stop 164
cgtccaagagtcttgttatctgctg

SEQ ID NO: 412533 - DNA, 25 bp, Artificial
  probe
  misc_feature (1)..(25): SEQ ID NO: 5497; WAN024FJZ; Start 94; Stop 118
cctaactcgctctctcatttcaaag

SEQ ID NO: 412534 - DNA, 25 bp, Artificial
  probe
  misc_feature (1)..(25): SEQ ID NO: 5497; WAN024FJZ; Start 244; Stop 268
gcgtttgatagctgttgttacttta

SEQ ID NO: 412535 - DNA, 25 bp, Artificial
  probe
  misc_feature (1)..(25): SEQ ID NO: 5497; WAN024FJZ; Start 246; Stop 270
gtttgatagctgttgttactttacg

SEQ ID NO: 412536 - DNA, 25 bp, Artificial
  probe
  misc_feature (1)..(25): SEQ ID NO: 5497; WAN024FJZ; Start 245; Stop 269
cgtttgatagctgttgttactttac

SEQ ID NO: 412537 - DNA, 25 bp, Artificial
  probe
  misc_feature (1)..(25): SEQ ID NO: 5497; WAN024FJZ; Start 250; Stop 274
gatagctgttgttactttacgttgg

SEQ ID NO: 412538 - DNA, 25 bp, Artificial
  probe
  misc_feature (1)..(25): SEQ ID NO: 5497; WAN024FJZ; Start 249; Stop 273
tgatagctgttgttactttacgttg

SEQ ID NO: 412539 - DNA, 25 bp, Artificial
  probe
  misc_feature (1)..(25): SEQ ID NO: 5497; WAN024FJZ; Start 251; Stop 275
atagctgttgttactttacgttggt

SEQ ID NO: 412540 - DNA, 25 bp, Artificial
  probe
  misc_feature (1)..(25): SEQ ID NO: 5497; WAN024FJZ; Start 252; Stop 276
tagctgttgttactttacgttggtt

SEQ ID NO: 412541 - DNA, 25 bp, Artificial
  probe
  misc_feature (1)..(25): SEQ ID NO: 5497; WAN024FJZ; Start 248; Stop 272
ttgatagctgttgttactttacgtt

SEQ ID NO: 412542 - DNA, 25 bp, Artificial
  probe
  misc_feature (1)..(25): SEQ ID NO: 5497; WAN024FJZ; Start 247; Stop 271
tttgatagctgttgttactttacgt

SEQ ID NO: 412543 - DNA, 25 bp, Artificial
  probe
  misc_feature (1)..(25): SEQ ID NO: 5497; WAN024FJZ; Start 253; Stop 277
agctgttgttactttacgttggttt

SEQ ID NO: 412544 - DNA, 25 bp, Artificial
  probe
  misc_feature (1)..(25): SEQ ID NO: 5497; WAN024FJZ; Start 38; Stop 62
atcgtgcttttaatgtgttctcttg

SEQ ID NO: 412545 - DNA, 25 bp, Artificial
  probe
  misc_feature (1)..(25): SEQ ID NO: 5497; WAN024FJZ; Start 141; Stop 165
ggtcttaattcgctttcttgttttc

SEQ ID NO: 412546 - DNA, 25 bp, Artificial
  probe
  misc_feature (1)..(25): SEQ ID NO: 5497; WAN024FJZ; Start 140; Stop 164
gggtcttaattcgctttcttgtttt

SEQ ID NO: 412547 - DNA, 25 bp, Artificial
  probe
  misc_feature (1)..(25): SEQ ID NO: 5497; WAN024FJZ; Start 40; Stop 64
cgtgcttttaatgtgttctcttgtt

SEQ ID NO: 412548 - DNA, 25 bp, Artificial
  probe
  misc_feature (1)..(25): SEQ ID NO: 5497; WAN024FJZ; Start 37; Stop 61
catcgtgcttttaatgtgttctctt

SEQ ID NO: 412549 - DNA, 25 bp, Artificial
  probe
  misc_feature (1)..(25): SEQ ID NO: 5497; WAN024FJZ; Start 41; Stop 65
gtgcttttaatgtgttctcttgttt

SEQ ID NO: 412550 - DNA, 25 bp, Artificial
  probe
  misc_feature (1)..(25): SEQ ID NO: 5497; WAN024FJZ; Start 142; Stop 166
gtcttaattcgctttcttgttttca

SEQ ID NO: 412551 - DNA, 25 bp, Artificial
  probe
  misc_feature (1)..(25): SEQ ID NO: 5497; WAN024FJZ; Start 39; Stop 63
tcgtgcttttaatgtgttctcttgt

SEQ ID NO: 412552 - DNA, 25 bp, Artificial
  probe
  misc_feature (1)..(25): SEQ ID NO: 5497; WAN024FJZ; Start 95; Stop 119
ctaactcgctctctcatttcaaagc

SEQ ID NO: 412553 - DNA, 25 bp, Artificial
  probe
  misc_feature (1)..(25): SEQ ID NO: 5497; WAN024FJZ; Start 42; Stop 66
tgcttttaatgtgttctcttgtttt

SEQ ID NO: 412554 - DNA, 25 bp, Artificial
  probe
  misc_feature (1)..(25): SEQ ID NO: 5497; WAN024FJZ; Start 52; Stop 76
gtgttctcttgttttcaaactcgta

SEQ ID NO: 412555 - DNA, 25 bp, Artificial
  probe
  misc_feature (1)..(25): SEQ ID NO: 5497; WAN024FJZ; Start 50; Stop 74
atgtgttctcttgttttcaaactcg

SEQ ID NO: 412556 - DNA, 25 bp, Artificial
  probe
  misc_feature (1)..(25): SEQ ID NO: 5497; WAN024FJZ; Start 53; Stop 77
tgttctcttgttttcaaactcgtaa

SEQ ID NO: 412557 - DNA, 25 bp, Artificial
  probe
  misc_feature (1)..(25): SEQ ID NO: 5497; WAN024FJZ; Start 36; Stop 60
ccatcgtgcttttaatgtgttctct

SEQ ID NO: 412558 - DNA, 25 bp, Artificial
  probe
  misc_feature (1)..(25): SEQ ID NO: 5497; WAN024FJZ; Start 35; Stop 59
tccatcgtgcttttaatgtgttctc

SEQ ID NO: 412559 - DNA, 25 bp, Artificial
  probe
  misc_feature (1)..(25): SEQ ID NO: 5497; WAN024FJZ; Start 34; Stop 58
ctccatcgtgcttttaatgtgttct

SEQ ID NO: 412560 - DNA, 25 bp, Artificial
  probe
  misc_feature (1)..(25): SEQ ID NO: 5497; WAN024FJZ; Start 139; Stop 163
ggggtcttaattcgctttcttgttt

SEQ ID NO: 412561 - DNA, 25 bp, Artificial
  probe
  misc_feature (1)..(25): SEQ ID NO: 5497; WAN024FJZ; Start 43; Stop 67
gcttttaatgtgttctcttgttttc

SEQ ID NO: 412562 - DNA, 25 bp, Artificial
  probe
  misc_feature (1)..(25): SEQ ID NO: 5497; WAN024FJZ; Start 49; Stop 73
aatgtgttctcttgttttcaaactc

SEQ ID NO: 412563 - DNA, 25 bp, Artificial
  probe
  misc_feature (1)..(25): SEQ ID NO: 5497; WAN024FJZ; Start 143; Stop 167
tcttaattcgctttcttgttttcaa

SEQ ID NO: 412564 - DNA, 25 bp, Artificial
  probe
  misc_feature (1)..(25): SEQ ID NO: 5497; WAN024FJZ; Start 54; Stop 78
gttctcttgttttcaaactcgtaaa

SEQ ID NO: 412565 - DNA, 25 bp, Artificial
  probe
  misc_feature (1)..(25): SEQ ID NO: 5497; WAN024FJZ; Start 51; Stop 75
tgtgttctcttgttttcaaactcgt

SEQ ID NO: 412566 - DNA, 25 bp, Artificial
  probe
  misc_feature (1)..(25): SEQ ID NO: 5498; WAN024CRT; Start 162; Stop 186
ttccatattgaccttctgtctgagg

SEQ ID NO: 412567 - DNA, 25 bp, Artificial
  probe
  misc_feature (1)..(25): SEQ ID NO: 5498; WAN024CRT; Start 47; Stop 71
tggaaatcttcggtgtaagtatgaa

SEQ ID NO: 412568 - DNA, 25 bp, Artificial
  probe
  misc_feature (1)..(25): SEQ ID NO: 5498; WAN024CRT; Start 44; Stop 68
aagtggaaatcttcggtgtaagtat

SEQ ID NO: 412569 - DNA, 25 bp, Artificial
  probe
  misc_feature (1)..(25): SEQ ID NO: 5498; WAN024CRT; Start 46; Stop 70
gtggaaatcttcggtgtaagtatga

SEQ ID NO: 412570 - DNA, 25 bp, Artificial
  probe
  misc_feature (1)..(25): SEQ ID NO: 5498; WAN024CRT; Start 45; Stop 69
agtggaaatcttcggtgtaagtatg

SEQ ID NO: 412571 - DNA, 25 bp, Artificial
  probe
  misc_feature (1)..(25): SEQ ID NO: 5498; WAN024CRT; Start 43; Stop 67
caagtggaaatcttcggtgtaagta

SEQ ID NO: 412572 - DNA, 25 bp, Artificial
  probe
  misc_feature (1)..(25): SEQ ID NO: 5498; WAN024CRT; Start 48; Stop 72
ggaaatcttcggtgtaagtatgaaa

SEQ ID NO: 412573 - DNA, 25 bp, Artificial
  probe
  misc_feature (1)..(25): SEQ ID NO: 5498; WAN024CRT; Start 41; Stop 65
atcaagtggaaatcttcggtgtaag

SEQ ID NO: 412574 - DNA, 25 bp, Artificial
  probe
  misc_feature (1)..(25): SEQ ID NO: 5498; WAN024CRT; Start 40; Stop 64
catcaagtggaaatcttcggtgtaa

SEQ ID NO: 412575 - DNA, 25 bp, Artificial
  probe
  misc_feature (1)..(25): SEQ ID NO: 5498; WAN024CRT; Start 127; Stop 151
tttgaaccagtagtccatcacattt

SEQ ID NO: 412576 - DNA, 25 bp, Artificial
  probe
  misc_feature (1)..(25): SEQ ID NO: 5498; WAN024CRT; Start 24; Stop 48
taactccaatttccttcatcaagtg

SEQ ID NO: 412577 - DNA, 25 bp, Artificial
  probe
  misc_feature (1)..(25): SEQ ID NO: 5498; WAN024CRT; Start 161; Stop 185
tttccatattgaccttctgtctgag

SEQ ID NO: 412578 - DNA, 25 bp, Artificial
  probe
  misc_feature (1)..(25): SEQ ID NO: 5498; WAN024CRT; Start 39; Stop 63
tcatcaagtggaaatcttcggtgta

SEQ ID NO: 412579 - DNA, 25 bp, Artificial
  probe
  misc_feature (1)..(25): SEQ ID NO: 5498; WAN024CRT; Start 23; Stop 47
ttaactccaatttccttcatcaagt

SEQ ID NO: 412580 - DNA, 25 bp, Artificial
  probe
  misc_feature (1)..(25): SEQ ID NO: 5498; WAN024CRT; Start 5; Stop 29
atggaagtgcggaaagaattaactc

SEQ ID NO: 412581 - DNA, 25 bp, Artificial
  probe
  misc_feature (1)..(25): SEQ ID NO: 5498; WAN024CRT; Start 4; Stop 28
gatggaagtgcggaaagaattaact

SEQ ID NO: 412582 - DNA, 25 bp, Artificial
  probe
  misc_feature (1)..(25): SEQ ID NO: 5498; WAN024CRT; Start 42; Stop 66
tcaagtggaaatcttcggtgtaagt

SEQ ID NO: 412583 - DNA, 25 bp, Artificial
  probe
  misc_feature (1)..(25): SEQ ID NO: 5498; WAN024CRT; Start 37; Stop 61
cttcatcaagtggaaatcttcggtg

SEQ ID NO: 412584 - DNA, 25 bp, Artificial
  probe
  misc_feature (1)..(25): SEQ ID NO: 5498; WAN024CRT; Start 11; Stop 35
gtgcggaaagaattaactccaattt

SEQ ID NO: 412585 - DNA, 25 bp, Artificial
  probe
  misc_feature (1)..(25): SEQ ID NO: 5498; WAN024CRT; Start 3; Stop 27
ggatggaagtgcggaaagaattaac

SEQ ID NO: 412586 - DNA, 25 bp, Artificial
  probe
  misc_feature (1)..(25): SEQ ID NO: 5498; WAN024CRT; Start 10; Stop 34
agtgcggaaagaattaactccaatt

SEQ ID NO: 412587 - DNA, 25 bp, Artificial
  probe
  misc_feature (1)..(25): SEQ ID NO: 5498; WAN024CRT; Start 9; Stop 33
aagtgcggaaagaattaactccaat

SEQ ID NO: 412588 - DNA, 25 bp, Artificial
  probe
  misc_feature (1)..(25): SEQ ID NO: 5498; WAN024CRT; Start 81; Stop 105
tggctacaagaggtccgacattatc

SEQ ID NO: 412589 - DNA, 25 bp, Artificial
  probe
  misc_feature (1)..(25): SEQ ID NO: 5498; WAN024CRT; Start 80; Stop 104
ctggctacaagaggtccgacattat

SEQ ID NO: 412590 - DNA, 25 bp, Artificial
  probe
  misc_feature (1)..(25): SEQ ID NO: 5498; WAN024CRT; Start 38; Stop 62
ttcatcaagtggaaatcttcggtgt

SEQ ID NO: 412591 - DNA, 25 bp, Artificial
  probe
  misc_feature (1)..(25): SEQ ID NO: 5498; WAN024CRT; Start 22; Stop 46
attaactccaatttccttcatcaag

SEQ ID NO: 412592 - DNA, 25 bp, Artificial
  probe
  misc_feature (1)..(25): SEQ ID NO: 5498; WAN024CRT; Start 2; Stop 26
tggatggaagtgcggaaagaattaa

SEQ ID NO: 412593 - DNA, 25 bp, Artificial
  probe
  misc_feature (1)..(25): SEQ ID NO: 5498; WAN024CRT; Start 1; Stop 25
ttggatggaagtgcggaaagaatta

SEQ ID NO: 412594 - DNA, 25 bp, Artificial
  probe
  misc_feature (1)..(25): SEQ ID NO: 5498; WAN024CRT; Start 25; Stop 49
aactccaatttccttcatcaagtgg

SEQ ID NO: 412595 - DNA, 25 bp, Artificial
  probe
  misc_feature (1)..(25): SEQ ID NO: 5498; WAN024CRT; Start 12; Stop 36
tgcggaaagaattaactccaatttc

SEQ ID NO: 412596 - DNA, 25 bp, Artificial
  probe
  misc_feature (1)..(25): SEQ ID NO: 5498; WAN024CRT; Start 8; Stop 32
gaagtgcggaaagaattaactccaa

SEQ ID NO: 412597 - DNA, 25 bp, Artificial
  probe
  misc_feature (1)..(25): SEQ ID NO: 5498; WAN024CRT; Start 20; Stop 44
gaattaactccaatttccttcatca

SEQ ID NO: 412598 - DNA, 25 bp, Artificial
  probe
  misc_feature (1)..(25): SEQ ID NO: 5498; WAN024CRT; Start 36; Stop 60
ccttcatcaagtggaaatcttcggt

SEQ ID NO: 412599 - DNA, 25 bp, Artificial
  probe
  misc_feature (1)..(25): SEQ ID NO: 5499; WAN024GM4; Start 80; Stop 104
aatgcttggtattgaaggtttactt

SEQ ID NO: 412600 - DNA, 25 bp, Artificial
  probe
  misc_feature (1)..(25): SEQ ID NO: 5499; WAN024GM4; Start 79; Stop 103
caatgcttggtattgaaggtttact

SEQ ID NO: 412601 - DNA, 25 bp, Artificial
  probe
  misc_feature (1)..(25): SEQ ID NO: 5499; WAN024GM4; Start 132; Stop 156
cgatttctttgattgcattccagtc

SEQ ID NO: 412602 - DNA, 25 bp, Artificial
  probe
  misc_feature (1)..(25): SEQ ID NO: 5499; WAN024GM4; Start 136; Stop 160
ttctttgattgcattccagtcattt

SEQ ID NO: 412603 - DNA, 25 bp, Artificial
  probe
  misc_feature (1)..(25): SEQ ID NO: 5499; WAN024GM4; Start 135; Stop 159
tttctttgattgcattccagtcatt

SEQ ID NO: 412604 - DNA, 25 bp, Artificial
  probe
  misc_feature (1)..(25): SEQ ID NO: 5499; WAN024GM4; Start 134; Stop 158
atttctttgattgcattccagtcat

SEQ ID NO: 412605 - DNA, 25 bp, Artificial
  probe
  misc_feature (1)..(25): SEQ ID NO: 5499; WAN024GM4; Start 133; Stop 157
gatttctttgattgcattccagtca

SEQ ID NO: 412606 - DNA, 25 bp, Artificial
  probe
  misc_feature (1)..(25): SEQ ID NO: 5499; WAN024GM4; Start 141; Stop 165
tgattgcattccagtcatttacttt

SEQ ID NO: 412607 - DNA, 25 bp, Artificial
  probe
  misc_feature (1)..(25): SEQ ID NO: 5499; WAN024GM4; Start 140; Stop 164
ttgattgcattccagtcatttactt

SEQ ID NO: 412608 - DNA, 25 bp, Artificial
  probe
  misc_feature (1)..(25): SEQ ID NO: 5499; WAN024GM4; Start 139; Stop 163
tttgattgcattccagtcatttact

SEQ ID NO: 412609 - DNA, 25 bp, Artificial
  probe
  misc_feature (1)..(25): SEQ ID NO: 5499; WAN024GM4; Start 131; Stop 155
tcgatttctttgattgcattccagt

SEQ ID NO: 412610 - DNA, 25 bp, Artificial
  probe
  misc_feature (1)..(25): SEQ ID NO: 5499; WAN024GM4; Start 138; Stop 162
ctttgattgcattccagtcatttac

SEQ ID NO: 412611 - DNA, 25 bp, Artificial
  probe
  misc_feature (1)..(25): SEQ ID NO: 5499; WAN024GM4; Start 137; Stop 161
tctttgattgcattccagtcattta

SEQ ID NO: 412612 - DNA, 25 bp, Artificial
  probe
  misc_feature (1)..(25): SEQ ID NO: 5499; WAN024GM4; Start 78; Stop 102
gcaatgcttggtattgaaggtttac

SEQ ID NO: 412613 - DNA, 25 bp, Artificial
  probe
  misc_feature (1)..(25): SEQ ID NO: 5499; WAN024GM4; Start 1; Stop 25
ttggattgcttctttcacgttcatc

SEQ ID NO: 412614 - DNA, 25 bp, Artificial
  probe
  misc_feature (1)..(25): SEQ ID NO: 5499; WAN024GM4; Start 173; Stop 197
atcaagtagtctgcaccgtaaagag

SEQ ID NO: 412615 - DNA, 25 bp, Artificial
  probe
  misc_feature (1)..(25): SEQ ID NO: 5499; WAN024GM4; Start 82; Stop 106
tgcttggtattgaaggtttacttct

SEQ ID NO: 412616 - DNA, 25 bp, Artificial
  probe
  misc_feature (1)..(25): SEQ ID NO: 5499; WAN024GM4; Start 83; Stop 107
gcttggtattgaaggtttacttctt

SEQ ID NO: 412617 - DNA, 25 bp, Artificial
  probe
  misc_feature (1)..(25): SEQ ID NO: 5499; WAN024GM4; Start 81; Stop 105
atgcttggtattgaaggtttacttc

SEQ ID NO: 412618 - DNA, 25 bp, Artificial
  probe
  misc_feature (1)..(25): SEQ ID NO: 5499; WAN024GM4; Start 172; Stop 196
catcaagtagtctgcaccgtaaaga

SEQ ID NO: 412619 - DNA, 25 bp, Artificial
  probe
  misc_feature (1)..(25): SEQ ID NO: 5499; WAN024GM4; Start 100; Stop 124
tacttcttcacgaagacggattgtt

SEQ ID NO: 412620 - DNA, 25 bp, Artificial
  probe
  misc_feature (1)..(25): SEQ ID NO: 5499; WAN024GM4; Start 99; Stop 123
ttacttcttcacgaagacggattgt

SEQ ID NO: 412621 - DNA, 25 bp, Artificial
  probe
  misc_feature (1)..(25): SEQ ID NO: 5499; WAN024GM4; Start 77; Stop 101
tgcaatgcttggtattgaaggttta

SEQ ID NO: 412622 - DNA, 25 bp, Artificial
  probe
  misc_feature (1)..(25): SEQ ID NO: 5499; WAN024GM4; Start 116; Stop 140
cggattgtttcttcatcgatttctt

SEQ ID NO: 412623 - DNA, 25 bp, Artificial
  probe
  misc_feature (1)..(25): SEQ ID NO: 5499; WAN024GM4; Start 130; Stop 154
atcgatttctttgattgcattccag

SEQ ID NO: 412624 - DNA, 25 bp, Artificial
  probe
  misc_feature (1)..(25): SEQ ID NO: 5499; WAN024GM4; Start 129; Stop 153
catcgatttctttgattgcattcca

SEQ ID NO: 412625 - DNA, 25 bp, Artificial
  probe
  misc_feature (1)..(25): SEQ ID NO: 5499; WAN024GM4; Start 114; Stop 138
gacggattgtttcttcatcgatttc

SEQ ID NO: 412626 - DNA, 25 bp, Artificial
  probe
  misc_feature (1)..(25): SEQ ID NO: 5499; WAN024GM4; Start 115; Stop 139
acggattgtttcttcatcgatttct

SEQ ID NO: 412627 - DNA, 25 bp, Artificial
  probe
  misc_feature (1)..(25): SEQ ID NO: 5499; WAN024GM4; Start 84; Stop 108
cttggtattgaaggtttacttcttc

SEQ ID NO: 412628 - DNA, 25 bp, Artificial
  probe
  misc_feature (1)..(25): SEQ ID NO: 5499; WAN024GM4; Start 124; Stop 148
ttcttcatcgatttctttgattgca

SEQ ID NO: 412629 - DNA, 25 bp, Artificial
  probe
  misc_feature (1)..(25): SEQ ID NO: 5499; WAN024GM4; Start 125; Stop 149
tcttcatcgatttctttgattgcat

SEQ ID NO: 412630 - DNA, 25 bp, Artificial
  probe
  misc_feature (1)..(25): SEQ ID NO: 5499; WAN024GM4; Start 128; Stop 152
tcatcgatttctttgattgcattcc

SEQ ID NO: 412631 - DNA, 25 bp, Artificial
  probe
  misc_feature (1)..(25): SEQ ID NO: 5499; WAN024GM4; Start 113; Stop 137
agacggattgtttcttcatcgattt

SEQ ID NO: 412632 - DNA, 25 bp, Artificial
  probe
  misc_feature (1)..(25): SEQ ID NO: 5500; WAN024GE8; Start 241; Stop 265
attgtcctatcttcagaagtctgtg

SEQ ID NO: 412633 - DNA, 25 bp, Artificial
  probe
  misc_feature (1)..(25): SEQ ID NO: 5500; WAN024GE8; Start 240; Stop 264
gattgtcctatcttcagaagtctgt

SEQ ID NO: 412634 - DNA, 25 bp, Artificial
  probe
  misc_feature (1)..(25): SEQ ID NO: 5500; WAN024GE8; Start 200; Stop 224
ttcaactcttctttctctacttcgg

SEQ ID NO: 412635 - DNA, 25 bp, Artificial
  probe
  misc_feature (1)..(25): SEQ ID NO: 5500; WAN024GE8; Start 205; Stop 229
ctcttctttctctacttcggtcttc

SEQ ID NO: 412636 - DNA, 25 bp, Artificial
  probe
  misc_feature (1)..(25): SEQ ID NO: 5500; WAN024GE8; Start 95; Stop 119
ttctgctcggtttaatcgttagtat

SEQ ID NO: 412637 - DNA, 25 bp, Artificial
  probe
  misc_feature (1)..(25): SEQ ID NO: 5500; WAN024GE8; Start 99; Stop 123
gctcggtttaatcgttagtatcatc

SEQ ID NO: 412638 - DNA, 25 bp, Artificial
  probe
  misc_feature (1)..(25): SEQ ID NO: 5500; WAN024GE8; Start 98; Stop 122
tgctcggtttaatcgttagtatcat

SEQ ID NO: 412639 - DNA, 25 bp, Artificial
  probe
  misc_feature (1)..(25): SEQ ID NO: 5500; WAN024GE8; Start 94; Stop 118
tttctgctcggtttaatcgttagta

SEQ ID NO: 412640 - DNA, 25 bp, Artificial
  probe
  misc_feature (1)..(25): SEQ ID NO: 5500; WAN024GE8; Start 96; Stop 120
tctgctcggtttaatcgttagtatc

SEQ ID NO: 412641 - DNA, 25 bp, Artificial
  probe
  misc_feature (1)..(25): SEQ ID NO: 5500; WAN024GE8; Start 239; Stop 263
ggattgtcctatcttcagaagtctg

SEQ ID NO: 412642 - DNA, 25 bp, Artificial
  probe
  misc_feature (1)..(25): SEQ ID NO: 5500; WAN024GE8; Start 204; Stop 228
actcttctttctctacttcggtctt

SEQ ID NO: 412643 - DNA, 25 bp, Artificial
  probe
  misc_feature (1)..(25): SEQ ID NO: 5500; WAN024GE8; Start 203; Stop 227
aactcttctttctctacttcggtct

SEQ ID NO: 412644 - DNA, 25 bp, Artificial
  probe
  misc_feature (1)..(25): SEQ ID NO: 5500; WAN024GE8; Start 202; Stop 226
caactcttctttctctacttcggtc

SEQ ID NO: 412645 - DNA, 25 bp, Artificial
  probe
  misc_feature (1)..(25): SEQ ID NO: 5500; WAN024GE8; Start 100; Stop 124
ctcggtttaatcgttagtatcatcc

SEQ ID NO: 412646 - DNA, 25 bp, Artificial
  probe
  misc_feature (1)..(25): SEQ ID NO: 5500; WAN024GE8; Start 97; Stop 121
ctgctcggtttaatcgttagtatca

SEQ ID NO: 412647 - DNA, 25 bp, Artificial
  probe
  misc_feature (1)..(25): SEQ ID NO: 5500; WAN024GE8; Start 297; Stop 321
ctatatggcagaatctttccgaagt

SEQ ID NO: 412648 - DNA, 25 bp, Artificial
  probe
  misc_feature (1)..(25): SEQ ID NO: 5500; WAN024GE8; Start 201; Stop 225
tcaactcttctttctctacttcggt

SEQ ID NO: 412649 - DNA, 25 bp, Artificial
  probe
  misc_feature (1)..(25): SEQ ID NO: 5500; WAN024GE8; Start 298; Stop 322
tatatggcagaatctttccgaagtg

SEQ ID NO: 412650 - DNA, 25 bp, Artificial
  probe
  misc_feature (1)..(25): SEQ ID NO: 5500; WAN024GE8; Start 521; Stop 545
aggatttgattggtctctactatga

SEQ ID NO: 412651 - DNA, 25 bp, Artificial
  probe
  misc_feature (1)..(25): SEQ ID NO: 5500; WAN024GE8; Start 199; Stop 223
attcaactcttctttctctacttcg

SEQ ID NO: 412652 - DNA, 25 bp, Artificial
  probe
  misc_feature (1)..(25): SEQ ID NO: 5500; WAN024GE8; Start 296; Stop 320
cctatatggcagaatctttccgaag

SEQ ID NO: 412653 - DNA, 25 bp, Artificial
  probe
  misc_feature (1)..(25): SEQ ID NO: 5500; WAN024GE8; Start 206; Stop 230
tcttctttctctacttcggtcttcc

SEQ ID NO: 412654 - DNA, 25 bp, Artificial
  probe
  misc_feature (1)..(25): SEQ ID NO: 5500; WAN024GE8; Start 110; Stop 134
tcgttagtatcatccgacattatcg

SEQ ID NO: 412655 - DNA, 25 bp, Artificial
  probe
  misc_feature (1)..(25): SEQ ID NO: 5500; WAN024GE8; Start 93; Stop 117
ctttctgctcggtttaatcgttagt

SEQ ID NO: 412656 - DNA, 25 bp, Artificial
  probe
  misc_feature (1)..(25): SEQ ID NO: 5500; WAN024GE8; Start 295; Stop 319
tcctatatggcagaatctttccgaa

SEQ ID NO: 412657 - DNA, 25 bp, Artificial
  probe
  misc_feature (1)..(25): SEQ ID NO: 5500; WAN024GE8; Start 163; Stop 187
gcctacattgaattgtcacgtaata

SEQ ID NO: 412658 - DNA, 25 bp, Artificial
  probe
  misc_feature (1)..(25): SEQ ID NO: 5500; WAN024GE8; Start 162; Stop 186
agcctacattgaattgtcacgtaat

SEQ ID NO: 412659 - DNA, 25 bp, Artificial
  probe
  misc_feature (1)..(25): SEQ ID NO: 5500; WAN024GE8; Start 520; Stop 544
aaggatttgattggtctctactatg

SEQ ID NO: 412660 - DNA, 25 bp, Artificial
  probe
  misc_feature (1)..(25): SEQ ID NO: 5500; WAN024GE8; Start 92; Stop 116
cctttctgctcggtttaatcgttag

SEQ ID NO: 412661 - DNA, 25 bp, Artificial
  probe
  misc_feature (1)..(25): SEQ ID NO: 5500; WAN024GE8; Start 242; Stop 266
ttgtcctatcttcagaagtctgtgc

SEQ ID NO: 412662 - DNA, 25 bp, Artificial
  probe
  misc_feature (1)..(25): SEQ ID NO: 5500; WAN024GE8; Start 522; Stop 546
ggatttgattggtctctactatgag

SEQ ID NO: 412663 - DNA, 25 bp, Artificial
  probe
  misc_feature (1)..(25): SEQ ID NO: 5500; WAN024GE8; Start 161; Stop 185
cagcctacattgaattgtcacgtaa

SEQ ID NO: 412664 - DNA, 25 bp, Artificial
  probe
  misc_feature (1)..(25): SEQ ID NO: 5500; WAN024GE8; Start 207; Stop 231
cttctttctctacttcggtcttccc

SEQ ID NO: 412665 - DNA, 25 bp, Artificial
  probe
  misc_feature (1)..(25): SEQ ID NO: 5501; WAN0249QE; Start 61; Stop 85
tctttagtttggtgttgaaaatagt

SEQ ID NO: 412666 - DNA, 25 bp, Artificial
  probe
  misc_feature (1)..(25): SEQ ID NO: 5501; WAN0249QE; Start 83; Stop 107
agtttaacagacttttgacttcttt

SEQ ID NO: 412667 - DNA, 25 bp, Artificial
  probe
  misc_feature (1)..(25): SEQ ID NO: 5501; WAN0249QE; Start 18; Stop 42
aatccatttcctctagtgaaaatcg

SEQ ID NO: 412668 - DNA, 25 bp, Artificial
  probe
  misc_feature (1)..(25): SEQ ID NO: 5501; WAN0249QE; Start 84; Stop 108
gtttaacagacttttgacttctttt

SEQ ID NO: 412669 - DNA, 25 bp, Artificial
  probe
  misc_feature (1)..(25): SEQ ID NO: 5501; WAN0249QE; Start 66; Stop 90
agtttggtgttgaaaatagtttaac

SEQ ID NO: 412670 - DNA, 25 bp, Artificial
  probe
  misc_feature (1)..(25): SEQ ID NO: 5501; WAN0249QE; Start 62; Stop 86
ctttagtttggtgttgaaaatagtt

SEQ ID NO: 412671 - DNA, 25 bp, Artificial
  probe
  misc_feature (1)..(25): SEQ ID NO: 5501; WAN0249QE; Start 11; Stop 35
tgaataaaatccatttcctctagtg

SEQ ID NO: 412672 - DNA, 25 bp, Artificial
  probe
  misc_feature (1)..(25): SEQ ID NO: 5501; WAN0249QE; Start 20; Stop 44
tccatttcctctagtgaaaatcgaa

SEQ ID NO: 412673 - DNA, 25 bp, Artificial
  probe
  misc_feature (1)..(25): SEQ ID NO: 5501; WAN0249QE; Start 19; Stop 43
atccatttcctctagtgaaaatcga

SEQ ID NO: 412674 - DNA, 25 bp, Artificial
  probe
  misc_feature (1)..(25): SEQ ID NO: 5501; WAN0249QE; Start 82; Stop 106
tagtttaacagacttttgacttctt

SEQ ID NO: 412675 - DNA, 25 bp, Artificial
  probe
  misc_feature (1)..(25): SEQ ID NO: 5501; WAN0249QE; Start 12; Stop 36
gaataaaatccatttcctctagtga

SEQ ID NO: 412676 - DNA, 25 bp, Artificial
  probe
  misc_feature (1)..(25): SEQ ID NO: 5501; WAN0249QE; Start 10; Stop 34
ctgaataaaatccatttcctctagt

SEQ ID NO: 412677 - DNA, 25 bp, Artificial
  probe
  misc_feature (1)..(25): SEQ ID NO: 5501; WAN0249QE; Start 9; Stop 33
actgaataaaatccatttcctctag

SEQ ID NO: 412678 - DNA, 25 bp, Artificial
  probe
  misc_feature (1)..(25): SEQ ID NO: 5501; WAN0249QE; Start 21; Stop 45
ccatttcctctagtgaaaatcgaaa

SEQ ID NO: 412679 - DNA, 25 bp, Artificial
  probe
  misc_feature (1)..(25): SEQ ID NO: 5501; WAN0249QE; Start 81; Stop 105
atagtttaacagacttttgacttct

SEQ ID NO: 412680 - DNA, 25 bp, Artificial
  probe
  misc_feature (1)..(25): SEQ ID NO: 5501; WAN0249QE; Start 63; Stop 87
tttagtttggtgttgaaaatagttt

SEQ ID NO: 412681 - DNA, 25 bp, Artificial
  probe
  misc_feature (1)..(25): SEQ ID NO: 5501; WAN0249QE; Start 7; Stop 31
ttactgaataaaatccatttcctct

SEQ ID NO: 412682 - DNA, 25 bp, Artificial
  probe
  misc_feature (1)..(25): SEQ ID NO: 5501; WAN0249QE; Start 22; Stop 46
catttcctctagtgaaaatcgaaaa

SEQ ID NO: 412683 - DNA, 25 bp, Artificial
  probe
  misc_feature (1)..(25): SEQ ID NO: 5501; WAN0249QE; Start 70; Stop 94
tggtgttgaaaatagtttaacagac

SEQ ID NO: 412684 - DNA, 25 bp, Artificial
  probe
  misc_feature (1)..(25): SEQ ID NO: 5501; WAN0249QE; Start 80; Stop 104
aatagtttaacagacttttgacttc

SEQ ID NO: 412685 - DNA, 25 bp, Artificial
  probe
  misc_feature (1)..(25): SEQ ID NO: 5501; WAN0249QE; Start 89; Stop 113
acagacttttgacttcttttatatg

SEQ ID NO: 412686 - DNA, 25 bp, Artificial
  probe
  misc_feature (1)..(25): SEQ ID NO: 5501; WAN0249QE; Start 71; Stop 95
ggtgttgaaaatagtttaacagact

SEQ ID NO: 412687 - DNA, 25 bp, Artificial
  probe
  misc_feature (1)..(25): SEQ ID NO: 5501; WAN0249QE; Start 6; Stop 30
tttactgaataaaatccatttcctc

SEQ ID NO: 412688 - DNA, 25 bp, Artificial
  probe
  misc_feature (1)..(25): SEQ ID NO: 5501; WAN0249QE; Start 64; Stop 88
ttagtttggtgttgaaaatagttta

SEQ ID NO: 412689 - DNA, 25 bp, Artificial
  probe
  misc_feature (1)..(25): SEQ ID NO: 5501; WAN0249QE; Start 90; Stop 114
cagacttttgacttcttttatatga

SEQ ID NO: 412690 - DNA, 25 bp, Artificial
  probe
  misc_feature (1)..(25): SEQ ID NO: 5501; WAN0249QE; Start 65; Stop 89
tagtttggtgttgaaaatagtttaa

SEQ ID NO: 412691 - DNA, 25 bp, Artificial
  probe
  misc_feature (1)..(25): SEQ ID NO: 5501; WAN0249QE; Start 69; Stop 93
ttggtgttgaaaatagtttaacaga

SEQ ID NO: 412692 - DNA, 25 bp, Artificial
  probe
  misc_feature (1)..(25): SEQ ID NO: 5501; WAN0249QE; Start 8; Stop 32
tactgaataaaatccatttcctcta

SEQ ID NO: 412693 - DNA, 25 bp, Artificial
  probe
  misc_feature (1)..(25): SEQ ID NO: 5501; WAN0249QE; Start 85; Stop 109
tttaacagacttttgacttctttta

SEQ ID NO: 412694 - DNA, 25 bp, Artificial
  probe
  misc_feature (1)..(25): SEQ ID NO: 5501; WAN0249QE; Start 79; Stop 103
aaatagtttaacagacttttgactt

SEQ ID NO: 412695 - DNA, 25 bp, Artificial
  probe
  misc_feature (1)..(25): SEQ ID NO: 5501; WAN0249QE; Start 67; Stop 91
gtttggtgttgaaaatagtttaaca

SEQ ID NO: 412696 - DNA, 25 bp, Artificial
  probe
  misc_feature (1)..(25): SEQ ID NO: 5501; WAN0249QE; Start 86; Stop 110
ttaacagacttttgacttcttttat

SEQ ID NO: 412697 - DNA, 25 bp, Artificial
  probe
  misc_feature (1)..(25): SEQ ID NO: 5501; WAN0249QE; Start 76; Stop 100
tgaaaatagtttaacagacttttga

SEQ ID NO: 412698 - DNA, 25 bp, Artificial
  probe
  misc_feature (1)..(25): SEQ ID NO: 5502; WAN024C49; Start 200; Stop 224
aaacttatccgcctcaatttcatct

SEQ ID NO: 412699 - DNA, 25 bp, Artificial
  probe
  misc_feature (1)..(25): SEQ ID NO: 5502; WAN024C49; Start 199; Stop 223
caaacttatccgcctcaatttcatc

SEQ ID NO: 412700 - DNA, 25 bp, Artificial
  probe
  misc_feature (1)..(25): SEQ ID NO: 5502; WAN024C49; Start 201; Stop 225
aacttatccgcctcaatttcatctc

SEQ ID NO: 412701 - DNA, 25 bp, Artificial
  probe
  misc_feature (1)..(25): SEQ ID NO: 5502; WAN024C49; Start 212; Stop 236
ctcaatttcatctctgtgttgctta

SEQ ID NO: 412702 - DNA, 25 bp, Artificial
  probe
  misc_feature (1)..(25): SEQ ID NO: 5502; WAN024C49; Start 129; Stop 153
cgcatctcttgaattaaatcatcca

SEQ ID NO: 412703 - DNA, 25 bp, Artificial
  probe
  misc_feature (1)..(25): SEQ ID NO: 5502; WAN024C49; Start 128; Stop 152
acgcatctcttgaattaaatcatcc

SEQ ID NO: 412704 - DNA, 25 bp, Artificial
  probe
  misc_feature (1)..(25): SEQ ID NO: 5502; WAN024C49; Start 125; Stop 149
ctcacgcatctcttgaattaaatca

SEQ ID NO: 412705 - DNA, 25 bp, Artificial
  probe
  misc_feature (1)..(25): SEQ ID NO: 5502; WAN024C49; Start 124; Stop 148
cctcacgcatctcttgaattaaatc

SEQ ID NO: 412706 - DNA, 25 bp, Artificial
  probe
  misc_feature (1)..(25): SEQ ID NO: 5502; WAN024C49; Start 213; Stop 237
tcaatttcatctctgtgttgcttaa

SEQ ID NO: 412707 - DNA, 25 bp, Artificial
  probe
  misc_feature (1)..(25): SEQ ID NO: 5502; WAN024C49; Start 59; Stop 83
caagggtagtaagatgtcttcagaa

SEQ ID NO: 412708 - DNA, 25 bp, Artificial
  probe
  misc_feature (1)..(25): SEQ ID NO: 5502; WAN024C49; Start 203; Stop 227
cttatccgcctcaatttcatctctg

SEQ ID NO: 412709 - DNA, 25 bp, Artificial
  probe
  misc_feature (1)..(25): SEQ ID NO: 5502; WAN024C49; Start 126; Stop 150
tcacgcatctcttgaattaaatcat

SEQ ID NO: 412710 - DNA, 25 bp, Artificial
  probe
  misc_feature (1)..(25): SEQ ID NO: 5502; WAN024C49; Start 127; Stop 151
cacgcatctcttgaattaaatcatc

SEQ ID NO: 412711 - DNA, 25 bp, Artificial
  probe
  misc_feature (1)..(25): SEQ ID NO: 5502; WAN024C49; Start 60; Stop 84
aagggtagtaagatgtcttcagaag

SEQ ID NO: 412712 - DNA, 25 bp, Artificial
  probe
  misc_feature (1)..(25): SEQ ID NO: 5502; WAN024C49; Start 202; Stop 226
acttatccgcctcaatttcatctct

SEQ ID NO: 412713 - DNA, 25 bp, Artificial
  probe
  misc_feature (1)..(25): SEQ ID NO: 5502; WAN024C49; Start 204; Stop 228
ttatccgcctcaatttcatctctgt

SEQ ID NO: 412714 - DNA, 25 bp, Artificial
  probe
  misc_feature (1)..(25): SEQ ID NO: 5502; WAN024C49; Start 211; Stop 235
cctcaatttcatctctgtgttgctt

SEQ ID NO: 412715 - DNA, 25 bp, Artificial
  probe
  misc_feature (1)..(25): SEQ ID NO: 5502; WAN024C49; Start 183; Stop 207
ttgtattgacgagtcgcaaacttat

SEQ ID NO: 412716 - DNA, 25 bp, Artificial
  probe
  misc_feature (1)..(25): SEQ ID NO: 5502; WAN024C49; Start 130; Stop 154
gcatctcttgaattaaatcatccag

SEQ ID NO: 412717 - DNA, 25 bp, Artificial
  probe
  misc_feature (1)..(25): SEQ ID NO: 5502; WAN024C49; Start 58; Stop 82
gcaagggtagtaagatgtcttcaga

SEQ ID NO: 412718 - DNA, 25 bp, Artificial
  probe
  misc_feature (1)..(25): SEQ ID NO: 5502; WAN024C49; Start 184; Stop 208
tgtattgacgagtcgcaaacttatc

SEQ ID NO: 412719 - DNA, 25 bp, Artificial
  probe
  misc_feature (1)..(25): SEQ ID NO: 5502; WAN024C49; Start 123; Stop 147
gcctcacgcatctcttgaattaaat

SEQ ID NO: 412720 - DNA, 25 bp, Artificial
  probe
  misc_feature (1)..(25): SEQ ID NO: 5502; WAN024C49; Start 121; Stop 145
cagcctcacgcatctcttgaattaa

SEQ ID NO: 412721 - DNA, 25 bp, Artificial
  probe
  misc_feature (1)..(25): SEQ ID NO: 5502; WAN024C49; Start 198; Stop 222
gcaaacttatccgcctcaatttcat

SEQ ID NO: 412722 - DNA, 25 bp, Artificial
  probe
  misc_feature (1)..(25): SEQ ID NO: 5502; WAN024C49; Start 144; Stop 168
aaatcatccagactctgagtttcaa

SEQ ID NO: 412723 - DNA, 25 bp, Artificial
  probe
  misc_feature (1)..(25): SEQ ID NO: 5502; WAN024C49; Start 143; Stop 167
taaatcatccagactctgagtttca

SEQ ID NO: 412724 - DNA, 25 bp, Artificial
  probe
  misc_feature (1)..(25): SEQ ID NO: 5502; WAN024C49; Start 145; Stop 169
aatcatccagactctgagtttcaac

SEQ ID NO: 412725 - DNA, 25 bp, Artificial
  probe
  misc_feature (1)..(25): SEQ ID NO: 5502; WAN024C49; Start 135; Stop 159
tcttgaattaaatcatccagactct

SEQ ID NO: 412726 - DNA, 25 bp, Artificial
  probe
  misc_feature (1)..(25): SEQ ID NO: 5502; WAN024C49; Start 133; Stop 157
tctcttgaattaaatcatccagact

SEQ ID NO: 412727 - DNA, 25 bp, Artificial
  probe
  misc_feature (1)..(25): SEQ ID NO: 5502; WAN024C49; Start 69; Stop 93
aagatgtcttcagaagatggaactt

SEQ ID NO: 412728 - DNA, 25 bp, Artificial
  probe
  misc_feature (1)..(25): SEQ ID NO: 5502; WAN024C49; Start 205; Stop 229
tatccgcctcaatttcatctctgtg

SEQ ID NO: 412729 - DNA, 25 bp, Artificial
  probe
  misc_feature (1)..(25): SEQ ID NO: 5502; WAN024C49; Start 185; Stop 209
gtattgacgagtcgcaaacttatcc

SEQ ID NO: 412730 - DNA, 25 bp, Artificial
  probe
  misc_feature (1)..(25): SEQ ID NO: 5502; WAN024C49; Start 68; Stop 92
taagatgtcttcagaagatggaact

SEQ ID NO: 412731 - DNA, 25 bp, Artificial
  probe
  misc_feature (1)..(25): SEQ ID NO: 5503; WAN024CAC; Start 266; Stop 290
ttcagaggaagtggcaatgtaagtt

SEQ ID NO: 412732 - DNA, 25 bp, Artificial
  probe
  misc_feature (1)..(25): SEQ ID NO: 5503; WAN024CAC; Start 134; Stop 158
tagaactaggctatcaatctgcatg

SEQ ID NO: 412733 - DNA, 25 bp, Artificial
  probe
  misc_feature (1)..(25): SEQ ID NO: 5503; WAN024CAC; Start 133; Stop 157
ctagaactaggctatcaatctgcat

SEQ ID NO: 412734 - DNA, 25 bp, Artificial
  probe
  misc_feature (1)..(25): SEQ ID NO: 5503; WAN024CAC; Start 101; Stop 125
caaagcactccaattcattagactg

SEQ ID NO: 412735 - DNA, 25 bp, Artificial
  probe
  misc_feature (1)..(25): SEQ ID NO: 5503; WAN024CAC; Start 98; Stop 122
ttccaaagcactccaattcattaga

SEQ ID NO: 412736 - DNA, 25 bp, Artificial
  probe
  misc_feature (1)..(25): SEQ ID NO: 5503; WAN024CAC; Start 97; Stop 121
gttccaaagcactccaattcattag

SEQ ID NO: 412737 - DNA, 25 bp, Artificial
  probe
  misc_feature (1)..(25): SEQ ID NO: 5503; WAN024CAC; Start 179; Stop 203
actcgataagtctatatgattgcct

SEQ ID NO: 412738 - DNA, 25 bp, Artificial
  probe
  misc_feature (1)..(25): SEQ ID NO: 5503; WAN024CAC; Start 136; Stop 160
gaactaggctatcaatctgcatgtt

SEQ ID NO: 412739 - DNA, 25 bp, Artificial
  probe
  misc_feature (1)..(25): SEQ ID NO: 5503; WAN024CAC; Start 96; Stop 120
tgttccaaagcactccaattcatta

SEQ ID NO: 412740 - DNA, 25 bp, Artificial
  probe
  misc_feature (1)..(25): SEQ ID NO: 5503; WAN024CAC; Start 100; Stop 124
ccaaagcactccaattcattagact

SEQ ID NO: 412741 - DNA, 25 bp, Artificial
  probe
  misc_feature (1)..(25): SEQ ID NO: 5503; WAN024CAC; Start 99; Stop 123
tccaaagcactccaattcattagac

SEQ ID NO: 412742 - DNA, 25 bp, Artificial
  probe
  misc_feature (1)..(25): SEQ ID NO: 5503; WAN024CAC; Start 180; Stop 204
ctcgataagtctatatgattgcctt

SEQ ID NO: 412743 - DNA, 25 bp, Artificial
  probe
  misc_feature (1)..(25): SEQ ID NO: 5503; WAN024CAC; Start 178; Stop 202
aactcgataagtctatatgattgcc

SEQ ID NO: 412744 - DNA, 25 bp, Artificial
  probe
  misc_feature (1)..(25): SEQ ID NO: 5503; WAN024CAC; Start 135; Stop 159
agaactaggctatcaatctgcatgt

SEQ ID NO: 412745 - DNA, 25 bp, Artificial
  probe
  misc_feature (1)..(25): SEQ ID NO: 5503; WAN024CAC; Start 267; Stop 291
tcagaggaagtggcaatgtaagttt

SEQ ID NO: 412746 - DNA, 25 bp, Artificial
  probe
  misc_feature (1)..(25): SEQ ID NO: 5503; WAN024CAC; Start 132; Stop 156
tctagaactaggctatcaatctgca

SEQ ID NO: 412747 - DNA, 25 bp, Artificial
  probe
  misc_feature (1)..(25): SEQ ID NO: 5503; WAN024CAC; Start 95; Stop 119
ttgttccaaagcactccaattcatt

SEQ ID NO: 412748 - DNA, 25 bp, Artificial
  probe
  misc_feature (1)..(25): SEQ ID NO: 5503; WAN024CAC; Start 94; Stop 118
gttgttccaaagcactccaattcat

SEQ ID NO: 412749 - DNA, 25 bp, Artificial
  probe
  misc_feature (1)..(25): SEQ ID NO: 5503; WAN024CAC; Start 138; Stop 162
actaggctatcaatctgcatgtttc

SEQ ID NO: 412750 - DNA, 25 bp, Artificial
  probe
  misc_feature (1)..(25): SEQ ID NO: 5503; WAN024CAC; Start 161; Stop 185
tcctagatgttgcattaaactcgat

SEQ ID NO: 412751 - DNA, 25 bp, Artificial
  probe
  misc_feature (1)..(25): SEQ ID NO: 5503; WAN024CAC; Start 160; Stop 184
ttcctagatgttgcattaaactcga

SEQ ID NO: 412752 - DNA, 25 bp, Artificial
  probe
  misc_feature (1)..(25): SEQ ID NO: 5503; WAN024CAC; Start 159; Stop 183
tttcctagatgttgcattaaactcg

SEQ ID NO: 412753 - DNA, 25 bp, Artificial
  probe
  misc_feature (1)..(25): SEQ ID NO: 5503; WAN024CAC; Start 137; Stop 161
aactaggctatcaatctgcatgttt

SEQ ID NO: 412754 - DNA, 25 bp, Artificial
  probe
  misc_feature (1)..(25): SEQ ID NO: 5503; WAN024CAC; Start 92; Stop 116
ttgttgttccaaagcactccaattc

SEQ ID NO: 412755 - DNA, 25 bp, Artificial
  probe
  misc_feature (1)..(25): SEQ ID NO: 5503; WAN024CAC; Start 143; Stop 167
gctatcaatctgcatgtttcctaga

SEQ ID NO: 412756 - DNA, 25 bp, Artificial
  probe
  misc_feature (1)..(25): SEQ ID NO: 5503; WAN024CAC; Start 209; Stop 233
ctttatggaaagtatttcacagcca

SEQ ID NO: 412757 - DNA, 25 bp, Artificial
  probe
  misc_feature (1)..(25): SEQ ID NO: 5503; WAN024CAC; Start 208; Stop 232
tctttatggaaagtatttcacagcc

SEQ ID NO: 412758 - DNA, 25 bp, Artificial
  probe
  misc_feature (1)..(25): SEQ ID NO: 5503; WAN024CAC; Start 142; Stop 166
ggctatcaatctgcatgtttcctag

SEQ ID NO: 412759 - DNA, 25 bp, Artificial
  probe
  misc_feature (1)..(25): SEQ ID NO: 5503; WAN024CAC; Start 139; Stop 163
ctaggctatcaatctgcatgtttcc

SEQ ID NO: 412760 - DNA, 25 bp, Artificial
  probe
  misc_feature (1)..(25): SEQ ID NO: 5503; WAN024CAC; Start 162; Stop 186
cctagatgttgcattaaactcgata

SEQ ID NO: 412761 - DNA, 25 bp, Artificial
  probe
  misc_feature (1)..(25): SEQ ID NO: 5503; WAN024CAC; Start 215; Stop 239
ggaaagtatttcacagccatgattt

SEQ ID NO: 412762 - DNA, 25 bp, Artificial
  probe
  misc_feature (1)..(25): SEQ ID NO: 5503; WAN024CAC; Start 167; Stop 191
atgttgcattaaactcgataagtct

SEQ ID NO: 412763 - DNA, 25 bp, Artificial
  probe
  misc_feature (1)..(25): SEQ ID NO: 5503; WAN024CAC; Start 165; Stop 189
agatgttgcattaaactcgataagt

SEQ ID NO: 412764 - DNA, 25 bp, Artificial
  probe
  misc_feature (1)..(25): SEQ ID NO: 5504; WAN024GBK; Start 223; Stop 247
gtagcaccaagaataattaccatcg

SEQ ID NO: 412765 - DNA, 25 bp, Artificial
  probe
  misc_feature (1)..(25): SEQ ID NO: 5504; WAN024GBK; Start 222; Stop 246
agtagcaccaagaataattaccatc

SEQ ID NO: 412766 - DNA, 25 bp, Artificial
  probe
  misc_feature (1)..(25): SEQ ID NO: 5504; WAN024GBK; Start 224; Stop 248
tagcaccaagaataattaccatcga

SEQ ID NO: 412767 - DNA, 25 bp, Artificial
  probe
  misc_feature (1)..(25): SEQ ID NO: 5504; WAN024GBK; Start 220; Stop 244
gtagtagcaccaagaataattacca

SEQ ID NO: 412768 - DNA, 25 bp, Artificial
  probe
  misc_feature (1)..(25): SEQ ID NO: 5504; WAN024GBK; Start 119; Stop 143
tttccacggtatttaagataacgct

SEQ ID NO: 412769 - DNA, 25 bp, Artificial
  probe
  misc_feature (1)..(25): SEQ ID NO: 5504; WAN024GBK; Start 54; Stop 78
gaatccatctgataaactcccactc

SEQ ID NO: 412770 - DNA, 25 bp, Artificial
  probe
  misc_feature (1)..(25): SEQ ID NO: 5504; WAN024GBK; Start 202; Stop 226
ttcttgcattcgttcttggtagtag

SEQ ID NO: 412771 - DNA, 25 bp, Artificial
  probe
  misc_feature (1)..(25): SEQ ID NO: 5504; WAN024GBK; Start 201; Stop 225
cttcttgcattcgttcttggtagta

SEQ ID NO: 412772 - DNA, 25 bp, Artificial
  probe
  misc_feature (1)..(25): SEQ ID NO: 5504; WAN024GBK; Start 52; Stop 76
aagaatccatctgataaactcccac

SEQ ID NO: 412773 - DNA, 25 bp, Artificial
  probe
  misc_feature (1)..(25): SEQ ID NO: 5504; WAN024GBK; Start 44; Stop 68
ccatcccaaagaatccatctgataa

SEQ ID NO: 412774 - DNA, 25 bp, Artificial
  probe
  misc_feature (1)..(25): SEQ ID NO: 5504; WAN024GBK; Start 134; Stop 158
agataacgcttaaaggctctaaaga

SEQ ID NO: 412775 - DNA, 25 bp, Artificial
  probe
  misc_feature (1)..(25): SEQ ID NO: 5504; WAN024GBK; Start 120; Stop 144
ttccacggtatttaagataacgctt

SEQ ID NO: 412776 - DNA, 25 bp, Artificial
  probe
  misc_feature (1)..(25): SEQ ID NO: 5504; WAN024GBK; Start 51; Stop 75
aaagaatccatctgataaactccca

SEQ ID NO: 412777 - DNA, 25 bp, Artificial
  probe
  misc_feature (1)..(25): SEQ ID NO: 5504; WAN024GBK; Start 47; Stop 71
tcccaaagaatccatctgataaact

SEQ ID NO: 412778 - DNA, 25 bp, Artificial
  probe
  misc_feature (1)..(25): SEQ ID NO: 5504; WAN024GBK; Start 50; Stop 74
caaagaatccatctgataaactccc

SEQ ID NO: 412779 - DNA, 25 bp, Artificial
  probe
  misc_feature (1)..(25): SEQ ID NO: 5504; WAN024GBK; Start 49; Stop 73
ccaaagaatccatctgataaactcc

SEQ ID NO: 412780 - DNA, 25 bp, Artificial
  probe
  misc_feature (1)..(25): SEQ ID NO: 5504; WAN024GBK; Start 48; Stop 72
cccaaagaatccatctgataaactc

SEQ ID NO: 412781 - DNA, 25 bp, Artificial
  probe
  misc_feature (1)..(25): SEQ ID NO: 5504; WAN024GBK; Start 133; Stop 157
aagataacgcttaaaggctctaaag

SEQ ID NO: 412782 - DNA, 25 bp, Artificial
  probe
  misc_feature (1)..(25): SEQ ID NO: 5504; WAN024GBK; Start 53; Stop 77
agaatccatctgataaactcccact

SEQ ID NO: 412783 - DNA, 25 bp, Artificial
  probe
  misc_feature (1)..(25): SEQ ID NO: 5504; WAN024GBK; Start 177; Stop 201
aattgagaaagatgatttggtcagc

SEQ ID NO: 412784 - DNA, 25 bp, Artificial
  probe
  misc_feature (1)..(25): SEQ ID NO: 5504; WAN024GBK; Start 221; Stop 245
tagtagcaccaagaataattaccat

SEQ ID NO: 412785 - DNA, 25 bp, Artificial
  probe
  misc_feature (1)..(25): SEQ ID NO: 5504; WAN024GBK; Start 46; Stop 70
atcccaaagaatccatctgataaac

SEQ ID NO: 412786 - DNA, 25 bp, Artificial
  probe
  misc_feature (1)..(25): SEQ ID NO: 5504; WAN024GBK; Start 45; Stop 69
catcccaaagaatccatctgataaa

SEQ ID NO: 412787 - DNA, 25 bp, Artificial
  probe
  misc_feature (1)..(25): SEQ ID NO: 5504; WAN024GBK; Start 58; Stop 82
ccatctgataaactcccactcaaag

SEQ ID NO: 412788 - DNA, 25 bp, Artificial
  probe
  misc_feature (1)..(25): SEQ ID NO: 5504; WAN024GBK; Start 56; Stop 80
atccatctgataaactcccactcaa

SEQ ID NO: 412789 - DNA, 25 bp, Artificial
  probe
  misc_feature (1)..(25): SEQ ID NO: 5504; WAN024GBK; Start 55; Stop 79
aatccatctgataaactcccactca

SEQ ID NO: 412790 - DNA, 25 bp, Artificial
  probe
  misc_feature (1)..(25): SEQ ID NO: 5504; WAN024GBK; Start 121; Stop 145
tccacggtatttaagataacgctta

SEQ ID NO: 412791 - DNA, 25 bp, Artificial
  probe
  misc_feature (1)..(25): SEQ ID NO: 5504; WAN024GBK; Start 57; Stop 81
tccatctgataaactcccactcaaa

SEQ ID NO: 412792 - DNA, 25 bp, Artificial
  probe
  misc_feature (1)..(25): SEQ ID NO: 5504; WAN024GBK; Start 43; Stop 67
cccatcccaaagaatccatctgata

SEQ ID NO: 412793 - DNA, 25 bp, Artificial
  probe
  misc_feature (1)..(25): SEQ ID NO: 5504; WAN024GBK; Start 59; Stop 83
catctgataaactcccactcaaagc

SEQ ID NO: 412794 - DNA, 25 bp, Artificial
  probe
  misc_feature (1)..(25): SEQ ID NO: 5504; WAN024GBK; Start 136; Stop 160
ataacgcttaaaggctctaaagaga

SEQ ID NO: 412795 - DNA, 25 bp, Artificial
  probe
  misc_feature (1)..(25): SEQ ID NO: 5504; WAN024GBK; Start 135; Stop 159
gataacgcttaaaggctctaaagag

SEQ ID NO: 412796 - DNA, 25 bp, Artificial
  probe
  misc_feature (1)..(25): SEQ ID NO: 5504; WAN024GBK; Start 142; Stop 166
cttaaaggctctaaagagacaggtc

SEQ ID NO: 412797 - DNA, 25 bp, Artificial
  probe
  misc_feature (1)..(25): SEQ ID NO: 5505; WAN024DP3; Start 48; Stop 72
aaaagaaaaccccgtgaaaacaagg

SEQ ID NO: 412798 - DNA, 25 bp, Artificial
  probe
  misc_feature (1)..(25): SEQ ID NO: 5505; WAN024DP3; Start 54; Stop 78
aaaccccgtgaaaacaagggatttt

SEQ ID NO: 412799 - DNA, 25 bp, Artificial
  probe
  misc_feature (1)..(25): SEQ ID NO: 5505; WAN024DP3; Start 53; Stop 77
aaaaccccgtgaaaacaagggattt

SEQ ID NO: 412800 - DNA, 25 bp, Artificial
  probe
  misc_feature (1)..(25): SEQ ID NO: 5505; WAN024DP3; Start 52; Stop 76
gaaaaccccgtgaaaacaagggatt

SEQ ID NO: 412801 - DNA, 25 bp, Artificial
  probe
  misc_feature (1)..(25): SEQ ID NO: 5505; WAN024DP3; Start 49; Stop 73
aaagaaaaccccgtgaaaacaaggg

SEQ ID NO: 412802 - DNA, 25 bp, Artificial
  probe
  misc_feature (1)..(25): SEQ ID NO: 5505; WAN024DP3; Start 58; Stop 82
cccgtgaaaacaagggattttcttg

SEQ ID NO: 412803 - DNA, 25 bp, Artificial
  probe
  misc_feature (1)..(25): SEQ ID NO: 5505; WAN024DP3; Start 51; Stop 75
agaaaaccccgtgaaaacaagggat

SEQ ID NO: 412804 - DNA, 25 bp, Artificial
  probe
  misc_feature (1)..(25): SEQ ID NO: 5505; WAN024DP3; Start 50; Stop 74
aagaaaaccccgtgaaaacaaggga

SEQ ID NO: 412805 - DNA, 25 bp, Artificial
  probe
  misc_feature (1)..(25): SEQ ID NO: 5505; WAN024DP3; Start 57; Stop 81
ccccgtgaaaacaagggattttctt

SEQ ID NO: 412806 - DNA, 25 bp, Artificial
  probe
  misc_feature (1)..(25): SEQ ID NO: 5505; WAN024DP3; Start 68; Stop 92
caagggattttcttgtcaagaatat

SEQ ID NO: 412807 - DNA, 25 bp, Artificial
  probe
  misc_feature (1)..(25): SEQ ID NO: 5505; WAN024DP3; Start 55; Stop 79
aaccccgtgaaaacaagggattttc

SEQ ID NO: 412808 - DNA, 25 bp, Artificial
  probe
  misc_feature (1)..(25): SEQ ID NO: 5505; WAN024DP3; Start 70; Stop 94
agggattttcttgtcaagaatattt

SEQ ID NO: 412809 - DNA, 25 bp, Artificial
  probe
  misc_feature (1)..(25): SEQ ID NO: 5505; WAN024DP3; Start 69; Stop 93
aagggattttcttgtcaagaatatt

SEQ ID NO: 412810 - DNA, 25 bp, Artificial
  probe
  misc_feature (1)..(25): SEQ ID NO: 5505; WAN024DP3; Start 56; Stop 80
accccgtgaaaacaagggattttct

SEQ ID NO: 412811 - DNA, 25 bp, Artificial
  probe
  misc_feature (1)..(25): SEQ ID NO: 5505; WAN024DP3; Start 71; Stop 95
gggattttcttgtcaagaatatttt

SEQ ID NO: 412812 - DNA, 25 bp, Artificial
  probe
  misc_feature (1)..(25): SEQ ID NO: 5506; WAN024F5C; Start 425; Stop 449
tctccttctattcctcaatgattgc

SEQ ID NO: 412813 - DNA, 25 bp, Artificial
  probe
  misc_feature (1)..(25): SEQ ID NO: 5506; WAN024F5C; Start 188; Stop 212
ctacttctgatactaacttagcacc

SEQ ID NO: 412814 - DNA, 25 bp, Artificial
  probe
  misc_feature (1)..(25): SEQ ID NO: 5506; WAN024F5C; Start 428; Stop 452
ccttctattcctcaatgattgccaa

SEQ ID NO: 412815 - DNA, 25 bp, Artificial
  probe
  misc_feature (1)..(25): SEQ ID NO: 5506; WAN024F5C; Start 426; Stop 450
ctccttctattcctcaatgattgcc

SEQ ID NO: 412816 - DNA, 25 bp, Artificial
  probe
  misc_feature (1)..(25): SEQ ID NO: 5506; WAN024F5C; Start 427; Stop 451
tccttctattcctcaatgattgcca

SEQ ID NO: 412817 - DNA, 25 bp, Artificial
  probe
  misc_feature (1)..(25): SEQ ID NO: 5506; WAN024F5C; Start 424; Stop 448
ttctccttctattcctcaatgattg

SEQ ID NO: 412818 - DNA, 25 bp, Artificial
  probe
  misc_feature (1)..(25): SEQ ID NO: 5506; WAN024F5C; Start 518; Stop 542
cttcaactaagacacgatctccagt

SEQ ID NO: 412819 - DNA, 25 bp, Artificial
  probe
  misc_feature (1)..(25): SEQ ID NO: 5506; WAN024F5C; Start 191; Stop 215
cttctgatactaacttagcacccat

SEQ ID NO: 412820 - DNA, 25 bp, Artificial
  probe
  misc_feature (1)..(25): SEQ ID NO: 5506; WAN024F5C; Start 421; Stop 445
actttctccttctattcctcaatga

SEQ ID NO: 412821 - DNA, 25 bp, Artificial
  probe
  misc_feature (1)..(25): SEQ ID NO: 5506; WAN024F5C; Start 189; Stop 213
tacttctgatactaacttagcaccc

SEQ ID NO: 412822 - DNA, 25 bp, Artificial
  probe
  misc_feature (1)..(25): SEQ ID NO: 5506; WAN024F5C; Start 190; Stop 214
acttctgatactaacttagcaccca

SEQ ID NO: 412823 - DNA, 25 bp, Artificial
  probe
  misc_feature (1)..(25): SEQ ID NO: 5506; WAN024F5C; Start 417; Stop 441
acttactttctccttctattcctca

SEQ ID NO: 412824 - DNA, 25 bp, Artificial
  probe
  misc_feature (1)..(25): SEQ ID NO: 5506; WAN024F5C; Start 192; Stop 216
ttctgatactaacttagcacccata

SEQ ID NO: 412825 - DNA, 25 bp, Artificial
  probe
  misc_feature (1)..(25): SEQ ID NO: 5506; WAN024F5C; Start 193; Stop 217
tctgatactaacttagcacccatat

SEQ ID NO: 412826 - DNA, 25 bp, Artificial
  probe
  misc_feature (1)..(25): SEQ ID NO: 5506; WAN024F5C; Start 429; Stop 453
cttctattcctcaatgattgccaaa

SEQ ID NO: 412827 - DNA, 25 bp, Artificial
  probe
  misc_feature (1)..(25): SEQ ID NO: 5506; WAN024F5C; Start 422; Stop 446
ctttctccttctattcctcaatgat

SEQ ID NO: 412828 - DNA, 25 bp, Artificial
  probe
  misc_feature (1)..(25): SEQ ID NO: 5506; WAN024F5C; Start 420; Stop 444
tactttctccttctattcctcaatg

SEQ ID NO: 412829 - DNA, 25 bp, Artificial
  probe
  misc_feature (1)..(25): SEQ ID NO: 5506; WAN024F5C; Start 418; Stop 442
cttactttctccttctattcctcaa

SEQ ID NO: 412830 - DNA, 25 bp, Artificial
  probe
  misc_feature (1)..(25): SEQ ID NO: 5506; WAN024F5C; Start 194; Stop 218
ctgatactaacttagcacccatatt

SEQ ID NO: 412831 - DNA, 25 bp, Artificial
  probe
  misc_feature (1)..(25): SEQ ID NO: 5506; WAN024F5C; Start 517; Stop 541
gcttcaactaagacacgatctccag

SEQ ID NO: 412832 - DNA, 25 bp, Artificial
  probe
  misc_feature (1)..(25): SEQ ID NO: 5506; WAN024F5C; Start 423; Stop 447
tttctccttctattcctcaatgatt

SEQ ID NO: 412833 - DNA, 25 bp, Artificial
  probe
  misc_feature (1)..(25): SEQ ID NO: 5506; WAN024F5C; Start 409; Stop 433
tttgacatacttactttctccttct

SEQ ID NO: 412834 - DNA, 25 bp, Artificial
  probe
  misc_feature (1)..(25): SEQ ID NO: 5506; WAN024F5C; Start 195; Stop 219
tgatactaacttagcacccatattt

SEQ ID NO: 412835 - DNA, 25 bp, Artificial
  probe
  misc_feature (1)..(25): SEQ ID NO: 5506; WAN024F5C; Start 337; Stop 361
ttaacagtgtctgcaaggatatcga

SEQ ID NO: 412836 - DNA, 25 bp, Artificial
  probe
  misc_feature (1)..(25): SEQ ID NO: 5506; WAN024F5C; Start 519; Stop 543
ttcaactaagacacgatctccagtt

SEQ ID NO: 412837 - DNA, 25 bp, Artificial
  probe
  misc_feature (1)..(25): SEQ ID NO: 5506; WAN024F5C; Start 272; Stop 296
taatcaagggtgaaccgaatgactt

SEQ ID NO: 412838 - DNA, 25 bp, Artificial
  probe
  misc_feature (1)..(25): SEQ ID NO: 5506; WAN024F5C; Start 325; Stop 349
cccaaggttactttaacagtgtctg

SEQ ID NO: 412839 - DNA, 25 bp, Artificial
  probe
  misc_feature (1)..(25): SEQ ID NO: 5506; WAN024F5C; Start 324; Stop 348
tcccaaggttactttaacagtgtct

SEQ ID NO: 412840 - DNA, 25 bp, Artificial
  probe
  misc_feature (1)..(25): SEQ ID NO: 5506; WAN024F5C; Start 323; Stop 347
gtcccaaggttactttaacagtgtc

SEQ ID NO: 412841 - DNA, 25 bp, Artificial
  probe
  misc_feature (1)..(25): SEQ ID NO: 5506; WAN024F5C; Start 419; Stop 443
ttactttctccttctattcctcaat

SEQ ID NO: 412842 - DNA, 25 bp, Artificial
  probe
  misc_feature (1)..(25): SEQ ID NO: 5506; WAN024F5C; Start 482; Stop 506
tttcatcgccatctttgacatcaag

SEQ ID NO: 412843 - DNA, 25 bp, Artificial
  probe
  misc_feature (1)..(25): SEQ ID NO: 5506; WAN024F5C; Start 416; Stop 440
tacttactttctccttctattcctc

SEQ ID NO: 412844 - DNA, 25 bp, Artificial
  probe
  misc_feature (1)..(25): SEQ ID NO: 5506; WAN024F5C; Start 410; Stop 434
ttgacatacttactttctccttcta

SEQ ID NO: 412845 - DNA, 25 bp, Artificial
  probe
  misc_feature (1)..(25): SEQ ID NO: 5507; WAN024B4W; Start 61; Stop 85
tgtggaatctctacaggaacaatag

SEQ ID NO: 412846 - DNA, 25 bp, Artificial
  probe
  misc_feature (1)..(25): SEQ ID NO: 5507; WAN024B4W; Start 57; Stop 81
atattgtggaatctctacaggaaca

SEQ ID NO: 412847 - DNA, 25 bp, Artificial
  probe
  misc_feature (1)..(25): SEQ ID NO: 5507; WAN024B4W; Start 66; Stop 90
aatctctacaggaacaatagactgc

SEQ ID NO: 412848 - DNA, 25 bp, Artificial
  probe
  misc_feature (1)..(25): SEQ ID NO: 5507; WAN024B4W; Start 63; Stop 87
tggaatctctacaggaacaatagac

SEQ ID NO: 412849 - DNA, 25 bp, Artificial
  probe
  misc_feature (1)..(25): SEQ ID NO: 5507; WAN024B4W; Start 62; Stop 86
gtggaatctctacaggaacaataga

SEQ ID NO: 412850 - DNA, 25 bp, Artificial
  probe
  misc_feature (1)..(25): SEQ ID NO: 5507; WAN024B4W; Start 64; Stop 88
ggaatctctacaggaacaatagact

SEQ ID NO: 412851 - DNA, 25 bp, Artificial
  probe
  misc_feature (1)..(25): SEQ ID NO: 5507; WAN024B4W; Start 65; Stop 89
gaatctctacaggaacaatagactg

SEQ ID NO: 412852 - DNA, 25 bp, Artificial
  probe
  misc_feature (1)..(25): SEQ ID NO: 5507; WAN024B4W; Start 123; Stop 147
actaatagtatataggaggagagcc

SEQ ID NO: 412853 - DNA, 25 bp, Artificial
  probe
  misc_feature (1)..(25): SEQ ID NO: 5507; WAN024B4W; Start 148; Stop 172
ctgaatcctagaccctttgttatga

SEQ ID NO: 412854 - DNA, 25 bp, Artificial
  probe
  misc_feature (1)..(25): SEQ ID NO: 5507; WAN024B4W; Start 67; Stop 91
atctctacaggaacaatagactgcg

SEQ ID NO: 412855 - DNA, 25 bp, Artificial
  probe
  misc_feature (1)..(25): SEQ ID NO: 5507; WAN024B4W; Start 147; Stop 171
cctgaatcctagaccctttgttatg

SEQ ID NO: 412856 - DNA, 25 bp, Artificial
  probe
  misc_feature (1)..(25): SEQ ID NO: 5507; WAN024B4W; Start 151; Stop 175
aatcctagaccctttgttatgatgc

SEQ ID NO: 412857 - DNA, 25 bp, Artificial
  probe
  misc_feature (1)..(25): SEQ ID NO: 5507; WAN024B4W; Start 149; Stop 173
tgaatcctagaccctttgttatgat

SEQ ID NO: 412858 - DNA, 25 bp, Artificial
  probe
  misc_feature (1)..(25): SEQ ID NO: 5507; WAN024B4W; Start 56; Stop 80
aatattgtggaatctctacaggaac

SEQ ID NO: 412859 - DNA, 25 bp, Artificial
  probe
  misc_feature (1)..(25): SEQ ID NO: 5507; WAN024B4W; Start 150; Stop 174
gaatcctagaccctttgttatgatg

SEQ ID NO: 412860 - DNA, 25 bp, Artificial
  probe
  misc_feature (1)..(25): SEQ ID NO: 5507; WAN024B4W; Start 74; Stop 98
caggaacaatagactgcgacactaa

SEQ ID NO: 412861 - DNA, 25 bp, Artificial
  probe
  misc_feature (1)..(25): SEQ ID NO: 5507; WAN024B4W; Start 146; Stop 170
ccctgaatcctagaccctttgttat

SEQ ID NO: 412862 - DNA, 25 bp, Artificial
  probe
  misc_feature (1)..(25): SEQ ID NO: 5507; WAN024B4W; Start 75; Stop 99
aggaacaatagactgcgacactaaa

SEQ ID NO: 412863 - DNA, 25 bp, Artificial
  probe
  misc_feature (1)..(25): SEQ ID NO: 5507; WAN024B4W; Start 124; Stop 148
ctaatagtatataggaggagagccc

SEQ ID NO: 412864 - DNA, 25 bp, Artificial
  probe
  misc_feature (1)..(25): SEQ ID NO: 5507; WAN024B4W; Start 69; Stop 93
ctctacaggaacaatagactgcgac

SEQ ID NO: 412865 - DNA, 25 bp, Artificial
  probe
  misc_feature (1)..(25): SEQ ID NO: 5507; WAN024B4W; Start 68; Stop 92
tctctacaggaacaatagactgcga

SEQ ID NO: 412866 - DNA, 25 bp, Artificial
  probe
  misc_feature (1)..(25): SEQ ID NO: 5507; WAN024B4W; Start 126; Stop 150
aatagtatataggaggagagccctg

SEQ ID NO: 412867 - DNA, 25 bp, Artificial
  probe
  misc_feature (1)..(25): SEQ ID NO: 5507; WAN024B4W; Start 127; Stop 151
atagtatataggaggagagccctga

SEQ ID NO: 412868 - DNA, 25 bp, Artificial
  probe
  misc_feature (1)..(25): SEQ ID NO: 5507; WAN024B4W; Start 71; Stop 95
ctacaggaacaatagactgcgacac

SEQ ID NO: 412869 - DNA, 25 bp, Artificial
  probe
  misc_feature (1)..(25): SEQ ID NO: 5507; WAN024B4W; Start 128; Stop 152
tagtatataggaggagagccctgaa

SEQ ID NO: 412870 - DNA, 25 bp, Artificial
  probe
  misc_feature (1)..(25): SEQ ID NO: 5507; WAN024B4W; Start 130; Stop 154
gtatataggaggagagccctgaatc

SEQ ID NO: 412871 - DNA, 25 bp, Artificial
  probe
  misc_feature (1)..(25): SEQ ID NO: 5507; WAN024B4W; Start 152; Stop 176
atcctagaccctttgttatgatgcg

SEQ ID NO: 412872 - DNA, 25 bp, Artificial
  probe
  misc_feature (1)..(25): SEQ ID NO: 5507; WAN024B4W; Start 60; Stop 84
ttgtggaatctctacaggaacaata

SEQ ID NO: 412873 - DNA, 25 bp, Artificial
  probe
  misc_feature (1)..(25): SEQ ID NO: 5507; WAN024B4W; Start 58; Stop 82
tattgtggaatctctacaggaacaa

SEQ ID NO: 412874 - DNA, 25 bp, Artificial
  probe
  misc_feature (1)..(25): SEQ ID NO: 5507; WAN024B4W; Start 129; Stop 153
agtatataggaggagagccctgaat

SEQ ID NO: 412875 - DNA, 25 bp, Artificial
  probe
  misc_feature (1)..(25): SEQ ID NO: 5507; WAN024B4W; Start 73; Stop 97
acaggaacaatagactgcgacacta

SEQ ID NO: 412876 - DNA, 25 bp, Artificial
  probe
  misc_feature (1)..(25): SEQ ID NO: 5507; WAN024B4W; Start 72; Stop 96
tacaggaacaatagactgcgacact

SEQ ID NO: 412877 - DNA, 25 bp, Artificial
  probe
  misc_feature (1)..(25): SEQ ID NO: 5507; WAN024B4W; Start 70; Stop 94
tctacaggaacaatagactgcgaca

SEQ ID NO: 412878 - DNA, 25 bp, Artificial
  probe
  misc_feature (1)..(25): SEQ ID NO: 5508; WAN024G6J; Start 318; Stop 342
aattgctgtcatttgcttaacttgg

SEQ ID NO: 412879 - DNA, 25 bp, Artificial
  probe
  misc_feature (1)..(25): SEQ ID NO: 5508; WAN024G6J; Start 342; Stop 366
gctcctttcaagattgtttgcttaa

SEQ ID NO: 412880 - DNA, 25 bp, Artificial
  probe
  misc_feature (1)..(25): SEQ ID NO: 5508; WAN024G6J; Start 328; Stop 352
atttgcttaacttggctcctttcaa

SEQ ID NO: 412881 - DNA, 25 bp, Artificial
  probe
  misc_feature (1)..(25): SEQ ID NO: 5508; WAN024G6J; Start 326; Stop 350
tcatttgcttaacttggctcctttc

SEQ ID NO: 412882 - DNA, 25 bp, Artificial
  probe
  misc_feature (1)..(25): SEQ ID NO: 5508; WAN024G6J; Start 327; Stop 351
catttgcttaacttggctcctttca

SEQ ID NO: 412883 - DNA, 25 bp, Artificial
  probe
  misc_feature (1)..(25): SEQ ID NO: 5508; WAN024G6J; Start 325; Stop 349
gtcatttgcttaacttggctccttt

SEQ ID NO: 412884 - DNA, 25 bp, Artificial
  probe
  misc_feature (1)..(25): SEQ ID NO: 5508; WAN024G6J; Start 341; Stop 365
ggctcctttcaagattgtttgctta

SEQ ID NO: 412885 - DNA, 25 bp, Artificial
  probe
  misc_feature (1)..(25): SEQ ID NO: 5508; WAN024G6J; Start 319; Stop 343
attgctgtcatttgcttaacttggc

SEQ ID NO: 412886 - DNA, 25 bp, Artificial
  probe
  misc_feature (1)..(25): SEQ ID NO: 5508; WAN024G6J; Start 324; Stop 348
tgtcatttgcttaacttggctcctt

SEQ ID NO: 412887 - DNA, 25 bp, Artificial
  probe
  misc_feature (1)..(25): SEQ ID NO: 5508; WAN024G6J; Start 13; Stop 37
agattctctgccactgtcatacgag

SEQ ID NO: 412888 - DNA, 25 bp, Artificial
  probe
  misc_feature (1)..(25): SEQ ID NO: 5508; WAN024G6J; Start 10; Stop 34
aggagattctctgccactgtcatac

SEQ ID NO: 412889 - DNA, 25 bp, Artificial
  probe
  misc_feature (1)..(25): SEQ ID NO: 5508; WAN024G6J; Start 323; Stop 347
ctgtcatttgcttaacttggctcct

SEQ ID NO: 412890 - DNA, 25 bp, Artificial
  probe
  misc_feature (1)..(25): SEQ ID NO: 5508; WAN024G6J; Start 9; Stop 33
caggagattctctgccactgtcata

SEQ ID NO: 412891 - DNA, 25 bp, Artificial
  probe
  misc_feature (1)..(25): SEQ ID NO: 5508; WAN024G6J; Start 12; Stop 36
gagattctctgccactgtcatacga

SEQ ID NO: 412892 - DNA, 25 bp, Artificial
  probe
  misc_feature (1)..(25): SEQ ID NO: 5508; WAN024G6J; Start 340; Stop 364
tggctcctttcaagattgtttgctt

SEQ ID NO: 412893 - DNA, 25 bp, Artificial
  probe
  misc_feature (1)..(25): SEQ ID NO: 5508; WAN024G6J; Start 339; Stop 363
ttggctcctttcaagattgtttgct

SEQ ID NO: 412894 - DNA, 25 bp, Artificial
  probe
  misc_feature (1)..(25): SEQ ID NO: 5508; WAN024G6J; Start 320; Stop 344
ttgctgtcatttgcttaacttggct

SEQ ID NO: 412895 - DNA, 25 bp, Artificial
  probe
  misc_feature (1)..(25): SEQ ID NO: 5508; WAN024G6J; Start 317; Stop 341
caattgctgtcatttgcttaacttg

SEQ ID NO: 412896 - DNA, 25 bp, Artificial
  probe
  misc_feature (1)..(25): SEQ ID NO: 5508; WAN024G6J; Start 311; Stop 335
attctacaattgctgtcatttgctt

SEQ ID NO: 412897 - DNA, 25 bp, Artificial
  probe
  misc_feature (1)..(25): SEQ ID NO: 5508; WAN024G6J; Start 310; Stop 334
aattctacaattgctgtcatttgct

SEQ ID NO: 412898 - DNA, 25 bp, Artificial
  probe
  misc_feature (1)..(25): SEQ ID NO: 5508; WAN024G6J; Start 316; Stop 340
acaattgctgtcatttgcttaactt

SEQ ID NO: 412899 - DNA, 25 bp, Artificial
  probe
  misc_feature (1)..(25): SEQ ID NO: 5508; WAN024G6J; Start 315; Stop 339
tacaattgctgtcatttgcttaact

SEQ ID NO: 412900 - DNA, 25 bp, Artificial
  probe
  misc_feature (1)..(25): SEQ ID NO: 5508; WAN024G6J; Start 314; Stop 338
ctacaattgctgtcatttgcttaac

SEQ ID NO: 412901 - DNA, 25 bp, Artificial
  probe
  misc_feature (1)..(25): SEQ ID NO: 5508; WAN024G6J; Start 313; Stop 337
tctacaattgctgtcatttgcttaa

SEQ ID NO: 412902 - DNA, 25 bp, Artificial
  probe
  misc_feature (1)..(25): SEQ ID NO: 5508; WAN024G6J; Start 312; Stop 336
ttctacaattgctgtcatttgctta

SEQ ID NO: 412903 - DNA, 25 bp, Artificial
  probe
  misc_feature (1)..(25): SEQ ID NO: 5508; WAN024G6J; Start 119; Stop 143
cacctaaaatacggatagttccact

SEQ ID NO: 412904 - DNA, 25 bp, Artificial
  probe
  misc_feature (1)..(25): SEQ ID NO: 5508; WAN024G6J; Start 118; Stop 142
tcacctaaaatacggatagttccac

SEQ ID NO: 412905 - DNA, 25 bp, Artificial
  probe
  misc_feature (1)..(25): SEQ ID NO: 5508; WAN024G6J; Start 333; Stop 357
cttaacttggctcctttcaagattg

SEQ ID NO: 412906 - DNA, 25 bp, Artificial
  probe
  misc_feature (1)..(25): SEQ ID NO: 5508; WAN024G6J; Start 6; Stop 30
aatcaggagattctctgccactgtc

SEQ ID NO: 412907 - DNA, 25 bp, Artificial
  probe
  misc_feature (1)..(25): SEQ ID NO: 5508; WAN024G6J; Start 14; Stop 38
gattctctgccactgtcatacgagg

SEQ ID NO: 412908 - DNA, 25 bp, Artificial
  probe
  misc_feature (1)..(25): SEQ ID NO: 5508; WAN024G6J; Start 335; Stop 359
taacttggctcctttcaagattgtt

SEQ ID NO: 412909 - DNA, 25 bp, Artificial
  probe
  misc_feature (1)..(25): SEQ ID NO: 5508; WAN024G6J; Start 334; Stop 358
ttaacttggctcctttcaagattgt

SEQ ID NO: 412910 - DNA, 25 bp, Artificial
  probe
  misc_feature (1)..(25): SEQ ID NO: 5508; WAN024G6J; Start 321; Stop 345
tgctgtcatttgcttaacttggctc

SEQ ID NO: 412911 - DNA, 25 bp, Artificial
  probe
  misc_feature (1)..(25): SEQ ID NO: 5509; WAN024FMC; Start 8; Stop 32
ttcctctctcttacctgtctcataa

SEQ ID NO: 412912 - DNA, 25 bp, Artificial
  probe
  misc_feature (1)..(25): SEQ ID NO: 5509; WAN024FMC; Start 7; Stop 31
attcctctctcttacctgtctcata

SEQ ID NO: 412913 - DNA, 25 bp, Artificial
  probe
  misc_feature (1)..(25): SEQ ID NO: 5509; WAN024FMC; Start 6; Stop 30
aattcctctctcttacctgtctcat

SEQ ID NO: 412914 - DNA, 25 bp, Artificial
  probe
  misc_feature (1)..(25): SEQ ID NO: 5509; WAN024FMC; Start 100; Stop 124
tatctggtgttggagtctcttgatt

SEQ ID NO: 412915 - DNA, 25 bp, Artificial
  probe
  misc_feature (1)..(25): SEQ ID NO: 5509; WAN024FMC; Start 99; Stop 123
ttatctggtgttggagtctcttgat

SEQ ID NO: 412916 - DNA, 25 bp, Artificial
  probe
  misc_feature (1)..(25): SEQ ID NO: 5509; WAN024FMC; Start 5; Stop 29
caattcctctctcttacctgtctca

SEQ ID NO: 412917 - DNA, 25 bp, Artificial
  probe
  misc_feature (1)..(25): SEQ ID NO: 5509; WAN024FMC; Start 9; Stop 33
tcctctctcttacctgtctcataag

SEQ ID NO: 412918 - DNA, 25 bp, Artificial
  probe
  misc_feature (1)..(25): SEQ ID NO: 5509; WAN024FMC; Start 11; Stop 35
ctctctcttacctgtctcataagtc

SEQ ID NO: 412919 - DNA, 25 bp, Artificial
  probe
  misc_feature (1)..(25): SEQ ID NO: 5509; WAN024FMC; Start 10; Stop 34
cctctctcttacctgtctcataagt

SEQ ID NO: 412920 - DNA, 25 bp, Artificial
  probe
  misc_feature (1)..(25): SEQ ID NO: 5509; WAN024FMC; Start 12; Stop 36
tctctcttacctgtctcataagtcg

SEQ ID NO: 412921 - DNA, 25 bp, Artificial
  probe
  misc_feature (1)..(25): SEQ ID NO: 5509; WAN024FMC; Start 15; Stop 39
ctcttacctgtctcataagtcggaa

SEQ ID NO: 412922 - DNA, 25 bp, Artificial
  probe
  misc_feature (1)..(25): SEQ ID NO: 5509; WAN024FMC; Start 4; Stop 28
gcaattcctctctcttacctgtctc

SEQ ID NO: 412923 - DNA, 25 bp, Artificial
  probe
  misc_feature (1)..(25): SEQ ID NO: 5509; WAN024FMC; Start 17; Stop 41
cttacctgtctcataagtcggaact

SEQ ID NO: 412924 - DNA, 25 bp, Artificial
  probe
  misc_feature (1)..(25): SEQ ID NO: 5509; WAN024FMC; Start 16; Stop 40
tcttacctgtctcataagtcggaac

SEQ ID NO: 412925 - DNA, 25 bp, Artificial
  probe
  misc_feature (1)..(25): SEQ ID NO: 5509; WAN024FMC; Start 13; Stop 37
ctctcttacctgtctcataagtcgg

SEQ ID NO: 412926 - DNA, 25 bp, Artificial
  probe
  misc_feature (1)..(25): SEQ ID NO: 5509; WAN024FMC; Start 14; Stop 38
tctcttacctgtctcataagtcgga

SEQ ID NO: 412927 - DNA, 25 bp, Artificial
  probe
  misc_feature (1)..(25): SEQ ID NO: 5509; WAN024FMC; Start 109; Stop 133
ttggagtctcttgatttggtagttc

SEQ ID NO: 412928 - DNA, 25 bp, Artificial
  probe
  misc_feature (1)..(25): SEQ ID NO: 5509; WAN024FMC; Start 116; Stop 140
ctcttgatttggtagttctgggttt

SEQ ID NO: 412929 - DNA, 25 bp, Artificial
  probe
  misc_feature (1)..(25): SEQ ID NO: 5509; WAN024FMC; Start 108; Stop 132
gttggagtctcttgatttggtagtt

SEQ ID NO: 412930 - DNA, 25 bp, Artificial
  probe
  misc_feature (1)..(25): SEQ ID NO: 5509; WAN024FMC; Start 117; Stop 141
tcttgatttggtagttctgggtttg

SEQ ID NO: 412931 - DNA, 25 bp, Artificial
  probe
  misc_feature (1)..(25): SEQ ID NO: 5509; WAN024FMC; Start 112; Stop 136
gagtctcttgatttggtagttctgg

SEQ ID NO: 412932 - DNA, 25 bp, Artificial
  probe
  misc_feature (1)..(25): SEQ ID NO: 5509; WAN024FMC; Start 111; Stop 135
ggagtctcttgatttggtagttctg

SEQ ID NO: 412933 - DNA, 25 bp, Artificial
  probe
  misc_feature (1)..(25): SEQ ID NO: 5509; WAN024FMC; Start 110; Stop 134
tggagtctcttgatttggtagttct

SEQ ID NO: 412934 - DNA, 25 bp, Artificial
  probe
  misc_feature (1)..(25): SEQ ID NO: 5509; WAN024FMC; Start 115; Stop 139
tctcttgatttggtagttctgggtt

SEQ ID NO: 412935 - DNA, 25 bp, Artificial
  probe
  misc_feature (1)..(25): SEQ ID NO: 5509; WAN024FMC; Start 106; Stop 130
gtgttggagtctcttgatttggtag

SEQ ID NO: 412936 - DNA, 25 bp, Artificial
  probe
  misc_feature (1)..(25): SEQ ID NO: 5509; WAN024FMC; Start 98; Stop 122
tttatctggtgttggagtctcttga

SEQ ID NO: 412937 - DNA, 25 bp, Artificial
  probe
  misc_feature (1)..(25): SEQ ID NO: 5509; WAN024FMC; Start 97; Stop 121
gtttatctggtgttggagtctcttg

SEQ ID NO: 412938 - DNA, 25 bp, Artificial
  probe
  misc_feature (1)..(25): SEQ ID NO: 5509; WAN024FMC; Start 187; Stop 211
tttctggtgttgataaacggtcata

SEQ ID NO: 412939 - DNA, 25 bp, Artificial
  probe
  misc_feature (1)..(25): SEQ ID NO: 5509; WAN024FMC; Start 107; Stop 131
tgttggagtctcttgatttggtagt

SEQ ID NO: 412940 - DNA, 25 bp, Artificial
  probe
  misc_feature (1)..(25): SEQ ID NO: 5509; WAN024FMC; Start 188; Stop 212
ttctggtgttgataaacggtcatac

SEQ ID NO: 412941 - DNA, 25 bp, Artificial
  probe
  misc_feature (1)..(25): SEQ ID NO: 5509; WAN024FMC; Start 113; Stop 137
agtctcttgatttggtagttctggg

SEQ ID NO: 412942 - DNA, 25 bp, Artificial
  probe
  misc_feature (1)..(25): SEQ ID NO: 5509; WAN024FMC; Start 211; Stop 235
accttaccgttatttctttatcact

SEQ ID NO: 412943 - DNA, 25 bp, Artificial
  probe
  misc_feature (1)..(25): SEQ ID NO: 5509; WAN024FMC; Start 118; Stop 142
cttgatttggtagttctgggtttgg

SEQ ID NO: 412944 - DNA, 25 bp, Artificial
  probe
  misc_feature (1)..(25): SEQ ID NO: 5510; WAN024FND; Start 198; Stop 222
cattgttattgatgttcagcaactt

SEQ ID NO: 412945 - DNA, 25 bp, Artificial
  probe
  misc_feature (1)..(25): SEQ ID NO: 5510; WAN024FND; Start 236; Stop 260
ttaataatgtaccttcttggcaccg

SEQ ID NO: 412946 - DNA, 25 bp, Artificial
  probe
  misc_feature (1)..(25): SEQ ID NO: 5510; WAN024FND; Start 237; Stop 261
taataatgtaccttcttggcaccga

SEQ ID NO: 412947 - DNA, 25 bp, Artificial
  probe
  misc_feature (1)..(25): SEQ ID NO: 5510; WAN024FND; Start 110; Stop 134
atgtggcagtagatcagacaagtaa

SEQ ID NO: 412948 - DNA, 25 bp, Artificial
  probe
  misc_feature (1)..(25): SEQ ID NO: 5510; WAN024FND; Start 109; Stop 133
aatgtggcagtagatcagacaagta

SEQ ID NO: 412949 - DNA, 25 bp, Artificial
  probe
  misc_feature (1)..(25): SEQ ID NO: 5510; WAN024FND; Start 238; Stop 262
aataatgtaccttcttggcaccgat

SEQ ID NO: 412950 - DNA, 25 bp, Artificial
  probe
  misc_feature (1)..(25): SEQ ID NO: 5510; WAN024FND; Start 141; Stop 165
cgttacaggcatgaactcagttaag

SEQ ID NO: 412951 - DNA, 25 bp, Artificial
  probe
  misc_feature (1)..(25): SEQ ID NO: 5510; WAN024FND; Start 142; Stop 166
gttacaggcatgaactcagttaagc

SEQ ID NO: 412952 - DNA, 25 bp, Artificial
  probe
  misc_feature (1)..(25): SEQ ID NO: 5510; WAN024FND; Start 150; Stop 174
catgaactcagttaagcagactctg

SEQ ID NO: 412953 - DNA, 25 bp, Artificial
  probe
  misc_feature (1)..(25): SEQ ID NO: 5510; WAN024FND; Start 212; Stop 236
ttcagcaactttcaacagatgattt

SEQ ID NO: 412954 - DNA, 25 bp, Artificial
  probe
  misc_feature (1)..(25): SEQ ID NO: 5510; WAN024FND; Start 201; Stop 225
tgttattgatgttcagcaactttca

SEQ ID NO: 412955 - DNA, 25 bp, Artificial
  probe
  misc_feature (1)..(25): SEQ ID NO: 5510; WAN024FND; Start 143; Stop 167
ttacaggcatgaactcagttaagca

SEQ ID NO: 412956 - DNA, 25 bp, Artificial
  probe
  misc_feature (1)..(25): SEQ ID NO: 5510; WAN024FND; Start 211; Stop 235
gttcagcaactttcaacagatgatt

SEQ ID NO: 412957 - DNA, 25 bp, Artificial
  probe
  misc_feature (1)..(25): SEQ ID NO: 5510; WAN024FND; Start 235; Stop 259
tttaataatgtaccttcttggcacc

SEQ ID NO: 412958 - DNA, 25 bp, Artificial
  probe
  misc_feature (1)..(25): SEQ ID NO: 5510; WAN024FND; Start 239; Stop 263
ataatgtaccttcttggcaccgatg

SEQ ID NO: 412959 - DNA, 25 bp, Artificial
  probe
  misc_feature (1)..(25): SEQ ID NO: 5510; WAN024FND; Start 200; Stop 224
ttgttattgatgttcagcaactttc

SEQ ID NO: 412960 - DNA, 25 bp, Artificial
  probe
  misc_feature (1)..(25): SEQ ID NO: 5510; WAN024FND; Start 108; Stop 132
gaatgtggcagtagatcagacaagt

SEQ ID NO: 412961 - DNA, 25 bp, Artificial
  probe
  misc_feature (1)..(25): SEQ ID NO: 5510; WAN024FND; Start 107; Stop 131
tgaatgtggcagtagatcagacaag

SEQ ID NO: 412962 - DNA, 25 bp, Artificial
  probe
  misc_feature (1)..(25): SEQ ID NO: 5510; WAN024FND; Start 151; Stop 175
atgaactcagttaagcagactctgg

SEQ ID NO: 412963 - DNA, 25 bp, Artificial
  probe
  misc_feature (1)..(25): SEQ ID NO: 5510; WAN024FND; Start 144; Stop 168
tacaggcatgaactcagttaagcag

SEQ ID NO: 412964 - DNA, 25 bp, Artificial
  probe
  misc_feature (1)..(25): SEQ ID NO: 5510; WAN024FND; Start 197; Stop 221
acattgttattgatgttcagcaact

SEQ ID NO: 412965 - DNA, 25 bp, Artificial
  probe
  misc_feature (1)..(25): SEQ ID NO: 5510; WAN024FND; Start 149; Stop 173
gcatgaactcagttaagcagactct

SEQ ID NO: 412966 - DNA, 25 bp, Artificial
  probe
  misc_feature (1)..(25): SEQ ID NO: 5510; WAN024FND; Start 106; Stop 130
gtgaatgtggcagtagatcagacaa

SEQ ID NO: 412967 - DNA, 25 bp, Artificial
  probe
  misc_feature (1)..(25): SEQ ID NO: 5510; WAN024FND; Start 12; Stop 36
tcaggatgcctatttcaacaaagaa

SEQ ID NO: 412968 - DNA, 25 bp, Artificial
  probe
  misc_feature (1)..(25): SEQ ID NO: 5510; WAN024FND; Start 199; Stop 223
attgttattgatgttcagcaacttt

SEQ ID NO: 412969 - DNA, 25 bp, Artificial
  probe
  misc_feature (1)..(25): SEQ ID NO: 5510; WAN024FND; Start 140; Stop 164
ccgttacaggcatgaactcagttaa

SEQ ID NO: 412970 - DNA, 25 bp, Artificial
  probe
  misc_feature (1)..(25): SEQ ID NO: 5510; WAN024FND; Start 153; Stop 177
gaactcagttaagcagactctggag

SEQ ID NO: 412971 - DNA, 25 bp, Artificial
  probe
  misc_feature (1)..(25): SEQ ID NO: 5510; WAN024FND; Start 11; Stop 35
ctcaggatgcctatttcaacaaaga

SEQ ID NO: 412972 - DNA, 25 bp, Artificial
  probe
  misc_feature (1)..(25): SEQ ID NO: 5510; WAN024FND; Start 111; Stop 135
tgtggcagtagatcagacaagtaaa

SEQ ID NO: 412973 - DNA, 25 bp, Artificial
  probe
  misc_feature (1)..(25): SEQ ID NO: 5510; WAN024FND; Start 152; Stop 176
tgaactcagttaagcagactctgga

SEQ ID NO: 412974 - DNA, 25 bp, Artificial
  probe
  misc_feature (1)..(25): SEQ ID NO: 5510; WAN024FND; Start 13; Stop 37
caggatgcctatttcaacaaagaaa

SEQ ID NO: 412975 - DNA, 25 bp, Artificial
  probe
  misc_feature (1)..(25): SEQ ID NO: 5510; WAN024FND; Start 148; Stop 172
ggcatgaactcagttaagcagactc

SEQ ID NO: 412976 - DNA, 25 bp, Artificial
  probe
  misc_feature (1)..(25): SEQ ID NO: 5510; WAN024FND; Start 10; Stop 34
gctcaggatgcctatttcaacaaag

SEQ ID NO: 412977 - DNA, 25 bp, Artificial
  probe
  misc_feature (1)..(25): SEQ ID NO: 5511; WAN024CX9; Start 85; Stop 109
ttaggacaaggactaggtaatgcta

SEQ ID NO: 412978 - DNA, 25 bp, Artificial
  probe
  misc_feature (1)..(25): SEQ ID NO: 5511; WAN024CX9; Start 212; Stop 236
gaatcgcaatagctccttatatgat

SEQ ID NO: 412979 - DNA, 25 bp, Artificial
  probe
  misc_feature (1)..(25): SEQ ID NO: 5511; WAN024CX9; Start 53; Stop 77
gattggaagatttacagacaggact

SEQ ID NO: 412980 - DNA, 25 bp, Artificial
  probe
  misc_feature (1)..(25): SEQ ID NO: 5511; WAN024CX9; Start 86; Stop 110
taggacaaggactaggtaatgctag

SEQ ID NO: 412981 - DNA, 25 bp, Artificial
  probe
  misc_feature (1)..(25): SEQ ID NO: 5511; WAN024CX9; Start 158; Stop 182
tgtcaaatccactcaatctttcaaa

SEQ ID NO: 412982 - DNA, 25 bp, Artificial
  probe
  misc_feature (1)..(25): SEQ ID NO: 5511; WAN024CX9; Start 54; Stop 78
attggaagatttacagacaggactt

SEQ ID NO: 412983 - DNA, 25 bp, Artificial
  probe
  misc_feature (1)..(25): SEQ ID NO: 5511; WAN024CX9; Start 52; Stop 76
ggattggaagatttacagacaggac

SEQ ID NO: 412984 - DNA, 25 bp, Artificial
  probe
  misc_feature (1)..(25): SEQ ID NO: 5511; WAN024CX9; Start 63; Stop 87
tttacagacaggacttgcttcttta

SEQ ID NO: 412985 - DNA, 25 bp, Artificial
  probe
  misc_feature (1)..(25): SEQ ID NO: 5511; WAN024CX9; Start 55; Stop 79
ttggaagatttacagacaggacttg

SEQ ID NO: 412986 - DNA, 25 bp, Artificial
  probe
  misc_feature (1)..(25): SEQ ID NO: 5511; WAN024CX9; Start 64; Stop 88
ttacagacaggacttgcttctttag

SEQ ID NO: 412987 - DNA, 25 bp, Artificial
  probe
  misc_feature (1)..(25): SEQ ID NO: 5511; WAN024CX9; Start 62; Stop 86
atttacagacaggacttgcttcttt

SEQ ID NO: 412988 - DNA, 25 bp, Artificial
  probe
  misc_feature (1)..(25): SEQ ID NO: 5511; WAN024CX9; Start 59; Stop 83
aagatttacagacaggacttgcttc

SEQ ID NO: 412989 - DNA, 25 bp, Artificial
  probe
  misc_feature (1)..(25): SEQ ID NO: 5511; WAN024CX9; Start 58; Stop 82
gaagatttacagacaggacttgctt

SEQ ID NO: 412990 - DNA, 25 bp, Artificial
  probe
  misc_feature (1)..(25): SEQ ID NO: 5511; WAN024CX9; Start 51; Stop 75
tggattggaagatttacagacagga

SEQ ID NO: 412991 - DNA, 25 bp, Artificial
  probe
  misc_feature (1)..(25): SEQ ID NO: 5511; WAN024CX9; Start 157; Stop 181
ttgtcaaatccactcaatctttcaa

SEQ ID NO: 412992 - DNA, 25 bp, Artificial
  probe
  misc_feature (1)..(25): SEQ ID NO: 5511; WAN024CX9; Start 61; Stop 85
gatttacagacaggacttgcttctt

SEQ ID NO: 412993 - DNA, 25 bp, Artificial
  probe
  misc_feature (1)..(25): SEQ ID NO: 5511; WAN024CX9; Start 84; Stop 108
tttaggacaaggactaggtaatgct

SEQ ID NO: 412994 - DNA, 25 bp, Artificial
  probe
  misc_feature (1)..(25): SEQ ID NO: 5511; WAN024CX9; Start 83; Stop 107
ctttaggacaaggactaggtaatgc

SEQ ID NO: 412995 - DNA, 25 bp, Artificial
  probe
  misc_feature (1)..(25): SEQ ID NO: 5511; WAN024CX9; Start 208; Stop 232
aatggaatcgcaatagctccttata

SEQ ID NO: 412996 - DNA, 25 bp, Artificial
  probe
  misc_feature (1)..(25): SEQ ID NO: 5511; WAN024CX9; Start 209; Stop 233
atggaatcgcaatagctccttatat

SEQ ID NO: 412997 - DNA, 25 bp, Artificial
  probe
  misc_feature (1)..(25): SEQ ID NO: 5511; WAN024CX9; Start 211; Stop 235
ggaatcgcaatagctccttatatga

SEQ ID NO: 412998 - DNA, 25 bp, Artificial
  probe
  misc_feature (1)..(25): SEQ ID NO: 5511; WAN024CX9; Start 82; Stop 106
tctttaggacaaggactaggtaatg

SEQ ID NO: 412999 - DNA, 25 bp, Artificial
  probe
  misc_feature (1)..(25): SEQ ID NO: 5511; WAN024CX9; Start 80; Stop 104
cttctttaggacaaggactaggtaa

SEQ ID NO: 413000 - DNA, 25 bp, Artificial
  probe
  misc_feature (1)..(25): SEQ ID NO: 5511; WAN024CX9; Start 210; Stop 234
tggaatcgcaatagctccttatatg

SEQ ID NO: 413001 - DNA, 25 bp, Artificial
  probe
  misc_feature (1)..(25): SEQ ID NO: 5511; WAN024CX9; Start 22; Stop 46
ctagcagaaggtggaacaaagttaa

SEQ ID NO: 413002 - DNA, 25 bp, Artificial
  probe
  misc_feature (1)..(25): SEQ ID NO: 5511; WAN024CX9; Start 273; Stop 297
tatgatatttgcgaaattgccttca

SEQ ID NO: 413003 - DNA, 25 bp, Artificial
  probe
  misc_feature (1)..(25): SEQ ID NO: 5511; WAN024CX9; Start 79; Stop 103
gcttctttaggacaaggactaggta

SEQ ID NO: 413004 - DNA, 25 bp, Artificial
  probe
  misc_feature (1)..(25): SEQ ID NO: 5511; WAN024CX9; Start 60; Stop 84
agatttacagacaggacttgcttct

SEQ ID NO: 413005 - DNA, 25 bp, Artificial
  probe
  misc_feature (1)..(25): SEQ ID NO: 5511; WAN024CX9; Start 274; Stop 298
atgatatttgcgaaattgccttcag

SEQ ID NO: 413006 - DNA, 25 bp, Artificial
  probe
  misc_feature (1)..(25): SEQ ID NO: 5511; WAN024CX9; Start 213; Stop 237
aatcgcaatagctccttatatgata

SEQ ID NO: 413007 - DNA, 25 bp, Artificial
  probe
  misc_feature (1)..(25): SEQ ID NO: 5511; WAN024CX9; Start 156; Stop 180
tttgtcaaatccactcaatctttca

SEQ ID NO: 413008 - DNA, 25 bp, Artificial
  probe
  misc_feature (1)..(25): SEQ ID NO: 5511; WAN024CX9; Start 81; Stop 105
ttctttaggacaaggactaggtaat

SEQ ID NO: 413009 - DNA, 25 bp, Artificial
  probe
  misc_feature (1)..(25): SEQ ID NO: 5511; WAN024CX9; Start 215; Stop 239
tcgcaatagctccttatatgatatc

SEQ ID NO: 413010 - DNA, 25 bp, Artificial
  probe
  misc_feature (1)..(25): SEQ ID NO: 5512; WAN024EYL; Start 169; Stop 193
ttcaacattgccaaaccatattctt

SEQ ID NO: 413011 - DNA, 25 bp, Artificial
  probe
  misc_feature (1)..(25): SEQ ID NO: 5512; WAN024EYL; Start 170; Stop 194
tcaacattgccaaaccatattcttc

SEQ ID NO: 413012 - DNA, 25 bp, Artificial
  probe
  misc_feature (1)..(25): SEQ ID NO: 5512; WAN024EYL; Start 168; Stop 192
tttcaacattgccaaaccatattct

SEQ ID NO: 413013 - DNA, 25 bp, Artificial
  probe
  misc_feature (1)..(25): SEQ ID NO: 5512; WAN024EYL; Start 167; Stop 191
ctttcaacattgccaaaccatattc

SEQ ID NO: 413014 - DNA, 25 bp, Artificial
  probe
  misc_feature (1)..(25): SEQ ID NO: 5512; WAN024EYL; Start 171; Stop 195
caacattgccaaaccatattcttcc

SEQ ID NO: 413015 - DNA, 25 bp, Artificial
  probe
  misc_feature (1)..(25): SEQ ID NO: 5512; WAN024EYL; Start 166; Stop 190
gctttcaacattgccaaaccatatt

SEQ ID NO: 413016 - DNA, 25 bp, Artificial
  probe
  misc_feature (1)..(25): SEQ ID NO: 5512; WAN024EYL; Start 283; Stop 307
gaaatcaaacctgaaagcatcaaac

SEQ ID NO: 413017 - DNA, 25 bp, Artificial
  probe
  misc_feature (1)..(25): SEQ ID NO: 5512; WAN024EYL; Start 282; Stop 306
tgaaatcaaacctgaaagcatcaaa

SEQ ID NO: 413018 - DNA, 25 bp, Artificial
  probe
  misc_feature (1)..(25): SEQ ID NO: 5512; WAN024EYL; Start 279; Stop 303
atctgaaatcaaacctgaaagcatc

SEQ ID NO: 413019 - DNA, 25 bp, Artificial
  probe
  misc_feature (1)..(25): SEQ ID NO: 5512; WAN024EYL; Start 277; Stop 301
gtatctgaaatcaaacctgaaagca

SEQ ID NO: 413020 - DNA, 25 bp, Artificial
  probe
  misc_feature (1)..(25): SEQ ID NO: 5512; WAN024EYL; Start 172; Stop 196
aacattgccaaaccatattcttcca

SEQ ID NO: 413021 - DNA, 25 bp, Artificial
  probe
  misc_feature (1)..(25): SEQ ID NO: 5512; WAN024EYL; Start 281; Stop 305
ctgaaatcaaacctgaaagcatcaa

SEQ ID NO: 413022 - DNA, 25 bp, Artificial
  probe
  misc_feature (1)..(25): SEQ ID NO: 5512; WAN024EYL; Start 174; Stop 198
cattgccaaaccatattcttccaag

SEQ ID NO: 413023 - DNA, 25 bp, Artificial
  probe
  misc_feature (1)..(25): SEQ ID NO: 5512; WAN024EYL; Start 175; Stop 199
attgccaaaccatattcttccaagt

SEQ ID NO: 413024 - DNA, 25 bp, Artificial
  probe
  misc_feature (1)..(25): SEQ ID NO: 5512; WAN024EYL; Start 284; Stop 308
aaatcaaacctgaaagcatcaaacc

SEQ ID NO: 413025 - DNA, 25 bp, Artificial
  probe
  misc_feature (1)..(25): SEQ ID NO: 5512; WAN024EYL; Start 278; Stop 302
tatctgaaatcaaacctgaaagcat

SEQ ID NO: 413026 - DNA, 25 bp, Artificial
  probe
  misc_feature (1)..(25): SEQ ID NO: 5512; WAN024EYL; Start 176; Stop 200
ttgccaaaccatattcttccaagtt

SEQ ID NO: 413027 - DNA, 25 bp, Artificial
  probe
  misc_feature (1)..(25): SEQ ID NO: 5512; WAN024EYL; Start 280; Stop 304
tctgaaatcaaacctgaaagcatca

SEQ ID NO: 413028 - DNA, 25 bp, Artificial
  probe
  misc_feature (1)..(25): SEQ ID NO: 5512; WAN024EYL; Start 212; Stop 236
attcagccaattcaggagcaatgat

SEQ ID NO: 413029 - DNA, 25 bp, Artificial
  probe
  misc_feature (1)..(25): SEQ ID NO: 5512; WAN024EYL; Start 173; Stop 197
acattgccaaaccatattcttccaa

SEQ ID NO: 413030 - DNA, 25 bp, Artificial
  probe
  misc_feature (1)..(25): SEQ ID NO: 5512; WAN024EYL; Start 285; Stop 309
aatcaaacctgaaagcatcaaacct

SEQ ID NO: 413031 - DNA, 25 bp, Artificial
  probe
  misc_feature (1)..(25): SEQ ID NO: 5512; WAN024EYL; Start 213; Stop 237
ttcagccaattcaggagcaatgatt

SEQ ID NO: 413032 - DNA, 25 bp, Artificial
  probe
  misc_feature (1)..(25): SEQ ID NO: 5512; WAN024EYL; Start 210; Stop 234
caattcagccaattcaggagcaatg

SEQ ID NO: 413033 - DNA, 25 bp, Artificial
  probe
  misc_feature (1)..(25): SEQ ID NO: 5512; WAN024EYL; Start 211; Stop 235
aattcagccaattcaggagcaatga

SEQ ID NO: 413034 - DNA, 25 bp, Artificial
  probe
  misc_feature (1)..(25): SEQ ID NO: 5512; WAN024EYL; Start 275; Stop 299
gggtatctgaaatcaaacctgaaag

SEQ ID NO: 413035 - DNA, 25 bp, Artificial
  probe
  misc_feature (1)..(25): SEQ ID NO: 5512; WAN024EYL; Start 274; Stop 298
agggtatctgaaatcaaacctgaaa

SEQ ID NO: 413036 - DNA, 25 bp, Artificial
  probe
  misc_feature (1)..(25): SEQ ID NO: 5512; WAN024EYL; Start 273; Stop 297
aagggtatctgaaatcaaacctgaa

SEQ ID NO: 413037 - DNA, 25 bp, Artificial
  probe
  misc_feature (1)..(25): SEQ ID NO: 5512; WAN024EYL; Start 270; Stop 294
aagaagggtatctgaaatcaaacct

SEQ ID NO: 413038 - DNA, 25 bp, Artificial
  probe
  misc_feature (1)..(25): SEQ ID NO: 5512; WAN024EYL; Start 276; Stop 300
ggtatctgaaatcaaacctgaaagc

SEQ ID NO: 413039 - DNA, 25 bp, Artificial
  probe
  misc_feature (1)..(25): SEQ ID NO: 5512; WAN024EYL; Start 286; Stop 310
atcaaacctgaaagcatcaaacctg

SEQ ID NO: 413040 - DNA, 25 bp, Artificial
  probe
  misc_feature (1)..(25): SEQ ID NO: 5512; WAN024EYL; Start 272; Stop 296
gaagggtatctgaaatcaaacctga

SEQ ID NO: 413041 - DNA, 25 bp, Artificial
  probe
  misc_feature (1)..(25): SEQ ID NO: 5512; WAN024EYL; Start 271; Stop 295
agaagggtatctgaaatcaaacctg

SEQ ID NO: 413042 - DNA, 25 bp, Artificial
  probe
  misc_feature (1)..(25): SEQ ID NO: 5512; WAN024EYL; Start 83; Stop 107
ggacattatttccgttgagttcaaa

SEQ ID NO: 413043 - DNA, 25 bp, Artificial
  probe
  misc_feature (1)..(25): SEQ ID NO: 5513; WAN024DTS; Start 17; Stop 41
tatatggaggagttcagcttattgg

SEQ ID NO: 413044 - DNA, 25 bp, Artificial
  probe
  misc_feature (1)..(25): SEQ ID NO: 5513; WAN024DTS; Start 15; Stop 39
ggtatatggaggagttcagcttatt

SEQ ID NO: 413045 - DNA, 25 bp, Artificial
  probe
  misc_feature (1)..(25): SEQ ID NO: 5513; WAN024DTS; Start 14; Stop 38
tggtatatggaggagttcagcttat

SEQ ID NO: 413046 - DNA, 25 bp, Artificial
  probe
  misc_feature (1)..(25): SEQ ID NO: 5513; WAN024DTS; Start 13; Stop 37
ttggtatatggaggagttcagctta

SEQ ID NO: 413047 - DNA, 25 bp, Artificial
  probe
  misc_feature (1)..(25): SEQ ID NO: 5513; WAN024DTS; Start 18; Stop 42
atatggaggagttcagcttattggt

SEQ ID NO: 413048 - DNA, 25 bp, Artificial
  probe
  misc_feature (1)..(25): SEQ ID NO: 5513; WAN024DTS; Start 16; Stop 40
gtatatggaggagttcagcttattg

SEQ ID NO: 413049 - DNA, 25 bp, Artificial
  probe
  misc_feature (1)..(25): SEQ ID NO: 5513; WAN024DTS; Start 19; Stop 43
tatggaggagttcagcttattggtt

SEQ ID NO: 413050 - DNA, 25 bp, Artificial
  probe
  misc_feature (1)..(25): SEQ ID NO: 5513; WAN024DTS; Start 280; Stop 304
cgacaaacaatctctatcaacaagt

SEQ ID NO: 413051 - DNA, 25 bp, Artificial
  probe
  misc_feature (1)..(25): SEQ ID NO: 5513; WAN024DTS; Start 279; Stop 303
acgacaaacaatctctatcaacaag

SEQ ID NO: 413052 - DNA, 25 bp, Artificial
  probe
  misc_feature (1)..(25): SEQ ID NO: 5513; WAN024DTS; Start 282; Stop 306
acaaacaatctctatcaacaagtca

SEQ ID NO: 413053 - DNA, 25 bp, Artificial
  probe
  misc_feature (1)..(25): SEQ ID NO: 5513; WAN024DTS; Start 278; Stop 302
tacgacaaacaatctctatcaacaa

SEQ ID NO: 413054 - DNA, 25 bp, Artificial
  probe
  misc_feature (1)..(25): SEQ ID NO: 5513; WAN024DTS; Start 277; Stop 301
ttacgacaaacaatctctatcaaca

SEQ ID NO: 413055 - DNA, 25 bp, Artificial
  probe
  misc_feature (1)..(25): SEQ ID NO: 5513; WAN024DTS; Start 97; Stop 121
gtattcatgtctatggtgaccactt

SEQ ID NO: 413056 - DNA, 25 bp, Artificial
  probe
  misc_feature (1)..(25): SEQ ID NO: 5513; WAN024DTS; Start 95; Stop 119
tagtattcatgtctatggtgaccac

SEQ ID NO: 413057 - DNA, 25 bp, Artificial
  probe
  misc_feature (1)..(25): SEQ ID NO: 5513; WAN024DTS; Start 203; Stop 227
atccacttgctttgacaaatgattt

SEQ ID NO: 413058 - DNA, 25 bp, Artificial
  probe
  misc_feature (1)..(25): SEQ ID NO: 5513; WAN024DTS; Start 200; Stop 224
cttatccacttgctttgacaaatga

SEQ ID NO: 413059 - DNA, 25 bp, Artificial
  probe
  misc_feature (1)..(25): SEQ ID NO: 5513; WAN024DTS; Start 199; Stop 223
acttatccacttgctttgacaaatg

SEQ ID NO: 413060 - DNA, 25 bp, Artificial
  probe
  misc_feature (1)..(25): SEQ ID NO: 5513; WAN024DTS; Start 197; Stop 221
gtacttatccacttgctttgacaaa

SEQ ID NO: 413061 - DNA, 25 bp, Artificial
  probe
  misc_feature (1)..(25): SEQ ID NO: 5513; WAN024DTS; Start 202; Stop 226
tatccacttgctttgacaaatgatt

SEQ ID NO: 413062 - DNA, 25 bp, Artificial
  probe
  misc_feature (1)..(25): SEQ ID NO: 5513; WAN024DTS; Start 201; Stop 225
ttatccacttgctttgacaaatgat

SEQ ID NO: 413063 - DNA, 25 bp, Artificial
  probe
  misc_feature (1)..(25): SEQ ID NO: 5513; WAN024DTS; Start 96; Stop 120
agtattcatgtctatggtgaccact

SEQ ID NO: 413064 - DNA, 25 bp, Artificial
  probe
  misc_feature (1)..(25): SEQ ID NO: 5513; WAN024DTS; Start 94; Stop 118
ttagtattcatgtctatggtgacca

SEQ ID NO: 413065 - DNA, 25 bp, Artificial
  probe
  misc_feature (1)..(25): SEQ ID NO: 5513; WAN024DTS; Start 246; Stop 270
ctggttaccaatgagctattcagtt

SEQ ID NO: 413066 - DNA, 25 bp, Artificial
  probe
  misc_feature (1)..(25): SEQ ID NO: 5513; WAN024DTS; Start 206; Stop 230
cacttgctttgacaaatgatttctt

SEQ ID NO: 413067 - DNA, 25 bp, Artificial
  probe
  misc_feature (1)..(25): SEQ ID NO: 5513; WAN024DTS; Start 205; Stop 229
ccacttgctttgacaaatgatttct

SEQ ID NO: 413068 - DNA, 25 bp, Artificial
  probe
  misc_feature (1)..(25): SEQ ID NO: 5513; WAN024DTS; Start 204; Stop 228
tccacttgctttgacaaatgatttc

SEQ ID NO: 413069 - DNA, 25 bp, Artificial
  probe
  misc_feature (1)..(25): SEQ ID NO: 5513; WAN024DTS; Start 33; Stop 57
gcttattggtttaactgctaatcat

SEQ ID NO: 413070 - DNA, 25 bp, Artificial
  probe
  misc_feature (1)..(25): SEQ ID NO: 5513; WAN024DTS; Start 198; Stop 222
tacttatccacttgctttgacaaat

SEQ ID NO: 413071 - DNA, 25 bp, Artificial
  probe
  misc_feature (1)..(25): SEQ ID NO: 5513; WAN024DTS; Start 194; Stop 218
caggtacttatccacttgctttgac

SEQ ID NO: 413072 - DNA, 25 bp, Artificial
  probe
  misc_feature (1)..(25): SEQ ID NO: 5513; WAN024DTS; Start 196; Stop 220
ggtacttatccacttgctttgacaa

SEQ ID NO: 413073 - DNA, 25 bp, Artificial
  probe
  misc_feature (1)..(25): SEQ ID NO: 5513; WAN024DTS; Start 207; Stop 231
acttgctttgacaaatgatttcttt

SEQ ID NO: 413074 - DNA, 25 bp, Artificial
  probe
  misc_feature (1)..(25): SEQ ID NO: 5513; WAN024DTS; Start 283; Stop 307
caaacaatctctatcaacaagtcat

SEQ ID NO: 413075 - DNA, 25 bp, Artificial
  probe
  misc_feature (1)..(25): SEQ ID NO: 5513; WAN024DTS; Start 195; Stop 219
aggtacttatccacttgctttgaca

SEQ ID NO: 413076 - DNA, 25 bp, Artificial
  probe
  misc_feature (1)..(25): SEQ ID NO: 5514; WAN024DTP; Start 61; Stop 85
atattgagtcttctgatgtcgcttg

SEQ ID NO: 413077 - DNA, 25 bp, Artificial
  probe
  misc_feature (1)..(25): SEQ ID NO: 5514; WAN024DTP; Start 63; Stop 87
attgagtcttctgatgtcgcttgta

SEQ ID NO: 413078 - DNA, 25 bp, Artificial
  probe
  misc_feature (1)..(25): SEQ ID NO: 5514; WAN024DTP; Start 62; Stop 86
tattgagtcttctgatgtcgcttgt

SEQ ID NO: 413079 - DNA, 25 bp, Artificial
  probe
  misc_feature (1)..(25): SEQ ID NO: 5514; WAN024DTP; Start 203; Stop 227
gaccttctacagatgttcctccatt

SEQ ID NO: 413080 - DNA, 25 bp, Artificial
  probe
  misc_feature (1)..(25): SEQ ID NO: 5514; WAN024DTP; Start 60; Stop 84
aatattgagtcttctgatgtcgctt

SEQ ID NO: 413081 - DNA, 25 bp, Artificial
  probe
  misc_feature (1)..(25): SEQ ID NO: 5514; WAN024DTP; Start 77; Stop 101
tgtcgcttgtactcacattagataa

SEQ ID NO: 413082 - DNA, 25 bp, Artificial
  probe
  misc_feature (1)..(25): SEQ ID NO: 5514; WAN024DTP; Start 57; Stop 81
tggaatattgagtcttctgatgtcg

SEQ ID NO: 413083 - DNA, 25 bp, Artificial
  probe
  misc_feature (1)..(25): SEQ ID NO: 5514; WAN024DTP; Start 59; Stop 83
gaatattgagtcttctgatgtcgct

SEQ ID NO: 413084 - DNA, 25 bp, Artificial
  probe
  misc_feature (1)..(25): SEQ ID NO: 5514; WAN024DTP; Start 21; Stop 45
taccgaacgaacaattacaccagat

SEQ ID NO: 413085 - DNA, 25 bp, Artificial
  probe
  misc_feature (1)..(25): SEQ ID NO: 5514; WAN024DTP; Start 197; Stop 221
aaccaagaccttctacagatgttcc

SEQ ID NO: 413086 - DNA, 25 bp, Artificial
  probe
  misc_feature (1)..(25): SEQ ID NO: 5514; WAN024DTP; Start 200; Stop 224
caagaccttctacagatgttcctcc

SEQ ID NO: 413087 - DNA, 25 bp, Artificial
  probe
  misc_feature (1)..(25): SEQ ID NO: 5514; WAN024DTP; Start 199; Stop 223
ccaagaccttctacagatgttcctc

SEQ ID NO: 413088 - DNA, 25 bp, Artificial
  probe
  misc_feature (1)..(25): SEQ ID NO: 5514; WAN024DTP; Start 56; Stop 80
ttggaatattgagtcttctgatgtc

SEQ ID NO: 413089 - DNA, 25 bp, Artificial
  probe
  misc_feature (1)..(25): SEQ ID NO: 5514; WAN024DTP; Start 55; Stop 79
cttggaatattgagtcttctgatgt

SEQ ID NO: 413090 - DNA, 25 bp, Artificial
  probe
  misc_feature (1)..(25): SEQ ID NO: 5514; WAN024DTP; Start 202; Stop 226
agaccttctacagatgttcctccat

SEQ ID NO: 413091 - DNA, 25 bp, Artificial
  probe
  misc_feature (1)..(25): SEQ ID NO: 5514; WAN024DTP; Start 58; Stop 82
ggaatattgagtcttctgatgtcgc

SEQ ID NO: 413092 - DNA, 25 bp, Artificial
  probe
  misc_feature (1)..(25): SEQ ID NO: 5514; WAN024DTP; Start 37; Stop 61
acaccagatgtaacattacttggaa

SEQ ID NO: 413093 - DNA, 25 bp, Artificial
  probe
  misc_feature (1)..(25): SEQ ID NO: 5514; WAN024DTP; Start 201; Stop 225
aagaccttctacagatgttcctcca

SEQ ID NO: 413094 - DNA, 25 bp, Artificial
  probe
  misc_feature (1)..(25): SEQ ID NO: 5514; WAN024DTP; Start 54; Stop 78
acttggaatattgagtcttctgatg

SEQ ID NO: 413095 - DNA, 25 bp, Artificial
  probe
  misc_feature (1)..(25): SEQ ID NO: 5514; WAN024DTP; Start 38; Stop 62
caccagatgtaacattacttggaat

SEQ ID NO: 413096 - DNA, 25 bp, Artificial
  probe
  misc_feature (1)..(25): SEQ ID NO: 5514; WAN024DTP; Start 198; Stop 222
accaagaccttctacagatgttcct

SEQ ID NO: 413097 - DNA, 25 bp, Artificial
  probe
  misc_feature (1)..(25): SEQ ID NO: 5514; WAN024DTP; Start 214; Stop 238
gatgttcctccatttgtagcaattt

SEQ ID NO: 413098 - DNA, 25 bp, Artificial
  probe
  misc_feature (1)..(25): SEQ ID NO: 5514; WAN024DTP; Start 36; Stop 60
tacaccagatgtaacattacttgga

SEQ ID NO: 413099 - DNA, 25 bp, Artificial
  probe
  misc_feature (1)..(25): SEQ ID NO: 5514; WAN024DTP; Start 196; Stop 220
aaaccaagaccttctacagatgttc

SEQ ID NO: 413100 - DNA, 25 bp, Artificial
  probe
  misc_feature (1)..(25): SEQ ID NO: 5514; WAN024DTP; Start 195; Stop 219
gaaaccaagaccttctacagatgtt

SEQ ID NO: 413101 - DNA, 25 bp, Artificial
  probe
  misc_feature (1)..(25): SEQ ID NO: 5514; WAN024DTP; Start 213; Stop 237
agatgttcctccatttgtagcaatt

SEQ ID NO: 413102 - DNA, 25 bp, Artificial
  probe
  misc_feature (1)..(25): SEQ ID NO: 5514; WAN024DTP; Start 64; Stop 88
ttgagtcttctgatgtcgcttgtac

SEQ ID NO: 413103 - DNA, 25 bp, Artificial
  probe
  misc_feature (1)..(25): SEQ ID NO: 5514; WAN024DTP; Start 205; Stop 229
ccttctacagatgttcctccatttg

SEQ ID NO: 413104 - DNA, 25 bp, Artificial
  probe
  misc_feature (1)..(25): SEQ ID NO: 5514; WAN024DTP; Start 8; Stop 32
gcatattactttgtaccgaacgaac

SEQ ID NO: 413105 - DNA, 25 bp, Artificial
  probe
  misc_feature (1)..(25): SEQ ID NO: 5514; WAN024DTP; Start 24; Stop 48
cgaacgaacaattacaccagatgta

SEQ ID NO: 413106 - DNA, 25 bp, Artificial
  probe
  misc_feature (1)..(25): SEQ ID NO: 5514; WAN024DTP; Start 212; Stop 236
cagatgttcctccatttgtagcaat

SEQ ID NO: 413107 - DNA, 25 bp, Artificial
  probe
  misc_feature (1)..(25): SEQ ID NO: 5514; WAN024DTP; Start 204; Stop 228
accttctacagatgttcctccattt

SEQ ID NO: 413108 - DNA, 25 bp, Artificial
  probe
  misc_feature (1)..(25): SEQ ID NO: 5514; WAN024DTP; Start 206; Stop 230
cttctacagatgttcctccatttgt

SEQ ID NO: 413109 - DNA, 25 bp, Artificial
  probe
  misc_feature (1)..(25): SEQ ID NO: 5515; WAN024DZ4; Start 1469; Stop 1493
acgatactcttattgatgatgacca

SEQ ID NO: 413110 - DNA, 25 bp, Artificial
  probe
  misc_feature (1)..(25): SEQ ID NO: 5515; WAN024DZ4; Start 1279; Stop 1303
gacattcgtggctatgacttagata

SEQ ID NO: 413111 - DNA, 25 bp, Artificial
  probe
  misc_feature (1)..(25): SEQ ID NO: 5515; WAN024DZ4; Start 1470; Stop 1494
cgatactcttattgatgatgaccag

SEQ ID NO: 413112 - DNA, 25 bp, Artificial
  probe
  misc_feature (1)..(25): SEQ ID NO: 5515; WAN024DZ4; Start 1297; Stop 1321
ttagatagtcttagaagcaaggtgg

SEQ ID NO: 413113 - DNA, 25 bp, Artificial
  probe
  misc_feature (1)..(25): SEQ ID NO: 5515; WAN024DZ4; Start 943; Stop 967
tactaccagcctattatccaagttg

SEQ ID NO: 413114 - DNA, 25 bp, Artificial
  probe
  misc_feature (1)..(25): SEQ ID NO: 5515; WAN024DZ4; Start 1278; Stop 1302
agacattcgtggctatgacttagat

SEQ ID NO: 413115 - DNA, 25 bp, Artificial
  probe
  misc_feature (1)..(25): SEQ ID NO: 5515; WAN024DZ4; Start 1277; Stop 1301
aagacattcgtggctatgacttaga

SEQ ID NO: 413116 - DNA, 25 bp, Artificial
  probe
  misc_feature (1)..(25): SEQ ID NO: 5515; WAN024DZ4; Start 1281; Stop 1305
cattcgtggctatgacttagatagt

SEQ ID NO: 413117 - DNA, 25 bp, Artificial
  probe
  misc_feature (1)..(25): SEQ ID NO: 5515; WAN024DZ4; Start 1280; Stop 1304
acattcgtggctatgacttagatag

SEQ ID NO: 413118 - DNA, 25 bp, Artificial
  probe
  misc_feature (1)..(25): SEQ ID NO: 5515; WAN024DZ4; Start 1296; Stop 1320
cttagatagtcttagaagcaaggtg

SEQ ID NO: 413119 - DNA, 25 bp, Artificial
  probe
  misc_feature (1)..(25): SEQ ID NO: 5515; WAN024DZ4; Start 239; Stop 263
tatcaggaatcatggtcaatcttgg

SEQ ID NO: 413120 - DNA, 25 bp, Artificial
  probe
  misc_feature (1)..(25): SEQ ID NO: 5515; WAN024DZ4; Start 1295; Stop 1319
acttagatagtcttagaagcaaggt

SEQ ID NO: 413121 - DNA, 25 bp, Artificial
  probe
  misc_feature (1)..(25): SEQ ID NO: 5515; WAN024DZ4; Start 712; Stop 736
attcaagaggatatgatggcaggat

SEQ ID NO: 413122 - DNA, 25 bp, Artificial
  probe
  misc_feature (1)..(25): SEQ ID NO: 5515; WAN024DZ4; Start 238; Stop 262
ctatcaggaatcatggtcaatcttg

SEQ ID NO: 413123 - DNA, 25 bp, Artificial
  probe
  misc_feature (1)..(25): SEQ ID NO: 5515; WAN024DZ4; Start 942; Stop 966
gtactaccagcctattatccaagtt

SEQ ID NO: 413124 - DNA, 25 bp, Artificial
  probe
  misc_feature (1)..(25): SEQ ID NO: 5515; WAN024DZ4; Start 713; Stop 737
ttcaagaggatatgatggcaggatt

SEQ ID NO: 413125 - DNA, 25 bp, Artificial
  probe
  misc_feature (1)..(25): SEQ ID NO: 5515; WAN024DZ4; Start 711; Stop 735
aattcaagaggatatgatggcagga

SEQ ID NO: 413126 - DNA, 25 bp, Artificial
  probe
  misc_feature (1)..(25): SEQ ID NO: 5515; WAN024DZ4; Start 1468; Stop 1492
tacgatactcttattgatgatgacc

SEQ ID NO: 413127 - DNA, 25 bp, Artificial
  probe
  misc_feature (1)..(25): SEQ ID NO: 5515; WAN024DZ4; Start 1471; Stop 1495
gatactcttattgatgatgaccaga

SEQ ID NO: 413128 - DNA, 25 bp, Artificial
  probe
  misc_feature (1)..(25): SEQ ID NO: 5515; WAN024DZ4; Start 827; Stop 851
tgattaatacagccatcgtcatctt

SEQ ID NO: 413129 - DNA, 25 bp, Artificial
  probe
  misc_feature (1)..(25): SEQ ID NO: 5515; WAN024DZ4; Start 504; Stop 528
atacattggtctgattcttgtcatg

SEQ ID NO: 413130 - DNA, 25 bp, Artificial
  probe
  misc_feature (1)..(25): SEQ ID NO: 5515; WAN024DZ4; Start 237; Stop 261
cctatcaggaatcatggtcaatctt

SEQ ID NO: 413131 - DNA, 25 bp, Artificial
  probe
  misc_feature (1)..(25): SEQ ID NO: 5515; WAN024DZ4; Start 502; Stop 526
ttatacattggtctgattcttgtca

SEQ ID NO: 413132 - DNA, 25 bp, Artificial
  probe
  misc_feature (1)..(25): SEQ ID NO: 5515; WAN024DZ4; Start 944; Stop 968
actaccagcctattatccaagttgc

SEQ ID NO: 413133 - DNA, 25 bp, Artificial
  probe
  misc_feature (1)..(25): SEQ ID NO: 5515; WAN024DZ4; Start 90; Stop 114
gttctcatttgtagttgtcatcctg

SEQ ID NO: 413134 - DNA, 25 bp, Artificial
  probe
  misc_feature (1)..(25): SEQ ID NO: 5515; WAN024DZ4; Start 89; Stop 113
agttctcatttgtagttgtcatcct

SEQ ID NO: 413135 - DNA, 25 bp, Artificial
  probe
  misc_feature (1)..(25): SEQ ID NO: 5515; WAN024DZ4; Start 721; Stop 745
gatatgatggcaggatttcttgaac

SEQ ID NO: 413136 - DNA, 25 bp, Artificial
  probe
  misc_feature (1)..(25): SEQ ID NO: 5515; WAN024DZ4; Start 722; Stop 746
atatgatggcaggatttcttgaaca

SEQ ID NO: 413137 - DNA, 25 bp, Artificial
  probe
  misc_feature (1)..(25): SEQ ID NO: 5515; WAN024DZ4; Start 826; Stop 850
ctgattaatacagccatcgtcatct

SEQ ID NO: 413138 - DNA, 25 bp, Artificial
  probe
  misc_feature (1)..(25): SEQ ID NO: 5515; WAN024DZ4; Start 503; Stop 527
tatacattggtctgattcttgtcat

SEQ ID NO: 413139 - DNA, 25 bp, Artificial
  probe
  misc_feature (1)..(25): SEQ ID NO: 5515; WAN024DZ4; Start 88; Stop 112
aagttctcatttgtagttgtcatcc

SEQ ID NO: 413140 - DNA, 25 bp, Artificial
  probe
  misc_feature (1)..(25): SEQ ID NO: 5515; WAN024DZ4; Start 723; Stop 747
tatgatggcaggatttcttgaacaa

SEQ ID NO: 413141 - DNA, 25 bp, Artificial
  probe
  misc_feature (1)..(25): SEQ ID NO: 5515; WAN024DZ4; Start 1275; Stop 1299
taaagacattcgtggctatgactta

SEQ ID NO: 413142 - DNA, 25 bp, Artificial
  probe
  misc_feature (1)..(25): SEQ ID NO: 5517; WAN024CB7; Start 126; Stop 150
atacttatctaggtctgttgaagcc

SEQ ID NO: 413143 - DNA, 25 bp, Artificial
  probe
  misc_feature (1)..(25): SEQ ID NO: 5517; WAN024CB7; Start 130; Stop 154
ttatctaggtctgttgaagccgatt

SEQ ID NO: 413144 - DNA, 25 bp, Artificial
  probe
  misc_feature (1)..(25): SEQ ID NO: 5517; WAN024CB7; Start 127; Stop 151
tacttatctaggtctgttgaagccg

SEQ ID NO: 413145 - DNA, 25 bp, Artificial
  probe
  misc_feature (1)..(25): SEQ ID NO: 5517; WAN024CB7; Start 131; Stop 155
tatctaggtctgttgaagccgattc

SEQ ID NO: 413146 - DNA, 25 bp, Artificial
  probe
  misc_feature (1)..(25): SEQ ID NO: 5517; WAN024CB7; Start 129; Stop 153
cttatctaggtctgttgaagccgat

SEQ ID NO: 413147 - DNA, 25 bp, Artificial
  probe
  misc_feature (1)..(25): SEQ ID NO: 5517; WAN024CB7; Start 125; Stop 149
aatacttatctaggtctgttgaagc

SEQ ID NO: 413148 - DNA, 25 bp, Artificial
  probe
  misc_feature (1)..(25): SEQ ID NO: 5517; WAN024CB7; Start 128; Stop 152
acttatctaggtctgttgaagccga

SEQ ID NO: 413149 - DNA, 25 bp, Artificial
  probe
  misc_feature (1)..(25): SEQ ID NO: 5517; WAN024CB7; Start 163; Stop 187
ccctccatgataaagctgatattga

SEQ ID NO: 413150 - DNA, 25 bp, Artificial
  probe
  misc_feature (1)..(25): SEQ ID NO: 5517; WAN024CB7; Start 162; Stop 186
tccctccatgataaagctgatattg

SEQ ID NO: 413151 - DNA, 25 bp, Artificial
  probe
  misc_feature (1)..(25): SEQ ID NO: 5517; WAN024CB7; Start 161; Stop 185
ctccctccatgataaagctgatatt

SEQ ID NO: 413152 - DNA, 25 bp, Artificial
  probe
  misc_feature (1)..(25): SEQ ID NO: 5517; WAN024CB7; Start 182; Stop 206
tattgacaggtaaatcatcatggtg

SEQ ID NO: 413153 - DNA, 25 bp, Artificial
  probe
  misc_feature (1)..(25): SEQ ID NO: 5517; WAN024CB7; Start 164; Stop 188
cctccatgataaagctgatattgac

SEQ ID NO: 413154 - DNA, 25 bp, Artificial
  probe
  misc_feature (1)..(25): SEQ ID NO: 5517; WAN024CB7; Start 165; Stop 189
ctccatgataaagctgatattgaca

SEQ ID NO: 413155 - DNA, 25 bp, Artificial
  probe
  misc_feature (1)..(25): SEQ ID NO: 5517; WAN024CB7; Start 183; Stop 207
attgacaggtaaatcatcatggtgc

SEQ ID NO: 413156 - DNA, 25 bp, Artificial
  probe
  misc_feature (1)..(25): SEQ ID NO: 5517; WAN024CB7; Start 122; Stop 146
ccaaatacttatctaggtctgttga

SEQ ID NO: 413157 - DNA, 25 bp, Artificial
  probe
  misc_feature (1)..(25): SEQ ID NO: 5517; WAN024CB7; Start 121; Stop 145
tccaaatacttatctaggtctgttg

SEQ ID NO: 413158 - DNA, 25 bp, Artificial
  probe
  misc_feature (1)..(25): SEQ ID NO: 5517; WAN024CB7; Start 191; Stop 215
gtaaatcatcatggtgctgcatata

SEQ ID NO: 413159 - DNA, 25 bp, Artificial
  probe
  misc_feature (1)..(25): SEQ ID NO: 5517; WAN024CB7; Start 194; Stop 218
aatcatcatggtgctgcatatattt

SEQ ID NO: 413160 - DNA, 25 bp, Artificial
  probe
  misc_feature (1)..(25): SEQ ID NO: 5517; WAN024CB7; Start 193; Stop 217
aaatcatcatggtgctgcatatatt

SEQ ID NO: 413161 - DNA, 25 bp, Artificial
  probe
  misc_feature (1)..(25): SEQ ID NO: 5517; WAN024CB7; Start 181; Stop 205
atattgacaggtaaatcatcatggt

SEQ ID NO: 413162 - DNA, 25 bp, Artificial
  probe
  misc_feature (1)..(25): SEQ ID NO: 5517; WAN024CB7; Start 167; Stop 191
ccatgataaagctgatattgacagg

SEQ ID NO: 413163 - DNA, 25 bp, Artificial
  probe
  misc_feature (1)..(25): SEQ ID NO: 5517; WAN024CB7; Start 120; Stop 144
ttccaaatacttatctaggtctgtt

SEQ ID NO: 413164 - DNA, 25 bp, Artificial
  probe
  misc_feature (1)..(25): SEQ ID NO: 5517; WAN024CB7; Start 119; Stop 143
tttccaaatacttatctaggtctgt

SEQ ID NO: 413165 - DNA, 25 bp, Artificial
  probe
  misc_feature (1)..(25): SEQ ID NO: 5517; WAN024CB7; Start 168; Stop 192
catgataaagctgatattgacaggt

SEQ ID NO: 413166 - DNA, 25 bp, Artificial
  probe
  misc_feature (1)..(25): SEQ ID NO: 5517; WAN024CB7; Start 192; Stop 216
taaatcatcatggtgctgcatatat

SEQ ID NO: 413167 - DNA, 25 bp, Artificial
  probe
  misc_feature (1)..(25): SEQ ID NO: 5517; WAN024CB7; Start 190; Stop 214
ggtaaatcatcatggtgctgcatat

SEQ ID NO: 413168 - DNA, 25 bp, Artificial
  probe
  misc_feature (1)..(25): SEQ ID NO: 5517; WAN024CB7; Start 184; Stop 208
ttgacaggtaaatcatcatggtgct

SEQ ID NO: 413169 - DNA, 25 bp, Artificial
  probe
  misc_feature (1)..(25): SEQ ID NO: 5517; WAN024CB7; Start 180; Stop 204
gatattgacaggtaaatcatcatgg

SEQ ID NO: 413170 - DNA, 25 bp, Artificial
  probe
  misc_feature (1)..(25): SEQ ID NO: 5517; WAN024CB7; Start 166; Stop 190
tccatgataaagctgatattgacag

SEQ ID NO: 413171 - DNA, 25 bp, Artificial
  probe
  misc_feature (1)..(25): SEQ ID NO: 5517; WAN024CB7; Start 132; Stop 156
atctaggtctgttgaagccgattcc

SEQ ID NO: 413172 - DNA, 25 bp, Artificial
  probe
  misc_feature (1)..(25): SEQ ID NO: 5517; WAN024CB7; Start 177; Stop 201
gctgatattgacaggtaaatcatca

SEQ ID NO: 413173 - DNA, 25 bp, Artificial
  probe
  misc_feature (1)..(25): SEQ ID NO: 5517; WAN024CB7; Start 189; Stop 213
aggtaaatcatcatggtgctgcata

SEQ ID NO: 413174 - DNA, 25 bp, Artificial
  probe
  misc_feature (1)..(25): SEQ ID NO: 5517; WAN024CB7; Start 170; Stop 194
tgataaagctgatattgacaggtaa

SEQ ID NO: 413175 - DNA, 25 bp, Artificial
  probe
  misc_feature (1)..(25): SEQ ID NO: 5518; WAN024G8Y; Start 833; Stop 857
taggtggtcttatgaaggctggtaa

SEQ ID NO: 413176 - DNA, 25 bp, Artificial
  probe
  misc_feature (1)..(25): SEQ ID NO: 5518; WAN024G8Y; Start 832; Stop 856
ttaggtggtcttatgaaggctggta

SEQ ID NO: 413177 - DNA, 25 bp, Artificial
  probe
  misc_feature (1)..(25): SEQ ID NO: 5518; WAN024G8Y; Start 401; Stop 425
ttgaagtggataagaaagaccgtat

SEQ ID NO: 413178 - DNA, 25 bp, Artificial
  probe
  misc_feature (1)..(25): SEQ ID NO: 5518; WAN024G8Y; Start 400; Stop 424
cttgaagtggataagaaagaccgta

SEQ ID NO: 413179 - DNA, 25 bp, Artificial
  probe
  misc_feature (1)..(25): SEQ ID NO: 5518; WAN024G8Y; Start 799; Stop 823
tttggcatttctaaaggtcagttca

SEQ ID NO: 413180 - DNA, 25 bp, Artificial
  probe
  misc_feature (1)..(25): SEQ ID NO: 5518; WAN024G8Y; Start 801; Stop 825
tggcatttctaaaggtcagttcaag

SEQ ID NO: 413181 - DNA, 25 bp, Artificial
  probe
  misc_feature (1)..(25): SEQ ID NO: 5518; WAN024G8Y; Start 802; Stop 826
ggcatttctaaaggtcagttcaaga

SEQ ID NO: 413182 - DNA, 25 bp, Artificial
  probe
  misc_feature (1)..(25): SEQ ID NO: 5518; WAN024G8Y; Start 800; Stop 824
ttggcatttctaaaggtcagttcaa

SEQ ID NO: 413183 - DNA, 25 bp, Artificial
  probe
  misc_feature (1)..(25): SEQ ID NO: 5518; WAN024G8Y; Start 404; Stop 428
aagtggataagaaagaccgtatctg

SEQ ID NO: 413184 - DNA, 25 bp, Artificial
  probe
  misc_feature (1)..(25): SEQ ID NO: 5518; WAN024G8Y; Start 403; Stop 427
gaagtggataagaaagaccgtatct

SEQ ID NO: 413185 - DNA, 25 bp, Artificial
  probe
  misc_feature (1)..(25): SEQ ID NO: 5518; WAN024G8Y; Start 402; Stop 426
tgaagtggataagaaagaccgtatc

SEQ ID NO: 413186 - DNA, 25 bp, Artificial
  probe
  misc_feature (1)..(25): SEQ ID NO: 5518; WAN024G8Y; Start 385; Stop 409
caactctacatccgtcttgaagtgg

SEQ ID NO: 413187 - DNA, 25 bp, Artificial
  probe
  misc_feature (1)..(25): SEQ ID NO: 5518; WAN024G8Y; Start 384; Stop 408
ccaactctacatccgtcttgaagtg

SEQ ID NO: 413188 - DNA, 25 bp, Artificial
  probe
  misc_feature (1)..(25): SEQ ID NO: 5518; WAN024G8Y; Start 382; Stop 406
gaccaactctacatccgtcttgaag

SEQ ID NO: 413189 - DNA, 25 bp, Artificial
  probe
  misc_feature (1)..(25): SEQ ID NO: 5518; WAN024G8Y; Start 383; Stop 407
accaactctacatccgtcttgaagt

SEQ ID NO: 413190 - DNA, 25 bp, Artificial
  probe
  misc_feature (1)..(25): SEQ ID NO: 5518; WAN024G8Y; Start 405; Stop 429
agtggataagaaagaccgtatctgg

SEQ ID NO: 413191 - DNA, 25 bp, Artificial
  probe
  misc_feature (1)..(25): SEQ ID NO: 5518; WAN024G8Y; Start 439; Stop 463
gcttatcaagaagacttccaacgtc

SEQ ID NO: 413192 - DNA, 25 bp, Artificial
  probe
  misc_feature (1)..(25): SEQ ID NO: 5518; WAN024G8Y; Start 121; Stop 145
caaacctatgctcttgctaaggaag

SEQ ID NO: 413193 - DNA, 25 bp, Artificial
  probe
  misc_feature (1)..(25): SEQ ID NO: 5518; WAN024G8Y; Start 386; Stop 410
aactctacatccgtcttgaagtgga

SEQ ID NO: 413194 - DNA, 25 bp, Artificial
  probe
  misc_feature (1)..(25): SEQ ID NO: 5518; WAN024G8Y; Start 120; Stop 144
tcaaacctatgctcttgctaaggaa

SEQ ID NO: 413195 - DNA, 25 bp, Artificial
  probe
  misc_feature (1)..(25): SEQ ID NO: 5518; WAN024G8Y; Start 830; Stop 854
ctttaggtggtcttatgaaggctgg

SEQ ID NO: 413196 - DNA, 25 bp, Artificial
  probe
  misc_feature (1)..(25): SEQ ID NO: 5518; WAN024G8Y; Start 798; Stop 822
ctttggcatttctaaaggtcagttc

SEQ ID NO: 413197 - DNA, 25 bp, Artificial
  probe
  misc_feature (1)..(25): SEQ ID NO: 5518; WAN024G8Y; Start 406; Stop 430
gtggataagaaagaccgtatctggg

SEQ ID NO: 413198 - DNA, 25 bp, Artificial
  probe
  misc_feature (1)..(25): SEQ ID NO: 5518; WAN024G8Y; Start 438; Stop 462
ggcttatcaagaagacttccaacgt

SEQ ID NO: 413199 - DNA, 25 bp, Artificial
  probe
  misc_feature (1)..(25): SEQ ID NO: 5518; WAN024G8Y; Start 437; Stop 461
tggcttatcaagaagacttccaacg

SEQ ID NO: 413200 - DNA, 25 bp, Artificial
  probe
  misc_feature (1)..(25): SEQ ID NO: 5518; WAN024G8Y; Start 390; Stop 414
ctacatccgtcttgaagtggataag

SEQ ID NO: 413201 - DNA, 25 bp, Artificial
  probe
  misc_feature (1)..(25): SEQ ID NO: 5518; WAN024G8Y; Start 391; Stop 415
tacatccgtcttgaagtggataaga

SEQ ID NO: 413202 - DNA, 25 bp, Artificial
  probe
  misc_feature (1)..(25): SEQ ID NO: 5518; WAN024G8Y; Start 389; Stop 413
tctacatccgtcttgaagtggataa

SEQ ID NO: 413203 - DNA, 25 bp, Artificial
  probe
  misc_feature (1)..(25): SEQ ID NO: 5518; WAN024G8Y; Start 803; Stop 827
gcatttctaaaggtcagttcaagaa

SEQ ID NO: 413204 - DNA, 25 bp, Artificial
  probe
  misc_feature (1)..(25): SEQ ID NO: 5518; WAN024G8Y; Start 388; Stop 412
ctctacatccgtcttgaagtggata

SEQ ID NO: 413205 - DNA, 25 bp, Artificial
  probe
  misc_feature (1)..(25): SEQ ID NO: 5518; WAN024G8Y; Start 111; Stop 135
aaaggatggtcaaacctatgctctt

SEQ ID NO: 413206 - DNA, 25 bp, Artificial
  probe
  misc_feature (1)..(25): SEQ ID NO: 5518; WAN024G8Y; Start 119; Stop 143
gtcaaacctatgctcttgctaagga

SEQ ID NO: 413207 - DNA, 25 bp, Artificial
  probe
  misc_feature (1)..(25): SEQ ID NO: 5518; WAN024G8Y; Start 574; Stop 598
tttattcatcctagcgagcgttacg

SEQ ID NO: 413208 - DNA, 25 bp, Artificial
  probe
  misc_feature (1)..(25): SEQ ID NO: 5519; WAN024FHO; Start 55; Stop 79
caactgctggtgaatatgtccataa

SEQ ID NO: 413209 - DNA, 25 bp, Artificial
  probe
  misc_feature (1)..(25): SEQ ID NO: 5519; WAN024FHO; Start 214; Stop 238
atgaatttgaagaggttgattgtgg

SEQ ID NO: 413210 - DNA, 25 bp, Artificial
  probe
  misc_feature (1)..(25): SEQ ID NO: 5519; WAN024FHO; Start 212; Stop 236
cgatgaatttgaagaggttgattgt

SEQ ID NO: 413211 - DNA, 25 bp, Artificial
  probe
  misc_feature (1)..(25): SEQ ID NO: 5519; WAN024FHO; Start 211; Stop 235
acgatgaatttgaagaggttgattg

SEQ ID NO: 413212 - DNA, 25 bp, Artificial
  probe
  misc_feature (1)..(25): SEQ ID NO: 5519; WAN024FHO; Start 210; Stop 234
gacgatgaatttgaagaggttgatt

SEQ ID NO: 413213 - DNA, 25 bp, Artificial
  probe
  misc_feature (1)..(25): SEQ ID NO: 5519; WAN024FHO; Start 216; Stop 240
gaatttgaagaggttgattgtggag

SEQ ID NO: 413214 - DNA, 25 bp, Artificial
  probe
  misc_feature (1)..(25): SEQ ID NO: 5519; WAN024FHO; Start 209; Stop 233
tgacgatgaatttgaagaggttgat

SEQ ID NO: 413215 - DNA, 25 bp, Artificial
  probe
  misc_feature (1)..(25): SEQ ID NO: 5519; WAN024FHO; Start 215; Stop 239
tgaatttgaagaggttgattgtgga

SEQ ID NO: 413216 - DNA, 25 bp, Artificial
  probe
  misc_feature (1)..(25): SEQ ID NO: 5519; WAN024FHO; Start 205; Stop 229
aaactgacgatgaatttgaagaggt

SEQ ID NO: 413217 - DNA, 25 bp, Artificial
  probe
  misc_feature (1)..(25): SEQ ID NO: 5519; WAN024FHO; Start 213; Stop 237
gatgaatttgaagaggttgattgtg

SEQ ID NO: 413218 - DNA, 25 bp, Artificial
  probe
  misc_feature (1)..(25): SEQ ID NO: 5519; WAN024FHO; Start 124; Stop 148
ctcttgtttgccagtatgaatcaac

SEQ ID NO: 413219 - DNA, 25 bp, Artificial
  probe
  misc_feature (1)..(25): SEQ ID NO: 5519; WAN024FHO; Start 208; Stop 232
ctgacgatgaatttgaagaggttga

SEQ ID NO: 413220 - DNA, 25 bp, Artificial
  probe
  misc_feature (1)..(25): SEQ ID NO: 5519; WAN024FHO; Start 76; Stop 100
ataaacagcaatatcacagggagga

SEQ ID NO: 413221 - DNA, 25 bp, Artificial
  probe
  misc_feature (1)..(25): SEQ ID NO: 5519; WAN024FHO; Start 75; Stop 99
cataaacagcaatatcacagggagg

SEQ ID NO: 413222 - DNA, 25 bp, Artificial
  probe
  misc_feature (1)..(25): SEQ ID NO: 5519; WAN024FHO; Start 74; Stop 98
ccataaacagcaatatcacagggag

SEQ ID NO: 413223 - DNA, 25 bp, Artificial
  probe
  misc_feature (1)..(25): SEQ ID NO: 5519; WAN024FHO; Start 206; Stop 230
aactgacgatgaatttgaagaggtt

SEQ ID NO: 413224 - DNA, 25 bp, Artificial
  probe
  misc_feature (1)..(25): SEQ ID NO: 5519; WAN024FHO; Start 121; Stop 145
ctcctcttgtttgccagtatgaatc

SEQ ID NO: 413225 - DNA, 25 bp, Artificial
  probe
  misc_feature (1)..(25): SEQ ID NO: 5519; WAN024FHO; Start 77; Stop 101
taaacagcaatatcacagggaggat

SEQ ID NO: 413226 - DNA, 25 bp, Artificial
  probe
  misc_feature (1)..(25): SEQ ID NO: 5519; WAN024FHO; Start 126; Stop 150
cttgtttgccagtatgaatcaactc

SEQ ID NO: 413227 - DNA, 25 bp, Artificial
  probe
  misc_feature (1)..(25): SEQ ID NO: 5519; WAN024FHO; Start 207; Stop 231
actgacgatgaatttgaagaggttg

SEQ ID NO: 413228 - DNA, 25 bp, Artificial
  probe
  misc_feature (1)..(25): SEQ ID NO: 5519; WAN024FHO; Start 127; Stop 151
ttgtttgccagtatgaatcaactct

SEQ ID NO: 413229 - DNA, 25 bp, Artificial
  probe
  misc_feature (1)..(25): SEQ ID NO: 5519; WAN024FHO; Start 125; Stop 149
tcttgtttgccagtatgaatcaact

SEQ ID NO: 413230 - DNA, 25 bp, Artificial
  probe
  misc_feature (1)..(25): SEQ ID NO: 5519; WAN024FHO; Start 72; Stop 96
gtccataaacagcaatatcacaggg

SEQ ID NO: 413231 - DNA, 25 bp, Artificial
  probe
  misc_feature (1)..(25): SEQ ID NO: 5519; WAN024FHO; Start 70; Stop 94
atgtccataaacagcaatatcacag

SEQ ID NO: 413232 - DNA, 25 bp, Artificial
  probe
  misc_feature (1)..(25): SEQ ID NO: 5519; WAN024FHO; Start 164; Stop 188
ttatcaggcagatgatggctaattc

SEQ ID NO: 413233 - DNA, 25 bp, Artificial
  probe
  misc_feature (1)..(25): SEQ ID NO: 5519; WAN024FHO; Start 163; Stop 187
cttatcaggcagatgatggctaatt

SEQ ID NO: 413234 - DNA, 25 bp, Artificial
  probe
  misc_feature (1)..(25): SEQ ID NO: 5519; WAN024FHO; Start 128; Stop 152
tgtttgccagtatgaatcaactctc

SEQ ID NO: 413235 - DNA, 25 bp, Artificial
  probe
  misc_feature (1)..(25): SEQ ID NO: 5519; WAN024FHO; Start 63; Stop 87
ggtgaatatgtccataaacagcaat

SEQ ID NO: 413236 - DNA, 25 bp, Artificial
  probe
  misc_feature (1)..(25): SEQ ID NO: 5519; WAN024FHO; Start 123; Stop 147
cctcttgtttgccagtatgaatcaa

SEQ ID NO: 413237 - DNA, 25 bp, Artificial
  probe
  misc_feature (1)..(25): SEQ ID NO: 5519; WAN024FHO; Start 217; Stop 241
aatttgaagaggttgattgtggagc

SEQ ID NO: 413238 - DNA, 25 bp, Artificial
  probe
  misc_feature (1)..(25): SEQ ID NO: 5519; WAN024FHO; Start 71; Stop 95
tgtccataaacagcaatatcacagg

SEQ ID NO: 413239 - DNA, 25 bp, Artificial
  probe
  misc_feature (1)..(25): SEQ ID NO: 5519; WAN024FHO; Start 122; Stop 146
tcctcttgtttgccagtatgaatca

SEQ ID NO: 413240 - DNA, 25 bp, Artificial
  probe
  misc_feature (1)..(25): SEQ ID NO: 5519; WAN024FHO; Start 233; Stop 257
ttgtggagcacttcaatttcttcta

SEQ ID NO: 413241 - DNA, 25 bp, Artificial
  probe
  misc_feature (1)..(25): SEQ ID NO: 5520; WAN024DZW; Start 198; Stop 222
acatataatctccgtcttccaatcc

SEQ ID NO: 413242 - DNA, 25 bp, Artificial
  probe
  misc_feature (1)..(25): SEQ ID NO: 5520; WAN024DZW; Start 195; Stop 219
ccaacatataatctccgtcttccaa

SEQ ID NO: 413243 - DNA, 25 bp, Artificial
  probe
  misc_feature (1)..(25): SEQ ID NO: 5520; WAN024DZW; Start 196; Stop 220
caacatataatctccgtcttccaat

SEQ ID NO: 413244 - DNA, 25 bp, Artificial
  probe
  misc_feature (1)..(25): SEQ ID NO: 5520; WAN024DZW; Start 197; Stop 221
aacatataatctccgtcttccaatc

SEQ ID NO: 413245 - DNA, 25 bp, Artificial
  probe
  misc_feature (1)..(25): SEQ ID NO: 5520; WAN024DZW; Start 189; Stop 213
attctcccaacatataatctccgtc

SEQ ID NO: 413246 - DNA, 25 bp, Artificial
  probe
  misc_feature (1)..(25): SEQ ID NO: 5520; WAN024DZW; Start 232; Stop 256
catacagtctgtgataagagcgatg

SEQ ID NO: 413247 - DNA, 25 bp, Artificial
  probe
  misc_feature (1)..(25): SEQ ID NO: 5520; WAN024DZW; Start 231; Stop 255
tcatacagtctgtgataagagcgat

SEQ ID NO: 413248 - DNA, 25 bp, Artificial
  probe
  misc_feature (1)..(25): SEQ ID NO: 5520; WAN024DZW; Start 199; Stop 223
catataatctccgtcttccaatccc

SEQ ID NO: 413249 - DNA, 25 bp, Artificial
  probe
  misc_feature (1)..(25): SEQ ID NO: 5520; WAN024DZW; Start 192; Stop 216
ctcccaacatataatctccgtcttc

SEQ ID NO: 413250 - DNA, 25 bp, Artificial
  probe
  misc_feature (1)..(25): SEQ ID NO: 5520; WAN024DZW; Start 191; Stop 215
tctcccaacatataatctccgtctt

SEQ ID NO: 413251 - DNA, 25 bp, Artificial
  probe
  misc_feature (1)..(25): SEQ ID NO: 5520; WAN024DZW; Start 190; Stop 214
ttctcccaacatataatctccgtct

SEQ ID NO: 413252 - DNA, 25 bp, Artificial
  probe
  misc_feature (1)..(25): SEQ ID NO: 5520; WAN024DZW; Start 188; Stop 212
aattctcccaacatataatctccgt

SEQ ID NO: 413253 - DNA, 25 bp, Artificial
  probe
  misc_feature (1)..(25): SEQ ID NO: 5520; WAN024DZW; Start 233; Stop 257
atacagtctgtgataagagcgatgt

SEQ ID NO: 413254 - DNA, 25 bp, Artificial
  probe
  misc_feature (1)..(25): SEQ ID NO: 5520; WAN024DZW; Start 124; Stop 148
gatagaacctgccaagttacctgtc

SEQ ID NO: 413255 - DNA, 25 bp, Artificial
  probe
  misc_feature (1)..(25): SEQ ID NO: 5520; WAN024DZW; Start 106; Stop 130
accatctttgagtttgaggatagaa

SEQ ID NO: 413256 - DNA, 25 bp, Artificial
  probe
  misc_feature (1)..(25): SEQ ID NO: 5520; WAN024DZW; Start 105; Stop 129
aaccatctttgagtttgaggataga

SEQ ID NO: 413257 - DNA, 25 bp, Artificial
  probe
  misc_feature (1)..(25): SEQ ID NO: 5520; WAN024DZW; Start 108; Stop 132
catctttgagtttgaggatagaacc

SEQ ID NO: 413258 - DNA, 25 bp, Artificial
  probe
  misc_feature (1)..(25): SEQ ID NO: 5520; WAN024DZW; Start 107; Stop 131
ccatctttgagtttgaggatagaac

SEQ ID NO: 413259 - DNA, 25 bp, Artificial
  probe
  misc_feature (1)..(25): SEQ ID NO: 5520; WAN024DZW; Start 234; Stop 258
tacagtctgtgataagagcgatgtt

SEQ ID NO: 413260 - DNA, 25 bp, Artificial
  probe
  misc_feature (1)..(25): SEQ ID NO: 5520; WAN024DZW; Start 119; Stop 143
ttgaggatagaacctgccaagttac

SEQ ID NO: 413261 - DNA, 25 bp, Artificial
  probe
  misc_feature (1)..(25): SEQ ID NO: 5520; WAN024DZW; Start 274; Stop 298
tttgataagaatttcgcaagccttt

SEQ ID NO: 413262 - DNA, 25 bp, Artificial
  probe
  misc_feature (1)..(25): SEQ ID NO: 5520; WAN024DZW; Start 270; Stop 294
tttgtttgataagaatttcgcaagc

SEQ ID NO: 413263 - DNA, 25 bp, Artificial
  probe
  misc_feature (1)..(25): SEQ ID NO: 5520; WAN024DZW; Start 193; Stop 217
tcccaacatataatctccgtcttcc

SEQ ID NO: 413264 - DNA, 25 bp, Artificial
  probe
  misc_feature (1)..(25): SEQ ID NO: 5520; WAN024DZW; Start 275; Stop 299
ttgataagaatttcgcaagcctttg

SEQ ID NO: 413265 - DNA, 25 bp, Artificial
  probe
  misc_feature (1)..(25): SEQ ID NO: 5520; WAN024DZW; Start 273; Stop 297
gtttgataagaatttcgcaagcctt

SEQ ID NO: 413266 - DNA, 25 bp, Artificial
  probe
  misc_feature (1)..(25): SEQ ID NO: 5520; WAN024DZW; Start 230; Stop 254
gtcatacagtctgtgataagagcga

SEQ ID NO: 413267 - DNA, 25 bp, Artificial
  probe
  misc_feature (1)..(25): SEQ ID NO: 5520; WAN024DZW; Start 271; Stop 295
ttgtttgataagaatttcgcaagcc

SEQ ID NO: 413268 - DNA, 25 bp, Artificial
  probe
  misc_feature (1)..(25): SEQ ID NO: 5520; WAN024DZW; Start 194; Stop 218
cccaacatataatctccgtcttcca

SEQ ID NO: 413269 - DNA, 25 bp, Artificial
  probe
  misc_feature (1)..(25): SEQ ID NO: 5520; WAN024DZW; Start 90; Stop 114
cgaccacattcttcaaaccatcttt

SEQ ID NO: 413270 - DNA, 25 bp, Artificial
  probe
  misc_feature (1)..(25): SEQ ID NO: 5520; WAN024DZW; Start 229; Stop 253
tgtcatacagtctgtgataagagcg

SEQ ID NO: 413271 - DNA, 25 bp, Artificial
  probe
  misc_feature (1)..(25): SEQ ID NO: 5520; WAN024DZW; Start 278; Stop 302
ataagaatttcgcaagcctttggat

SEQ ID NO: 413272 - DNA, 25 bp, Artificial
  probe
  misc_feature (1)..(25): SEQ ID NO: 5520; WAN024DZW; Start 321; Stop 345
agatcaactctgcataggtatgtgg

SEQ ID NO: 413273 - DNA, 25 bp, Artificial
  probe
  misc_feature (1)..(25): SEQ ID NO: 5520; WAN024DZW; Start 272; Stop 296
tgtttgataagaatttcgcaagcct

SEQ ID NO: 413274 - DNA, 25 bp, Artificial
  probe
  misc_feature (1)..(25): SEQ ID NO: 5521; WAN024CPT; Start 23; Stop 47
ccttaacctctggatcaattccttc

SEQ ID NO: 413275 - DNA, 25 bp, Artificial
  probe
  misc_feature (1)..(25): SEQ ID NO: 5521; WAN024CPT; Start 22; Stop 46
tccttaacctctggatcaattcctt

SEQ ID NO: 413276 - DNA, 25 bp, Artificial
  probe
  misc_feature (1)..(25): SEQ ID NO: 5521; WAN024CPT; Start 21; Stop 45
ttccttaacctctggatcaattcct

SEQ ID NO: 413277 - DNA, 25 bp, Artificial
  probe
  misc_feature (1)..(25): SEQ ID NO: 5521; WAN024CPT; Start 24; Stop 48
cttaacctctggatcaattccttcg

SEQ ID NO: 413278 - DNA, 25 bp, Artificial
  probe
  misc_feature (1)..(25): SEQ ID NO: 5521; WAN024CPT; Start 133; Stop 157
gcagaagtagagtctttagcatctt

SEQ ID NO: 413279 - DNA, 25 bp, Artificial
  probe
  misc_feature (1)..(25): SEQ ID NO: 5521; WAN024CPT; Start 131; Stop 155
gagcagaagtagagtctttagcatc

SEQ ID NO: 413280 - DNA, 25 bp, Artificial
  probe
  misc_feature (1)..(25): SEQ ID NO: 5521; WAN024CPT; Start 132; Stop 156
agcagaagtagagtctttagcatct

SEQ ID NO: 413281 - DNA, 25 bp, Artificial
  probe
  misc_feature (1)..(25): SEQ ID NO: 5521; WAN024CPT; Start 127; Stop 151
acaggagcagaagtagagtctttag

SEQ ID NO: 413282 - DNA, 25 bp, Artificial
  probe
  misc_feature (1)..(25): SEQ ID NO: 5521; WAN024CPT; Start 130; Stop 154
ggagcagaagtagagtctttagcat

SEQ ID NO: 413283 - DNA, 25 bp, Artificial
  probe
  misc_feature (1)..(25): SEQ ID NO: 5521; WAN024CPT; Start 126; Stop 150
gacaggagcagaagtagagtcttta

SEQ ID NO: 413284 - DNA, 25 bp, Artificial
  probe
  misc_feature (1)..(25): SEQ ID NO: 5521; WAN024CPT; Start 13; Stop 37
aagattgtttccttaacctctggat

SEQ ID NO: 413285 - DNA, 25 bp, Artificial
  probe
  misc_feature (1)..(25): SEQ ID NO: 5521; WAN024CPT; Start 12; Stop 36
taagattgtttccttaacctctgga

SEQ ID NO: 413286 - DNA, 25 bp, Artificial
  probe
  misc_feature (1)..(25): SEQ ID NO: 5521; WAN024CPT; Start 128; Stop 152
caggagcagaagtagagtctttagc

SEQ ID NO: 413287 - DNA, 25 bp, Artificial
  probe
  misc_feature (1)..(25): SEQ ID NO: 5521; WAN024CPT; Start 25; Stop 49
ttaacctctggatcaattccttcgc

SEQ ID NO: 413288 - DNA, 25 bp, Artificial
  probe
  misc_feature (1)..(25): SEQ ID NO: 5521; WAN024CPT; Start 18; Stop 42
tgtttccttaacctctggatcaatt

SEQ ID NO: 413289 - DNA, 25 bp, Artificial
  probe
  misc_feature (1)..(25): SEQ ID NO: 5521; WAN024CPT; Start 17; Stop 41
ttgtttccttaacctctggatcaat

SEQ ID NO: 413290 - DNA, 25 bp, Artificial
  probe
  misc_feature (1)..(25): SEQ ID NO: 5521; WAN024CPT; Start 16; Stop 40
attgtttccttaacctctggatcaa

SEQ ID NO: 413291 - DNA, 25 bp, Artificial
  probe
  misc_feature (1)..(25): SEQ ID NO: 5521; WAN024CPT; Start 14; Stop 38
agattgtttccttaacctctggatc

SEQ ID NO: 413292 - DNA, 25 bp, Artificial
  probe
  misc_feature (1)..(25): SEQ ID NO: 5521; WAN024CPT; Start 19; Stop 43
gtttccttaacctctggatcaattc

SEQ ID NO: 413293 - DNA, 25 bp, Artificial
  probe
  misc_feature (1)..(25): SEQ ID NO: 5521; WAN024CPT; Start 20; Stop 44
tttccttaacctctggatcaattcc

SEQ ID NO: 413294 - DNA, 25 bp, Artificial
  probe
  misc_feature (1)..(25): SEQ ID NO: 5521; WAN024CPT; Start 15; Stop 39
gattgtttccttaacctctggatca

SEQ ID NO: 413295 - DNA, 25 bp, Artificial
  probe
  misc_feature (1)..(25): SEQ ID NO: 5521; WAN024CPT; Start 129; Stop 153
aggagcagaagtagagtctttagca

SEQ ID NO: 413296 - DNA, 25 bp, Artificial
  probe
  misc_feature (1)..(25): SEQ ID NO: 5521; WAN024CPT; Start 224; Stop 248
ctaatgagctaccaaaggcaatgag

SEQ ID NO: 413297 - DNA, 25 bp, Artificial
  probe
  misc_feature (1)..(25): SEQ ID NO: 5521; WAN024CPT; Start 212; Stop 236
gtccaatctggtctaatgagctacc

SEQ ID NO: 413298 - DNA, 25 bp, Artificial
  probe
  misc_feature (1)..(25): SEQ ID NO: 5521; WAN024CPT; Start 211; Stop 235
ggtccaatctggtctaatgagctac

SEQ ID NO: 413299 - DNA, 25 bp, Artificial
  probe
  misc_feature (1)..(25): SEQ ID NO: 5521; WAN024CPT; Start 222; Stop 246
gtctaatgagctaccaaaggcaatg

SEQ ID NO: 413300 - DNA, 25 bp, Artificial
  probe
  misc_feature (1)..(25): SEQ ID NO: 5521; WAN024CPT; Start 210; Stop 234
aggtccaatctggtctaatgagcta

SEQ ID NO: 413301 - DNA, 25 bp, Artificial
  probe
  misc_feature (1)..(25): SEQ ID NO: 5521; WAN024CPT; Start 225; Stop 249
taatgagctaccaaaggcaatgaga

SEQ ID NO: 413302 - DNA, 25 bp, Artificial
  probe
  misc_feature (1)..(25): SEQ ID NO: 5521; WAN024CPT; Start 223; Stop 247
tctaatgagctaccaaaggcaatga

SEQ ID NO: 413303 - DNA, 25 bp, Artificial
  probe
  misc_feature (1)..(25): SEQ ID NO: 5521; WAN024CPT; Start 137; Stop 161
aagtagagtctttagcatcttcgct

SEQ ID NO: 413304 - DNA, 25 bp, Artificial
  probe
  misc_feature (1)..(25): SEQ ID NO: 5521; WAN024CPT; Start 208; Stop 232
aaaggtccaatctggtctaatgagc

SEQ ID NO: 413305 - DNA, 25 bp, Artificial
  probe
  misc_feature (1)..(25): SEQ ID NO: 5521; WAN024CPT; Start 209; Stop 233
aaggtccaatctggtctaatgagct

SEQ ID NO: 413306 - DNA, 25 bp, Artificial
  probe
  misc_feature (1)..(25): SEQ ID NO: 5521; WAN024CPT; Start 135; Stop 159
agaagtagagtctttagcatcttcg

SEQ ID NO: 413307 - DNA, 25 bp, Artificial
  probe
  misc_feature (1)..(25): SEQ ID NO: 5522; WAN024DUC; Start 68; Stop 92
taagtattgtcagttctccatctcg

SEQ ID NO: 413308 - DNA, 25 bp, Artificial
  probe
  misc_feature (1)..(25): SEQ ID NO: 5522; WAN024DUC; Start 47; Stop 71
gctccaagattgtcgtactgataag

SEQ ID NO: 413309 - DNA, 25 bp, Artificial
  probe
  misc_feature (1)..(25): SEQ ID NO: 5522; WAN024DUC; Start 48; Stop 72
ctccaagattgtcgtactgataagt

SEQ ID NO: 413310 - DNA, 25 bp, Artificial
  probe
  misc_feature (1)..(25): SEQ ID NO: 5522; WAN024DUC; Start 67; Stop 91
ataagtattgtcagttctccatctc

SEQ ID NO: 413311 - DNA, 25 bp, Artificial
  probe
  misc_feature (1)..(25): SEQ ID NO: 5522; WAN024DUC; Start 66; Stop 90
gataagtattgtcagttctccatct

SEQ ID NO: 413312 - DNA, 25 bp, Artificial
  probe
  misc_feature (1)..(25): SEQ ID NO: 5522; WAN024DUC; Start 65; Stop 89
tgataagtattgtcagttctccatc

SEQ ID NO: 413313 - DNA, 25 bp, Artificial
  probe
  misc_feature (1)..(25): SEQ ID NO: 5522; WAN024DUC; Start 69; Stop 93
aagtattgtcagttctccatctcga

SEQ ID NO: 413314 - DNA, 25 bp, Artificial
  probe
  misc_feature (1)..(25): SEQ ID NO: 5522; WAN024DUC; Start 161; Stop 185
attgctcctgtaagatttctgctaa

SEQ ID NO: 413315 - DNA, 25 bp, Artificial
  probe
  misc_feature (1)..(25): SEQ ID NO: 5522; WAN024DUC; Start 70; Stop 94
agtattgtcagttctccatctcgaa

SEQ ID NO: 413316 - DNA, 25 bp, Artificial
  probe
  misc_feature (1)..(25): SEQ ID NO: 5522; WAN024DUC; Start 160; Stop 184
aattgctcctgtaagatttctgcta

SEQ ID NO: 413317 - DNA, 25 bp, Artificial
  probe
  misc_feature (1)..(25): SEQ ID NO: 5522; WAN024DUC; Start 49; Stop 73
tccaagattgtcgtactgataagta

SEQ ID NO: 413318 - DNA, 25 bp, Artificial
  probe
  misc_feature (1)..(25): SEQ ID NO: 5522; WAN024DUC; Start 162; Stop 186
ttgctcctgtaagatttctgctaac

SEQ ID NO: 413319 - DNA, 25 bp, Artificial
  probe
  misc_feature (1)..(25): SEQ ID NO: 5522; WAN024DUC; Start 46; Stop 70
cgctccaagattgtcgtactgataa

SEQ ID NO: 413320 - DNA, 25 bp, Artificial
  probe
  misc_feature (1)..(25): SEQ ID NO: 5522; WAN024DUC; Start 168; Stop 192
ctgtaagatttctgctaactgctcc

SEQ ID NO: 413321 - DNA, 25 bp, Artificial
  probe
  misc_feature (1)..(25): SEQ ID NO: 5522; WAN024DUC; Start 167; Stop 191
cctgtaagatttctgctaactgctc

SEQ ID NO: 413322 - DNA, 25 bp, Artificial
  probe
  misc_feature (1)..(25): SEQ ID NO: 5522; WAN024DUC; Start 165; Stop 189
ctcctgtaagatttctgctaactgc

SEQ ID NO: 413323 - DNA, 25 bp, Artificial
  probe
  misc_feature (1)..(25): SEQ ID NO: 5522; WAN024DUC; Start 164; Stop 188
gctcctgtaagatttctgctaactg

SEQ ID NO: 413324 - DNA, 25 bp, Artificial
  probe
  misc_feature (1)..(25): SEQ ID NO: 5522; WAN024DUC; Start 166; Stop 190
tcctgtaagatttctgctaactgct

SEQ ID NO: 413325 - DNA, 25 bp, Artificial
  probe
  misc_feature (1)..(25): SEQ ID NO: 5522; WAN024DUC; Start 163; Stop 187
tgctcctgtaagatttctgctaact

SEQ ID NO: 413326 - DNA, 25 bp, Artificial
  probe
  misc_feature (1)..(25): SEQ ID NO: 5522; WAN024DUC; Start 50; Stop 74
ccaagattgtcgtactgataagtat

SEQ ID NO: 413327 - DNA, 25 bp, Artificial
  probe
  misc_feature (1)..(25): SEQ ID NO: 5522; WAN024DUC; Start 159; Stop 183
aaattgctcctgtaagatttctgct

SEQ ID NO: 413328 - DNA, 25 bp, Artificial
  probe
  misc_feature (1)..(25): SEQ ID NO: 5522; WAN024DUC; Start 124; Stop 148
gttacagaagatacaaagccaattt

SEQ ID NO: 413329 - DNA, 25 bp, Artificial
  probe
  misc_feature (1)..(25): SEQ ID NO: 5522; WAN024DUC; Start 55; Stop 79
attgtcgtactgataagtattgtca

SEQ ID NO: 413330 - DNA, 25 bp, Artificial
  probe
  misc_feature (1)..(25): SEQ ID NO: 5522; WAN024DUC; Start 123; Stop 147
tgttacagaagatacaaagccaatt

SEQ ID NO: 413331 - DNA, 25 bp, Artificial
  probe
  misc_feature (1)..(25): SEQ ID NO: 5522; WAN024DUC; Start 152; Stop 176
catttggaaattgctcctgtaagat

SEQ ID NO: 413332 - DNA, 25 bp, Artificial
  probe
  misc_feature (1)..(25): SEQ ID NO: 5522; WAN024DUC; Start 53; Stop 77
agattgtcgtactgataagtattgt

SEQ ID NO: 413333 - DNA, 25 bp, Artificial
  probe
  misc_feature (1)..(25): SEQ ID NO: 5522; WAN024DUC; Start 150; Stop 174
ctcatttggaaattgctcctgtaag

SEQ ID NO: 413334 - DNA, 25 bp, Artificial
  probe
  misc_feature (1)..(25): SEQ ID NO: 5522; WAN024DUC; Start 154; Stop 178
tttggaaattgctcctgtaagattt

SEQ ID NO: 413335 - DNA, 25 bp, Artificial
  probe
  misc_feature (1)..(25): SEQ ID NO: 5522; WAN024DUC; Start 151; Stop 175
tcatttggaaattgctcctgtaaga

SEQ ID NO: 413336 - DNA, 25 bp, Artificial
  probe
  misc_feature (1)..(25): SEQ ID NO: 5522; WAN024DUC; Start 149; Stop 173
tctcatttggaaattgctcctgtaa

SEQ ID NO: 413337 - DNA, 25 bp, Artificial
  probe
  misc_feature (1)..(25): SEQ ID NO: 5522; WAN024DUC; Start 148; Stop 172
ttctcatttggaaattgctcctgta

SEQ ID NO: 413338 - DNA, 25 bp, Artificial
  probe
  misc_feature (1)..(25): SEQ ID NO: 5522; WAN024DUC; Start 54; Stop 78
gattgtcgtactgataagtattgtc

SEQ ID NO: 413339 - DNA, 25 bp, Artificial
  probe
  misc_feature (1)..(25): SEQ ID NO: 5522; WAN024DUC; Start 169; Stop 193
tgtaagatttctgctaactgctccc

SEQ ID NO: 413340 - DNA, 25 bp, Artificial
  probe
  misc_feature (1)..(25): SEQ ID NO: 5523; WAN024FCF; Start 151; Stop 175
gtagttgatagaggattggagtgtc

SEQ ID NO: 413341 - DNA, 25 bp, Artificial
  probe
  misc_feature (1)..(25): SEQ ID NO: 5523; WAN024FCF; Start 148; Stop 172
aaggtagttgatagaggattggagt

SEQ ID NO: 413342 - DNA, 25 bp, Artificial
  probe
  misc_feature (1)..(25): SEQ ID NO: 5523; WAN024FCF; Start 149; Stop 173
aggtagttgatagaggattggagtg

SEQ ID NO: 413343 - DNA, 25 bp, Artificial
  probe
  misc_feature (1)..(25): SEQ ID NO: 5523; WAN024FCF; Start 147; Stop 171
taaggtagttgatagaggattggag

SEQ ID NO: 413344 - DNA, 25 bp, Artificial
  probe
  misc_feature (1)..(25): SEQ ID NO: 5523; WAN024FCF; Start 150; Stop 174
ggtagttgatagaggattggagtgt

SEQ ID NO: 413345 - DNA, 25 bp, Artificial
  probe
  misc_feature (1)..(25): SEQ ID NO: 5523; WAN024FCF; Start 152; Stop 176
tagttgatagaggattggagtgtca

SEQ ID NO: 413346 - DNA, 25 bp, Artificial
  probe
  misc_feature (1)..(25): SEQ ID NO: 5523; WAN024FCF; Start 146; Stop 170
ttaaggtagttgatagaggattgga

SEQ ID NO: 413347 - DNA, 25 bp, Artificial
  probe
  misc_feature (1)..(25): SEQ ID NO: 5523; WAN024FCF; Start 153; Stop 177
agttgatagaggattggagtgtcac

SEQ ID NO: 413348 - DNA, 25 bp, Artificial
  probe
  misc_feature (1)..(25): SEQ ID NO: 5523; WAN024FCF; Start 113; Stop 137
ttaatggtcaatacatcgtcgagtt

SEQ ID NO: 413349 - DNA, 25 bp, Artificial
  probe
  misc_feature (1)..(25): SEQ ID NO: 5523; WAN024FCF; Start 107; Stop 131
tctcctttaatggtcaatacatcgt

SEQ ID NO: 413350 - DNA, 25 bp, Artificial
  probe
  misc_feature (1)..(25): SEQ ID NO: 5523; WAN024FCF; Start 108; Stop 132
ctcctttaatggtcaatacatcgtc

SEQ ID NO: 413351 - DNA, 25 bp, Artificial
  probe
  misc_feature (1)..(25): SEQ ID NO: 5523; WAN024FCF; Start 194; Stop 218
gagataaccaccaaaccactgattt

SEQ ID NO: 413352 - DNA, 25 bp, Artificial
  probe
  misc_feature (1)..(25): SEQ ID NO: 5523; WAN024FCF; Start 154; Stop 178
gttgatagaggattggagtgtcacc

SEQ ID NO: 413353 - DNA, 25 bp, Artificial
  probe
  misc_feature (1)..(25): SEQ ID NO: 5523; WAN024FCF; Start 109; Stop 133
tcctttaatggtcaatacatcgtcg

SEQ ID NO: 413354 - DNA, 25 bp, Artificial
  probe
  misc_feature (1)..(25): SEQ ID NO: 5523; WAN024FCF; Start 106; Stop 130
ttctcctttaatggtcaatacatcg

SEQ ID NO: 413355 - DNA, 25 bp, Artificial
  probe
  misc_feature (1)..(25): SEQ ID NO: 5523; WAN024FCF; Start 40; Stop 64
atttctgccctcttgattggtgata

SEQ ID NO: 413356 - DNA, 25 bp, Artificial
  probe
  misc_feature (1)..(25): SEQ ID NO: 5523; WAN024FCF; Start 41; Stop 65
tttctgccctcttgattggtgatat

SEQ ID NO: 413357 - DNA, 25 bp, Artificial
  probe
  misc_feature (1)..(25): SEQ ID NO: 5523; WAN024FCF; Start 86; Stop 110
gtacgaccttgatggacacattctc

SEQ ID NO: 413358 - DNA, 25 bp, Artificial
  probe
  misc_feature (1)..(25): SEQ ID NO: 5523; WAN024FCF; Start 145; Stop 169
cttaaggtagttgatagaggattgg

SEQ ID NO: 413359 - DNA, 25 bp, Artificial
  probe
  misc_feature (1)..(25): SEQ ID NO: 5523; WAN024FCF; Start 92; Stop 116
ccttgatggacacattctcctttaa

SEQ ID NO: 413360 - DNA, 25 bp, Artificial
  probe
  misc_feature (1)..(25): SEQ ID NO: 5523; WAN024FCF; Start 84; Stop 108
ttgtacgaccttgatggacacattc

SEQ ID NO: 413361 - DNA, 25 bp, Artificial
  probe
  misc_feature (1)..(25): SEQ ID NO: 5523; WAN024FCF; Start 51; Stop 75
cttgattggtgatatccacatccat

SEQ ID NO: 413362 - DNA, 25 bp, Artificial
  probe
  misc_feature (1)..(25): SEQ ID NO: 5523; WAN024FCF; Start 93; Stop 117
cttgatggacacattctcctttaat

SEQ ID NO: 413363 - DNA, 25 bp, Artificial
  probe
  misc_feature (1)..(25): SEQ ID NO: 5523; WAN024FCF; Start 111; Stop 135
ctttaatggtcaatacatcgtcgag

SEQ ID NO: 413364 - DNA, 25 bp, Artificial
  probe
  misc_feature (1)..(25): SEQ ID NO: 5523; WAN024FCF; Start 114; Stop 138
taatggtcaatacatcgtcgagttt

SEQ ID NO: 413365 - DNA, 25 bp, Artificial
  probe
  misc_feature (1)..(25): SEQ ID NO: 5523; WAN024FCF; Start 112; Stop 136
tttaatggtcaatacatcgtcgagt

SEQ ID NO: 413366 - DNA, 25 bp, Artificial
  probe
  misc_feature (1)..(25): SEQ ID NO: 5523; WAN024FCF; Start 49; Stop 73
ctcttgattggtgatatccacatcc

SEQ ID NO: 413367 - DNA, 25 bp, Artificial
  probe
  misc_feature (1)..(25): SEQ ID NO: 5523; WAN024FCF; Start 48; Stop 72
cctcttgattggtgatatccacatc

SEQ ID NO: 413368 - DNA, 25 bp, Artificial
  probe
  misc_feature (1)..(25): SEQ ID NO: 5523; WAN024FCF; Start 83; Stop 107
gttgtacgaccttgatggacacatt

SEQ ID NO: 413369 - DNA, 25 bp, Artificial
  probe
  misc_feature (1)..(25): SEQ ID NO: 5523; WAN024FCF; Start 110; Stop 134
cctttaatggtcaatacatcgtcga

SEQ ID NO: 413370 - DNA, 25 bp, Artificial
  probe
  misc_feature (1)..(25): SEQ ID NO: 5523; WAN024FCF; Start 50; Stop 74
tcttgattggtgatatccacatcca

SEQ ID NO: 413371 - DNA, 25 bp, Artificial
  probe
  misc_feature (1)..(25): SEQ ID NO: 5523; WAN024FCF; Start 91; Stop 115
accttgatggacacattctccttta

SEQ ID NO: 413372 - DNA, 25 bp, Artificial
  probe
  misc_feature (1)..(25): SEQ ID NO: 5523; WAN024FCF; Start 193; Stop 217
cgagataaccaccaaaccactgatt

SEQ ID NO: 413373 - DNA, 25 bp, Artificial
  probe
  misc_feature (1)..(25): SEQ ID NO: 5524; WAN024FZM; Start 87; Stop 111
gataacgaatagccacatcaccatt

SEQ ID NO: 413374 - DNA, 25 bp, Artificial
  probe
  misc_feature (1)..(25): SEQ ID NO: 5524; WAN024FZM; Start 88; Stop 112
ataacgaatagccacatcaccattg

SEQ ID NO: 413375 - DNA, 25 bp, Artificial
  probe
  misc_feature (1)..(25): SEQ ID NO: 5524; WAN024FZM; Start 22; Stop 46
accttcaacaagaacttctacatca

SEQ ID NO: 413376 - DNA, 25 bp, Artificial
  probe
  misc_feature (1)..(25): SEQ ID NO: 5524; WAN024FZM; Start 23; Stop 47
ccttcaacaagaacttctacatcaa

SEQ ID NO: 413377 - DNA, 25 bp, Artificial
  probe
  misc_feature (1)..(25): SEQ ID NO: 5524; WAN024FZM; Start 19; Stop 43
cttaccttcaacaagaacttctaca

SEQ ID NO: 413378 - DNA, 25 bp, Artificial
  probe
  misc_feature (1)..(25): SEQ ID NO: 5524; WAN024FZM; Start 21; Stop 45
taccttcaacaagaacttctacatc

SEQ ID NO: 413379 - DNA, 25 bp, Artificial
  probe
  misc_feature (1)..(25): SEQ ID NO: 5524; WAN024FZM; Start 80; Stop 104
atcacctgataacgaatagccacat

SEQ ID NO: 413380 - DNA, 25 bp, Artificial
  probe
  misc_feature (1)..(25): SEQ ID NO: 5524; WAN024FZM; Start 81; Stop 105
tcacctgataacgaatagccacatc

SEQ ID NO: 413381 - DNA, 25 bp, Artificial
  probe
  misc_feature (1)..(25): SEQ ID NO: 5524; WAN024FZM; Start 20; Stop 44
ttaccttcaacaagaacttctacat

SEQ ID NO: 413382 - DNA, 25 bp, Artificial
  probe
  misc_feature (1)..(25): SEQ ID NO: 5524; WAN024FZM; Start 79; Stop 103
aatcacctgataacgaatagccaca

SEQ ID NO: 413383 - DNA, 25 bp, Artificial
  probe
  misc_feature (1)..(25): SEQ ID NO: 5524; WAN024FZM; Start 89; Stop 113
taacgaatagccacatcaccattga

SEQ ID NO: 413384 - DNA, 25 bp, Artificial
  probe
  misc_feature (1)..(25): SEQ ID NO: 5524; WAN024FZM; Start 35; Stop 59
acttctacatcaaagaccttatcgt

SEQ ID NO: 413385 - DNA, 25 bp, Artificial
  probe
  misc_feature (1)..(25): SEQ ID NO: 5524; WAN024FZM; Start 36; Stop 60
cttctacatcaaagaccttatcgtg

SEQ ID NO: 413386 - DNA, 25 bp, Artificial
  probe
  misc_feature (1)..(25): SEQ ID NO: 5524; WAN024FZM; Start 38; Stop 62
tctacatcaaagaccttatcgtgag

SEQ ID NO: 413387 - DNA, 25 bp, Artificial
  probe
  misc_feature (1)..(25): SEQ ID NO: 5524; WAN024FZM; Start 37; Stop 61
ttctacatcaaagaccttatcgtga

SEQ ID NO: 413388 - DNA, 25 bp, Artificial
  probe
  misc_feature (1)..(25): SEQ ID NO: 5524; WAN024FZM; Start 14; Stop 38
atgctcttaccttcaacaagaactt

SEQ ID NO: 413389 - DNA, 25 bp, Artificial
  probe
  misc_feature (1)..(25): SEQ ID NO: 5524; WAN024FZM; Start 34; Stop 58
aacttctacatcaaagaccttatcg

SEQ ID NO: 413390 - DNA, 25 bp, Artificial
  probe
  misc_feature (1)..(25): SEQ ID NO: 5524; WAN024FZM; Start 76; Stop 100
agaaatcacctgataacgaatagcc

SEQ ID NO: 413391 - DNA, 25 bp, Artificial
  probe
  misc_feature (1)..(25): SEQ ID NO: 5524; WAN024FZM; Start 29; Stop 53
acaagaacttctacatcaaagacct

SEQ ID NO: 413392 - DNA, 25 bp, Artificial
  probe
  misc_feature (1)..(25): SEQ ID NO: 5524; WAN024FZM; Start 16; Stop 40
gctcttaccttcaacaagaacttct

SEQ ID NO: 413393 - DNA, 25 bp, Artificial
  probe
  misc_feature (1)..(25): SEQ ID NO: 5524; WAN024FZM; Start 325; Stop 349
gataaactggtcaaactggcaatca

SEQ ID NO: 413394 - DNA, 25 bp, Artificial
  probe
  misc_feature (1)..(25): SEQ ID NO: 5524; WAN024FZM; Start 13; Stop 37
gatgctcttaccttcaacaagaact

SEQ ID NO: 413395 - DNA, 25 bp, Artificial
  probe
  misc_feature (1)..(25): SEQ ID NO: 5524; WAN024FZM; Start 77; Stop 101
gaaatcacctgataacgaatagcca

SEQ ID NO: 413396 - DNA, 25 bp, Artificial
  probe
  misc_feature (1)..(25): SEQ ID NO: 5524; WAN024FZM; Start 28; Stop 52
aacaagaacttctacatcaaagacc

SEQ ID NO: 413397 - DNA, 25 bp, Artificial
  probe
  misc_feature (1)..(25): SEQ ID NO: 5524; WAN024FZM; Start 15; Stop 39
tgctcttaccttcaacaagaacttc

SEQ ID NO: 413398 - DNA, 25 bp, Artificial
  probe
  misc_feature (1)..(25): SEQ ID NO: 5524; WAN024FZM; Start 78; Stop 102
aaatcacctgataacgaatagccac

SEQ ID NO: 413399 - DNA, 25 bp, Artificial
  probe
  misc_feature (1)..(25): SEQ ID NO: 5524; WAN024FZM; Start 39; Stop 63
ctacatcaaagaccttatcgtgagc

SEQ ID NO: 413400 - DNA, 25 bp, Artificial
  probe
  misc_feature (1)..(25): SEQ ID NO: 5524; WAN024FZM; Start 326; Stop 350
ataaactggtcaaactggcaatcac

SEQ ID NO: 413401 - DNA, 25 bp, Artificial
  probe
  misc_feature (1)..(25): SEQ ID NO: 5524; WAN024FZM; Start 30; Stop 54
caagaacttctacatcaaagacctt

SEQ ID NO: 413402 - DNA, 25 bp, Artificial
  probe
  misc_feature (1)..(25): SEQ ID NO: 5524; WAN024FZM; Start 18; Stop 42
tcttaccttcaacaagaacttctac

SEQ ID NO: 413403 - DNA, 25 bp, Artificial
  probe
  misc_feature (1)..(25): SEQ ID NO: 5524; WAN024FZM; Start 324; Stop 348
tgataaactggtcaaactggcaatc

SEQ ID NO: 413404 - DNA, 25 bp, Artificial
  probe
  misc_feature (1)..(25): SEQ ID NO: 5524; WAN024FZM; Start 40; Stop 64
tacatcaaagaccttatcgtgagca

SEQ ID NO: 413405 - DNA, 25 bp, Artificial
  probe
  misc_feature (1)..(25): SEQ ID NO: 5524; WAN024FZM; Start 17; Stop 41
ctcttaccttcaacaagaacttcta

SEQ ID NO: 413406 - DNA, 25 bp, Artificial
  probe
  misc_feature (1)..(25): SEQ ID NO: 5525; WAN024F3G; Start 68; Stop 92
gcttatcaatcacttcgttagacac

SEQ ID NO: 413407 - DNA, 25 bp, Artificial
  probe
  misc_feature (1)..(25): SEQ ID NO: 5525; WAN024F3G; Start 69; Stop 93
cttatcaatcacttcgttagacaca

SEQ ID NO: 413408 - DNA, 25 bp, Artificial
  probe
  misc_feature (1)..(25): SEQ ID NO: 5525; WAN024F3G; Start 67; Stop 91
cgcttatcaatcacttcgttagaca

SEQ ID NO: 413409 - DNA, 25 bp, Artificial
  probe
  misc_feature (1)..(25): SEQ ID NO: 5525; WAN024F3G; Start 72; Stop 96
atcaatcacttcgttagacacaaca

SEQ ID NO: 413410 - DNA, 25 bp, Artificial
  probe
  misc_feature (1)..(25): SEQ ID NO: 5525; WAN024F3G; Start 71; Stop 95
tatcaatcacttcgttagacacaac

SEQ ID NO: 413411 - DNA, 25 bp, Artificial
  probe
  misc_feature (1)..(25): SEQ ID NO: 5525; WAN024F3G; Start 70; Stop 94
ttatcaatcacttcgttagacacaa

SEQ ID NO: 413412 - DNA, 25 bp, Artificial
  probe
  misc_feature (1)..(25): SEQ ID NO: 5525; WAN024F3G; Start 75; Stop 99
aatcacttcgttagacacaacagac

SEQ ID NO: 413413 - DNA, 25 bp, Artificial
  probe
  misc_feature (1)..(25): SEQ ID NO: 5525; WAN024F3G; Start 74; Stop 98
caatcacttcgttagacacaacaga

SEQ ID NO: 413414 - DNA, 25 bp, Artificial
  probe
  misc_feature (1)..(25): SEQ ID NO: 5525; WAN024F3G; Start 73; Stop 97
tcaatcacttcgttagacacaacag

SEQ ID NO: 413415 - DNA, 25 bp, Artificial
  probe
  misc_feature (1)..(25): SEQ ID NO: 5525; WAN024F3G; Start 76; Stop 100
atcacttcgttagacacaacagact

SEQ ID NO: 413416 - DNA, 25 bp, Artificial
  probe
  misc_feature (1)..(25): SEQ ID NO: 5525; WAN024F3G; Start 77; Stop 101
tcacttcgttagacacaacagactt

SEQ ID NO: 413417 - DNA, 25 bp, Artificial
  probe
  misc_feature (1)..(25): SEQ ID NO: 5525; WAN024F3G; Start 78; Stop 102
cacttcgttagacacaacagacttg

SEQ ID NO: 413418 - DNA, 25 bp, Artificial
  probe
  misc_feature (1)..(25): SEQ ID NO: 5525; WAN024F3G; Start 60; Stop 84
caaatcacgcttatcaatcacttcg

SEQ ID NO: 413419 - DNA, 25 bp, Artificial
  probe
  misc_feature (1)..(25): SEQ ID NO: 5525; WAN024F3G; Start 59; Stop 83
gcaaatcacgcttatcaatcacttc

SEQ ID NO: 413420 - DNA, 25 bp, Artificial
  probe
  misc_feature (1)..(25): SEQ ID NO: 5525; WAN024F3G; Start 22; Stop 46
ataaagacttgtccttccttgttct

SEQ ID NO: 413421 - DNA, 25 bp, Artificial
  probe
  misc_feature (1)..(25): SEQ ID NO: 5525; WAN024F3G; Start 21; Stop 45
aataaagacttgtccttccttgttc

SEQ ID NO: 413422 - DNA, 25 bp, Artificial
  probe
  misc_feature (1)..(25): SEQ ID NO: 5525; WAN024F3G; Start 19; Stop 43
tcaataaagacttgtccttccttgt

SEQ ID NO: 413423 - DNA, 25 bp, Artificial
  probe
  misc_feature (1)..(25): SEQ ID NO: 5525; WAN024F3G; Start 20; Stop 44
caataaagacttgtccttccttgtt

SEQ ID NO: 413424 - DNA, 25 bp, Artificial
  probe
  misc_feature (1)..(25): SEQ ID NO: 5525; WAN024F3G; Start 26; Stop 50
agacttgtccttccttgttcttgac

SEQ ID NO: 413425 - DNA, 25 bp, Artificial
  probe
  misc_feature (1)..(25): SEQ ID NO: 5525; WAN024F3G; Start 18; Stop 42
atcaataaagacttgtccttccttg

SEQ ID NO: 413426 - DNA, 25 bp, Artificial
  probe
  misc_feature (1)..(25): SEQ ID NO: 5525; WAN024F3G; Start 10; Stop 34
cccgtaggatcaataaagacttgtc

SEQ ID NO: 413427 - DNA, 25 bp, Artificial
  probe
  misc_feature (1)..(25): SEQ ID NO: 5525; WAN024F3G; Start 63; Stop 87
atcacgcttatcaatcacttcgtta

SEQ ID NO: 413428 - DNA, 25 bp, Artificial
  probe
  misc_feature (1)..(25): SEQ ID NO: 5525; WAN024F3G; Start 17; Stop 41
gatcaataaagacttgtccttcctt

SEQ ID NO: 413429 - DNA, 25 bp, Artificial
  probe
  misc_feature (1)..(25): SEQ ID NO: 5525; WAN024F3G; Start 79; Stop 103
acttcgttagacacaacagacttgc

SEQ ID NO: 413430 - DNA, 25 bp, Artificial
  probe
  misc_feature (1)..(25): SEQ ID NO: 5525; WAN024F3G; Start 66; Stop 90
acgcttatcaatcacttcgttagac

SEQ ID NO: 413431 - DNA, 25 bp, Artificial
  probe
  misc_feature (1)..(25): SEQ ID NO: 5525; WAN024F3G; Start 65; Stop 89
cacgcttatcaatcacttcgttaga

SEQ ID NO: 413432 - DNA, 25 bp, Artificial
  probe
  misc_feature (1)..(25): SEQ ID NO: 5525; WAN024F3G; Start 64; Stop 88
tcacgcttatcaatcacttcgttag

SEQ ID NO: 413433 - DNA, 25 bp, Artificial
  probe
  misc_feature (1)..(25): SEQ ID NO: 5525; WAN024F3G; Start 25; Stop 49
aagacttgtccttccttgttcttga

SEQ ID NO: 413434 - DNA, 25 bp, Artificial
  probe
  misc_feature (1)..(25): SEQ ID NO: 5525; WAN024F3G; Start 62; Stop 86
aatcacgcttatcaatcacttcgtt

SEQ ID NO: 413435 - DNA, 25 bp, Artificial
  probe
  misc_feature (1)..(25): SEQ ID NO: 5525; WAN024F3G; Start 16; Stop 40
ggatcaataaagacttgtccttcct

SEQ ID NO: 413436 - DNA, 25 bp, Artificial
  probe
  misc_feature (1)..(25): SEQ ID NO: 5525; WAN024F3G; Start 171; Stop 195
ttctacttccaactctactgaagca

SEQ ID NO: 413437 - DNA, 25 bp, Artificial
  probe
  misc_feature (1)..(25): SEQ ID NO: 5525; WAN024F3G; Start 7; Stop 31
ttgcccgtaggatcaataaagactt

SEQ ID NO: 413438 - DNA, 25 bp, Artificial
  probe
  misc_feature (1)..(25): SEQ ID NO: 5525; WAN024F3G; Start 11; Stop 35
ccgtaggatcaataaagacttgtcc

SEQ ID NO: 413439 - DNA, 25 bp, Artificial
  probe
  misc_feature (1)..(25): SEQ ID NO: 5526; WAN024FLV; Start 183; Stop 207
cttggtaagacattcaaattctcct

SEQ ID NO: 413440 - DNA, 25 bp, Artificial
  probe
  misc_feature (1)..(25): SEQ ID NO: 5526; WAN024FLV; Start 185; Stop 209
tggtaagacattcaaattctccttt

SEQ ID NO: 413441 - DNA, 25 bp, Artificial
  probe
  misc_feature (1)..(25): SEQ ID NO: 5526; WAN024FLV; Start 184; Stop 208
ttggtaagacattcaaattctcctt

SEQ ID NO: 413442 - DNA, 25 bp, Artificial
  probe
  misc_feature (1)..(25): SEQ ID NO: 5526; WAN024FLV; Start 120; Stop 144
tttccaaatcttgacgaaggtagtc

SEQ ID NO: 413443 - DNA, 25 bp, Artificial
  probe
  misc_feature (1)..(25): SEQ ID NO: 5526; WAN024FLV; Start 14; Stop 38
tagatgttgatacggtttgtaccag

SEQ ID NO: 413444 - DNA, 25 bp, Artificial
  probe
  misc_feature (1)..(25): SEQ ID NO: 5526; WAN024FLV; Start 278; Stop 302
gaacatctcttcaaaccaggtcaga

SEQ ID NO: 413445 - DNA, 25 bp, Artificial
  probe
  misc_feature (1)..(25): SEQ ID NO: 5526; WAN024FLV; Start 13; Stop 37
gtagatgttgatacggtttgtacca

SEQ ID NO: 413446 - DNA, 25 bp, Artificial
  probe
  misc_feature (1)..(25): SEQ ID NO: 5526; WAN024FLV; Start 72; Stop 96
attcaagatttgtatagaaggcatc

SEQ ID NO: 413447 - DNA, 25 bp, Artificial
  probe
  misc_feature (1)..(25): SEQ ID NO: 5526; WAN024FLV; Start 186; Stop 210
ggtaagacattcaaattctccttta

SEQ ID NO: 413448 - DNA, 25 bp, Artificial
  probe
  misc_feature (1)..(25): SEQ ID NO: 5526; WAN024FLV; Start 182; Stop 206
tcttggtaagacattcaaattctcc

SEQ ID NO: 413449 - DNA, 25 bp, Artificial
  probe
  misc_feature (1)..(25): SEQ ID NO: 5526; WAN024FLV; Start 281; Stop 305
catctcttcaaaccaggtcagattg

SEQ ID NO: 413450 - DNA, 25 bp, Artificial
  probe
  misc_feature (1)..(25): SEQ ID NO: 5526; WAN024FLV; Start 267; Stop 291
ttatctgcttcgaacatctcttcaa

SEQ ID NO: 413451 - DNA, 25 bp, Artificial
  probe
  misc_feature (1)..(25): SEQ ID NO: 5526; WAN024FLV; Start 280; Stop 304
acatctcttcaaaccaggtcagatt

SEQ ID NO: 413452 - DNA, 25 bp, Artificial
  probe
  misc_feature (1)..(25): SEQ ID NO: 5526; WAN024FLV; Start 279; Stop 303
aacatctcttcaaaccaggtcagat

SEQ ID NO: 413453 - DNA, 25 bp, Artificial
  probe
  misc_feature (1)..(25): SEQ ID NO: 5526; WAN024FLV; Start 266; Stop 290
cttatctgcttcgaacatctcttca

SEQ ID NO: 413454 - DNA, 25 bp, Artificial
  probe
  misc_feature (1)..(25): SEQ ID NO: 5526; WAN024FLV; Start 71; Stop 95
aattcaagatttgtatagaaggcat

SEQ ID NO: 413455 - DNA, 25 bp, Artificial
  probe
  misc_feature (1)..(25): SEQ ID NO: 5526; WAN024FLV; Start 70; Stop 94
aaattcaagatttgtatagaaggca

SEQ ID NO: 413456 - DNA, 25 bp, Artificial
  probe
  misc_feature (1)..(25): SEQ ID NO: 5526; WAN024FLV; Start 73; Stop 97
ttcaagatttgtatagaaggcatct

SEQ ID NO: 413457 - DNA, 25 bp, Artificial
  probe
  misc_feature (1)..(25): SEQ ID NO: 5526; WAN024FLV; Start 119; Stop 143
ttttccaaatcttgacgaaggtagt

SEQ ID NO: 413458 - DNA, 25 bp, Artificial
  probe
  misc_feature (1)..(25): SEQ ID NO: 5526; WAN024FLV; Start 82; Stop 106
tgtatagaaggcatcttccttagtt

SEQ ID NO: 413459 - DNA, 25 bp, Artificial
  probe
  misc_feature (1)..(25): SEQ ID NO: 5526; WAN024FLV; Start 81; Stop 105
ttgtatagaaggcatcttccttagt

SEQ ID NO: 413460 - DNA, 25 bp, Artificial
  probe
  misc_feature (1)..(25): SEQ ID NO: 5526; WAN024FLV; Start 265; Stop 289
ccttatctgcttcgaacatctcttc

SEQ ID NO: 413461 - DNA, 25 bp, Artificial
  probe
  misc_feature (1)..(25): SEQ ID NO: 5526; WAN024FLV; Start 264; Stop 288
accttatctgcttcgaacatctctt

SEQ ID NO: 413462 - DNA, 25 bp, Artificial
  probe
  misc_feature (1)..(25): SEQ ID NO: 5526; WAN024FLV; Start 263; Stop 287
aaccttatctgcttcgaacatctct

SEQ ID NO: 413463 - DNA, 25 bp, Artificial
  probe
  misc_feature (1)..(25): SEQ ID NO: 5526; WAN024FLV; Start 277; Stop 301
cgaacatctcttcaaaccaggtcag

SEQ ID NO: 413464 - DNA, 25 bp, Artificial
  probe
  misc_feature (1)..(25): SEQ ID NO: 5526; WAN024FLV; Start 77; Stop 101
agatttgtatagaaggcatcttcct

SEQ ID NO: 413465 - DNA, 25 bp, Artificial
  probe
  misc_feature (1)..(25): SEQ ID NO: 5526; WAN024FLV; Start 118; Stop 142
attttccaaatcttgacgaaggtag

SEQ ID NO: 413466 - DNA, 25 bp, Artificial
  probe
  misc_feature (1)..(25): SEQ ID NO: 5526; WAN024FLV; Start 282; Stop 306
atctcttcaaaccaggtcagattga

SEQ ID NO: 413467 - DNA, 25 bp, Artificial
  probe
  misc_feature (1)..(25): SEQ ID NO: 5526; WAN024FLV; Start 112; Stop 136
gtccatattttccaaatcttgacga

SEQ ID NO: 413468 - DNA, 25 bp, Artificial
  probe
  misc_feature (1)..(25): SEQ ID NO: 5526; WAN024FLV; Start 110; Stop 134
tcgtccatattttccaaatcttgac

SEQ ID NO: 413469 - DNA, 25 bp, Artificial
  probe
  misc_feature (1)..(25): SEQ ID NO: 5526; WAN024FLV; Start 116; Stop 140
atattttccaaatcttgacgaaggt

SEQ ID NO: 413470 - DNA, 25 bp, Artificial
  probe
  misc_feature (1)..(25): SEQ ID NO: 5526; WAN024FLV; Start 113; Stop 137
tccatattttccaaatcttgacgaa

SEQ ID NO: 413471 - DNA, 25 bp, Artificial
  probe
  misc_feature (1)..(25): SEQ ID NO: 5526; WAN024FLV; Start 109; Stop 133
ttcgtccatattttccaaatcttga

SEQ ID NO: 413472 - DNA, 25 bp, Artificial
  probe
  misc_feature (1)..(25): SEQ ID NO: 5527; WAN024F5X; Start 142; Stop 166
attccaagtcacagcaatcatcaag

SEQ ID NO: 413473 - DNA, 25 bp, Artificial
  probe
  misc_feature (1)..(25): SEQ ID NO: 5527; WAN024F5X; Start 125; Stop 149
aagagtcgcataatgtcattccaag

SEQ ID NO: 413474 - DNA, 25 bp, Artificial
  probe
  misc_feature (1)..(25): SEQ ID NO: 5527; WAN024F5X; Start 141; Stop 165
cattccaagtcacagcaatcatcaa

SEQ ID NO: 413475 - DNA, 25 bp, Artificial
  probe
  misc_feature (1)..(25): SEQ ID NO: 5527; WAN024F5X; Start 135; Stop 159
taatgtcattccaagtcacagcaat

SEQ ID NO: 413476 - DNA, 25 bp, Artificial
  probe
  misc_feature (1)..(25): SEQ ID NO: 5527; WAN024F5X; Start 134; Stop 158
ataatgtcattccaagtcacagcaa

SEQ ID NO: 413477 - DNA, 25 bp, Artificial
  probe
  misc_feature (1)..(25): SEQ ID NO: 5527; WAN024F5X; Start 139; Stop 163
gtcattccaagtcacagcaatcatc

SEQ ID NO: 413478 - DNA, 25 bp, Artificial
  probe
  misc_feature (1)..(25): SEQ ID NO: 5527; WAN024F5X; Start 127; Stop 151
gagtcgcataatgtcattccaagtc

SEQ ID NO: 413479 - DNA, 25 bp, Artificial
  probe
  misc_feature (1)..(25): SEQ ID NO: 5527; WAN024F5X; Start 143; Stop 167
ttccaagtcacagcaatcatcaaga

SEQ ID NO: 413480 - DNA, 25 bp, Artificial
  probe
  misc_feature (1)..(25): SEQ ID NO: 5527; WAN024F5X; Start 133; Stop 157
cataatgtcattccaagtcacagca

SEQ ID NO: 413481 - DNA, 25 bp, Artificial
  probe
  misc_feature (1)..(25): SEQ ID NO: 5527; WAN024F5X; Start 126; Stop 150
agagtcgcataatgtcattccaagt

SEQ ID NO: 413482 - DNA, 25 bp, Artificial
  probe
  misc_feature (1)..(25): SEQ ID NO: 5527; WAN024F5X; Start 140; Stop 164
tcattccaagtcacagcaatcatca

SEQ ID NO: 413483 - DNA, 25 bp, Artificial
  probe
  misc_feature (1)..(25): SEQ ID NO: 5527; WAN024F5X; Start 129; Stop 153
gtcgcataatgtcattccaagtcac

SEQ ID NO: 413484 - DNA, 25 bp, Artificial
  probe
  misc_feature (1)..(25): SEQ ID NO: 5527; WAN024F5X; Start 128; Stop 152
agtcgcataatgtcattccaagtca

SEQ ID NO: 413485 - DNA, 25 bp, Artificial
  probe
  misc_feature (1)..(25): SEQ ID NO: 5527; WAN024F5X; Start 147; Stop 171
aagtcacagcaatcatcaagacaac

SEQ ID NO: 413486 - DNA, 25 bp, Artificial
  probe
  misc_feature (1)..(25): SEQ ID NO: 5527; WAN024F5X; Start 146; Stop 170
caagtcacagcaatcatcaagacaa

SEQ ID NO: 413487 - DNA, 25 bp, Artificial
  probe
  misc_feature (1)..(25): SEQ ID NO: 5527; WAN024F5X; Start 150; Stop 174
tcacagcaatcatcaagacaaccat

SEQ ID NO: 413488 - DNA, 25 bp, Artificial
  probe
  misc_feature (1)..(25): SEQ ID NO: 5527; WAN024F5X; Start 6; Stop 30
gaacataaccagcacgcaacataag

SEQ ID NO: 413489 - DNA, 25 bp, Artificial
  probe
  misc_feature (1)..(25): SEQ ID NO: 5527; WAN024F5X; Start 136; Stop 160
aatgtcattccaagtcacagcaatc

SEQ ID NO: 413490 - DNA, 25 bp, Artificial
  probe
  misc_feature (1)..(25): SEQ ID NO: 5527; WAN024F5X; Start 206; Stop 230
tcaatttcttgtttcaatggtttgc

SEQ ID NO: 413491 - DNA, 25 bp, Artificial
  probe
  misc_feature (1)..(25): SEQ ID NO: 5527; WAN024F5X; Start 7; Stop 31
aacataaccagcacgcaacataaga

SEQ ID NO: 413492 - DNA, 25 bp, Artificial
  probe
  misc_feature (1)..(25): SEQ ID NO: 5527; WAN024F5X; Start 189; Stop 213
ccaaggtgacataggtttcaatttc

SEQ ID NO: 413493 - DNA, 25 bp, Artificial
  probe
  misc_feature (1)..(25): SEQ ID NO: 5527; WAN024F5X; Start 202; Stop 226
ggtttcaatttcttgtttcaatggt

SEQ ID NO: 413494 - DNA, 25 bp, Artificial
  probe
  misc_feature (1)..(25): SEQ ID NO: 5527; WAN024F5X; Start 192; Stop 216
aggtgacataggtttcaatttcttg

SEQ ID NO: 413495 - DNA, 25 bp, Artificial
  probe
  misc_feature (1)..(25): SEQ ID NO: 5527; WAN024F5X; Start 190; Stop 214
caaggtgacataggtttcaatttct

SEQ ID NO: 413496 - DNA, 25 bp, Artificial
  probe
  misc_feature (1)..(25): SEQ ID NO: 5527; WAN024F5X; Start 124; Stop 148
aaagagtcgcataatgtcattccaa

SEQ ID NO: 413497 - DNA, 25 bp, Artificial
  probe
  misc_feature (1)..(25): SEQ ID NO: 5527; WAN024F5X; Start 207; Stop 231
caatttcttgtttcaatggtttgcg

SEQ ID NO: 413498 - DNA, 25 bp, Artificial
  probe
  misc_feature (1)..(25): SEQ ID NO: 5527; WAN024F5X; Start 131; Stop 155
cgcataatgtcattccaagtcacag

SEQ ID NO: 413499 - DNA, 25 bp, Artificial
  probe
  misc_feature (1)..(25): SEQ ID NO: 5527; WAN024F5X; Start 201; Stop 225
aggtttcaatttcttgtttcaatgg

SEQ ID NO: 413500 - DNA, 25 bp, Artificial
  probe
  misc_feature (1)..(25): SEQ ID NO: 5527; WAN024F5X; Start 193; Stop 217
ggtgacataggtttcaatttcttgt

SEQ ID NO: 413501 - DNA, 25 bp, Artificial
  probe
  misc_feature (1)..(25): SEQ ID NO: 5527; WAN024F5X; Start 23; Stop 47
aacataagagcatggctgataactt

SEQ ID NO: 413502 - DNA, 25 bp, Artificial
  probe
  misc_feature (1)..(25): SEQ ID NO: 5527; WAN024F5X; Start 191; Stop 215
aaggtgacataggtttcaatttctt

SEQ ID NO: 413503 - DNA, 25 bp, Artificial
  probe
  misc_feature (1)..(25): SEQ ID NO: 5527; WAN024F5X; Start 138; Stop 162
tgtcattccaagtcacagcaatcat

SEQ ID NO: 413504 - DNA, 25 bp, Artificial
  probe
  misc_feature (1)..(25): SEQ ID NO: 5527; WAN024F5X; Start 137; Stop 161
atgtcattccaagtcacagcaatca

SEQ ID NO: 413505 - DNA, 25 bp, Artificial
  probe
  misc_feature (1)..(25): SEQ ID NO: 5528; WAN024FKI; Start 251; Stop 275
gtgtagagaacttccttaactgctg

SEQ ID NO: 413506 - DNA, 25 bp, Artificial
  probe
  misc_feature (1)..(25): SEQ ID NO: 5528; WAN024FKI; Start 246; Stop 270
gaccagtgtagagaacttccttaac

SEQ ID NO: 413507 - DNA, 25 bp, Artificial
  probe
  misc_feature (1)..(25): SEQ ID NO: 5528; WAN024FKI; Start 247; Stop 271
accagtgtagagaacttccttaact

SEQ ID NO: 413508 - DNA, 25 bp, Artificial
  probe
  misc_feature (1)..(25): SEQ ID NO: 5528; WAN024FKI; Start 250; Stop 274
agtgtagagaacttccttaactgct

SEQ ID NO: 413509 - DNA, 25 bp, Artificial
  probe
  misc_feature (1)..(25): SEQ ID NO: 5528; WAN024FKI; Start 252; Stop 276
tgtagagaacttccttaactgctgg

SEQ ID NO: 413510 - DNA, 25 bp, Artificial
  probe
  misc_feature (1)..(25): SEQ ID NO: 5528; WAN024FKI; Start 245; Stop 269
cgaccagtgtagagaacttccttaa

SEQ ID NO: 413511 - DNA, 25 bp, Artificial
  probe
  misc_feature (1)..(25): SEQ ID NO: 5528; WAN024FKI; Start 115; Stop 139
ttgagtcgttggataagtaataaga

SEQ ID NO: 413512 - DNA, 25 bp, Artificial
  probe
  misc_feature (1)..(25): SEQ ID NO: 5528; WAN024FKI; Start 116; Stop 140
tgagtcgttggataagtaataagac

SEQ ID NO: 413513 - DNA, 25 bp, Artificial
  probe
  misc_feature (1)..(25): SEQ ID NO: 5528; WAN024FKI; Start 258; Stop 282
gaacttccttaactgctggagaatc

SEQ ID NO: 413514 - DNA, 25 bp, Artificial
  probe
  misc_feature (1)..(25): SEQ ID NO: 5528; WAN024FKI; Start 110; Stop 134
tgagtttgagtcgttggataagtaa

SEQ ID NO: 413515 - DNA, 25 bp, Artificial
  probe
  misc_feature (1)..(25): SEQ ID NO: 5528; WAN024FKI; Start 109; Stop 133
atgagtttgagtcgttggataagta

SEQ ID NO: 413516 - DNA, 25 bp, Artificial
  probe
  misc_feature (1)..(25): SEQ ID NO: 5528; WAN024FKI; Start 254; Stop 278
tagagaacttccttaactgctggag

SEQ ID NO: 413517 - DNA, 25 bp, Artificial
  probe
  misc_feature (1)..(25): SEQ ID NO: 5528; WAN024FKI; Start 257; Stop 281
agaacttccttaactgctggagaat

SEQ ID NO: 413518 - DNA, 25 bp, Artificial
  probe
  misc_feature (1)..(25): SEQ ID NO: 5528; WAN024FKI; Start 253; Stop 277
gtagagaacttccttaactgctgga

SEQ ID NO: 413519 - DNA, 25 bp, Artificial
  probe
  misc_feature (1)..(25): SEQ ID NO: 5528; WAN024FKI; Start 244; Stop 268
acgaccagtgtagagaacttcctta

SEQ ID NO: 413520 - DNA, 25 bp, Artificial
  probe
  misc_feature (1)..(25): SEQ ID NO: 5528; WAN024FKI; Start 111; Stop 135
gagtttgagtcgttggataagtaat

SEQ ID NO: 413521 - DNA, 25 bp, Artificial
  probe
  misc_feature (1)..(25): SEQ ID NO: 5528; WAN024FKI; Start 27; Stop 51
tagcatcctcaatcccaatagacaa

SEQ ID NO: 413522 - DNA, 25 bp, Artificial
  probe
  misc_feature (1)..(25): SEQ ID NO: 5528; WAN024FKI; Start 17; Stop 41
atcaaatctctagcatcctcaatcc

SEQ ID NO: 413523 - DNA, 25 bp, Artificial
  probe
  misc_feature (1)..(25): SEQ ID NO: 5528; WAN024FKI; Start 132; Stop 156
taataagactttccactccacccaa

SEQ ID NO: 413524 - DNA, 25 bp, Artificial
  probe
  misc_feature (1)..(25): SEQ ID NO: 5528; WAN024FKI; Start 22; Stop 46
atctctagcatcctcaatcccaata

SEQ ID NO: 413525 - DNA, 25 bp, Artificial
  probe
  misc_feature (1)..(25): SEQ ID NO: 5528; WAN024FKI; Start 15; Stop 39
caatcaaatctctagcatcctcaat

SEQ ID NO: 413526 - DNA, 25 bp, Artificial
  probe
  misc_feature (1)..(25): SEQ ID NO: 5528; WAN024FKI; Start 262; Stop 286
ttccttaactgctggagaatccttc

SEQ ID NO: 413527 - DNA, 25 bp, Artificial
  probe
  misc_feature (1)..(25): SEQ ID NO: 5528; WAN024FKI; Start 261; Stop 285
cttccttaactgctggagaatcctt

SEQ ID NO: 413528 - DNA, 25 bp, Artificial
  probe
  misc_feature (1)..(25): SEQ ID NO: 5528; WAN024FKI; Start 256; Stop 280
gagaacttccttaactgctggagaa

SEQ ID NO: 413529 - DNA, 25 bp, Artificial
  probe
  misc_feature (1)..(25): SEQ ID NO: 5528; WAN024FKI; Start 30; Stop 54
catcctcaatcccaatagacaaacg

SEQ ID NO: 413530 - DNA, 25 bp, Artificial
  probe
  misc_feature (1)..(25): SEQ ID NO: 5528; WAN024FKI; Start 23; Stop 47
tctctagcatcctcaatcccaatag

SEQ ID NO: 413531 - DNA, 25 bp, Artificial
  probe
  misc_feature (1)..(25): SEQ ID NO: 5528; WAN024FKI; Start 14; Stop 38
gcaatcaaatctctagcatcctcaa

SEQ ID NO: 413532 - DNA, 25 bp, Artificial
  probe
  misc_feature (1)..(25): SEQ ID NO: 5528; WAN024FKI; Start 21; Stop 45
aatctctagcatcctcaatcccaat

SEQ ID NO: 413533 - DNA, 25 bp, Artificial
  probe
  misc_feature (1)..(25): SEQ ID NO: 5528; WAN024FKI; Start 16; Stop 40
aatcaaatctctagcatcctcaatc

SEQ ID NO: 413534 - DNA, 25 bp, Artificial
  probe
  misc_feature (1)..(25): SEQ ID NO: 5528; WAN024FKI; Start 29; Stop 53
gcatcctcaatcccaatagacaaac

SEQ ID NO: 413535 - DNA, 25 bp, Artificial
  probe
  misc_feature (1)..(25): SEQ ID NO: 5528; WAN024FKI; Start 28; Stop 52
agcatcctcaatcccaatagacaaa

SEQ ID NO: 413536 - DNA, 25 bp, Artificial
  probe
  misc_feature (1)..(25): SEQ ID NO: 5528; WAN024FKI; Start 131; Stop 155
gtaataagactttccactccaccca

SEQ ID NO: 413537 - DNA, 25 bp, Artificial
  probe
  misc_feature (1)..(25): SEQ ID NO: 5528; WAN024FKI; Start 20; Stop 44
aaatctctagcatcctcaatcccaa

SEQ ID NO: 413538 - DNA, 25 bp, Artificial
  probe
  misc_feature (1)..(25): SEQ ID NO: 5529; WAN024CAI; Start 126; Stop 150
cttgctggctcttcatatacttgag

SEQ ID NO: 413539 - DNA, 25 bp, Artificial
  probe
  misc_feature (1)..(25): SEQ ID NO: 5529; WAN024CAI; Start 127; Stop 151
ttgctggctcttcatatacttgaga

SEQ ID NO: 413540 - DNA, 25 bp, Artificial
  probe
  misc_feature (1)..(25): SEQ ID NO: 5529; WAN024CAI; Start 105; Stop 129
caatgatatgagacaactccgcttg

SEQ ID NO: 413541 - DNA, 25 bp, Artificial
  probe
  misc_feature (1)..(25): SEQ ID NO: 5529; WAN024CAI; Start 102; Stop 126
tatcaatgatatgagacaactccgc

SEQ ID NO: 413542 - DNA, 25 bp, Artificial
  probe
  misc_feature (1)..(25): SEQ ID NO: 5529; WAN024CAI; Start 128; Stop 152
tgctggctcttcatatacttgagac

SEQ ID NO: 413543 - DNA, 25 bp, Artificial
  probe
  misc_feature (1)..(25): SEQ ID NO: 5529; WAN024CAI; Start 104; Stop 128
tcaatgatatgagacaactccgctt

SEQ ID NO: 413544 - DNA, 25 bp, Artificial
  probe
  misc_feature (1)..(25): SEQ ID NO: 5529; WAN024CAI; Start 103; Stop 127
atcaatgatatgagacaactccgct

SEQ ID NO: 413545 - DNA, 25 bp, Artificial
  probe
  misc_feature (1)..(25): SEQ ID NO: 5529; WAN024CAI; Start 130; Stop 154
ctggctcttcatatacttgagacgg

SEQ ID NO: 413546 - DNA, 25 bp, Artificial
  probe
  misc_feature (1)..(25): SEQ ID NO: 5529; WAN024CAI; Start 32; Stop 56
gtcatttccttgccatcactaatca

SEQ ID NO: 413547 - DNA, 25 bp, Artificial
  probe
  misc_feature (1)..(25): SEQ ID NO: 5529; WAN024CAI; Start 33; Stop 57
tcatttccttgccatcactaatcaa

SEQ ID NO: 413548 - DNA, 25 bp, Artificial
  probe
  misc_feature (1)..(25): SEQ ID NO: 5529; WAN024CAI; Start 125; Stop 149
gcttgctggctcttcatatacttga

SEQ ID NO: 413549 - DNA, 25 bp, Artificial
  probe
  misc_feature (1)..(25): SEQ ID NO: 5529; WAN024CAI; Start 129; Stop 153
gctggctcttcatatacttgagacg

SEQ ID NO: 413550 - DNA, 25 bp, Artificial
  probe
  misc_feature (1)..(25): SEQ ID NO: 5529; WAN024CAI; Start 31; Stop 55
cgtcatttccttgccatcactaatc

SEQ ID NO: 413551 - DNA, 25 bp, Artificial
  probe
  misc_feature (1)..(25): SEQ ID NO: 5529; WAN024CAI; Start 87; Stop 111
ccagacggttgacaatatcaatgat

SEQ ID NO: 413552 - DNA, 25 bp, Artificial
  probe
  misc_feature (1)..(25): SEQ ID NO: 5529; WAN024CAI; Start 106; Stop 130
aatgatatgagacaactccgcttgc

SEQ ID NO: 413553 - DNA, 25 bp, Artificial
  probe
  misc_feature (1)..(25): SEQ ID NO: 5529; WAN024CAI; Start 88; Stop 112
cagacggttgacaatatcaatgata

SEQ ID NO: 413554 - DNA, 25 bp, Artificial
  probe
  misc_feature (1)..(25): SEQ ID NO: 5529; WAN024CAI; Start 124; Stop 148
cgcttgctggctcttcatatacttg

SEQ ID NO: 413555 - DNA, 25 bp, Artificial
  probe
  misc_feature (1)..(25): SEQ ID NO: 5529; WAN024CAI; Start 134; Stop 158
ctcttcatatacttgagacgggcag

SEQ ID NO: 413556 - DNA, 25 bp, Artificial
  probe
  misc_feature (1)..(25): SEQ ID NO: 5529; WAN024CAI; Start 107; Stop 131
atgatatgagacaactccgcttgct

SEQ ID NO: 413557 - DNA, 25 bp, Artificial
  probe
  misc_feature (1)..(25): SEQ ID NO: 5529; WAN024CAI; Start 169; Stop 193
aaagagatcctccacacaaaccttg

SEQ ID NO: 413558 - DNA, 25 bp, Artificial
  probe
  misc_feature (1)..(25): SEQ ID NO: 5529; WAN024CAI; Start 91; Stop 115
acggttgacaatatcaatgatatga

SEQ ID NO: 413559 - DNA, 25 bp, Artificial
  probe
  misc_feature (1)..(25): SEQ ID NO: 5529; WAN024CAI; Start 101; Stop 125
atatcaatgatatgagacaactccg

SEQ ID NO: 413560 - DNA, 25 bp, Artificial
  probe
  misc_feature (1)..(25): SEQ ID NO: 5529; WAN024CAI; Start 90; Stop 114
gacggttgacaatatcaatgatatg

SEQ ID NO: 413561 - DNA, 25 bp, Artificial
  probe
  misc_feature (1)..(25): SEQ ID NO: 5529; WAN024CAI; Start 89; Stop 113
agacggttgacaatatcaatgatat

SEQ ID NO: 413562 - DNA, 25 bp, Artificial
  probe
  misc_feature (1)..(25): SEQ ID NO: 5529; WAN024CAI; Start 135; Stop 159
tcttcatatacttgagacgggcagg

SEQ ID NO: 413563 - DNA, 25 bp, Artificial
  probe
  misc_feature (1)..(25): SEQ ID NO: 5529; WAN024CAI; Start 30; Stop 54
gcgtcatttccttgccatcactaat

SEQ ID NO: 413564 - DNA, 25 bp, Artificial
  probe
  misc_feature (1)..(25): SEQ ID NO: 5529; WAN024CAI; Start 92; Stop 116
cggttgacaatatcaatgatatgag

SEQ ID NO: 413565 - DNA, 25 bp, Artificial
  probe
  misc_feature (1)..(25): SEQ ID NO: 5529; WAN024CAI; Start 38; Stop 62
tccttgccatcactaatcaagctaa

SEQ ID NO: 413566 - DNA, 25 bp, Artificial
  probe
  misc_feature (1)..(25): SEQ ID NO: 5529; WAN024CAI; Start 37; Stop 61
ttccttgccatcactaatcaagcta

SEQ ID NO: 413567 - DNA, 25 bp, Artificial
  probe
  misc_feature (1)..(25): SEQ ID NO: 5529; WAN024CAI; Start 131; Stop 155
tggctcttcatatacttgagacggg

SEQ ID NO: 413568 - DNA, 25 bp, Artificial
  probe
  misc_feature (1)..(25): SEQ ID NO: 5529; WAN024CAI; Start 123; Stop 147
ccgcttgctggctcttcatatactt

SEQ ID NO: 413569 - DNA, 25 bp, Artificial
  probe
  misc_feature (1)..(25): SEQ ID NO: 5529; WAN024CAI; Start 43; Stop 67
gccatcactaatcaagctaaaagaa

SEQ ID NO: 413570 - DNA, 25 bp, Artificial
  probe
  misc_feature (1)..(25): SEQ ID NO: 5529; WAN024CAI; Start 34; Stop 58
catttccttgccatcactaatcaag

SEQ ID NO: 413571 - DNA, 25 bp, Artificial
  probe
  misc_feature (1)..(25): SEQ ID NO: 5530; WAN024C7N; Start 286; Stop 310
gtcattaccagtatccatagcgtat

SEQ ID NO: 413572 - DNA, 25 bp, Artificial
  probe
  misc_feature (1)..(25): SEQ ID NO: 5530; WAN024C7N; Start 289; Stop 313
attaccagtatccatagcgtattgc

SEQ ID NO: 413573 - DNA, 25 bp, Artificial
  probe
  misc_feature (1)..(25): SEQ ID NO: 5530; WAN024C7N; Start 288; Stop 312
cattaccagtatccatagcgtattg

SEQ ID NO: 413574 - DNA, 25 bp, Artificial
  probe
  misc_feature (1)..(25): SEQ ID NO: 5530; WAN024C7N; Start 287; Stop 311
tcattaccagtatccatagcgtatt

SEQ ID NO: 413575 - DNA, 25 bp, Artificial
  probe
  misc_feature (1)..(25): SEQ ID NO: 5530; WAN024C7N; Start 157; Stop 181
aatccattgagtccacttgtagtag

SEQ ID NO: 413576 - DNA, 25 bp, Artificial
  probe
  misc_feature (1)..(25): SEQ ID NO: 5530; WAN024C7N; Start 158; Stop 182
atccattgagtccacttgtagtagt

SEQ ID NO: 413577 - DNA, 25 bp, Artificial
  probe
  misc_feature (1)..(25): SEQ ID NO: 5530; WAN024C7N; Start 159; Stop 183
tccattgagtccacttgtagtagtt

SEQ ID NO: 413578 - DNA, 25 bp, Artificial
  probe
  misc_feature (1)..(25): SEQ ID NO: 5530; WAN024C7N; Start 285; Stop 309
ggtcattaccagtatccatagcgta

SEQ ID NO: 413579 - DNA, 25 bp, Artificial
  probe
  misc_feature (1)..(25): SEQ ID NO: 5530; WAN024C7N; Start 161; Stop 185
cattgagtccacttgtagtagtttg

SEQ ID NO: 413580 - DNA, 25 bp, Artificial
  probe
  misc_feature (1)..(25): SEQ ID NO: 5530; WAN024C7N; Start 160; Stop 184
ccattgagtccacttgtagtagttt

SEQ ID NO: 413581 - DNA, 25 bp, Artificial
  probe
  misc_feature (1)..(25): SEQ ID NO: 5530; WAN024C7N; Start 156; Stop 180
aaatccattgagtccacttgtagta

SEQ ID NO: 413582 - DNA, 25 bp, Artificial
  probe
  misc_feature (1)..(25): SEQ ID NO: 5530; WAN024C7N; Start 176; Stop 200
tagtagtttggatctgttgtgttga

SEQ ID NO: 413583 - DNA, 25 bp, Artificial
  probe
  misc_feature (1)..(25): SEQ ID NO: 5530; WAN024C7N; Start 175; Stop 199
gtagtagtttggatctgttgtgttg

SEQ ID NO: 413584 - DNA, 25 bp, Artificial
  probe
  misc_feature (1)..(25): SEQ ID NO: 5530; WAN024C7N; Start 174; Stop 198
tgtagtagtttggatctgttgtgtt

SEQ ID NO: 413585 - DNA, 25 bp, Artificial
  probe
  misc_feature (1)..(25): SEQ ID NO: 5530; WAN024C7N; Start 173; Stop 197
ttgtagtagtttggatctgttgtgt

SEQ ID NO: 413586 - DNA, 25 bp, Artificial
  probe
  misc_feature (1)..(25): SEQ ID NO: 5530; WAN024C7N; Start 172; Stop 196
cttgtagtagtttggatctgttgtg

SEQ ID NO: 413587 - DNA, 25 bp, Artificial
  probe
  misc_feature (1)..(25): SEQ ID NO: 5530; WAN024C7N; Start 177; Stop 201
agtagtttggatctgttgtgttgac

SEQ ID NO: 413588 - DNA, 25 bp, Artificial
  probe
  misc_feature (1)..(25): SEQ ID NO: 5530; WAN024C7N; Start 441; Stop 465
cagacggataagggaacatatcaag

SEQ ID NO: 413589 - DNA, 25 bp, Artificial
  probe
  misc_feature (1)..(25): SEQ ID NO: 5530; WAN024C7N; Start 290; Stop 314
ttaccagtatccatagcgtattgct

SEQ ID NO: 413590 - DNA, 25 bp, Artificial
  probe
  misc_feature (1)..(25): SEQ ID NO: 5530; WAN024C7N; Start 171; Stop 195
acttgtagtagtttggatctgttgt

SEQ ID NO: 413591 - DNA, 25 bp, Artificial
  probe
  misc_feature (1)..(25): SEQ ID NO: 5530; WAN024C7N; Start 170; Stop 194
cacttgtagtagtttggatctgttg

SEQ ID NO: 413592 - DNA, 25 bp, Artificial
  probe
  misc_feature (1)..(25): SEQ ID NO: 5530; WAN024C7N; Start 179; Stop 203
tagtttggatctgttgtgttgactt

SEQ ID NO: 413593 - DNA, 25 bp, Artificial
  probe
  misc_feature (1)..(25): SEQ ID NO: 5530; WAN024C7N; Start 386; Stop 410
ctgaggatatcggttgcagtataac

SEQ ID NO: 413594 - DNA, 25 bp, Artificial
  probe
  misc_feature (1)..(25): SEQ ID NO: 5530; WAN024C7N; Start 291; Stop 315
taccagtatccatagcgtattgctc

SEQ ID NO: 413595 - DNA, 25 bp, Artificial
  probe
  misc_feature (1)..(25): SEQ ID NO: 5530; WAN024C7N; Start 178; Stop 202
gtagtttggatctgttgtgttgact

SEQ ID NO: 413596 - DNA, 25 bp, Artificial
  probe
  misc_feature (1)..(25): SEQ ID NO: 5530; WAN024C7N; Start 181; Stop 205
gtttggatctgttgtgttgacttca

SEQ ID NO: 413597 - DNA, 25 bp, Artificial
  probe
  misc_feature (1)..(25): SEQ ID NO: 5530; WAN024C7N; Start 180; Stop 204
agtttggatctgttgtgttgacttc

SEQ ID NO: 413598 - DNA, 25 bp, Artificial
  probe
  misc_feature (1)..(25): SEQ ID NO: 5530; WAN024C7N; Start 162; Stop 186
attgagtccacttgtagtagtttgg

SEQ ID NO: 413599 - DNA, 25 bp, Artificial
  probe
  misc_feature (1)..(25): SEQ ID NO: 5530; WAN024C7N; Start 440; Stop 464
ccagacggataagggaacatatcaa

SEQ ID NO: 413600 - DNA, 25 bp, Artificial
  probe
  misc_feature (1)..(25): SEQ ID NO: 5530; WAN024C7N; Start 200; Stop 224
acttcacgatcccagtcataagaaa

SEQ ID NO: 413601 - DNA, 25 bp, Artificial
  probe
  misc_feature (1)..(25): SEQ ID NO: 5530; WAN024C7N; Start 169; Stop 193
ccacttgtagtagtttggatctgtt

SEQ ID NO: 413602 - DNA, 25 bp, Artificial
  probe
  misc_feature (1)..(25): SEQ ID NO: 5530; WAN024C7N; Start 442; Stop 466
agacggataagggaacatatcaagc

SEQ ID NO: 413603 - DNA, 25 bp, Artificial
  probe
  misc_feature (1)..(25): SEQ ID NO: 5530; WAN024C7N; Start 187; Stop 211
atctgttgtgttgacttcacgatcc

SEQ ID NO: 413604 - DNA, 25 bp, Artificial
  probe
  misc_feature (1)..(25): SEQ ID NO: 5531; WAN024GGI; Start 188; Stop 212
ataacctgcttagcgatattgactt

SEQ ID NO: 413605 - DNA, 25 bp, Artificial
  probe
  misc_feature (1)..(25): SEQ ID NO: 5531; WAN024GGI; Start 187; Stop 211
gataacctgcttagcgatattgact

SEQ ID NO: 413606 - DNA, 25 bp, Artificial
  probe
  misc_feature (1)..(25): SEQ ID NO: 5531; WAN024GGI; Start 183; Stop 207
cttggataacctgcttagcgatatt

SEQ ID NO: 413607 - DNA, 25 bp, Artificial
  probe
  misc_feature (1)..(25): SEQ ID NO: 5531; WAN024GGI; Start 189; Stop 213
taacctgcttagcgatattgacttg

SEQ ID NO: 413608 - DNA, 25 bp, Artificial
  probe
  misc_feature (1)..(25): SEQ ID NO: 5531; WAN024GGI; Start 184; Stop 208
ttggataacctgcttagcgatattg

SEQ ID NO: 413609 - DNA, 25 bp, Artificial
  probe
  misc_feature (1)..(25): SEQ ID NO: 5531; WAN024GGI; Start 339; Stop 363
tcttgtacttacggtaatccttctt

SEQ ID NO: 413610 - DNA, 25 bp, Artificial
  probe
  misc_feature (1)..(25): SEQ ID NO: 5531; WAN024GGI; Start 338; Stop 362
atcttgtacttacggtaatccttct

SEQ ID NO: 413611 - DNA, 25 bp, Artificial
  probe
  misc_feature (1)..(25): SEQ ID NO: 5531; WAN024GGI; Start 186; Stop 210
ggataacctgcttagcgatattgac

SEQ ID NO: 413612 - DNA, 25 bp, Artificial
  probe
  misc_feature (1)..(25): SEQ ID NO: 5531; WAN024GGI; Start 182; Stop 206
tcttggataacctgcttagcgatat

SEQ ID NO: 413613 - DNA, 25 bp, Artificial
  probe
  misc_feature (1)..(25): SEQ ID NO: 5531; WAN024GGI; Start 196; Stop 220
cttagcgatattgacttgaccttgc

SEQ ID NO: 413614 - DNA, 25 bp, Artificial
  probe
  misc_feature (1)..(25): SEQ ID NO: 5531; WAN024GGI; Start 185; Stop 209
tggataacctgcttagcgatattga

SEQ ID NO: 413615 - DNA, 25 bp, Artificial
  probe
  misc_feature (1)..(25): SEQ ID NO: 5531; WAN024GGI; Start 195; Stop 219
gcttagcgatattgacttgaccttg

SEQ ID NO: 413616 - DNA, 25 bp, Artificial
  probe
  misc_feature (1)..(25): SEQ ID NO: 5531; WAN024GGI; Start 181; Stop 205
ctcttggataacctgcttagcgata

SEQ ID NO: 413617 - DNA, 25 bp, Artificial
  probe
  misc_feature (1)..(25): SEQ ID NO: 5531; WAN024GGI; Start 344; Stop 368
tacttacggtaatccttcttactcg

SEQ ID NO: 413618 - DNA, 25 bp, Artificial
  probe
  misc_feature (1)..(25): SEQ ID NO: 5531; WAN024GGI; Start 340; Stop 364
cttgtacttacggtaatccttctta

SEQ ID NO: 413619 - DNA, 25 bp, Artificial
  probe
  misc_feature (1)..(25): SEQ ID NO: 5531; WAN024GGI; Start 347; Stop 371
ttacggtaatccttcttactcggtt

SEQ ID NO: 413620 - DNA, 25 bp, Artificial
  probe
  misc_feature (1)..(25): SEQ ID NO: 5531; WAN024GGI; Start 194; Stop 218
tgcttagcgatattgacttgacctt

SEQ ID NO: 413621 - DNA, 25 bp, Artificial
  probe
  misc_feature (1)..(25): SEQ ID NO: 5531; WAN024GGI; Start 190; Stop 214
aacctgcttagcgatattgacttga

SEQ ID NO: 413622 - DNA, 25 bp, Artificial
  probe
  misc_feature (1)..(25): SEQ ID NO: 5531; WAN024GGI; Start 226; Stop 250
atcaatcacaatcaaatctggagga

SEQ ID NO: 413623 - DNA, 25 bp, Artificial
  probe
  misc_feature (1)..(25): SEQ ID NO: 5531; WAN024GGI; Start 225; Stop 249
catcaatcacaatcaaatctggagg

SEQ ID NO: 413624 - DNA, 25 bp, Artificial
  probe
  misc_feature (1)..(25): SEQ ID NO: 5531; WAN024GGI; Start 337; Stop 361
tatcttgtacttacggtaatccttc

SEQ ID NO: 413625 - DNA, 25 bp, Artificial
  probe
  misc_feature (1)..(25): SEQ ID NO: 5531; WAN024GGI; Start 346; Stop 370
cttacggtaatccttcttactcggt

SEQ ID NO: 413626 - DNA, 25 bp, Artificial
  probe
  misc_feature (1)..(25): SEQ ID NO: 5531; WAN024GGI; Start 345; Stop 369
acttacggtaatccttcttactcgg

SEQ ID NO: 413627 - DNA, 25 bp, Artificial
  probe
  misc_feature (1)..(25): SEQ ID NO: 5531; WAN024GGI; Start 229; Stop 253
aatcacaatcaaatctggaggagtc

SEQ ID NO: 413628 - DNA, 25 bp, Artificial
  probe
  misc_feature (1)..(25): SEQ ID NO: 5531; WAN024GGI; Start 227; Stop 251
tcaatcacaatcaaatctggaggag

SEQ ID NO: 413629 - DNA, 25 bp, Artificial
  probe
  misc_feature (1)..(25): SEQ ID NO: 5531; WAN024GGI; Start 176; Stop 200
agttcctcttggataacctgcttag

SEQ ID NO: 413630 - DNA, 25 bp, Artificial
  probe
  misc_feature (1)..(25): SEQ ID NO: 5531; WAN024GGI; Start 233; Stop 257
acaatcaaatctggaggagtcaaag

SEQ ID NO: 413631 - DNA, 25 bp, Artificial
  probe
  misc_feature (1)..(25): SEQ ID NO: 5531; WAN024GGI; Start 228; Stop 252
caatcacaatcaaatctggaggagt

SEQ ID NO: 413632 - DNA, 25 bp, Artificial
  probe
  misc_feature (1)..(25): SEQ ID NO: 5531; WAN024GGI; Start 342; Stop 366
tgtacttacggtaatccttcttact

SEQ ID NO: 413633 - DNA, 25 bp, Artificial
  probe
  misc_feature (1)..(25): SEQ ID NO: 5531; WAN024GGI; Start 232; Stop 256
cacaatcaaatctggaggagtcaaa

SEQ ID NO: 413634 - DNA, 25 bp, Artificial
  probe
  misc_feature (1)..(25): SEQ ID NO: 5531; WAN024GGI; Start 193; Stop 217
ctgcttagcgatattgacttgacct

SEQ ID NO: 413635 - DNA, 25 bp, Artificial
  probe
  misc_feature (1)..(25): SEQ ID NO: 5531; WAN024GGI; Start 197; Stop 221
ttagcgatattgacttgaccttgcc

SEQ ID NO: 413636 - DNA, 25 bp, Artificial
  probe
  misc_feature (1)..(25): SEQ ID NO: 5531; WAN024GGI; Start 175; Stop 199
cagttcctcttggataacctgctta

SEQ ID NO: 413637 - DNA, 25 bp, Artificial
  probe
  misc_feature (1)..(25): SEQ ID NO: 5532; WAN024GD2; Start 191; Stop 215
cgatcacggtcataggtatcttgaa

SEQ ID NO: 413638 - DNA, 25 bp, Artificial
  probe
  misc_feature (1)..(25): SEQ ID NO: 5532; WAN024GD2; Start 227; Stop 251
ttgaccatcttaggactaaacttga

SEQ ID NO: 413639 - DNA, 25 bp, Artificial
  probe
  misc_feature (1)..(25): SEQ ID NO: 5532; WAN024GD2; Start 224; Stop 248
tctttgaccatcttaggactaaact

SEQ ID NO: 413640 - DNA, 25 bp, Artificial
  probe
  misc_feature (1)..(25): SEQ ID NO: 5532; WAN024GD2; Start 228; Stop 252
tgaccatcttaggactaaacttgat

SEQ ID NO: 413641 - DNA, 25 bp, Artificial
  probe
  misc_feature (1)..(25): SEQ ID NO: 5532; WAN024GD2; Start 244; Stop 268
aaacttgattcccaatttctccaac

SEQ ID NO: 413642 - DNA, 25 bp, Artificial
  probe
  misc_feature (1)..(25): SEQ ID NO: 5532; WAN024GD2; Start 287; Stop 311
tcacttggctgataaagggtaatag

SEQ ID NO: 413643 - DNA, 25 bp, Artificial
  probe
  misc_feature (1)..(25): SEQ ID NO: 5532; WAN024GD2; Start 193; Stop 217
atcacggtcataggtatcttgaaat

SEQ ID NO: 413644 - DNA, 25 bp, Artificial
  probe
  misc_feature (1)..(25): SEQ ID NO: 5532; WAN024GD2; Start 226; Stop 250
tttgaccatcttaggactaaacttg

SEQ ID NO: 413645 - DNA, 25 bp, Artificial
  probe
  misc_feature (1)..(25): SEQ ID NO: 5532; WAN024GD2; Start 194; Stop 218
tcacggtcataggtatcttgaaatt

SEQ ID NO: 413646 - DNA, 25 bp, Artificial
  probe
  misc_feature (1)..(25): SEQ ID NO: 5532; WAN024GD2; Start 196; Stop 220
acggtcataggtatcttgaaattcc

SEQ ID NO: 413647 - DNA, 25 bp, Artificial
  probe
  misc_feature (1)..(25): SEQ ID NO: 5532; WAN024GD2; Start 195; Stop 219
cacggtcataggtatcttgaaattc

SEQ ID NO: 413648 - DNA, 25 bp, Artificial
  probe
  misc_feature (1)..(25): SEQ ID NO: 5532; WAN024GD2; Start 245; Stop 269
aacttgattcccaatttctccaact

SEQ ID NO: 413649 - DNA, 25 bp, Artificial
  probe
  misc_feature (1)..(25): SEQ ID NO: 5532; WAN024GD2; Start 242; Stop 266
ctaaacttgattcccaatttctcca

SEQ ID NO: 413650 - DNA, 25 bp, Artificial
  probe
  misc_feature (1)..(25): SEQ ID NO: 5532; WAN024GD2; Start 241; Stop 265
actaaacttgattcccaatttctcc

SEQ ID NO: 413651 - DNA, 25 bp, Artificial
  probe
  misc_feature (1)..(25): SEQ ID NO: 5532; WAN024GD2; Start 225; Stop 249
ctttgaccatcttaggactaaactt

SEQ ID NO: 413652 - DNA, 25 bp, Artificial
  probe
  misc_feature (1)..(25): SEQ ID NO: 5532; WAN024GD2; Start 197; Stop 221
cggtcataggtatcttgaaattccc

SEQ ID NO: 413653 - DNA, 25 bp, Artificial
  probe
  misc_feature (1)..(25): SEQ ID NO: 5532; WAN024GD2; Start 246; Stop 270
acttgattcccaatttctccaactc

SEQ ID NO: 413654 - DNA, 25 bp, Artificial
  probe
  misc_feature (1)..(25): SEQ ID NO: 5532; WAN024GD2; Start 243; Stop 267
taaacttgattcccaatttctccaa

SEQ ID NO: 413655 - DNA, 25 bp, Artificial
  probe
  misc_feature (1)..(25): SEQ ID NO: 5532; WAN024GD2; Start 247; Stop 271
cttgattcccaatttctccaactca

SEQ ID NO: 413656 - DNA, 25 bp, Artificial
  probe
  misc_feature (1)..(25): SEQ ID NO: 5532; WAN024GD2; Start 230; Stop 254
accatcttaggactaaacttgattc

SEQ ID NO: 413657 - DNA, 25 bp, Artificial
  probe
  misc_feature (1)..(25): SEQ ID NO: 5532; WAN024GD2; Start 229; Stop 253
gaccatcttaggactaaacttgatt

SEQ ID NO: 413658 - DNA, 25 bp, Artificial
  probe
  misc_feature (1)..(25): SEQ ID NO: 5532; WAN024GD2; Start 192; Stop 216
gatcacggtcataggtatcttgaaa

SEQ ID NO: 413659 - DNA, 25 bp, Artificial
  probe
  misc_feature (1)..(25): SEQ ID NO: 5532; WAN024GD2; Start 248; Stop 272
ttgattcccaatttctccaactcac

SEQ ID NO: 413660 - DNA, 25 bp, Artificial
  probe
  misc_feature (1)..(25): SEQ ID NO: 5532; WAN024GD2; Start 189; Stop 213
gacgatcacggtcataggtatcttg

SEQ ID NO: 413661 - DNA, 25 bp, Artificial
  probe
  misc_feature (1)..(25): SEQ ID NO: 5532; WAN024GD2; Start 190; Stop 214
acgatcacggtcataggtatcttga

SEQ ID NO: 413662 - DNA, 25 bp, Artificial
  probe
  misc_feature (1)..(25): SEQ ID NO: 5532; WAN024GD2; Start 240; Stop 264
gactaaacttgattcccaatttctc

SEQ ID NO: 413663 - DNA, 25 bp, Artificial
  probe
  misc_feature (1)..(25): SEQ ID NO: 5532; WAN024GD2; Start 234; Stop 258
tcttaggactaaacttgattcccaa

SEQ ID NO: 413664 - DNA, 25 bp, Artificial
  probe
  misc_feature (1)..(25): SEQ ID NO: 5532; WAN024GD2; Start 239; Stop 263
ggactaaacttgattcccaatttct

SEQ ID NO: 413665 - DNA, 25 bp, Artificial
  probe
  misc_feature (1)..(25): SEQ ID NO: 5532; WAN024GD2; Start 238; Stop 262
aggactaaacttgattcccaatttc

SEQ ID NO: 413666 - DNA, 25 bp, Artificial
  probe
  misc_feature (1)..(25): SEQ ID NO: 5532; WAN024GD2; Start 233; Stop 257
atcttaggactaaacttgattccca

SEQ ID NO: 413667 - DNA, 25 bp, Artificial
  probe
  misc_feature (1)..(25): SEQ ID NO: 5532; WAN024GD2; Start 232; Stop 256
catcttaggactaaacttgattccc

SEQ ID NO: 413668 - DNA, 25 bp, Artificial
  probe
  misc_feature (1)..(25): SEQ ID NO: 5532; WAN024GD2; Start 231; Stop 255
ccatcttaggactaaacttgattcc

SEQ ID NO: 413669 - DNA, 25 bp, Artificial
  probe
  misc_feature (1)..(25): SEQ ID NO: 5532; WAN024GD2; Start 235; Stop 259
cttaggactaaacttgattcccaat

SEQ ID NO: 413670 - DNA, 25 bp, Artificial
  probe
  misc_feature (1)..(25): SEQ ID NO: 5533; WAN024C8F; Start 50; Stop 74
gtattgctcatattcacgctacatt

SEQ ID NO: 413671 - DNA, 25 bp, Artificial
  probe
  misc_feature (1)..(25): SEQ ID NO: 5533; WAN024C8F; Start 49; Stop 73
ggtattgctcatattcacgctacat

SEQ ID NO: 413672 - DNA, 25 bp, Artificial
  probe
  misc_feature (1)..(25): SEQ ID NO: 5533; WAN024C8F; Start 44; Stop 68
aatctggtattgctcatattcacgc

SEQ ID NO: 413673 - DNA, 25 bp, Artificial
  probe
  misc_feature (1)..(25): SEQ ID NO: 5533; WAN024C8F; Start 47; Stop 71
ctggtattgctcatattcacgctac

SEQ ID NO: 413674 - DNA, 25 bp, Artificial
  probe
  misc_feature (1)..(25): SEQ ID NO: 5533; WAN024C8F; Start 46; Stop 70
tctggtattgctcatattcacgcta

SEQ ID NO: 413675 - DNA, 25 bp, Artificial
  probe
  misc_feature (1)..(25): SEQ ID NO: 5533; WAN024C8F; Start 48; Stop 72
tggtattgctcatattcacgctaca

SEQ ID NO: 413676 - DNA, 25 bp, Artificial
  probe
  misc_feature (1)..(25): SEQ ID NO: 5533; WAN024C8F; Start 45; Stop 69
atctggtattgctcatattcacgct

SEQ ID NO: 413677 - DNA, 25 bp, Artificial
  probe
  misc_feature (1)..(25): SEQ ID NO: 5533; WAN024C8F; Start 305; Stop 329
gtcttgaagtaacagcaattcgtga

SEQ ID NO: 413678 - DNA, 25 bp, Artificial
  probe
  misc_feature (1)..(25): SEQ ID NO: 5533; WAN024C8F; Start 43; Stop 67
gaatctggtattgctcatattcacg

SEQ ID NO: 413679 - DNA, 25 bp, Artificial
  probe
  misc_feature (1)..(25): SEQ ID NO: 5533; WAN024C8F; Start 42; Stop 66
cgaatctggtattgctcatattcac

SEQ ID NO: 413680 - DNA, 25 bp, Artificial
  probe
  misc_feature (1)..(25): SEQ ID NO: 5533; WAN024C8F; Start 82; Stop 106
actattgttatgattactgatgtgc

SEQ ID NO: 413681 - DNA, 25 bp, Artificial
  probe
  misc_feature (1)..(25): SEQ ID NO: 5533; WAN024C8F; Start 35; Stop 59
agaatatcgaatctggtattgctca

SEQ ID NO: 413682 - DNA, 25 bp, Artificial
  probe
  misc_feature (1)..(25): SEQ ID NO: 5533; WAN024C8F; Start 144; Stop 168
tggtttcaaaggttctcgtaaatct

SEQ ID NO: 413683 - DNA, 25 bp, Artificial
  probe
  misc_feature (1)..(25): SEQ ID NO: 5533; WAN024C8F; Start 86; Stop 110
ttgttatgattactgatgtgcatgg

SEQ ID NO: 413684 - DNA, 25 bp, Artificial
  probe
  misc_feature (1)..(25): SEQ ID NO: 5533; WAN024C8F; Start 36; Stop 60
gaatatcgaatctggtattgctcat

SEQ ID NO: 413685 - DNA, 25 bp, Artificial
  probe
  misc_feature (1)..(25): SEQ ID NO: 5533; WAN024C8F; Start 87; Stop 111
tgttatgattactgatgtgcatggt

SEQ ID NO: 413686 - DNA, 25 bp, Artificial
  probe
  misc_feature (1)..(25): SEQ ID NO: 5533; WAN024C8F; Start 145; Stop 169
ggtttcaaaggttctcgtaaatcta

SEQ ID NO: 413687 - DNA, 25 bp, Artificial
  probe
  misc_feature (1)..(25): SEQ ID NO: 5533; WAN024C8F; Start 34; Stop 58
aagaatatcgaatctggtattgctc

SEQ ID NO: 413688 - DNA, 25 bp, Artificial
  probe
  misc_feature (1)..(25): SEQ ID NO: 5533; WAN024C8F; Start 148; Stop 172
ttcaaaggttctcgtaaatctacac

SEQ ID NO: 413689 - DNA, 25 bp, Artificial
  probe
  misc_feature (1)..(25): SEQ ID NO: 5533; WAN024C8F; Start 53; Stop 77
ttgctcatattcacgctacatttaa

SEQ ID NO: 413690 - DNA, 25 bp, Artificial
  probe
  misc_feature (1)..(25): SEQ ID NO: 5533; WAN024C8F; Start 304; Stop 328
ggtcttgaagtaacagcaattcgtg

SEQ ID NO: 413691 - DNA, 25 bp, Artificial
  probe
  misc_feature (1)..(25): SEQ ID NO: 5533; WAN024C8F; Start 52; Stop 76
attgctcatattcacgctacattta

SEQ ID NO: 413692 - DNA, 25 bp, Artificial
  probe
  misc_feature (1)..(25): SEQ ID NO: 5533; WAN024C8F; Start 51; Stop 75
tattgctcatattcacgctacattt

SEQ ID NO: 413693 - DNA, 25 bp, Artificial
  probe
  misc_feature (1)..(25): SEQ ID NO: 5533; WAN024C8F; Start 54; Stop 78
tgctcatattcacgctacatttaat

SEQ ID NO: 413694 - DNA, 25 bp, Artificial
  probe
  misc_feature (1)..(25): SEQ ID NO: 5533; WAN024C8F; Start 88; Stop 112
gttatgattactgatgtgcatggta

SEQ ID NO: 413695 - DNA, 25 bp, Artificial
  probe
  misc_feature (1)..(25): SEQ ID NO: 5533; WAN024C8F; Start 220; Stop 244
gaacacggtcttaaatcagttgaag

SEQ ID NO: 413696 - DNA, 25 bp, Artificial
  probe
  misc_feature (1)..(25): SEQ ID NO: 5533; WAN024C8F; Start 224; Stop 248
acggtcttaaatcagttgaagttac

SEQ ID NO: 413697 - DNA, 25 bp, Artificial
  probe
  misc_feature (1)..(25): SEQ ID NO: 5533; WAN024C8F; Start 223; Stop 247
cacggtcttaaatcagttgaagtta

SEQ ID NO: 413698 - DNA, 25 bp, Artificial
  probe
  misc_feature (1)..(25): SEQ ID NO: 5533; WAN024C8F; Start 143; Stop 167
ttggtttcaaaggttctcgtaaatc

SEQ ID NO: 413699 - DNA, 25 bp, Artificial
  probe
  misc_feature (1)..(25): SEQ ID NO: 5533; WAN024C8F; Start 142; Stop 166
cttggtttcaaaggttctcgtaaat

SEQ ID NO: 413700 - DNA, 25 bp, Artificial
  probe
  misc_feature (1)..(25): SEQ ID NO: 5533; WAN024C8F; Start 219; Stop 243
agaacacggtcttaaatcagttgaa

SEQ ID NO: 413701 - DNA, 25 bp, Artificial
  probe
  misc_feature (1)..(25): SEQ ID NO: 5533; WAN024C8F; Start 222; Stop 246
acacggtcttaaatcagttgaagtt

SEQ ID NO: 413702 - DNA, 25 bp, Artificial
  probe
  misc_feature (1)..(25): SEQ ID NO: 5533; WAN024C8F; Start 302; Stop 326
ctggtcttgaagtaacagcaattcg

SEQ ID NO: 413703 - DNA, 25 bp, Artificial
  probe
  misc_feature (1)..(25): SEQ ID NO: 5534; WAN024DXF; Start 180; Stop 204
taatcaaggcaatcttagtccaagt

SEQ ID NO: 413704 - DNA, 25 bp, Artificial
  probe
  misc_feature (1)..(25): SEQ ID NO: 5534; WAN024DXF; Start 177; Stop 201
tcataatcaaggcaatcttagtcca

SEQ ID NO: 413705 - DNA, 25 bp, Artificial
  probe
  misc_feature (1)..(25): SEQ ID NO: 5534; WAN024DXF; Start 174; Stop 198
gcatcataatcaaggcaatcttagt

SEQ ID NO: 413706 - DNA, 25 bp, Artificial
  probe
  misc_feature (1)..(25): SEQ ID NO: 5534; WAN024DXF; Start 181; Stop 205
aatcaaggcaatcttagtccaagtt

SEQ ID NO: 413707 - DNA, 25 bp, Artificial
  probe
  misc_feature (1)..(25): SEQ ID NO: 5534; WAN024DXF; Start 178; Stop 202
cataatcaaggcaatcttagtccaa

SEQ ID NO: 413708 - DNA, 25 bp, Artificial
  probe
  misc_feature (1)..(25): SEQ ID NO: 5534; WAN024DXF; Start 179; Stop 203
ataatcaaggcaatcttagtccaag

SEQ ID NO: 413709 - DNA, 25 bp, Artificial
  probe
  misc_feature (1)..(25): SEQ ID NO: 5534; WAN024DXF; Start 176; Stop 200
atcataatcaaggcaatcttagtcc

SEQ ID NO: 413710 - DNA, 25 bp, Artificial
  probe
  misc_feature (1)..(25): SEQ ID NO: 5534; WAN024DXF; Start 182; Stop 206
atcaaggcaatcttagtccaagttg

SEQ ID NO: 413711 - DNA, 25 bp, Artificial
  probe
  misc_feature (1)..(25): SEQ ID NO: 5534; WAN024DXF; Start 263; Stop 287
attggcaatacttgagtgttgatag

SEQ ID NO: 413712 - DNA, 25 bp, Artificial
  probe
  misc_feature (1)..(25): SEQ ID NO: 5534; WAN024DXF; Start 262; Stop 286
gattggcaatacttgagtgttgata

SEQ ID NO: 413713 - DNA, 25 bp, Artificial
  probe
  misc_feature (1)..(25): SEQ ID NO: 5534; WAN024DXF; Start 261; Stop 285
agattggcaatacttgagtgttgat

SEQ ID NO: 413714 - DNA, 25 bp, Artificial
  probe
  misc_feature (1)..(25): SEQ ID NO: 5534; WAN024DXF; Start 260; Stop 284
aagattggcaatacttgagtgttga

SEQ ID NO: 413715 - DNA, 25 bp, Artificial
  probe
  misc_feature (1)..(25): SEQ ID NO: 5534; WAN024DXF; Start 264; Stop 288
ttggcaatacttgagtgttgatagc

SEQ ID NO: 413716 - DNA, 25 bp, Artificial
  probe
  misc_feature (1)..(25): SEQ ID NO: 5534; WAN024DXF; Start 175; Stop 199
catcataatcaaggcaatcttagtc

SEQ ID NO: 413717 - DNA, 25 bp, Artificial
  probe
  misc_feature (1)..(25): SEQ ID NO: 5534; WAN024DXF; Start 100; Stop 124
gtaaaggtcgttaggaatagattgc

SEQ ID NO: 413718 - DNA, 25 bp, Artificial
  probe
  misc_feature (1)..(25): SEQ ID NO: 5534; WAN024DXF; Start 265; Stop 289
tggcaatacttgagtgttgatagca

SEQ ID NO: 413719 - DNA, 25 bp, Artificial
  probe
  misc_feature (1)..(25): SEQ ID NO: 5534; WAN024DXF; Start 99; Stop 123
cgtaaaggtcgttaggaatagattg

SEQ ID NO: 413720 - DNA, 25 bp, Artificial
  probe
  misc_feature (1)..(25): SEQ ID NO: 5534; WAN024DXF; Start 98; Stop 122
tcgtaaaggtcgttaggaatagatt

SEQ ID NO: 413721 - DNA, 25 bp, Artificial
  probe
  misc_feature (1)..(25): SEQ ID NO: 5534; WAN024DXF; Start 234; Stop 258
catcaaggaaaggaaggaatttagc

SEQ ID NO: 413722 - DNA, 25 bp, Artificial
  probe
  misc_feature (1)..(25): SEQ ID NO: 5534; WAN024DXF; Start 242; Stop 266
aaaggaaggaatttagccaagattg

SEQ ID NO: 413723 - DNA, 25 bp, Artificial
  probe
  misc_feature (1)..(25): SEQ ID NO: 5534; WAN024DXF; Start 233; Stop 257
ccatcaaggaaaggaaggaatttag

SEQ ID NO: 413724 - DNA, 25 bp, Artificial
  probe
  misc_feature (1)..(25): SEQ ID NO: 5534; WAN024DXF; Start 96; Stop 120
cttcgtaaaggtcgttaggaataga

SEQ ID NO: 413725 - DNA, 25 bp, Artificial
  probe
  misc_feature (1)..(25): SEQ ID NO: 5534; WAN024DXF; Start 241; Stop 265
gaaaggaaggaatttagccaagatt

SEQ ID NO: 413726 - DNA, 25 bp, Artificial
  probe
  misc_feature (1)..(25): SEQ ID NO: 5534; WAN024DXF; Start 269; Stop 293
aatacttgagtgttgatagcaccga

SEQ ID NO: 413727 - DNA, 25 bp, Artificial
  probe
  misc_feature (1)..(25): SEQ ID NO: 5534; WAN024DXF; Start 268; Stop 292
caatacttgagtgttgatagcaccg

SEQ ID NO: 413728 - DNA, 25 bp, Artificial
  probe
  misc_feature (1)..(25): SEQ ID NO: 5534; WAN024DXF; Start 97; Stop 121
ttcgtaaaggtcgttaggaatagat

SEQ ID NO: 413729 - DNA, 25 bp, Artificial
  probe
  misc_feature (1)..(25): SEQ ID NO: 5534; WAN024DXF; Start 240; Stop 264
ggaaaggaaggaatttagccaagat

SEQ ID NO: 413730 - DNA, 25 bp, Artificial
  probe
  misc_feature (1)..(25): SEQ ID NO: 5534; WAN024DXF; Start 235; Stop 259
atcaaggaaaggaaggaatttagcc

SEQ ID NO: 413731 - DNA, 25 bp, Artificial
  probe
  misc_feature (1)..(25): SEQ ID NO: 5534; WAN024DXF; Start 267; Stop 291
gcaatacttgagtgttgatagcacc

SEQ ID NO: 413732 - DNA, 25 bp, Artificial
  probe
  misc_feature (1)..(25): SEQ ID NO: 5534; WAN024DXF; Start 266; Stop 290
ggcaatacttgagtgttgatagcac

SEQ ID NO: 413733 - DNA, 25 bp, Artificial
  probe
  misc_feature (1)..(25): SEQ ID NO: 5534; WAN024DXF; Start 238; Stop 262
aaggaaaggaaggaatttagccaag

SEQ ID NO: 413734 - DNA, 25 bp, Artificial
  probe
  misc_feature (1)..(25): SEQ ID NO: 5534; WAN024DXF; Start 95; Stop 119
gcttcgtaaaggtcgttaggaatag

SEQ ID NO: 413735 - DNA, 25 bp, Artificial
  probe
  misc_feature (1)..(25): SEQ ID NO: 5534; WAN024DXF; Start 237; Stop 261
caaggaaaggaaggaatttagccaa

SEQ ID NO: 413736 - DNA, 25 bp, Artificial
  probe
  misc_feature (1)..(25): SEQ ID NO: 5535; WAN024FFC; Start 123; Stop 147
ttctctttctgtttgggtaatggtt

SEQ ID NO: 413737 - DNA, 25 bp, Artificial
  probe
  misc_feature (1)..(25): SEQ ID NO: 5535; WAN024FFC; Start 120; Stop 144
gagttctctttctgtttgggtaatg

SEQ ID NO: 413738 - DNA, 25 bp, Artificial
  probe
  misc_feature (1)..(25): SEQ ID NO: 5535; WAN024FFC; Start 124; Stop 148
tctctttctgtttgggtaatggttc

SEQ ID NO: 413739 - DNA, 25 bp, Artificial
  probe
  misc_feature (1)..(25): SEQ ID NO: 5535; WAN024FFC; Start 121; Stop 145
agttctctttctgtttgggtaatgg

SEQ ID NO: 413740 - DNA, 25 bp, Artificial
  probe
  misc_feature (1)..(25): SEQ ID NO: 5535; WAN024FFC; Start 122; Stop 146
gttctctttctgtttgggtaatggt

SEQ ID NO: 413741 - DNA, 25 bp, Artificial
  probe
  misc_feature (1)..(25): SEQ ID NO: 5535; WAN024FFC; Start 125; Stop 149
ctctttctgtttgggtaatggttcc

SEQ ID NO: 413742 - DNA, 25 bp, Artificial
  probe
  misc_feature (1)..(25): SEQ ID NO: 5535; WAN024FFC; Start 20; Stop 44
atttctcattgatatttgccgaatc

SEQ ID NO: 413743 - DNA, 25 bp, Artificial
  probe
  misc_feature (1)..(25): SEQ ID NO: 5535; WAN024FFC; Start 119; Stop 143
agagttctctttctgtttgggtaat

SEQ ID NO: 413744 - DNA, 25 bp, Artificial
  probe
  misc_feature (1)..(25): SEQ ID NO: 5535; WAN024FFC; Start 6; Stop 30
taccttcatggcatatttctcattg

SEQ ID NO: 413745 - DNA, 25 bp, Artificial
  probe
  misc_feature (1)..(25): SEQ ID NO: 5535; WAN024FFC; Start 4; Stop 28
gctaccttcatggcatatttctcat

SEQ ID NO: 413746 - DNA, 25 bp, Artificial
  probe
  misc_feature (1)..(25): SEQ ID NO: 5535; WAN024FFC; Start 5; Stop 29
ctaccttcatggcatatttctcatt

SEQ ID NO: 413747 - DNA, 25 bp, Artificial
  probe
  misc_feature (1)..(25): SEQ ID NO: 5535; WAN024FFC; Start 17; Stop 41
catatttctcattgatatttgccga

SEQ ID NO: 413748 - DNA, 25 bp, Artificial
  probe
  misc_feature (1)..(25): SEQ ID NO: 5535; WAN024FFC; Start 7; Stop 31
accttcatggcatatttctcattga

SEQ ID NO: 413749 - DNA, 25 bp, Artificial
  probe
  misc_feature (1)..(25): SEQ ID NO: 5535; WAN024FFC; Start 8; Stop 32
ccttcatggcatatttctcattgat

SEQ ID NO: 413750 - DNA, 25 bp, Artificial
  probe
  misc_feature (1)..(25): SEQ ID NO: 5535; WAN024FFC; Start 227; Stop 251
taagactaaagtcagaggaaactgg

SEQ ID NO: 413751 - DNA, 25 bp, Artificial
  probe
  misc_feature (1)..(25): SEQ ID NO: 5535; WAN024FFC; Start 230; Stop 254
gactaaagtcagaggaaactggttt

SEQ ID NO: 413752 - DNA, 25 bp, Artificial
  probe
  misc_feature (1)..(25): SEQ ID NO: 5535; WAN024FFC; Start 1; Stop 25
ttggctaccttcatggcatatttct

SEQ ID NO: 413753 - DNA, 25 bp, Artificial
  probe
  misc_feature (1)..(25): SEQ ID NO: 5535; WAN024FFC; Start 229; Stop 253
agactaaagtcagaggaaactggtt

SEQ ID NO: 413754 - DNA, 25 bp, Artificial
  probe
  misc_feature (1)..(25): SEQ ID NO: 5535; WAN024FFC; Start 228; Stop 252
aagactaaagtcagaggaaactggt

SEQ ID NO: 413755 - DNA, 25 bp, Artificial
  probe
  misc_feature (1)..(25): SEQ ID NO: 5535; WAN024FFC; Start 19; Stop 43
tatttctcattgatatttgccgaat

SEQ ID NO: 413756 - DNA, 25 bp, Artificial
  probe
  misc_feature (1)..(25): SEQ ID NO: 5535; WAN024FFC; Start 18; Stop 42
atatttctcattgatatttgccgaa

SEQ ID NO: 413757 - DNA, 25 bp, Artificial
  probe
  misc_feature (1)..(25): SEQ ID NO: 5535; WAN024FFC; Start 3; Stop 27
ggctaccttcatggcatatttctca

SEQ ID NO: 413758 - DNA, 25 bp, Artificial
  probe
  misc_feature (1)..(25): SEQ ID NO: 5535; WAN024FFC; Start 2; Stop 26
tggctaccttcatggcatatttctc

SEQ ID NO: 413759 - DNA, 25 bp, Artificial
  probe
  misc_feature (1)..(25): SEQ ID NO: 5535; WAN024FFC; Start 226; Stop 250
ttaagactaaagtcagaggaaactg

SEQ ID NO: 413760 - DNA, 25 bp, Artificial
  probe
  misc_feature (1)..(25): SEQ ID NO: 5535; WAN024FFC; Start 9; Stop 33
cttcatggcatatttctcattgata

SEQ ID NO: 413761 - DNA, 25 bp, Artificial
  probe
  misc_feature (1)..(25): SEQ ID NO: 5535; WAN024FFC; Start 16; Stop 40
gcatatttctcattgatatttgccg

SEQ ID NO: 413762 - DNA, 25 bp, Artificial
  probe
  misc_feature (1)..(25): SEQ ID NO: 5535; WAN024FFC; Start 118; Stop 142
aagagttctctttctgtttgggtaa

SEQ ID NO: 413763 - DNA, 25 bp, Artificial
  probe
  misc_feature (1)..(25): SEQ ID NO: 5535; WAN024FFC; Start 14; Stop 38
tggcatatttctcattgatatttgc

SEQ ID NO: 413764 - DNA, 25 bp, Artificial
  probe
  misc_feature (1)..(25): SEQ ID NO: 5535; WAN024FFC; Start 224; Stop 248
ccttaagactaaagtcagaggaaac

SEQ ID NO: 413765 - DNA, 25 bp, Artificial
  probe
  misc_feature (1)..(25): SEQ ID NO: 5535; WAN024FFC; Start 117; Stop 141
caagagttctctttctgtttgggta

SEQ ID NO: 413766 - DNA, 25 bp, Artificial
  probe
  misc_feature (1)..(25): SEQ ID NO: 5535; WAN024FFC; Start 231; Stop 255
actaaagtcagaggaaactggtttt

SEQ ID NO: 413767 - DNA, 25 bp, Artificial
  probe
  misc_feature (1)..(25): SEQ ID NO: 5535; WAN024FFC; Start 13; Stop 37
atggcatatttctcattgatatttg

SEQ ID NO: 413768 - DNA, 25 bp, Artificial
  probe
  misc_feature (1)..(25): SEQ ID NO: 5535; WAN024FFC; Start 11; Stop 35
tcatggcatatttctcattgatatt

SEQ ID NO: 413769 - DNA, 25 bp, Artificial
  probe
  misc_feature (1)..(25): SEQ ID NO: 5536; WAN024CD9; Start 141; Stop 165
cattgtaagttccacggatattgtt

SEQ ID NO: 413770 - DNA, 25 bp, Artificial
  probe
  misc_feature (1)..(25): SEQ ID NO: 5536; WAN024CD9; Start 139; Stop 163
aacattgtaagttccacggatattg

SEQ ID NO: 413771 - DNA, 25 bp, Artificial
  probe
  misc_feature (1)..(25): SEQ ID NO: 5536; WAN024CD9; Start 138; Stop 162
caacattgtaagttccacggatatt

SEQ ID NO: 413772 - DNA, 25 bp, Artificial
  probe
  misc_feature (1)..(25): SEQ ID NO: 5536; WAN024CD9; Start 290; Stop 314
gcaatcacaggtacataatcaatcc

SEQ ID NO: 413773 - DNA, 25 bp, Artificial
  probe
  misc_feature (1)..(25): SEQ ID NO: 5536; WAN024CD9; Start 289; Stop 313
cgcaatcacaggtacataatcaatc

SEQ ID NO: 413774 - DNA, 25 bp, Artificial
  probe
  misc_feature (1)..(25): SEQ ID NO: 5536; WAN024CD9; Start 314; Stop 338
ccttggaacttacgaatcaattcat

SEQ ID NO: 413775 - DNA, 25 bp, Artificial
  probe
  misc_feature (1)..(25): SEQ ID NO: 5536; WAN024CD9; Start 271; Stop 295
atcatagtcttgaatgtccgcaatc

SEQ ID NO: 413776 - DNA, 25 bp, Artificial
  probe
  misc_feature (1)..(25): SEQ ID NO: 5536; WAN024CD9; Start 120; Stop 144
cttcatcaacagccttagcaacatt

SEQ ID NO: 413777 - DNA, 25 bp, Artificial
  probe
  misc_feature (1)..(25): SEQ ID NO: 5536; WAN024CD9; Start 140; Stop 164
acattgtaagttccacggatattgt

SEQ ID NO: 413778 - DNA, 25 bp, Artificial
  probe
  misc_feature (1)..(25): SEQ ID NO: 5536; WAN024CD9; Start 288; Stop 312
ccgcaatcacaggtacataatcaat

SEQ ID NO: 413779 - DNA, 25 bp, Artificial
  probe
  misc_feature (1)..(25): SEQ ID NO: 5536; WAN024CD9; Start 137; Stop 161
gcaacattgtaagttccacggatat

SEQ ID NO: 413780 - DNA, 25 bp, Artificial
  probe
  misc_feature (1)..(25): SEQ ID NO: 5536; WAN024CD9; Start 124; Stop 148
atcaacagccttagcaacattgtaa

SEQ ID NO: 413781 - DNA, 25 bp, Artificial
  probe
  misc_feature (1)..(25): SEQ ID NO: 5536; WAN024CD9; Start 270; Stop 294
gatcatagtcttgaatgtccgcaat

SEQ ID NO: 413782 - DNA, 25 bp, Artificial
  probe
  misc_feature (1)..(25): SEQ ID NO: 5536; WAN024CD9; Start 315; Stop 339
cttggaacttacgaatcaattcatg

SEQ ID NO: 413783 - DNA, 25 bp, Artificial
  probe
  misc_feature (1)..(25): SEQ ID NO: 5536; WAN024CD9; Start 127; Stop 151
aacagccttagcaacattgtaagtt

SEQ ID NO: 413784 - DNA, 25 bp, Artificial
  probe
  misc_feature (1)..(25): SEQ ID NO: 5536; WAN024CD9; Start 123; Stop 147
catcaacagccttagcaacattgta

SEQ ID NO: 413785 - DNA, 25 bp, Artificial
  probe
  misc_feature (1)..(25): SEQ ID NO: 5536; WAN024CD9; Start 121; Stop 145
ttcatcaacagccttagcaacattg

SEQ ID NO: 413786 - DNA, 25 bp, Artificial
  probe
  misc_feature (1)..(25): SEQ ID NO: 5536; WAN024CD9; Start 128; Stop 152
acagccttagcaacattgtaagttc

SEQ ID NO: 413787 - DNA, 25 bp, Artificial
  probe
  misc_feature (1)..(25): SEQ ID NO: 5536; WAN024CD9; Start 125; Stop 149
tcaacagccttagcaacattgtaag

SEQ ID NO: 413788 - DNA, 25 bp, Artificial
  probe
  misc_feature (1)..(25): SEQ ID NO: 5536; WAN024CD9; Start 273; Stop 297
catagtcttgaatgtccgcaatcac

SEQ ID NO: 413789 - DNA, 25 bp, Artificial
  probe
  misc_feature (1)..(25): SEQ ID NO: 5536; WAN024CD9; Start 272; Stop 296
tcatagtcttgaatgtccgcaatca

SEQ ID NO: 413790 - DNA, 25 bp, Artificial
  probe
  misc_feature (1)..(25): SEQ ID NO: 5536; WAN024CD9; Start 287; Stop 311
tccgcaatcacaggtacataatcaa

SEQ ID NO: 413791 - DNA, 25 bp, Artificial
  probe
  misc_feature (1)..(25): SEQ ID NO: 5536; WAN024CD9; Start 126; Stop 150
caacagccttagcaacattgtaagt

SEQ ID NO: 413792 - DNA, 25 bp, Artificial
  probe
  misc_feature (1)..(25): SEQ ID NO: 5536; WAN024CD9; Start 136; Stop 160
agcaacattgtaagttccacggata

SEQ ID NO: 413793 - DNA, 25 bp, Artificial
  probe
  misc_feature (1)..(25): SEQ ID NO: 5536; WAN024CD9; Start 135; Stop 159
tagcaacattgtaagttccacggat

SEQ ID NO: 413794 - DNA, 25 bp, Artificial
  probe
  misc_feature (1)..(25): SEQ ID NO: 5536; WAN024CD9; Start 134; Stop 158
ttagcaacattgtaagttccacgga

SEQ ID NO: 413795 - DNA, 25 bp, Artificial
  probe
  misc_feature (1)..(25): SEQ ID NO: 5536; WAN024CD9; Start 129; Stop 153
cagccttagcaacattgtaagttcc

SEQ ID NO: 413796 - DNA, 25 bp, Artificial
  probe
  misc_feature (1)..(25): SEQ ID NO: 5536; WAN024CD9; Start 274; Stop 298
atagtcttgaatgtccgcaatcaca

SEQ ID NO: 413797 - DNA, 25 bp, Artificial
  probe
  misc_feature (1)..(25): SEQ ID NO: 5536; WAN024CD9; Start 91; Stop 115
cgaaatcataaccatcttagacact

SEQ ID NO: 413798 - DNA, 25 bp, Artificial
  probe
  misc_feature (1)..(25): SEQ ID NO: 5536; WAN024CD9; Start 133; Stop 157
cttagcaacattgtaagttccacgg

SEQ ID NO: 413799 - DNA, 25 bp, Artificial
  probe
  misc_feature (1)..(25): SEQ ID NO: 5536; WAN024CD9; Start 132; Stop 156
ccttagcaacattgtaagttccacg

SEQ ID NO: 413800 - DNA, 25 bp, Artificial
  probe
  misc_feature (1)..(25): SEQ ID NO: 5536; WAN024CD9; Start 142; Stop 166
attgtaagttccacggatattgttt

SEQ ID NO: 413801 - DNA, 25 bp, Artificial
  probe
  misc_feature (1)..(25): SEQ ID NO: 5536; WAN024CD9; Start 291; Stop 315
caatcacaggtacataatcaatccc

SEQ ID NO: 413802 - DNA, 25 bp, Artificial
  probe
  misc_feature (1)..(25): SEQ ID NO: 5537; WAN024EZO; Start 82; Stop 106
gatacatattctccaccagccattg

SEQ ID NO: 413803 - DNA, 25 bp, Artificial
  probe
  misc_feature (1)..(25): SEQ ID NO: 5537; WAN024EZO; Start 206; Stop 230
taattccatcgttagcatcaagaac

SEQ ID NO: 413804 - DNA, 25 bp, Artificial
  probe
  misc_feature (1)..(25): SEQ ID NO: 5537; WAN024EZO; Start 83; Stop 107
atacatattctccaccagccattga

SEQ ID NO: 413805 - DNA, 25 bp, Artificial
  probe
  misc_feature (1)..(25): SEQ ID NO: 5537; WAN024EZO; Start 204; Stop 228
aataattccatcgttagcatcaaga

SEQ ID NO: 413806 - DNA, 25 bp, Artificial
  probe
  misc_feature (1)..(25): SEQ ID NO: 5537; WAN024EZO; Start 207; Stop 231
aattccatcgttagcatcaagaaca

SEQ ID NO: 413807 - DNA, 25 bp, Artificial
  probe
  misc_feature (1)..(25): SEQ ID NO: 5537; WAN024EZO; Start 205; Stop 229
ataattccatcgttagcatcaagaa

SEQ ID NO: 413808 - DNA, 25 bp, Artificial
  probe
  misc_feature (1)..(25): SEQ ID NO: 5537; WAN024EZO; Start 84; Stop 108
tacatattctccaccagccattgaa

SEQ ID NO: 413809 - DNA, 25 bp, Artificial
  probe
  misc_feature (1)..(25): SEQ ID NO: 5537; WAN024EZO; Start 208; Stop 232
attccatcgttagcatcaagaacac

SEQ ID NO: 413810 - DNA, 25 bp, Artificial
  probe
  misc_feature (1)..(25): SEQ ID NO: 5537; WAN024EZO; Start 69; Stop 93
tggagttgaaacggatacatattct

SEQ ID NO: 413811 - DNA, 25 bp, Artificial
  probe
  misc_feature (1)..(25): SEQ ID NO: 5537; WAN024EZO; Start 68; Stop 92
ttggagttgaaacggatacatattc

SEQ ID NO: 413812 - DNA, 25 bp, Artificial
  probe
  misc_feature (1)..(25): SEQ ID NO: 5537; WAN024EZO; Start 67; Stop 91
tttggagttgaaacggatacatatt

SEQ ID NO: 413813 - DNA, 25 bp, Artificial
  probe
  misc_feature (1)..(25): SEQ ID NO: 5537; WAN024EZO; Start 81; Stop 105
ggatacatattctccaccagccatt

SEQ ID NO: 413814 - DNA, 25 bp, Artificial
  probe
  misc_feature (1)..(25): SEQ ID NO: 5537; WAN024EZO; Start 70; Stop 94
ggagttgaaacggatacatattctc

SEQ ID NO: 413815 - DNA, 25 bp, Artificial
  probe
  misc_feature (1)..(25): SEQ ID NO: 5537; WAN024EZO; Start 209; Stop 233
ttccatcgttagcatcaagaacacc

SEQ ID NO: 413816 - DNA, 25 bp, Artificial
  probe
  misc_feature (1)..(25): SEQ ID NO: 5537; WAN024EZO; Start 203; Stop 227
aaataattccatcgttagcatcaag

SEQ ID NO: 413817 - DNA, 25 bp, Artificial
  probe
  misc_feature (1)..(25): SEQ ID NO: 5537; WAN024EZO; Start 202; Stop 226
gaaataattccatcgttagcatcaa

SEQ ID NO: 413818 - DNA, 25 bp, Artificial
  probe
  misc_feature (1)..(25): SEQ ID NO: 5537; WAN024EZO; Start 73; Stop 97
gttgaaacggatacatattctccac

SEQ ID NO: 413819 - DNA, 25 bp, Artificial
  probe
  misc_feature (1)..(25): SEQ ID NO: 5537; WAN024EZO; Start 72; Stop 96
agttgaaacggatacatattctcca

SEQ ID NO: 413820 - DNA, 25 bp, Artificial
  probe
  misc_feature (1)..(25): SEQ ID NO: 5537; WAN024EZO; Start 74; Stop 98
ttgaaacggatacatattctccacc

SEQ ID NO: 413821 - DNA, 25 bp, Artificial
  probe
  misc_feature (1)..(25): SEQ ID NO: 5537; WAN024EZO; Start 71; Stop 95
gagttgaaacggatacatattctcc

SEQ ID NO: 413822 - DNA, 25 bp, Artificial
  probe
  misc_feature (1)..(25): SEQ ID NO: 5537; WAN024EZO; Start 1; Stop 25
ttggctagttccctatcttggtcta

SEQ ID NO: 413823 - DNA, 25 bp, Artificial
  probe
  misc_feature (1)..(25): SEQ ID NO: 5537; WAN024EZO; Start 85; Stop 109
acatattctccaccagccattgaaa

SEQ ID NO: 413824 - DNA, 25 bp, Artificial
  probe
  misc_feature (1)..(25): SEQ ID NO: 5537; WAN024EZO; Start 76; Stop 100
gaaacggatacatattctccaccag

SEQ ID NO: 413825 - DNA, 25 bp, Artificial
  probe
  misc_feature (1)..(25): SEQ ID NO: 5537; WAN024EZO; Start 185; Stop 209
taaccacaccagcaatggaaataat

SEQ ID NO: 413826 - DNA, 25 bp, Artificial
  probe
  misc_feature (1)..(25): SEQ ID NO: 5537; WAN024EZO; Start 184; Stop 208
ataaccacaccagcaatggaaataa

SEQ ID NO: 413827 - DNA, 25 bp, Artificial
  probe
  misc_feature (1)..(25): SEQ ID NO: 5537; WAN024EZO; Start 75; Stop 99
tgaaacggatacatattctccacca

SEQ ID NO: 413828 - DNA, 25 bp, Artificial
  probe
  misc_feature (1)..(25): SEQ ID NO: 5537; WAN024EZO; Start 183; Stop 207
gataaccacaccagcaatggaaata

SEQ ID NO: 413829 - DNA, 25 bp, Artificial
  probe
  misc_feature (1)..(25): SEQ ID NO: 5537; WAN024EZO; Start 5; Stop 29
ctagttccctatcttggtctagcaa

SEQ ID NO: 413830 - DNA, 25 bp, Artificial
  probe
  misc_feature (1)..(25): SEQ ID NO: 5537; WAN024EZO; Start 186; Stop 210
aaccacaccagcaatggaaataatt

SEQ ID NO: 413831 - DNA, 25 bp, Artificial
  probe
  misc_feature (1)..(25): SEQ ID NO: 5537; WAN024EZO; Start 187; Stop 211
accacaccagcaatggaaataattc

SEQ ID NO: 413832 - DNA, 25 bp, Artificial
  probe
  misc_feature (1)..(25): SEQ ID NO: 5537; WAN024EZO; Start 65; Stop 89
cttttggagttgaaacggatacata

SEQ ID NO: 413833 - DNA, 25 bp, Artificial
  probe
  misc_feature (1)..(25): SEQ ID NO: 5537; WAN024EZO; Start 64; Stop 88
tcttttggagttgaaacggatacat

SEQ ID NO: 413834 - DNA, 25 bp, Artificial
  probe
  misc_feature (1)..(25): SEQ ID NO: 5537; WAN024EZO; Start 63; Stop 87
atcttttggagttgaaacggataca

SEQ ID NO: 413835 - DNA, 25 bp, Artificial
  probe
  misc_feature (1)..(25): SEQ ID NO: 5538; WAN024GNY; Start 54; Stop 78
tttcctagccctttgtttacagatt

SEQ ID NO: 413836 - DNA, 25 bp, Artificial
  probe
  misc_feature (1)..(25): SEQ ID NO: 5538; WAN024GNY; Start 17; Stop 41
tgggtgacaaatttaatcggataaa

SEQ ID NO: 413837 - DNA, 25 bp, Artificial
  probe
  misc_feature (1)..(25): SEQ ID NO: 5538; WAN024GNY; Start 53; Stop 77
ttttcctagccctttgtttacagat

SEQ ID NO: 413838 - DNA, 25 bp, Artificial
  probe
  misc_feature (1)..(25): SEQ ID NO: 5538; WAN024GNY; Start 52; Stop 76
gttttcctagccctttgtttacaga

SEQ ID NO: 413839 - DNA, 25 bp, Artificial
  probe
  misc_feature (1)..(25): SEQ ID NO: 5538; WAN024GNY; Start 51; Stop 75
agttttcctagccctttgtttacag

SEQ ID NO: 413840 - DNA, 25 bp, Artificial
  probe
  misc_feature (1)..(25): SEQ ID NO: 5538; WAN024GNY; Start 50; Stop 74
gagttttcctagccctttgtttaca

SEQ ID NO: 413841 - DNA, 25 bp, Artificial
  probe
  misc_feature (1)..(25): SEQ ID NO: 5538; WAN024GNY; Start 49; Stop 73
ggagttttcctagccctttgtttac

SEQ ID NO: 413842 - DNA, 25 bp, Artificial
  probe
  misc_feature (1)..(25): SEQ ID NO: 5538; WAN024GNY; Start 18; Stop 42
gggtgacaaatttaatcggataaaa

SEQ ID NO: 413843 - DNA, 25 bp, Artificial
  probe
  misc_feature (1)..(25): SEQ ID NO: 5538; WAN024GNY; Start 48; Stop 72
aggagttttcctagccctttgttta

SEQ ID NO: 413844 - DNA, 25 bp, Artificial
  probe
  misc_feature (1)..(25): SEQ ID NO: 5538; WAN024GNY; Start 47; Stop 71
caggagttttcctagccctttgttt

SEQ ID NO: 413845 - DNA, 25 bp, Artificial
  probe
  misc_feature (1)..(25): SEQ ID NO: 5539; WAN024DQG; Start 67; Stop 91
ttgtttggataatatgaatgggaaa

SEQ ID NO: 413846 - DNA, 25 bp, Artificial
  probe
  misc_feature (1)..(25): SEQ ID NO: 5539; WAN024DQG; Start 66; Stop 90
tttgtttggataatatgaatgggaa

SEQ ID NO: 413847 - DNA, 25 bp, Artificial
  probe
  misc_feature (1)..(25): SEQ ID NO: 5539; WAN024DQG; Start 48; Stop 72
tgagttatcaccatctcttttgttt

SEQ ID NO: 413848 - DNA, 25 bp, Artificial
  probe
  misc_feature (1)..(25): SEQ ID NO: 5539; WAN024DQG; Start 47; Stop 71
ttgagttatcaccatctcttttgtt

SEQ ID NO: 413849 - DNA, 25 bp, Artificial
  probe
  misc_feature (1)..(25): SEQ ID NO: 5539; WAN024DQG; Start 46; Stop 70
tttgagttatcaccatctcttttgt

SEQ ID NO: 413850 - DNA, 25 bp, Artificial
  probe
  misc_feature (1)..(25): SEQ ID NO: 5539; WAN024DQG; Start 13; Stop 37
tttgctaggaattttacaagattgc

SEQ ID NO: 413851 - DNA, 25 bp, Artificial
  probe
  misc_feature (1)..(25): SEQ ID NO: 5539; WAN024DQG; Start 49; Stop 73
gagttatcaccatctcttttgtttg

SEQ ID NO: 413852 - DNA, 25 bp, Artificial
  probe
  misc_feature (1)..(25): SEQ ID NO: 5539; WAN024DQG; Start 51; Stop 75
gttatcaccatctcttttgtttgga

SEQ ID NO: 413853 - DNA, 25 bp, Artificial
  probe
  misc_feature (1)..(25): SEQ ID NO: 5539; WAN024DQG; Start 50; Stop 74
agttatcaccatctcttttgtttgg

SEQ ID NO: 413854 - DNA, 25 bp, Artificial
  probe
  misc_feature (1)..(25): SEQ ID NO: 5539; WAN024DQG; Start 45; Stop 69
ttttgagttatcaccatctcttttg

SEQ ID NO: 413855 - DNA, 25 bp, Artificial
  probe
  misc_feature (1)..(25): SEQ ID NO: 5539; WAN024DQG; Start 55; Stop 79
tcaccatctcttttgtttggataat

SEQ ID NO: 413856 - DNA, 25 bp, Artificial
  probe
  misc_feature (1)..(25): SEQ ID NO: 5539; WAN024DQG; Start 54; Stop 78
atcaccatctcttttgtttggataa

SEQ ID NO: 413857 - DNA, 25 bp, Artificial
  probe
  misc_feature (1)..(25): SEQ ID NO: 5539; WAN024DQG; Start 52; Stop 76
ttatcaccatctcttttgtttggat

SEQ ID NO: 413858 - DNA, 25 bp, Artificial
  probe
  misc_feature (1)..(25): SEQ ID NO: 5539; WAN024DQG; Start 68; Stop 92
tgtttggataatatgaatgggaaaa

SEQ ID NO: 413859 - DNA, 25 bp, Artificial
  probe
  misc_feature (1)..(25): SEQ ID NO: 5539; WAN024DQG; Start 65; Stop 89
ttttgtttggataatatgaatggga

SEQ ID NO: 413860 - DNA, 25 bp, Artificial
  probe
  misc_feature (1)..(25): SEQ ID NO: 5539; WAN024DQG; Start 64; Stop 88
cttttgtttggataatatgaatggg

SEQ ID NO: 413861 - DNA, 25 bp, Artificial
  probe
  misc_feature (1)..(25): SEQ ID NO: 5539; WAN024DQG; Start 53; Stop 77
tatcaccatctcttttgtttggata

SEQ ID NO: 413862 - DNA, 25 bp, Artificial
  probe
  misc_feature (1)..(25): SEQ ID NO: 5539; WAN024DQG; Start 56; Stop 80
caccatctcttttgtttggataata

SEQ ID NO: 413863 - DNA, 25 bp, Artificial
  probe
  misc_feature (1)..(25): SEQ ID NO: 5539; WAN024DQG; Start 12; Stop 36
ttttgctaggaattttacaagattg

SEQ ID NO: 413864 - DNA, 25 bp, Artificial
  probe
  misc_feature (1)..(25): SEQ ID NO: 5539; WAN024DQG; Start 63; Stop 87
tcttttgtttggataatatgaatgg

SEQ ID NO: 413865 - DNA, 25 bp, Artificial
  probe
  misc_feature (1)..(25): SEQ ID NO: 5539; WAN024DQG; Start 14; Stop 38
ttgctaggaattttacaagattgca

SEQ ID NO: 413866 - DNA, 25 bp, Artificial
  probe
  misc_feature (1)..(25): SEQ ID NO: 5539; WAN024DQG; Start 57; Stop 81
accatctcttttgtttggataatat

SEQ ID NO: 413867 - DNA, 25 bp, Artificial
  probe
  misc_feature (1)..(25): SEQ ID NO: 5539; WAN024DQG; Start 58; Stop 82
ccatctcttttgtttggataatatg

SEQ ID NO: 413868 - DNA, 25 bp, Artificial
  probe
  misc_feature (1)..(25): SEQ ID NO: 5539; WAN024DQG; Start 59; Stop 83
catctcttttgtttggataatatga

SEQ ID NO: 413869 - DNA, 25 bp, Artificial
  probe
  misc_feature (1)..(25): SEQ ID NO: 5539; WAN024DQG; Start 15; Stop 39
tgctaggaattttacaagattgcaa

SEQ ID NO: 413870 - DNA, 25 bp, Artificial
  probe
  misc_feature (1)..(25): SEQ ID NO: 5540; WAN024CLN; Start 64; Stop 88
gtaaattaccaaaccactttccaaa

SEQ ID NO: 413871 - DNA, 25 bp, Artificial
  probe
  misc_feature (1)..(25): SEQ ID NO: 5540; WAN024CLN; Start 63; Stop 87
agtaaattaccaaaccactttccaa

SEQ ID NO: 413872 - DNA, 25 bp, Artificial
  probe
  misc_feature (1)..(25): SEQ ID NO: 5540; WAN024CLN; Start 1; Stop 25
ttggctcttatactagagtcatcaa

SEQ ID NO: 413873 - DNA, 25 bp, Artificial
  probe
  misc_feature (1)..(25): SEQ ID NO: 5540; WAN024CLN; Start 55; Stop 79
acgattaaagtaaattaccaaacca

SEQ ID NO: 413874 - DNA, 25 bp, Artificial
  probe
  misc_feature (1)..(25): SEQ ID NO: 5540; WAN024CLN; Start 56; Stop 80
cgattaaagtaaattaccaaaccac

SEQ ID NO: 413875 - DNA, 25 bp, Artificial
  probe
  misc_feature (1)..(25): SEQ ID NO: 5540; WAN024CLN; Start 62; Stop 86
aagtaaattaccaaaccactttcca

SEQ ID NO: 413876 - DNA, 25 bp, Artificial
  probe
  misc_feature (1)..(25): SEQ ID NO: 5540; WAN024CLN; Start 54; Stop 78
aacgattaaagtaaattaccaaacc

SEQ ID NO: 413877 - DNA, 25 bp, Artificial
  probe
  misc_feature (1)..(25): SEQ ID NO: 5540; WAN024CLN; Start 2; Stop 26
tggctcttatactagagtcatcaaa

SEQ ID NO: 413878 - DNA, 25 bp, Artificial
  probe
  misc_feature (1)..(25): SEQ ID NO: 5540; WAN024CLN; Start 65; Stop 89
taaattaccaaaccactttccaaaa

SEQ ID NO: 413879 - DNA, 25 bp, Artificial
  probe
  misc_feature (1)..(25): SEQ ID NO: 5540; WAN024CLN; Start 69; Stop 93
ttaccaaaccactttccaaaagaag

SEQ ID NO: 413880 - DNA, 25 bp, Artificial
  probe
  misc_feature (1)..(25): SEQ ID NO: 5540; WAN024CLN; Start 68; Stop 92
attaccaaaccactttccaaaagaa

SEQ ID NO: 413881 - DNA, 25 bp, Artificial
  probe
  misc_feature (1)..(25): SEQ ID NO: 5540; WAN024CLN; Start 67; Stop 91
aattaccaaaccactttccaaaaga

SEQ ID NO: 413882 - DNA, 25 bp, Artificial
  probe
  misc_feature (1)..(25): SEQ ID NO: 5540; WAN024CLN; Start 57; Stop 81
gattaaagtaaattaccaaaccact

SEQ ID NO: 413883 - DNA, 25 bp, Artificial
  probe
  misc_feature (1)..(25): SEQ ID NO: 5540; WAN024CLN; Start 66; Stop 90
aaattaccaaaccactttccaaaag

SEQ ID NO: 413884 - DNA, 25 bp, Artificial
  probe
  misc_feature (1)..(25): SEQ ID NO: 5540; WAN024CLN; Start 70; Stop 94
taccaaaccactttccaaaagaagg

SEQ ID NO: 413885 - DNA, 25 bp, Artificial
  probe
  misc_feature (1)..(25): SEQ ID NO: 5540; WAN024CLN; Start 46; Stop 70
atgacagtaacgattaaagtaaatt

SEQ ID NO: 413886 - DNA, 25 bp, Artificial
  probe
  misc_feature (1)..(25): SEQ ID NO: 5540; WAN024CLN; Start 50; Stop 74
cagtaacgattaaagtaaattacca

SEQ ID NO: 413887 - DNA, 25 bp, Artificial
  probe
  misc_feature (1)..(25): SEQ ID NO: 5540; WAN024CLN; Start 49; Stop 73
acagtaacgattaaagtaaattacc

SEQ ID NO: 413888 - DNA, 25 bp, Artificial
  probe
  misc_feature (1)..(25): SEQ ID NO: 5540; WAN024CLN; Start 71; Stop 95
accaaaccactttccaaaagaagga

SEQ ID NO: 413889 - DNA, 25 bp, Artificial
  probe
  misc_feature (1)..(25): SEQ ID NO: 5540; WAN024CLN; Start 3; Stop 27
ggctcttatactagagtcatcaaaa

SEQ ID NO: 413890 - DNA, 25 bp, Artificial
  probe
  misc_feature (1)..(25): SEQ ID NO: 5540; WAN024CLN; Start 78; Stop 102
cactttccaaaagaaggaagcaaaa

SEQ ID NO: 413891 - DNA, 25 bp, Artificial
  probe
  misc_feature (1)..(25): SEQ ID NO: 5540; WAN024CLN; Start 73; Stop 97
caaaccactttccaaaagaaggaag

SEQ ID NO: 413892 - DNA, 25 bp, Artificial
  probe
  misc_feature (1)..(25): SEQ ID NO: 5540; WAN024CLN; Start 43; Stop 67
catatgacagtaacgattaaagtaa

SEQ ID NO: 413893 - DNA, 25 bp, Artificial
  probe
  misc_feature (1)..(25): SEQ ID NO: 5540; WAN024CLN; Start 58; Stop 82
attaaagtaaattaccaaaccactt

SEQ ID NO: 413894 - DNA, 25 bp, Artificial
  probe
  misc_feature (1)..(25): SEQ ID NO: 5540; WAN024CLN; Start 72; Stop 96
ccaaaccactttccaaaagaaggaa

SEQ ID NO: 413895 - DNA, 25 bp, Artificial
  probe
  misc_feature (1)..(25): SEQ ID NO: 5540; WAN024CLN; Start 61; Stop 85
aaagtaaattaccaaaccactttcc

SEQ ID NO: 413896 - DNA, 25 bp, Artificial
  probe
  misc_feature (1)..(25): SEQ ID NO: 5540; WAN024CLN; Start 77; Stop 101
ccactttccaaaagaaggaagcaaa

SEQ ID NO: 413897 - DNA, 25 bp, Artificial
  probe
  misc_feature (1)..(25): SEQ ID NO: 5540; WAN024CLN; Start 74; Stop 98
aaaccactttccaaaagaaggaagc

SEQ ID NO: 413898 - DNA, 25 bp, Artificial
  probe
  misc_feature (1)..(25): SEQ ID NO: 5540; WAN024CLN; Start 76; Stop 100
accactttccaaaagaaggaagcaa

SEQ ID NO: 413899 - DNA, 25 bp, Artificial
  probe
  misc_feature (1)..(25): SEQ ID NO: 5540; WAN024CLN; Start 75; Stop 99
aaccactttccaaaagaaggaagca

SEQ ID NO: 413900 - DNA, 25 bp, Artificial
  probe
  misc_feature (1)..(25): SEQ ID NO: 5540; WAN024CLN; Start 60; Stop 84
taaagtaaattaccaaaccactttc

SEQ ID NO: 413901 - DNA, 25 bp, Artificial
  probe
  misc_feature (1)..(25): SEQ ID NO: 5540; WAN024CLN; Start 59; Stop 83
ttaaagtaaattaccaaaccacttt

SEQ ID NO: 413902 - DNA, 25 bp, Artificial
  probe
  misc_feature (1)..(25): SEQ ID NO: 5541; WAN024GBN; Start 39; Stop 63
actacaacagatacaactccgatac

SEQ ID NO: 413903 - DNA, 25 bp, Artificial
  probe
  misc_feature (1)..(25): SEQ ID NO: 5541; WAN024GBN; Start 40; Stop 64
ctacaacagatacaactccgatact

SEQ ID NO: 413904 - DNA, 25 bp, Artificial
  probe
  misc_feature (1)..(25): SEQ ID NO: 5541; WAN024GBN; Start 38; Stop 62
gactacaacagatacaactccgata

SEQ ID NO: 413905 - DNA, 25 bp, Artificial
  probe
  misc_feature (1)..(25): SEQ ID NO: 5541; WAN024GBN; Start 42; Stop 66
acaacagatacaactccgatactta

SEQ ID NO: 413906 - DNA, 25 bp, Artificial
  probe
  misc_feature (1)..(25): SEQ ID NO: 5541; WAN024GBN; Start 41; Stop 65
tacaacagatacaactccgatactt

SEQ ID NO: 413907 - DNA, 25 bp, Artificial
  probe
  misc_feature (1)..(25): SEQ ID NO: 5541; WAN024GBN; Start 197; Stop 221
agtcaattcattctcatctctcctt

SEQ ID NO: 413908 - DNA, 25 bp, Artificial
  probe
  misc_feature (1)..(25): SEQ ID NO: 5541; WAN024GBN; Start 196; Stop 220
aagtcaattcattctcatctctcct

SEQ ID NO: 413909 - DNA, 25 bp, Artificial
  probe
  misc_feature (1)..(25): SEQ ID NO: 5541; WAN024GBN; Start 43; Stop 67
caacagatacaactccgatacttaa

SEQ ID NO: 413910 - DNA, 25 bp, Artificial
  probe
  misc_feature (1)..(25): SEQ ID NO: 5541; WAN024GBN; Start 198; Stop 222
gtcaattcattctcatctctcctta

SEQ ID NO: 413911 - DNA, 25 bp, Artificial
  probe
  misc_feature (1)..(25): SEQ ID NO: 5541; WAN024GBN; Start 37; Stop 61
cgactacaacagatacaactccgat

SEQ ID NO: 413912 - DNA, 25 bp, Artificial
  probe
  misc_feature (1)..(25): SEQ ID NO: 5541; WAN024GBN; Start 44; Stop 68
aacagatacaactccgatacttaat

SEQ ID NO: 413913 - DNA, 25 bp, Artificial
  probe
  misc_feature (1)..(25): SEQ ID NO: 5541; WAN024GBN; Start 45; Stop 69
acagatacaactccgatacttaatt

SEQ ID NO: 413914 - DNA, 25 bp, Artificial
  probe
  misc_feature (1)..(25): SEQ ID NO: 5541; WAN024GBN; Start 33; Stop 57
aagccgactacaacagatacaactc

SEQ ID NO: 413915 - DNA, 25 bp, Artificial
  probe
  misc_feature (1)..(25): SEQ ID NO: 5541; WAN024GBN; Start 205; Stop 229
cattctcatctctccttatcatact

SEQ ID NO: 413916 - DNA, 25 bp, Artificial
  probe
  misc_feature (1)..(25): SEQ ID NO: 5541; WAN024GBN; Start 204; Stop 228
tcattctcatctctccttatcatac

SEQ ID NO: 413917 - DNA, 25 bp, Artificial
  probe
  misc_feature (1)..(25): SEQ ID NO: 5541; WAN024GBN; Start 201; Stop 225
aattcattctcatctctccttatca

SEQ ID NO: 413918 - DNA, 25 bp, Artificial
  probe
  misc_feature (1)..(25): SEQ ID NO: 5541; WAN024GBN; Start 199; Stop 223
tcaattcattctcatctctccttat

SEQ ID NO: 413919 - DNA, 25 bp, Artificial
  probe
  misc_feature (1)..(25): SEQ ID NO: 5541; WAN024GBN; Start 127; Stop 151
tcgtttatttacaagcagactcaag

SEQ ID NO: 413920 - DNA, 25 bp, Artificial
  probe
  misc_feature (1)..(25): SEQ ID NO: 5541; WAN024GBN; Start 27; Stop 51
aaatcaaagccgactacaacagata

SEQ ID NO: 413921 - DNA, 25 bp, Artificial
  probe
  misc_feature (1)..(25): SEQ ID NO: 5541; WAN024GBN; Start 202; Stop 226
attcattctcatctctccttatcat

SEQ ID NO: 413922 - DNA, 25 bp, Artificial
  probe
  misc_feature (1)..(25): SEQ ID NO: 5541; WAN024GBN; Start 126; Stop 150
ttcgtttatttacaagcagactcaa

SEQ ID NO: 413923 - DNA, 25 bp, Artificial
  probe
  misc_feature (1)..(25): SEQ ID NO: 5541; WAN024GBN; Start 125; Stop 149
tttcgtttatttacaagcagactca

SEQ ID NO: 413924 - DNA, 25 bp, Artificial
  probe
  misc_feature (1)..(25): SEQ ID NO: 5541; WAN024GBN; Start 132; Stop 156
tatttacaagcagactcaagcgaaa

SEQ ID NO: 413925 - DNA, 25 bp, Artificial
  probe
  misc_feature (1)..(25): SEQ ID NO: 5541; WAN024GBN; Start 131; Stop 155
ttatttacaagcagactcaagcgaa

SEQ ID NO: 413926 - DNA, 25 bp, Artificial
  probe
  misc_feature (1)..(25): SEQ ID NO: 5541; WAN024GBN; Start 130; Stop 154
tttatttacaagcagactcaagcga

SEQ ID NO: 413927 - DNA, 25 bp, Artificial
  probe
  misc_feature (1)..(25): SEQ ID NO: 5541; WAN024GBN; Start 129; Stop 153
gtttatttacaagcagactcaagcg

SEQ ID NO: 413928 - DNA, 25 bp, Artificial
  probe
  misc_feature (1)..(25): SEQ ID NO: 5541; WAN024GBN; Start 128; Stop 152
cgtttatttacaagcagactcaagc

SEQ ID NO: 413929 - DNA, 25 bp, Artificial
  probe
  misc_feature (1)..(25): SEQ ID NO: 5541; WAN024GBN; Start 24; Stop 48
tagaaatcaaagccgactacaacag

SEQ ID NO: 413930 - DNA, 25 bp, Artificial
  probe
  misc_feature (1)..(25): SEQ ID NO: 5541; WAN024GBN; Start 200; Stop 224
caattcattctcatctctccttatc

SEQ ID NO: 413931 - DNA, 25 bp, Artificial
  probe
  misc_feature (1)..(25): SEQ ID NO: 5541; WAN024GBN; Start 28; Stop 52
aatcaaagccgactacaacagatac

SEQ ID NO: 413932 - DNA, 25 bp, Artificial
  probe
  misc_feature (1)..(25): SEQ ID NO: 5541; WAN024GBN; Start 195; Stop 219
aaagtcaattcattctcatctctcc

SEQ ID NO: 413933 - DNA, 25 bp, Artificial
  probe
  misc_feature (1)..(25): SEQ ID NO: 5541; WAN024GBN; Start 23; Stop 47
ctagaaatcaaagccgactacaaca

SEQ ID NO: 413934 - DNA, 25 bp, Artificial
  probe
  misc_feature (1)..(25): SEQ ID NO: 5541; WAN024GBN; Start 26; Stop 50
gaaatcaaagccgactacaacagat

SEQ ID NO: 413935 - DNA, 25 bp, Artificial
  probe
  misc_feature (1)..(25): SEQ ID NO: 5542; WAN024EVF; Start 170; Stop 194
atctgatgaacatctattgctgctt

SEQ ID NO: 413936 - DNA, 25 bp, Artificial
  probe
  misc_feature (1)..(25): SEQ ID NO: 5542; WAN024EVF; Start 169; Stop 193
aatctgatgaacatctattgctgct

SEQ ID NO: 413937 - DNA, 25 bp, Artificial
  probe
  misc_feature (1)..(25): SEQ ID NO: 5542; WAN024EVF; Start 163; Stop 187
ctcgccaatctgatgaacatctatt

SEQ ID NO: 413938 - DNA, 25 bp, Artificial
  probe
  misc_feature (1)..(25): SEQ ID NO: 5542; WAN024EVF; Start 141; Stop 165
ttccttgaacaatgtaggtatcctc

SEQ ID NO: 413939 - DNA, 25 bp, Artificial
  probe
  misc_feature (1)..(25): SEQ ID NO: 5542; WAN024EVF; Start 158; Stop 182
gtatcctcgccaatctgatgaacat

SEQ ID NO: 413940 - DNA, 25 bp, Artificial
  probe
  misc_feature (1)..(25): SEQ ID NO: 5542; WAN024EVF; Start 45; Stop 69
ttcccactcctgtcaaataataacc

SEQ ID NO: 413941 - DNA, 25 bp, Artificial
  probe
  misc_feature (1)..(25): SEQ ID NO: 5542; WAN024EVF; Start 142; Stop 166
tccttgaacaatgtaggtatcctcg

SEQ ID NO: 413942 - DNA, 25 bp, Artificial
  probe
  misc_feature (1)..(25): SEQ ID NO: 5542; WAN024EVF; Start 44; Stop 68
gttcccactcctgtcaaataataac

SEQ ID NO: 413943 - DNA, 25 bp, Artificial
  probe
  misc_feature (1)..(25): SEQ ID NO: 5542; WAN024EVF; Start 162; Stop 186
cctcgccaatctgatgaacatctat

SEQ ID NO: 413944 - DNA, 25 bp, Artificial
  probe
  misc_feature (1)..(25): SEQ ID NO: 5542; WAN024EVF; Start 159; Stop 183
tatcctcgccaatctgatgaacatc

SEQ ID NO: 413945 - DNA, 25 bp, Artificial
  probe
  misc_feature (1)..(25): SEQ ID NO: 5542; WAN024EVF; Start 23; Stop 47
agtttctcagtcgttggaatagttc

SEQ ID NO: 413946 - DNA, 25 bp, Artificial
  probe
  misc_feature (1)..(25): SEQ ID NO: 5542; WAN024EVF; Start 46; Stop 70
tcccactcctgtcaaataataacca

SEQ ID NO: 413947 - DNA, 25 bp, Artificial
  probe
  misc_feature (1)..(25): SEQ ID NO: 5542; WAN024EVF; Start 193; Stop 217
tttgtccgtttcatcatcaatttca

SEQ ID NO: 413948 - DNA, 25 bp, Artificial
  probe
  misc_feature (1)..(25): SEQ ID NO: 5542; WAN024EVF; Start 167; Stop 191
ccaatctgatgaacatctattgctg

SEQ ID NO: 413949 - DNA, 25 bp, Artificial
  probe
  misc_feature (1)..(25): SEQ ID NO: 5542; WAN024EVF; Start 39; Stop 63
gaatagttcccactcctgtcaaata

SEQ ID NO: 413950 - DNA, 25 bp, Artificial
  probe
  misc_feature (1)..(25): SEQ ID NO: 5542; WAN024EVF; Start 192; Stop 216
ctttgtccgtttcatcatcaatttc

SEQ ID NO: 413951 - DNA, 25 bp, Artificial
  probe
  misc_feature (1)..(25): SEQ ID NO: 5542; WAN024EVF; Start 87; Stop 111
catcactttccagttcaacatcaaa

SEQ ID NO: 413952 - DNA, 25 bp, Artificial
  probe
  misc_feature (1)..(25): SEQ ID NO: 5542; WAN024EVF; Start 43; Stop 67
agttcccactcctgtcaaataataa

SEQ ID NO: 413953 - DNA, 25 bp, Artificial
  probe
  misc_feature (1)..(25): SEQ ID NO: 5542; WAN024EVF; Start 40; Stop 64
aatagttcccactcctgtcaaataa

SEQ ID NO: 413954 - DNA, 25 bp, Artificial
  probe
  misc_feature (1)..(25): SEQ ID NO: 5542; WAN024EVF; Start 168; Stop 192
caatctgatgaacatctattgctgc

SEQ ID NO: 413955 - DNA, 25 bp, Artificial
  probe
  misc_feature (1)..(25): SEQ ID NO: 5542; WAN024EVF; Start 120; Stop 144
tgaaatcattgagggtcatagttcc

SEQ ID NO: 413956 - DNA, 25 bp, Artificial
  probe
  misc_feature (1)..(25): SEQ ID NO: 5542; WAN024EVF; Start 41; Stop 65
atagttcccactcctgtcaaataat

SEQ ID NO: 413957 - DNA, 25 bp, Artificial
  probe
  misc_feature (1)..(25): SEQ ID NO: 5542; WAN024EVF; Start 86; Stop 110
tcatcactttccagttcaacatcaa

SEQ ID NO: 413958 - DNA, 25 bp, Artificial
  probe
  misc_feature (1)..(25): SEQ ID NO: 5542; WAN024EVF; Start 119; Stop 143
ttgaaatcattgagggtcatagttc

SEQ ID NO: 413959 - DNA, 25 bp, Artificial
  probe
  misc_feature (1)..(25): SEQ ID NO: 5542; WAN024EVF; Start 191; Stop 215
gctttgtccgtttcatcatcaattt

SEQ ID NO: 413960 - DNA, 25 bp, Artificial
  probe
  misc_feature (1)..(25): SEQ ID NO: 5542; WAN024EVF; Start 42; Stop 66
tagttcccactcctgtcaaataata

SEQ ID NO: 413961 - DNA, 25 bp, Artificial
  probe
  misc_feature (1)..(25): SEQ ID NO: 5542; WAN024EVF; Start 22; Stop 46
gagtttctcagtcgttggaatagtt

SEQ ID NO: 413962 - DNA, 25 bp, Artificial
  probe
  misc_feature (1)..(25): SEQ ID NO: 5542; WAN024EVF; Start 164; Stop 188
tcgccaatctgatgaacatctattg

SEQ ID NO: 413963 - DNA, 25 bp, Artificial
  probe
  misc_feature (1)..(25): SEQ ID NO: 5542; WAN024EVF; Start 172; Stop 196
ctgatgaacatctattgctgctttg

SEQ ID NO: 413964 - DNA, 25 bp, Artificial
  probe
  misc_feature (1)..(25): SEQ ID NO: 5542; WAN024EVF; Start 171; Stop 195
tctgatgaacatctattgctgcttt

SEQ ID NO: 413965 - DNA, 25 bp, Artificial
  probe
  misc_feature (1)..(25): SEQ ID NO: 5542; WAN024EVF; Start 148; Stop 172
aacaatgtaggtatcctcgccaatc

SEQ ID NO: 413966 - DNA, 25 bp, Artificial
  probe
  misc_feature (1)..(25): SEQ ID NO: 5542; WAN024EVF; Start 147; Stop 171
gaacaatgtaggtatcctcgccaat

SEQ ID NO: 413967 - DNA, 25 bp, Artificial
  probe
  misc_feature (1)..(25): SEQ ID NO: 5542; WAN024EVF; Start 166; Stop 190
gccaatctgatgaacatctattgct

SEQ ID NO: 413968 - DNA, 25 bp, Artificial
  probe
  misc_feature (1)..(25): SEQ ID NO: 5543; WAN024FU5; Start 222; Stop 246
gttctcgttcttggttgacaataga

SEQ ID NO: 413969 - DNA, 25 bp, Artificial
  probe
  misc_feature (1)..(25): SEQ ID NO: 5543; WAN024FU5; Start 221; Stop 245
tgttctcgttcttggttgacaatag

SEQ ID NO: 413970 - DNA, 25 bp, Artificial
  probe
  misc_feature (1)..(25): SEQ ID NO: 5543; WAN024FU5; Start 220; Stop 244
ctgttctcgttcttggttgacaata

SEQ ID NO: 413971 - DNA, 25 bp, Artificial
  probe
  misc_feature (1)..(25): SEQ ID NO: 5543; WAN024FU5; Start 204; Stop 228
tatagtccttgatttcctgttctcg

SEQ ID NO: 413972 - DNA, 25 bp, Artificial
  probe
  misc_feature (1)..(25): SEQ ID NO: 5543; WAN024FU5; Start 233; Stop 257
tggttgacaatagaaacttcagact

SEQ ID NO: 413973 - DNA, 25 bp, Artificial
  probe
  misc_feature (1)..(25): SEQ ID NO: 5543; WAN024FU5; Start 205; Stop 229
atagtccttgatttcctgttctcgt

SEQ ID NO: 413974 - DNA, 25 bp, Artificial
  probe
  misc_feature (1)..(25): SEQ ID NO: 5543; WAN024FU5; Start 223; Stop 247
ttctcgttcttggttgacaatagaa

SEQ ID NO: 413975 - DNA, 25 bp, Artificial
  probe
  misc_feature (1)..(25): SEQ ID NO: 5543; WAN024FU5; Start 232; Stop 256
ttggttgacaatagaaacttcagac

SEQ ID NO: 413976 - DNA, 25 bp, Artificial
  probe
  misc_feature (1)..(25): SEQ ID NO: 5543; WAN024FU5; Start 206; Stop 230
tagtccttgatttcctgttctcgtt

SEQ ID NO: 413977 - DNA, 25 bp, Artificial
  probe
  misc_feature (1)..(25): SEQ ID NO: 5543; WAN024FU5; Start 53; Stop 77
ttaaaggcattgatagagacaacag

SEQ ID NO: 413978 - DNA, 25 bp, Artificial
  probe
  misc_feature (1)..(25): SEQ ID NO: 5543; WAN024FU5; Start 235; Stop 259
gttgacaatagaaacttcagactgg

SEQ ID NO: 413979 - DNA, 25 bp, Artificial
  probe
  misc_feature (1)..(25): SEQ ID NO: 5543; WAN024FU5; Start 234; Stop 258
ggttgacaatagaaacttcagactg

SEQ ID NO: 413980 - DNA, 25 bp, Artificial
  probe
  misc_feature (1)..(25): SEQ ID NO: 5543; WAN024FU5; Start 231; Stop 255
cttggttgacaatagaaacttcaga

SEQ ID NO: 413981 - DNA, 25 bp, Artificial
  probe
  misc_feature (1)..(25): SEQ ID NO: 5543; WAN024FU5; Start 230; Stop 254
tcttggttgacaatagaaacttcag

SEQ ID NO: 413982 - DNA, 25 bp, Artificial
  probe
  misc_feature (1)..(25): SEQ ID NO: 5543; WAN024FU5; Start 54; Stop 78
taaaggcattgatagagacaacagc

SEQ ID NO: 413983 - DNA, 25 bp, Artificial
  probe
  misc_feature (1)..(25): SEQ ID NO: 5543; WAN024FU5; Start 236; Stop 260
ttgacaatagaaacttcagactggg

SEQ ID NO: 413984 - DNA, 25 bp, Artificial
  probe
  misc_feature (1)..(25): SEQ ID NO: 5543; WAN024FU5; Start 60; Stop 84
cattgatagagacaacagcttgagc

SEQ ID NO: 413985 - DNA, 25 bp, Artificial
  probe
  misc_feature (1)..(25): SEQ ID NO: 5543; WAN024FU5; Start 59; Stop 83
gcattgatagagacaacagcttgag

SEQ ID NO: 413986 - DNA, 25 bp, Artificial
  probe
  misc_feature (1)..(25): SEQ ID NO: 5543; WAN024FU5; Start 428; Stop 452
tccaaagaatttcgcaaatcatcaa

SEQ ID NO: 413987 - DNA, 25 bp, Artificial
  probe
  misc_feature (1)..(25): SEQ ID NO: 5543; WAN024FU5; Start 429; Stop 453
ccaaagaatttcgcaaatcatcaaa

SEQ ID NO: 413988 - DNA, 25 bp, Artificial
  probe
  misc_feature (1)..(25): SEQ ID NO: 5543; WAN024FU5; Start 427; Stop 451
ctccaaagaatttcgcaaatcatca

SEQ ID NO: 413989 - DNA, 25 bp, Artificial
  probe
  misc_feature (1)..(25): SEQ ID NO: 5543; WAN024FU5; Start 271; Stop 295
cttaatttcagcgactgtcagattt

SEQ ID NO: 413990 - DNA, 25 bp, Artificial
  probe
  misc_feature (1)..(25): SEQ ID NO: 5543; WAN024FU5; Start 211; Stop 235
cttgatttcctgttctcgttcttgg

SEQ ID NO: 413991 - DNA, 25 bp, Artificial
  probe
  misc_feature (1)..(25): SEQ ID NO: 5543; WAN024FU5; Start 210; Stop 234
ccttgatttcctgttctcgttcttg

SEQ ID NO: 413992 - DNA, 25 bp, Artificial
  probe
  misc_feature (1)..(25): SEQ ID NO: 5543; WAN024FU5; Start 209; Stop 233
tccttgatttcctgttctcgttctt

SEQ ID NO: 413993 - DNA, 25 bp, Artificial
  probe
  misc_feature (1)..(25): SEQ ID NO: 5543; WAN024FU5; Start 203; Stop 227
atatagtccttgatttcctgttctc

SEQ ID NO: 413994 - DNA, 25 bp, Artificial
  probe
  misc_feature (1)..(25): SEQ ID NO: 5543; WAN024FU5; Start 56; Stop 80
aaggcattgatagagacaacagctt

SEQ ID NO: 413995 - DNA, 25 bp, Artificial
  probe
  misc_feature (1)..(25): SEQ ID NO: 5543; WAN024FU5; Start 214; Stop 238
gatttcctgttctcgttcttggttg

SEQ ID NO: 413996 - DNA, 25 bp, Artificial
  probe
  misc_feature (1)..(25): SEQ ID NO: 5543; WAN024FU5; Start 101; Stop 125
tttctatcccattggacataggaac

SEQ ID NO: 413997 - DNA, 25 bp, Artificial
  probe
  misc_feature (1)..(25): SEQ ID NO: 5543; WAN024FU5; Start 426; Stop 450
gctccaaagaatttcgcaaatcatc

SEQ ID NO: 413998 - DNA, 25 bp, Artificial
  probe
  misc_feature (1)..(25): SEQ ID NO: 5543; WAN024FU5; Start 215; Stop 239
atttcctgttctcgttcttggttga

SEQ ID NO: 413999 - DNA, 25 bp, Artificial
  probe
  misc_feature (1)..(25): SEQ ID NO: 5543; WAN024FU5; Start 213; Stop 237
tgatttcctgttctcgttcttggtt

SEQ ID NO: 414000 - DNA, 25 bp, Artificial
  probe
  misc_feature (1)..(25): SEQ ID NO: 5543; WAN024FU5; Start 212; Stop 236
ttgatttcctgttctcgttcttggt

SEQ ID NO: 414001 - DNA, 25 bp, Artificial
  probe
  misc_feature (1)..(25): SEQ ID NO: 5544; WAN024CM9; Start 49; Stop 73
ccatatctattacagacacctcagg

SEQ ID NO: 414002 - DNA, 25 bp, Artificial
  probe
  misc_feature (1)..(25): SEQ ID NO: 5544; WAN024CM9; Start 48; Stop 72
tccatatctattacagacacctcag

SEQ ID NO: 414003 - DNA, 25 bp, Artificial
  probe
  misc_feature (1)..(25): SEQ ID NO: 5544; WAN024CM9; Start 47; Stop 71
ctccatatctattacagacacctca

SEQ ID NO: 414004 - DNA, 25 bp, Artificial
  probe
  misc_feature (1)..(25): SEQ ID NO: 5544; WAN024CM9; Start 46; Stop 70
actccatatctattacagacacctc

SEQ ID NO: 414005 - DNA, 25 bp, Artificial
  probe
  misc_feature (1)..(25): SEQ ID NO: 5544; WAN024CM9; Start 50; Stop 74
catatctattacagacacctcagga

SEQ ID NO: 414006 - DNA, 25 bp, Artificial
  probe
  misc_feature (1)..(25): SEQ ID NO: 5544; WAN024CM9; Start 54; Stop 78
tctattacagacacctcaggattat

SEQ ID NO: 414007 - DNA, 25 bp, Artificial
  probe
  misc_feature (1)..(25): SEQ ID NO: 5544; WAN024CM9; Start 53; Stop 77
atctattacagacacctcaggatta

SEQ ID NO: 414008 - DNA, 25 bp, Artificial
  probe
  misc_feature (1)..(25): SEQ ID NO: 5544; WAN024CM9; Start 52; Stop 76
tatctattacagacacctcaggatt

SEQ ID NO: 414009 - DNA, 25 bp, Artificial
  probe
  misc_feature (1)..(25): SEQ ID NO: 5544; WAN024CM9; Start 51; Stop 75
atatctattacagacacctcaggat

SEQ ID NO: 414010 - DNA, 25 bp, Artificial
  probe
  misc_feature (1)..(25): SEQ ID NO: 5544; WAN024CM9; Start 45; Stop 69
tactccatatctattacagacacct

SEQ ID NO: 414011 - DNA, 25 bp, Artificial
  probe
  misc_feature (1)..(25): SEQ ID NO: 5544; WAN024CM9; Start 55; Stop 79
ctattacagacacctcaggattatt

SEQ ID NO: 414012 - DNA, 25 bp, Artificial
  probe
  misc_feature (1)..(25): SEQ ID NO: 5544; WAN024CM9; Start 44; Stop 68
ttactccatatctattacagacacc

SEQ ID NO: 414013 - DNA, 25 bp, Artificial
  probe
  misc_feature (1)..(25): SEQ ID NO: 5544; WAN024CM9; Start 60; Stop 84
acagacacctcaggattatttaact

SEQ ID NO: 414014 - DNA, 25 bp, Artificial
  probe
  misc_feature (1)..(25): SEQ ID NO: 5544; WAN024CM9; Start 61; Stop 85
cagacacctcaggattatttaactt

SEQ ID NO: 414015 - DNA, 25 bp, Artificial
  probe
  misc_feature (1)..(25): SEQ ID NO: 5544; WAN024CM9; Start 59; Stop 83
tacagacacctcaggattatttaac

SEQ ID NO: 414016 - DNA, 25 bp, Artificial
  probe
  misc_feature (1)..(25): SEQ ID NO: 5544; WAN024CM9; Start 58; Stop 82
ttacagacacctcaggattatttaa

SEQ ID NO: 414017 - DNA, 25 bp, Artificial
  probe
  misc_feature (1)..(25): SEQ ID NO: 5544; WAN024CM9; Start 57; Stop 81
attacagacacctcaggattattta

SEQ ID NO: 414018 - DNA, 25 bp, Artificial
  probe
  misc_feature (1)..(25): SEQ ID NO: 5544; WAN024CM9; Start 56; Stop 80
tattacagacacctcaggattattt

SEQ ID NO: 414019 - DNA, 25 bp, Artificial
  probe
  misc_feature (1)..(25): SEQ ID NO: 5544; WAN024CM9; Start 62; Stop 86
agacacctcaggattatttaactta

SEQ ID NO: 414020 - DNA, 25 bp, Artificial
  probe
  misc_feature (1)..(25): SEQ ID NO: 5544; WAN024CM9; Start 63; Stop 87
gacacctcaggattatttaacttat

SEQ ID NO: 414021 - DNA, 25 bp, Artificial
  probe
  misc_feature (1)..(25): SEQ ID NO: 5544; WAN024CM9; Start 43; Stop 67
tttactccatatctattacagacac

SEQ ID NO: 414022 - DNA, 25 bp, Artificial
  probe
  misc_feature (1)..(25): SEQ ID NO: 5544; WAN024CM9; Start 64; Stop 88
acacctcaggattatttaacttata

SEQ ID NO: 414023 - DNA, 25 bp, Artificial
  probe
  misc_feature (1)..(25): SEQ ID NO: 5544; WAN024CM9; Start 5; Stop 29
ctggagaaccatataaagcttgtaa

SEQ ID NO: 414024 - DNA, 25 bp, Artificial
  probe
  misc_feature (1)..(25): SEQ ID NO: 5544; WAN024CM9; Start 4; Stop 28
gctggagaaccatataaagcttgta

SEQ ID NO: 414025 - DNA, 25 bp, Artificial
  probe
  misc_feature (1)..(25): SEQ ID NO: 5544; WAN024CM9; Start 6; Stop 30
tggagaaccatataaagcttgtaaa

SEQ ID NO: 414026 - DNA, 25 bp, Artificial
  probe
  misc_feature (1)..(25): SEQ ID NO: 5544; WAN024CM9; Start 1; Stop 25
ttggctggagaaccatataaagctt

SEQ ID NO: 414027 - DNA, 25 bp, Artificial
  probe
  misc_feature (1)..(25): SEQ ID NO: 5544; WAN024CM9; Start 3; Stop 27
ggctggagaaccatataaagcttgt

SEQ ID NO: 414028 - DNA, 25 bp, Artificial
  probe
  misc_feature (1)..(25): SEQ ID NO: 5544; WAN024CM9; Start 2; Stop 26
tggctggagaaccatataaagcttg

SEQ ID NO: 414029 - DNA, 25 bp, Artificial
  probe
  misc_feature (1)..(25): SEQ ID NO: 5544; WAN024CM9; Start 7; Stop 31
ggagaaccatataaagcttgtaaaa

SEQ ID NO: 414030 - DNA, 25 bp, Artificial
  probe
  misc_feature (1)..(25): SEQ ID NO: 5544; WAN024CM9; Start 8; Stop 32
gagaaccatataaagcttgtaaaat

SEQ ID NO: 414031 - DNA, 25 bp, Artificial
  probe
  misc_feature (1)..(25): SEQ ID NO: 5544; WAN024CM9; Start 12; Stop 36
accatataaagcttgtaaaattgaa

SEQ ID NO: 414032 - DNA, 25 bp, Artificial
  probe
  misc_feature (1)..(25): SEQ ID NO: 5544; WAN024CM9; Start 11; Stop 35
aaccatataaagcttgtaaaattga

SEQ ID NO: 414033 - DNA, 25 bp, Artificial
  probe
  misc_feature (1)..(25): SEQ ID NO: 5544; WAN024CM9; Start 10; Stop 34
gaaccatataaagcttgtaaaattg

SEQ ID NO: 414034 - DNA, 25 bp, Artificial
  probe
  misc_feature (1)..(25): SEQ ID NO: 5545; WAN024GEE; Start 127; Stop 151
gactcttccttagctgattctgaat

SEQ ID NO: 414035 - DNA, 25 bp, Artificial
  probe
  misc_feature (1)..(25): SEQ ID NO: 5545; WAN024GEE; Start 126; Stop 150
agactcttccttagctgattctgaa

SEQ ID NO: 414036 - DNA, 25 bp, Artificial
  probe
  misc_feature (1)..(25): SEQ ID NO: 5545; WAN024GEE; Start 77; Stop 101
ctttctcttctttctctttgtcagc

SEQ ID NO: 414037 - DNA, 25 bp, Artificial
  probe
  misc_feature (1)..(25): SEQ ID NO: 5545; WAN024GEE; Start 65; Stop 89
actctggttcttctttctcttcttt

SEQ ID NO: 414038 - DNA, 25 bp, Artificial
  probe
  misc_feature (1)..(25): SEQ ID NO: 5545; WAN024GEE; Start 64; Stop 88
gactctggttcttctttctcttctt

SEQ ID NO: 414039 - DNA, 25 bp, Artificial
  probe
  misc_feature (1)..(25): SEQ ID NO: 5545; WAN024GEE; Start 69; Stop 93
tggttcttctttctcttctttctct

SEQ ID NO: 414040 - DNA, 25 bp, Artificial
  probe
  misc_feature (1)..(25): SEQ ID NO: 5545; WAN024GEE; Start 67; Stop 91
tctggttcttctttctcttctttct

SEQ ID NO: 414041 - DNA, 25 bp, Artificial
  probe
  misc_feature (1)..(25): SEQ ID NO: 5545; WAN024GEE; Start 297; Stop 321
tttctgccattctgataactctttc

SEQ ID NO: 414042 - DNA, 25 bp, Artificial
  probe
  misc_feature (1)..(25): SEQ ID NO: 5545; WAN024GEE; Start 68; Stop 92
ctggttcttctttctcttctttctc

SEQ ID NO: 414043 - DNA, 25 bp, Artificial
  probe
  misc_feature (1)..(25): SEQ ID NO: 5545; WAN024GEE; Start 66; Stop 90
ctctggttcttctttctcttctttc

SEQ ID NO: 414044 - DNA, 25 bp, Artificial
  probe
  misc_feature (1)..(25): SEQ ID NO: 5545; WAN024GEE; Start 40; Stop 64
ttatcctgttcctccttctctttag

SEQ ID NO: 414045 - DNA, 25 bp, Artificial
  probe
  misc_feature (1)..(25): SEQ ID NO: 5545; WAN024GEE; Start 41; Stop 65
tatcctgttcctccttctctttaga

SEQ ID NO: 414046 - DNA, 25 bp, Artificial
  probe
  misc_feature (1)..(25): SEQ ID NO: 5545; WAN024GEE; Start 53; Stop 77
ccttctctttagactctggttcttc

SEQ ID NO: 414047 - DNA, 25 bp, Artificial
  probe
  misc_feature (1)..(25): SEQ ID NO: 5545; WAN024GEE; Start 296; Stop 320
gtttctgccattctgataactcttt

SEQ ID NO: 414048 - DNA, 25 bp, Artificial
  probe
  misc_feature (1)..(25): SEQ ID NO: 5545; WAN024GEE; Start 78; Stop 102
tttctcttctttctctttgtcagcc

SEQ ID NO: 414049 - DNA, 25 bp, Artificial
  probe
  misc_feature (1)..(25): SEQ ID NO: 5545; WAN024GEE; Start 39; Stop 63
tttatcctgttcctccttctcttta

SEQ ID NO: 414050 - DNA, 25 bp, Artificial
  probe
  misc_feature (1)..(25): SEQ ID NO: 5545; WAN024GEE; Start 62; Stop 86
tagactctggttcttctttctcttc

SEQ ID NO: 414051 - DNA, 25 bp, Artificial
  probe
  misc_feature (1)..(25): SEQ ID NO: 5545; WAN024GEE; Start 54; Stop 78
cttctctttagactctggttcttct

SEQ ID NO: 414052 - DNA, 25 bp, Artificial
  probe
  misc_feature (1)..(25): SEQ ID NO: 5545; WAN024GEE; Start 52; Stop 76
tccttctctttagactctggttctt

SEQ ID NO: 414053 - DNA, 25 bp, Artificial
  probe
  misc_feature (1)..(25): SEQ ID NO: 5545; WAN024GEE; Start 279; Stop 303
tagatattcttggtttcgtttctgc

SEQ ID NO: 414054 - DNA, 25 bp, Artificial
  probe
  misc_feature (1)..(25): SEQ ID NO: 5545; WAN024GEE; Start 76; Stop 100
tctttctcttctttctctttgtcag

SEQ ID NO: 414055 - DNA, 25 bp, Artificial
  probe
  misc_feature (1)..(25): SEQ ID NO: 5545; WAN024GEE; Start 70; Stop 94
ggttcttctttctcttctttctctt

SEQ ID NO: 414056 - DNA, 25 bp, Artificial
  probe
  misc_feature (1)..(25): SEQ ID NO: 5545; WAN024GEE; Start 193; Stop 217
gacttctcagattcttctcccattc

SEQ ID NO: 414057 - DNA, 25 bp, Artificial
  probe
  misc_feature (1)..(25): SEQ ID NO: 5545; WAN024GEE; Start 63; Stop 87
agactctggttcttctttctcttct

SEQ ID NO: 414058 - DNA, 25 bp, Artificial
  probe
  misc_feature (1)..(25): SEQ ID NO: 5545; WAN024GEE; Start 51; Stop 75
ctccttctctttagactctggttct

SEQ ID NO: 414059 - DNA, 25 bp, Artificial
  probe
  misc_feature (1)..(25): SEQ ID NO: 5545; WAN024GEE; Start 45; Stop 69
ctgttcctccttctctttagactct

SEQ ID NO: 414060 - DNA, 25 bp, Artificial
  probe
  misc_feature (1)..(25): SEQ ID NO: 5545; WAN024GEE; Start 292; Stop 316
tttcgtttctgccattctgataact

SEQ ID NO: 414061 - DNA, 25 bp, Artificial
  probe
  misc_feature (1)..(25): SEQ ID NO: 5545; WAN024GEE; Start 291; Stop 315
gtttcgtttctgccattctgataac

SEQ ID NO: 414062 - DNA, 25 bp, Artificial
  probe
  misc_feature (1)..(25): SEQ ID NO: 5545; WAN024GEE; Start 61; Stop 85
ttagactctggttcttctttctctt

SEQ ID NO: 414063 - DNA, 25 bp, Artificial
  probe
  misc_feature (1)..(25): SEQ ID NO: 5545; WAN024GEE; Start 60; Stop 84
tttagactctggttcttctttctct

SEQ ID NO: 414064 - DNA, 25 bp, Artificial
  probe
  misc_feature (1)..(25): SEQ ID NO: 5545; WAN024GEE; Start 58; Stop 82
tctttagactctggttcttctttct

SEQ ID NO: 414065 - DNA, 25 bp, Artificial
  probe
  misc_feature (1)..(25): SEQ ID NO: 5545; WAN024GEE; Start 56; Stop 80
tctctttagactctggttcttcttt

SEQ ID NO: 414066 - DNA, 25 bp, Artificial
  probe
  misc_feature (1)..(25): SEQ ID NO: 5545; WAN024GEE; Start 55; Stop 79
ttctctttagactctggttcttctt

SEQ ID NO: 414067 - DNA, 25 bp, Artificial
  probe
  misc_feature (1)..(25): SEQ ID NO: 5546; WAN024FAV; Start 1044; Stop 1068
aatcaattcaacctactattcagcg

SEQ ID NO: 414068 - DNA, 25 bp, Artificial
  probe
  misc_feature (1)..(25): SEQ ID NO: 5546; WAN024FAV; Start 1329; Stop 1353
gactactgagatagagacaccaaca

SEQ ID NO: 414069 - DNA, 25 bp, Artificial
  probe
  misc_feature (1)..(25): SEQ ID NO: 5546; WAN024FAV; Start 909; Stop 933
gattggagtagtagatgtcaaggat

SEQ ID NO: 414070 - DNA, 25 bp, Artificial
  probe
  misc_feature (1)..(25): SEQ ID NO: 5546; WAN024FAV; Start 1328; Stop 1352
ggactactgagatagagacaccaac

SEQ ID NO: 414071 - DNA, 25 bp, Artificial
  probe
  misc_feature (1)..(25): SEQ ID NO: 5546; WAN024FAV; Start 908; Stop 932
ggattggagtagtagatgtcaagga

SEQ ID NO: 414072 - DNA, 25 bp, Artificial
  probe
  misc_feature (1)..(25): SEQ ID NO: 5546; WAN024FAV; Start 1440; Stop 1464
ggtaattgagaatggagttgaagta

SEQ ID NO: 414073 - DNA, 25 bp, Artificial
  probe
  misc_feature (1)..(25): SEQ ID NO: 5546; WAN024FAV; Start 1011; Stop 1035
tagtgccgagtataacaacttagat

SEQ ID NO: 414074 - DNA, 25 bp, Artificial
  probe
  misc_feature (1)..(25): SEQ ID NO: 5546; WAN024FAV; Start 1010; Stop 1034
ctagtgccgagtataacaacttaga

SEQ ID NO: 414075 - DNA, 25 bp, Artificial
  probe
  misc_feature (1)..(25): SEQ ID NO: 5546; WAN024FAV; Start 1009; Stop 1033
tctagtgccgagtataacaacttag

SEQ ID NO: 414076 - DNA, 25 bp, Artificial
  probe
  misc_feature (1)..(25): SEQ ID NO: 5546; WAN024FAV; Start 56; Stop 80
tgattacctattctgatagccttgg

SEQ ID NO: 414077 - DNA, 25 bp, Artificial
  probe
  misc_feature (1)..(25): SEQ ID NO: 5546; WAN024FAV; Start 57; Stop 81
gattacctattctgatagccttgga

SEQ ID NO: 414078 - DNA, 25 bp, Artificial
  probe
  misc_feature (1)..(25): SEQ ID NO: 5546; WAN024FAV; Start 1008; Stop 1032
ctctagtgccgagtataacaactta

SEQ ID NO: 414079 - DNA, 25 bp, Artificial
  probe
  misc_feature (1)..(25): SEQ ID NO: 5546; WAN024FAV; Start 58; Stop 82
attacctattctgatagccttggaa

SEQ ID NO: 414080 - DNA, 25 bp, Artificial
  probe
  misc_feature (1)..(25): SEQ ID NO: 5546; WAN024FAV; Start 53; Stop 77
tgttgattacctattctgatagcct

SEQ ID NO: 414081 - DNA, 25 bp, Artificial
  probe
  misc_feature (1)..(25): SEQ ID NO: 5546; WAN024FAV; Start 551; Stop 575
ttatccgtaagaccattcagcactt

SEQ ID NO: 414082 - DNA, 25 bp, Artificial
  probe
  misc_feature (1)..(25): SEQ ID NO: 5546; WAN024FAV; Start 911; Stop 935
ttggagtagtagatgtcaaggatat

SEQ ID NO: 414083 - DNA, 25 bp, Artificial
  probe
  misc_feature (1)..(25): SEQ ID NO: 5546; WAN024FAV; Start 910; Stop 934
attggagtagtagatgtcaaggata

SEQ ID NO: 414084 - DNA, 25 bp, Artificial
  probe
  misc_feature (1)..(25): SEQ ID NO: 5546; WAN024FAV; Start 1151; Stop 1175
gtctattagcaggcaagaatgactt

SEQ ID NO: 414085 - DNA, 25 bp, Artificial
  probe
  misc_feature (1)..(25): SEQ ID NO: 5546; WAN024FAV; Start 1330; Stop 1354
actactgagatagagacaccaacag

SEQ ID NO: 414086 - DNA, 25 bp, Artificial
  probe
  misc_feature (1)..(25): SEQ ID NO: 5546; WAN024FAV; Start 937; Stop 961
ctgaccgatgaggagattgactatg

SEQ ID NO: 414087 - DNA, 25 bp, Artificial
  probe
  misc_feature (1)..(25): SEQ ID NO: 5546; WAN024FAV; Start 967; Stop 991
aatgaactctataaggttggagcca

SEQ ID NO: 414088 - DNA, 25 bp, Artificial
  probe
  misc_feature (1)..(25): SEQ ID NO: 5546; WAN024FAV; Start 55; Stop 79
ttgattacctattctgatagccttg

SEQ ID NO: 414089 - DNA, 25 bp, Artificial
  probe
  misc_feature (1)..(25): SEQ ID NO: 5546; WAN024FAV; Start 54; Stop 78
gttgattacctattctgatagcctt

SEQ ID NO: 414090 - DNA, 25 bp, Artificial
  probe
  misc_feature (1)..(25): SEQ ID NO: 5546; WAN024FAV; Start 52; Stop 76
atgttgattacctattctgatagcc

SEQ ID NO: 414091 - DNA, 25 bp, Artificial
  probe
  misc_feature (1)..(25): SEQ ID NO: 5546; WAN024FAV; Start 942; Stop 966
cgatgaggagattgactatgcttca

SEQ ID NO: 414092 - DNA, 25 bp, Artificial
  probe
  misc_feature (1)..(25): SEQ ID NO: 5546; WAN024FAV; Start 552; Stop 576
tatccgtaagaccattcagcacttg

SEQ ID NO: 414093 - DNA, 25 bp, Artificial
  probe
  misc_feature (1)..(25): SEQ ID NO: 5546; WAN024FAV; Start 1382; Stop 1406
ataaagataagtccgtaacagcagt

SEQ ID NO: 414094 - DNA, 25 bp, Artificial
  probe
  misc_feature (1)..(25): SEQ ID NO: 5546; WAN024FAV; Start 941; Stop 965
ccgatgaggagattgactatgcttc

SEQ ID NO: 414095 - DNA, 25 bp, Artificial
  probe
  misc_feature (1)..(25): SEQ ID NO: 5546; WAN024FAV; Start 582; Stop 606
taatgggtgtgatttgattcgtcta

SEQ ID NO: 414096 - DNA, 25 bp, Artificial
  probe
  misc_feature (1)..(25): SEQ ID NO: 5546; WAN024FAV; Start 1384; Stop 1408
aaagataagtccgtaacagcagtag

SEQ ID NO: 414097 - DNA, 25 bp, Artificial
  probe
  misc_feature (1)..(25): SEQ ID NO: 5546; WAN024FAV; Start 1139; Stop 1163
tttactatgtgggtctattagcagg

SEQ ID NO: 414098 - DNA, 25 bp, Artificial
  probe
  misc_feature (1)..(25): SEQ ID NO: 5546; WAN024FAV; Start 295; Stop 319
tctcgtcaatccaagtattataagg

SEQ ID NO: 414099 - DNA, 25 bp, Artificial
  probe
  misc_feature (1)..(25): SEQ ID NO: 5546; WAN024FAV; Start 970; Stop 994
gaactctataaggttggagccaatg

SEQ ID NO: 414100 - DNA, 25 bp, Artificial
  probe
  misc_feature (1)..(25): SEQ ID NO: 5547; WAN024G4N; Start 686; Stop 710
atggcaagactattatcactcacaa

SEQ ID NO: 414101 - DNA, 25 bp, Artificial
  probe
  misc_feature (1)..(25): SEQ ID NO: 5547; WAN024G4N; Start 738; Stop 762
gatggataatggattgatgacacct

SEQ ID NO: 414102 - DNA, 25 bp, Artificial
  probe
  misc_feature (1)..(25): SEQ ID NO: 5547; WAN024G4N; Start 677; Stop 701
tgacagaagatggcaagactattat

SEQ ID NO: 414103 - DNA, 25 bp, Artificial
  probe
  misc_feature (1)..(25): SEQ ID NO: 5547; WAN024G4N; Start 739; Stop 763
atggataatggattgatgacacctg

SEQ ID NO: 414104 - DNA, 25 bp, Artificial
  probe
  misc_feature (1)..(25): SEQ ID NO: 5547; WAN024G4N; Start 688; Stop 712
ggcaagactattatcactcacaact

SEQ ID NO: 414105 - DNA, 25 bp, Artificial
  probe
  misc_feature (1)..(25): SEQ ID NO: 5547; WAN024G4N; Start 684; Stop 708
agatggcaagactattatcactcac

SEQ ID NO: 414106 - DNA, 25 bp, Artificial
  probe
  misc_feature (1)..(25): SEQ ID NO: 5547; WAN024G4N; Start 685; Stop 709
gatggcaagactattatcactcaca

SEQ ID NO: 414107 - DNA, 25 bp, Artificial
  probe
  misc_feature (1)..(25): SEQ ID NO: 5547; WAN024G4N; Start 683; Stop 707
aagatggcaagactattatcactca

SEQ ID NO: 414108 - DNA, 25 bp, Artificial
  probe
  misc_feature (1)..(25): SEQ ID NO: 5547; WAN024G4N; Start 679; Stop 703
acagaagatggcaagactattatca

SEQ ID NO: 414109 - DNA, 25 bp, Artificial
  probe
  misc_feature (1)..(25): SEQ ID NO: 5547; WAN024G4N; Start 687; Stop 711
tggcaagactattatcactcacaac

SEQ ID NO: 414110 - DNA, 25 bp, Artificial
  probe
  misc_feature (1)..(25): SEQ ID NO: 5547; WAN024G4N; Start 742; Stop 766
gataatggattgatgacacctgttg

SEQ ID NO: 414111 - DNA, 25 bp, Artificial
  probe
  misc_feature (1)..(25): SEQ ID NO: 5547; WAN024G4N; Start 681; Stop 705
agaagatggcaagactattatcact

SEQ ID NO: 414112 - DNA, 25 bp, Artificial
  probe
  misc_feature (1)..(25): SEQ ID NO: 5547; WAN024G4N; Start 680; Stop 704
cagaagatggcaagactattatcac

SEQ ID NO: 414113 - DNA, 25 bp, Artificial
  probe
  misc_feature (1)..(25): SEQ ID NO: 5547; WAN024G4N; Start 682; Stop 706
gaagatggcaagactattatcactc

SEQ ID NO: 414114 - DNA, 25 bp, Artificial
  probe
  misc_feature (1)..(25): SEQ ID NO: 5547; WAN024G4N; Start 678; Stop 702
gacagaagatggcaagactattatc

SEQ ID NO: 414115 - DNA, 25 bp, Artificial
  probe
  misc_feature (1)..(25): SEQ ID NO: 5547; WAN024G4N; Start 741; Stop 765
ggataatggattgatgacacctgtt

SEQ ID NO: 414116 - DNA, 25 bp, Artificial
  probe
  misc_feature (1)..(25): SEQ ID NO: 5547; WAN024G4N; Start 737; Stop 761
ggatggataatggattgatgacacc

SEQ ID NO: 414117 - DNA, 25 bp, Artificial
  probe
  misc_feature (1)..(25): SEQ ID NO: 5547; WAN024G4N; Start 675; Stop 699
attgacagaagatggcaagactatt

SEQ ID NO: 414118 - DNA, 25 bp, Artificial
  probe
  misc_feature (1)..(25): SEQ ID NO: 5547; WAN024G4N; Start 676; Stop 700
ttgacagaagatggcaagactatta

SEQ ID NO: 414119 - DNA, 25 bp, Artificial
  probe
  misc_feature (1)..(25): SEQ ID NO: 5547; WAN024G4N; Start 674; Stop 698
cattgacagaagatggcaagactat

SEQ ID NO: 414120 - DNA, 25 bp, Artificial
  probe
  misc_feature (1)..(25): SEQ ID NO: 5547; WAN024G4N; Start 689; Stop 713
gcaagactattatcactcacaacta

SEQ ID NO: 414121 - DNA, 25 bp, Artificial
  probe
  misc_feature (1)..(25): SEQ ID NO: 5547; WAN024G4N; Start 444; Stop 468
tattccaatgacaccaatgcgtaag

SEQ ID NO: 414122 - DNA, 25 bp, Artificial
  probe
  misc_feature (1)..(25): SEQ ID NO: 5547; WAN024G4N; Start 740; Stop 764
tggataatggattgatgacacctgt

SEQ ID NO: 414123 - DNA, 25 bp, Artificial
  probe
  misc_feature (1)..(25): SEQ ID NO: 5547; WAN024G4N; Start 743; Stop 767
ataatggattgatgacacctgttgt

SEQ ID NO: 414124 - DNA, 25 bp, Artificial
  probe
  misc_feature (1)..(25): SEQ ID NO: 5547; WAN024G4N; Start 443; Stop 467
gtattccaatgacaccaatgcgtaa

SEQ ID NO: 414125 - DNA, 25 bp, Artificial
  probe
  misc_feature (1)..(25): SEQ ID NO: 5547; WAN024G4N; Start 744; Stop 768
taatggattgatgacacctgttgtt

SEQ ID NO: 414126 - DNA, 25 bp, Artificial
  probe
  misc_feature (1)..(25): SEQ ID NO: 5547; WAN024G4N; Start 700; Stop 724
atcactcacaactatgtcaatcttg

SEQ ID NO: 414127 - DNA, 25 bp, Artificial
  probe
  misc_feature (1)..(25): SEQ ID NO: 5547; WAN024G4N; Start 673; Stop 697
tcattgacagaagatggcaagacta

SEQ ID NO: 414128 - DNA, 25 bp, Artificial
  probe
  misc_feature (1)..(25): SEQ ID NO: 5547; WAN024G4N; Start 704; Stop 728
ctcacaactatgtcaatcttgccat

SEQ ID NO: 414129 - DNA, 25 bp, Artificial
  probe
  misc_feature (1)..(25): SEQ ID NO: 5547; WAN024G4N; Start 701; Stop 725
tcactcacaactatgtcaatcttgc

SEQ ID NO: 414130 - DNA, 25 bp, Artificial
  probe
  misc_feature (1)..(25): SEQ ID NO: 5547; WAN024G4N; Start 672; Stop 696
ttcattgacagaagatggcaagact

SEQ ID NO: 414131 - DNA, 25 bp, Artificial
  probe
  misc_feature (1)..(25): SEQ ID NO: 5547; WAN024G4N; Start 597; Stop 621
gaagaagactactgtaacagacctt

SEQ ID NO: 414132 - DNA, 25 bp, Artificial
  probe
  misc_feature (1)..(25): SEQ ID NO: 5547; WAN024G4N; Start 766; Stop 790
gtttacaatgctgagaagatgagtc

SEQ ID NO: 414133 - DNA, 25 bp, Artificial
  probe
  misc_feature (1)..(25): SEQ ID NO: 5548; WAN024CGR; Start 255; Stop 279
atttaccaattccaaaccatccaga

SEQ ID NO: 414134 - DNA, 25 bp, Artificial
  probe
  misc_feature (1)..(25): SEQ ID NO: 5548; WAN024CGR; Start 254; Stop 278
tatttaccaattccaaaccatccag

SEQ ID NO: 414135 - DNA, 25 bp, Artificial
  probe
  misc_feature (1)..(25): SEQ ID NO: 5548; WAN024CGR; Start 256; Stop 280
tttaccaattccaaaccatccagag

SEQ ID NO: 414136 - DNA, 25 bp, Artificial
  probe
  misc_feature (1)..(25): SEQ ID NO: 5548; WAN024CGR; Start 210; Stop 234
ggtctttgcgaagtcaatcaattta

SEQ ID NO: 414137 - DNA, 25 bp, Artificial
  probe
  misc_feature (1)..(25): SEQ ID NO: 5548; WAN024CGR; Start 186; Stop 210
gataaaggtccaagcaacatcattg

SEQ ID NO: 414138 - DNA, 25 bp, Artificial
  probe
  misc_feature (1)..(25): SEQ ID NO: 5548; WAN024CGR; Start 253; Stop 277
atatttaccaattccaaaccatcca

SEQ ID NO: 414139 - DNA, 25 bp, Artificial
  probe
  misc_feature (1)..(25): SEQ ID NO: 5548; WAN024CGR; Start 623; Stop 647
ttaattcctgctttggcgatttctt

SEQ ID NO: 414140 - DNA, 25 bp, Artificial
  probe
  misc_feature (1)..(25): SEQ ID NO: 5548; WAN024CGR; Start 185; Stop 209
cgataaaggtccaagcaacatcatt

SEQ ID NO: 414141 - DNA, 25 bp, Artificial
  probe
  misc_feature (1)..(25): SEQ ID NO: 5548; WAN024CGR; Start 543; Stop 567
agaccatagtcaagccgtatttatc

SEQ ID NO: 414142 - DNA, 25 bp, Artificial
  probe
  misc_feature (1)..(25): SEQ ID NO: 5548; WAN024CGR; Start 542; Stop 566
aagaccatagtcaagccgtatttat

SEQ ID NO: 414143 - DNA, 25 bp, Artificial
  probe
  misc_feature (1)..(25): SEQ ID NO: 5548; WAN024CGR; Start 541; Stop 565
aaagaccatagtcaagccgtattta

SEQ ID NO: 414144 - DNA, 25 bp, Artificial
  probe
  misc_feature (1)..(25): SEQ ID NO: 5548; WAN024CGR; Start 540; Stop 564
taaagaccatagtcaagccgtattt

SEQ ID NO: 414145 - DNA, 25 bp, Artificial
  probe
  misc_feature (1)..(25): SEQ ID NO: 5548; WAN024CGR; Start 252; Stop 276
gatatttaccaattccaaaccatcc

SEQ ID NO: 414146 - DNA, 25 bp, Artificial
  probe
  misc_feature (1)..(25): SEQ ID NO: 5548; WAN024CGR; Start 261; Stop 285
caattccaaaccatccagagtcatc

SEQ ID NO: 414147 - DNA, 25 bp, Artificial
  probe
  misc_feature (1)..(25): SEQ ID NO: 5548; WAN024CGR; Start 249; Stop 273
agagatatttaccaattccaaacca

SEQ ID NO: 414148 - DNA, 25 bp, Artificial
  probe
  misc_feature (1)..(25): SEQ ID NO: 5548; WAN024CGR; Start 539; Stop 563
gtaaagaccatagtcaagccgtatt

SEQ ID NO: 414149 - DNA, 25 bp, Artificial
  probe
  misc_feature (1)..(25): SEQ ID NO: 5548; WAN024CGR; Start 624; Stop 648
taattcctgctttggcgatttcttc

SEQ ID NO: 414150 - DNA, 25 bp, Artificial
  probe
  misc_feature (1)..(25): SEQ ID NO: 5548; WAN024CGR; Start 622; Stop 646
cttaattcctgctttggcgatttct

SEQ ID NO: 414151 - DNA, 25 bp, Artificial
  probe
  misc_feature (1)..(25): SEQ ID NO: 5548; WAN024CGR; Start 257; Stop 281
ttaccaattccaaaccatccagagt

SEQ ID NO: 414152 - DNA, 25 bp, Artificial
  probe
  misc_feature (1)..(25): SEQ ID NO: 5548; WAN024CGR; Start 544; Stop 568
gaccatagtcaagccgtatttatcc

SEQ ID NO: 414153 - DNA, 25 bp, Artificial
  probe
  misc_feature (1)..(25): SEQ ID NO: 5548; WAN024CGR; Start 532; Stop 556
cacacctgtaaagaccatagtcaag

SEQ ID NO: 414154 - DNA, 25 bp, Artificial
  probe
  misc_feature (1)..(25): SEQ ID NO: 5548; WAN024CGR; Start 209; Stop 233
tggtctttgcgaagtcaatcaattt

SEQ ID NO: 414155 - DNA, 25 bp, Artificial
  probe
  misc_feature (1)..(25): SEQ ID NO: 5548; WAN024CGR; Start 208; Stop 232
ttggtctttgcgaagtcaatcaatt

SEQ ID NO: 414156 - DNA, 25 bp, Artificial
  probe
  misc_feature (1)..(25): SEQ ID NO: 5548; WAN024CGR; Start 531; Stop 555
tcacacctgtaaagaccatagtcaa

SEQ ID NO: 414157 - DNA, 25 bp, Artificial
  probe
  misc_feature (1)..(25): SEQ ID NO: 5548; WAN024CGR; Start 375; Stop 399
gacaacaagcagtttcattcctcaa

SEQ ID NO: 414158 - DNA, 25 bp, Artificial
  probe
  misc_feature (1)..(25): SEQ ID NO: 5548; WAN024CGR; Start 545; Stop 569
accatagtcaagccgtatttatccg

SEQ ID NO: 414159 - DNA, 25 bp, Artificial
  probe
  misc_feature (1)..(25): SEQ ID NO: 5548; WAN024CGR; Start 538; Stop 562
tgtaaagaccatagtcaagccgtat

SEQ ID NO: 414160 - DNA, 25 bp, Artificial
  probe
  misc_feature (1)..(25): SEQ ID NO: 5548; WAN024CGR; Start 529; Stop 553
tctcacacctgtaaagaccatagtc

SEQ ID NO: 414161 - DNA, 25 bp, Artificial
  probe
  misc_feature (1)..(25): SEQ ID NO: 5548; WAN024CGR; Start 258; Stop 282
taccaattccaaaccatccagagtc

SEQ ID NO: 414162 - DNA, 25 bp, Artificial
  probe
  misc_feature (1)..(25): SEQ ID NO: 5548; WAN024CGR; Start 530; Stop 554
ctcacacctgtaaagaccatagtca

SEQ ID NO: 414163 - DNA, 25 bp, Artificial
  probe
  misc_feature (1)..(25): SEQ ID NO: 5548; WAN024CGR; Start 376; Stop 400
acaacaagcagtttcattcctcaac

SEQ ID NO: 414164 - DNA, 25 bp, Artificial
  probe
  misc_feature (1)..(25): SEQ ID NO: 5548; WAN024CGR; Start 382; Stop 406
agcagtttcattcctcaacctcttt

SEQ ID NO: 414165 - DNA, 25 bp, Artificial
  probe
  misc_feature (1)..(25): SEQ ID NO: 5548; WAN024CGR; Start 381; Stop 405
aagcagtttcattcctcaacctctt

SEQ ID NO: 414166 - DNA, 25 bp, Artificial
  probe
  misc_feature (1)..(25): SEQ ID NO: 5549; WAN024DVB; Start 294; Stop 318
tcatcttaccagtcaacttagcctt

SEQ ID NO: 414167 - DNA, 25 bp, Artificial
  probe
  misc_feature (1)..(25): SEQ ID NO: 5549; WAN024DVB; Start 298; Stop 322
cttaccagtcaacttagccttgtag

SEQ ID NO: 414168 - DNA, 25 bp, Artificial
  probe
  misc_feature (1)..(25): SEQ ID NO: 5549; WAN024DVB; Start 297; Stop 321
tcttaccagtcaacttagccttgta

SEQ ID NO: 414169 - DNA, 25 bp, Artificial
  probe
  misc_feature (1)..(25): SEQ ID NO: 5549; WAN024DVB; Start 295; Stop 319
catcttaccagtcaacttagccttg

SEQ ID NO: 414170 - DNA, 25 bp, Artificial
  probe
  misc_feature (1)..(25): SEQ ID NO: 5549; WAN024DVB; Start 299; Stop 323
ttaccagtcaacttagccttgtagt

SEQ ID NO: 414171 - DNA, 25 bp, Artificial
  probe
  misc_feature (1)..(25): SEQ ID NO: 5549; WAN024DVB; Start 296; Stop 320
atcttaccagtcaacttagccttgt

SEQ ID NO: 414172 - DNA, 25 bp, Artificial
  probe
  misc_feature (1)..(25): SEQ ID NO: 5549; WAN024DVB; Start 293; Stop 317
gtcatcttaccagtcaacttagcct

SEQ ID NO: 414173 - DNA, 25 bp, Artificial
  probe
  misc_feature (1)..(25): SEQ ID NO: 5549; WAN024DVB; Start 68; Stop 92
aactgaacatacttgaattgtccag

SEQ ID NO: 414174 - DNA, 25 bp, Artificial
  probe
  misc_feature (1)..(25): SEQ ID NO: 5549; WAN024DVB; Start 300; Stop 324
taccagtcaacttagccttgtagtc

SEQ ID NO: 414175 - DNA, 25 bp, Artificial
  probe
  misc_feature (1)..(25): SEQ ID NO: 5549; WAN024DVB; Start 69; Stop 93
actgaacatacttgaattgtccagc

SEQ ID NO: 414176 - DNA, 25 bp, Artificial
  probe
  misc_feature (1)..(25): SEQ ID NO: 5549; WAN024DVB; Start 302; Stop 326
ccagtcaacttagccttgtagtcaa

SEQ ID NO: 414177 - DNA, 25 bp, Artificial
  probe
  misc_feature (1)..(25): SEQ ID NO: 5549; WAN024DVB; Start 264; Stop 288
ttgtatagtaagccttgtactcagc

SEQ ID NO: 414178 - DNA, 25 bp, Artificial
  probe
  misc_feature (1)..(25): SEQ ID NO: 5549; WAN024DVB; Start 175; Stop 199
gtaagtgtatttcttgctttgtcca

SEQ ID NO: 414179 - DNA, 25 bp, Artificial
  probe
  misc_feature (1)..(25): SEQ ID NO: 5549; WAN024DVB; Start 174; Stop 198
tgtaagtgtatttcttgctttgtcc

SEQ ID NO: 414180 - DNA, 25 bp, Artificial
  probe
  misc_feature (1)..(25): SEQ ID NO: 5549; WAN024DVB; Start 196; Stop 220
tccaccttgaacaaattccatagta

SEQ ID NO: 414181 - DNA, 25 bp, Artificial
  probe
  misc_feature (1)..(25): SEQ ID NO: 5549; WAN024DVB; Start 72; Stop 96
gaacatacttgaattgtccagcgtc

SEQ ID NO: 414182 - DNA, 25 bp, Artificial
  probe
  misc_feature (1)..(25): SEQ ID NO: 5549; WAN024DVB; Start 23; Stop 47
atatggaaatgttctgccttaactg

SEQ ID NO: 414183 - DNA, 25 bp, Artificial
  probe
  misc_feature (1)..(25): SEQ ID NO: 5549; WAN024DVB; Start 182; Stop 206
tatttcttgctttgtccaccttgaa

SEQ ID NO: 414184 - DNA, 25 bp, Artificial
  probe
  misc_feature (1)..(25): SEQ ID NO: 5549; WAN024DVB; Start 267; Stop 291
tatagtaagccttgtactcagcctg

SEQ ID NO: 414185 - DNA, 25 bp, Artificial
  probe
  misc_feature (1)..(25): SEQ ID NO: 5549; WAN024DVB; Start 266; Stop 290
gtatagtaagccttgtactcagcct

SEQ ID NO: 414186 - DNA, 25 bp, Artificial
  probe
  misc_feature (1)..(25): SEQ ID NO: 5549; WAN024DVB; Start 70; Stop 94
ctgaacatacttgaattgtccagcg

SEQ ID NO: 414187 - DNA, 25 bp, Artificial
  probe
  misc_feature (1)..(25): SEQ ID NO: 5549; WAN024DVB; Start 22; Stop 46
gatatggaaatgttctgccttaact

SEQ ID NO: 414188 - DNA, 25 bp, Artificial
  probe
  misc_feature (1)..(25): SEQ ID NO: 5549; WAN024DVB; Start 21; Stop 45
agatatggaaatgttctgccttaac

SEQ ID NO: 414189 - DNA, 25 bp, Artificial
  probe
  misc_feature (1)..(25): SEQ ID NO: 5549; WAN024DVB; Start 59; Stop 83
tggtcactaaactgaacatacttga

SEQ ID NO: 414190 - DNA, 25 bp, Artificial
  probe
  misc_feature (1)..(25): SEQ ID NO: 5549; WAN024DVB; Start 197; Stop 221
ccaccttgaacaaattccatagtat

SEQ ID NO: 414191 - DNA, 25 bp, Artificial
  probe
  misc_feature (1)..(25): SEQ ID NO: 5549; WAN024DVB; Start 24; Stop 48
tatggaaatgttctgccttaactgg

SEQ ID NO: 414192 - DNA, 25 bp, Artificial
  probe
  misc_feature (1)..(25): SEQ ID NO: 5549; WAN024DVB; Start 305; Stop 329
gtcaacttagccttgtagtcaaaga

SEQ ID NO: 414193 - DNA, 25 bp, Artificial
  probe
  misc_feature (1)..(25): SEQ ID NO: 5549; WAN024DVB; Start 304; Stop 328
agtcaacttagccttgtagtcaaag

SEQ ID NO: 414194 - DNA, 25 bp, Artificial
  probe
  misc_feature (1)..(25): SEQ ID NO: 5549; WAN024DVB; Start 265; Stop 289
tgtatagtaagccttgtactcagcc

SEQ ID NO: 414195 - DNA, 25 bp, Artificial
  probe
  misc_feature (1)..(25): SEQ ID NO: 5549; WAN024DVB; Start 58; Stop 82
gtggtcactaaactgaacatacttg

SEQ ID NO: 414196 - DNA, 25 bp, Artificial
  probe
  misc_feature (1)..(25): SEQ ID NO: 5549; WAN024DVB; Start 345; Stop 369
cgtcttcaaggaaaggataaactga

SEQ ID NO: 414197 - DNA, 25 bp, Artificial
  probe
  misc_feature (1)..(25): SEQ ID NO: 5549; WAN024DVB; Start 195; Stop 219
gtccaccttgaacaaattccatagt

SEQ ID NO: 414198 - DNA, 25 bp, Artificial
  probe
  misc_feature (1)..(25): SEQ ID NO: 5549; WAN024DVB; Start 181; Stop 205
gtatttcttgctttgtccaccttga

SEQ ID NO: 414199 - DNA, 25 bp, Artificial
  probe
  misc_feature (1)..(25): SEQ ID NO: 5550; WAN024CL4; Start 162; Stop 186
tgtggctcctcatcaacaatctatt

SEQ ID NO: 414200 - DNA, 25 bp, Artificial
  probe
  misc_feature (1)..(25): SEQ ID NO: 5550; WAN024CL4; Start 221; Stop 245
ctgacgaaggtttggtagataagta

SEQ ID NO: 414201 - DNA, 25 bp, Artificial
  probe
  misc_feature (1)..(25): SEQ ID NO: 5550; WAN024CL4; Start 227; Stop 251
aaggtttggtagataagtatgtccc

SEQ ID NO: 414202 - DNA, 25 bp, Artificial
  probe
  misc_feature (1)..(25): SEQ ID NO: 5550; WAN024CL4; Start 224; Stop 248
acgaaggtttggtagataagtatgt

SEQ ID NO: 414203 - DNA, 25 bp, Artificial
  probe
  misc_feature (1)..(25): SEQ ID NO: 5550; WAN024CL4; Start 222; Stop 246
tgacgaaggtttggtagataagtat

SEQ ID NO: 414204 - DNA, 25 bp, Artificial
  probe
  misc_feature (1)..(25): SEQ ID NO: 5550; WAN024CL4; Start 229; Stop 253
ggtttggtagataagtatgtcccta

SEQ ID NO: 414205 - DNA, 25 bp, Artificial
  probe
  misc_feature (1)..(25): SEQ ID NO: 5550; WAN024CL4; Start 225; Stop 249
cgaaggtttggtagataagtatgtc

SEQ ID NO: 414206 - DNA, 25 bp, Artificial
  probe
  misc_feature (1)..(25): SEQ ID NO: 5550; WAN024CL4; Start 223; Stop 247
gacgaaggtttggtagataagtatg

SEQ ID NO: 414207 - DNA, 25 bp, Artificial
  probe
  misc_feature (1)..(25): SEQ ID NO: 5550; WAN024CL4; Start 163; Stop 187
gtggctcctcatcaacaatctattt

SEQ ID NO: 414208 - DNA, 25 bp, Artificial
  probe
  misc_feature (1)..(25): SEQ ID NO: 5550; WAN024CL4; Start 193; Stop 217
gccatcaatgctatctgtaaagaag

SEQ ID NO: 414209 - DNA, 25 bp, Artificial
  probe
  misc_feature (1)..(25): SEQ ID NO: 5550; WAN024CL4; Start 191; Stop 215
atgccatcaatgctatctgtaaaga

SEQ ID NO: 414210 - DNA, 25 bp, Artificial
  probe
  misc_feature (1)..(25): SEQ ID NO: 5550; WAN024CL4; Start 192; Stop 216
tgccatcaatgctatctgtaaagaa

SEQ ID NO: 414211 - DNA, 25 bp, Artificial
  probe
  misc_feature (1)..(25): SEQ ID NO: 5550; WAN024CL4; Start 226; Stop 250
gaaggtttggtagataagtatgtcc

SEQ ID NO: 414212 - DNA, 25 bp, Artificial
  probe
  misc_feature (1)..(25): SEQ ID NO: 5550; WAN024CL4; Start 190; Stop 214
gatgccatcaatgctatctgtaaag

SEQ ID NO: 414213 - DNA, 25 bp, Artificial
  probe
  misc_feature (1)..(25): SEQ ID NO: 5550; WAN024CL4; Start 63; Stop 87
ggcaacacaaactactgatggtaaa

SEQ ID NO: 414214 - DNA, 25 bp, Artificial
  probe
  misc_feature (1)..(25): SEQ ID NO: 5550; WAN024CL4; Start 189; Stop 213
ggatgccatcaatgctatctgtaaa

SEQ ID NO: 414215 - DNA, 25 bp, Artificial
  probe
  misc_feature (1)..(25): SEQ ID NO: 5550; WAN024CL4; Start 188; Stop 212
tggatgccatcaatgctatctgtaa

SEQ ID NO: 414216 - DNA, 25 bp, Artificial
  probe
  misc_feature (1)..(25): SEQ ID NO: 5550; WAN024CL4; Start 187; Stop 211
ttggatgccatcaatgctatctgta

SEQ ID NO: 414217 - DNA, 25 bp, Artificial
  probe
  misc_feature (1)..(25): SEQ ID NO: 5550; WAN024CL4; Start 228; Stop 252
aggtttggtagataagtatgtccct

SEQ ID NO: 414218 - DNA, 25 bp, Artificial
  probe
  misc_feature (1)..(25): SEQ ID NO: 5550; WAN024CL4; Start 220; Stop 244
gctgacgaaggtttggtagataagt

SEQ ID NO: 414219 - DNA, 25 bp, Artificial
  probe
  misc_feature (1)..(25): SEQ ID NO: 5550; WAN024CL4; Start 230; Stop 254
gtttggtagataagtatgtccctat

SEQ ID NO: 414220 - DNA, 25 bp, Artificial
  probe
  misc_feature (1)..(25): SEQ ID NO: 5550; WAN024CL4; Start 62; Stop 86
tggcaacacaaactactgatggtaa

SEQ ID NO: 414221 - DNA, 25 bp, Artificial
  probe
  misc_feature (1)..(25): SEQ ID NO: 5550; WAN024CL4; Start 233; Stop 257
tggtagataagtatgtccctatcaa

SEQ ID NO: 414222 - DNA, 25 bp, Artificial
  probe
  misc_feature (1)..(25): SEQ ID NO: 5550; WAN024CL4; Start 232; Stop 256
ttggtagataagtatgtccctatca

SEQ ID NO: 414223 - DNA, 25 bp, Artificial
  probe
  misc_feature (1)..(25): SEQ ID NO: 5550; WAN024CL4; Start 219; Stop 243
ggctgacgaaggtttggtagataag

SEQ ID NO: 414224 - DNA, 25 bp, Artificial
  probe
  misc_feature (1)..(25): SEQ ID NO: 5550; WAN024CL4; Start 194; Stop 218
ccatcaatgctatctgtaaagaagc

SEQ ID NO: 414225 - DNA, 25 bp, Artificial
  probe
  misc_feature (1)..(25): SEQ ID NO: 5550; WAN024CL4; Start 195; Stop 219
catcaatgctatctgtaaagaagcg

SEQ ID NO: 414226 - DNA, 25 bp, Artificial
  probe
  misc_feature (1)..(25): SEQ ID NO: 5550; WAN024CL4; Start 164; Stop 188
tggctcctcatcaacaatctatttt

SEQ ID NO: 414227 - DNA, 25 bp, Artificial
  probe
  misc_feature (1)..(25): SEQ ID NO: 5550; WAN024CL4; Start 64; Stop 88
gcaacacaaactactgatggtaaaa

SEQ ID NO: 414228 - DNA, 25 bp, Artificial
  probe
  misc_feature (1)..(25): SEQ ID NO: 5550; WAN024CL4; Start 139; Stop 163
ttggttggaatcaaaggagaatttg

SEQ ID NO: 414229 - DNA, 25 bp, Artificial
  probe
  misc_feature (1)..(25): SEQ ID NO: 5550; WAN024CL4; Start 196; Stop 220
atcaatgctatctgtaaagaagcgg

SEQ ID NO: 414230 - DNA, 25 bp, Artificial
  probe
  misc_feature (1)..(25): SEQ ID NO: 5550; WAN024CL4; Start 161; Stop 185
ttgtggctcctcatcaacaatctat

SEQ ID NO: 414231 - DNA, 25 bp, Artificial
  probe
  misc_feature (1)..(25): SEQ ID NO: 5550; WAN024CL4; Start 138; Stop 162
tttggttggaatcaaaggagaattt

SEQ ID NO: 414232 - DNA, 25 bp, Artificial
  probe
  misc_feature (1)..(25): SEQ ID NO: 5551; WAN024D3G; Start 160; Stop 184
gtaagttcttctggttccatgattg

SEQ ID NO: 414233 - DNA, 25 bp, Artificial
  probe
  misc_feature (1)..(25): SEQ ID NO: 5551; WAN024D3G; Start 159; Stop 183
tgtaagttcttctggttccatgatt

SEQ ID NO: 414234 - DNA, 25 bp, Artificial
  probe
  misc_feature (1)..(25): SEQ ID NO: 5551; WAN024D3G; Start 158; Stop 182
atgtaagttcttctggttccatgat

SEQ ID NO: 414235 - DNA, 25 bp, Artificial
  probe
  misc_feature (1)..(25): SEQ ID NO: 5551; WAN024D3G; Start 157; Stop 181
tatgtaagttcttctggttccatga

SEQ ID NO: 414236 - DNA, 25 bp, Artificial
  probe
  misc_feature (1)..(25): SEQ ID NO: 5551; WAN024D3G; Start 161; Stop 185
taagttcttctggttccatgattgc

SEQ ID NO: 414237 - DNA, 25 bp, Artificial
  probe
  misc_feature (1)..(25): SEQ ID NO: 5551; WAN024D3G; Start 156; Stop 180
ttatgtaagttcttctggttccatg

SEQ ID NO: 414238 - DNA, 25 bp, Artificial
  probe
  misc_feature (1)..(25): SEQ ID NO: 5551; WAN024D3G; Start 151; Stop 175
tggtattatgtaagttcttctggtt

SEQ ID NO: 414239 - DNA, 25 bp, Artificial
  probe
  misc_feature (1)..(25): SEQ ID NO: 5551; WAN024D3G; Start 23; Stop 47
ctatgtactacagcgtagatgatgt

SEQ ID NO: 414240 - DNA, 25 bp, Artificial
  probe
  misc_feature (1)..(25): SEQ ID NO: 5551; WAN024D3G; Start 22; Stop 46
tctatgtactacagcgtagatgatg

SEQ ID NO: 414241 - DNA, 25 bp, Artificial
  probe
  misc_feature (1)..(25): SEQ ID NO: 5551; WAN024D3G; Start 155; Stop 179
attatgtaagttcttctggttccat

SEQ ID NO: 414242 - DNA, 25 bp, Artificial
  probe
  misc_feature (1)..(25): SEQ ID NO: 5551; WAN024D3G; Start 150; Stop 174
atggtattatgtaagttcttctggt

SEQ ID NO: 414243 - DNA, 25 bp, Artificial
  probe
  misc_feature (1)..(25): SEQ ID NO: 5551; WAN024D3G; Start 15; Stop 39
tgatgtatctatgtactacagcgta

SEQ ID NO: 414244 - DNA, 25 bp, Artificial
  probe
  misc_feature (1)..(25): SEQ ID NO: 5551; WAN024D3G; Start 132; Stop 156
ggtttatgacaagggagaatggtat

SEQ ID NO: 414245 - DNA, 25 bp, Artificial
  probe
  misc_feature (1)..(25): SEQ ID NO: 5551; WAN024D3G; Start 153; Stop 177
gtattatgtaagttcttctggttcc

SEQ ID NO: 414246 - DNA, 25 bp, Artificial
  probe
  misc_feature (1)..(25): SEQ ID NO: 5551; WAN024D3G; Start 152; Stop 176
ggtattatgtaagttcttctggttc

SEQ ID NO: 414247 - DNA, 25 bp, Artificial
  probe
  misc_feature (1)..(25): SEQ ID NO: 5551; WAN024D3G; Start 24; Stop 48
tatgtactacagcgtagatgatgta

SEQ ID NO: 414248 - DNA, 25 bp, Artificial
  probe
  misc_feature (1)..(25): SEQ ID NO: 5551; WAN024D3G; Start 154; Stop 178
tattatgtaagttcttctggttcca

SEQ ID NO: 414249 - DNA, 25 bp, Artificial
  probe
  misc_feature (1)..(25): SEQ ID NO: 5551; WAN024D3G; Start 17; Stop 41
atgtatctatgtactacagcgtaga

SEQ ID NO: 414250 - DNA, 25 bp, Artificial
  probe
  misc_feature (1)..(25): SEQ ID NO: 5551; WAN024D3G; Start 133; Stop 157
gtttatgacaagggagaatggtatt

SEQ ID NO: 414251 - DNA, 25 bp, Artificial
  probe
  misc_feature (1)..(25): SEQ ID NO: 5551; WAN024D3G; Start 16; Stop 40
gatgtatctatgtactacagcgtag

SEQ ID NO: 414252 - DNA, 25 bp, Artificial
  probe
  misc_feature (1)..(25): SEQ ID NO: 5551; WAN024D3G; Start 14; Stop 38
ttgatgtatctatgtactacagcgt

SEQ ID NO: 414253 - DNA, 25 bp, Artificial
  probe
  misc_feature (1)..(25): SEQ ID NO: 5551; WAN024D3G; Start 141; Stop 165
caagggagaatggtattatgtaagt

SEQ ID NO: 414254 - DNA, 25 bp, Artificial
  probe
  misc_feature (1)..(25): SEQ ID NO: 5551; WAN024D3G; Start 137; Stop 161
atgacaagggagaatggtattatgt

SEQ ID NO: 414255 - DNA, 25 bp, Artificial
  probe
  misc_feature (1)..(25): SEQ ID NO: 5551; WAN024D3G; Start 149; Stop 173
aatggtattatgtaagttcttctgg

SEQ ID NO: 414256 - DNA, 25 bp, Artificial
  probe
  misc_feature (1)..(25): SEQ ID NO: 5551; WAN024D3G; Start 131; Stop 155
gggtttatgacaagggagaatggta

SEQ ID NO: 414257 - DNA, 25 bp, Artificial
  probe
  misc_feature (1)..(25): SEQ ID NO: 5551; WAN024D3G; Start 136; Stop 160
tatgacaagggagaatggtattatg

SEQ ID NO: 414258 - DNA, 25 bp, Artificial
  probe
  misc_feature (1)..(25): SEQ ID NO: 5551; WAN024D3G; Start 138; Stop 162
tgacaagggagaatggtattatgta

SEQ ID NO: 414259 - DNA, 25 bp, Artificial
  probe
  misc_feature (1)..(25): SEQ ID NO: 5551; WAN024D3G; Start 97; Stop 121
tttaattgctcaggaaccatgaaag

SEQ ID NO: 414260 - DNA, 25 bp, Artificial
  probe
  misc_feature (1)..(25): SEQ ID NO: 5551; WAN024D3G; Start 96; Stop 120
ctttaattgctcaggaaccatgaaa

SEQ ID NO: 414261 - DNA, 25 bp, Artificial
  probe
  misc_feature (1)..(25): SEQ ID NO: 5551; WAN024D3G; Start 170; Stop 194
ctggttccatgattgcgaatgattg

SEQ ID NO: 414262 - DNA, 25 bp, Artificial
  probe
  misc_feature (1)..(25): SEQ ID NO: 5551; WAN024D3G; Start 169; Stop 193
tctggttccatgattgcgaatgatt

SEQ ID NO: 414263 - DNA, 25 bp, Artificial
  probe
  misc_feature (1)..(25): SEQ ID NO: 5551; WAN024D3G; Start 168; Stop 192
ttctggttccatgattgcgaatgat

SEQ ID NO: 414264 - DNA, 25 bp, Artificial
  probe
  misc_feature (1)..(25): SEQ ID NO: 5551; WAN024D3G; Start 165; Stop 189
ttcttctggttccatgattgcgaat

SEQ ID NO: 414265 - DNA, 25 bp, Artificial
  probe
  misc_feature (1)..(25): SEQ ID NO: 5552; WAN024D2Y; Start 89; Stop 113
atcttgtattcgctatctccactac

SEQ ID NO: 414266 - DNA, 25 bp, Artificial
  probe
  misc_feature (1)..(25): SEQ ID NO: 5552; WAN024D2Y; Start 87; Stop 111
caatcttgtattcgctatctccact

SEQ ID NO: 414267 - DNA, 25 bp, Artificial
  probe
  misc_feature (1)..(25): SEQ ID NO: 5552; WAN024D2Y; Start 86; Stop 110
tcaatcttgtattcgctatctccac

SEQ ID NO: 414268 - DNA, 25 bp, Artificial
  probe
  misc_feature (1)..(25): SEQ ID NO: 5552; WAN024D2Y; Start 85; Stop 109
gtcaatcttgtattcgctatctcca

SEQ ID NO: 414269 - DNA, 25 bp, Artificial
  probe
  misc_feature (1)..(25): SEQ ID NO: 5552; WAN024D2Y; Start 88; Stop 112
aatcttgtattcgctatctccacta

SEQ ID NO: 414270 - DNA, 25 bp, Artificial
  probe
  misc_feature (1)..(25): SEQ ID NO: 5552; WAN024D2Y; Start 32; Stop 56
aatccagtatccaagaagaggtcat

SEQ ID NO: 414271 - DNA, 25 bp, Artificial
  probe
  misc_feature (1)..(25): SEQ ID NO: 5552; WAN024D2Y; Start 173; Stop 197
ttatccagagtcacaactacagaag

SEQ ID NO: 414272 - DNA, 25 bp, Artificial
  probe
  misc_feature (1)..(25): SEQ ID NO: 5552; WAN024D2Y; Start 170; Stop 194
tgattatccagagtcacaactacag

SEQ ID NO: 414273 - DNA, 25 bp, Artificial
  probe
  misc_feature (1)..(25): SEQ ID NO: 5552; WAN024D2Y; Start 184; Stop 208
cacaactacagaagcataattgagc

SEQ ID NO: 414274 - DNA, 25 bp, Artificial
  probe
  misc_feature (1)..(25): SEQ ID NO: 5552; WAN024D2Y; Start 179; Stop 203
agagtcacaactacagaagcataat

SEQ ID NO: 414275 - DNA, 25 bp, Artificial
  probe
  misc_feature (1)..(25): SEQ ID NO: 5552; WAN024D2Y; Start 84; Stop 108
cgtcaatcttgtattcgctatctcc

SEQ ID NO: 414276 - DNA, 25 bp, Artificial
  probe
  misc_feature (1)..(25): SEQ ID NO: 5552; WAN024D2Y; Start 83; Stop 107
ccgtcaatcttgtattcgctatctc

SEQ ID NO: 414277 - DNA, 25 bp, Artificial
  probe
  misc_feature (1)..(25): SEQ ID NO: 5552; WAN024D2Y; Start 171; Stop 195
gattatccagagtcacaactacaga

SEQ ID NO: 414278 - DNA, 25 bp, Artificial
  probe
  misc_feature (1)..(25): SEQ ID NO: 5552; WAN024D2Y; Start 178; Stop 202
cagagtcacaactacagaagcataa

SEQ ID NO: 414279 - DNA, 25 bp, Artificial
  probe
  misc_feature (1)..(25): SEQ ID NO: 5552; WAN024D2Y; Start 182; Stop 206
gtcacaactacagaagcataattga

SEQ ID NO: 414280 - DNA, 25 bp, Artificial
  probe
  misc_feature (1)..(25): SEQ ID NO: 5552; WAN024D2Y; Start 181; Stop 205
agtcacaactacagaagcataattg

SEQ ID NO: 414281 - DNA, 25 bp, Artificial
  probe
  misc_feature (1)..(25): SEQ ID NO: 5552; WAN024D2Y; Start 172; Stop 196
attatccagagtcacaactacagaa

SEQ ID NO: 414282 - DNA, 25 bp, Artificial
  probe
  misc_feature (1)..(25): SEQ ID NO: 5552; WAN024D2Y; Start 169; Stop 193
atgattatccagagtcacaactaca

SEQ ID NO: 414283 - DNA, 25 bp, Artificial
  probe
  misc_feature (1)..(25): SEQ ID NO: 5552; WAN024D2Y; Start 31; Stop 55
caatccagtatccaagaagaggtca

SEQ ID NO: 414284 - DNA, 25 bp, Artificial
  probe
  misc_feature (1)..(25): SEQ ID NO: 5552; WAN024D2Y; Start 183; Stop 207
tcacaactacagaagcataattgag

SEQ ID NO: 414285 - DNA, 25 bp, Artificial
  probe
  misc_feature (1)..(25): SEQ ID NO: 5552; WAN024D2Y; Start 180; Stop 204
gagtcacaactacagaagcataatt

SEQ ID NO: 414286 - DNA, 25 bp, Artificial
  probe
  misc_feature (1)..(25): SEQ ID NO: 5552; WAN024D2Y; Start 90; Stop 114
tcttgtattcgctatctccactacg

SEQ ID NO: 414287 - DNA, 25 bp, Artificial
  probe
  misc_feature (1)..(25): SEQ ID NO: 5552; WAN024D2Y; Start 185; Stop 209
acaactacagaagcataattgagcg

SEQ ID NO: 414288 - DNA, 25 bp, Artificial
  probe
  misc_feature (1)..(25): SEQ ID NO: 5552; WAN024D2Y; Start 30; Stop 54
ccaatccagtatccaagaagaggtc

SEQ ID NO: 414289 - DNA, 25 bp, Artificial
  probe
  misc_feature (1)..(25): SEQ ID NO: 5552; WAN024D2Y; Start 174; Stop 198
tatccagagtcacaactacagaagc

SEQ ID NO: 414290 - DNA, 25 bp, Artificial
  probe
  misc_feature (1)..(25): SEQ ID NO: 5552; WAN024D2Y; Start 33; Stop 57
atccagtatccaagaagaggtcatg

SEQ ID NO: 414291 - DNA, 25 bp, Artificial
  probe
  misc_feature (1)..(25): SEQ ID NO: 5552; WAN024D2Y; Start 168; Stop 192
catgattatccagagtcacaactac

SEQ ID NO: 414292 - DNA, 25 bp, Artificial
  probe
  misc_feature (1)..(25): SEQ ID NO: 5552; WAN024D2Y; Start 177; Stop 201
ccagagtcacaactacagaagcata

SEQ ID NO: 414293 - DNA, 25 bp, Artificial
  probe
  misc_feature (1)..(25): SEQ ID NO: 5552; WAN024D2Y; Start 188; Stop 212
actacagaagcataattgagcggtt

SEQ ID NO: 414294 - DNA, 25 bp, Artificial
  probe
  misc_feature (1)..(25): SEQ ID NO: 5552; WAN024D2Y; Start 187; Stop 211
aactacagaagcataattgagcggt

SEQ ID NO: 414295 - DNA, 25 bp, Artificial
  probe
  misc_feature (1)..(25): SEQ ID NO: 5552; WAN024D2Y; Start 186; Stop 210
caactacagaagcataattgagcgg

SEQ ID NO: 414296 - DNA, 25 bp, Artificial
  probe
  misc_feature (1)..(25): SEQ ID NO: 5552; WAN024D2Y; Start 82; Stop 106
gccgtcaatcttgtattcgctatct

SEQ ID NO: 414297 - DNA, 25 bp, Artificial
  probe
  misc_feature (1)..(25): SEQ ID NO: 5552; WAN024D2Y; Start 75; Stop 99
ctttcttgccgtcaatcttgtattc

SEQ ID NO: 414298 - DNA, 25 bp, Artificial
  probe
  misc_feature (1)..(25): SEQ ID NO: 5553; WAN024GLP; Start 65; Stop 89
aaatagaaggagttgagcctgaaag

SEQ ID NO: 414299 - DNA, 25 bp, Artificial
  probe
  misc_feature (1)..(25): SEQ ID NO: 5553; WAN024GLP; Start 66; Stop 90
aatagaaggagttgagcctgaaagt

SEQ ID NO: 414300 - DNA, 25 bp, Artificial
  probe
  misc_feature (1)..(25): SEQ ID NO: 5553; WAN024GLP; Start 67; Stop 91
atagaaggagttgagcctgaaagtg

SEQ ID NO: 414301 - DNA, 25 bp, Artificial
  probe
  misc_feature (1)..(25): SEQ ID NO: 5553; WAN024GLP; Start 68; Stop 92
tagaaggagttgagcctgaaagtga

SEQ ID NO: 414302 - DNA, 25 bp, Artificial
  probe
  misc_feature (1)..(25): SEQ ID NO: 5553; WAN024GLP; Start 90; Stop 114
tgagaagcccagtactagacaattt

SEQ ID NO: 414303 - DNA, 25 bp, Artificial
  probe
  misc_feature (1)..(25): SEQ ID NO: 5553; WAN024GLP; Start 62; Stop 86
ctaaaatagaaggagttgagcctga

SEQ ID NO: 414304 - DNA, 25 bp, Artificial
  probe
  misc_feature (1)..(25): SEQ ID NO: 5553; WAN024GLP; Start 64; Stop 88
aaaatagaaggagttgagcctgaaa

SEQ ID NO: 414305 - DNA, 25 bp, Artificial
  probe
  misc_feature (1)..(25): SEQ ID NO: 5553; WAN024GLP; Start 63; Stop 87
taaaatagaaggagttgagcctgaa

SEQ ID NO: 414306 - DNA, 25 bp, Artificial
  probe
  misc_feature (1)..(25): SEQ ID NO: 5553; WAN024GLP; Start 89; Stop 113
gtgagaagcccagtactagacaatt

SEQ ID NO: 414307 - DNA, 25 bp, Artificial
  probe
  misc_feature (1)..(25): SEQ ID NO: 5553; WAN024GLP; Start 61; Stop 85
tctaaaatagaaggagttgagcctg

SEQ ID NO: 414308 - DNA, 25 bp, Artificial
  probe
  misc_feature (1)..(25): SEQ ID NO: 5553; WAN024GLP; Start 60; Stop 84
atctaaaatagaaggagttgagcct

SEQ ID NO: 414309 - DNA, 25 bp, Artificial
  probe
  misc_feature (1)..(25): SEQ ID NO: 5553; WAN024GLP; Start 71; Stop 95
aaggagttgagcctgaaagtgagaa

SEQ ID NO: 414310 - DNA, 25 bp, Artificial
  probe
  misc_feature (1)..(25): SEQ ID NO: 5553; WAN024GLP; Start 85; Stop 109
gaaagtgagaagcccagtactagac

SEQ ID NO: 414311 - DNA, 25 bp, Artificial
  probe
  misc_feature (1)..(25): SEQ ID NO: 5553; WAN024GLP; Start 222; Stop 246
agaactccctgttccaaagaagtag

SEQ ID NO: 414312 - DNA, 25 bp, Artificial
  probe
  misc_feature (1)..(25): SEQ ID NO: 5553; WAN024GLP; Start 184; Stop 208
cgcataaaacgtaatttcatttcac

SEQ ID NO: 414313 - DNA, 25 bp, Artificial
  probe
  misc_feature (1)..(25): SEQ ID NO: 5553; WAN024GLP; Start 183; Stop 207
tcgcataaaacgtaatttcatttca

SEQ ID NO: 414314 - DNA, 25 bp, Artificial
  probe
  misc_feature (1)..(25): SEQ ID NO: 5553; WAN024GLP; Start 221; Stop 245
cagaactccctgttccaaagaagta

SEQ ID NO: 414315 - DNA, 25 bp, Artificial
  probe
  misc_feature (1)..(25): SEQ ID NO: 5553; WAN024GLP; Start 59; Stop 83
tatctaaaatagaaggagttgagcc

SEQ ID NO: 414316 - DNA, 25 bp, Artificial
  probe
  misc_feature (1)..(25): SEQ ID NO: 5553; WAN024GLP; Start 84; Stop 108
tgaaagtgagaagcccagtactaga

SEQ ID NO: 414317 - DNA, 25 bp, Artificial
  probe
  misc_feature (1)..(25): SEQ ID NO: 5553; WAN024GLP; Start 83; Stop 107
ctgaaagtgagaagcccagtactag

SEQ ID NO: 414318 - DNA, 25 bp, Artificial
  probe
  misc_feature (1)..(25): SEQ ID NO: 5553; WAN024GLP; Start 72; Stop 96
aggagttgagcctgaaagtgagaag

SEQ ID NO: 414319 - DNA, 25 bp, Artificial
  probe
  misc_feature (1)..(25): SEQ ID NO: 5553; WAN024GLP; Start 70; Stop 94
gaaggagttgagcctgaaagtgaga

SEQ ID NO: 414320 - DNA, 25 bp, Artificial
  probe
  misc_feature (1)..(25): SEQ ID NO: 5553; WAN024GLP; Start 69; Stop 93
agaaggagttgagcctgaaagtgag

SEQ ID NO: 414321 - DNA, 25 bp, Artificial
  probe
  misc_feature (1)..(25): SEQ ID NO: 5553; WAN024GLP; Start 88; Stop 112
agtgagaagcccagtactagacaat

SEQ ID NO: 414322 - DNA, 25 bp, Artificial
  probe
  misc_feature (1)..(25): SEQ ID NO: 5553; WAN024GLP; Start 87; Stop 111
aagtgagaagcccagtactagacaa

SEQ ID NO: 414323 - DNA, 25 bp, Artificial
  probe
  misc_feature (1)..(25): SEQ ID NO: 5553; WAN024GLP; Start 86; Stop 110
aaagtgagaagcccagtactagaca

SEQ ID NO: 414324 - DNA, 25 bp, Artificial
  probe
  misc_feature (1)..(25): SEQ ID NO: 5553; WAN024GLP; Start 194; Stop 218
gtaatttcatttcacgggcgacgag

SEQ ID NO: 414325 - DNA, 25 bp, Artificial
  probe
  misc_feature (1)..(25): SEQ ID NO: 5553; WAN024GLP; Start 97; Stop 121
cccagtactagacaattttcatcca

SEQ ID NO: 414326 - DNA, 25 bp, Artificial
  probe
  misc_feature (1)..(25): SEQ ID NO: 5553; WAN024GLP; Start 94; Stop 118
aagcccagtactagacaattttcat

SEQ ID NO: 414327 - DNA, 25 bp, Artificial
  probe
  misc_feature (1)..(25): SEQ ID NO: 5553; WAN024GLP; Start 95; Stop 119
agcccagtactagacaattttcatc

SEQ ID NO: 414328 - DNA, 25 bp, Artificial
  probe
  misc_feature (1)..(25): SEQ ID NO: 5553; WAN024GLP; Start 91; Stop 115
gagaagcccagtactagacaatttt

SEQ ID NO: 414329 - DNA, 25 bp, Artificial
  probe
  misc_feature (1)..(25): SEQ ID NO: 5553; WAN024GLP; Start 92; Stop 116
agaagcccagtactagacaattttc

SEQ ID NO: 414330 - DNA, 25 bp, Artificial
  probe
  misc_feature (1)..(25): SEQ ID NO: 5553; WAN024GLP; Start 93; Stop 117
gaagcccagtactagacaattttca

SEQ ID NO: 414331 - DNA, 25 bp, Artificial
  probe
  misc_feature (1)..(25): SEQ ID NO: 5554; WAN024DTJ; Start 17; Stop 41
ttttacctctattttccttcttcca

SEQ ID NO: 414332 - DNA, 25 bp, Artificial
  probe
  misc_feature (1)..(25): SEQ ID NO: 5554; WAN024DTJ; Start 18; Stop 42
tttacctctattttccttcttccat

SEQ ID NO: 414333 - DNA, 25 bp, Artificial
  probe
  misc_feature (1)..(25): SEQ ID NO: 5554; WAN024DTJ; Start 19; Stop 43
ttacctctattttccttcttccata

SEQ ID NO: 414334 - DNA, 25 bp, Artificial
  probe
  misc_feature (1)..(25): SEQ ID NO: 5554; WAN024DTJ; Start 20; Stop 44
tacctctattttccttcttccatag

SEQ ID NO: 414335 - DNA, 25 bp, Artificial
  probe
  misc_feature (1)..(25): SEQ ID NO: 5554; WAN024DTJ; Start 21; Stop 45
acctctattttccttcttccataga

SEQ ID NO: 414336 - DNA, 25 bp, Artificial
  probe
  misc_feature (1)..(25): SEQ ID NO: 5554; WAN024DTJ; Start 22; Stop 46
cctctattttccttcttccatagaa

SEQ ID NO: 414337 - DNA, 25 bp, Artificial
  probe
  misc_feature (1)..(25): SEQ ID NO: 5554; WAN024DTJ; Start 23; Stop 47
ctctattttccttcttccatagaaa

SEQ ID NO: 414338 - DNA, 25 bp, Artificial
  probe
  misc_feature (1)..(25): SEQ ID NO: 5554; WAN024DTJ; Start 32; Stop 56
ccttcttccatagaaaattttacca

SEQ ID NO: 414339 - DNA, 25 bp, Artificial
  probe
  misc_feature (1)..(25): SEQ ID NO: 5554; WAN024DTJ; Start 31; Stop 55
tccttcttccatagaaaattttacc

SEQ ID NO: 414340 - DNA, 25 bp, Artificial
  probe
  misc_feature (1)..(25): SEQ ID NO: 5554; WAN024DTJ; Start 43; Stop 67
agaaaattttaccataaaagcgaaa

SEQ ID NO: 414341 - DNA, 25 bp, Artificial
  probe
  misc_feature (1)..(25): SEQ ID NO: 5554; WAN024DTJ; Start 24; Stop 48
tctattttccttcttccatagaaaa

SEQ ID NO: 414342 - DNA, 25 bp, Artificial
  probe
  misc_feature (1)..(25): SEQ ID NO: 5554; WAN024DTJ; Start 44; Stop 68
gaaaattttaccataaaagcgaaaa

SEQ ID NO: 414343 - DNA, 25 bp, Artificial
  probe
  misc_feature (1)..(25): SEQ ID NO: 5554; WAN024DTJ; Start 42; Stop 66
tagaaaattttaccataaaagcgaa

SEQ ID NO: 414344 - DNA, 25 bp, Artificial
  probe
  misc_feature (1)..(25): SEQ ID NO: 5554; WAN024DTJ; Start 40; Stop 64
catagaaaattttaccataaaagcg

SEQ ID NO: 414345 - DNA, 25 bp, Artificial
  probe
  misc_feature (1)..(25): SEQ ID NO: 5554; WAN024DTJ; Start 41; Stop 65
atagaaaattttaccataaaagcga

SEQ ID NO: 414346 - DNA, 25 bp, Artificial
  probe
  misc_feature (1)..(25): SEQ ID NO: 5554; WAN024DTJ; Start 33; Stop 57
cttcttccatagaaaattttaccat

SEQ ID NO: 414347 - DNA, 25 bp, Artificial
  probe
  misc_feature (1)..(25): SEQ ID NO: 5554; WAN024DTJ; Start 30; Stop 54
ttccttcttccatagaaaattttac

SEQ ID NO: 414348 - DNA, 25 bp, Artificial
  probe
  misc_feature (1)..(25): SEQ ID NO: 5554; WAN024DTJ; Start 39; Stop 63
ccatagaaaattttaccataaaagc

SEQ ID NO: 414349 - DNA, 25 bp, Artificial
  probe
  misc_feature (1)..(25): SEQ ID NO: 5554; WAN024DTJ; Start 28; Stop 52
ttttccttcttccatagaaaatttt

SEQ ID NO: 414350 - DNA, 25 bp, Artificial
  probe
  misc_feature (1)..(25): SEQ ID NO: 5555; WAN024DBK; Start 222; Stop 246
tgttattatggagtcagatggagtt

SEQ ID NO: 414351 - DNA, 25 bp, Artificial
  probe
  misc_feature (1)..(25): SEQ ID NO: 5555; WAN024DBK; Start 221; Stop 245
ttgttattatggagtcagatggagt

SEQ ID NO: 414352 - DNA, 25 bp, Artificial
  probe
  misc_feature (1)..(25): SEQ ID NO: 5555; WAN024DBK; Start 219; Stop 243
agttgttattatggagtcagatgga

SEQ ID NO: 414353 - DNA, 25 bp, Artificial
  probe
  misc_feature (1)..(25): SEQ ID NO: 5555; WAN024DBK; Start 220; Stop 244
gttgttattatggagtcagatggag

SEQ ID NO: 414354 - DNA, 25 bp, Artificial
  probe
  misc_feature (1)..(25): SEQ ID NO: 5555; WAN024DBK; Start 218; Stop 242
aagttgttattatggagtcagatgg

SEQ ID NO: 414355 - DNA, 25 bp, Artificial
  probe
  misc_feature (1)..(25): SEQ ID NO: 5555; WAN024DBK; Start 217; Stop 241
caagttgttattatggagtcagatg

SEQ ID NO: 414356 - DNA, 25 bp, Artificial
  probe
  misc_feature (1)..(25): SEQ ID NO: 5555; WAN024DBK; Start 59; Stop 83
aagacttcagaccattgattattga

SEQ ID NO: 414357 - DNA, 25 bp, Artificial
  probe
  misc_feature (1)..(25): SEQ ID NO: 5555; WAN024DBK; Start 216; Stop 240
tcaagttgttattatggagtcagat

SEQ ID NO: 414358 - DNA, 25 bp, Artificial
  probe
  misc_feature (1)..(25): SEQ ID NO: 5555; WAN024DBK; Start 215; Stop 239
atcaagttgttattatggagtcaga

SEQ ID NO: 414359 - DNA, 25 bp, Artificial
  probe
  misc_feature (1)..(25): SEQ ID NO: 5555; WAN024DBK; Start 223; Stop 247
gttattatggagtcagatggagtta

SEQ ID NO: 414360 - DNA, 25 bp, Artificial
  probe
  misc_feature (1)..(25): SEQ ID NO: 5555; WAN024DBK; Start 60; Stop 84
agacttcagaccattgattattgat

SEQ ID NO: 414361 - DNA, 25 bp, Artificial
  probe
  misc_feature (1)..(25): SEQ ID NO: 5555; WAN024DBK; Start 213; Stop 237
agatcaagttgttattatggagtca

SEQ ID NO: 414362 - DNA, 25 bp, Artificial
  probe
  misc_feature (1)..(25): SEQ ID NO: 5555; WAN024DBK; Start 118; Stop 142
tacaggcatttagttcagcagttta

SEQ ID NO: 414363 - DNA, 25 bp, Artificial
  probe
  misc_feature (1)..(25): SEQ ID NO: 5555; WAN024DBK; Start 123; Stop 147
gcatttagttcagcagtttagagat

SEQ ID NO: 414364 - DNA, 25 bp, Artificial
  probe
  misc_feature (1)..(25): SEQ ID NO: 5555; WAN024DBK; Start 114; Stop 138
tatttacaggcatttagttcagcag

SEQ ID NO: 414365 - DNA, 25 bp, Artificial
  probe
  misc_feature (1)..(25): SEQ ID NO: 5555; WAN024DBK; Start 126; Stop 150
tttagttcagcagtttagagatgtg

SEQ ID NO: 414366 - DNA, 25 bp, Artificial
  probe
  misc_feature (1)..(25): SEQ ID NO: 5555; WAN024DBK; Start 115; Stop 139
atttacaggcatttagttcagcagt

SEQ ID NO: 414367 - DNA, 25 bp, Artificial
  probe
  misc_feature (1)..(25): SEQ ID NO: 5555; WAN024DBK; Start 214; Stop 238
gatcaagttgttattatggagtcag

SEQ ID NO: 414368 - DNA, 25 bp, Artificial
  probe
  misc_feature (1)..(25): SEQ ID NO: 5555; WAN024DBK; Start 212; Stop 236
cagatcaagttgttattatggagtc

SEQ ID NO: 414369 - DNA, 25 bp, Artificial
  probe
  misc_feature (1)..(25): SEQ ID NO: 5555; WAN024DBK; Start 302; Stop 326
tcatcaatcaattagagggaggaaa

SEQ ID NO: 414370 - DNA, 25 bp, Artificial
  probe
  misc_feature (1)..(25): SEQ ID NO: 5555; WAN024DBK; Start 121; Stop 145
aggcatttagttcagcagtttagag

SEQ ID NO: 414371 - DNA, 25 bp, Artificial
  probe
  misc_feature (1)..(25): SEQ ID NO: 5555; WAN024DBK; Start 122; Stop 146
ggcatttagttcagcagtttagaga

SEQ ID NO: 414372 - DNA, 25 bp, Artificial
  probe
  misc_feature (1)..(25): SEQ ID NO: 5555; WAN024DBK; Start 117; Stop 141
ttacaggcatttagttcagcagttt

SEQ ID NO: 414373 - DNA, 25 bp, Artificial
  probe
  misc_feature (1)..(25): SEQ ID NO: 5555; WAN024DBK; Start 116; Stop 140
tttacaggcatttagttcagcagtt

SEQ ID NO: 414374 - DNA, 25 bp, Artificial
  probe
  misc_feature (1)..(25): SEQ ID NO: 5555; WAN024DBK; Start 301; Stop 325
atcatcaatcaattagagggaggaa

SEQ ID NO: 414375 - DNA, 25 bp, Artificial
  probe
  misc_feature (1)..(25): SEQ ID NO: 5555; WAN024DBK; Start 61; Stop 85
gacttcagaccattgattattgatc

SEQ ID NO: 414376 - DNA, 25 bp, Artificial
  probe
  misc_feature (1)..(25): SEQ ID NO: 5555; WAN024DBK; Start 224; Stop 248
ttattatggagtcagatggagttaa

SEQ ID NO: 414377 - DNA, 25 bp, Artificial
  probe
  misc_feature (1)..(25): SEQ ID NO: 5555; WAN024DBK; Start 209; Stop 233
tgacagatcaagttgttattatgga

SEQ ID NO: 414378 - DNA, 25 bp, Artificial
  probe
  misc_feature (1)..(25): SEQ ID NO: 5555; WAN024DBK; Start 113; Stop 137
atatttacaggcatttagttcagca

SEQ ID NO: 414379 - DNA, 25 bp, Artificial
  probe
  misc_feature (1)..(25): SEQ ID NO: 5555; WAN024DBK; Start 120; Stop 144
caggcatttagttcagcagtttaga

SEQ ID NO: 414380 - DNA, 25 bp, Artificial
  probe
  misc_feature (1)..(25): SEQ ID NO: 5555; WAN024DBK; Start 211; Stop 235
acagatcaagttgttattatggagt

SEQ ID NO: 414381 - DNA, 25 bp, Artificial
  probe
  misc_feature (1)..(25): SEQ ID NO: 5555; WAN024DBK; Start 119; Stop 143
acaggcatttagttcagcagtttag

SEQ ID NO: 414382 - DNA, 25 bp, Artificial
  probe
  misc_feature (1)..(25): SEQ ID NO: 5555; WAN024DBK; Start 127; Stop 151
ttagttcagcagtttagagatgtga

SEQ ID NO: 414383 - DNA, 25 bp, Artificial
  probe
  misc_feature (1)..(25): SEQ ID NO: 5556; WAN024DCP; Start 50; Stop 74
taacggatgaaatgattgaaagagc

SEQ ID NO: 414384 - DNA, 25 bp, Artificial
  probe
  misc_feature (1)..(25): SEQ ID NO: 5556; WAN024DCP; Start 19; Stop 43
atagaggaggtcagtatgggtaaat

SEQ ID NO: 414385 - DNA, 25 bp, Artificial
  probe
  misc_feature (1)..(25): SEQ ID NO: 5556; WAN024DCP; Start 18; Stop 42
aatagaggaggtcagtatgggtaaa

SEQ ID NO: 414386 - DNA, 25 bp, Artificial
  probe
  misc_feature (1)..(25): SEQ ID NO: 5556; WAN024DCP; Start 17; Stop 41
aaatagaggaggtcagtatgggtaa

SEQ ID NO: 414387 - DNA, 25 bp, Artificial
  probe
  misc_feature (1)..(25): SEQ ID NO: 5556; WAN024DCP; Start 20; Stop 44
tagaggaggtcagtatgggtaaatc

SEQ ID NO: 414388 - DNA, 25 bp, Artificial
  probe
  misc_feature (1)..(25): SEQ ID NO: 5556; WAN024DCP; Start 24; Stop 48
ggaggtcagtatgggtaaatcttta

SEQ ID NO: 414389 - DNA, 25 bp, Artificial
  probe
  misc_feature (1)..(25): SEQ ID NO: 5556; WAN024DCP; Start 23; Stop 47
aggaggtcagtatgggtaaatcttt

SEQ ID NO: 414390 - DNA, 25 bp, Artificial
  probe
  misc_feature (1)..(25): SEQ ID NO: 5556; WAN024DCP; Start 98; Stop 122
gtcctcctttgctagatgataatga

SEQ ID NO: 414391 - DNA, 25 bp, Artificial
  probe
  misc_feature (1)..(25): SEQ ID NO: 5556; WAN024DCP; Start 22; Stop 46
gaggaggtcagtatgggtaaatctt

SEQ ID NO: 414392 - DNA, 25 bp, Artificial
  probe
  misc_feature (1)..(25): SEQ ID NO: 5556; WAN024DCP; Start 97; Stop 121
ggtcctcctttgctagatgataatg

SEQ ID NO: 414393 - DNA, 25 bp, Artificial
  probe
  misc_feature (1)..(25): SEQ ID NO: 5556; WAN024DCP; Start 99; Stop 123
tcctcctttgctagatgataatgag

SEQ ID NO: 414394 - DNA, 25 bp, Artificial
  probe
  misc_feature (1)..(25): SEQ ID NO: 5556; WAN024DCP; Start 209; Stop 233
ttcaggtcgaaccatctattcataa

SEQ ID NO: 414395 - DNA, 25 bp, Artificial
  probe
  misc_feature (1)..(25): SEQ ID NO: 5556; WAN024DCP; Start 208; Stop 232
attcaggtcgaaccatctattcata

SEQ ID NO: 414396 - DNA, 25 bp, Artificial
  probe
  misc_feature (1)..(25): SEQ ID NO: 5556; WAN024DCP; Start 35; Stop 59
tgggtaaatctttattaacggatga

SEQ ID NO: 414397 - DNA, 25 bp, Artificial
  probe
  misc_feature (1)..(25): SEQ ID NO: 5556; WAN024DCP; Start 49; Stop 73
ttaacggatgaaatgattgaaagag

SEQ ID NO: 414398 - DNA, 25 bp, Artificial
  probe
  misc_feature (1)..(25): SEQ ID NO: 5556; WAN024DCP; Start 21; Stop 45
agaggaggtcagtatgggtaaatct

SEQ ID NO: 414399 - DNA, 25 bp, Artificial
  probe
  misc_feature (1)..(25): SEQ ID NO: 5556; WAN024DCP; Start 25; Stop 49
gaggtcagtatgggtaaatctttat

SEQ ID NO: 414400 - DNA, 25 bp, Artificial
  probe
  misc_feature (1)..(25): SEQ ID NO: 5556; WAN024DCP; Start 64; Stop 88
attgaaagagctaatagaggcgaaa

SEQ ID NO: 414401 - DNA, 25 bp, Artificial
  probe
  misc_feature (1)..(25): SEQ ID NO: 5556; WAN024DCP; Start 53; Stop 77
cggatgaaatgattgaaagagctaa

SEQ ID NO: 414402 - DNA, 25 bp, Artificial
  probe
  misc_feature (1)..(25): SEQ ID NO: 5556; WAN024DCP; Start 96; Stop 120
aggtcctcctttgctagatgataat

SEQ ID NO: 414403 - DNA, 25 bp, Artificial
  probe
  misc_feature (1)..(25): SEQ ID NO: 5556; WAN024DCP; Start 52; Stop 76
acggatgaaatgattgaaagagcta

SEQ ID NO: 414404 - DNA, 25 bp, Artificial
  probe
  misc_feature (1)..(25): SEQ ID NO: 5556; WAN024DCP; Start 63; Stop 87
gattgaaagagctaatagaggcgaa

SEQ ID NO: 414405 - DNA, 25 bp, Artificial
  probe
  misc_feature (1)..(25): SEQ ID NO: 5556; WAN024DCP; Start 61; Stop 85
atgattgaaagagctaatagaggcg

SEQ ID NO: 414406 - DNA, 25 bp, Artificial
  probe
  misc_feature (1)..(25): SEQ ID NO: 5556; WAN024DCP; Start 60; Stop 84
aatgattgaaagagctaatagaggc

SEQ ID NO: 414407 - DNA, 25 bp, Artificial
  probe
  misc_feature (1)..(25): SEQ ID NO: 5556; WAN024DCP; Start 26; Stop 50
aggtcagtatgggtaaatctttatt

SEQ ID NO: 414408 - DNA, 25 bp, Artificial
  probe
  misc_feature (1)..(25): SEQ ID NO: 5556; WAN024DCP; Start 51; Stop 75
aacggatgaaatgattgaaagagct

SEQ ID NO: 414409 - DNA, 25 bp, Artificial
  probe
  misc_feature (1)..(25): SEQ ID NO: 5556; WAN024DCP; Start 48; Stop 72
attaacggatgaaatgattgaaaga

SEQ ID NO: 414410 - DNA, 25 bp, Artificial
  probe
  misc_feature (1)..(25): SEQ ID NO: 5556; WAN024DCP; Start 95; Stop 119
caggtcctcctttgctagatgataa

SEQ ID NO: 414411 - DNA, 25 bp, Artificial
  probe
  misc_feature (1)..(25): SEQ ID NO: 5556; WAN024DCP; Start 90; Stop 114
aatttcaggtcctcctttgctagat

SEQ ID NO: 414412 - DNA, 25 bp, Artificial
  probe
  misc_feature (1)..(25): SEQ ID NO: 5556; WAN024DCP; Start 62; Stop 86
tgattgaaagagctaatagaggcga

SEQ ID NO: 414413 - DNA, 25 bp, Artificial
  probe
  misc_feature (1)..(25): SEQ ID NO: 5556; WAN024DCP; Start 36; Stop 60
gggtaaatctttattaacggatgaa

SEQ ID NO: 414414 - DNA, 25 bp, Artificial
  probe
  misc_feature (1)..(25): SEQ ID NO: 5556; WAN024DCP; Start 34; Stop 58
atgggtaaatctttattaacggatg

SEQ ID NO: 414415 - DNA, 25 bp, Artificial
  probe
  misc_feature (1)..(25): SEQ ID NO: 5556; WAN024DCP; Start 94; Stop 118
tcaggtcctcctttgctagatgata

SEQ ID NO: 414416 - DNA, 25 bp, Artificial
  probe
  misc_feature (1)..(25): SEQ ID NO: 5557; WAN024DWA; Start 45; Stop 69
gactgaccttaaccgaataatctgt

SEQ ID NO: 414417 - DNA, 25 bp, Artificial
  probe
  misc_feature (1)..(25): SEQ ID NO: 5557; WAN024DWA; Start 50; Stop 74
accttaaccgaataatctgtgtgag

SEQ ID NO: 414418 - DNA, 25 bp, Artificial
  probe
  misc_feature (1)..(25): SEQ ID NO: 5557; WAN024DWA; Start 49; Stop 73
gaccttaaccgaataatctgtgtga

SEQ ID NO: 414419 - DNA, 25 bp, Artificial
  probe
  misc_feature (1)..(25): SEQ ID NO: 5557; WAN024DWA; Start 47; Stop 71
ctgaccttaaccgaataatctgtgt

SEQ ID NO: 414420 - DNA, 25 bp, Artificial
  probe
  misc_feature (1)..(25): SEQ ID NO: 5557; WAN024DWA; Start 46; Stop 70
actgaccttaaccgaataatctgtg

SEQ ID NO: 414421 - DNA, 25 bp, Artificial
  probe
  misc_feature (1)..(25): SEQ ID NO: 5557; WAN024DWA; Start 48; Stop 72
tgaccttaaccgaataatctgtgtg

SEQ ID NO: 414422 - DNA, 25 bp, Artificial
  probe
  misc_feature (1)..(25): SEQ ID NO: 5557; WAN024DWA; Start 44; Stop 68
ggactgaccttaaccgaataatctg

SEQ ID NO: 414423 - DNA, 25 bp, Artificial
  probe
  misc_feature (1)..(25): SEQ ID NO: 5557; WAN024DWA; Start 51; Stop 75
ccttaaccgaataatctgtgtgagc

SEQ ID NO: 414424 - DNA, 25 bp, Artificial
  probe
  misc_feature (1)..(25): SEQ ID NO: 5557; WAN024DWA; Start 43; Stop 67
aggactgaccttaaccgaataatct

SEQ ID NO: 414425 - DNA, 25 bp, Artificial
  probe
  misc_feature (1)..(25): SEQ ID NO: 5557; WAN024DWA; Start 52; Stop 76
cttaaccgaataatctgtgtgagct

SEQ ID NO: 414426 - DNA, 25 bp, Artificial
  probe
  misc_feature (1)..(25): SEQ ID NO: 5557; WAN024DWA; Start 53; Stop 77
ttaaccgaataatctgtgtgagctg

SEQ ID NO: 414427 - DNA, 25 bp, Artificial
  probe
  misc_feature (1)..(25): SEQ ID NO: 5557; WAN024DWA; Start 233; Stop 257
aaggtattaggaccgaagtggataa

SEQ ID NO: 414428 - DNA, 25 bp, Artificial
  probe
  misc_feature (1)..(25): SEQ ID NO: 5557; WAN024DWA; Start 61; Stop 85
ataatctgtgtgagctgtcggataa

SEQ ID NO: 414429 - DNA, 25 bp, Artificial
  probe
  misc_feature (1)..(25): SEQ ID NO: 5557; WAN024DWA; Start 60; Stop 84
aataatctgtgtgagctgtcggata

SEQ ID NO: 414430 - DNA, 25 bp, Artificial
  probe
  misc_feature (1)..(25): SEQ ID NO: 5557; WAN024DWA; Start 54; Stop 78
taaccgaataatctgtgtgagctgt

SEQ ID NO: 414431 - DNA, 25 bp, Artificial
  probe
  misc_feature (1)..(25): SEQ ID NO: 5557; WAN024DWA; Start 59; Stop 83
gaataatctgtgtgagctgtcggat

SEQ ID NO: 414432 - DNA, 25 bp, Artificial
  probe
  misc_feature (1)..(25): SEQ ID NO: 5557; WAN024DWA; Start 234; Stop 258
aggtattaggaccgaagtggataaa

SEQ ID NO: 414433 - DNA, 25 bp, Artificial
  probe
  misc_feature (1)..(25): SEQ ID NO: 5557; WAN024DWA; Start 232; Stop 256
aaaggtattaggaccgaagtggata

SEQ ID NO: 414434 - DNA, 25 bp, Artificial
  probe
  misc_feature (1)..(25): SEQ ID NO: 5557; WAN024DWA; Start 55; Stop 79
aaccgaataatctgtgtgagctgtc

SEQ ID NO: 414435 - DNA, 25 bp, Artificial
  probe
  misc_feature (1)..(25): SEQ ID NO: 5557; WAN024DWA; Start 62; Stop 86
taatctgtgtgagctgtcggataaa

SEQ ID NO: 414436 - DNA, 25 bp, Artificial
  probe
  misc_feature (1)..(25): SEQ ID NO: 5557; WAN024DWA; Start 237; Stop 261
tattaggaccgaagtggataaaagc

SEQ ID NO: 414437 - DNA, 25 bp, Artificial
  probe
  misc_feature (1)..(25): SEQ ID NO: 5557; WAN024DWA; Start 236; Stop 260
gtattaggaccgaagtggataaaag

SEQ ID NO: 414438 - DNA, 25 bp, Artificial
  probe
  misc_feature (1)..(25): SEQ ID NO: 5557; WAN024DWA; Start 42; Stop 66
aaggactgaccttaaccgaataatc

SEQ ID NO: 414439 - DNA, 25 bp, Artificial
  probe
  misc_feature (1)..(25): SEQ ID NO: 5557; WAN024DWA; Start 41; Stop 65
caaggactgaccttaaccgaataat

SEQ ID NO: 414440 - DNA, 25 bp, Artificial
  probe
  misc_feature (1)..(25): SEQ ID NO: 5557; WAN024DWA; Start 63; Stop 87
aatctgtgtgagctgtcggataaag

SEQ ID NO: 414441 - DNA, 25 bp, Artificial
  probe
  misc_feature (1)..(25): SEQ ID NO: 5557; WAN024DWA; Start 40; Stop 64
ccaaggactgaccttaaccgaataa

SEQ ID NO: 414442 - DNA, 25 bp, Artificial
  probe
  misc_feature (1)..(25): SEQ ID NO: 5557; WAN024DWA; Start 235; Stop 259
ggtattaggaccgaagtggataaaa

SEQ ID NO: 414443 - DNA, 25 bp, Artificial
  probe
  misc_feature (1)..(25): SEQ ID NO: 5557; WAN024DWA; Start 229; Stop 253
ataaaaggtattaggaccgaagtgg

SEQ ID NO: 414444 - DNA, 25 bp, Artificial
  probe
  misc_feature (1)..(25): SEQ ID NO: 5557; WAN024DWA; Start 215; Stop 239
ccccattcttggtcataaaaggtat

SEQ ID NO: 414445 - DNA, 25 bp, Artificial
  probe
  misc_feature (1)..(25): SEQ ID NO: 5557; WAN024DWA; Start 228; Stop 252
cataaaaggtattaggaccgaagtg

SEQ ID NO: 414446 - DNA, 25 bp, Artificial
  probe
  misc_feature (1)..(25): SEQ ID NO: 5557; WAN024DWA; Start 227; Stop 251
tcataaaaggtattaggaccgaagt

SEQ ID NO: 414447 - DNA, 25 bp, Artificial
  probe
  misc_feature (1)..(25): SEQ ID NO: 5557; WAN024DWA; Start 230; Stop 254
taaaaggtattaggaccgaagtgga

SEQ ID NO: 414448 - DNA, 25 bp, Artificial
  probe
  misc_feature (1)..(25): SEQ ID NO: 5557; WAN024DWA; Start 226; Stop 250
gtcataaaaggtattaggaccgaag

SEQ ID NO: 414449 - DNA, 25 bp, Artificial
  probe
  misc_feature (1)..(25): SEQ ID NO: 5558; WAN024CBW; Start 483; Stop 507
agttgataatcatgtactgactctt

SEQ ID NO: 414450 - DNA, 25 bp, Artificial
  probe
  misc_feature (1)..(25): SEQ ID NO: 5558; WAN024CBW; Start 401; Stop 425
aggtgtctcaatctccttggataaa

SEQ ID NO: 414451 - DNA, 25 bp, Artificial
  probe
  misc_feature (1)..(25): SEQ ID NO: 5558; WAN024CBW; Start 152; Stop 176
tctactcaatagtatcactacctct

SEQ ID NO: 414452 - DNA, 25 bp, Artificial
  probe
  misc_feature (1)..(25): SEQ ID NO: 5558; WAN024CBW; Start 162; Stop 186
agtatcactacctctatattctgtg

SEQ ID NO: 414453 - DNA, 25 bp, Artificial
  probe
  misc_feature (1)..(25): SEQ ID NO: 5558; WAN024CBW; Start 29; Stop 53
agatgagtaatgtagataagattcg

SEQ ID NO: 414454 - DNA, 25 bp, Artificial
  probe
  misc_feature (1)..(25): SEQ ID NO: 5558; WAN024CBW; Start 665; Stop 689
caggctatttgttttcggttttact

SEQ ID NO: 414455 - DNA, 25 bp, Artificial
  probe
  misc_feature (1)..(25): SEQ ID NO: 5558; WAN024CBW; Start 666; Stop 690
aggctatttgttttcggttttactt

SEQ ID NO: 414456 - DNA, 25 bp, Artificial
  probe
  misc_feature (1)..(25): SEQ ID NO: 5558; WAN024CBW; Start 552; Stop 576
attcatcagattatttgacacaagt

SEQ ID NO: 414457 - DNA, 25 bp, Artificial
  probe
  misc_feature (1)..(25): SEQ ID NO: 5558; WAN024CBW; Start 667; Stop 691
ggctatttgttttcggttttacttc

SEQ ID NO: 414458 - DNA, 25 bp, Artificial
  probe
  misc_feature (1)..(25): SEQ ID NO: 5558; WAN024CBW; Start 151; Stop 175
atctactcaatagtatcactacctc

SEQ ID NO: 414459 - DNA, 25 bp, Artificial
  probe
  misc_feature (1)..(25): SEQ ID NO: 5558; WAN024CBW; Start 484; Stop 508
gttgataatcatgtactgactctta

SEQ ID NO: 414460 - DNA, 25 bp, Artificial
  probe
  misc_feature (1)..(25): SEQ ID NO: 5558; WAN024CBW; Start 554; Stop 578
tcatcagattatttgacacaagtac

SEQ ID NO: 414461 - DNA, 25 bp, Artificial
  probe
  misc_feature (1)..(25): SEQ ID NO: 5558; WAN024CBW; Start 668; Stop 692
gctatttgttttcggttttacttct

SEQ ID NO: 414462 - DNA, 25 bp, Artificial
  probe
  misc_feature (1)..(25): SEQ ID NO: 5558; WAN024CBW; Start 400; Stop 424
aaggtgtctcaatctccttggataa

SEQ ID NO: 414463 - DNA, 25 bp, Artificial
  probe
  misc_feature (1)..(25): SEQ ID NO: 5558; WAN024CBW; Start 664; Stop 688
gcaggctatttgttttcggttttac

SEQ ID NO: 414464 - DNA, 25 bp, Artificial
  probe
  misc_feature (1)..(25): SEQ ID NO: 5558; WAN024CBW; Start 402; Stop 426
ggtgtctcaatctccttggataaaa

SEQ ID NO: 414465 - DNA, 25 bp, Artificial
  probe
  misc_feature (1)..(25): SEQ ID NO: 5558; WAN024CBW; Start 553; Stop 577
ttcatcagattatttgacacaagta

SEQ ID NO: 414466 - DNA, 25 bp, Artificial
  probe
  misc_feature (1)..(25): SEQ ID NO: 5558; WAN024CBW; Start 403; Stop 427
gtgtctcaatctccttggataaaat

SEQ ID NO: 414467 - DNA, 25 bp, Artificial
  probe
  misc_feature (1)..(25): SEQ ID NO: 5558; WAN024CBW; Start 601; Stop 625
tttcttttcgcattggatgttatag

SEQ ID NO: 414468 - DNA, 25 bp, Artificial
  probe
  misc_feature (1)..(25): SEQ ID NO: 5558; WAN024CBW; Start 30; Stop 54
gatgagtaatgtagataagattcga

SEQ ID NO: 414469 - DNA, 25 bp, Artificial
  probe
  misc_feature (1)..(25): SEQ ID NO: 5558; WAN024CBW; Start 663; Stop 687
agcaggctatttgttttcggtttta

SEQ ID NO: 414470 - DNA, 25 bp, Artificial
  probe
  misc_feature (1)..(25): SEQ ID NO: 5558; WAN024CBW; Start 153; Stop 177
ctactcaatagtatcactacctcta

SEQ ID NO: 414471 - DNA, 25 bp, Artificial
  probe
  misc_feature (1)..(25): SEQ ID NO: 5558; WAN024CBW; Start 464; Stop 488
catctattctttatggtacagttga

SEQ ID NO: 414472 - DNA, 25 bp, Artificial
  probe
  misc_feature (1)..(25): SEQ ID NO: 5558; WAN024CBW; Start 481; Stop 505
acagttgataatcatgtactgactc

SEQ ID NO: 414473 - DNA, 25 bp, Artificial
  probe
  misc_feature (1)..(25): SEQ ID NO: 5558; WAN024CBW; Start 600; Stop 624
ttttcttttcgcattggatgttata

SEQ ID NO: 414474 - DNA, 25 bp, Artificial
  probe
  misc_feature (1)..(25): SEQ ID NO: 5558; WAN024CBW; Start 482; Stop 506
cagttgataatcatgtactgactct

SEQ ID NO: 414475 - DNA, 25 bp, Artificial
  probe
  misc_feature (1)..(25): SEQ ID NO: 5558; WAN024CBW; Start 662; Stop 686
aagcaggctatttgttttcggtttt

SEQ ID NO: 414476 - DNA, 25 bp, Artificial
  probe
  misc_feature (1)..(25): SEQ ID NO: 5558; WAN024CBW; Start 661; Stop 685
aaagcaggctatttgttttcggttt

SEQ ID NO: 414477 - DNA, 25 bp, Artificial
  probe
  misc_feature (1)..(25): SEQ ID NO: 5558; WAN024CBW; Start 485; Stop 509
ttgataatcatgtactgactcttat

SEQ ID NO: 414478 - DNA, 25 bp, Artificial
  probe
  misc_feature (1)..(25): SEQ ID NO: 5558; WAN024CBW; Start 473; Stop 497
tttatggtacagttgataatcatgt

SEQ ID NO: 414479 - DNA, 25 bp, Artificial
  probe
  misc_feature (1)..(25): SEQ ID NO: 5558; WAN024CBW; Start 470; Stop 494
ttctttatggtacagttgataatca

SEQ ID NO: 414480 - DNA, 25 bp, Artificial
  probe
  misc_feature (1)..(25): SEQ ID NO: 5558; WAN024CBW; Start 404; Stop 428
tgtctcaatctccttggataaaata

SEQ ID NO: 414481 - DNA, 25 bp, Artificial
  probe
  misc_feature (1)..(25): SEQ ID NO: 5558; WAN024CBW; Start 161; Stop 185
tagtatcactacctctatattctgt

SEQ ID NO: 414482 - DNA, 25 bp, Artificial
  probe
  misc_feature (1)..(25): SEQ ID NO: 5559; WAN024DUP; Start 160; Stop 184
agtaagtgggatatcaaggacagac

SEQ ID NO: 414483 - DNA, 25 bp, Artificial
  probe
  misc_feature (1)..(25): SEQ ID NO: 5559; WAN024DUP; Start 159; Stop 183
cagtaagtgggatatcaaggacaga

SEQ ID NO: 414484 - DNA, 25 bp, Artificial
  probe
  misc_feature (1)..(25): SEQ ID NO: 5559; WAN024DUP; Start 38; Stop 62
ccagtatacatttgttcacgggtac

SEQ ID NO: 414485 - DNA, 25 bp, Artificial
  probe
  misc_feature (1)..(25): SEQ ID NO: 5559; WAN024DUP; Start 158; Stop 182
acagtaagtgggatatcaaggacag

SEQ ID NO: 414486 - DNA, 25 bp, Artificial
  probe
  misc_feature (1)..(25): SEQ ID NO: 5559; WAN024DUP; Start 157; Stop 181
gacagtaagtgggatatcaaggaca

SEQ ID NO: 414487 - DNA, 25 bp, Artificial
  probe
  misc_feature (1)..(25): SEQ ID NO: 5559; WAN024DUP; Start 39; Stop 63
cagtatacatttgttcacgggtacg

SEQ ID NO: 414488 - DNA, 25 bp, Artificial
  probe
  misc_feature (1)..(25): SEQ ID NO: 5559; WAN024DUP; Start 162; Stop 186
taagtgggatatcaaggacagactg

SEQ ID NO: 414489 - DNA, 25 bp, Artificial
  probe
  misc_feature (1)..(25): SEQ ID NO: 5559; WAN024DUP; Start 161; Stop 185
gtaagtgggatatcaaggacagact

SEQ ID NO: 414490 - DNA, 25 bp, Artificial
  probe
  misc_feature (1)..(25): SEQ ID NO: 5559; WAN024DUP; Start 299; Stop 323
gtcttggtgttttcttggatgaatt

SEQ ID NO: 414491 - DNA, 25 bp, Artificial
  probe
  misc_feature (1)..(25): SEQ ID NO: 5559; WAN024DUP; Start 156; Stop 180
tgacagtaagtgggatatcaaggac

SEQ ID NO: 414492 - DNA, 25 bp, Artificial
  probe
  misc_feature (1)..(25): SEQ ID NO: 5559; WAN024DUP; Start 149; Stop 173
cgcattttgacagtaagtgggatat

SEQ ID NO: 414493 - DNA, 25 bp, Artificial
  probe
  misc_feature (1)..(25): SEQ ID NO: 5559; WAN024DUP; Start 177; Stop 201
ggacagactggaccttgttgatgat

SEQ ID NO: 414494 - DNA, 25 bp, Artificial
  probe
  misc_feature (1)..(25): SEQ ID NO: 5559; WAN024DUP; Start 298; Stop 322
ggtcttggtgttttcttggatgaat

SEQ ID NO: 414495 - DNA, 25 bp, Artificial
  probe
  misc_feature (1)..(25): SEQ ID NO: 5559; WAN024DUP; Start 40; Stop 64
agtatacatttgttcacgggtacgg

SEQ ID NO: 414496 - DNA, 25 bp, Artificial
  probe
  misc_feature (1)..(25): SEQ ID NO: 5559; WAN024DUP; Start 293; Stop 317
atatcggtcttggtgttttcttgga

SEQ ID NO: 414497 - DNA, 25 bp, Artificial
  probe
  misc_feature (1)..(25): SEQ ID NO: 5559; WAN024DUP; Start 294; Stop 318
tatcggtcttggtgttttcttggat

SEQ ID NO: 414498 - DNA, 25 bp, Artificial
  probe
  misc_feature (1)..(25): SEQ ID NO: 5559; WAN024DUP; Start 37; Stop 61
gccagtatacatttgttcacgggta

SEQ ID NO: 414499 - DNA, 25 bp, Artificial
  probe
  misc_feature (1)..(25): SEQ ID NO: 5559; WAN024DUP; Start 148; Stop 172
acgcattttgacagtaagtgggata

SEQ ID NO: 414500 - DNA, 25 bp, Artificial
  probe
  misc_feature (1)..(25): SEQ ID NO: 5559; WAN024DUP; Start 147; Stop 171
tacgcattttgacagtaagtgggat

SEQ ID NO: 414501 - DNA, 25 bp, Artificial
  probe
  misc_feature (1)..(25): SEQ ID NO: 5559; WAN024DUP; Start 154; Stop 178
tttgacagtaagtgggatatcaagg

SEQ ID NO: 414502 - DNA, 25 bp, Artificial
  probe
  misc_feature (1)..(25): SEQ ID NO: 5559; WAN024DUP; Start 155; Stop 179
ttgacagtaagtgggatatcaagga

SEQ ID NO: 414503 - DNA, 25 bp, Artificial
  probe
  misc_feature (1)..(25): SEQ ID NO: 5559; WAN024DUP; Start 150; Stop 174
gcattttgacagtaagtgggatatc

SEQ ID NO: 414504 - DNA, 25 bp, Artificial
  probe
  misc_feature (1)..(25): SEQ ID NO: 5559; WAN024DUP; Start 247; Stop 271
gttcttcacgattttgttgacaggg

SEQ ID NO: 414505 - DNA, 25 bp, Artificial
  probe
  misc_feature (1)..(25): SEQ ID NO: 5559; WAN024DUP; Start 176; Stop 200
aggacagactggaccttgttgatga

SEQ ID NO: 414506 - DNA, 25 bp, Artificial
  probe
  misc_feature (1)..(25): SEQ ID NO: 5559; WAN024DUP; Start 163; Stop 187
aagtgggatatcaaggacagactgg

SEQ ID NO: 414507 - DNA, 25 bp, Artificial
  probe
  misc_feature (1)..(25): SEQ ID NO: 5559; WAN024DUP; Start 151; Stop 175
cattttgacagtaagtgggatatca

SEQ ID NO: 414508 - DNA, 25 bp, Artificial
  probe
  misc_feature (1)..(25): SEQ ID NO: 5559; WAN024DUP; Start 292; Stop 316
gatatcggtcttggtgttttcttgg

SEQ ID NO: 414509 - DNA, 25 bp, Artificial
  probe
  misc_feature (1)..(25): SEQ ID NO: 5559; WAN024DUP; Start 302; Stop 326
ttggtgttttcttggatgaattctg

SEQ ID NO: 414510 - DNA, 25 bp, Artificial
  probe
  misc_feature (1)..(25): SEQ ID NO: 5559; WAN024DUP; Start 301; Stop 325
cttggtgttttcttggatgaattct

SEQ ID NO: 414511 - DNA, 25 bp, Artificial
  probe
  misc_feature (1)..(25): SEQ ID NO: 5559; WAN024DUP; Start 300; Stop 324
tcttggtgttttcttggatgaattc

SEQ ID NO: 414512 - DNA, 25 bp, Artificial
  probe
  misc_feature (1)..(25): SEQ ID NO: 5559; WAN024DUP; Start 295; Stop 319
atcggtcttggtgttttcttggatg

SEQ ID NO: 414513 - DNA, 25 bp, Artificial
  probe
  misc_feature (1)..(25): SEQ ID NO: 5559; WAN024DUP; Start 146; Stop 170
gtacgcattttgacagtaagtggga

SEQ ID NO: 414514 - DNA, 25 bp, Artificial
  probe
  misc_feature (1)..(25): SEQ ID NO: 5559; WAN024DUP; Start 41; Stop 65
gtatacatttgttcacgggtacggc

SEQ ID NO: 414515 - DNA, 25 bp, Artificial
  probe
  misc_feature (1)..(25): SEQ ID NO: 5560; WAN024BIN; Start 4; Stop 28
ggcaagatgtttgaagaatttccta

SEQ ID NO: 414516 - DNA, 25 bp, Artificial
  probe
  misc_feature (1)..(25): SEQ ID NO: 5560; WAN024BIN; Start 1; Stop 25
ttgggcaagatgtttgaagaatttc

SEQ ID NO: 414517 - DNA, 25 bp, Artificial
  probe
  misc_feature (1)..(25): SEQ ID NO: 5560; WAN024BIN; Start 97; Stop 121
ctagatgactgctttccaacaactc

SEQ ID NO: 414518 - DNA, 25 bp, Artificial
  probe
  misc_feature (1)..(25): SEQ ID NO: 5560; WAN024BIN; Start 5; Stop 29
gcaagatgtttgaagaatttcctaa

SEQ ID NO: 414519 - DNA, 25 bp, Artificial
  probe
  misc_feature (1)..(25): SEQ ID NO: 5560; WAN024BIN; Start 3; Stop 27
gggcaagatgtttgaagaatttcct

SEQ ID NO: 414520 - DNA, 25 bp, Artificial
  probe
  misc_feature (1)..(25): SEQ ID NO: 5560; WAN024BIN; Start 2; Stop 26
tgggcaagatgtttgaagaatttcc

SEQ ID NO: 414521 - DNA, 25 bp, Artificial
  probe
  misc_feature (1)..(25): SEQ ID NO: 5560; WAN024BIN; Start 98; Stop 122
tagatgactgctttccaacaactcc

SEQ ID NO: 414522 - DNA, 25 bp, Artificial
  probe
  misc_feature (1)..(25): SEQ ID NO: 5560; WAN024BIN; Start 6; Stop 30
caagatgtttgaagaatttcctaaa

SEQ ID NO: 414523 - DNA, 25 bp, Artificial
  probe
  misc_feature (1)..(25): SEQ ID NO: 5560; WAN024BIN; Start 105; Stop 129
ctgctttccaacaactcccatccta

SEQ ID NO: 414524 - DNA, 25 bp, Artificial
  probe
  misc_feature (1)..(25): SEQ ID NO: 5560; WAN024BIN; Start 8; Stop 32
agatgtttgaagaatttcctaaact

SEQ ID NO: 414525 - DNA, 25 bp, Artificial
  probe
  misc_feature (1)..(25): SEQ ID NO: 5560; WAN024BIN; Start 9; Stop 33
gatgtttgaagaatttcctaaactc

SEQ ID NO: 414526 - DNA, 25 bp, Artificial
  probe
  misc_feature (1)..(25): SEQ ID NO: 5560; WAN024BIN; Start 101; Stop 125
atgactgctttccaacaactcccat

SEQ ID NO: 414527 - DNA, 25 bp, Artificial
  probe
  misc_feature (1)..(25): SEQ ID NO: 5560; WAN024BIN; Start 7; Stop 31
aagatgtttgaagaatttcctaaac

SEQ ID NO: 414528 - DNA, 25 bp, Artificial
  probe
  misc_feature (1)..(25): SEQ ID NO: 5560; WAN024BIN; Start 99; Stop 123
agatgactgctttccaacaactccc

SEQ ID NO: 414529 - DNA, 25 bp, Artificial
  probe
  misc_feature (1)..(25): SEQ ID NO: 5561; WAN024EX6; Start 198; Stop 222
ccgtatctggattcttctctgtcaa

SEQ ID NO: 414530 - DNA, 25 bp, Artificial
  probe
  misc_feature (1)..(25): SEQ ID NO: 5561; WAN024EX6; Start 118; Stop 142
aaccatgtcaaccagttcatcaatt

SEQ ID NO: 414531 - DNA, 25 bp, Artificial
  probe
  misc_feature (1)..(25): SEQ ID NO: 5561; WAN024EX6; Start 119; Stop 143
accatgtcaaccagttcatcaattc

SEQ ID NO: 414532 - DNA, 25 bp, Artificial
  probe
  misc_feature (1)..(25): SEQ ID NO: 5561; WAN024EX6; Start 199; Stop 223
cgtatctggattcttctctgtcaaa

SEQ ID NO: 414533 - DNA, 25 bp, Artificial
  probe
  misc_feature (1)..(25): SEQ ID NO: 5561; WAN024EX6; Start 176; Stop 200
gcaccgatgataaagtaataatccg

SEQ ID NO: 414534 - DNA, 25 bp, Artificial
  probe
  misc_feature (1)..(25): SEQ ID NO: 5561; WAN024EX6; Start 175; Stop 199
ggcaccgatgataaagtaataatcc

SEQ ID NO: 414535 - DNA, 25 bp, Artificial
  probe
  misc_feature (1)..(25): SEQ ID NO: 5561; WAN024EX6; Start 177; Stop 201
caccgatgataaagtaataatccgt

SEQ ID NO: 414536 - DNA, 25 bp, Artificial
  probe
  misc_feature (1)..(25): SEQ ID NO: 5561; WAN024EX6; Start 150; Stop 174
acttaggcagatagtcaaccatgtc

SEQ ID NO: 414537 - DNA, 25 bp, Artificial
  probe
  misc_feature (1)..(25): SEQ ID NO: 5561; WAN024EX6; Start 146; Stop 170
taccacttaggcagatagtcaacca

SEQ ID NO: 414538 - DNA, 25 bp, Artificial
  probe
  misc_feature (1)..(25): SEQ ID NO: 5561; WAN024EX6; Start 145; Stop 169
gtaccacttaggcagatagtcaacc

SEQ ID NO: 414539 - DNA, 25 bp, Artificial
  probe
  misc_feature (1)..(25): SEQ ID NO: 5561; WAN024EX6; Start 149; Stop 173
cacttaggcagatagtcaaccatgt

SEQ ID NO: 414540 - DNA, 25 bp, Artificial
  probe
  misc_feature (1)..(25): SEQ ID NO: 5561; WAN024EX6; Start 121; Stop 145
catgtcaaccagttcatcaattcgg

SEQ ID NO: 414541 - DNA, 25 bp, Artificial
  probe
  misc_feature (1)..(25): SEQ ID NO: 5561; WAN024EX6; Start 120; Stop 144
ccatgtcaaccagttcatcaattcg

SEQ ID NO: 414542 - DNA, 25 bp, Artificial
  probe
  misc_feature (1)..(25): SEQ ID NO: 5561; WAN024EX6; Start 174; Stop 198
cggcaccgatgataaagtaataatc

SEQ ID NO: 414543 - DNA, 25 bp, Artificial
  probe
  misc_feature (1)..(25): SEQ ID NO: 5561; WAN024EX6; Start 197; Stop 221
tccgtatctggattcttctctgtca

SEQ ID NO: 414544 - DNA, 25 bp, Artificial
  probe
  misc_feature (1)..(25): SEQ ID NO: 5561; WAN024EX6; Start 151; Stop 175
cttaggcagatagtcaaccatgtcg

SEQ ID NO: 414545 - DNA, 25 bp, Artificial
  probe
  misc_feature (1)..(25): SEQ ID NO: 5561; WAN024EX6; Start 124; Stop 148
gtcaaccagttcatcaattcggtac

SEQ ID NO: 414546 - DNA, 25 bp, Artificial
  probe
  misc_feature (1)..(25): SEQ ID NO: 5561; WAN024EX6; Start 147; Stop 171
accacttaggcagatagtcaaccat

SEQ ID NO: 414547 - DNA, 25 bp, Artificial
  probe
  misc_feature (1)..(25): SEQ ID NO: 5561; WAN024EX6; Start 123; Stop 147
tgtcaaccagttcatcaattcggta

SEQ ID NO: 414548 - DNA, 25 bp, Artificial
  probe
  misc_feature (1)..(25): SEQ ID NO: 5561; WAN024EX6; Start 148; Stop 172
ccacttaggcagatagtcaaccatg

SEQ ID NO: 414549 - DNA, 25 bp, Artificial
  probe
  misc_feature (1)..(25): SEQ ID NO: 5561; WAN024EX6; Start 178; Stop 202
accgatgataaagtaataatccgta

SEQ ID NO: 414550 - DNA, 25 bp, Artificial
  probe
  misc_feature (1)..(25): SEQ ID NO: 5561; WAN024EX6; Start 263; Stop 287
tccaactcaatggtttcaatgacta

SEQ ID NO: 414551 - DNA, 25 bp, Artificial
  probe
  misc_feature (1)..(25): SEQ ID NO: 5561; WAN024EX6; Start 264; Stop 288
ccaactcaatggtttcaatgactag

SEQ ID NO: 414552 - DNA, 25 bp, Artificial
  probe
  misc_feature (1)..(25): SEQ ID NO: 5561; WAN024EX6; Start 122; Stop 146
atgtcaaccagttcatcaattcggt

SEQ ID NO: 414553 - DNA, 25 bp, Artificial
  probe
  misc_feature (1)..(25): SEQ ID NO: 5561; WAN024EX6; Start 262; Stop 286
ctccaactcaatggtttcaatgact

SEQ ID NO: 414554 - DNA, 25 bp, Artificial
  probe
  misc_feature (1)..(25): SEQ ID NO: 5561; WAN024EX6; Start 196; Stop 220
atccgtatctggattcttctctgtc

SEQ ID NO: 414555 - DNA, 25 bp, Artificial
  probe
  misc_feature (1)..(25): SEQ ID NO: 5561; WAN024EX6; Start 117; Stop 141
gaaccatgtcaaccagttcatcaat

SEQ ID NO: 414556 - DNA, 25 bp, Artificial
  probe
  misc_feature (1)..(25): SEQ ID NO: 5561; WAN024EX6; Start 152; Stop 176
ttaggcagatagtcaaccatgtcgg

SEQ ID NO: 414557 - DNA, 25 bp, Artificial
  probe
  misc_feature (1)..(25): SEQ ID NO: 5561; WAN024EX6; Start 179; Stop 203
ccgatgataaagtaataatccgtat

SEQ ID NO: 414558 - DNA, 25 bp, Artificial
  probe
  misc_feature (1)..(25): SEQ ID NO: 5561; WAN024EX6; Start 60; Stop 84
agataactggataggaagtccctac

SEQ ID NO: 414559 - DNA, 25 bp, Artificial
  probe
  misc_feature (1)..(25): SEQ ID NO: 5561; WAN024EX6; Start 59; Stop 83
cagataactggataggaagtcccta

SEQ ID NO: 414560 - DNA, 25 bp, Artificial
  probe
  misc_feature (1)..(25): SEQ ID NO: 5561; WAN024EX6; Start 200; Stop 224
gtatctggattcttctctgtcaaaa

SEQ ID NO: 414561 - DNA, 25 bp, Artificial
  probe
  misc_feature (1)..(25): SEQ ID NO: 5561; WAN024EX6; Start 61; Stop 85
gataactggataggaagtccctacc

SEQ ID NO: 414562 - DNA, 25 bp, Artificial
  probe
  misc_feature (1)..(25): SEQ ID NO: 5562; WAN024FEK; Start 199; Stop 223
atagtagttaccgacatattctgcg

SEQ ID NO: 414563 - DNA, 25 bp, Artificial
  probe
  misc_feature (1)..(25): SEQ ID NO: 5562; WAN024FEK; Start 213; Stop 237
catattctgcgtattccaacatctg

SEQ ID NO: 414564 - DNA, 25 bp, Artificial
  probe
  misc_feature (1)..(25): SEQ ID NO: 5562; WAN024FEK; Start 211; Stop 235
gacatattctgcgtattccaacatc

SEQ ID NO: 414565 - DNA, 25 bp, Artificial
  probe
  misc_feature (1)..(25): SEQ ID NO: 5562; WAN024FEK; Start 212; Stop 236
acatattctgcgtattccaacatct

SEQ ID NO: 414566 - DNA, 25 bp, Artificial
  probe
  misc_feature (1)..(25): SEQ ID NO: 5562; WAN024FEK; Start 203; Stop 227
tagttaccgacatattctgcgtatt

SEQ ID NO: 414567 - DNA, 25 bp, Artificial
  probe
  misc_feature (1)..(25): SEQ ID NO: 5562; WAN024FEK; Start 202; Stop 226
gtagttaccgacatattctgcgtat

SEQ ID NO: 414568 - DNA, 25 bp, Artificial
  probe
  misc_feature (1)..(25): SEQ ID NO: 5562; WAN024FEK; Start 192; Stop 216
gagttccatagtagttaccgacata

SEQ ID NO: 414569 - DNA, 25 bp, Artificial
  probe
  misc_feature (1)..(25): SEQ ID NO: 5562; WAN024FEK; Start 214; Stop 238
atattctgcgtattccaacatctgt

SEQ ID NO: 414570 - DNA, 25 bp, Artificial
  probe
  misc_feature (1)..(25): SEQ ID NO: 5562; WAN024FEK; Start 204; Stop 228
agttaccgacatattctgcgtattc

SEQ ID NO: 414571 - DNA, 25 bp, Artificial
  probe
  misc_feature (1)..(25): SEQ ID NO: 5562; WAN024FEK; Start 198; Stop 222
catagtagttaccgacatattctgc

SEQ ID NO: 414572 - DNA, 25 bp, Artificial
  probe
  misc_feature (1)..(25): SEQ ID NO: 5562; WAN024FEK; Start 181; Stop 205
ataggtcagaggagttccatagtag

SEQ ID NO: 414573 - DNA, 25 bp, Artificial
  probe
  misc_feature (1)..(25): SEQ ID NO: 5562; WAN024FEK; Start 185; Stop 209
gtcagaggagttccatagtagttac

SEQ ID NO: 414574 - DNA, 25 bp, Artificial
  probe
  misc_feature (1)..(25): SEQ ID NO: 5562; WAN024FEK; Start 180; Stop 204
cataggtcagaggagttccatagta

SEQ ID NO: 414575 - DNA, 25 bp, Artificial
  probe
  misc_feature (1)..(25): SEQ ID NO: 5562; WAN024FEK; Start 186; Stop 210
tcagaggagttccatagtagttacc

SEQ ID NO: 414576 - DNA, 25 bp, Artificial
  probe
  misc_feature (1)..(25): SEQ ID NO: 5562; WAN024FEK; Start 184; Stop 208
ggtcagaggagttccatagtagtta

SEQ ID NO: 414577 - DNA, 25 bp, Artificial
  probe
  misc_feature (1)..(25): SEQ ID NO: 5562; WAN024FEK; Start 200; Stop 224
tagtagttaccgacatattctgcgt

SEQ ID NO: 414578 - DNA, 25 bp, Artificial
  probe
  misc_feature (1)..(25): SEQ ID NO: 5562; WAN024FEK; Start 201; Stop 225
agtagttaccgacatattctgcgta

SEQ ID NO: 414579 - DNA, 25 bp, Artificial
  probe
  misc_feature (1)..(25): SEQ ID NO: 5562; WAN024FEK; Start 215; Stop 239
tattctgcgtattccaacatctgtc

SEQ ID NO: 414580 - DNA, 25 bp, Artificial
  probe
  misc_feature (1)..(25): SEQ ID NO: 5562; WAN024FEK; Start 193; Stop 217
agttccatagtagttaccgacatat

SEQ ID NO: 414581 - DNA, 25 bp, Artificial
  probe
  misc_feature (1)..(25): SEQ ID NO: 5562; WAN024FEK; Start 182; Stop 206
taggtcagaggagttccatagtagt

SEQ ID NO: 414582 - DNA, 25 bp, Artificial
  probe
  misc_feature (1)..(25): SEQ ID NO: 5562; WAN024FEK; Start 210; Stop 234
cgacatattctgcgtattccaacat

SEQ ID NO: 414583 - DNA, 25 bp, Artificial
  probe
  misc_feature (1)..(25): SEQ ID NO: 5562; WAN024FEK; Start 197; Stop 221
ccatagtagttaccgacatattctg

SEQ ID NO: 414584 - DNA, 25 bp, Artificial
  probe
  misc_feature (1)..(25): SEQ ID NO: 5562; WAN024FEK; Start 205; Stop 229
gttaccgacatattctgcgtattcc

SEQ ID NO: 414585 - DNA, 25 bp, Artificial
  probe
  misc_feature (1)..(25): SEQ ID NO: 5562; WAN024FEK; Start 196; Stop 220
tccatagtagttaccgacatattct

SEQ ID NO: 414586 - DNA, 25 bp, Artificial
  probe
  misc_feature (1)..(25): SEQ ID NO: 5562; WAN024FEK; Start 191; Stop 215
ggagttccatagtagttaccgacat

SEQ ID NO: 414587 - DNA, 25 bp, Artificial
  probe
  misc_feature (1)..(25): SEQ ID NO: 5562; WAN024FEK; Start 207; Stop 231
taccgacatattctgcgtattccaa

SEQ ID NO: 414588 - DNA, 25 bp, Artificial
  probe
  misc_feature (1)..(25): SEQ ID NO: 5562; WAN024FEK; Start 206; Stop 230
ttaccgacatattctgcgtattcca

SEQ ID NO: 414589 - DNA, 25 bp, Artificial
  probe
  misc_feature (1)..(25): SEQ ID NO: 5562; WAN024FEK; Start 189; Stop 213
gaggagttccatagtagttaccgac

SEQ ID NO: 414590 - DNA, 25 bp, Artificial
  probe
  misc_feature (1)..(25): SEQ ID NO: 5562; WAN024FEK; Start 188; Stop 212
agaggagttccatagtagttaccga

SEQ ID NO: 414591 - DNA, 25 bp, Artificial
  probe
  misc_feature (1)..(25): SEQ ID NO: 5562; WAN024FEK; Start 187; Stop 211
cagaggagttccatagtagttaccg

SEQ ID NO: 414592 - DNA, 25 bp, Artificial
  probe
  misc_feature (1)..(25): SEQ ID NO: 5562; WAN024FEK; Start 194; Stop 218
gttccatagtagttaccgacatatt

SEQ ID NO: 414593 - DNA, 25 bp, Artificial
  probe
  misc_feature (1)..(25): SEQ ID NO: 5562; WAN024FEK; Start 183; Stop 207
aggtcagaggagttccatagtagtt

SEQ ID NO: 414594 - DNA, 25 bp, Artificial
  probe
  misc_feature (1)..(25): SEQ ID NO: 5562; WAN024FEK; Start 179; Stop 203
acataggtcagaggagttccatagt

SEQ ID NO: 414595 - DNA, 25 bp, Artificial
  probe
  misc_feature (1)..(25): SEQ ID NO: 5563; WAN024DLZ; Start 203; Stop 227
aatcacacgagattatgctagtcaa

SEQ ID NO: 414596 - DNA, 25 bp, Artificial
  probe
  misc_feature (1)..(25): SEQ ID NO: 5563; WAN024DLZ; Start 208; Stop 232
cacgagattatgctagtcaaacaaa

SEQ ID NO: 414597 - DNA, 25 bp, Artificial
  probe
  misc_feature (1)..(25): SEQ ID NO: 5563; WAN024DLZ; Start 207; Stop 231
acacgagattatgctagtcaaacaa

SEQ ID NO: 414598 - DNA, 25 bp, Artificial
  probe
  misc_feature (1)..(25): SEQ ID NO: 5563; WAN024DLZ; Start 204; Stop 228
atcacacgagattatgctagtcaaa

SEQ ID NO: 414599 - DNA, 25 bp, Artificial
  probe
  misc_feature (1)..(25): SEQ ID NO: 5563; WAN024DLZ; Start 205; Stop 229
tcacacgagattatgctagtcaaac

SEQ ID NO: 414600 - DNA, 25 bp, Artificial
  probe
  misc_feature (1)..(25): SEQ ID NO: 5563; WAN024DLZ; Start 49; Stop 73
ggagtttgtcgttgaaattacttga

SEQ ID NO: 414601 - DNA, 25 bp, Artificial
  probe
  misc_feature (1)..(25): SEQ ID NO: 5563; WAN024DLZ; Start 48; Stop 72
tggagtttgtcgttgaaattacttg

SEQ ID NO: 414602 - DNA, 25 bp, Artificial
  probe
  misc_feature (1)..(25): SEQ ID NO: 5563; WAN024DLZ; Start 47; Stop 71
atggagtttgtcgttgaaattactt

SEQ ID NO: 414603 - DNA, 25 bp, Artificial
  probe
  misc_feature (1)..(25): SEQ ID NO: 5563; WAN024DLZ; Start 206; Stop 230
cacacgagattatgctagtcaaaca

SEQ ID NO: 414604 - DNA, 25 bp, Artificial
  probe
  misc_feature (1)..(25): SEQ ID NO: 5563; WAN024DLZ; Start 53; Stop 77
tttgtcgttgaaattacttgattgt

SEQ ID NO: 414605 - DNA, 25 bp, Artificial
  probe
  misc_feature (1)..(25): SEQ ID NO: 5563; WAN024DLZ; Start 46; Stop 70
tatggagtttgtcgttgaaattact

SEQ ID NO: 414606 - DNA, 25 bp, Artificial
  probe
  misc_feature (1)..(25): SEQ ID NO: 5563; WAN024DLZ; Start 52; Stop 76
gtttgtcgttgaaattacttgattg

SEQ ID NO: 414607 - DNA, 25 bp, Artificial
  probe
  misc_feature (1)..(25): SEQ ID NO: 5563; WAN024DLZ; Start 43; Stop 67
aaatatggagtttgtcgttgaaatt

SEQ ID NO: 414608 - DNA, 25 bp, Artificial
  probe
  misc_feature (1)..(25): SEQ ID NO: 5563; WAN024DLZ; Start 50; Stop 74
gagtttgtcgttgaaattacttgat

SEQ ID NO: 414609 - DNA, 25 bp, Artificial
  probe
  misc_feature (1)..(25): SEQ ID NO: 5563; WAN024DLZ; Start 45; Stop 69
atatggagtttgtcgttgaaattac

SEQ ID NO: 414610 - DNA, 25 bp, Artificial
  probe
  misc_feature (1)..(25): SEQ ID NO: 5563; WAN024DLZ; Start 51; Stop 75
agtttgtcgttgaaattacttgatt

SEQ ID NO: 414611 - DNA, 25 bp, Artificial
  probe
  misc_feature (1)..(25): SEQ ID NO: 5563; WAN024DLZ; Start 202; Stop 226
aaatcacacgagattatgctagtca

SEQ ID NO: 414612 - DNA, 25 bp, Artificial
  probe
  misc_feature (1)..(25): SEQ ID NO: 5563; WAN024DLZ; Start 54; Stop 78
ttgtcgttgaaattacttgattgta

SEQ ID NO: 414613 - DNA, 25 bp, Artificial
  probe
  misc_feature (1)..(25): SEQ ID NO: 5563; WAN024DLZ; Start 44; Stop 68
aatatggagtttgtcgttgaaatta

SEQ ID NO: 414614 - DNA, 25 bp, Artificial
  probe
  misc_feature (1)..(25): SEQ ID NO: 5563; WAN024DLZ; Start 55; Stop 79
tgtcgttgaaattacttgattgtat

SEQ ID NO: 414615 - DNA, 25 bp, Artificial
  probe
  misc_feature (1)..(25): SEQ ID NO: 5563; WAN024DLZ; Start 114; Stop 138
tgtcaagtatcaacgaattataagt

SEQ ID NO: 414616 - DNA, 25 bp, Artificial
  probe
  misc_feature (1)..(25): SEQ ID NO: 5563; WAN024DLZ; Start 222; Stop 246
agtcaaacaaaacctgctattcaag

SEQ ID NO: 414617 - DNA, 25 bp, Artificial
  probe
  misc_feature (1)..(25): SEQ ID NO: 5563; WAN024DLZ; Start 38; Stop 62
tgagaaaatatggagtttgtcgttg

SEQ ID NO: 414618 - DNA, 25 bp, Artificial
  probe
  misc_feature (1)..(25): SEQ ID NO: 5563; WAN024DLZ; Start 39; Stop 63
gagaaaatatggagtttgtcgttga

SEQ ID NO: 414619 - DNA, 25 bp, Artificial
  probe
  misc_feature (1)..(25): SEQ ID NO: 5563; WAN024DLZ; Start 40; Stop 64
agaaaatatggagtttgtcgttgaa

SEQ ID NO: 414620 - DNA, 25 bp, Artificial
  probe
  misc_feature (1)..(25): SEQ ID NO: 5563; WAN024DLZ; Start 37; Stop 61
ttgagaaaatatggagtttgtcgtt

SEQ ID NO: 414621 - DNA, 25 bp, Artificial
  probe
  misc_feature (1)..(25): SEQ ID NO: 5563; WAN024DLZ; Start 36; Stop 60
tttgagaaaatatggagtttgtcgt

SEQ ID NO: 414622 - DNA, 25 bp, Artificial
  probe
  misc_feature (1)..(25): SEQ ID NO: 5563; WAN024DLZ; Start 221; Stop 245
tagtcaaacaaaacctgctattcaa

SEQ ID NO: 414623 - DNA, 25 bp, Artificial
  probe
  misc_feature (1)..(25): SEQ ID NO: 5563; WAN024DLZ; Start 216; Stop 240
tatgctagtcaaacaaaacctgcta

SEQ ID NO: 414624 - DNA, 25 bp, Artificial
  probe
  misc_feature (1)..(25): SEQ ID NO: 5563; WAN024DLZ; Start 214; Stop 238
attatgctagtcaaacaaaacctgc

SEQ ID NO: 414625 - DNA, 25 bp, Artificial
  probe
  misc_feature (1)..(25): SEQ ID NO: 5563; WAN024DLZ; Start 220; Stop 244
ctagtcaaacaaaacctgctattca

SEQ ID NO: 414626 - DNA, 25 bp, Artificial
  probe
  misc_feature (1)..(25): SEQ ID NO: 5563; WAN024DLZ; Start 219; Stop 243
gctagtcaaacaaaacctgctattc

SEQ ID NO: 414627 - DNA, 25 bp, Artificial
  probe
  misc_feature (1)..(25): SEQ ID NO: 5563; WAN024DLZ; Start 56; Stop 80
gtcgttgaaattacttgattgtatt

SEQ ID NO: 414628 - DNA, 25 bp, Artificial
  probe
  misc_feature (1)..(25): SEQ ID NO: 5564; WAN024EY9; Start 228; Stop 252
cagtcaagagcgaagtaatggtcaa

SEQ ID NO: 414629 - DNA, 25 bp, Artificial
  probe
  misc_feature (1)..(25): SEQ ID NO: 5564; WAN024EY9; Start 357; Stop 381
ccagaccaaagggaatgataatctt

SEQ ID NO: 414630 - DNA, 25 bp, Artificial
  probe
  misc_feature (1)..(25): SEQ ID NO: 5564; WAN024EY9; Start 358; Stop 382
cagaccaaagggaatgataatcttc

SEQ ID NO: 414631 - DNA, 25 bp, Artificial
  probe
  misc_feature (1)..(25): SEQ ID NO: 5564; WAN024EY9; Start 166; Stop 190
caaggtctcaacagagtacatctcc

SEQ ID NO: 414632 - DNA, 25 bp, Artificial
  probe
  misc_feature (1)..(25): SEQ ID NO: 5564; WAN024EY9; Start 165; Stop 189
ccaaggtctcaacagagtacatctc

SEQ ID NO: 414633 - DNA, 25 bp, Artificial
  probe
  misc_feature (1)..(25): SEQ ID NO: 5564; WAN024EY9; Start 416; Stop 440
atgatacgggagttgatgggtttaa

SEQ ID NO: 414634 - DNA, 25 bp, Artificial
  probe
  misc_feature (1)..(25): SEQ ID NO: 5564; WAN024EY9; Start 425; Stop 449
gagttgatgggtttaacggtcttag

SEQ ID NO: 414635 - DNA, 25 bp, Artificial
  probe
  misc_feature (1)..(25): SEQ ID NO: 5564; WAN024EY9; Start 296; Stop 320
gagtttacaacggatgacttgagag

SEQ ID NO: 414636 - DNA, 25 bp, Artificial
  probe
  misc_feature (1)..(25): SEQ ID NO: 5564; WAN024EY9; Start 167; Stop 191
aaggtctcaacagagtacatctcct

SEQ ID NO: 414637 - DNA, 25 bp, Artificial
  probe
  misc_feature (1)..(25): SEQ ID NO: 5564; WAN024EY9; Start 229; Stop 253
agtcaagagcgaagtaatggtcaaa

SEQ ID NO: 414638 - DNA, 25 bp, Artificial
  probe
  misc_feature (1)..(25): SEQ ID NO: 5564; WAN024EY9; Start 354; Stop 378
gagccagaccaaagggaatgataat

SEQ ID NO: 414639 - DNA, 25 bp, Artificial
  probe
  misc_feature (1)..(25): SEQ ID NO: 5564; WAN024EY9; Start 355; Stop 379
agccagaccaaagggaatgataatc

SEQ ID NO: 414640 - DNA, 25 bp, Artificial
  probe
  misc_feature (1)..(25): SEQ ID NO: 5564; WAN024EY9; Start 424; Stop 448
ggagttgatgggtttaacggtctta

SEQ ID NO: 414641 - DNA, 25 bp, Artificial
  probe
  misc_feature (1)..(25): SEQ ID NO: 5564; WAN024EY9; Start 417; Stop 441
tgatacgggagttgatgggtttaac

SEQ ID NO: 414642 - DNA, 25 bp, Artificial
  probe
  misc_feature (1)..(25): SEQ ID NO: 5564; WAN024EY9; Start 168; Stop 192
aggtctcaacagagtacatctcctg

SEQ ID NO: 414643 - DNA, 25 bp, Artificial
  probe
  misc_feature (1)..(25): SEQ ID NO: 5564; WAN024EY9; Start 356; Stop 380
gccagaccaaagggaatgataatct

SEQ ID NO: 414644 - DNA, 25 bp, Artificial
  probe
  misc_feature (1)..(25): SEQ ID NO: 5564; WAN024EY9; Start 297; Stop 321
agtttacaacggatgacttgagagg

SEQ ID NO: 414645 - DNA, 25 bp, Artificial
  probe
  misc_feature (1)..(25): SEQ ID NO: 5564; WAN024EY9; Start 259; Stop 283
aattcccttaggcaacattcccaaa

SEQ ID NO: 414646 - DNA, 25 bp, Artificial
  probe
  misc_feature (1)..(25): SEQ ID NO: 5564; WAN024EY9; Start 5; Stop 29
gcagttggattcttatcctcactat

SEQ ID NO: 414647 - DNA, 25 bp, Artificial
  probe
  misc_feature (1)..(25): SEQ ID NO: 5564; WAN024EY9; Start 7; Stop 31
agttggattcttatcctcactatgg

SEQ ID NO: 414648 - DNA, 25 bp, Artificial
  probe
  misc_feature (1)..(25): SEQ ID NO: 5564; WAN024EY9; Start 415; Stop 439
catgatacgggagttgatgggttta

SEQ ID NO: 414649 - DNA, 25 bp, Artificial
  probe
  misc_feature (1)..(25): SEQ ID NO: 5564; WAN024EY9; Start 295; Stop 319
cgagtttacaacggatgacttgaga

SEQ ID NO: 414650 - DNA, 25 bp, Artificial
  probe
  misc_feature (1)..(25): SEQ ID NO: 5564; WAN024EY9; Start 426; Stop 450
agttgatgggtttaacggtcttagc

SEQ ID NO: 414651 - DNA, 25 bp, Artificial
  probe
  misc_feature (1)..(25): SEQ ID NO: 5564; WAN024EY9; Start 6; Stop 30
cagttggattcttatcctcactatg

SEQ ID NO: 414652 - DNA, 25 bp, Artificial
  probe
  misc_feature (1)..(25): SEQ ID NO: 5564; WAN024EY9; Start 294; Stop 318
acgagtttacaacggatgacttgag

SEQ ID NO: 414653 - DNA, 25 bp, Artificial
  probe
  misc_feature (1)..(25): SEQ ID NO: 5564; WAN024EY9; Start 293; Stop 317
gacgagtttacaacggatgacttga

SEQ ID NO: 414654 - DNA, 25 bp, Artificial
  probe
  misc_feature (1)..(25): SEQ ID NO: 5564; WAN024EY9; Start 372; Stop 396
tgataatcttcccagtaaaaccagc

SEQ ID NO: 414655 - DNA, 25 bp, Artificial
  probe
  misc_feature (1)..(25): SEQ ID NO: 5564; WAN024EY9; Start 353; Stop 377
agagccagaccaaagggaatgataa

SEQ ID NO: 414656 - DNA, 25 bp, Artificial
  probe
  misc_feature (1)..(25): SEQ ID NO: 5564; WAN024EY9; Start 435; Stop 459
gtttaacggtcttagcctcaagcat

SEQ ID NO: 414657 - DNA, 25 bp, Artificial
  probe
  misc_feature (1)..(25): SEQ ID NO: 5564; WAN024EY9; Start 4; Stop 28
ggcagttggattcttatcctcacta

SEQ ID NO: 414658 - DNA, 25 bp, Artificial
  probe
  misc_feature (1)..(25): SEQ ID NO: 5564; WAN024EY9; Start 258; Stop 282
caattcccttaggcaacattcccaa

SEQ ID NO: 414659 - DNA, 25 bp, Artificial
  probe
  misc_feature (1)..(25): SEQ ID NO: 5564; WAN024EY9; Start 418; Stop 442
gatacgggagttgatgggtttaacg

SEQ ID NO: 414660 - DNA, 25 bp, Artificial
  probe
  misc_feature (1)..(25): SEQ ID NO: 5564; WAN024EY9; Start 373; Stop 397
gataatcttcccagtaaaaccagcc

SEQ ID NO: 414661 - DNA, 25 bp, Artificial
  probe
  misc_feature (1)..(25): SEQ ID NO: 5565; WAN024CE4; Start 209; Stop 233
actgtattgtcgttgataagagatt

SEQ ID NO: 414662 - DNA, 25 bp, Artificial
  probe
  misc_feature (1)..(25): SEQ ID NO: 5565; WAN024CE4; Start 208; Stop 232
aactgtattgtcgttgataagagat

SEQ ID NO: 414663 - DNA, 25 bp, Artificial
  probe
  misc_feature (1)..(25): SEQ ID NO: 5565; WAN024CE4; Start 18; Stop 42
aagggaagacacggtaaatatcatt

SEQ ID NO: 414664 - DNA, 25 bp, Artificial
  probe
  misc_feature (1)..(25): SEQ ID NO: 5565; WAN024CE4; Start 16; Stop 40
gtaagggaagacacggtaaatatca

SEQ ID NO: 414665 - DNA, 25 bp, Artificial
  probe
  misc_feature (1)..(25): SEQ ID NO: 5565; WAN024CE4; Start 26; Stop 50
acacggtaaatatcattcaagacac

SEQ ID NO: 414666 - DNA, 25 bp, Artificial
  probe
  misc_feature (1)..(25): SEQ ID NO: 5565; WAN024CE4; Start 17; Stop 41
taagggaagacacggtaaatatcat

SEQ ID NO: 414667 - DNA, 25 bp, Artificial
  probe
  misc_feature (1)..(25): SEQ ID NO: 5565; WAN024CE4; Start 25; Stop 49
gacacggtaaatatcattcaagaca

SEQ ID NO: 414668 - DNA, 25 bp, Artificial
  probe
  misc_feature (1)..(25): SEQ ID NO: 5565; WAN024CE4; Start 19; Stop 43
agggaagacacggtaaatatcattc

SEQ ID NO: 414669 - DNA, 25 bp, Artificial
  probe
  misc_feature (1)..(25): SEQ ID NO: 5565; WAN024CE4; Start 24; Stop 48
agacacggtaaatatcattcaagac

SEQ ID NO: 414670 - DNA, 25 bp, Artificial
  probe
  misc_feature (1)..(25): SEQ ID NO: 5565; WAN024CE4; Start 20; Stop 44
gggaagacacggtaaatatcattca

SEQ ID NO: 414671 - DNA, 25 bp, Artificial
  probe
  misc_feature (1)..(25): SEQ ID NO: 5565; WAN024CE4; Start 34; Stop 58
aatatcattcaagacaccgccacaa

SEQ ID NO: 414672 - DNA, 25 bp, Artificial
  probe
  misc_feature (1)..(25): SEQ ID NO: 5565; WAN024CE4; Start 21; Stop 45
ggaagacacggtaaatatcattcaa

SEQ ID NO: 414673 - DNA, 25 bp, Artificial
  probe
  misc_feature (1)..(25): SEQ ID NO: 5565; WAN024CE4; Start 32; Stop 56
taaatatcattcaagacaccgccac

SEQ ID NO: 414674 - DNA, 25 bp, Artificial
  probe
  misc_feature (1)..(25): SEQ ID NO: 5565; WAN024CE4; Start 31; Stop 55
gtaaatatcattcaagacaccgcca

SEQ ID NO: 414675 - DNA, 25 bp, Artificial
  probe
  misc_feature (1)..(25): SEQ ID NO: 5565; WAN024CE4; Start 23; Stop 47
aagacacggtaaatatcattcaaga

SEQ ID NO: 414676 - DNA, 25 bp, Artificial
  probe
  misc_feature (1)..(25): SEQ ID NO: 5565; WAN024CE4; Start 15; Stop 39
tgtaagggaagacacggtaaatatc

SEQ ID NO: 414677 - DNA, 25 bp, Artificial
  probe
  misc_feature (1)..(25): SEQ ID NO: 5565; WAN024CE4; Start 13; Stop 37
gatgtaagggaagacacggtaaata

SEQ ID NO: 414678 - DNA, 25 bp, Artificial
  probe
  misc_feature (1)..(25): SEQ ID NO: 5565; WAN024CE4; Start 14; Stop 38
atgtaagggaagacacggtaaatat

SEQ ID NO: 414679 - DNA, 25 bp, Artificial
  probe
  misc_feature (1)..(25): SEQ ID NO: 5565; WAN024CE4; Start 22; Stop 46
gaagacacggtaaatatcattcaag

SEQ ID NO: 414680 - DNA, 25 bp, Artificial
  probe
  misc_feature (1)..(25): SEQ ID NO: 5565; WAN024CE4; Start 35; Stop 59
atatcattcaagacaccgccacaac

SEQ ID NO: 414681 - DNA, 25 bp, Artificial
  probe
  misc_feature (1)..(25): SEQ ID NO: 5565; WAN024CE4; Start 6; Stop 30
cataaacgatgtaagggaagacacg

SEQ ID NO: 414682 - DNA, 25 bp, Artificial
  probe
  misc_feature (1)..(25): SEQ ID NO: 5565; WAN024CE4; Start 27; Stop 51
cacggtaaatatcattcaagacacc

SEQ ID NO: 414683 - DNA, 25 bp, Artificial
  probe
  misc_feature (1)..(25): SEQ ID NO: 5565; WAN024CE4; Start 210; Stop 234
ctgtattgtcgttgataagagattt

SEQ ID NO: 414684 - DNA, 25 bp, Artificial
  probe
  misc_feature (1)..(25): SEQ ID NO: 5565; WAN024CE4; Start 5; Stop 29
gcataaacgatgtaagggaagacac

SEQ ID NO: 414685 - DNA, 25 bp, Artificial
  probe
  misc_feature (1)..(25): SEQ ID NO: 5565; WAN024CE4; Start 33; Stop 57
aaatatcattcaagacaccgccaca

SEQ ID NO: 414686 - DNA, 25 bp, Artificial
  probe
  misc_feature (1)..(25): SEQ ID NO: 5565; WAN024CE4; Start 175; Stop 199
agtgtagtctgtcgttgtaccaaag

SEQ ID NO: 414687 - DNA, 25 bp, Artificial
  probe
  misc_feature (1)..(25): SEQ ID NO: 5565; WAN024CE4; Start 1; Stop 25
ttgggcataaacgatgtaagggaag

SEQ ID NO: 414688 - DNA, 25 bp, Artificial
  probe
  misc_feature (1)..(25): SEQ ID NO: 5565; WAN024CE4; Start 176; Stop 200
gtgtagtctgtcgttgtaccaaaga

SEQ ID NO: 414689 - DNA, 25 bp, Artificial
  probe
  misc_feature (1)..(25): SEQ ID NO: 5565; WAN024CE4; Start 174; Stop 198
gagtgtagtctgtcgttgtaccaaa

SEQ ID NO: 414690 - DNA, 25 bp, Artificial
  probe
  misc_feature (1)..(25): SEQ ID NO: 5565; WAN024CE4; Start 12; Stop 36
cgatgtaagggaagacacggtaaat

SEQ ID NO: 414691 - DNA, 25 bp, Artificial
  probe
  misc_feature (1)..(25): SEQ ID NO: 5565; WAN024CE4; Start 7; Stop 31
ataaacgatgtaagggaagacacgg

SEQ ID NO: 414692 - DNA, 25 bp, Artificial
  probe
  misc_feature (1)..(25): SEQ ID NO: 5565; WAN024CE4; Start 30; Stop 54
ggtaaatatcattcaagacaccgcc

SEQ ID NO: 414693 - DNA, 25 bp, Artificial
  probe
  misc_feature (1)..(25): SEQ ID NO: 5565; WAN024CE4; Start 206; Stop 230
acaactgtattgtcgttgataagag

SEQ ID NO: 414694 - DNA, 25 bp, Artificial
  probe
  misc_feature (1)..(25): SEQ ID NO: 5566; WAN024GHD; Start 90; Stop 114
tgaagttgataggcttacggtagtg

SEQ ID NO: 414695 - DNA, 25 bp, Artificial
  probe
  misc_feature (1)..(25): SEQ ID NO: 5566; WAN024GHD; Start 89; Stop 113
gtgaagttgataggcttacggtagt

SEQ ID NO: 414696 - DNA, 25 bp, Artificial
  probe
  misc_feature (1)..(25): SEQ ID NO: 5566; WAN024GHD; Start 16; Stop 40
tcctgtaaatggttgttcgtaagta

SEQ ID NO: 414697 - DNA, 25 bp, Artificial
  probe
  misc_feature (1)..(25): SEQ ID NO: 5566; WAN024GHD; Start 14; Stop 38
tttcctgtaaatggttgttcgtaag

SEQ ID NO: 414698 - DNA, 25 bp, Artificial
  probe
  misc_feature (1)..(25): SEQ ID NO: 5566; WAN024GHD; Start 15; Stop 39
ttcctgtaaatggttgttcgtaagt

SEQ ID NO: 414699 - DNA, 25 bp, Artificial
  probe
  misc_feature (1)..(25): SEQ ID NO: 5566; WAN024GHD; Start 17; Stop 41
cctgtaaatggttgttcgtaagtat

SEQ ID NO: 414700 - DNA, 25 bp, Artificial
  probe
  misc_feature (1)..(25): SEQ ID NO: 5566; WAN024GHD; Start 165; Stop 189
catcgtgtaccgtaatgaagttacc

SEQ ID NO: 414701 - DNA, 25 bp, Artificial
  probe
  misc_feature (1)..(25): SEQ ID NO: 5566; WAN024GHD; Start 91; Stop 115
gaagttgataggcttacggtagtgc

SEQ ID NO: 414702 - DNA, 25 bp, Artificial
  probe
  misc_feature (1)..(25): SEQ ID NO: 5566; WAN024GHD; Start 164; Stop 188
gcatcgtgtaccgtaatgaagttac

SEQ ID NO: 414703 - DNA, 25 bp, Artificial
  probe
  misc_feature (1)..(25): SEQ ID NO: 5566; WAN024GHD; Start 163; Stop 187
ggcatcgtgtaccgtaatgaagtta

SEQ ID NO: 414704 - DNA, 25 bp, Artificial
  probe
  misc_feature (1)..(25): SEQ ID NO: 5566; WAN024GHD; Start 19; Stop 43
tgtaaatggttgttcgtaagtattc

SEQ ID NO: 414705 - DNA, 25 bp, Artificial
  probe
  misc_feature (1)..(25): SEQ ID NO: 5566; WAN024GHD; Start 18; Stop 42
ctgtaaatggttgttcgtaagtatt

SEQ ID NO: 414706 - DNA, 25 bp, Artificial
  probe
  misc_feature (1)..(25): SEQ ID NO: 5566; WAN024GHD; Start 92; Stop 116
aagttgataggcttacggtagtgct

SEQ ID NO: 414707 - DNA, 25 bp, Artificial
  probe
  misc_feature (1)..(25): SEQ ID NO: 5566; WAN024GHD; Start 20; Stop 44
gtaaatggttgttcgtaagtattct

SEQ ID NO: 414708 - DNA, 25 bp, Artificial
  probe
  misc_feature (1)..(25): SEQ ID NO: 5566; WAN024GHD; Start 227; Stop 251
aagccattgtgcatccagtagttag

SEQ ID NO: 414709 - DNA, 25 bp, Artificial
  probe
  misc_feature (1)..(25): SEQ ID NO: 5566; WAN024GHD; Start 93; Stop 117
agttgataggcttacggtagtgctg

SEQ ID NO: 414710 - DNA, 25 bp, Artificial
  probe
  misc_feature (1)..(25): SEQ ID NO: 5566; WAN024GHD; Start 169; Stop 193
gtgtaccgtaatgaagttacccaag

SEQ ID NO: 414711 - DNA, 25 bp, Artificial
  probe
  misc_feature (1)..(25): SEQ ID NO: 5566; WAN024GHD; Start 172; Stop 196
taccgtaatgaagttacccaaggac

SEQ ID NO: 414712 - DNA, 25 bp, Artificial
  probe
  misc_feature (1)..(25): SEQ ID NO: 5566; WAN024GHD; Start 21; Stop 45
taaatggttgttcgtaagtattctt

SEQ ID NO: 414713 - DNA, 25 bp, Artificial
  probe
  misc_feature (1)..(25): SEQ ID NO: 5566; WAN024GHD; Start 171; Stop 195
gtaccgtaatgaagttacccaagga

SEQ ID NO: 414714 - DNA, 25 bp, Artificial
  probe
  misc_feature (1)..(25): SEQ ID NO: 5566; WAN024GHD; Start 170; Stop 194
tgtaccgtaatgaagttacccaagg

SEQ ID NO: 414715 - DNA, 25 bp, Artificial
  probe
  misc_feature (1)..(25): SEQ ID NO: 5566; WAN024GHD; Start 182; Stop 206
aagttacccaaggacttagacattt

SEQ ID NO: 414716 - DNA, 25 bp, Artificial
  probe
  misc_feature (1)..(25): SEQ ID NO: 5566; WAN024GHD; Start 181; Stop 205
gaagttacccaaggacttagacatt

SEQ ID NO: 414717 - DNA, 25 bp, Artificial
  probe
  misc_feature (1)..(25): SEQ ID NO: 5566; WAN024GHD; Start 178; Stop 202
aatgaagttacccaaggacttagac

SEQ ID NO: 414718 - DNA, 25 bp, Artificial
  probe
  misc_feature (1)..(25): SEQ ID NO: 5566; WAN024GHD; Start 175; Stop 199
cgtaatgaagttacccaaggactta

SEQ ID NO: 414719 - DNA, 25 bp, Artificial
  probe
  misc_feature (1)..(25): SEQ ID NO: 5566; WAN024GHD; Start 185; Stop 209
ttacccaaggacttagacattttga

SEQ ID NO: 414720 - DNA, 25 bp, Artificial
  probe
  misc_feature (1)..(25): SEQ ID NO: 5566; WAN024GHD; Start 184; Stop 208
gttacccaaggacttagacattttg

SEQ ID NO: 414721 - DNA, 25 bp, Artificial
  probe
  misc_feature (1)..(25): SEQ ID NO: 5566; WAN024GHD; Start 186; Stop 210
tacccaaggacttagacattttgac

SEQ ID NO: 414722 - DNA, 25 bp, Artificial
  probe
  misc_feature (1)..(25): SEQ ID NO: 5566; WAN024GHD; Start 157; Stop 181
tttaagggcatcgtgtaccgtaatg

SEQ ID NO: 414723 - DNA, 25 bp, Artificial
  probe
  misc_feature (1)..(25): SEQ ID NO: 5566; WAN024GHD; Start 189; Stop 213
ccaaggacttagacattttgacatt

SEQ ID NO: 414724 - DNA, 25 bp, Artificial
  probe
  misc_feature (1)..(25): SEQ ID NO: 5566; WAN024GHD; Start 166; Stop 190
atcgtgtaccgtaatgaagttaccc

SEQ ID NO: 414725 - DNA, 25 bp, Artificial
  probe
  misc_feature (1)..(25): SEQ ID NO: 5566; WAN024GHD; Start 82; Stop 106
cttttccgtgaagttgataggctta

SEQ ID NO: 414726 - DNA, 25 bp, Artificial
  probe
  misc_feature (1)..(25): SEQ ID NO: 5566; WAN024GHD; Start 183; Stop 207
agttacccaaggacttagacatttt

SEQ ID NO: 414727 - DNA, 25 bp, Artificial
  probe
  misc_feature (1)..(25): SEQ ID NO: 5567; WAN024G7S; Start 126; Stop 150
tagaggcattatcattgatggtgtt

SEQ ID NO: 414728 - DNA, 25 bp, Artificial
  probe
  misc_feature (1)..(25): SEQ ID NO: 5567; WAN024G7S; Start 133; Stop 157
attatcattgatggtgttggtggaa

SEQ ID NO: 414729 - DNA, 25 bp, Artificial
  probe
  misc_feature (1)..(25): SEQ ID NO: 5567; WAN024G7S; Start 125; Stop 149
ctagaggcattatcattgatggtgt

SEQ ID NO: 414730 - DNA, 25 bp, Artificial
  probe
  misc_feature (1)..(25): SEQ ID NO: 5567; WAN024G7S; Start 132; Stop 156
cattatcattgatggtgttggtgga

SEQ ID NO: 414731 - DNA, 25 bp, Artificial
  probe
  misc_feature (1)..(25): SEQ ID NO: 5567; WAN024G7S; Start 127; Stop 151
agaggcattatcattgatggtgttg

SEQ ID NO: 414732 - DNA, 25 bp, Artificial
  probe
  misc_feature (1)..(25): SEQ ID NO: 5567; WAN024G7S; Start 134; Stop 158
ttatcattgatggtgttggtggaac

SEQ ID NO: 414733 - DNA, 25 bp, Artificial
  probe
  misc_feature (1)..(25): SEQ ID NO: 5567; WAN024G7S; Start 124; Stop 148
gctagaggcattatcattgatggtg

SEQ ID NO: 414734 - DNA, 25 bp, Artificial
  probe
  misc_feature (1)..(25): SEQ ID NO: 5567; WAN024G7S; Start 82; Stop 106
cagatagagattgcctgtcagagtt

SEQ ID NO: 414735 - DNA, 25 bp, Artificial
  probe
  misc_feature (1)..(25): SEQ ID NO: 5567; WAN024G7S; Start 128; Stop 152
gaggcattatcattgatggtgttgg

SEQ ID NO: 414736 - DNA, 25 bp, Artificial
  probe
  misc_feature (1)..(25): SEQ ID NO: 5567; WAN024G7S; Start 211; Stop 235
agtataaatcatagcaagcacaagc

SEQ ID NO: 414737 - DNA, 25 bp, Artificial
  probe
  misc_feature (1)..(25): SEQ ID NO: 5567; WAN024G7S; Start 209; Stop 233
tcagtataaatcatagcaagcacaa

SEQ ID NO: 414738 - DNA, 25 bp, Artificial
  probe
  misc_feature (1)..(25): SEQ ID NO: 5567; WAN024G7S; Start 208; Stop 232
ttcagtataaatcatagcaagcaca

SEQ ID NO: 414739 - DNA, 25 bp, Artificial
  probe
  misc_feature (1)..(25): SEQ ID NO: 5567; WAN024G7S; Start 84; Stop 108
gatagagattgcctgtcagagtttg

SEQ ID NO: 414740 - DNA, 25 bp, Artificial
  probe
  misc_feature (1)..(25): SEQ ID NO: 5567; WAN024G7S; Start 83; Stop 107
agatagagattgcctgtcagagttt

SEQ ID NO: 414741 - DNA, 25 bp, Artificial
  probe
  misc_feature (1)..(25): SEQ ID NO: 5567; WAN024G7S; Start 131; Stop 155
gcattatcattgatggtgttggtgg

SEQ ID NO: 414742 - DNA, 25 bp, Artificial
  probe
  misc_feature (1)..(25): SEQ ID NO: 5567; WAN024G7S; Start 130; Stop 154
ggcattatcattgatggtgttggtg

SEQ ID NO: 414743 - DNA, 25 bp, Artificial
  probe
  misc_feature (1)..(25): SEQ ID NO: 5567; WAN024G7S; Start 129; Stop 153
aggcattatcattgatggtgttggt

SEQ ID NO: 414744 - DNA, 25 bp, Artificial
  probe
  misc_feature (1)..(25): SEQ ID NO: 5567; WAN024G7S; Start 210; Stop 234
cagtataaatcatagcaagcacaag

SEQ ID NO: 414745 - DNA, 25 bp, Artificial
  probe
  misc_feature (1)..(25): SEQ ID NO: 5567; WAN024G7S; Start 166; Stop 190
agactcactagactgcataacatcg

SEQ ID NO: 414746 - DNA, 25 bp, Artificial
  probe
  misc_feature (1)..(25): SEQ ID NO: 5567; WAN024G7S; Start 165; Stop 189
cagactcactagactgcataacatc

SEQ ID NO: 414747 - DNA, 25 bp, Artificial
  probe
  misc_feature (1)..(25): SEQ ID NO: 5567; WAN024G7S; Start 207; Stop 231
tttcagtataaatcatagcaagcac

SEQ ID NO: 414748 - DNA, 25 bp, Artificial
  probe
  misc_feature (1)..(25): SEQ ID NO: 5567; WAN024G7S; Start 206; Stop 230
gtttcagtataaatcatagcaagca

SEQ ID NO: 414749 - DNA, 25 bp, Artificial
  probe
  misc_feature (1)..(25): SEQ ID NO: 5567; WAN024G7S; Start 205; Stop 229
tgtttcagtataaatcatagcaagc

SEQ ID NO: 414750 - DNA, 25 bp, Artificial
  probe
  misc_feature (1)..(25): SEQ ID NO: 5567; WAN024G7S; Start 85; Stop 109
atagagattgcctgtcagagtttga

SEQ ID NO: 414751 - DNA, 25 bp, Artificial
  probe
  misc_feature (1)..(25): SEQ ID NO: 5567; WAN024G7S; Start 86; Stop 110
tagagattgcctgtcagagtttgaa

SEQ ID NO: 414752 - DNA, 25 bp, Artificial
  probe
  misc_feature (1)..(25): SEQ ID NO: 5567; WAN024G7S; Start 297; Stop 321
tgacttgtttgacatcttgatgaac

SEQ ID NO: 414753 - DNA, 25 bp, Artificial
  probe
  misc_feature (1)..(25): SEQ ID NO: 5567; WAN024G7S; Start 295; Stop 319
catgacttgtttgacatcttgatga

SEQ ID NO: 414754 - DNA, 25 bp, Artificial
  probe
  misc_feature (1)..(25): SEQ ID NO: 5567; WAN024G7S; Start 296; Stop 320
atgacttgtttgacatcttgatgaa

SEQ ID NO: 414755 - DNA, 25 bp, Artificial
  probe
  misc_feature (1)..(25): SEQ ID NO: 5567; WAN024G7S; Start 298; Stop 322
gacttgtttgacatcttgatgaacg

SEQ ID NO: 414756 - DNA, 25 bp, Artificial
  probe
  misc_feature (1)..(25): SEQ ID NO: 5567; WAN024G7S; Start 88; Stop 112
gagattgcctgtcagagtttgaatg

SEQ ID NO: 414757 - DNA, 25 bp, Artificial
  probe
  misc_feature (1)..(25): SEQ ID NO: 5567; WAN024G7S; Start 81; Stop 105
ccagatagagattgcctgtcagagt

SEQ ID NO: 414758 - DNA, 25 bp, Artificial
  probe
  misc_feature (1)..(25): SEQ ID NO: 5567; WAN024G7S; Start 87; Stop 111
agagattgcctgtcagagtttgaat

SEQ ID NO: 414759 - DNA, 25 bp, Artificial
  probe
  misc_feature (1)..(25): SEQ ID NO: 5567; WAN024G7S; Start 123; Stop 147
tgctagaggcattatcattgatggt

SEQ ID NO: 414760 - DNA, 25 bp, Artificial
  probe
  misc_feature (1)..(25): SEQ ID NO: 5568; WAN024FVP; Start 318; Stop 342
ttctaatgaagatgttatcgcacca

SEQ ID NO: 414761 - DNA, 25 bp, Artificial
  probe
  misc_feature (1)..(25): SEQ ID NO: 5568; WAN024FVP; Start 319; Stop 343
tctaatgaagatgttatcgcaccag

SEQ ID NO: 414762 - DNA, 25 bp, Artificial
  probe
  misc_feature (1)..(25): SEQ ID NO: 5568; WAN024FVP; Start 163; Stop 187
ttgacagttgagcaagatacagttc

SEQ ID NO: 414763 - DNA, 25 bp, Artificial
  probe
  misc_feature (1)..(25): SEQ ID NO: 5568; WAN024FVP; Start 320; Stop 344
ctaatgaagatgttatcgcaccagc

SEQ ID NO: 414764 - DNA, 25 bp, Artificial
  probe
  misc_feature (1)..(25): SEQ ID NO: 5568; WAN024FVP; Start 164; Stop 188
tgacagttgagcaagatacagttct

SEQ ID NO: 414765 - DNA, 25 bp, Artificial
  probe
  misc_feature (1)..(25): SEQ ID NO: 5568; WAN024FVP; Start 42; Stop 66
aattacggaggtgaacacactaatg

SEQ ID NO: 414766 - DNA, 25 bp, Artificial
  probe
  misc_feature (1)..(25): SEQ ID NO: 5568; WAN024FVP; Start 43; Stop 67
attacggaggtgaacacactaatga

SEQ ID NO: 414767 - DNA, 25 bp, Artificial
  probe
  misc_feature (1)..(25): SEQ ID NO: 5568; WAN024FVP; Start 204; Stop 228
tggaagcgaagttgagtataaagtt

SEQ ID NO: 414768 - DNA, 25 bp, Artificial
  probe
  misc_feature (1)..(25): SEQ ID NO: 5568; WAN024FVP; Start 41; Stop 65
taattacggaggtgaacacactaat

SEQ ID NO: 414769 - DNA, 25 bp, Artificial
  probe
  misc_feature (1)..(25): SEQ ID NO: 5568; WAN024FVP; Start 40; Stop 64
ataattacggaggtgaacacactaa

SEQ ID NO: 414770 - DNA, 25 bp, Artificial
  probe
  misc_feature (1)..(25): SEQ ID NO: 5568; WAN024FVP; Start 39; Stop 63
aataattacggaggtgaacacacta

SEQ ID NO: 414771 - DNA, 25 bp, Artificial
  probe
  misc_feature (1)..(25): SEQ ID NO: 5568; WAN024FVP; Start 205; Stop 229
ggaagcgaagttgagtataaagtta

SEQ ID NO: 414772 - DNA, 25 bp, Artificial
  probe
  misc_feature (1)..(25): SEQ ID NO: 5568; WAN024FVP; Start 203; Stop 227
gtggaagcgaagttgagtataaagt

SEQ ID NO: 414773 - DNA, 25 bp, Artificial
  probe
  misc_feature (1)..(25): SEQ ID NO: 5568; WAN024FVP; Start 317; Stop 341
tttctaatgaagatgttatcgcacc

SEQ ID NO: 414774 - DNA, 25 bp, Artificial
  probe
  misc_feature (1)..(25): SEQ ID NO: 5568; WAN024FVP; Start 44; Stop 68
ttacggaggtgaacacactaatgag

SEQ ID NO: 414775 - DNA, 25 bp, Artificial
  probe
  misc_feature (1)..(25): SEQ ID NO: 5568; WAN024FVP; Start 369; Stop 393
aaacgctgaagcacttgaaattaaa

SEQ ID NO: 414776 - DNA, 25 bp, Artificial
  probe
  misc_feature (1)..(25): SEQ ID NO: 5568; WAN024FVP; Start 166; Stop 190
acagttgagcaagatacagttcttc

SEQ ID NO: 414777 - DNA, 25 bp, Artificial
  probe
  misc_feature (1)..(25): SEQ ID NO: 5568; WAN024FVP; Start 165; Stop 189
gacagttgagcaagatacagttctt

SEQ ID NO: 414778 - DNA, 25 bp, Artificial
  probe
  misc_feature (1)..(25): SEQ ID NO: 5568; WAN024FVP; Start 370; Stop 394
aacgctgaagcacttgaaattaaag

SEQ ID NO: 414779 - DNA, 25 bp, Artificial
  probe
  misc_feature (1)..(25): SEQ ID NO: 5568; WAN024FVP; Start 202; Stop 226
cgtggaagcgaagttgagtataaag

SEQ ID NO: 414780 - DNA, 25 bp, Artificial
  probe
  misc_feature (1)..(25): SEQ ID NO: 5568; WAN024FVP; Start 374; Stop 398
ctgaagcacttgaaattaaaggtgg

SEQ ID NO: 414781 - DNA, 25 bp, Artificial
  probe
  misc_feature (1)..(25): SEQ ID NO: 5568; WAN024FVP; Start 169; Stop 193
gttgagcaagatacagttcttcgtc

SEQ ID NO: 414782 - DNA, 25 bp, Artificial
  probe
  misc_feature (1)..(25): SEQ ID NO: 5568; WAN024FVP; Start 167; Stop 191
cagttgagcaagatacagttcttcg

SEQ ID NO: 414783 - DNA, 25 bp, Artificial
  probe
  misc_feature (1)..(25): SEQ ID NO: 5568; WAN024FVP; Start 376; Stop 400
gaagcacttgaaattaaaggtggtg

SEQ ID NO: 414784 - DNA, 25 bp, Artificial
  probe
  misc_feature (1)..(25): SEQ ID NO: 5568; WAN024FVP; Start 284; Stop 308
catctgtatttgttggaccatctgc

SEQ ID NO: 414785 - DNA, 25 bp, Artificial
  probe
  misc_feature (1)..(25): SEQ ID NO: 5568; WAN024FVP; Start 283; Stop 307
gcatctgtatttgttggaccatctg

SEQ ID NO: 414786 - DNA, 25 bp, Artificial
  probe
  misc_feature (1)..(25): SEQ ID NO: 5568; WAN024FVP; Start 375; Stop 399
tgaagcacttgaaattaaaggtggt

SEQ ID NO: 414787 - DNA, 25 bp, Artificial
  probe
  misc_feature (1)..(25): SEQ ID NO: 5568; WAN024FVP; Start 45; Stop 69
tacggaggtgaacacactaatgagt

SEQ ID NO: 414788 - DNA, 25 bp, Artificial
  probe
  misc_feature (1)..(25): SEQ ID NO: 5568; WAN024FVP; Start 168; Stop 192
agttgagcaagatacagttcttcgt

SEQ ID NO: 414789 - DNA, 25 bp, Artificial
  probe
  misc_feature (1)..(25): SEQ ID NO: 5568; WAN024FVP; Start 206; Stop 230
gaagcgaagttgagtataaagttat

SEQ ID NO: 414790 - DNA, 25 bp, Artificial
  probe
  misc_feature (1)..(25): SEQ ID NO: 5568; WAN024FVP; Start 373; Stop 397
gctgaagcacttgaaattaaaggtg

SEQ ID NO: 414791 - DNA, 25 bp, Artificial
  probe
  misc_feature (1)..(25): SEQ ID NO: 5568; WAN024FVP; Start 277; Stop 301
gatcttgcatctgtatttgttggac

SEQ ID NO: 414792 - DNA, 25 bp, Artificial
  probe
  misc_feature (1)..(25): SEQ ID NO: 5568; WAN024FVP; Start 38; Stop 62
aaataattacggaggtgaacacact

SEQ ID NO: 414793 - DNA, 25 bp, Artificial
  probe
  misc_feature (1)..(25): SEQ ID NO: 5569; WAN024F4Z; Start 627; Stop 651
cattgtcatcagcagcgataatagc

SEQ ID NO: 414794 - DNA, 25 bp, Artificial
  probe
  misc_feature (1)..(25): SEQ ID NO: 5569; WAN024F4Z; Start 626; Stop 650
gcattgtcatcagcagcgataatag

SEQ ID NO: 414795 - DNA, 25 bp, Artificial
  probe
  misc_feature (1)..(25): SEQ ID NO: 5569; WAN024F4Z; Start 435; Stop 459
cttccatagcttcttccaattcttg

SEQ ID NO: 414796 - DNA, 25 bp, Artificial
  probe
  misc_feature (1)..(25): SEQ ID NO: 5569; WAN024F4Z; Start 628; Stop 652
attgtcatcagcagcgataatagca

SEQ ID NO: 414797 - DNA, 25 bp, Artificial
  probe
  misc_feature (1)..(25): SEQ ID NO: 5569; WAN024F4Z; Start 625; Stop 649
agcattgtcatcagcagcgataata

SEQ ID NO: 414798 - DNA, 25 bp, Artificial
  probe
  misc_feature (1)..(25): SEQ ID NO: 5569; WAN024F4Z; Start 186; Stop 210
tttccatacacaacaactcaaacaa

SEQ ID NO: 414799 - DNA, 25 bp, Artificial
  probe
  misc_feature (1)..(25): SEQ ID NO: 5569; WAN024F4Z; Start 632; Stop 656
tcatcagcagcgataatagcaagag

SEQ ID NO: 414800 - DNA, 25 bp, Artificial
  probe
  misc_feature (1)..(25): SEQ ID NO: 5569; WAN024F4Z; Start 361; Stop 385
tgtatctgtcgttccttcaaagaat

SEQ ID NO: 414801 - DNA, 25 bp, Artificial
  probe
  misc_feature (1)..(25): SEQ ID NO: 5569; WAN024F4Z; Start 181; Stop 205
ataggtttccatacacaacaactca

SEQ ID NO: 414802 - DNA, 25 bp, Artificial
  probe
  misc_feature (1)..(25): SEQ ID NO: 5569; WAN024F4Z; Start 179; Stop 203
tgataggtttccatacacaacaact

SEQ ID NO: 414803 - DNA, 25 bp, Artificial
  probe
  misc_feature (1)..(25): SEQ ID NO: 5569; WAN024F4Z; Start 178; Stop 202
ctgataggtttccatacacaacaac

SEQ ID NO: 414804 - DNA, 25 bp, Artificial
  probe
  misc_feature (1)..(25): SEQ ID NO: 5569; WAN024F4Z; Start 182; Stop 206
taggtttccatacacaacaactcaa

SEQ ID NO: 414805 - DNA, 25 bp, Artificial
  probe
  misc_feature (1)..(25): SEQ ID NO: 5569; WAN024F4Z; Start 180; Stop 204
gataggtttccatacacaacaactc

SEQ ID NO: 414806 - DNA, 25 bp, Artificial
  probe
  misc_feature (1)..(25): SEQ ID NO: 5569; WAN024F4Z; Start 631; Stop 655
gtcatcagcagcgataatagcaaga

SEQ ID NO: 414807 - DNA, 25 bp, Artificial
  probe
  misc_feature (1)..(25): SEQ ID NO: 5569; WAN024F4Z; Start 364; Stop 388
atctgtcgttccttcaaagaatttc

SEQ ID NO: 414808 - DNA, 25 bp, Artificial
  probe
  misc_feature (1)..(25): SEQ ID NO: 5569; WAN024F4Z; Start 360; Stop 384
ctgtatctgtcgttccttcaaagaa

SEQ ID NO: 414809 - DNA, 25 bp, Artificial
  probe
  misc_feature (1)..(25): SEQ ID NO: 5569; WAN024F4Z; Start 362; Stop 386
gtatctgtcgttccttcaaagaatt

SEQ ID NO: 414810 - DNA, 25 bp, Artificial
  probe
  misc_feature (1)..(25): SEQ ID NO: 5569; WAN024F4Z; Start 308; Stop 332
ctctgctcctatttgaccaacattt

SEQ ID NO: 414811 - DNA, 25 bp, Artificial
  probe
  misc_feature (1)..(25): SEQ ID NO: 5569; WAN024F4Z; Start 183; Stop 207
aggtttccatacacaacaactcaaa

SEQ ID NO: 414812 - DNA, 25 bp, Artificial
  probe
  misc_feature (1)..(25): SEQ ID NO: 5569; WAN024F4Z; Start 629; Stop 653
ttgtcatcagcagcgataatagcaa

SEQ ID NO: 414813 - DNA, 25 bp, Artificial
  probe
  misc_feature (1)..(25): SEQ ID NO: 5569; WAN024F4Z; Start 630; Stop 654
tgtcatcagcagcgataatagcaag

SEQ ID NO: 414814 - DNA, 25 bp, Artificial
  probe
  misc_feature (1)..(25): SEQ ID NO: 5569; WAN024F4Z; Start 365; Stop 389
tctgtcgttccttcaaagaatttct

SEQ ID NO: 414815 - DNA, 25 bp, Artificial
  probe
  misc_feature (1)..(25): SEQ ID NO: 5569; WAN024F4Z; Start 363; Stop 387
tatctgtcgttccttcaaagaattt

SEQ ID NO: 414816 - DNA, 25 bp, Artificial
  probe
  misc_feature (1)..(25): SEQ ID NO: 5569; WAN024F4Z; Start 69; Stop 93
cttccaattcagtgtcggtcatctc

SEQ ID NO: 414817 - DNA, 25 bp, Artificial
  probe
  misc_feature (1)..(25): SEQ ID NO: 5569; WAN024F4Z; Start 177; Stop 201
cctgataggtttccatacacaacaa

SEQ ID NO: 414818 - DNA, 25 bp, Artificial
  probe
  misc_feature (1)..(25): SEQ ID NO: 5569; WAN024F4Z; Start 70; Stop 94
ttccaattcagtgtcggtcatctct

SEQ ID NO: 414819 - DNA, 25 bp, Artificial
  probe
  misc_feature (1)..(25): SEQ ID NO: 5569; WAN024F4Z; Start 434; Stop 458
gcttccatagcttcttccaattctt

SEQ ID NO: 414820 - DNA, 25 bp, Artificial
  probe
  misc_feature (1)..(25): SEQ ID NO: 5569; WAN024F4Z; Start 624; Stop 648
cagcattgtcatcagcagcgataat

SEQ ID NO: 414821 - DNA, 25 bp, Artificial
  probe
  misc_feature (1)..(25): SEQ ID NO: 5569; WAN024F4Z; Start 359; Stop 383
gctgtatctgtcgttccttcaaaga

SEQ ID NO: 414822 - DNA, 25 bp, Artificial
  probe
  misc_feature (1)..(25): SEQ ID NO: 5569; WAN024F4Z; Start 633; Stop 657
catcagcagcgataatagcaagagc

SEQ ID NO: 414823 - DNA, 25 bp, Artificial
  probe
  misc_feature (1)..(25): SEQ ID NO: 5569; WAN024F4Z; Start 185; Stop 209
gtttccatacacaacaactcaaaca

SEQ ID NO: 414824 - DNA, 25 bp, Artificial
  probe
  misc_feature (1)..(25): SEQ ID NO: 5569; WAN024F4Z; Start 184; Stop 208
ggtttccatacacaacaactcaaac

SEQ ID NO: 414825 - DNA, 25 bp, Artificial
  probe
  misc_feature (1)..(25): SEQ ID NO: 5569; WAN024F4Z; Start 174; Stop 198
ctgcctgataggtttccatacacaa

SEQ ID NO: 414826 - DNA, 25 bp, Artificial
  probe
  misc_feature (1)..(25): SEQ ID NO: 5570; WAN024F3E; Start 10; Stop 34
gatgctaccaaggttgacatagata

SEQ ID NO: 414827 - DNA, 25 bp, Artificial
  probe
  misc_feature (1)..(25): SEQ ID NO: 5570; WAN024F3E; Start 11; Stop 35
atgctaccaaggttgacatagataa

SEQ ID NO: 414828 - DNA, 25 bp, Artificial
  probe
  misc_feature (1)..(25): SEQ ID NO: 5570; WAN024F3E; Start 89; Stop 113
ttgtaagtattgtaagtgatggcac

SEQ ID NO: 414829 - DNA, 25 bp, Artificial
  probe
  misc_feature (1)..(25): SEQ ID NO: 5570; WAN024F3E; Start 90; Stop 114
tgtaagtattgtaagtgatggcacg

SEQ ID NO: 414830 - DNA, 25 bp, Artificial
  probe
  misc_feature (1)..(25): SEQ ID NO: 5570; WAN024F3E; Start 9; Stop 33
cgatgctaccaaggttgacatagat

SEQ ID NO: 414831 - DNA, 25 bp, Artificial
  probe
  misc_feature (1)..(25): SEQ ID NO: 5570; WAN024F3E; Start 12; Stop 36
tgctaccaaggttgacatagataaa

SEQ ID NO: 414832 - DNA, 25 bp, Artificial
  probe
  misc_feature (1)..(25): SEQ ID NO: 5570; WAN024F3E; Start 88; Stop 112
tttgtaagtattgtaagtgatggca

SEQ ID NO: 414833 - DNA, 25 bp, Artificial
  probe
  misc_feature (1)..(25): SEQ ID NO: 5570; WAN024F3E; Start 19; Stop 43
aaggttgacatagataaagcggttg

SEQ ID NO: 414834 - DNA, 25 bp, Artificial
  probe
  misc_feature (1)..(25): SEQ ID NO: 5570; WAN024F3E; Start 15; Stop 39
taccaaggttgacatagataaagcg

SEQ ID NO: 414835 - DNA, 25 bp, Artificial
  probe
  misc_feature (1)..(25): SEQ ID NO: 5570; WAN024F3E; Start 14; Stop 38
ctaccaaggttgacatagataaagc

SEQ ID NO: 414836 - DNA, 25 bp, Artificial
  probe
  misc_feature (1)..(25): SEQ ID NO: 5570; WAN024F3E; Start 13; Stop 37
gctaccaaggttgacatagataaag

SEQ ID NO: 414837 - DNA, 25 bp, Artificial
  probe
  misc_feature (1)..(25): SEQ ID NO: 5570; WAN024F3E; Start 18; Stop 42
caaggttgacatagataaagcggtt

SEQ ID NO: 414838 - DNA, 25 bp, Artificial
  probe
  misc_feature (1)..(25): SEQ ID NO: 5570; WAN024F3E; Start 87; Stop 111
ctttgtaagtattgtaagtgatggc

SEQ ID NO: 414839 - DNA, 25 bp, Artificial
  probe
  misc_feature (1)..(25): SEQ ID NO: 5570; WAN024F3E; Start 72; Stop 96
tttcttgctcatgttctttgtaagt

SEQ ID NO: 414840 - DNA, 25 bp, Artificial
  probe
  misc_feature (1)..(25): SEQ ID NO: 5570; WAN024F3E; Start 91; Stop 115
gtaagtattgtaagtgatggcacgt

SEQ ID NO: 414841 - DNA, 25 bp, Artificial
  probe
  misc_feature (1)..(25): SEQ ID NO: 5570; WAN024F3E; Start 77; Stop 101
tgctcatgttctttgtaagtattgt

SEQ ID NO: 414842 - DNA, 25 bp, Artificial
  probe
  misc_feature (1)..(25): SEQ ID NO: 5570; WAN024F3E; Start 49; Stop 73
gcgttctactgtaccagacatgatt

SEQ ID NO: 414843 - DNA, 25 bp, Artificial
  probe
  misc_feature (1)..(25): SEQ ID NO: 5570; WAN024F3E; Start 73; Stop 97
ttcttgctcatgttctttgtaagta

SEQ ID NO: 414844 - DNA, 25 bp, Artificial
  probe
  misc_feature (1)..(25): SEQ ID NO: 5570; WAN024F3E; Start 69; Stop 93
tgatttcttgctcatgttctttgta

SEQ ID NO: 414845 - DNA, 25 bp, Artificial
  probe
  misc_feature (1)..(25): SEQ ID NO: 5570; WAN024F3E; Start 7; Stop 31
ttcgatgctaccaaggttgacatag

SEQ ID NO: 414846 - DNA, 25 bp, Artificial
  probe
  misc_feature (1)..(25): SEQ ID NO: 5570; WAN024F3E; Start 6; Stop 30
cttcgatgctaccaaggttgacata

SEQ ID NO: 414847 - DNA, 25 bp, Artificial
  probe
  misc_feature (1)..(25): SEQ ID NO: 5570; WAN024F3E; Start 70; Stop 94
gatttcttgctcatgttctttgtaa

SEQ ID NO: 414848 - DNA, 25 bp, Artificial
  probe
  misc_feature (1)..(25): SEQ ID NO: 5570; WAN024F3E; Start 74; Stop 98
tcttgctcatgttctttgtaagtat

SEQ ID NO: 414849 - DNA, 25 bp, Artificial
  probe
  misc_feature (1)..(25): SEQ ID NO: 5570; WAN024F3E; Start 71; Stop 95
atttcttgctcatgttctttgtaag

SEQ ID NO: 414850 - DNA, 25 bp, Artificial
  probe
  misc_feature (1)..(25): SEQ ID NO: 5570; WAN024F3E; Start 50; Stop 74
cgttctactgtaccagacatgattt

SEQ ID NO: 414851 - DNA, 25 bp, Artificial
  probe
  misc_feature (1)..(25): SEQ ID NO: 5570; WAN024F3E; Start 26; Stop 50
acatagataaagcggttgtcaaagc

SEQ ID NO: 414852 - DNA, 25 bp, Artificial
  probe
  misc_feature (1)..(25): SEQ ID NO: 5570; WAN024F3E; Start 55; Stop 79
tactgtaccagacatgatttcttgc

SEQ ID NO: 414853 - DNA, 25 bp, Artificial
  probe
  misc_feature (1)..(25): SEQ ID NO: 5570; WAN024F3E; Start 54; Stop 78
ctactgtaccagacatgatttcttg

SEQ ID NO: 414854 - DNA, 25 bp, Artificial
  probe
  misc_feature (1)..(25): SEQ ID NO: 5570; WAN024F3E; Start 53; Stop 77
tctactgtaccagacatgatttctt

SEQ ID NO: 414855 - DNA, 25 bp, Artificial
  probe
  misc_feature (1)..(25): SEQ ID NO: 5570; WAN024F3E; Start 52; Stop 76
ttctactgtaccagacatgatttct

SEQ ID NO: 414856 - DNA, 25 bp, Artificial
  probe
  misc_feature (1)..(25): SEQ ID NO: 5570; WAN024F3E; Start 51; Stop 75
gttctactgtaccagacatgatttc

SEQ ID NO: 414857 - DNA, 25 bp, Artificial
  probe
  misc_feature (1)..(25): SEQ ID NO: 5570; WAN024F3E; Start 76; Stop 100
ttgctcatgttctttgtaagtattg

SEQ ID NO: 414858 - DNA, 25 bp, Artificial
  probe
  misc_feature (1)..(25): SEQ ID NO: 5570; WAN024F3E; Start 27; Stop 51
catagataaagcggttgtcaaagcg

SEQ ID NO: 414859 - DNA, 25 bp, Artificial
  probe
  misc_feature (1)..(25): SEQ ID NO: 5571; WAN024DP9; Start 5; Stop 29
gcttgatggctatgctactaataac

SEQ ID NO: 414860 - DNA, 25 bp, Artificial
  probe
  misc_feature (1)..(25): SEQ ID NO: 5571; WAN024DP9; Start 4; Stop 28
ggcttgatggctatgctactaataa

SEQ ID NO: 414861 - DNA, 25 bp, Artificial
  probe
  misc_feature (1)..(25): SEQ ID NO: 5571; WAN024DP9; Start 6; Stop 30
cttgatggctatgctactaataaca

SEQ ID NO: 414862 - DNA, 25 bp, Artificial
  probe
  misc_feature (1)..(25): SEQ ID NO: 5571; WAN024DP9; Start 8; Stop 32
tgatggctatgctactaataacaat

SEQ ID NO: 414863 - DNA, 25 bp, Artificial
  probe
  misc_feature (1)..(25): SEQ ID NO: 5571; WAN024DP9; Start 7; Stop 31
ttgatggctatgctactaataacaa

SEQ ID NO: 414864 - DNA, 25 bp, Artificial
  probe
  misc_feature (1)..(25): SEQ ID NO: 5571; WAN024DP9; Start 9; Stop 33
gatggctatgctactaataacaatt

SEQ ID NO: 414865 - DNA, 25 bp, Artificial
  probe
  misc_feature (1)..(25): SEQ ID NO: 5571; WAN024DP9; Start 3; Stop 27
gggcttgatggctatgctactaata

SEQ ID NO: 414866 - DNA, 25 bp, Artificial
  probe
  misc_feature (1)..(25): SEQ ID NO: 5571; WAN024DP9; Start 10; Stop 34
atggctatgctactaataacaatta

SEQ ID NO: 414867 - DNA, 25 bp, Artificial
  probe
  misc_feature (1)..(25): SEQ ID NO: 5571; WAN024DP9; Start 31; Stop 55
attaggagagaaaatcaggcacttg

SEQ ID NO: 414868 - DNA, 25 bp, Artificial
  probe
  misc_feature (1)..(25): SEQ ID NO: 5571; WAN024DP9; Start 30; Stop 54
aattaggagagaaaatcaggcactt

SEQ ID NO: 414869 - DNA, 25 bp, Artificial
  probe
  misc_feature (1)..(25): SEQ ID NO: 5571; WAN024DP9; Start 27; Stop 51
aacaattaggagagaaaatcaggca

SEQ ID NO: 414870 - DNA, 25 bp, Artificial
  probe
  misc_feature (1)..(25): SEQ ID NO: 5571; WAN024DP9; Start 29; Stop 53
caattaggagagaaaatcaggcact

SEQ ID NO: 414871 - DNA, 25 bp, Artificial
  probe
  misc_feature (1)..(25): SEQ ID NO: 5571; WAN024DP9; Start 28; Stop 52
acaattaggagagaaaatcaggcac

SEQ ID NO: 414872 - DNA, 25 bp, Artificial
  probe
  misc_feature (1)..(25): SEQ ID NO: 5571; WAN024DP9; Start 35; Stop 59
ggagagaaaatcaggcacttgttaa

SEQ ID NO: 414873 - DNA, 25 bp, Artificial
  probe
  misc_feature (1)..(25): SEQ ID NO: 5571; WAN024DP9; Start 2; Stop 26
tgggcttgatggctatgctactaat

SEQ ID NO: 414874 - DNA, 25 bp, Artificial
  probe
  misc_feature (1)..(25): SEQ ID NO: 5571; WAN024DP9; Start 26; Stop 50
taacaattaggagagaaaatcaggc

SEQ ID NO: 414875 - DNA, 25 bp, Artificial
  probe
  misc_feature (1)..(25): SEQ ID NO: 5571; WAN024DP9; Start 1; Stop 25
ttgggcttgatggctatgctactaa

SEQ ID NO: 414876 - DNA, 25 bp, Artificial
  probe
  misc_feature (1)..(25): SEQ ID NO: 5571; WAN024DP9; Start 34; Stop 58
aggagagaaaatcaggcacttgtta

SEQ ID NO: 414877 - DNA, 25 bp, Artificial
  probe
  misc_feature (1)..(25): SEQ ID NO: 5571; WAN024DP9; Start 33; Stop 57
taggagagaaaatcaggcacttgtt

SEQ ID NO: 414878 - DNA, 25 bp, Artificial
  probe
  misc_feature (1)..(25): SEQ ID NO: 5571; WAN024DP9; Start 32; Stop 56
ttaggagagaaaatcaggcacttgt

SEQ ID NO: 414879 - DNA, 25 bp, Artificial
  probe
  misc_feature (1)..(25): SEQ ID NO: 5571; WAN024DP9; Start 12; Stop 36
ggctatgctactaataacaattagg

SEQ ID NO: 414880 - DNA, 25 bp, Artificial
  probe
  misc_feature (1)..(25): SEQ ID NO: 5571; WAN024DP9; Start 76; Stop 100
cttgagatgaaaggaactttagaaa

SEQ ID NO: 414881 - DNA, 25 bp, Artificial
  probe
  misc_feature (1)..(25): SEQ ID NO: 5571; WAN024DP9; Start 17; Stop 41
tgctactaataacaattaggagaga

SEQ ID NO: 414882 - DNA, 25 bp, Artificial
  probe
  misc_feature (1)..(25): SEQ ID NO: 5571; WAN024DP9; Start 78; Stop 102
tgagatgaaaggaactttagaaatc

SEQ ID NO: 414883 - DNA, 25 bp, Artificial
  probe
  misc_feature (1)..(25): SEQ ID NO: 5571; WAN024DP9; Start 79; Stop 103
gagatgaaaggaactttagaaatct

SEQ ID NO: 414884 - DNA, 25 bp, Artificial
  probe
  misc_feature (1)..(25): SEQ ID NO: 5571; WAN024DP9; Start 11; Stop 35
tggctatgctactaataacaattag

SEQ ID NO: 414885 - DNA, 25 bp, Artificial
  probe
  misc_feature (1)..(25): SEQ ID NO: 5571; WAN024DP9; Start 74; Stop 98
cccttgagatgaaaggaactttaga

SEQ ID NO: 414886 - DNA, 25 bp, Artificial
  probe
  misc_feature (1)..(25): SEQ ID NO: 5571; WAN024DP9; Start 77; Stop 101
ttgagatgaaaggaactttagaaat

SEQ ID NO: 414887 - DNA, 25 bp, Artificial
  probe
  misc_feature (1)..(25): SEQ ID NO: 5571; WAN024DP9; Start 13; Stop 37
gctatgctactaataacaattagga

SEQ ID NO: 414888 - DNA, 25 bp, Artificial
  probe
  misc_feature (1)..(25): SEQ ID NO: 5571; WAN024DP9; Start 75; Stop 99
ccttgagatgaaaggaactttagaa

SEQ ID NO: 414889 - DNA, 25 bp, Artificial
  probe
  misc_feature (1)..(25): SEQ ID NO: 5571; WAN024DP9; Start 80; Stop 104
agatgaaaggaactttagaaatctt

SEQ ID NO: 414890 - DNA, 25 bp, Artificial
  probe
  misc_feature (1)..(25): SEQ ID NO: 5571; WAN024DP9; Start 36; Stop 60
gagagaaaatcaggcacttgttaac

SEQ ID NO: 414891 - DNA, 25 bp, Artificial
  probe
  misc_feature (1)..(25): SEQ ID NO: 5571; WAN024DP9; Start 25; Stop 49
ataacaattaggagagaaaatcagg

SEQ ID NO: 414892 - DNA, 25 bp, Artificial
  probe
  misc_feature (1)..(25): SEQ ID NO: 5572; WAN024FYP; Start 101; Stop 125
ttgagaagagattcctcgatgttac

SEQ ID NO: 414893 - DNA, 25 bp, Artificial
  probe
  misc_feature (1)..(25): SEQ ID NO: 5572; WAN024FYP; Start 100; Stop 124
cttgagaagagattcctcgatgtta

SEQ ID NO: 414894 - DNA, 25 bp, Artificial
  probe
  misc_feature (1)..(25): SEQ ID NO: 5572; WAN024FYP; Start 19; Stop 43
ttcaatcaaggcatcatcagaaact

SEQ ID NO: 414895 - DNA, 25 bp, Artificial
  probe
  misc_feature (1)..(25): SEQ ID NO: 5572; WAN024FYP; Start 48; Stop 72
caagttcaggtatttcattgtggtg

SEQ ID NO: 414896 - DNA, 25 bp, Artificial
  probe
  misc_feature (1)..(25): SEQ ID NO: 5572; WAN024FYP; Start 49; Stop 73
aagttcaggtatttcattgtggtgc

SEQ ID NO: 414897 - DNA, 25 bp, Artificial
  probe
  misc_feature (1)..(25): SEQ ID NO: 5572; WAN024FYP; Start 102; Stop 126
tgagaagagattcctcgatgttacg

SEQ ID NO: 414898 - DNA, 25 bp, Artificial
  probe
  misc_feature (1)..(25): SEQ ID NO: 5572; WAN024FYP; Start 99; Stop 123
ccttgagaagagattcctcgatgtt

SEQ ID NO: 414899 - DNA, 25 bp, Artificial
  probe
  misc_feature (1)..(25): SEQ ID NO: 5572; WAN024FYP; Start 47; Stop 71
gcaagttcaggtatttcattgtggt

SEQ ID NO: 414900 - DNA, 25 bp, Artificial
  probe
  misc_feature (1)..(25): SEQ ID NO: 5572; WAN024FYP; Start 20; Stop 44
tcaatcaaggcatcatcagaaactg

SEQ ID NO: 414901 - DNA, 25 bp, Artificial
  probe
  misc_feature (1)..(25): SEQ ID NO: 5572; WAN024FYP; Start 18; Stop 42
tttcaatcaaggcatcatcagaaac

SEQ ID NO: 414902 - DNA, 25 bp, Artificial
  probe
  misc_feature (1)..(25): SEQ ID NO: 5572; WAN024FYP; Start 197; Stop 221
tcaaatgggaaacgtggaatcttag

SEQ ID NO: 414903 - DNA, 25 bp, Artificial
  probe
  misc_feature (1)..(25): SEQ ID NO: 5572; WAN024FYP; Start 103; Stop 127
gagaagagattcctcgatgttacga

SEQ ID NO: 414904 - DNA, 25 bp, Artificial
  probe
  misc_feature (1)..(25): SEQ ID NO: 5572; WAN024FYP; Start 196; Stop 220
gtcaaatgggaaacgtggaatctta

SEQ ID NO: 414905 - DNA, 25 bp, Artificial
  probe
  misc_feature (1)..(25): SEQ ID NO: 5572; WAN024FYP; Start 104; Stop 128
agaagagattcctcgatgttacgac

SEQ ID NO: 414906 - DNA, 25 bp, Artificial
  probe
  misc_feature (1)..(25): SEQ ID NO: 5572; WAN024FYP; Start 186; Stop 210
tttcaaacttgtcaaatgggaaacg

SEQ ID NO: 414907 - DNA, 25 bp, Artificial
  probe
  misc_feature (1)..(25): SEQ ID NO: 5572; WAN024FYP; Start 204; Stop 228
ggaaacgtggaatcttagcaactac

SEQ ID NO: 414908 - DNA, 25 bp, Artificial
  probe
  misc_feature (1)..(25): SEQ ID NO: 5572; WAN024FYP; Start 178; Stop 202
ttcacccttttcaaacttgtcaaat

SEQ ID NO: 414909 - DNA, 25 bp, Artificial
  probe
  misc_feature (1)..(25): SEQ ID NO: 5572; WAN024FYP; Start 179; Stop 203
tcacccttttcaaacttgtcaaatg

SEQ ID NO: 414910 - DNA, 25 bp, Artificial
  probe
  misc_feature (1)..(25): SEQ ID NO: 5572; WAN024FYP; Start 45; Stop 69
ctgcaagttcaggtatttcattgtg

SEQ ID NO: 414911 - DNA, 25 bp, Artificial
  probe
  misc_feature (1)..(25): SEQ ID NO: 5572; WAN024FYP; Start 16; Stop 40
cttttcaatcaaggcatcatcagaa

SEQ ID NO: 414912 - DNA, 25 bp, Artificial
  probe
  misc_feature (1)..(25): SEQ ID NO: 5572; WAN024FYP; Start 187; Stop 211
ttcaaacttgtcaaatgggaaacgt

SEQ ID NO: 414913 - DNA, 25 bp, Artificial
  probe
  misc_feature (1)..(25): SEQ ID NO: 5572; WAN024FYP; Start 183; Stop 207
ccttttcaaacttgtcaaatgggaa

SEQ ID NO: 414914 - DNA, 25 bp, Artificial
  probe
  misc_feature (1)..(25): SEQ ID NO: 5572; WAN024FYP; Start 177; Stop 201
gttcacccttttcaaacttgtcaaa

SEQ ID NO: 414915 - DNA, 25 bp, Artificial
  probe
  misc_feature (1)..(25): SEQ ID NO: 5572; WAN024FYP; Start 46; Stop 70
tgcaagttcaggtatttcattgtgg

SEQ ID NO: 414916 - DNA, 25 bp, Artificial
  probe
  misc_feature (1)..(25): SEQ ID NO: 5572; WAN024FYP; Start 180; Stop 204
cacccttttcaaacttgtcaaatgg

SEQ ID NO: 414917 - DNA, 25 bp, Artificial
  probe
  misc_feature (1)..(25): SEQ ID NO: 5572; WAN024FYP; Start 198; Stop 222
caaatgggaaacgtggaatcttagc

SEQ ID NO: 414918 - DNA, 25 bp, Artificial
  probe
  misc_feature (1)..(25): SEQ ID NO: 5572; WAN024FYP; Start 188; Stop 212
tcaaacttgtcaaatgggaaacgtg

SEQ ID NO: 414919 - DNA, 25 bp, Artificial
  probe
  misc_feature (1)..(25): SEQ ID NO: 5572; WAN024FYP; Start 105; Stop 129
gaagagattcctcgatgttacgacc

SEQ ID NO: 414920 - DNA, 25 bp, Artificial
  probe
  misc_feature (1)..(25): SEQ ID NO: 5572; WAN024FYP; Start 42; Stop 66
ctgctgcaagttcaggtatttcatt

SEQ ID NO: 414921 - DNA, 25 bp, Artificial
  probe
  misc_feature (1)..(25): SEQ ID NO: 5572; WAN024FYP; Start 203; Stop 227
gggaaacgtggaatcttagcaacta

SEQ ID NO: 414922 - DNA, 25 bp, Artificial
  probe
  misc_feature (1)..(25): SEQ ID NO: 5572; WAN024FYP; Start 193; Stop 217
cttgtcaaatgggaaacgtggaatc

SEQ ID NO: 414923 - DNA, 25 bp, Artificial
  probe
  misc_feature (1)..(25): SEQ ID NO: 5572; WAN024FYP; Start 200; Stop 224
aatgggaaacgtggaatcttagcaa

SEQ ID NO: 414924 - DNA, 25 bp, Artificial
  probe
  misc_feature (1)..(25): SEQ ID NO: 5572; WAN024FYP; Start 199; Stop 223
aaatgggaaacgtggaatcttagca

SEQ ID NO: 414925 - DNA, 25 bp, Artificial
  probe
  misc_feature (1)..(25): SEQ ID NO: 5573; WAN024GIT; Start 12; Stop 36
ggttatccgaagcaaggttactcaa

SEQ ID NO: 414926 - DNA, 25 bp, Artificial
  probe
  misc_feature (1)..(25): SEQ ID NO: 5573; WAN024GIT; Start 136; Stop 160
aatctcattgacttcacgcttgatt

SEQ ID NO: 414927 - DNA, 25 bp, Artificial
  probe
  misc_feature (1)..(25): SEQ ID NO: 5573; WAN024GIT; Start 13; Stop 37
gttatccgaagcaaggttactcaaa

SEQ ID NO: 414928 - DNA, 25 bp, Artificial
  probe
  misc_feature (1)..(25): SEQ ID NO: 5573; WAN024GIT; Start 10; Stop 34
ttggttatccgaagcaaggttactc

SEQ ID NO: 414929 - DNA, 25 bp, Artificial
  probe
  misc_feature (1)..(25): SEQ ID NO: 5573; WAN024GIT; Start 137; Stop 161
atctcattgacttcacgcttgattt

SEQ ID NO: 414930 - DNA, 25 bp, Artificial
  probe
  misc_feature (1)..(25): SEQ ID NO: 5573; WAN024GIT; Start 135; Stop 159
aaatctcattgacttcacgcttgat

SEQ ID NO: 414931 - DNA, 25 bp, Artificial
  probe
  misc_feature (1)..(25): SEQ ID NO: 5573; WAN024GIT; Start 42; Stop 66
tgtaataaaccttggcaacagacaa

SEQ ID NO: 414932 - DNA, 25 bp, Artificial
  probe
  misc_feature (1)..(25): SEQ ID NO: 5573; WAN024GIT; Start 138; Stop 162
tctcattgacttcacgcttgatttc

SEQ ID NO: 414933 - DNA, 25 bp, Artificial
  probe
  misc_feature (1)..(25): SEQ ID NO: 5573; WAN024GIT; Start 11; Stop 35
tggttatccgaagcaaggttactca

SEQ ID NO: 414934 - DNA, 25 bp, Artificial
  probe
  misc_feature (1)..(25): SEQ ID NO: 5573; WAN024GIT; Start 41; Stop 65
gtgtaataaaccttggcaacagaca

SEQ ID NO: 414935 - DNA, 25 bp, Artificial
  probe
  misc_feature (1)..(25): SEQ ID NO: 5573; WAN024GIT; Start 201; Stop 225
tattcctttctctactttgaaccaa

SEQ ID NO: 414936 - DNA, 25 bp, Artificial
  probe
  misc_feature (1)..(25): SEQ ID NO: 5573; WAN024GIT; Start 200; Stop 224
atattcctttctctactttgaacca

SEQ ID NO: 414937 - DNA, 25 bp, Artificial
  probe
  misc_feature (1)..(25): SEQ ID NO: 5573; WAN024GIT; Start 36; Stop 60
aaatggtgtaataaaccttggcaac

SEQ ID NO: 414938 - DNA, 25 bp, Artificial
  probe
  misc_feature (1)..(25): SEQ ID NO: 5573; WAN024GIT; Start 9; Stop 33
tttggttatccgaagcaaggttact

SEQ ID NO: 414939 - DNA, 25 bp, Artificial
  probe
  misc_feature (1)..(25): SEQ ID NO: 5573; WAN024GIT; Start 141; Stop 165
cattgacttcacgcttgatttccat

SEQ ID NO: 414940 - DNA, 25 bp, Artificial
  probe
  misc_feature (1)..(25): SEQ ID NO: 5573; WAN024GIT; Start 37; Stop 61
aatggtgtaataaaccttggcaaca

SEQ ID NO: 414941 - DNA, 25 bp, Artificial
  probe
  misc_feature (1)..(25): SEQ ID NO: 5573; WAN024GIT; Start 199; Stop 223
gatattcctttctctactttgaacc

SEQ ID NO: 414942 - DNA, 25 bp, Artificial
  probe
  misc_feature (1)..(25): SEQ ID NO: 5573; WAN024GIT; Start 139; Stop 163
ctcattgacttcacgcttgatttcc

SEQ ID NO: 414943 - DNA, 25 bp, Artificial
  probe
  misc_feature (1)..(25): SEQ ID NO: 5573; WAN024GIT; Start 38; Stop 62
atggtgtaataaaccttggcaacag

SEQ ID NO: 414944 - DNA, 25 bp, Artificial
  probe
  misc_feature (1)..(25): SEQ ID NO: 5573; WAN024GIT; Start 142; Stop 166
attgacttcacgcttgatttccatg

SEQ ID NO: 414945 - DNA, 25 bp, Artificial
  probe
  misc_feature (1)..(25): SEQ ID NO: 5573; WAN024GIT; Start 195; Stop 219
ccatgatattcctttctctactttg

SEQ ID NO: 414946 - DNA, 25 bp, Artificial
  probe
  misc_feature (1)..(25): SEQ ID NO: 5573; WAN024GIT; Start 15; Stop 39
tatccgaagcaaggttactcaaaat

SEQ ID NO: 414947 - DNA, 25 bp, Artificial
  probe
  misc_feature (1)..(25): SEQ ID NO: 5573; WAN024GIT; Start 14; Stop 38
ttatccgaagcaaggttactcaaaa

SEQ ID NO: 414948 - DNA, 25 bp, Artificial
  probe
  misc_feature (1)..(25): SEQ ID NO: 5573; WAN024GIT; Start 21; Stop 45
aagcaaggttactcaaaatggtgta

SEQ ID NO: 414949 - DNA, 25 bp, Artificial
  probe
  misc_feature (1)..(25): SEQ ID NO: 5573; WAN024GIT; Start 40; Stop 64
ggtgtaataaaccttggcaacagac

SEQ ID NO: 414950 - DNA, 25 bp, Artificial
  probe
  misc_feature (1)..(25): SEQ ID NO: 5573; WAN024GIT; Start 198; Stop 222
tgatattcctttctctactttgaac

SEQ ID NO: 414951 - DNA, 25 bp, Artificial
  probe
  misc_feature (1)..(25): SEQ ID NO: 5573; WAN024GIT; Start 140; Stop 164
tcattgacttcacgcttgatttcca

SEQ ID NO: 414952 - DNA, 25 bp, Artificial
  probe
  misc_feature (1)..(25): SEQ ID NO: 5573; WAN024GIT; Start 202; Stop 226
attcctttctctactttgaaccaaa

SEQ ID NO: 414953 - DNA, 25 bp, Artificial
  probe
  misc_feature (1)..(25): SEQ ID NO: 5573; WAN024GIT; Start 39; Stop 63
tggtgtaataaaccttggcaacaga

SEQ ID NO: 414954 - DNA, 25 bp, Artificial
  probe
  misc_feature (1)..(25): SEQ ID NO: 5573; WAN024GIT; Start 16; Stop 40
atccgaagcaaggttactcaaaatg

SEQ ID NO: 414955 - DNA, 25 bp, Artificial
  probe
  misc_feature (1)..(25): SEQ ID NO: 5573; WAN024GIT; Start 20; Stop 44
gaagcaaggttactcaaaatggtgt

SEQ ID NO: 414956 - DNA, 25 bp, Artificial
  probe
  misc_feature (1)..(25): SEQ ID NO: 5573; WAN024GIT; Start 133; Stop 157
caaaatctcattgacttcacgcttg

SEQ ID NO: 414957 - DNA, 25 bp, Artificial
  probe
  misc_feature (1)..(25): SEQ ID NO: 5573; WAN024GIT; Start 134; Stop 158
aaaatctcattgacttcacgcttga

SEQ ID NO: 414958 - DNA, 25 bp, Artificial
  probe
  misc_feature (1)..(25): SEQ ID NO: 5574; WAN024CMQ; Start 99; Stop 123
tacgcaggtgattgtactaactaat

SEQ ID NO: 414959 - DNA, 25 bp, Artificial
  probe
  misc_feature (1)..(25): SEQ ID NO: 5574; WAN024CMQ; Start 98; Stop 122
atacgcaggtgattgtactaactaa

SEQ ID NO: 414960 - DNA, 25 bp, Artificial
  probe
  misc_feature (1)..(25): SEQ ID NO: 5574; WAN024CMQ; Start 96; Stop 120
ttatacgcaggtgattgtactaact

SEQ ID NO: 414961 - DNA, 25 bp, Artificial
  probe
  misc_feature (1)..(25): SEQ ID NO: 5574; WAN024CMQ; Start 97; Stop 121
tatacgcaggtgattgtactaacta

SEQ ID NO: 414962 - DNA, 25 bp, Artificial
  probe
  misc_feature (1)..(25): SEQ ID NO: 5574; WAN024CMQ; Start 43; Stop 67
acagcagtcatcacagacgatagta

SEQ ID NO: 414963 - DNA, 25 bp, Artificial
  probe
  misc_feature (1)..(25): SEQ ID NO: 5574; WAN024CMQ; Start 44; Stop 68
cagcagtcatcacagacgatagtac

SEQ ID NO: 414964 - DNA, 25 bp, Artificial
  probe
  misc_feature (1)..(25): SEQ ID NO: 5574; WAN024CMQ; Start 95; Stop 119
tttatacgcaggtgattgtactaac

SEQ ID NO: 414965 - DNA, 25 bp, Artificial
  probe
  misc_feature (1)..(25): SEQ ID NO: 5574; WAN024CMQ; Start 94; Stop 118
atttatacgcaggtgattgtactaa

SEQ ID NO: 414966 - DNA, 25 bp, Artificial
  probe
  misc_feature (1)..(25): SEQ ID NO: 5574; WAN024CMQ; Start 93; Stop 117
aatttatacgcaggtgattgtacta

SEQ ID NO: 414967 - DNA, 25 bp, Artificial
  probe
  misc_feature (1)..(25): SEQ ID NO: 5574; WAN024CMQ; Start 85; Stop 109
gagttagaaatttatacgcaggtga

SEQ ID NO: 414968 - DNA, 25 bp, Artificial
  probe
  misc_feature (1)..(25): SEQ ID NO: 5574; WAN024CMQ; Start 84; Stop 108
agagttagaaatttatacgcaggtg

SEQ ID NO: 414969 - DNA, 25 bp, Artificial
  probe
  misc_feature (1)..(25): SEQ ID NO: 5574; WAN024CMQ; Start 51; Stop 75
catcacagacgatagtactgaacaa

SEQ ID NO: 414970 - DNA, 25 bp, Artificial
  probe
  misc_feature (1)..(25): SEQ ID NO: 5574; WAN024CMQ; Start 41; Stop 65
tcacagcagtcatcacagacgatag

SEQ ID NO: 414971 - DNA, 25 bp, Artificial
  probe
  misc_feature (1)..(25): SEQ ID NO: 5574; WAN024CMQ; Start 92; Stop 116
aaatttatacgcaggtgattgtact

SEQ ID NO: 414972 - DNA, 25 bp, Artificial
  probe
  misc_feature (1)..(25): SEQ ID NO: 5574; WAN024CMQ; Start 91; Stop 115
gaaatttatacgcaggtgattgtac

SEQ ID NO: 414973 - DNA, 25 bp, Artificial
  probe
  misc_feature (1)..(25): SEQ ID NO: 5574; WAN024CMQ; Start 89; Stop 113
tagaaatttatacgcaggtgattgt

SEQ ID NO: 414974 - DNA, 25 bp, Artificial
  probe
  misc_feature (1)..(25): SEQ ID NO: 5574; WAN024CMQ; Start 49; Stop 73
gtcatcacagacgatagtactgaac

SEQ ID NO: 414975 - DNA, 25 bp, Artificial
  probe
  misc_feature (1)..(25): SEQ ID NO: 5574; WAN024CMQ; Start 48; Stop 72
agtcatcacagacgatagtactgaa

SEQ ID NO: 414976 - DNA, 25 bp, Artificial
  probe
  misc_feature (1)..(25): SEQ ID NO: 5574; WAN024CMQ; Start 90; Stop 114
agaaatttatacgcaggtgattgta

SEQ ID NO: 414977 - DNA, 25 bp, Artificial
  probe
  misc_feature (1)..(25): SEQ ID NO: 5574; WAN024CMQ; Start 50; Stop 74
tcatcacagacgatagtactgaaca

SEQ ID NO: 414978 - DNA, 25 bp, Artificial
  probe
  misc_feature (1)..(25): SEQ ID NO: 5574; WAN024CMQ; Start 86; Stop 110
agttagaaatttatacgcaggtgat

SEQ ID NO: 414979 - DNA, 25 bp, Artificial
  probe
  misc_feature (1)..(25): SEQ ID NO: 5574; WAN024CMQ; Start 83; Stop 107
aagagttagaaatttatacgcaggt

SEQ ID NO: 414980 - DNA, 25 bp, Artificial
  probe
  misc_feature (1)..(25): SEQ ID NO: 5574; WAN024CMQ; Start 42; Stop 66
cacagcagtcatcacagacgatagt

SEQ ID NO: 414981 - DNA, 25 bp, Artificial
  probe
  misc_feature (1)..(25): SEQ ID NO: 5574; WAN024CMQ; Start 40; Stop 64
gtcacagcagtcatcacagacgata

SEQ ID NO: 414982 - DNA, 25 bp, Artificial
  probe
  misc_feature (1)..(25): SEQ ID NO: 5574; WAN024CMQ; Start 82; Stop 106
gaagagttagaaatttatacgcagg

SEQ ID NO: 414983 - DNA, 25 bp, Artificial
  probe
  misc_feature (1)..(25): SEQ ID NO: 5574; WAN024CMQ; Start 45; Stop 69
agcagtcatcacagacgatagtact

SEQ ID NO: 414984 - DNA, 25 bp, Artificial
  probe
  misc_feature (1)..(25): SEQ ID NO: 5574; WAN024CMQ; Start 88; Stop 112
ttagaaatttatacgcaggtgattg

SEQ ID NO: 414985 - DNA, 25 bp, Artificial
  probe
  misc_feature (1)..(25): SEQ ID NO: 5574; WAN024CMQ; Start 87; Stop 111
gttagaaatttatacgcaggtgatt

SEQ ID NO: 414986 - DNA, 25 bp, Artificial
  probe
  misc_feature (1)..(25): SEQ ID NO: 5574; WAN024CMQ; Start 81; Stop 105
tgaagagttagaaatttatacgcag

SEQ ID NO: 414987 - DNA, 25 bp, Artificial
  probe
  misc_feature (1)..(25): SEQ ID NO: 5574; WAN024CMQ; Start 52; Stop 76
atcacagacgatagtactgaacaaa

SEQ ID NO: 414988 - DNA, 25 bp, Artificial
  probe
  misc_feature (1)..(25): SEQ ID NO: 5574; WAN024CMQ; Start 80; Stop 104
atgaagagttagaaatttatacgca

SEQ ID NO: 414989 - DNA, 25 bp, Artificial
  probe
  misc_feature (1)..(25): SEQ ID NO: 5574; WAN024CMQ; Start 47; Stop 71
cagtcatcacagacgatagtactga

SEQ ID NO: 414990 - DNA, 25 bp, Artificial
  probe
  misc_feature (1)..(25): SEQ ID NO: 5574; WAN024CMQ; Start 9; Stop 33
aagattttgcttcatctgttccttg

SEQ ID NO: 414991 - DNA, 25 bp, Artificial
  probe
  misc_feature (1)..(25): SEQ ID NO: 5575; WAN024G4W; Start 131; Stop 155
atccgttcttgaatatggttggtat

SEQ ID NO: 414992 - DNA, 25 bp, Artificial
  probe
  misc_feature (1)..(25): SEQ ID NO: 5575; WAN024G4W; Start 136; Stop 160
ttcttgaatatggttggtatcctga

SEQ ID NO: 414993 - DNA, 25 bp, Artificial
  probe
  misc_feature (1)..(25): SEQ ID NO: 5575; WAN024G4W; Start 135; Stop 159
gttcttgaatatggttggtatcctg

SEQ ID NO: 414994 - DNA, 25 bp, Artificial
  probe
  misc_feature (1)..(25): SEQ ID NO: 5575; WAN024G4W; Start 134; Stop 158
cgttcttgaatatggttggtatcct

SEQ ID NO: 414995 - DNA, 25 bp, Artificial
  probe
  misc_feature (1)..(25): SEQ ID NO: 5575; WAN024G4W; Start 132; Stop 156
tccgttcttgaatatggttggtatc

SEQ ID NO: 414996 - DNA, 25 bp, Artificial
  probe
  misc_feature (1)..(25): SEQ ID NO: 5575; WAN024G4W; Start 137; Stop 161
tcttgaatatggttggtatcctgat

SEQ ID NO: 414997 - DNA, 25 bp, Artificial
  probe
  misc_feature (1)..(25): SEQ ID NO: 5575; WAN024G4W; Start 130; Stop 154
catccgttcttgaatatggttggta

SEQ ID NO: 414998 - DNA, 25 bp, Artificial
  probe
  misc_feature (1)..(25): SEQ ID NO: 5575; WAN024G4W; Start 133; Stop 157
ccgttcttgaatatggttggtatcc

SEQ ID NO: 414999 - DNA, 25 bp, Artificial
  probe
  misc_feature (1)..(25): SEQ ID NO: 5575; WAN024G4W; Start 138; Stop 162
cttgaatatggttggtatcctgata

SEQ ID NO: 415000 - DNA, 25 bp, Artificial
  probe
  misc_feature (1)..(25): SEQ ID NO: 5575; WAN024G4W; Start 110; Stop 134
ccattagacaacaattccagcatcc

SEQ ID NO: 415001 - DNA, 25 bp, Artificial
  probe
  misc_feature (1)..(25): SEQ ID NO: 5575; WAN024G4W; Start 190; Stop 214
ctcctgataagactcacgaacttgt

SEQ ID NO: 415002 - DNA, 25 bp, Artificial
  probe
  misc_feature (1)..(25): SEQ ID NO: 5575; WAN024G4W; Start 111; Stop 135
cattagacaacaattccagcatccg

SEQ ID NO: 415003 - DNA, 25 bp, Artificial
  probe
  misc_feature (1)..(25): SEQ ID NO: 5575; WAN024G4W; Start 127; Stop 151
cagcatccgttcttgaatatggttg

SEQ ID NO: 415004 - DNA, 25 bp, Artificial
  probe
  misc_feature (1)..(25): SEQ ID NO: 5575; WAN024G4W; Start 122; Stop 146
aattccagcatccgttcttgaatat

SEQ ID NO: 415005 - DNA, 25 bp, Artificial
  probe
  misc_feature (1)..(25): SEQ ID NO: 5575; WAN024G4W; Start 112; Stop 136
attagacaacaattccagcatccgt

SEQ ID NO: 415006 - DNA, 25 bp, Artificial
  probe
  misc_feature (1)..(25): SEQ ID NO: 5575; WAN024G4W; Start 109; Stop 133
gccattagacaacaattccagcatc

SEQ ID NO: 415007 - DNA, 25 bp, Artificial
  probe
  misc_feature (1)..(25): SEQ ID NO: 5575; WAN024G4W; Start 61; Stop 85
gaaacgatagatggattgcttgata

SEQ ID NO: 415008 - DNA, 25 bp, Artificial
  probe
  misc_feature (1)..(25): SEQ ID NO: 5575; WAN024G4W; Start 123; Stop 147
attccagcatccgttcttgaatatg

SEQ ID NO: 415009 - DNA, 25 bp, Artificial
  probe
  misc_feature (1)..(25): SEQ ID NO: 5575; WAN024G4W; Start 60; Stop 84
ggaaacgatagatggattgcttgat

SEQ ID NO: 415010 - DNA, 25 bp, Artificial
  probe
  misc_feature (1)..(25): SEQ ID NO: 5575; WAN024G4W; Start 15; Stop 39
catagcgttggaatttctcattgaa

SEQ ID NO: 415011 - DNA, 25 bp, Artificial
  probe
  misc_feature (1)..(25): SEQ ID NO: 5575; WAN024G4W; Start 121; Stop 145
caattccagcatccgttcttgaata

SEQ ID NO: 415012 - DNA, 25 bp, Artificial
  probe
  misc_feature (1)..(25): SEQ ID NO: 5575; WAN024G4W; Start 144; Stop 168
tatggttggtatcctgatactcatc

SEQ ID NO: 415013 - DNA, 25 bp, Artificial
  probe
  misc_feature (1)..(25): SEQ ID NO: 5575; WAN024G4W; Start 113; Stop 137
ttagacaacaattccagcatccgtt

SEQ ID NO: 415014 - DNA, 25 bp, Artificial
  probe
  misc_feature (1)..(25): SEQ ID NO: 5575; WAN024G4W; Start 62; Stop 86
aaacgatagatggattgcttgatat

SEQ ID NO: 415015 - DNA, 25 bp, Artificial
  probe
  misc_feature (1)..(25): SEQ ID NO: 5575; WAN024G4W; Start 191; Stop 215
tcctgataagactcacgaacttgtg

SEQ ID NO: 415016 - DNA, 25 bp, Artificial
  probe
  misc_feature (1)..(25): SEQ ID NO: 5575; WAN024G4W; Start 142; Stop 166
aatatggttggtatcctgatactca

SEQ ID NO: 415017 - DNA, 25 bp, Artificial
  probe
  misc_feature (1)..(25): SEQ ID NO: 5575; WAN024G4W; Start 140; Stop 164
tgaatatggttggtatcctgatact

SEQ ID NO: 415018 - DNA, 25 bp, Artificial
  probe
  misc_feature (1)..(25): SEQ ID NO: 5575; WAN024G4W; Start 143; Stop 167
atatggttggtatcctgatactcat

SEQ ID NO: 415019 - DNA, 25 bp, Artificial
  probe
  misc_feature (1)..(25): SEQ ID NO: 5575; WAN024G4W; Start 128; Stop 152
agcatccgttcttgaatatggttgg

SEQ ID NO: 415020 - DNA, 25 bp, Artificial
  probe
  misc_feature (1)..(25): SEQ ID NO: 5575; WAN024G4W; Start 83; Stop 107
atatctcccaccataaagcgattgt

SEQ ID NO: 415021 - DNA, 25 bp, Artificial
  probe
  misc_feature (1)..(25): SEQ ID NO: 5575; WAN024G4W; Start 189; Stop 213
gctcctgataagactcacgaacttg

SEQ ID NO: 415022 - DNA, 25 bp, Artificial
  probe
  misc_feature (1)..(25): SEQ ID NO: 5575; WAN024G4W; Start 145; Stop 169
atggttggtatcctgatactcatcg

SEQ ID NO: 415023 - DNA, 25 bp, Artificial
  probe
  misc_feature (1)..(25): SEQ ID NO: 5575; WAN024G4W; Start 141; Stop 165
gaatatggttggtatcctgatactc

SEQ ID NO: 415024 - DNA, 25 bp, Artificial
  probe
  misc_feature (1)..(25): SEQ ID NO: 5576; WAN024EYD; Start 151; Stop 175
attgctgattcatgcttgttccatt

SEQ ID NO: 415025 - DNA, 25 bp, Artificial
  probe
  misc_feature (1)..(25): SEQ ID NO: 5576; WAN024EYD; Start 150; Stop 174
gattgctgattcatgcttgttccat

SEQ ID NO: 415026 - DNA, 25 bp, Artificial
  probe
  misc_feature (1)..(25): SEQ ID NO: 5576; WAN024EYD; Start 206; Stop 230
ccacaatgatgactggaatctcata

SEQ ID NO: 415027 - DNA, 25 bp, Artificial
  probe
  misc_feature (1)..(25): SEQ ID NO: 5576; WAN024EYD; Start 148; Stop 172
ttgattgctgattcatgcttgttcc

SEQ ID NO: 415028 - DNA, 25 bp, Artificial
  probe
  misc_feature (1)..(25): SEQ ID NO: 5576; WAN024EYD; Start 155; Stop 179
ctgattcatgcttgttccatttacc

SEQ ID NO: 415029 - DNA, 25 bp, Artificial
  probe
  misc_feature (1)..(25): SEQ ID NO: 5576; WAN024EYD; Start 207; Stop 231
cacaatgatgactggaatctcataa

SEQ ID NO: 415030 - DNA, 25 bp, Artificial
  probe
  misc_feature (1)..(25): SEQ ID NO: 5576; WAN024EYD; Start 157; Stop 181
gattcatgcttgttccatttaccac

SEQ ID NO: 415031 - DNA, 25 bp, Artificial
  probe
  misc_feature (1)..(25): SEQ ID NO: 5576; WAN024EYD; Start 156; Stop 180
tgattcatgcttgttccatttacca

SEQ ID NO: 415032 - DNA, 25 bp, Artificial
  probe
  misc_feature (1)..(25): SEQ ID NO: 5576; WAN024EYD; Start 154; Stop 178
gctgattcatgcttgttccatttac

SEQ ID NO: 415033 - DNA, 25 bp, Artificial
  probe
  misc_feature (1)..(25): SEQ ID NO: 5576; WAN024EYD; Start 153; Stop 177
tgctgattcatgcttgttccattta

SEQ ID NO: 415034 - DNA, 25 bp, Artificial
  probe
  misc_feature (1)..(25): SEQ ID NO: 5576; WAN024EYD; Start 147; Stop 171
tttgattgctgattcatgcttgttc

SEQ ID NO: 415035 - DNA, 25 bp, Artificial
  probe
  misc_feature (1)..(25): SEQ ID NO: 5576; WAN024EYD; Start 152; Stop 176
ttgctgattcatgcttgttccattt

SEQ ID NO: 415036 - DNA, 25 bp, Artificial
  probe
  misc_feature (1)..(25): SEQ ID NO: 5576; WAN024EYD; Start 149; Stop 173
tgattgctgattcatgcttgttcca

SEQ ID NO: 415037 - DNA, 25 bp, Artificial
  probe
  misc_feature (1)..(25): SEQ ID NO: 5576; WAN024EYD; Start 158; Stop 182
attcatgcttgttccatttaccacg

SEQ ID NO: 415038 - DNA, 25 bp, Artificial
  probe
  misc_feature (1)..(25): SEQ ID NO: 5576; WAN024EYD; Start 98; Stop 122
cagatgaaaagaggatgaaatcgtc

SEQ ID NO: 415039 - DNA, 25 bp, Artificial
  probe
  misc_feature (1)..(25): SEQ ID NO: 5576; WAN024EYD; Start 96; Stop 120
gacagatgaaaagaggatgaaatcg

SEQ ID NO: 415040 - DNA, 25 bp, Artificial
  probe
  misc_feature (1)..(25): SEQ ID NO: 5576; WAN024EYD; Start 97; Stop 121
acagatgaaaagaggatgaaatcgt

SEQ ID NO: 415041 - DNA, 25 bp, Artificial
  probe
  misc_feature (1)..(25): SEQ ID NO: 5576; WAN024EYD; Start 29; Stop 53
tgccattttcttttcctcacaattt

SEQ ID NO: 415042 - DNA, 25 bp, Artificial
  probe
  misc_feature (1)..(25): SEQ ID NO: 5576; WAN024EYD; Start 30; Stop 54
gccattttcttttcctcacaatttt

SEQ ID NO: 415043 - DNA, 25 bp, Artificial
  probe
  misc_feature (1)..(25): SEQ ID NO: 5576; WAN024EYD; Start 170; Stop 194
tccatttaccacgaggaatcttgtc

SEQ ID NO: 415044 - DNA, 25 bp, Artificial
  probe
  misc_feature (1)..(25): SEQ ID NO: 5576; WAN024EYD; Start 95; Stop 119
tgacagatgaaaagaggatgaaatc

SEQ ID NO: 415045 - DNA, 25 bp, Artificial
  probe
  misc_feature (1)..(25): SEQ ID NO: 5576; WAN024EYD; Start 94; Stop 118
ctgacagatgaaaagaggatgaaat

SEQ ID NO: 415046 - DNA, 25 bp, Artificial
  probe
  misc_feature (1)..(25): SEQ ID NO: 5576; WAN024EYD; Start 27; Stop 51
tttgccattttcttttcctcacaat

SEQ ID NO: 415047 - DNA, 25 bp, Artificial
  probe
  misc_feature (1)..(25): SEQ ID NO: 5576; WAN024EYD; Start 26; Stop 50
ttttgccattttcttttcctcacaa

SEQ ID NO: 415048 - DNA, 25 bp, Artificial
  probe
  misc_feature (1)..(25): SEQ ID NO: 5576; WAN024EYD; Start 205; Stop 229
gccacaatgatgactggaatctcat

SEQ ID NO: 415049 - DNA, 25 bp, Artificial
  probe
  misc_feature (1)..(25): SEQ ID NO: 5576; WAN024EYD; Start 28; Stop 52
ttgccattttcttttcctcacaatt

SEQ ID NO: 415050 - DNA, 25 bp, Artificial
  probe
  misc_feature (1)..(25): SEQ ID NO: 5576; WAN024EYD; Start 100; Stop 124
gatgaaaagaggatgaaatcgtcac

SEQ ID NO: 415051 - DNA, 25 bp, Artificial
  probe
  misc_feature (1)..(25): SEQ ID NO: 5576; WAN024EYD; Start 99; Stop 123
agatgaaaagaggatgaaatcgtca

SEQ ID NO: 415052 - DNA, 25 bp, Artificial
  probe
  misc_feature (1)..(25): SEQ ID NO: 5576; WAN024EYD; Start 101; Stop 125
atgaaaagaggatgaaatcgtcact

SEQ ID NO: 415053 - DNA, 25 bp, Artificial
  probe
  misc_feature (1)..(25): SEQ ID NO: 5576; WAN024EYD; Start 159; Stop 183
ttcatgcttgttccatttaccacga

SEQ ID NO: 415054 - DNA, 25 bp, Artificial
  probe
  misc_feature (1)..(25): SEQ ID NO: 5576; WAN024EYD; Start 160; Stop 184
tcatgcttgttccatttaccacgag

SEQ ID NO: 415055 - DNA, 25 bp, Artificial
  probe
  misc_feature (1)..(25): SEQ ID NO: 5576; WAN024EYD; Start 146; Stop 170
ttttgattgctgattcatgcttgtt

SEQ ID NO: 415056 - DNA, 25 bp, Artificial
  probe
  misc_feature (1)..(25): SEQ ID NO: 5576; WAN024EYD; Start 171; Stop 195
ccatttaccacgaggaatcttgtcc

SEQ ID NO: 415057 - DNA, 25 bp, Artificial
  probe
  misc_feature (1)..(25): SEQ ID NO: 5577; WAN024GFG; Start 106; Stop 130
actactatcaccagcatcttggaag

SEQ ID NO: 415058 - DNA, 25 bp, Artificial
  probe
  misc_feature (1)..(25): SEQ ID NO: 5577; WAN024GFG; Start 105; Stop 129
gactactatcaccagcatcttggaa

SEQ ID NO: 415059 - DNA, 25 bp, Artificial
  probe
  misc_feature (1)..(25): SEQ ID NO: 5577; WAN024GFG; Start 95; Stop 119
agttgactttgactactatcaccag

SEQ ID NO: 415060 - DNA, 25 bp, Artificial
  probe
  misc_feature (1)..(25): SEQ ID NO: 5577; WAN024GFG; Start 94; Stop 118
gagttgactttgactactatcacca

SEQ ID NO: 415061 - DNA, 25 bp, Artificial
  probe
  misc_feature (1)..(25): SEQ ID NO: 5577; WAN024GFG; Start 93; Stop 117
tgagttgactttgactactatcacc

SEQ ID NO: 415062 - DNA, 25 bp, Artificial
  probe
  misc_feature (1)..(25): SEQ ID NO: 5577; WAN024GFG; Start 101; Stop 125
ctttgactactatcaccagcatctt

SEQ ID NO: 415063 - DNA, 25 bp, Artificial
  probe
  misc_feature (1)..(25): SEQ ID NO: 5577; WAN024GFG; Start 102; Stop 126
tttgactactatcaccagcatcttg

SEQ ID NO: 415064 - DNA, 25 bp, Artificial
  probe
  misc_feature (1)..(25): SEQ ID NO: 5577; WAN024GFG; Start 89; Stop 113
cgtttgagttgactttgactactat

SEQ ID NO: 415065 - DNA, 25 bp, Artificial
  probe
  misc_feature (1)..(25): SEQ ID NO: 5577; WAN024GFG; Start 99; Stop 123
gactttgactactatcaccagcatc

SEQ ID NO: 415066 - DNA, 25 bp, Artificial
  probe
  misc_feature (1)..(25): SEQ ID NO: 5577; WAN024GFG; Start 103; Stop 127
ttgactactatcaccagcatcttgg

SEQ ID NO: 415067 - DNA, 25 bp, Artificial
  probe
  misc_feature (1)..(25): SEQ ID NO: 5577; WAN024GFG; Start 100; Stop 124
actttgactactatcaccagcatct

SEQ ID NO: 415068 - DNA, 25 bp, Artificial
  probe
  misc_feature (1)..(25): SEQ ID NO: 5577; WAN024GFG; Start 96; Stop 120
gttgactttgactactatcaccagc

SEQ ID NO: 415069 - DNA, 25 bp, Artificial
  probe
  misc_feature (1)..(25): SEQ ID NO: 5577; WAN024GFG; Start 98; Stop 122
tgactttgactactatcaccagcat

SEQ ID NO: 415070 - DNA, 25 bp, Artificial
  probe
  misc_feature (1)..(25): SEQ ID NO: 5577; WAN024GFG; Start 92; Stop 116
ttgagttgactttgactactatcac

SEQ ID NO: 415071 - DNA, 25 bp, Artificial
  probe
  misc_feature (1)..(25): SEQ ID NO: 5577; WAN024GFG; Start 97; Stop 121
ttgactttgactactatcaccagca

SEQ ID NO: 415072 - DNA, 25 bp, Artificial
  probe
  misc_feature (1)..(25): SEQ ID NO: 5577; WAN024GFG; Start 104; Stop 128
tgactactatcaccagcatcttgga

SEQ ID NO: 415073 - DNA, 25 bp, Artificial
  probe
  misc_feature (1)..(25): SEQ ID NO: 5577; WAN024GFG; Start 91; Stop 115
tttgagttgactttgactactatca

SEQ ID NO: 415074 - DNA, 25 bp, Artificial
  probe
  misc_feature (1)..(25): SEQ ID NO: 5577; WAN024GFG; Start 90; Stop 114
gtttgagttgactttgactactatc

SEQ ID NO: 415075 - DNA, 25 bp, Artificial
  probe
  misc_feature (1)..(25): SEQ ID NO: 5577; WAN024GFG; Start 107; Stop 131
ctactatcaccagcatcttggaagc

SEQ ID NO: 415076 - DNA, 25 bp, Artificial
  probe
  misc_feature (1)..(25): SEQ ID NO: 5577; WAN024GFG; Start 88; Stop 112
acgtttgagttgactttgactacta

SEQ ID NO: 415077 - DNA, 25 bp, Artificial
  probe
  misc_feature (1)..(25): SEQ ID NO: 5577; WAN024GFG; Start 87; Stop 111
cacgtttgagttgactttgactact

SEQ ID NO: 415078 - DNA, 25 bp, Artificial
  probe
  misc_feature (1)..(25): SEQ ID NO: 5577; WAN024GFG; Start 230; Stop 254
taaagagcattttctacaaggggtt

SEQ ID NO: 415079 - DNA, 25 bp, Artificial
  probe
  misc_feature (1)..(25): SEQ ID NO: 5577; WAN024GFG; Start 226; Stop 250
atggtaaagagcattttctacaagg

SEQ ID NO: 415080 - DNA, 25 bp, Artificial
  probe
  misc_feature (1)..(25): SEQ ID NO: 5577; WAN024GFG; Start 229; Stop 253
gtaaagagcattttctacaaggggt

SEQ ID NO: 415081 - DNA, 25 bp, Artificial
  probe
  misc_feature (1)..(25): SEQ ID NO: 5577; WAN024GFG; Start 227; Stop 251
tggtaaagagcattttctacaaggg

SEQ ID NO: 415082 - DNA, 25 bp, Artificial
  probe
  misc_feature (1)..(25): SEQ ID NO: 5577; WAN024GFG; Start 154; Stop 178
gatgaccaatcccgaatcctgtttc

SEQ ID NO: 415083 - DNA, 25 bp, Artificial
  probe
  misc_feature (1)..(25): SEQ ID NO: 5577; WAN024GFG; Start 186; Stop 210
aaagtttaatatggccctgaccttc

SEQ ID NO: 415084 - DNA, 25 bp, Artificial
  probe
  misc_feature (1)..(25): SEQ ID NO: 5577; WAN024GFG; Start 185; Stop 209
gaaagtttaatatggccctgacctt

SEQ ID NO: 415085 - DNA, 25 bp, Artificial
  probe
  misc_feature (1)..(25): SEQ ID NO: 5577; WAN024GFG; Start 177; Stop 201
tctggacagaaagtttaatatggcc

SEQ ID NO: 415086 - DNA, 25 bp, Artificial
  probe
  misc_feature (1)..(25): SEQ ID NO: 5577; WAN024GFG; Start 86; Stop 110
ccacgtttgagttgactttgactac

SEQ ID NO: 415087 - DNA, 25 bp, Artificial
  probe
  misc_feature (1)..(25): SEQ ID NO: 5577; WAN024GFG; Start 228; Stop 252
ggtaaagagcattttctacaagggg

SEQ ID NO: 415088 - DNA, 25 bp, Artificial
  probe
  misc_feature (1)..(25): SEQ ID NO: 5577; WAN024GFG; Start 184; Stop 208
agaaagtttaatatggccctgacct

SEQ ID NO: 415089 - DNA, 25 bp, Artificial
  probe
  misc_feature (1)..(25): SEQ ID NO: 5577; WAN024GFG; Start 178; Stop 202
ctggacagaaagtttaatatggccc

SEQ ID NO: 415090 - DNA, 25 bp, Artificial
  probe
  misc_feature (1)..(25): SEQ ID NO: 5578; WAN024BFG; Start 50; Stop 74
atgaactaagaaagcaaggacaaag

SEQ ID NO: 415091 - DNA, 25 bp, Artificial
  probe
  misc_feature (1)..(25): SEQ ID NO: 5578; WAN024BFG; Start 48; Stop 72
ctatgaactaagaaagcaaggacaa

SEQ ID NO: 415092 - DNA, 25 bp, Artificial
  probe
  misc_feature (1)..(25): SEQ ID NO: 5578; WAN024BFG; Start 103; Stop 127
gtggatgtttctggtctaaagtcat

SEQ ID NO: 415093 - DNA, 25 bp, Artificial
  probe
  misc_feature (1)..(25): SEQ ID NO: 5578; WAN024BFG; Start 47; Stop 71
tctatgaactaagaaagcaaggaca

SEQ ID NO: 415094 - DNA, 25 bp, Artificial
  probe
  misc_feature (1)..(25): SEQ ID NO: 5578; WAN024BFG; Start 49; Stop 73
tatgaactaagaaagcaaggacaaa

SEQ ID NO: 415095 - DNA, 25 bp, Artificial
  probe
  misc_feature (1)..(25): SEQ ID NO: 5578; WAN024BFG; Start 101; Stop 125
gtgtggatgtttctggtctaaagtc

SEQ ID NO: 415096 - DNA, 25 bp, Artificial
  probe
  misc_feature (1)..(25): SEQ ID NO: 5578; WAN024BFG; Start 46; Stop 70
atctatgaactaagaaagcaaggac

SEQ ID NO: 415097 - DNA, 25 bp, Artificial
  probe
  misc_feature (1)..(25): SEQ ID NO: 5578; WAN024BFG; Start 102; Stop 126
tgtggatgtttctggtctaaagtca

SEQ ID NO: 415098 - DNA, 25 bp, Artificial
  probe
  misc_feature (1)..(25): SEQ ID NO: 5578; WAN024BFG; Start 51; Stop 75
tgaactaagaaagcaaggacaaagc

SEQ ID NO: 415099 - DNA, 25 bp, Artificial
  probe
  misc_feature (1)..(25): SEQ ID NO: 5578; WAN024BFG; Start 96; Stop 120
atttggtgtggatgtttctggtcta

SEQ ID NO: 415100 - DNA, 25 bp, Artificial
  probe
  misc_feature (1)..(25): SEQ ID NO: 5578; WAN024BFG; Start 92; Stop 116
aaagatttggtgtggatgtttctgg

SEQ ID NO: 415101 - DNA, 25 bp, Artificial
  probe
  misc_feature (1)..(25): SEQ ID NO: 5578; WAN024BFG; Start 97; Stop 121
tttggtgtggatgtttctggtctaa

SEQ ID NO: 415102 - DNA, 25 bp, Artificial
  probe
  misc_feature (1)..(25): SEQ ID NO: 5578; WAN024BFG; Start 98; Stop 122
ttggtgtggatgtttctggtctaaa

SEQ ID NO: 415103 - DNA, 25 bp, Artificial
  probe
  misc_feature (1)..(25): SEQ ID NO: 5578; WAN024BFG; Start 45; Stop 69
gatctatgaactaagaaagcaagga

SEQ ID NO: 415104 - DNA, 25 bp, Artificial
  probe
  misc_feature (1)..(25): SEQ ID NO: 5578; WAN024BFG; Start 100; Stop 124
ggtgtggatgtttctggtctaaagt

SEQ ID NO: 415105 - DNA, 25 bp, Artificial
  probe
  misc_feature (1)..(25): SEQ ID NO: 5578; WAN024BFG; Start 99; Stop 123
tggtgtggatgtttctggtctaaag

SEQ ID NO: 415106 - DNA, 25 bp, Artificial
  probe
  misc_feature (1)..(25): SEQ ID NO: 5578; WAN024BFG; Start 93; Stop 117
aagatttggtgtggatgtttctggt

SEQ ID NO: 415107 - DNA, 25 bp, Artificial
  probe
  misc_feature (1)..(25): SEQ ID NO: 5578; WAN024BFG; Start 95; Stop 119
gatttggtgtggatgtttctggtct

SEQ ID NO: 415108 - DNA, 25 bp, Artificial
  probe
  misc_feature (1)..(25): SEQ ID NO: 5578; WAN024BFG; Start 94; Stop 118
agatttggtgtggatgtttctggtc

SEQ ID NO: 415109 - DNA, 25 bp, Artificial
  probe
  misc_feature (1)..(25): SEQ ID NO: 5578; WAN024BFG; Start 91; Stop 115
aaaagatttggtgtggatgtttctg

SEQ ID NO: 415110 - DNA, 25 bp, Artificial
  probe
  misc_feature (1)..(25): SEQ ID NO: 5578; WAN024BFG; Start 44; Stop 68
agatctatgaactaagaaagcaagg

SEQ ID NO: 415111 - DNA, 25 bp, Artificial
  probe
  misc_feature (1)..(25): SEQ ID NO: 5578; WAN024BFG; Start 52; Stop 76
gaactaagaaagcaaggacaaagct

SEQ ID NO: 415112 - DNA, 25 bp, Artificial
  probe
  misc_feature (1)..(25): SEQ ID NO: 5578; WAN024BFG; Start 43; Stop 67
cagatctatgaactaagaaagcaag

SEQ ID NO: 415113 - DNA, 25 bp, Artificial
  probe
  misc_feature (1)..(25): SEQ ID NO: 5578; WAN024BFG; Start 42; Stop 66
tcagatctatgaactaagaaagcaa

SEQ ID NO: 415114 - DNA, 25 bp, Artificial
  probe
  misc_feature (1)..(25): SEQ ID NO: 5578; WAN024BFG; Start 41; Stop 65
ttcagatctatgaactaagaaagca

SEQ ID NO: 415115 - DNA, 25 bp, Artificial
  probe
  misc_feature (1)..(25): SEQ ID NO: 5578; WAN024BFG; Start 56; Stop 80
taagaaagcaaggacaaagcttcaa

SEQ ID NO: 415116 - DNA, 25 bp, Artificial
  probe
  misc_feature (1)..(25): SEQ ID NO: 5578; WAN024BFG; Start 53; Stop 77
aactaagaaagcaaggacaaagctt

SEQ ID NO: 415117 - DNA, 25 bp, Artificial
  probe
  misc_feature (1)..(25): SEQ ID NO: 5578; WAN024BFG; Start 55; Stop 79
ctaagaaagcaaggacaaagcttca

SEQ ID NO: 415118 - DNA, 25 bp, Artificial
  probe
  misc_feature (1)..(25): SEQ ID NO: 5578; WAN024BFG; Start 54; Stop 78
actaagaaagcaaggacaaagcttc

SEQ ID NO: 415119 - DNA, 25 bp, Artificial
  probe
  misc_feature (1)..(25): SEQ ID NO: 5578; WAN024BFG; Start 57; Stop 81
aagaaagcaaggacaaagcttcaaa

SEQ ID NO: 415120 - DNA, 25 bp, Artificial
  probe
  misc_feature (1)..(25): SEQ ID NO: 5578; WAN024BFG; Start 58; Stop 82
agaaagcaaggacaaagcttcaaac

SEQ ID NO: 415121 - DNA, 25 bp, Artificial
  probe
  misc_feature (1)..(25): SEQ ID NO: 5578; WAN024BFG; Start 60; Stop 84
aaagcaaggacaaagcttcaaacag

SEQ ID NO: 415122 - DNA, 25 bp, Artificial
  probe
  misc_feature (1)..(25): SEQ ID NO: 5578; WAN024BFG; Start 59; Stop 83
gaaagcaaggacaaagcttcaaaca

SEQ ID NO: 415123 - DNA, 25 bp, Artificial
  probe
  misc_feature (1)..(25): SEQ ID NO: 5578; WAN024BFG; Start 61; Stop 85
aagcaaggacaaagcttcaaacagc

SEQ ID NO: 415124 - DNA, 25 bp, Artificial
  probe
  misc_feature (1)..(25): SEQ ID NO: 5579; WAN024GGN; Start 268; Stop 292
atcaatctccgtattctcatcaatg

SEQ ID NO: 415125 - DNA, 25 bp, Artificial
  probe
  misc_feature (1)..(25): SEQ ID NO: 5579; WAN024GGN; Start 267; Stop 291
aatcaatctccgtattctcatcaat

SEQ ID NO: 415126 - DNA, 25 bp, Artificial
  probe
  misc_feature (1)..(25): SEQ ID NO: 5579; WAN024GGN; Start 271; Stop 295
aatctccgtattctcatcaatgaca

SEQ ID NO: 415127 - DNA, 25 bp, Artificial
  probe
  misc_feature (1)..(25): SEQ ID NO: 5579; WAN024GGN; Start 272; Stop 296
atctccgtattctcatcaatgacat

SEQ ID NO: 415128 - DNA, 25 bp, Artificial
  probe
  misc_feature (1)..(25): SEQ ID NO: 5579; WAN024GGN; Start 270; Stop 294
caatctccgtattctcatcaatgac

SEQ ID NO: 415129 - DNA, 25 bp, Artificial
  probe
  misc_feature (1)..(25): SEQ ID NO: 5579; WAN024GGN; Start 269; Stop 293
tcaatctccgtattctcatcaatga

SEQ ID NO: 415130 - DNA, 25 bp, Artificial
  probe
  misc_feature (1)..(25): SEQ ID NO: 5579; WAN024GGN; Start 273; Stop 297
tctccgtattctcatcaatgacatg

SEQ ID NO: 415131 - DNA, 25 bp, Artificial
  probe
  misc_feature (1)..(25): SEQ ID NO: 5579; WAN024GGN; Start 276; Stop 300
ccgtattctcatcaatgacatggaa

SEQ ID NO: 415132 - DNA, 25 bp, Artificial
  probe
  misc_feature (1)..(25): SEQ ID NO: 5579; WAN024GGN; Start 274; Stop 298
ctccgtattctcatcaatgacatgg

SEQ ID NO: 415133 - DNA, 25 bp, Artificial
  probe
  misc_feature (1)..(25): SEQ ID NO: 5579; WAN024GGN; Start 9; Stop 33
tttcatccctaacttcactttcact

SEQ ID NO: 415134 - DNA, 25 bp, Artificial
  probe
  misc_feature (1)..(25): SEQ ID NO: 5579; WAN024GGN; Start 365; Stop 389
tcagacccaaatacaggaactttag

SEQ ID NO: 415135 - DNA, 25 bp, Artificial
  probe
  misc_feature (1)..(25): SEQ ID NO: 5579; WAN024GGN; Start 364; Stop 388
ctcagacccaaatacaggaacttta

SEQ ID NO: 415136 - DNA, 25 bp, Artificial
  probe
  misc_feature (1)..(25): SEQ ID NO: 5579; WAN024GGN; Start 309; Stop 333
atttcttaacggcatcatttccttt

SEQ ID NO: 415137 - DNA, 25 bp, Artificial
  probe
  misc_feature (1)..(25): SEQ ID NO: 5579; WAN024GGN; Start 10; Stop 34
ttcatccctaacttcactttcacta

SEQ ID NO: 415138 - DNA, 25 bp, Artificial
  probe
  misc_feature (1)..(25): SEQ ID NO: 5579; WAN024GGN; Start 8; Stop 32
atttcatccctaacttcactttcac

SEQ ID NO: 415139 - DNA, 25 bp, Artificial
  probe
  misc_feature (1)..(25): SEQ ID NO: 5579; WAN024GGN; Start 310; Stop 334
tttcttaacggcatcatttcctttg

SEQ ID NO: 415140 - DNA, 25 bp, Artificial
  probe
  misc_feature (1)..(25): SEQ ID NO: 5579; WAN024GGN; Start 308; Stop 332
aatttcttaacggcatcatttcctt

SEQ ID NO: 415141 - DNA, 25 bp, Artificial
  probe
  misc_feature (1)..(25): SEQ ID NO: 5579; WAN024GGN; Start 157; Stop 181
tttgaagtcacctgtataaacgatg

SEQ ID NO: 415142 - DNA, 25 bp, Artificial
  probe
  misc_feature (1)..(25): SEQ ID NO: 5579; WAN024GGN; Start 11; Stop 35
tcatccctaacttcactttcactag

SEQ ID NO: 415143 - DNA, 25 bp, Artificial
  probe
  misc_feature (1)..(25): SEQ ID NO: 5579; WAN024GGN; Start 161; Stop 185
aagtcacctgtataaacgatgcttc

SEQ ID NO: 415144 - DNA, 25 bp, Artificial
  probe
  misc_feature (1)..(25): SEQ ID NO: 5579; WAN024GGN; Start 160; Stop 184
gaagtcacctgtataaacgatgctt

SEQ ID NO: 415145 - DNA, 25 bp, Artificial
  probe
  misc_feature (1)..(25): SEQ ID NO: 5579; WAN024GGN; Start 227; Stop 251
gagtaagtcgtagggaagaaggaaa

SEQ ID NO: 415146 - DNA, 25 bp, Artificial
  probe
  misc_feature (1)..(25): SEQ ID NO: 5579; WAN024GGN; Start 158; Stop 182
ttgaagtcacctgtataaacgatgc

SEQ ID NO: 415147 - DNA, 25 bp, Artificial
  probe
  misc_feature (1)..(25): SEQ ID NO: 5579; WAN024GGN; Start 155; Stop 179
aatttgaagtcacctgtataaacga

SEQ ID NO: 415148 - DNA, 25 bp, Artificial
  probe
  misc_feature (1)..(25): SEQ ID NO: 5579; WAN024GGN; Start 121; Stop 145
atcagttgcataagattcactagcc

SEQ ID NO: 415149 - DNA, 25 bp, Artificial
  probe
  misc_feature (1)..(25): SEQ ID NO: 5579; WAN024GGN; Start 4; Stop 28
ggtaatttcatccctaacttcactt

SEQ ID NO: 415150 - DNA, 25 bp, Artificial
  probe
  misc_feature (1)..(25): SEQ ID NO: 5579; WAN024GGN; Start 366; Stop 390
cagacccaaatacaggaactttagc

SEQ ID NO: 415151 - DNA, 25 bp, Artificial
  probe
  misc_feature (1)..(25): SEQ ID NO: 5579; WAN024GGN; Start 7; Stop 31
aatttcatccctaacttcactttca

SEQ ID NO: 415152 - DNA, 25 bp, Artificial
  probe
  misc_feature (1)..(25): SEQ ID NO: 5579; WAN024GGN; Start 156; Stop 180
atttgaagtcacctgtataaacgat

SEQ ID NO: 415153 - DNA, 25 bp, Artificial
  probe
  misc_feature (1)..(25): SEQ ID NO: 5579; WAN024GGN; Start 275; Stop 299
tccgtattctcatcaatgacatgga

SEQ ID NO: 415154 - DNA, 25 bp, Artificial
  probe
  misc_feature (1)..(25): SEQ ID NO: 5579; WAN024GGN; Start 12; Stop 36
catccctaacttcactttcactagc

SEQ ID NO: 415155 - DNA, 25 bp, Artificial
  probe
  misc_feature (1)..(25): SEQ ID NO: 5579; WAN024GGN; Start 266; Stop 290
aaatcaatctccgtattctcatcaa

SEQ ID NO: 415156 - DNA, 25 bp, Artificial
  probe
  misc_feature (1)..(25): SEQ ID NO: 5579; WAN024GGN; Start 228; Stop 252
agtaagtcgtagggaagaaggaaac

SEQ ID NO: 415157 - DNA, 25 bp, Artificial
  probe
  misc_feature (1)..(25): SEQ ID NO: 5580; WAN024DDX; Start 155; Stop 179
atatccaatctatctacgaccaacg

SEQ ID NO: 415158 - DNA, 25 bp, Artificial
  probe
  misc_feature (1)..(25): SEQ ID NO: 5580; WAN024DDX; Start 156; Stop 180
tatccaatctatctacgaccaacgg

SEQ ID NO: 415159 - DNA, 25 bp, Artificial
  probe
  misc_feature (1)..(25): SEQ ID NO: 5580; WAN024DDX; Start 143; Stop 167
attctcctagcgatatccaatctat

SEQ ID NO: 415160 - DNA, 25 bp, Artificial
  probe
  misc_feature (1)..(25): SEQ ID NO: 5580; WAN024DDX; Start 148; Stop 172
cctagcgatatccaatctatctacg

SEQ ID NO: 415161 - DNA, 25 bp, Artificial
  probe
  misc_feature (1)..(25): SEQ ID NO: 5580; WAN024DDX; Start 145; Stop 169
tctcctagcgatatccaatctatct

SEQ ID NO: 415162 - DNA, 25 bp, Artificial
  probe
  misc_feature (1)..(25): SEQ ID NO: 5580; WAN024DDX; Start 153; Stop 177
cgatatccaatctatctacgaccaa

SEQ ID NO: 415163 - DNA, 25 bp, Artificial
  probe
  misc_feature (1)..(25): SEQ ID NO: 5580; WAN024DDX; Start 150; Stop 174
tagcgatatccaatctatctacgac

SEQ ID NO: 415164 - DNA, 25 bp, Artificial
  probe
  misc_feature (1)..(25): SEQ ID NO: 5580; WAN024DDX; Start 144; Stop 168
ttctcctagcgatatccaatctatc

SEQ ID NO: 415165 - DNA, 25 bp, Artificial
  probe
  misc_feature (1)..(25): SEQ ID NO: 5580; WAN024DDX; Start 149; Stop 173
ctagcgatatccaatctatctacga

SEQ ID NO: 415166 - DNA, 25 bp, Artificial
  probe
  misc_feature (1)..(25): SEQ ID NO: 5580; WAN024DDX; Start 151; Stop 175
agcgatatccaatctatctacgacc

SEQ ID NO: 415167 - DNA, 25 bp, Artificial
  probe
  misc_feature (1)..(25): SEQ ID NO: 5580; WAN024DDX; Start 147; Stop 171
tcctagcgatatccaatctatctac

SEQ ID NO: 415168 - DNA, 25 bp, Artificial
  probe
  misc_feature (1)..(25): SEQ ID NO: 5580; WAN024DDX; Start 154; Stop 178
gatatccaatctatctacgaccaac

SEQ ID NO: 415169 - DNA, 25 bp, Artificial
  probe
  misc_feature (1)..(25): SEQ ID NO: 5580; WAN024DDX; Start 152; Stop 176
gcgatatccaatctatctacgacca

SEQ ID NO: 415170 - DNA, 25 bp, Artificial
  probe
  misc_feature (1)..(25): SEQ ID NO: 5580; WAN024DDX; Start 146; Stop 170
ctcctagcgatatccaatctatcta

SEQ ID NO: 415171 - DNA, 25 bp, Artificial
  probe
  misc_feature (1)..(25): SEQ ID NO: 5580; WAN024DDX; Start 142; Stop 166
gattctcctagcgatatccaatcta

SEQ ID NO: 415172 - DNA, 25 bp, Artificial
  probe
  misc_feature (1)..(25): SEQ ID NO: 5580; WAN024DDX; Start 157; Stop 181
atccaatctatctacgaccaacggg

SEQ ID NO: 415173 - DNA, 25 bp, Artificial
  probe
  misc_feature (1)..(25): SEQ ID NO: 5580; WAN024DDX; Start 255; Stop 279
aaaatcatcagactggacgactaca

SEQ ID NO: 415174 - DNA, 25 bp, Artificial
  probe
  misc_feature (1)..(25): SEQ ID NO: 5580; WAN024DDX; Start 141; Stop 165
ggattctcctagcgatatccaatct

SEQ ID NO: 415175 - DNA, 25 bp, Artificial
  probe
  misc_feature (1)..(25): SEQ ID NO: 5580; WAN024DDX; Start 139; Stop 163
aaggattctcctagcgatatccaat

SEQ ID NO: 415176 - DNA, 25 bp, Artificial
  probe
  misc_feature (1)..(25): SEQ ID NO: 5580; WAN024DDX; Start 140; Stop 164
aggattctcctagcgatatccaatc

SEQ ID NO: 415177 - DNA, 25 bp, Artificial
  probe
  misc_feature (1)..(25): SEQ ID NO: 5580; WAN024DDX; Start 216; Stop 240
cgagaggcaactgtatgatcagaaa

SEQ ID NO: 415178 - DNA, 25 bp, Artificial
  probe
  misc_feature (1)..(25): SEQ ID NO: 5580; WAN024DDX; Start 138; Stop 162
aaaggattctcctagcgatatccaa

SEQ ID NO: 415179 - DNA, 25 bp, Artificial
  probe
  misc_feature (1)..(25): SEQ ID NO: 5580; WAN024DDX; Start 215; Stop 239
ccgagaggcaactgtatgatcagaa

SEQ ID NO: 415180 - DNA, 25 bp, Artificial
  probe
  misc_feature (1)..(25): SEQ ID NO: 5580; WAN024DDX; Start 217; Stop 241
gagaggcaactgtatgatcagaaaa

SEQ ID NO: 415181 - DNA, 25 bp, Artificial
  probe
  misc_feature (1)..(25): SEQ ID NO: 5580; WAN024DDX; Start 134; Stop 158
ttcaaaaggattctcctagcgatat

SEQ ID NO: 415182 - DNA, 25 bp, Artificial
  probe
  misc_feature (1)..(25): SEQ ID NO: 5580; WAN024DDX; Start 133; Stop 157
gttcaaaaggattctcctagcgata

SEQ ID NO: 415183 - DNA, 25 bp, Artificial
  probe
  misc_feature (1)..(25): SEQ ID NO: 5580; WAN024DDX; Start 128; Stop 152
ctccagttcaaaaggattctcctag

SEQ ID NO: 415184 - DNA, 25 bp, Artificial
  probe
  misc_feature (1)..(25): SEQ ID NO: 5580; WAN024DDX; Start 132; Stop 156
agttcaaaaggattctcctagcgat

SEQ ID NO: 415185 - DNA, 25 bp, Artificial
  probe
  misc_feature (1)..(25): SEQ ID NO: 5580; WAN024DDX; Start 135; Stop 159
tcaaaaggattctcctagcgatatc

SEQ ID NO: 415186 - DNA, 25 bp, Artificial
  probe
  misc_feature (1)..(25): SEQ ID NO: 5580; WAN024DDX; Start 136; Stop 160
caaaaggattctcctagcgatatcc

SEQ ID NO: 415187 - DNA, 25 bp, Artificial
  probe
  misc_feature (1)..(25): SEQ ID NO: 5580; WAN024DDX; Start 129; Stop 153
tccagttcaaaaggattctcctagc

SEQ ID NO: 415188 - DNA, 25 bp, Artificial
  probe
  misc_feature (1)..(25): SEQ ID NO: 5580; WAN024DDX; Start 137; Stop 161
aaaaggattctcctagcgatatcca

SEQ ID NO: 415189 - DNA, 25 bp, Artificial
  probe
  misc_feature (1)..(25): SEQ ID NO: 5580; WAN024DDX; Start 131; Stop 155
cagttcaaaaggattctcctagcga

SEQ ID NO: 415190 - DNA, 25 bp, Artificial
  probe
  misc_feature (1)..(25): SEQ ID NO: 5580; WAN024DDX; Start 130; Stop 154
ccagttcaaaaggattctcctagcg

SEQ ID NO: 415191 - DNA, 25 bp, Artificial
  probe
  misc_feature (1)..(25): SEQ ID NO: 5581; WAN024FRJ; Start 147; Stop 171
taaccatattagccgctacatagac

SEQ ID NO: 415192 - DNA, 25 bp, Artificial
  probe
  misc_feature (1)..(25): SEQ ID NO: 5581; WAN024FRJ; Start 144; Stop 168
gcataaccatattagccgctacata

SEQ ID NO: 415193 - DNA, 25 bp, Artificial
  probe
  misc_feature (1)..(25): SEQ ID NO: 5581; WAN024FRJ; Start 162; Stop 186
ctacatagaccttggcaccatactt

SEQ ID NO: 415194 - DNA, 25 bp, Artificial
  probe
  misc_feature (1)..(25): SEQ ID NO: 5581; WAN024FRJ; Start 151; Stop 175
catattagccgctacatagaccttg

SEQ ID NO: 415195 - DNA, 25 bp, Artificial
  probe
  misc_feature (1)..(25): SEQ ID NO: 5581; WAN024FRJ; Start 146; Stop 170
ataaccatattagccgctacataga

SEQ ID NO: 415196 - DNA, 25 bp, Artificial
  probe
  misc_feature (1)..(25): SEQ ID NO: 5581; WAN024FRJ; Start 145; Stop 169
cataaccatattagccgctacatag

SEQ ID NO: 415197 - DNA, 25 bp, Artificial
  probe
  misc_feature (1)..(25): SEQ ID NO: 5581; WAN024FRJ; Start 163; Stop 187
tacatagaccttggcaccatacttg

SEQ ID NO: 415198 - DNA, 25 bp, Artificial
  probe
  misc_feature (1)..(25): SEQ ID NO: 5581; WAN024FRJ; Start 152; Stop 176
atattagccgctacatagaccttgg

SEQ ID NO: 415199 - DNA, 25 bp, Artificial
  probe
  misc_feature (1)..(25): SEQ ID NO: 5581; WAN024FRJ; Start 150; Stop 174
ccatattagccgctacatagacctt

SEQ ID NO: 415200 - DNA, 25 bp, Artificial
  probe
  misc_feature (1)..(25): SEQ ID NO: 5581; WAN024FRJ; Start 148; Stop 172
aaccatattagccgctacatagacc

SEQ ID NO: 415201 - DNA, 25 bp, Artificial
  probe
  misc_feature (1)..(25): SEQ ID NO: 5581; WAN024FRJ; Start 135; Stop 159
ttccttcgtgcataaccatattagc

SEQ ID NO: 415202 - DNA, 25 bp, Artificial
  probe
  misc_feature (1)..(25): SEQ ID NO: 5581; WAN024FRJ; Start 149; Stop 173
accatattagccgctacatagacct

SEQ ID NO: 415203 - DNA, 25 bp, Artificial
  probe
  misc_feature (1)..(25): SEQ ID NO: 5581; WAN024FRJ; Start 143; Stop 167
tgcataaccatattagccgctacat

SEQ ID NO: 415204 - DNA, 25 bp, Artificial
  probe
  misc_feature (1)..(25): SEQ ID NO: 5581; WAN024FRJ; Start 47; Stop 71
atcataatcaaggctgggtcagata

SEQ ID NO: 415205 - DNA, 25 bp, Artificial
  probe
  misc_feature (1)..(25): SEQ ID NO: 5581; WAN024FRJ; Start 285; Stop 309
ctccatactgaacagctacctttag

SEQ ID NO: 415206 - DNA, 25 bp, Artificial
  probe
  misc_feature (1)..(25): SEQ ID NO: 5581; WAN024FRJ; Start 64; Stop 88
gtcagatacgataactgctgcaatc

SEQ ID NO: 415207 - DNA, 25 bp, Artificial
  probe
  misc_feature (1)..(25): SEQ ID NO: 5581; WAN024FRJ; Start 136; Stop 160
tccttcgtgcataaccatattagcc

SEQ ID NO: 415208 - DNA, 25 bp, Artificial
  probe
  misc_feature (1)..(25): SEQ ID NO: 5581; WAN024FRJ; Start 46; Stop 70
aatcataatcaaggctgggtcagat

SEQ ID NO: 415209 - DNA, 25 bp, Artificial
  probe
  misc_feature (1)..(25): SEQ ID NO: 5581; WAN024FRJ; Start 132; Stop 156
catttccttcgtgcataaccatatt

SEQ ID NO: 415210 - DNA, 25 bp, Artificial
  probe
  misc_feature (1)..(25): SEQ ID NO: 5581; WAN024FRJ; Start 48; Stop 72
tcataatcaaggctgggtcagatac

SEQ ID NO: 415211 - DNA, 25 bp, Artificial
  probe
  misc_feature (1)..(25): SEQ ID NO: 5581; WAN024FRJ; Start 131; Stop 155
tcatttccttcgtgcataaccatat

SEQ ID NO: 415212 - DNA, 25 bp, Artificial
  probe
  misc_feature (1)..(25): SEQ ID NO: 5581; WAN024FRJ; Start 161; Stop 185
gctacatagaccttggcaccatact

SEQ ID NO: 415213 - DNA, 25 bp, Artificial
  probe
  misc_feature (1)..(25): SEQ ID NO: 5581; WAN024FRJ; Start 134; Stop 158
tttccttcgtgcataaccatattag

SEQ ID NO: 415214 - DNA, 25 bp, Artificial
  probe
  misc_feature (1)..(25): SEQ ID NO: 5581; WAN024FRJ; Start 130; Stop 154
ttcatttccttcgtgcataaccata

SEQ ID NO: 415215 - DNA, 25 bp, Artificial
  probe
  misc_feature (1)..(25): SEQ ID NO: 5581; WAN024FRJ; Start 142; Stop 166
gtgcataaccatattagccgctaca

SEQ ID NO: 415216 - DNA, 25 bp, Artificial
  probe
  misc_feature (1)..(25): SEQ ID NO: 5581; WAN024FRJ; Start 133; Stop 157
atttccttcgtgcataaccatatta

SEQ ID NO: 415217 - DNA, 25 bp, Artificial
  probe
  misc_feature (1)..(25): SEQ ID NO: 5581; WAN024FRJ; Start 65; Stop 89
tcagatacgataactgctgcaatcc

SEQ ID NO: 415218 - DNA, 25 bp, Artificial
  probe
  misc_feature (1)..(25): SEQ ID NO: 5581; WAN024FRJ; Start 45; Stop 69
caatcataatcaaggctgggtcaga

SEQ ID NO: 415219 - DNA, 25 bp, Artificial
  probe
  misc_feature (1)..(25): SEQ ID NO: 5581; WAN024FRJ; Start 129; Stop 153
cttcatttccttcgtgcataaccat

SEQ ID NO: 415220 - DNA, 25 bp, Artificial
  probe
  misc_feature (1)..(25): SEQ ID NO: 5581; WAN024FRJ; Start 63; Stop 87
ggtcagatacgataactgctgcaat

SEQ ID NO: 415221 - DNA, 25 bp, Artificial
  probe
  misc_feature (1)..(25): SEQ ID NO: 5581; WAN024FRJ; Start 49; Stop 73
cataatcaaggctgggtcagatacg

SEQ ID NO: 415222 - DNA, 25 bp, Artificial
  probe
  misc_feature (1)..(25): SEQ ID NO: 5581; WAN024FRJ; Start 53; Stop 77
atcaaggctgggtcagatacgataa

SEQ ID NO: 415223 - DNA, 25 bp, Artificial
  probe
  misc_feature (1)..(25): SEQ ID NO: 5581; WAN024FRJ; Start 52; Stop 76
aatcaaggctgggtcagatacgata

SEQ ID NO: 415224 - DNA, 25 bp, Artificial
  probe
  misc_feature (1)..(25): SEQ ID NO: 5582; WAN024DXV; Start 115; Stop 139
tgtatgagtattagtcgcaatctgg

SEQ ID NO: 415225 - DNA, 25 bp, Artificial
  probe
  misc_feature (1)..(25): SEQ ID NO: 5582; WAN024DXV; Start 110; Stop 134
aagagtgtatgagtattagtcgcaa

SEQ ID NO: 415226 - DNA, 25 bp, Artificial
  probe
  misc_feature (1)..(25): SEQ ID NO: 5582; WAN024DXV; Start 114; Stop 138
gtgtatgagtattagtcgcaatctg

SEQ ID NO: 415227 - DNA, 25 bp, Artificial
  probe
  misc_feature (1)..(25): SEQ ID NO: 5582; WAN024DXV; Start 113; Stop 137
agtgtatgagtattagtcgcaatct

SEQ ID NO: 415228 - DNA, 25 bp, Artificial
  probe
  misc_feature (1)..(25): SEQ ID NO: 5582; WAN024DXV; Start 111; Stop 135
agagtgtatgagtattagtcgcaat

SEQ ID NO: 415229 - DNA, 25 bp, Artificial
  probe
  misc_feature (1)..(25): SEQ ID NO: 5582; WAN024DXV; Start 112; Stop 136
gagtgtatgagtattagtcgcaatc

SEQ ID NO: 415230 - DNA, 25 bp, Artificial
  probe
  misc_feature (1)..(25): SEQ ID NO: 5582; WAN024DXV; Start 116; Stop 140
gtatgagtattagtcgcaatctggc

SEQ ID NO: 415231 - DNA, 25 bp, Artificial
  probe
  misc_feature (1)..(25): SEQ ID NO: 5582; WAN024DXV; Start 109; Stop 133
aaagagtgtatgagtattagtcgca

SEQ ID NO: 415232 - DNA, 25 bp, Artificial
  probe
  misc_feature (1)..(25): SEQ ID NO: 5582; WAN024DXV; Start 108; Stop 132
caaagagtgtatgagtattagtcgc

SEQ ID NO: 415233 - DNA, 25 bp, Artificial
  probe
  misc_feature (1)..(25): SEQ ID NO: 5582; WAN024DXV; Start 107; Stop 131
gcaaagagtgtatgagtattagtcg

SEQ ID NO: 415234 - DNA, 25 bp, Artificial
  probe
  misc_feature (1)..(25): SEQ ID NO: 5582; WAN024DXV; Start 172; Stop 196
atagaattgatctggcaaccaatct

SEQ ID NO: 415235 - DNA, 25 bp, Artificial
  probe
  misc_feature (1)..(25): SEQ ID NO: 5582; WAN024DXV; Start 171; Stop 195
catagaattgatctggcaaccaatc

SEQ ID NO: 415236 - DNA, 25 bp, Artificial
  probe
  misc_feature (1)..(25): SEQ ID NO: 5582; WAN024DXV; Start 166; Stop 190
gagaccatagaattgatctggcaac

SEQ ID NO: 415237 - DNA, 25 bp, Artificial
  probe
  misc_feature (1)..(25): SEQ ID NO: 5582; WAN024DXV; Start 173; Stop 197
tagaattgatctggcaaccaatctc

SEQ ID NO: 415238 - DNA, 25 bp, Artificial
  probe
  misc_feature (1)..(25): SEQ ID NO: 5582; WAN024DXV; Start 170; Stop 194
ccatagaattgatctggcaaccaat

SEQ ID NO: 415239 - DNA, 25 bp, Artificial
  probe
  misc_feature (1)..(25): SEQ ID NO: 5582; WAN024DXV; Start 165; Stop 189
ggagaccatagaattgatctggcaa

SEQ ID NO: 415240 - DNA, 25 bp, Artificial
  probe
  misc_feature (1)..(25): SEQ ID NO: 5582; WAN024DXV; Start 169; Stop 193
accatagaattgatctggcaaccaa

SEQ ID NO: 415241 - DNA, 25 bp, Artificial
  probe
  misc_feature (1)..(25): SEQ ID NO: 5582; WAN024DXV; Start 167; Stop 191
agaccatagaattgatctggcaacc

SEQ ID NO: 415242 - DNA, 25 bp, Artificial
  probe
  misc_feature (1)..(25): SEQ ID NO: 5582; WAN024DXV; Start 102; Stop 126
ttcctgcaaagagtgtatgagtatt

SEQ ID NO: 415243 - DNA, 25 bp, Artificial
  probe
  misc_feature (1)..(25): SEQ ID NO: 5582; WAN024DXV; Start 101; Stop 125
gttcctgcaaagagtgtatgagtat

SEQ ID NO: 415244 - DNA, 25 bp, Artificial
  probe
  misc_feature (1)..(25): SEQ ID NO: 5582; WAN024DXV; Start 168; Stop 192
gaccatagaattgatctggcaacca

SEQ ID NO: 415245 - DNA, 25 bp, Artificial
  probe
  misc_feature (1)..(25): SEQ ID NO: 5582; WAN024DXV; Start 103; Stop 127
tcctgcaaagagtgtatgagtatta

SEQ ID NO: 415246 - DNA, 25 bp, Artificial
  probe
  misc_feature (1)..(25): SEQ ID NO: 5582; WAN024DXV; Start 144; Stop 168
ctttcaaatctggacgaacatggag

SEQ ID NO: 415247 - DNA, 25 bp, Artificial
  probe
  misc_feature (1)..(25): SEQ ID NO: 5582; WAN024DXV; Start 104; Stop 128
cctgcaaagagtgtatgagtattag

SEQ ID NO: 415248 - DNA, 25 bp, Artificial
  probe
  misc_feature (1)..(25): SEQ ID NO: 5582; WAN024DXV; Start 100; Stop 124
agttcctgcaaagagtgtatgagta

SEQ ID NO: 415249 - DNA, 25 bp, Artificial
  probe
  misc_feature (1)..(25): SEQ ID NO: 5582; WAN024DXV; Start 142; Stop 166
gactttcaaatctggacgaacatgg

SEQ ID NO: 415250 - DNA, 25 bp, Artificial
  probe
  misc_feature (1)..(25): SEQ ID NO: 5582; WAN024DXV; Start 145; Stop 169
tttcaaatctggacgaacatggaga

SEQ ID NO: 415251 - DNA, 25 bp, Artificial
  probe
  misc_feature (1)..(25): SEQ ID NO: 5582; WAN024DXV; Start 106; Stop 130
tgcaaagagtgtatgagtattagtc

SEQ ID NO: 415252 - DNA, 25 bp, Artificial
  probe
  misc_feature (1)..(25): SEQ ID NO: 5582; WAN024DXV; Start 105; Stop 129
ctgcaaagagtgtatgagtattagt

SEQ ID NO: 415253 - DNA, 25 bp, Artificial
  probe
  misc_feature (1)..(25): SEQ ID NO: 5582; WAN024DXV; Start 176; Stop 200
aattgatctggcaaccaatctccaa

SEQ ID NO: 415254 - DNA, 25 bp, Artificial
  probe
  misc_feature (1)..(25): SEQ ID NO: 5582; WAN024DXV; Start 117; Stop 141
tatgagtattagtcgcaatctggcc

SEQ ID NO: 415255 - DNA, 25 bp, Artificial
  probe
  misc_feature (1)..(25): SEQ ID NO: 5582; WAN024DXV; Start 164; Stop 188
tggagaccatagaattgatctggca

SEQ ID NO: 415256 - DNA, 25 bp, Artificial
  probe
  misc_feature (1)..(25): SEQ ID NO: 5582; WAN024DXV; Start 174; Stop 198
agaattgatctggcaaccaatctcc

SEQ ID NO: 415257 - DNA, 25 bp, Artificial
  probe
  misc_feature (1)..(25): SEQ ID NO: 5583; WAN024FFX; Start 53; Stop 77
gaccaattcagaaccagaccacttc

SEQ ID NO: 415258 - DNA, 25 bp, Artificial
  probe
  misc_feature (1)..(25): SEQ ID NO: 5583; WAN024FFX; Start 52; Stop 76
agaccaattcagaaccagaccactt

SEQ ID NO: 415259 - DNA, 25 bp, Artificial
  probe
  misc_feature (1)..(25): SEQ ID NO: 5583; WAN024FFX; Start 67; Stop 91
cagaccacttccctgaactctattt

SEQ ID NO: 415260 - DNA, 25 bp, Artificial
  probe
  misc_feature (1)..(25): SEQ ID NO: 5583; WAN024FFX; Start 51; Stop 75
gagaccaattcagaaccagaccact

SEQ ID NO: 415261 - DNA, 25 bp, Artificial
  probe
  misc_feature (1)..(25): SEQ ID NO: 5583; WAN024FFX; Start 212; Stop 236
caacgggacatgagtttgtatttgt

SEQ ID NO: 415262 - DNA, 25 bp, Artificial
  probe
  misc_feature (1)..(25): SEQ ID NO: 5583; WAN024FFX; Start 69; Stop 93
gaccacttccctgaactctattttc

SEQ ID NO: 415263 - DNA, 25 bp, Artificial
  probe
  misc_feature (1)..(25): SEQ ID NO: 5583; WAN024FFX; Start 68; Stop 92
agaccacttccctgaactctatttt

SEQ ID NO: 415264 - DNA, 25 bp, Artificial
  probe
  misc_feature (1)..(25): SEQ ID NO: 5583; WAN024FFX; Start 50; Stop 74
tgagaccaattcagaaccagaccac

SEQ ID NO: 415265 - DNA, 25 bp, Artificial
  probe
  misc_feature (1)..(25): SEQ ID NO: 5583; WAN024FFX; Start 54; Stop 78
accaattcagaaccagaccacttcc

SEQ ID NO: 415266 - DNA, 25 bp, Artificial
  probe
  misc_feature (1)..(25): SEQ ID NO: 5583; WAN024FFX; Start 66; Stop 90
ccagaccacttccctgaactctatt

SEQ ID NO: 415267 - DNA, 25 bp, Artificial
  probe
  misc_feature (1)..(25): SEQ ID NO: 5583; WAN024FFX; Start 210; Stop 234
gacaacgggacatgagtttgtattt

SEQ ID NO: 415268 - DNA, 25 bp, Artificial
  probe
  misc_feature (1)..(25): SEQ ID NO: 5583; WAN024FFX; Start 211; Stop 235
acaacgggacatgagtttgtatttg

SEQ ID NO: 415269 - DNA, 25 bp, Artificial
  probe
  misc_feature (1)..(25): SEQ ID NO: 5583; WAN024FFX; Start 56; Stop 80
caattcagaaccagaccacttccct

SEQ ID NO: 415270 - DNA, 25 bp, Artificial
  probe
  misc_feature (1)..(25): SEQ ID NO: 5583; WAN024FFX; Start 46; Stop 70
ttcctgagaccaattcagaaccaga

SEQ ID NO: 415271 - DNA, 25 bp, Artificial
  probe
  misc_feature (1)..(25): SEQ ID NO: 5583; WAN024FFX; Start 216; Stop 240
gggacatgagtttgtatttgtctag

SEQ ID NO: 415272 - DNA, 25 bp, Artificial
  probe
  misc_feature (1)..(25): SEQ ID NO: 5583; WAN024FFX; Start 215; Stop 239
cgggacatgagtttgtatttgtcta

SEQ ID NO: 415273 - DNA, 25 bp, Artificial
  probe
  misc_feature (1)..(25): SEQ ID NO: 5583; WAN024FFX; Start 209; Stop 233
tgacaacgggacatgagtttgtatt

SEQ ID NO: 415274 - DNA, 25 bp, Artificial
  probe
  misc_feature (1)..(25): SEQ ID NO: 5583; WAN024FFX; Start 65; Stop 89
accagaccacttccctgaactctat

SEQ ID NO: 415275 - DNA, 25 bp, Artificial
  probe
  misc_feature (1)..(25): SEQ ID NO: 5583; WAN024FFX; Start 57; Stop 81
aattcagaaccagaccacttccctg

SEQ ID NO: 415276 - DNA, 25 bp, Artificial
  probe
  misc_feature (1)..(25): SEQ ID NO: 5583; WAN024FFX; Start 64; Stop 88
aaccagaccacttccctgaactcta

SEQ ID NO: 415277 - DNA, 25 bp, Artificial
  probe
  misc_feature (1)..(25): SEQ ID NO: 5583; WAN024FFX; Start 208; Stop 232
ctgacaacgggacatgagtttgtat

SEQ ID NO: 415278 - DNA, 25 bp, Artificial
  probe
  misc_feature (1)..(25): SEQ ID NO: 5583; WAN024FFX; Start 213; Stop 237
aacgggacatgagtttgtatttgtc

SEQ ID NO: 415279 - DNA, 25 bp, Artificial
  probe
  misc_feature (1)..(25): SEQ ID NO: 5583; WAN024FFX; Start 45; Stop 69
tttcctgagaccaattcagaaccag

SEQ ID NO: 415280 - DNA, 25 bp, Artificial
  probe
  misc_feature (1)..(25): SEQ ID NO: 5583; WAN024FFX; Start 155; Stop 179
agagcctgcttgtattctgccaaat

SEQ ID NO: 415281 - DNA, 25 bp, Artificial
  probe
  misc_feature (1)..(25): SEQ ID NO: 5583; WAN024FFX; Start 70; Stop 94
accacttccctgaactctattttca

SEQ ID NO: 415282 - DNA, 25 bp, Artificial
  probe
  misc_feature (1)..(25): SEQ ID NO: 5583; WAN024FFX; Start 47; Stop 71
tcctgagaccaattcagaaccagac

SEQ ID NO: 415283 - DNA, 25 bp, Artificial
  probe
  misc_feature (1)..(25): SEQ ID NO: 5583; WAN024FFX; Start 154; Stop 178
aagagcctgcttgtattctgccaaa

SEQ ID NO: 415284 - DNA, 25 bp, Artificial
  probe
  misc_feature (1)..(25): SEQ ID NO: 5583; WAN024FFX; Start 49; Stop 73
ctgagaccaattcagaaccagacca

SEQ ID NO: 415285 - DNA, 25 bp, Artificial
  probe
  misc_feature (1)..(25): SEQ ID NO: 5583; WAN024FFX; Start 214; Stop 238
acgggacatgagtttgtatttgtct

SEQ ID NO: 415286 - DNA, 25 bp, Artificial
  probe
  misc_feature (1)..(25): SEQ ID NO: 5583; WAN024FFX; Start 48; Stop 72
cctgagaccaattcagaaccagacc

SEQ ID NO: 415287 - DNA, 25 bp, Artificial
  probe
  misc_feature (1)..(25): SEQ ID NO: 5583; WAN024FFX; Start 44; Stop 68
ttttcctgagaccaattcagaacca

SEQ ID NO: 415288 - DNA, 25 bp, Artificial
  probe
  misc_feature (1)..(25): SEQ ID NO: 5583; WAN024FFX; Start 112; Stop 136
ctgcatttggaaataaaagagttcc

SEQ ID NO: 415289 - DNA, 25 bp, Artificial
  probe
  misc_feature (1)..(25): SEQ ID NO: 5583; WAN024FFX; Start 207; Stop 231
cctgacaacgggacatgagtttgta

SEQ ID NO: 415290 - DNA, 25 bp, Artificial
  probe
  misc_feature (1)..(25): SEQ ID NO: 5583; WAN024FFX; Start 58; Stop 82
attcagaaccagaccacttccctga

SEQ ID NO: 415291 - DNA, 25 bp, Artificial
  probe
  misc_feature (1)..(25): SEQ ID NO: 5585; WAN024DRE; Start 2; Stop 26
tgggtggagttaagggagattatta

SEQ ID NO: 415292 - DNA, 25 bp, Artificial
  probe
  misc_feature (1)..(25): SEQ ID NO: 5585; WAN024DRE; Start 3; Stop 27
gggtggagttaagggagattattat

SEQ ID NO: 415293 - DNA, 25 bp, Artificial
  probe
  misc_feature (1)..(25): SEQ ID NO: 5585; WAN024DRE; Start 1; Stop 25
ttgggtggagttaagggagattatt

SEQ ID NO: 415294 - DNA, 25 bp, Artificial
  probe
  misc_feature (1)..(25): SEQ ID NO: 5585; WAN024DRE; Start 4; Stop 28
ggtggagttaagggagattattatg

SEQ ID NO: 415295 - DNA, 25 bp, Artificial
  probe
  misc_feature (1)..(25): SEQ ID NO: 5585; WAN024DRE; Start 5; Stop 29
gtggagttaagggagattattatga

SEQ ID NO: 415296 - DNA, 25 bp, Artificial
  probe
  misc_feature (1)..(25): SEQ ID NO: 5585; WAN024DRE; Start 81; Stop 105
taactacatgatacaagacgaaact

SEQ ID NO: 415297 - DNA, 25 bp, Artificial
  probe
  misc_feature (1)..(25): SEQ ID NO: 5585; WAN024DRE; Start 6; Stop 30
tggagttaagggagattattatgaa

SEQ ID NO: 415298 - DNA, 25 bp, Artificial
  probe
  misc_feature (1)..(25): SEQ ID NO: 5585; WAN024DRE; Start 80; Stop 104
ataactacatgatacaagacgaaac

SEQ ID NO: 415299 - DNA, 25 bp, Artificial
  probe
  misc_feature (1)..(25): SEQ ID NO: 5585; WAN024DRE; Start 78; Stop 102
taataactacatgatacaagacgaa

SEQ ID NO: 415300 - DNA, 25 bp, Artificial
  probe
  misc_feature (1)..(25): SEQ ID NO: 5585; WAN024DRE; Start 77; Stop 101
ttaataactacatgatacaagacga

SEQ ID NO: 415301 - DNA, 25 bp, Artificial
  probe
  misc_feature (1)..(25): SEQ ID NO: 5585; WAN024DRE; Start 7; Stop 31
ggagttaagggagattattatgaaa

SEQ ID NO: 415302 - DNA, 25 bp, Artificial
  probe
  misc_feature (1)..(25): SEQ ID NO: 5585; WAN024DRE; Start 79; Stop 103
aataactacatgatacaagacgaaa

SEQ ID NO: 415303 - DNA, 25 bp, Artificial
  probe
  misc_feature (1)..(25): SEQ ID NO: 5585; WAN024DRE; Start 64; Stop 88
aggaggtctttatttaataactaca

SEQ ID NO: 415304 - DNA, 25 bp, Artificial
  probe
  misc_feature (1)..(25): SEQ ID NO: 5585; WAN024DRE; Start 76; Stop 100
tttaataactacatgatacaagacg

SEQ ID NO: 415305 - DNA, 25 bp, Artificial
  probe
  misc_feature (1)..(25): SEQ ID NO: 5586; WAN024CMP; Start 46; Stop 70
aggaagttggagaagtttgtttaca

SEQ ID NO: 415306 - DNA, 25 bp, Artificial
  probe
  misc_feature (1)..(25): SEQ ID NO: 5586; WAN024CMP; Start 45; Stop 69
taggaagttggagaagtttgtttac

SEQ ID NO: 415307 - DNA, 25 bp, Artificial
  probe
  misc_feature (1)..(25): SEQ ID NO: 5586; WAN024CMP; Start 43; Stop 67
attaggaagttggagaagtttgttt

SEQ ID NO: 415308 - DNA, 25 bp, Artificial
  probe
  misc_feature (1)..(25): SEQ ID NO: 5586; WAN024CMP; Start 42; Stop 66
aattaggaagttggagaagtttgtt

SEQ ID NO: 415309 - DNA, 25 bp, Artificial
  probe
  misc_feature (1)..(25): SEQ ID NO: 5586; WAN024CMP; Start 41; Stop 65
aaattaggaagttggagaagtttgt

SEQ ID NO: 415310 - DNA, 25 bp, Artificial
  probe
  misc_feature (1)..(25): SEQ ID NO: 5586; WAN024CMP; Start 44; Stop 68
ttaggaagttggagaagtttgttta

SEQ ID NO: 415311 - DNA, 25 bp, Artificial
  probe
  misc_feature (1)..(25): SEQ ID NO: 5586; WAN024CMP; Start 47; Stop 71
ggaagttggagaagtttgtttacaa

SEQ ID NO: 415312 - DNA, 25 bp, Artificial
  probe
  misc_feature (1)..(25): SEQ ID NO: 5586; WAN024CMP; Start 11; Stop 35
caagatacaaagctcgtaaagaaca

SEQ ID NO: 415313 - DNA, 25 bp, Artificial
  probe
  misc_feature (1)..(25): SEQ ID NO: 5586; WAN024CMP; Start 10; Stop 34
tcaagatacaaagctcgtaaagaac

SEQ ID NO: 415314 - DNA, 25 bp, Artificial
  probe
  misc_feature (1)..(25): SEQ ID NO: 5586; WAN024CMP; Start 13; Stop 37
agatacaaagctcgtaaagaacaaa

SEQ ID NO: 415315 - DNA, 25 bp, Artificial
  probe
  misc_feature (1)..(25): SEQ ID NO: 5586; WAN024CMP; Start 12; Stop 36
aagatacaaagctcgtaaagaacaa

SEQ ID NO: 415316 - DNA, 25 bp, Artificial
  probe
  misc_feature (1)..(25): SEQ ID NO: 5586; WAN024CMP; Start 14; Stop 38
gatacaaagctcgtaaagaacaaag

SEQ ID NO: 415317 - DNA, 25 bp, Artificial
  probe
  misc_feature (1)..(25): SEQ ID NO: 5586; WAN024CMP; Start 64; Stop 88
gtttacaaacaagccaacttatcta

SEQ ID NO: 415318 - DNA, 25 bp, Artificial
  probe
  misc_feature (1)..(25): SEQ ID NO: 5586; WAN024CMP; Start 9; Stop 33
atcaagatacaaagctcgtaaagaa

SEQ ID NO: 415319 - DNA, 25 bp, Artificial
  probe
  misc_feature (1)..(25): SEQ ID NO: 5586; WAN024CMP; Start 8; Stop 32
aatcaagatacaaagctcgtaaaga

SEQ ID NO: 415320 - DNA, 25 bp, Artificial
  probe
  misc_feature (1)..(25): SEQ ID NO: 5586; WAN024CMP; Start 7; Stop 31
aaatcaagatacaaagctcgtaaag

SEQ ID NO: 415321 - DNA, 25 bp, Artificial
  probe
  misc_feature (1)..(25): SEQ ID NO: 5586; WAN024CMP; Start 67; Stop 91
tacaaacaagccaacttatctattt

SEQ ID NO: 415322 - DNA, 25 bp, Artificial
  probe
  misc_feature (1)..(25): SEQ ID NO: 5586; WAN024CMP; Start 66; Stop 90
ttacaaacaagccaacttatctatt

SEQ ID NO: 415323 - DNA, 25 bp, Artificial
  probe
  misc_feature (1)..(25): SEQ ID NO: 5586; WAN024CMP; Start 65; Stop 89
tttacaaacaagccaacttatctat

SEQ ID NO: 415324 - DNA, 25 bp, Artificial
  probe
  misc_feature (1)..(25): SEQ ID NO: 5586; WAN024CMP; Start 38; Stop 62
gcaaaattaggaagttggagaagtt

SEQ ID NO: 415325 - DNA, 25 bp, Artificial
  probe
  misc_feature (1)..(25): SEQ ID NO: 5586; WAN024CMP; Start 36; Stop 60
aagcaaaattaggaagttggagaag

SEQ ID NO: 415326 - DNA, 25 bp, Artificial
  probe
  misc_feature (1)..(25): SEQ ID NO: 5586; WAN024CMP; Start 34; Stop 58
caaagcaaaattaggaagttggaga

SEQ ID NO: 415327 - DNA, 25 bp, Artificial
  probe
  misc_feature (1)..(25): SEQ ID NO: 5586; WAN024CMP; Start 33; Stop 57
acaaagcaaaattaggaagttggag

SEQ ID NO: 415328 - DNA, 25 bp, Artificial
  probe
  misc_feature (1)..(25): SEQ ID NO: 5586; WAN024CMP; Start 32; Stop 56
aacaaagcaaaattaggaagttgga

SEQ ID NO: 415329 - DNA, 25 bp, Artificial
  probe
  misc_feature (1)..(25): SEQ ID NO: 5586; WAN024CMP; Start 31; Stop 55
gaacaaagcaaaattaggaagttgg

SEQ ID NO: 415330 - DNA, 25 bp, Artificial
  probe
  misc_feature (1)..(25): SEQ ID NO: 5586; WAN024CMP; Start 37; Stop 61
agcaaaattaggaagttggagaagt

SEQ ID NO: 415331 - DNA, 25 bp, Artificial
  probe
  misc_feature (1)..(25): SEQ ID NO: 5586; WAN024CMP; Start 35; Stop 59
aaagcaaaattaggaagttggagaa

SEQ ID NO: 415332 - DNA, 25 bp, Artificial
  probe
  misc_feature (1)..(25): SEQ ID NO: 5586; WAN024CMP; Start 25; Stop 49
cgtaaagaacaaagcaaaattagga

SEQ ID NO: 415333 - DNA, 25 bp, Artificial
  probe
  misc_feature (1)..(25): SEQ ID NO: 5586; WAN024CMP; Start 24; Stop 48
tcgtaaagaacaaagcaaaattagg

SEQ ID NO: 415334 - DNA, 25 bp, Artificial
  probe
  misc_feature (1)..(25): SEQ ID NO: 5586; WAN024CMP; Start 15; Stop 39
atacaaagctcgtaaagaacaaagc

SEQ ID NO: 415335 - DNA, 25 bp, Artificial
  probe
  misc_feature (1)..(25): SEQ ID NO: 5586; WAN024CMP; Start 70; Stop 94
aaacaagccaacttatctattttgc

SEQ ID NO: 415336 - DNA, 25 bp, Artificial
  probe
  misc_feature (1)..(25): SEQ ID NO: 5586; WAN024CMP; Start 30; Stop 54
agaacaaagcaaaattaggaagttg

SEQ ID NO: 415337 - DNA, 25 bp, Artificial
  probe
  misc_feature (1)..(25): SEQ ID NO: 5586; WAN024CMP; Start 28; Stop 52
aaagaacaaagcaaaattaggaagt

SEQ ID NO: 415338 - DNA, 25 bp, Artificial
  probe
  misc_feature (1)..(25): SEQ ID NO: 5587; WAN024B8K; Start 314; Stop 338
gcctcaagtatagcctcaagtataa

SEQ ID NO: 415339 - DNA, 25 bp, Artificial
  probe
  misc_feature (1)..(25): SEQ ID NO: 5587; WAN024B8K; Start 313; Stop 337
agcctcaagtatagcctcaagtata

SEQ ID NO: 415340 - DNA, 25 bp, Artificial
  probe
  misc_feature (1)..(25): SEQ ID NO: 5587; WAN024B8K; Start 312; Stop 336
cagcctcaagtatagcctcaagtat

SEQ ID NO: 415341 - DNA, 25 bp, Artificial
  probe
  misc_feature (1)..(25): SEQ ID NO: 5587; WAN024B8K; Start 308; Stop 332
aatacagcctcaagtatagcctcaa

SEQ ID NO: 415342 - DNA, 25 bp, Artificial
  probe
  misc_feature (1)..(25): SEQ ID NO: 5587; WAN024B8K; Start 311; Stop 335
acagcctcaagtatagcctcaagta

SEQ ID NO: 415343 - DNA, 25 bp, Artificial
  probe
  misc_feature (1)..(25): SEQ ID NO: 5587; WAN024B8K; Start 310; Stop 334
tacagcctcaagtatagcctcaagt

SEQ ID NO: 415344 - DNA, 25 bp, Artificial
  probe
  misc_feature (1)..(25): SEQ ID NO: 5587; WAN024B8K; Start 309; Stop 333
atacagcctcaagtatagcctcaag

SEQ ID NO: 415345 - DNA, 25 bp, Artificial
  probe
  misc_feature (1)..(25): SEQ ID NO: 5587; WAN024B8K; Start 307; Stop 331
gaatacagcctcaagtatagcctca

SEQ ID NO: 415346 - DNA, 25 bp, Artificial
  probe
  misc_feature (1)..(25): SEQ ID NO: 5587; WAN024B8K; Start 306; Stop 330
tgaatacagcctcaagtatagcctc

SEQ ID NO: 415347 - DNA, 25 bp, Artificial
  probe
  misc_feature (1)..(25): SEQ ID NO: 5587; WAN024B8K; Start 304; Stop 328
attgaatacagcctcaagtatagcc

SEQ ID NO: 415348 - DNA, 25 bp, Artificial
  probe
  misc_feature (1)..(25): SEQ ID NO: 5587; WAN024B8K; Start 303; Stop 327
aattgaatacagcctcaagtatagc

SEQ ID NO: 415349 - DNA, 25 bp, Artificial
  probe
  misc_feature (1)..(25): SEQ ID NO: 5587; WAN024B8K; Start 315; Stop 339
cctcaagtatagcctcaagtataaa

SEQ ID NO: 415350 - DNA, 25 bp, Artificial
  probe
  misc_feature (1)..(25): SEQ ID NO: 5587; WAN024B8K; Start 323; Stop 347
atagcctcaagtataaagaaacctt

SEQ ID NO: 415351 - DNA, 25 bp, Artificial
  probe
  misc_feature (1)..(25): SEQ ID NO: 5587; WAN024B8K; Start 305; Stop 329
ttgaatacagcctcaagtatagcct

SEQ ID NO: 415352 - DNA, 25 bp, Artificial
  probe
  misc_feature (1)..(25): SEQ ID NO: 5587; WAN024B8K; Start 321; Stop 345
gtatagcctcaagtataaagaaacc

SEQ ID NO: 415353 - DNA, 25 bp, Artificial
  probe
  misc_feature (1)..(25): SEQ ID NO: 5587; WAN024B8K; Start 322; Stop 346
tatagcctcaagtataaagaaacct

SEQ ID NO: 415354 - DNA, 25 bp, Artificial
  probe
  misc_feature (1)..(25): SEQ ID NO: 5587; WAN024B8K; Start 317; Stop 341
tcaagtatagcctcaagtataaaga

SEQ ID NO: 415355 - DNA, 25 bp, Artificial
  probe
  misc_feature (1)..(25): SEQ ID NO: 5587; WAN024B8K; Start 349; Stop 373
aagactattttgaaagacggacatc

SEQ ID NO: 415356 - DNA, 25 bp, Artificial
  probe
  misc_feature (1)..(25): SEQ ID NO: 5587; WAN024B8K; Start 316; Stop 340
ctcaagtatagcctcaagtataaag

SEQ ID NO: 415357 - DNA, 25 bp, Artificial
  probe
  misc_feature (1)..(25): SEQ ID NO: 5587; WAN024B8K; Start 351; Stop 375
gactattttgaaagacggacatctg

SEQ ID NO: 415358 - DNA, 25 bp, Artificial
  probe
  misc_feature (1)..(25): SEQ ID NO: 5587; WAN024B8K; Start 350; Stop 374
agactattttgaaagacggacatct

SEQ ID NO: 415359 - DNA, 25 bp, Artificial
  probe
  misc_feature (1)..(25): SEQ ID NO: 5587; WAN024B8K; Start 266; Stop 290
gtcagtcagttttatcgggttcaaa

SEQ ID NO: 415360 - DNA, 25 bp, Artificial
  probe
  misc_feature (1)..(25): SEQ ID NO: 5587; WAN024B8K; Start 353; Stop 377
ctattttgaaagacggacatctggt

SEQ ID NO: 415361 - DNA, 25 bp, Artificial
  probe
  misc_feature (1)..(25): SEQ ID NO: 5587; WAN024B8K; Start 352; Stop 376
actattttgaaagacggacatctgg

SEQ ID NO: 415362 - DNA, 25 bp, Artificial
  probe
  misc_feature (1)..(25): SEQ ID NO: 5587; WAN024B8K; Start 324; Stop 348
tagcctcaagtataaagaaaccttt

SEQ ID NO: 415363 - DNA, 25 bp, Artificial
  probe
  misc_feature (1)..(25): SEQ ID NO: 5587; WAN024B8K; Start 347; Stop 371
ttaagactattttgaaagacggaca

SEQ ID NO: 415364 - DNA, 25 bp, Artificial
  probe
  misc_feature (1)..(25): SEQ ID NO: 5587; WAN024B8K; Start 276; Stop 300
tttatcgggttcaaaactaggaagg

SEQ ID NO: 415365 - DNA, 25 bp, Artificial
  probe
  misc_feature (1)..(25): SEQ ID NO: 5587; WAN024B8K; Start 348; Stop 372
taagactattttgaaagacggacat

SEQ ID NO: 415366 - DNA, 25 bp, Artificial
  probe
  misc_feature (1)..(25): SEQ ID NO: 5587; WAN024B8K; Start 320; Stop 344
agtatagcctcaagtataaagaaac

SEQ ID NO: 415367 - DNA, 25 bp, Artificial
  probe
  misc_feature (1)..(25): SEQ ID NO: 5587; WAN024B8K; Start 318; Stop 342
caagtatagcctcaagtataaagaa

SEQ ID NO: 415368 - DNA, 25 bp, Artificial
  probe
  misc_feature (1)..(25): SEQ ID NO: 5587; WAN024B8K; Start 301; Stop 325
gcaattgaatacagcctcaagtata

SEQ ID NO: 415369 - DNA, 25 bp, Artificial
  probe
  misc_feature (1)..(25): SEQ ID NO: 5587; WAN024B8K; Start 354; Stop 378
tattttgaaagacggacatctggtc

SEQ ID NO: 415370 - DNA, 25 bp, Artificial
  probe
  misc_feature (1)..(25): SEQ ID NO: 5587; WAN024B8K; Start 267; Stop 291
tcagtcagttttatcgggttcaaaa

SEQ ID NO: 415371 - DNA, 25 bp, Artificial
  probe
  misc_feature (1)..(25): SEQ ID NO: 5589; WAN024ATK; Start 280; Stop 304
ttcataggtaataatgccgtctgtc

SEQ ID NO: 415372 - DNA, 25 bp, Artificial
  probe
  misc_feature (1)..(25): SEQ ID NO: 5589; WAN024ATK; Start 281; Stop 305
tcataggtaataatgccgtctgtcc

SEQ ID NO: 415373 - DNA, 25 bp, Artificial
  probe
  misc_feature (1)..(25): SEQ ID NO: 5589; WAN024ATK; Start 279; Stop 303
tttcataggtaataatgccgtctgt

SEQ ID NO: 415374 - DNA, 25 bp, Artificial
  probe
  misc_feature (1)..(25): SEQ ID NO: 5589; WAN024ATK; Start 203; Stop 227
gtataaacatccttaccgtccatcg

SEQ ID NO: 415375 - DNA, 25 bp, Artificial
  probe
  misc_feature (1)..(25): SEQ ID NO: 5589; WAN024ATK; Start 204; Stop 228
tataaacatccttaccgtccatcgt

SEQ ID NO: 415376 - DNA, 25 bp, Artificial
  probe
  misc_feature (1)..(25): SEQ ID NO: 5589; WAN024ATK; Start 202; Stop 226
tgtataaacatccttaccgtccatc

SEQ ID NO: 415377 - DNA, 25 bp, Artificial
  probe
  misc_feature (1)..(25): SEQ ID NO: 5589; WAN024ATK; Start 201; Stop 225
ttgtataaacatccttaccgtccat

SEQ ID NO: 415378 - DNA, 25 bp, Artificial
  probe
  misc_feature (1)..(25): SEQ ID NO: 5589; WAN024ATK; Start 189; Stop 213
ggctggaaatggttgtataaacatc

SEQ ID NO: 415379 - DNA, 25 bp, Artificial
  probe
  misc_feature (1)..(25): SEQ ID NO: 5589; WAN024ATK; Start 200; Stop 224
gttgtataaacatccttaccgtcca

SEQ ID NO: 415380 - DNA, 25 bp, Artificial
  probe
  misc_feature (1)..(25): SEQ ID NO: 5589; WAN024ATK; Start 255; Stop 279
gtacaatattacccagacgatcctt

SEQ ID NO: 415381 - DNA, 25 bp, Artificial
  probe
  misc_feature (1)..(25): SEQ ID NO: 5589; WAN024ATK; Start 256; Stop 280
tacaatattacccagacgatccttt

SEQ ID NO: 415382 - DNA, 25 bp, Artificial
  probe
  misc_feature (1)..(25): SEQ ID NO: 5589; WAN024ATK; Start 21; Stop 45
aaacaaagtcctctgtaatgccttc

SEQ ID NO: 415383 - DNA, 25 bp, Artificial
  probe
  misc_feature (1)..(25): SEQ ID NO: 5589; WAN024ATK; Start 205; Stop 229
ataaacatccttaccgtccatcgtt

SEQ ID NO: 415384 - DNA, 25 bp, Artificial
  probe
  misc_feature (1)..(25): SEQ ID NO: 5589; WAN024ATK; Start 188; Stop 212
gggctggaaatggttgtataaacat

SEQ ID NO: 415385 - DNA, 25 bp, Artificial
  probe
  misc_feature (1)..(25): SEQ ID NO: 5589; WAN024ATK; Start 190; Stop 214
gctggaaatggttgtataaacatcc

SEQ ID NO: 415386 - DNA, 25 bp, Artificial
  probe
  misc_feature (1)..(25): SEQ ID NO: 5589; WAN024ATK; Start 20; Stop 44
caaacaaagtcctctgtaatgcctt

SEQ ID NO: 415387 - DNA, 25 bp, Artificial
  probe
  misc_feature (1)..(25): SEQ ID NO: 5589; WAN024ATK; Start 197; Stop 221
atggttgtataaacatccttaccgt

SEQ ID NO: 415388 - DNA, 25 bp, Artificial
  probe
  misc_feature (1)..(25): SEQ ID NO: 5589; WAN024ATK; Start 191; Stop 215
ctggaaatggttgtataaacatcct

SEQ ID NO: 415389 - DNA, 25 bp, Artificial
  probe
  misc_feature (1)..(25): SEQ ID NO: 5589; WAN024ATK; Start 198; Stop 222
tggttgtataaacatccttaccgtc

SEQ ID NO: 415390 - DNA, 25 bp, Artificial
  probe
  misc_feature (1)..(25): SEQ ID NO: 5589; WAN024ATK; Start 196; Stop 220
aatggttgtataaacatccttaccg

SEQ ID NO: 415391 - DNA, 25 bp, Artificial
  probe
  misc_feature (1)..(25): SEQ ID NO: 5589; WAN024ATK; Start 192; Stop 216
tggaaatggttgtataaacatcctt

SEQ ID NO: 415392 - DNA, 25 bp, Artificial
  probe
  misc_feature (1)..(25): SEQ ID NO: 5589; WAN024ATK; Start 23; Stop 47
acaaagtcctctgtaatgccttctt

SEQ ID NO: 415393 - DNA, 25 bp, Artificial
  probe
  misc_feature (1)..(25): SEQ ID NO: 5589; WAN024ATK; Start 22; Stop 46
aacaaagtcctctgtaatgccttct

SEQ ID NO: 415394 - DNA, 25 bp, Artificial
  probe
  misc_feature (1)..(25): SEQ ID NO: 5589; WAN024ATK; Start 206; Stop 230
taaacatccttaccgtccatcgttc

SEQ ID NO: 415395 - DNA, 25 bp, Artificial
  probe
  misc_feature (1)..(25): SEQ ID NO: 5589; WAN024ATK; Start 199; Stop 223
ggttgtataaacatccttaccgtcc

SEQ ID NO: 415396 - DNA, 25 bp, Artificial
  probe
  misc_feature (1)..(25): SEQ ID NO: 5589; WAN024ATK; Start 282; Stop 306
cataggtaataatgccgtctgtccc

SEQ ID NO: 415397 - DNA, 25 bp, Artificial
  probe
  misc_feature (1)..(25): SEQ ID NO: 5589; WAN024ATK; Start 313; Stop 337
aatactgttcaaggaactctccatt

SEQ ID NO: 415398 - DNA, 25 bp, Artificial
  probe
  misc_feature (1)..(25): SEQ ID NO: 5589; WAN024ATK; Start 310; Stop 334
aagaatactgttcaaggaactctcc

SEQ ID NO: 415399 - DNA, 25 bp, Artificial
  probe
  misc_feature (1)..(25): SEQ ID NO: 5589; WAN024ATK; Start 4; Stop 28
gtaaaggatatcacgccaaacaaag

SEQ ID NO: 415400 - DNA, 25 bp, Artificial
  probe
  misc_feature (1)..(25): SEQ ID NO: 5589; WAN024ATK; Start 314; Stop 338
atactgttcaaggaactctccattc

SEQ ID NO: 415401 - DNA, 25 bp, Artificial
  probe
  misc_feature (1)..(25): SEQ ID NO: 5589; WAN024ATK; Start 312; Stop 336
gaatactgttcaaggaactctccat

SEQ ID NO: 415402 - DNA, 25 bp, Artificial
  probe
  misc_feature (1)..(25): SEQ ID NO: 5589; WAN024ATK; Start 309; Stop 333
caagaatactgttcaaggaactctc

SEQ ID NO: 415403 - DNA, 25 bp, Artificial
  probe
  misc_feature (1)..(25): SEQ ID NO: 5589; WAN024ATK; Start 5; Stop 29
taaaggatatcacgccaaacaaagt

SEQ ID NO: 415404 - DNA, 25 bp, Artificial
  probe
  misc_feature (1)..(25): SEQ ID NO: 5590; WAN024DD6; Start 76; Stop 100
ttagttctgaaagttccaaaaggtg

SEQ ID NO: 415405 - DNA, 25 bp, Artificial
  probe
  misc_feature (1)..(25): SEQ ID NO: 5590; WAN024DD6; Start 75; Stop 99
tttagttctgaaagttccaaaaggt

SEQ ID NO: 415406 - DNA, 25 bp, Artificial
  probe
  misc_feature (1)..(25): SEQ ID NO: 5590; WAN024DD6; Start 77; Stop 101
tagttctgaaagttccaaaaggtgc

SEQ ID NO: 415407 - DNA, 25 bp, Artificial
  probe
  misc_feature (1)..(25): SEQ ID NO: 5590; WAN024DD6; Start 69; Stop 93
tctgattttagttctgaaagttcca

SEQ ID NO: 415408 - DNA, 25 bp, Artificial
  probe
  misc_feature (1)..(25): SEQ ID NO: 5590; WAN024DD6; Start 70; Stop 94
ctgattttagttctgaaagttccaa

SEQ ID NO: 415409 - DNA, 25 bp, Artificial
  probe
  misc_feature (1)..(25): SEQ ID NO: 5590; WAN024DD6; Start 68; Stop 92
ttctgattttagttctgaaagttcc

SEQ ID NO: 415410 - DNA, 25 bp, Artificial
  probe
  misc_feature (1)..(25): SEQ ID NO: 5590; WAN024DD6; Start 71; Stop 95
tgattttagttctgaaagttccaaa

SEQ ID NO: 415411 - DNA, 25 bp, Artificial
  probe
  misc_feature (1)..(25): SEQ ID NO: 5590; WAN024DD6; Start 74; Stop 98
ttttagttctgaaagttccaaaagg

SEQ ID NO: 415412 - DNA, 25 bp, Artificial
  probe
  misc_feature (1)..(25): SEQ ID NO: 5590; WAN024DD6; Start 61; Stop 85
ttccattttctgattttagttctga

SEQ ID NO: 415413 - DNA, 25 bp, Artificial
  probe
  misc_feature (1)..(25): SEQ ID NO: 5590; WAN024DD6; Start 62; Stop 86
tccattttctgattttagttctgaa

SEQ ID NO: 415414 - DNA, 25 bp, Artificial
  probe
  misc_feature (1)..(25): SEQ ID NO: 5590; WAN024DD6; Start 60; Stop 84
cttccattttctgattttagttctg

SEQ ID NO: 415415 - DNA, 25 bp, Artificial
  probe
  misc_feature (1)..(25): SEQ ID NO: 5590; WAN024DD6; Start 59; Stop 83
tcttccattttctgattttagttct

SEQ ID NO: 415416 - DNA, 25 bp, Artificial
  probe
  misc_feature (1)..(25): SEQ ID NO: 5590; WAN024DD6; Start 56; Stop 80
tcttcttccattttctgattttagt

SEQ ID NO: 415417 - DNA, 25 bp, Artificial
  probe
  misc_feature (1)..(25): SEQ ID NO: 5590; WAN024DD6; Start 52; Stop 76
actatcttcttccattttctgattt

SEQ ID NO: 415418 - DNA, 25 bp, Artificial
  probe
  misc_feature (1)..(25): SEQ ID NO: 5590; WAN024DD6; Start 79; Stop 103
gttctgaaagttccaaaaggtgcaa

SEQ ID NO: 415419 - DNA, 25 bp, Artificial
  probe
  misc_feature (1)..(25): SEQ ID NO: 5590; WAN024DD6; Start 80; Stop 104
ttctgaaagttccaaaaggtgcaac

SEQ ID NO: 415420 - DNA, 25 bp, Artificial
  probe
  misc_feature (1)..(25): SEQ ID NO: 5590; WAN024DD6; Start 58; Stop 82
ttcttccattttctgattttagttc

SEQ ID NO: 415421 - DNA, 25 bp, Artificial
  probe
  misc_feature (1)..(25): SEQ ID NO: 5590; WAN024DD6; Start 57; Stop 81
cttcttccattttctgattttagtt

SEQ ID NO: 415422 - DNA, 25 bp, Artificial
  probe
  misc_feature (1)..(25): SEQ ID NO: 5590; WAN024DD6; Start 72; Stop 96
gattttagttctgaaagttccaaaa

SEQ ID NO: 415423 - DNA, 25 bp, Artificial
  probe
  misc_feature (1)..(25): SEQ ID NO: 5590; WAN024DD6; Start 89; Stop 113
ttccaaaaggtgcaaccgtatttac

SEQ ID NO: 415424 - DNA, 25 bp, Artificial
  probe
  misc_feature (1)..(25): SEQ ID NO: 5590; WAN024DD6; Start 88; Stop 112
gttccaaaaggtgcaaccgtattta

SEQ ID NO: 415425 - DNA, 25 bp, Artificial
  probe
  misc_feature (1)..(25): SEQ ID NO: 5590; WAN024DD6; Start 78; Stop 102
agttctgaaagttccaaaaggtgca

SEQ ID NO: 415426 - DNA, 25 bp, Artificial
  probe
  misc_feature (1)..(25): SEQ ID NO: 5590; WAN024DD6; Start 73; Stop 97
attttagttctgaaagttccaaaag

SEQ ID NO: 415427 - DNA, 25 bp, Artificial
  probe
  misc_feature (1)..(25): SEQ ID NO: 5590; WAN024DD6; Start 49; Stop 73
aatactatcttcttccattttctga

SEQ ID NO: 415428 - DNA, 25 bp, Artificial
  probe
  misc_feature (1)..(25): SEQ ID NO: 5590; WAN024DD6; Start 51; Stop 75
tactatcttcttccattttctgatt

SEQ ID NO: 415429 - DNA, 25 bp, Artificial
  probe
  misc_feature (1)..(25): SEQ ID NO: 5590; WAN024DD6; Start 55; Stop 79
atcttcttccattttctgattttag

SEQ ID NO: 415430 - DNA, 25 bp, Artificial
  probe
  misc_feature (1)..(25): SEQ ID NO: 5590; WAN024DD6; Start 53; Stop 77
ctatcttcttccattttctgatttt

SEQ ID NO: 415431 - DNA, 25 bp, Artificial
  probe
  misc_feature (1)..(25): SEQ ID NO: 5590; WAN024DD6; Start 50; Stop 74
atactatcttcttccattttctgat

SEQ ID NO: 415432 - DNA, 25 bp, Artificial
  probe
  misc_feature (1)..(25): SEQ ID NO: 5590; WAN024DD6; Start 90; Stop 114
tccaaaaggtgcaaccgtatttaca

SEQ ID NO: 415433 - DNA, 25 bp, Artificial
  probe
  misc_feature (1)..(25): SEQ ID NO: 5590; WAN024DD6; Start 63; Stop 87
ccattttctgattttagttctgaaa

SEQ ID NO: 415434 - DNA, 25 bp, Artificial
  probe
  misc_feature (1)..(25): SEQ ID NO: 5590; WAN024DD6; Start 67; Stop 91
tttctgattttagttctgaaagttc

SEQ ID NO: 415435 - DNA, 25 bp, Artificial
  probe
  misc_feature (1)..(25): SEQ ID NO: 5590; WAN024DD6; Start 87; Stop 111
agttccaaaaggtgcaaccgtattt

SEQ ID NO: 415436 - DNA, 25 bp, Artificial
  probe
  misc_feature (1)..(25): SEQ ID NO: 5590; WAN024DD6; Start 86; Stop 110
aagttccaaaaggtgcaaccgtatt

SEQ ID NO: 415437 - DNA, 25 bp, Artificial
  probe
  misc_feature (1)..(25): SEQ ID NO: 5591; WAN024ES5; Start 151; Stop 175
aatcaaccagcatacttgttatctt

SEQ ID NO: 415438 - DNA, 25 bp, Artificial
  probe
  misc_feature (1)..(25): SEQ ID NO: 5591; WAN024ES5; Start 150; Stop 174
taatcaaccagcatacttgttatct

SEQ ID NO: 415439 - DNA, 25 bp, Artificial
  probe
  misc_feature (1)..(25): SEQ ID NO: 5591; WAN024ES5; Start 37; Stop 61
aggcaatacttcctactatcagcaa

SEQ ID NO: 415440 - DNA, 25 bp, Artificial
  probe
  misc_feature (1)..(25): SEQ ID NO: 5591; WAN024ES5; Start 36; Stop 60
aaggcaatacttcctactatcagca

SEQ ID NO: 415441 - DNA, 25 bp, Artificial
  probe
  misc_feature (1)..(25): SEQ ID NO: 5591; WAN024ES5; Start 38; Stop 62
ggcaatacttcctactatcagcaaa

SEQ ID NO: 415442 - DNA, 25 bp, Artificial
  probe
  misc_feature (1)..(25): SEQ ID NO: 5591; WAN024ES5; Start 143; Stop 167
aaccaaataatcaaccagcatactt

SEQ ID NO: 415443 - DNA, 25 bp, Artificial
  probe
  misc_feature (1)..(25): SEQ ID NO: 5591; WAN024ES5; Start 142; Stop 166
aaaccaaataatcaaccagcatact

SEQ ID NO: 415444 - DNA, 25 bp, Artificial
  probe
  misc_feature (1)..(25): SEQ ID NO: 5591; WAN024ES5; Start 141; Stop 165
gaaaccaaataatcaaccagcatac

SEQ ID NO: 415445 - DNA, 25 bp, Artificial
  probe
  misc_feature (1)..(25): SEQ ID NO: 5591; WAN024ES5; Start 149; Stop 173
ataatcaaccagcatacttgttatc

SEQ ID NO: 415446 - DNA, 25 bp, Artificial
  probe
  misc_feature (1)..(25): SEQ ID NO: 5591; WAN024ES5; Start 145; Stop 169
ccaaataatcaaccagcatacttgt

SEQ ID NO: 415447 - DNA, 25 bp, Artificial
  probe
  misc_feature (1)..(25): SEQ ID NO: 5591; WAN024ES5; Start 144; Stop 168
accaaataatcaaccagcatacttg

SEQ ID NO: 415448 - DNA, 25 bp, Artificial
  probe
  misc_feature (1)..(25): SEQ ID NO: 5591; WAN024ES5; Start 195; Stop 219
atatttacagggctatgacgcaatg

SEQ ID NO: 415449 - DNA, 25 bp, Artificial
  probe
  misc_feature (1)..(25): SEQ ID NO: 5591; WAN024ES5; Start 154; Stop 178
caaccagcatacttgttatctttga

SEQ ID NO: 415450 - DNA, 25 bp, Artificial
  probe
  misc_feature (1)..(25): SEQ ID NO: 5591; WAN024ES5; Start 153; Stop 177
tcaaccagcatacttgttatctttg

SEQ ID NO: 415451 - DNA, 25 bp, Artificial
  probe
  misc_feature (1)..(25): SEQ ID NO: 5591; WAN024ES5; Start 128; Stop 152
aaccaccaagattgaaaccaaataa

SEQ ID NO: 415452 - DNA, 25 bp, Artificial
  probe
  misc_feature (1)..(25): SEQ ID NO: 5591; WAN024ES5; Start 127; Stop 151
aaaccaccaagattgaaaccaaata

SEQ ID NO: 415453 - DNA, 25 bp, Artificial
  probe
  misc_feature (1)..(25): SEQ ID NO: 5591; WAN024ES5; Start 129; Stop 153
accaccaagattgaaaccaaataat

SEQ ID NO: 415454 - DNA, 25 bp, Artificial
  probe
  misc_feature (1)..(25): SEQ ID NO: 5591; WAN024ES5; Start 140; Stop 164
tgaaaccaaataatcaaccagcata

SEQ ID NO: 415455 - DNA, 25 bp, Artificial
  probe
  misc_feature (1)..(25): SEQ ID NO: 5591; WAN024ES5; Start 155; Stop 179
aaccagcatacttgttatctttgat

SEQ ID NO: 415456 - DNA, 25 bp, Artificial
  probe
  misc_feature (1)..(25): SEQ ID NO: 5591; WAN024ES5; Start 152; Stop 176
atcaaccagcatacttgttatcttt

SEQ ID NO: 415457 - DNA, 25 bp, Artificial
  probe
  misc_feature (1)..(25): SEQ ID NO: 5591; WAN024ES5; Start 148; Stop 172
aataatcaaccagcatacttgttat

SEQ ID NO: 415458 - DNA, 25 bp, Artificial
  probe
  misc_feature (1)..(25): SEQ ID NO: 5591; WAN024ES5; Start 146; Stop 170
caaataatcaaccagcatacttgtt

SEQ ID NO: 415459 - DNA, 25 bp, Artificial
  probe
  misc_feature (1)..(25): SEQ ID NO: 5591; WAN024ES5; Start 190; Stop 214
ctaccatatttacagggctatgacg

SEQ ID NO: 415460 - DNA, 25 bp, Artificial
  probe
  misc_feature (1)..(25): SEQ ID NO: 5591; WAN024ES5; Start 189; Stop 213
tctaccatatttacagggctatgac

SEQ ID NO: 415461 - DNA, 25 bp, Artificial
  probe
  misc_feature (1)..(25): SEQ ID NO: 5591; WAN024ES5; Start 32; Stop 56
tacgaaggcaatacttcctactatc

SEQ ID NO: 415462 - DNA, 25 bp, Artificial
  probe
  misc_feature (1)..(25): SEQ ID NO: 5591; WAN024ES5; Start 31; Stop 55
ctacgaaggcaatacttcctactat

SEQ ID NO: 415463 - DNA, 25 bp, Artificial
  probe
  misc_feature (1)..(25): SEQ ID NO: 5591; WAN024ES5; Start 188; Stop 212
ttctaccatatttacagggctatga

SEQ ID NO: 415464 - DNA, 25 bp, Artificial
  probe
  misc_feature (1)..(25): SEQ ID NO: 5591; WAN024ES5; Start 34; Stop 58
cgaaggcaatacttcctactatcag

SEQ ID NO: 415465 - DNA, 25 bp, Artificial
  probe
  misc_feature (1)..(25): SEQ ID NO: 5591; WAN024ES5; Start 194; Stop 218
catatttacagggctatgacgcaat

SEQ ID NO: 415466 - DNA, 25 bp, Artificial
  probe
  misc_feature (1)..(25): SEQ ID NO: 5591; WAN024ES5; Start 35; Stop 59
gaaggcaatacttcctactatcagc

SEQ ID NO: 415467 - DNA, 25 bp, Artificial
  probe
  misc_feature (1)..(25): SEQ ID NO: 5591; WAN024ES5; Start 33; Stop 57
acgaaggcaatacttcctactatca

SEQ ID NO: 415468 - DNA, 25 bp, Artificial
  probe
  misc_feature (1)..(25): SEQ ID NO: 5591; WAN024ES5; Start 156; Stop 180
accagcatacttgttatctttgata

SEQ ID NO: 415469 - DNA, 25 bp, Artificial
  probe
  misc_feature (1)..(25): SEQ ID NO: 5591; WAN024ES5; Start 71; Stop 95
cccaatccaatttccaagagacatg

SEQ ID NO: 415470 - DNA, 25 bp, Artificial
  probe
  misc_feature (1)..(25): SEQ ID NO: 5592; WAN024GEP; Start 209; Stop 233
agcataagataggtgtgttcatagc

SEQ ID NO: 415471 - DNA, 25 bp, Artificial
  probe
  misc_feature (1)..(25): SEQ ID NO: 5592; WAN024GEP; Start 210; Stop 234
gcataagataggtgtgttcatagcc

SEQ ID NO: 415472 - DNA, 25 bp, Artificial
  probe
  misc_feature (1)..(25): SEQ ID NO: 5592; WAN024GEP; Start 208; Stop 232
aagcataagataggtgtgttcatag

SEQ ID NO: 415473 - DNA, 25 bp, Artificial
  probe
  misc_feature (1)..(25): SEQ ID NO: 5592; WAN024GEP; Start 207; Stop 231
gaagcataagataggtgtgttcata

SEQ ID NO: 415474 - DNA, 25 bp, Artificial
  probe
  misc_feature (1)..(25): SEQ ID NO: 5592; WAN024GEP; Start 213; Stop 237
taagataggtgtgttcatagccttg

SEQ ID NO: 415475 - DNA, 25 bp, Artificial
  probe
  misc_feature (1)..(25): SEQ ID NO: 5592; WAN024GEP; Start 211; Stop 235
cataagataggtgtgttcatagcct

SEQ ID NO: 415476 - DNA, 25 bp, Artificial
  probe
  misc_feature (1)..(25): SEQ ID NO: 5592; WAN024GEP; Start 212; Stop 236
ataagataggtgtgttcatagcctt

SEQ ID NO: 415477 - DNA, 25 bp, Artificial
  probe
  misc_feature (1)..(25): SEQ ID NO: 5592; WAN024GEP; Start 214; Stop 238
aagataggtgtgttcatagccttga

SEQ ID NO: 415478 - DNA, 25 bp, Artificial
  probe
  misc_feature (1)..(25): SEQ ID NO: 5592; WAN024GEP; Start 204; Stop 228
tatgaagcataagataggtgtgttc

SEQ ID NO: 415479 - DNA, 25 bp, Artificial
  probe
  misc_feature (1)..(25): SEQ ID NO: 5592; WAN024GEP; Start 229; Stop 253
atagccttgaatgattcgatcctga

SEQ ID NO: 415480 - DNA, 25 bp, Artificial
  probe
  misc_feature (1)..(25): SEQ ID NO: 5592; WAN024GEP; Start 228; Stop 252
catagccttgaatgattcgatcctg

SEQ ID NO: 415481 - DNA, 25 bp, Artificial
  probe
  misc_feature (1)..(25): SEQ ID NO: 5592; WAN024GEP; Start 230; Stop 254
tagccttgaatgattcgatcctgaa

SEQ ID NO: 415482 - DNA, 25 bp, Artificial
  probe
  misc_feature (1)..(25): SEQ ID NO: 5592; WAN024GEP; Start 206; Stop 230
tgaagcataagataggtgtgttcat

SEQ ID NO: 415483 - DNA, 25 bp, Artificial
  probe
  misc_feature (1)..(25): SEQ ID NO: 5592; WAN024GEP; Start 205; Stop 229
atgaagcataagataggtgtgttca

SEQ ID NO: 415484 - DNA, 25 bp, Artificial
  probe
  misc_feature (1)..(25): SEQ ID NO: 5592; WAN024GEP; Start 221; Stop 245
gtgtgttcatagccttgaatgattc

SEQ ID NO: 415485 - DNA, 25 bp, Artificial
  probe
  misc_feature (1)..(25): SEQ ID NO: 5592; WAN024GEP; Start 216; Stop 240
gataggtgtgttcatagccttgaat

SEQ ID NO: 415486 - DNA, 25 bp, Artificial
  probe
  misc_feature (1)..(25): SEQ ID NO: 5592; WAN024GEP; Start 217; Stop 241
ataggtgtgttcatagccttgaatg

SEQ ID NO: 415487 - DNA, 25 bp, Artificial
  probe
  misc_feature (1)..(25): SEQ ID NO: 5592; WAN024GEP; Start 215; Stop 239
agataggtgtgttcatagccttgaa

SEQ ID NO: 415488 - DNA, 25 bp, Artificial
  probe
  misc_feature (1)..(25): SEQ ID NO: 5592; WAN024GEP; Start 220; Stop 244
ggtgtgttcatagccttgaatgatt

SEQ ID NO: 415489 - DNA, 25 bp, Artificial
  probe
  misc_feature (1)..(25): SEQ ID NO: 5592; WAN024GEP; Start 164; Stop 188
agttccttgtctttgttggctgtaa

SEQ ID NO: 415490 - DNA, 25 bp, Artificial
  probe
  misc_feature (1)..(25): SEQ ID NO: 5592; WAN024GEP; Start 222; Stop 246
tgtgttcatagccttgaatgattcg

SEQ ID NO: 415491 - DNA, 25 bp, Artificial
  probe
  misc_feature (1)..(25): SEQ ID NO: 5592; WAN024GEP; Start 218; Stop 242
taggtgtgttcatagccttgaatga

SEQ ID NO: 415492 - DNA, 25 bp, Artificial
  probe
  misc_feature (1)..(25): SEQ ID NO: 5592; WAN024GEP; Start 163; Stop 187
aagttccttgtctttgttggctgta

SEQ ID NO: 415493 - DNA, 25 bp, Artificial
  probe
  misc_feature (1)..(25): SEQ ID NO: 5592; WAN024GEP; Start 225; Stop 249
gttcatagccttgaatgattcgatc

SEQ ID NO: 415494 - DNA, 25 bp, Artificial
  probe
  misc_feature (1)..(25): SEQ ID NO: 5592; WAN024GEP; Start 165; Stop 189
gttccttgtctttgttggctgtaac

SEQ ID NO: 415495 - DNA, 25 bp, Artificial
  probe
  misc_feature (1)..(25): SEQ ID NO: 5592; WAN024GEP; Start 2; Stop 26
tggtaagtcttatcgacatgatatt

SEQ ID NO: 415496 - DNA, 25 bp, Artificial
  probe
  misc_feature (1)..(25): SEQ ID NO: 5592; WAN024GEP; Start 1; Stop 25
ttggtaagtcttatcgacatgatat

SEQ ID NO: 415497 - DNA, 25 bp, Artificial
  probe
  misc_feature (1)..(25): SEQ ID NO: 5592; WAN024GEP; Start 224; Stop 248
tgttcatagccttgaatgattcgat

SEQ ID NO: 415498 - DNA, 25 bp, Artificial
  probe
  misc_feature (1)..(25): SEQ ID NO: 5592; WAN024GEP; Start 226; Stop 250
ttcatagccttgaatgattcgatcc

SEQ ID NO: 415499 - DNA, 25 bp, Artificial
  probe
  misc_feature (1)..(25): SEQ ID NO: 5592; WAN024GEP; Start 219; Stop 243
aggtgtgttcatagccttgaatgat

SEQ ID NO: 415500 - DNA, 25 bp, Artificial
  probe
  misc_feature (1)..(25): SEQ ID NO: 5592; WAN024GEP; Start 4; Stop 28
gtaagtcttatcgacatgatattgg

SEQ ID NO: 415501 - DNA, 25 bp, Artificial
  probe
  misc_feature (1)..(25): SEQ ID NO: 5592; WAN024GEP; Start 3; Stop 27
ggtaagtcttatcgacatgatattg

SEQ ID NO: 415502 - DNA, 25 bp, Artificial
  probe
  misc_feature (1)..(25): SEQ ID NO: 5592; WAN024GEP; Start 227; Stop 251
tcatagccttgaatgattcgatcct

SEQ ID NO: 415503 - DNA, 25 bp, Artificial
  probe
  misc_feature (1)..(25): SEQ ID NO: 5593; WAN024GAR; Start 156; Stop 180
attggctttcatttcatctaaggat

SEQ ID NO: 415504 - DNA, 25 bp, Artificial
  probe
  misc_feature (1)..(25): SEQ ID NO: 5593; WAN024GAR; Start 51; Stop 75
cgaaatcttgctaaattctggaatc

SEQ ID NO: 415505 - DNA, 25 bp, Artificial
  probe
  misc_feature (1)..(25): SEQ ID NO: 5593; WAN024GAR; Start 155; Stop 179
tattggctttcatttcatctaagga

SEQ ID NO: 415506 - DNA, 25 bp, Artificial
  probe
  misc_feature (1)..(25): SEQ ID NO: 5593; WAN024GAR; Start 57; Stop 81
cttgctaaattctggaatcatttgc

SEQ ID NO: 415507 - DNA, 25 bp, Artificial
  probe
  misc_feature (1)..(25): SEQ ID NO: 5593; WAN024GAR; Start 192; Stop 216
gatacggacttgcttaaacaatgtt

SEQ ID NO: 415508 - DNA, 25 bp, Artificial
  probe
  misc_feature (1)..(25): SEQ ID NO: 5593; WAN024GAR; Start 99; Stop 123
tattgccatcagcataactggaata

SEQ ID NO: 415509 - DNA, 25 bp, Artificial
  probe
  misc_feature (1)..(25): SEQ ID NO: 5593; WAN024GAR; Start 58; Stop 82
ttgctaaattctggaatcatttgcg

SEQ ID NO: 415510 - DNA, 25 bp, Artificial
  probe
  misc_feature (1)..(25): SEQ ID NO: 5593; WAN024GAR; Start 1; Stop 25
ttggtaatcacaagaacagaaattg

SEQ ID NO: 415511 - DNA, 25 bp, Artificial
  probe
  misc_feature (1)..(25): SEQ ID NO: 5593; WAN024GAR; Start 194; Stop 218
tacggacttgcttaaacaatgttaa

SEQ ID NO: 415512 - DNA, 25 bp, Artificial
  probe
  misc_feature (1)..(25): SEQ ID NO: 5593; WAN024GAR; Start 100; Stop 124
attgccatcagcataactggaataa

SEQ ID NO: 415513 - DNA, 25 bp, Artificial
  probe
  misc_feature (1)..(25): SEQ ID NO: 5593; WAN024GAR; Start 193; Stop 217
atacggacttgcttaaacaatgtta

SEQ ID NO: 415514 - DNA, 25 bp, Artificial
  probe
  misc_feature (1)..(25): SEQ ID NO: 5593; WAN024GAR; Start 191; Stop 215
cgatacggacttgcttaaacaatgt

SEQ ID NO: 415515 - DNA, 25 bp, Artificial
  probe
  misc_feature (1)..(25): SEQ ID NO: 5593; WAN024GAR; Start 52; Stop 76
gaaatcttgctaaattctggaatca

SEQ ID NO: 415516 - DNA, 25 bp, Artificial
  probe
  misc_feature (1)..(25): SEQ ID NO: 5593; WAN024GAR; Start 98; Stop 122
gtattgccatcagcataactggaat

SEQ ID NO: 415517 - DNA, 25 bp, Artificial
  probe
  misc_feature (1)..(25): SEQ ID NO: 5593; WAN024GAR; Start 43; Stop 67
aggctaatcgaaatcttgctaaatt

SEQ ID NO: 415518 - DNA, 25 bp, Artificial
  probe
  misc_feature (1)..(25): SEQ ID NO: 5593; WAN024GAR; Start 154; Stop 178
atattggctttcatttcatctaagg

SEQ ID NO: 415519 - DNA, 25 bp, Artificial
  probe
  misc_feature (1)..(25): SEQ ID NO: 5593; WAN024GAR; Start 171; Stop 195
atctaaggatggcaaggttccgata

SEQ ID NO: 415520 - DNA, 25 bp, Artificial
  probe
  misc_feature (1)..(25): SEQ ID NO: 5593; WAN024GAR; Start 56; Stop 80
tcttgctaaattctggaatcatttg

SEQ ID NO: 415521 - DNA, 25 bp, Artificial
  probe
  misc_feature (1)..(25): SEQ ID NO: 5593; WAN024GAR; Start 50; Stop 74
tcgaaatcttgctaaattctggaat

SEQ ID NO: 415522 - DNA, 25 bp, Artificial
  probe
  misc_feature (1)..(25): SEQ ID NO: 5593; WAN024GAR; Start 49; Stop 73
atcgaaatcttgctaaattctggaa

SEQ ID NO: 415523 - DNA, 25 bp, Artificial
  probe
  misc_feature (1)..(25): SEQ ID NO: 5593; WAN024GAR; Start 48; Stop 72
aatcgaaatcttgctaaattctgga

SEQ ID NO: 415524 - DNA, 25 bp, Artificial
  probe
  misc_feature (1)..(25): SEQ ID NO: 5593; WAN024GAR; Start 42; Stop 66
aaggctaatcgaaatcttgctaaat

SEQ ID NO: 415525 - DNA, 25 bp, Artificial
  probe
  misc_feature (1)..(25): SEQ ID NO: 5593; WAN024GAR; Start 217; Stop 241
aacagcgataataggattacaataa

SEQ ID NO: 415526 - DNA, 25 bp, Artificial
  probe
  misc_feature (1)..(25): SEQ ID NO: 5593; WAN024GAR; Start 215; Stop 239
ttaacagcgataataggattacaat

SEQ ID NO: 415527 - DNA, 25 bp, Artificial
  probe
  misc_feature (1)..(25): SEQ ID NO: 5593; WAN024GAR; Start 44; Stop 68
ggctaatcgaaatcttgctaaattc

SEQ ID NO: 415528 - DNA, 25 bp, Artificial
  probe
  misc_feature (1)..(25): SEQ ID NO: 5593; WAN024GAR; Start 54; Stop 78
aatcttgctaaattctggaatcatt

SEQ ID NO: 415529 - DNA, 25 bp, Artificial
  probe
  misc_feature (1)..(25): SEQ ID NO: 5593; WAN024GAR; Start 53; Stop 77
aaatcttgctaaattctggaatcat

SEQ ID NO: 415530 - DNA, 25 bp, Artificial
  probe
  misc_feature (1)..(25): SEQ ID NO: 5593; WAN024GAR; Start 218; Stop 242
acagcgataataggattacaataat

SEQ ID NO: 415531 - DNA, 25 bp, Artificial
  probe
  misc_feature (1)..(25): SEQ ID NO: 5593; WAN024GAR; Start 95; Stop 119
caagtattgccatcagcataactgg

SEQ ID NO: 415532 - DNA, 25 bp, Artificial
  probe
  misc_feature (1)..(25): SEQ ID NO: 5593; WAN024GAR; Start 97; Stop 121
agtattgccatcagcataactggaa

SEQ ID NO: 415533 - DNA, 25 bp, Artificial
  probe
  misc_feature (1)..(25): SEQ ID NO: 5593; WAN024GAR; Start 96; Stop 120
aagtattgccatcagcataactgga

SEQ ID NO: 415534 - DNA, 25 bp, Artificial
  probe
  misc_feature (1)..(25): SEQ ID NO: 5593; WAN024GAR; Start 45; Stop 69
gctaatcgaaatcttgctaaattct

SEQ ID NO: 415535 - DNA, 25 bp, Artificial
  probe
  misc_feature (1)..(25): SEQ ID NO: 5593; WAN024GAR; Start 47; Stop 71
taatcgaaatcttgctaaattctgg

SEQ ID NO: 415536 - DNA, 25 bp, Artificial
  probe
  misc_feature (1)..(25): SEQ ID NO: 5594; WAN024EYV; Start 381; Stop 405
cactattccaagaggacagtatgag

SEQ ID NO: 415537 - DNA, 25 bp, Artificial
  probe
  misc_feature (1)..(25): SEQ ID NO: 5594; WAN024EYV; Start 379; Stop 403
gacactattccaagaggacagtatg

SEQ ID NO: 415538 - DNA, 25 bp, Artificial
  probe
  misc_feature (1)..(25): SEQ ID NO: 5594; WAN024EYV; Start 375; Stop 399
aattgacactattccaagaggacag

SEQ ID NO: 415539 - DNA, 25 bp, Artificial
  probe
  misc_feature (1)..(25): SEQ ID NO: 5594; WAN024EYV; Start 380; Stop 404
acactattccaagaggacagtatga

SEQ ID NO: 415540 - DNA, 25 bp, Artificial
  probe
  misc_feature (1)..(25): SEQ ID NO: 5594; WAN024EYV; Start 378; Stop 402
tgacactattccaagaggacagtat

SEQ ID NO: 415541 - DNA, 25 bp, Artificial
  probe
  misc_feature (1)..(25): SEQ ID NO: 5594; WAN024EYV; Start 377; Stop 401
ttgacactattccaagaggacagta

SEQ ID NO: 415542 - DNA, 25 bp, Artificial
  probe
  misc_feature (1)..(25): SEQ ID NO: 5594; WAN024EYV; Start 382; Stop 406
actattccaagaggacagtatgagg

SEQ ID NO: 415543 - DNA, 25 bp, Artificial
  probe
  misc_feature (1)..(25): SEQ ID NO: 5594; WAN024EYV; Start 374; Stop 398
gaattgacactattccaagaggaca

SEQ ID NO: 415544 - DNA, 25 bp, Artificial
  probe
  misc_feature (1)..(25): SEQ ID NO: 5594; WAN024EYV; Start 376; Stop 400
attgacactattccaagaggacagt

SEQ ID NO: 415545 - DNA, 25 bp, Artificial
  probe
  misc_feature (1)..(25): SEQ ID NO: 5594; WAN024EYV; Start 519; Stop 543
ggatacttctttggtctatgctctc

SEQ ID NO: 415546 - DNA, 25 bp, Artificial
  probe
  misc_feature (1)..(25): SEQ ID NO: 5594; WAN024EYV; Start 518; Stop 542
aggatacttctttggtctatgctct

SEQ ID NO: 415547 - DNA, 25 bp, Artificial
  probe
  misc_feature (1)..(25): SEQ ID NO: 5594; WAN024EYV; Start 520; Stop 544
gatacttctttggtctatgctctcg

SEQ ID NO: 415548 - DNA, 25 bp, Artificial
  probe
  misc_feature (1)..(25): SEQ ID NO: 5594; WAN024EYV; Start 517; Stop 541
aaggatacttctttggtctatgctc

SEQ ID NO: 415549 - DNA, 25 bp, Artificial
  probe
  misc_feature (1)..(25): SEQ ID NO: 5594; WAN024EYV; Start 329; Stop 353
ttgttctcaactatgcagcttactt

SEQ ID NO: 415550 - DNA, 25 bp, Artificial
  probe
  misc_feature (1)..(25): SEQ ID NO: 5594; WAN024EYV; Start 539; Stop 563
ctctcggaatttcagaccttatctt

SEQ ID NO: 415551 - DNA, 25 bp, Artificial
  probe
  misc_feature (1)..(25): SEQ ID NO: 5594; WAN024EYV; Start 513; Stop 537
ggtcaaggatacttctttggtctat

SEQ ID NO: 415552 - DNA, 25 bp, Artificial
  probe
  misc_feature (1)..(25): SEQ ID NO: 5594; WAN024EYV; Start 320; Stop 344
ttattgcctttgttctcaactatgc

SEQ ID NO: 415553 - DNA, 25 bp, Artificial
  probe
  misc_feature (1)..(25): SEQ ID NO: 5594; WAN024EYV; Start 316; Stop 340
gctattattgcctttgttctcaact

SEQ ID NO: 415554 - DNA, 25 bp, Artificial
  probe
  misc_feature (1)..(25): SEQ ID NO: 5594; WAN024EYV; Start 544; Stop 568
ggaatttcagaccttatcttggcta

SEQ ID NO: 415555 - DNA, 25 bp, Artificial
  probe
  misc_feature (1)..(25): SEQ ID NO: 5594; WAN024EYV; Start 516; Stop 540
caaggatacttctttggtctatgct

SEQ ID NO: 415556 - DNA, 25 bp, Artificial
  probe
  misc_feature (1)..(25): SEQ ID NO: 5594; WAN024EYV; Start 515; Stop 539
tcaaggatacttctttggtctatgc

SEQ ID NO: 415557 - DNA, 25 bp, Artificial
  probe
  misc_feature (1)..(25): SEQ ID NO: 5594; WAN024EYV; Start 476; Stop 500
tcgttcttcctagtgtctttaatga

SEQ ID NO: 415558 - DNA, 25 bp, Artificial
  probe
  misc_feature (1)..(25): SEQ ID NO: 5594; WAN024EYV; Start 540; Stop 564
tctcggaatttcagaccttatcttg

SEQ ID NO: 415559 - DNA, 25 bp, Artificial
  probe
  misc_feature (1)..(25): SEQ ID NO: 5594; WAN024EYV; Start 506; Stop 530
tgagtttggtcaaggatacttcttt

SEQ ID NO: 415560 - DNA, 25 bp, Artificial
  probe
  misc_feature (1)..(25): SEQ ID NO: 5594; WAN024EYV; Start 505; Stop 529
atgagtttggtcaaggatacttctt

SEQ ID NO: 415561 - DNA, 25 bp, Artificial
  probe
  misc_feature (1)..(25): SEQ ID NO: 5594; WAN024EYV; Start 498; Stop 522
tgaagttatgagtttggtcaaggat

SEQ ID NO: 415562 - DNA, 25 bp, Artificial
  probe
  misc_feature (1)..(25): SEQ ID NO: 5594; WAN024EYV; Start 497; Stop 521
atgaagttatgagtttggtcaagga

SEQ ID NO: 415563 - DNA, 25 bp, Artificial
  probe
  misc_feature (1)..(25): SEQ ID NO: 5594; WAN024EYV; Start 507; Stop 531
gagtttggtcaaggatacttctttg

SEQ ID NO: 415564 - DNA, 25 bp, Artificial
  probe
  misc_feature (1)..(25): SEQ ID NO: 5594; WAN024EYV; Start 512; Stop 536
tggtcaaggatacttctttggtcta

SEQ ID NO: 415565 - DNA, 25 bp, Artificial
  probe
  misc_feature (1)..(25): SEQ ID NO: 5594; WAN024EYV; Start 496; Stop 520
aatgaagttatgagtttggtcaagg

SEQ ID NO: 415566 - DNA, 25 bp, Artificial
  probe
  misc_feature (1)..(25): SEQ ID NO: 5594; WAN024EYV; Start 510; Stop 534
tttggtcaaggatacttctttggtc

SEQ ID NO: 415567 - DNA, 25 bp, Artificial
  probe
  misc_feature (1)..(25): SEQ ID NO: 5594; WAN024EYV; Start 546; Stop 570
aatttcagaccttatcttggctagt

SEQ ID NO: 415568 - DNA, 25 bp, Artificial
  probe
  misc_feature (1)..(25): SEQ ID NO: 5594; WAN024EYV; Start 501; Stop 525
agttatgagtttggtcaaggatact

SEQ ID NO: 415569 - DNA, 25 bp, Artificial
  probe
  misc_feature (1)..(25): SEQ ID NO: 5595; WAN024CPI; Start 86; Stop 110
tcttgatgacgaacctgataatctg

SEQ ID NO: 415570 - DNA, 25 bp, Artificial
  probe
  misc_feature (1)..(25): SEQ ID NO: 5595; WAN024CPI; Start 87; Stop 111
cttgatgacgaacctgataatctgt

SEQ ID NO: 415571 - DNA, 25 bp, Artificial
  probe
  misc_feature (1)..(25): SEQ ID NO: 5595; WAN024CPI; Start 85; Stop 109
ttcttgatgacgaacctgataatct

SEQ ID NO: 415572 - DNA, 25 bp, Artificial
  probe
  misc_feature (1)..(25): SEQ ID NO: 5595; WAN024CPI; Start 88; Stop 112
ttgatgacgaacctgataatctgtc

SEQ ID NO: 415573 - DNA, 25 bp, Artificial
  probe
  misc_feature (1)..(25): SEQ ID NO: 5595; WAN024CPI; Start 212; Stop 236
ttgataatacctgccttctgctctg

SEQ ID NO: 415574 - DNA, 25 bp, Artificial
  probe
  misc_feature (1)..(25): SEQ ID NO: 5595; WAN024CPI; Start 207; Stop 231
cttgtttgataatacctgccttctg

SEQ ID NO: 415575 - DNA, 25 bp, Artificial
  probe
  misc_feature (1)..(25): SEQ ID NO: 5595; WAN024CPI; Start 206; Stop 230
ccttgtttgataatacctgccttct

SEQ ID NO: 415576 - DNA, 25 bp, Artificial
  probe
  misc_feature (1)..(25): SEQ ID NO: 5595; WAN024CPI; Start 89; Stop 113
tgatgacgaacctgataatctgtcc

SEQ ID NO: 415577 - DNA, 25 bp, Artificial
  probe
  misc_feature (1)..(25): SEQ ID NO: 5595; WAN024CPI; Start 82; Stop 106
actttcttgatgacgaacctgataa

SEQ ID NO: 415578 - DNA, 25 bp, Artificial
  probe
  misc_feature (1)..(25): SEQ ID NO: 5595; WAN024CPI; Start 36; Stop 60
cttgtctgacagcacttgtatagtc

SEQ ID NO: 415579 - DNA, 25 bp, Artificial
  probe
  misc_feature (1)..(25): SEQ ID NO: 5595; WAN024CPI; Start 84; Stop 108
tttcttgatgacgaacctgataatc

SEQ ID NO: 415580 - DNA, 25 bp, Artificial
  probe
  misc_feature (1)..(25): SEQ ID NO: 5595; WAN024CPI; Start 83; Stop 107
ctttcttgatgacgaacctgataat

SEQ ID NO: 415581 - DNA, 25 bp, Artificial
  probe
  misc_feature (1)..(25): SEQ ID NO: 5595; WAN024CPI; Start 81; Stop 105
cactttcttgatgacgaacctgata

SEQ ID NO: 415582 - DNA, 25 bp, Artificial
  probe
  misc_feature (1)..(25): SEQ ID NO: 5595; WAN024CPI; Start 216; Stop 240
taatacctgccttctgctctgctat

SEQ ID NO: 415583 - DNA, 25 bp, Artificial
  probe
  misc_feature (1)..(25): SEQ ID NO: 5595; WAN024CPI; Start 215; Stop 239
ataatacctgccttctgctctgcta

SEQ ID NO: 415584 - DNA, 25 bp, Artificial
  probe
  misc_feature (1)..(25): SEQ ID NO: 5595; WAN024CPI; Start 208; Stop 232
ttgtttgataatacctgccttctgc

SEQ ID NO: 415585 - DNA, 25 bp, Artificial
  probe
  misc_feature (1)..(25): SEQ ID NO: 5595; WAN024CPI; Start 205; Stop 229
cccttgtttgataatacctgccttc

SEQ ID NO: 415586 - DNA, 25 bp, Artificial
  probe
  misc_feature (1)..(25): SEQ ID NO: 5595; WAN024CPI; Start 211; Stop 235
tttgataatacctgccttctgctct

SEQ ID NO: 415587 - DNA, 25 bp, Artificial
  probe
  misc_feature (1)..(25): SEQ ID NO: 5595; WAN024CPI; Start 210; Stop 234
gtttgataatacctgccttctgctc

SEQ ID NO: 415588 - DNA, 25 bp, Artificial
  probe
  misc_feature (1)..(25): SEQ ID NO: 5595; WAN024CPI; Start 203; Stop 227
atcccttgtttgataatacctgcct

SEQ ID NO: 415589 - DNA, 25 bp, Artificial
  probe
  misc_feature (1)..(25): SEQ ID NO: 5595; WAN024CPI; Start 202; Stop 226
catcccttgtttgataatacctgcc

SEQ ID NO: 415590 - DNA, 25 bp, Artificial
  probe
  misc_feature (1)..(25): SEQ ID NO: 5595; WAN024CPI; Start 200; Stop 224
ggcatcccttgtttgataatacctg

SEQ ID NO: 415591 - DNA, 25 bp, Artificial
  probe
  misc_feature (1)..(25): SEQ ID NO: 5595; WAN024CPI; Start 204; Stop 228
tcccttgtttgataatacctgcctt

SEQ ID NO: 415592 - DNA, 25 bp, Artificial
  probe
  misc_feature (1)..(25): SEQ ID NO: 5595; WAN024CPI; Start 35; Stop 59
ccttgtctgacagcacttgtatagt

SEQ ID NO: 415593 - DNA, 25 bp, Artificial
  probe
  misc_feature (1)..(25): SEQ ID NO: 5595; WAN024CPI; Start 34; Stop 58
accttgtctgacagcacttgtatag

SEQ ID NO: 415594 - DNA, 25 bp, Artificial
  probe
  misc_feature (1)..(25): SEQ ID NO: 5595; WAN024CPI; Start 209; Stop 233
tgtttgataatacctgccttctgct

SEQ ID NO: 415595 - DNA, 25 bp, Artificial
  probe
  misc_feature (1)..(25): SEQ ID NO: 5595; WAN024CPI; Start 33; Stop 57
gaccttgtctgacagcacttgtata

SEQ ID NO: 415596 - DNA, 25 bp, Artificial
  probe
  misc_feature (1)..(25): SEQ ID NO: 5595; WAN024CPI; Start 80; Stop 104
acactttcttgatgacgaacctgat

SEQ ID NO: 415597 - DNA, 25 bp, Artificial
  probe
  misc_feature (1)..(25): SEQ ID NO: 5595; WAN024CPI; Start 214; Stop 238
gataatacctgccttctgctctgct

SEQ ID NO: 415598 - DNA, 25 bp, Artificial
  probe
  misc_feature (1)..(25): SEQ ID NO: 5595; WAN024CPI; Start 79; Stop 103
cacactttcttgatgacgaacctga

SEQ ID NO: 415599 - DNA, 25 bp, Artificial
  probe
  misc_feature (1)..(25): SEQ ID NO: 5595; WAN024CPI; Start 90; Stop 114
gatgacgaacctgataatctgtccc

SEQ ID NO: 415600 - DNA, 25 bp, Artificial
  probe
  misc_feature (1)..(25): SEQ ID NO: 5595; WAN024CPI; Start 217; Stop 241
aatacctgccttctgctctgctatg

SEQ ID NO: 415601 - DNA, 25 bp, Artificial
  probe
  misc_feature (1)..(25): SEQ ID NO: 5595; WAN024CPI; Start 213; Stop 237
tgataatacctgccttctgctctgc

SEQ ID NO: 415602 - DNA, 25 bp, Artificial
  probe
  misc_feature (1)..(25): SEQ ID NO: 5596; WAN024F8H; Start 108; Stop 132
attatcagaagagcaaggaccaatc

SEQ ID NO: 415603 - DNA, 25 bp, Artificial
  probe
  misc_feature (1)..(25): SEQ ID NO: 5596; WAN024F8H; Start 107; Stop 131
cattatcagaagagcaaggaccaat

SEQ ID NO: 415604 - DNA, 25 bp, Artificial
  probe
  misc_feature (1)..(25): SEQ ID NO: 5596; WAN024F8H; Start 121; Stop 145
caaggaccaatcaccaagagaatac

SEQ ID NO: 415605 - DNA, 25 bp, Artificial
  probe
  misc_feature (1)..(25): SEQ ID NO: 5596; WAN024F8H; Start 109; Stop 133
ttatcagaagagcaaggaccaatca

SEQ ID NO: 415606 - DNA, 25 bp, Artificial
  probe
  misc_feature (1)..(25): SEQ ID NO: 5596; WAN024F8H; Start 106; Stop 130
tcattatcagaagagcaaggaccaa

SEQ ID NO: 415607 - DNA, 25 bp, Artificial
  probe
  misc_feature (1)..(25): SEQ ID NO: 5596; WAN024F8H; Start 105; Stop 129
ttcattatcagaagagcaaggacca

SEQ ID NO: 415608 - DNA, 25 bp, Artificial
  probe
  misc_feature (1)..(25): SEQ ID NO: 5596; WAN024F8H; Start 110; Stop 134
tatcagaagagcaaggaccaatcac

SEQ ID NO: 415609 - DNA, 25 bp, Artificial
  probe
  misc_feature (1)..(25): SEQ ID NO: 5596; WAN024F8H; Start 122; Stop 146
aaggaccaatcaccaagagaatacg

SEQ ID NO: 415610 - DNA, 25 bp, Artificial
  probe
  misc_feature (1)..(25): SEQ ID NO: 5596; WAN024F8H; Start 120; Stop 144
gcaaggaccaatcaccaagagaata

SEQ ID NO: 415611 - DNA, 25 bp, Artificial
  probe
  misc_feature (1)..(25): SEQ ID NO: 5596; WAN024F8H; Start 162; Stop 186
aataatatctgccaattccctgtca

SEQ ID NO: 415612 - DNA, 25 bp, Artificial
  probe
  misc_feature (1)..(25): SEQ ID NO: 5596; WAN024F8H; Start 163; Stop 187
ataatatctgccaattccctgtcac

SEQ ID NO: 415613 - DNA, 25 bp, Artificial
  probe
  misc_feature (1)..(25): SEQ ID NO: 5596; WAN024F8H; Start 129; Stop 153
aatcaccaagagaatacggtcatct

SEQ ID NO: 415614 - DNA, 25 bp, Artificial
  probe
  misc_feature (1)..(25): SEQ ID NO: 5596; WAN024F8H; Start 128; Stop 152
caatcaccaagagaatacggtcatc

SEQ ID NO: 415615 - DNA, 25 bp, Artificial
  probe
  misc_feature (1)..(25): SEQ ID NO: 5596; WAN024F8H; Start 157; Stop 181
cctgaaataatatctgccaattccc

SEQ ID NO: 415616 - DNA, 25 bp, Artificial
  probe
  misc_feature (1)..(25): SEQ ID NO: 5596; WAN024F8H; Start 156; Stop 180
ccctgaaataatatctgccaattcc

SEQ ID NO: 415617 - DNA, 25 bp, Artificial
  probe
  misc_feature (1)..(25): SEQ ID NO: 5596; WAN024F8H; Start 161; Stop 185
aaataatatctgccaattccctgtc

SEQ ID NO: 415618 - DNA, 25 bp, Artificial
  probe
  misc_feature (1)..(25): SEQ ID NO: 5596; WAN024F8H; Start 228; Stop 252
ttcagccttgatgacttccatatcg

SEQ ID NO: 415619 - DNA, 25 bp, Artificial
  probe
  misc_feature (1)..(25): SEQ ID NO: 5596; WAN024F8H; Start 160; Stop 184
gaaataatatctgccaattccctgt

SEQ ID NO: 415620 - DNA, 25 bp, Artificial
  probe
  misc_feature (1)..(25): SEQ ID NO: 5596; WAN024F8H; Start 159; Stop 183
tgaaataatatctgccaattccctg

SEQ ID NO: 415621 - DNA, 25 bp, Artificial
  probe
  misc_feature (1)..(25): SEQ ID NO: 5596; WAN024F8H; Start 158; Stop 182
ctgaaataatatctgccaattccct

SEQ ID NO: 415622 - DNA, 25 bp, Artificial
  probe
  misc_feature (1)..(25): SEQ ID NO: 5596; WAN024F8H; Start 227; Stop 251
tttcagccttgatgacttccatatc

SEQ ID NO: 415623 - DNA, 25 bp, Artificial
  probe
  misc_feature (1)..(25): SEQ ID NO: 5596; WAN024F8H; Start 226; Stop 250
gtttcagccttgatgacttccatat

SEQ ID NO: 415624 - DNA, 25 bp, Artificial
  probe
  misc_feature (1)..(25): SEQ ID NO: 5596; WAN024F8H; Start 130; Stop 154
atcaccaagagaatacggtcatctt

SEQ ID NO: 415625 - DNA, 25 bp, Artificial
  probe
  misc_feature (1)..(25): SEQ ID NO: 5596; WAN024F8H; Start 88; Stop 112
tattccaagaccgcctcttcattat

SEQ ID NO: 415626 - DNA, 25 bp, Artificial
  probe
  misc_feature (1)..(25): SEQ ID NO: 5596; WAN024F8H; Start 87; Stop 111
atattccaagaccgcctcttcatta

SEQ ID NO: 415627 - DNA, 25 bp, Artificial
  probe
  misc_feature (1)..(25): SEQ ID NO: 5596; WAN024F8H; Start 127; Stop 151
ccaatcaccaagagaatacggtcat

SEQ ID NO: 415628 - DNA, 25 bp, Artificial
  probe
  misc_feature (1)..(25): SEQ ID NO: 5596; WAN024F8H; Start 131; Stop 155
tcaccaagagaatacggtcatcttc

SEQ ID NO: 415629 - DNA, 25 bp, Artificial
  probe
  misc_feature (1)..(25): SEQ ID NO: 5596; WAN024F8H; Start 164; Stop 188
taatatctgccaattccctgtcacg

SEQ ID NO: 415630 - DNA, 25 bp, Artificial
  probe
  misc_feature (1)..(25): SEQ ID NO: 5596; WAN024F8H; Start 104; Stop 128
cttcattatcagaagagcaaggacc

SEQ ID NO: 415631 - DNA, 25 bp, Artificial
  probe
  misc_feature (1)..(25): SEQ ID NO: 5596; WAN024F8H; Start 123; Stop 147
aggaccaatcaccaagagaatacgg

SEQ ID NO: 415632 - DNA, 25 bp, Artificial
  probe
  misc_feature (1)..(25): SEQ ID NO: 5596; WAN024F8H; Start 119; Stop 143
agcaaggaccaatcaccaagagaat

SEQ ID NO: 415633 - DNA, 25 bp, Artificial
  probe
  misc_feature (1)..(25): SEQ ID NO: 5596; WAN024F8H; Start 93; Stop 117
caagaccgcctcttcattatcagaa

SEQ ID NO: 415634 - DNA, 25 bp, Artificial
  probe
  misc_feature (1)..(25): SEQ ID NO: 5596; WAN024F8H; Start 89; Stop 113
attccaagaccgcctcttcattatc

SEQ ID NO: 415635 - DNA, 25 bp, Artificial
  probe
  misc_feature (1)..(25): SEQ ID NO: 5597; WAN024G6A; Start 216; Stop 240
cagcataagcaacatcatcaatcaa

SEQ ID NO: 415636 - DNA, 25 bp, Artificial
  probe
  misc_feature (1)..(25): SEQ ID NO: 5597; WAN024G6A; Start 519; Stop 543
ccaagatattccaaggattgaccag

SEQ ID NO: 415637 - DNA, 25 bp, Artificial
  probe
  misc_feature (1)..(25): SEQ ID NO: 5597; WAN024G6A; Start 520; Stop 544
caagatattccaaggattgaccagc

SEQ ID NO: 415638 - DNA, 25 bp, Artificial
  probe
  misc_feature (1)..(25): SEQ ID NO: 5597; WAN024G6A; Start 14; Stop 38
tggttggtatcttggtactcatcaa

SEQ ID NO: 415639 - DNA, 25 bp, Artificial
  probe
  misc_feature (1)..(25): SEQ ID NO: 5597; WAN024G6A; Start 215; Stop 239
gcagcataagcaacatcatcaatca

SEQ ID NO: 415640 - DNA, 25 bp, Artificial
  probe
  misc_feature (1)..(25): SEQ ID NO: 5597; WAN024G6A; Start 13; Stop 37
gtggttggtatcttggtactcatca

SEQ ID NO: 415641 - DNA, 25 bp, Artificial
  probe
  misc_feature (1)..(25): SEQ ID NO: 5597; WAN024G6A; Start 217; Stop 241
agcataagcaacatcatcaatcaaa

SEQ ID NO: 415642 - DNA, 25 bp, Artificial
  probe
  misc_feature (1)..(25): SEQ ID NO: 5597; WAN024G6A; Start 103; Stop 127
caaggtcagcataatcaaatcatca

SEQ ID NO: 415643 - DNA, 25 bp, Artificial
  probe
  misc_feature (1)..(25): SEQ ID NO: 5597; WAN024G6A; Start 547; Stop 571
ttcatcaatcaaataagcgatacgg

SEQ ID NO: 415644 - DNA, 25 bp, Artificial
  probe
  misc_feature (1)..(25): SEQ ID NO: 5597; WAN024G6A; Start 115; Stop 139
aatcaaatcatcaaagtcaacggat

SEQ ID NO: 415645 - DNA, 25 bp, Artificial
  probe
  misc_feature (1)..(25): SEQ ID NO: 5597; WAN024G6A; Start 102; Stop 126
gcaaggtcagcataatcaaatcatc

SEQ ID NO: 415646 - DNA, 25 bp, Artificial
  probe
  misc_feature (1)..(25): SEQ ID NO: 5597; WAN024G6A; Start 549; Stop 573
catcaatcaaataagcgatacggtg

SEQ ID NO: 415647 - DNA, 25 bp, Artificial
  probe
  misc_feature (1)..(25): SEQ ID NO: 5597; WAN024G6A; Start 548; Stop 572
tcatcaatcaaataagcgatacggt

SEQ ID NO: 415648 - DNA, 25 bp, Artificial
  probe
  misc_feature (1)..(25): SEQ ID NO: 5597; WAN024G6A; Start 218; Stop 242
gcataagcaacatcatcaatcaaat

SEQ ID NO: 415649 - DNA, 25 bp, Artificial
  probe
  misc_feature (1)..(25): SEQ ID NO: 5597; WAN024G6A; Start 114; Stop 138
taatcaaatcatcaaagtcaacgga

SEQ ID NO: 415650 - DNA, 25 bp, Artificial
  probe
  misc_feature (1)..(25): SEQ ID NO: 5597; WAN024G6A; Start 105; Stop 129
aggtcagcataatcaaatcatcaaa

SEQ ID NO: 415651 - DNA, 25 bp, Artificial
  probe
  misc_feature (1)..(25): SEQ ID NO: 5597; WAN024G6A; Start 104; Stop 128
aaggtcagcataatcaaatcatcaa

SEQ ID NO: 415652 - DNA, 25 bp, Artificial
  probe
  misc_feature (1)..(25): SEQ ID NO: 5597; WAN024G6A; Start 214; Stop 238
ggcagcataagcaacatcatcaatc

SEQ ID NO: 415653 - DNA, 25 bp, Artificial
  probe
  misc_feature (1)..(25): SEQ ID NO: 5597; WAN024G6A; Start 106; Stop 130
ggtcagcataatcaaatcatcaaag

SEQ ID NO: 415654 - DNA, 25 bp, Artificial
  probe
  misc_feature (1)..(25): SEQ ID NO: 5597; WAN024G6A; Start 367; Stop 391
attacgattgtagccaatatggtcc

SEQ ID NO: 415655 - DNA, 25 bp, Artificial
  probe
  misc_feature (1)..(25): SEQ ID NO: 5597; WAN024G6A; Start 366; Stop 390
aattacgattgtagccaatatggtc

SEQ ID NO: 415656 - DNA, 25 bp, Artificial
  probe
  misc_feature (1)..(25): SEQ ID NO: 5597; WAN024G6A; Start 224; Stop 248
gcaacatcatcaatcaaatcattct

SEQ ID NO: 415657 - DNA, 25 bp, Artificial
  probe
  misc_feature (1)..(25): SEQ ID NO: 5597; WAN024G6A; Start 223; Stop 247
agcaacatcatcaatcaaatcattc

SEQ ID NO: 415658 - DNA, 25 bp, Artificial
  probe
  misc_feature (1)..(25): SEQ ID NO: 5597; WAN024G6A; Start 522; Stop 546
agatattccaaggattgaccagctt

SEQ ID NO: 415659 - DNA, 25 bp, Artificial
  probe
  misc_feature (1)..(25): SEQ ID NO: 5597; WAN024G6A; Start 521; Stop 545
aagatattccaaggattgaccagct

SEQ ID NO: 415660 - DNA, 25 bp, Artificial
  probe
  misc_feature (1)..(25): SEQ ID NO: 5597; WAN024G6A; Start 550; Stop 574
atcaatcaaataagcgatacggtgg

SEQ ID NO: 415661 - DNA, 25 bp, Artificial
  probe
  misc_feature (1)..(25): SEQ ID NO: 5597; WAN024G6A; Start 518; Stop 542
gccaagatattccaaggattgacca

SEQ ID NO: 415662 - DNA, 25 bp, Artificial
  probe
  misc_feature (1)..(25): SEQ ID NO: 5597; WAN024G6A; Start 21; Stop 45
tatcttggtactcatcaacgtggat

SEQ ID NO: 415663 - DNA, 25 bp, Artificial
  probe
  misc_feature (1)..(25): SEQ ID NO: 5597; WAN024G6A; Start 546; Stop 570
tttcatcaatcaaataagcgatacg

SEQ ID NO: 415664 - DNA, 25 bp, Artificial
  probe
  misc_feature (1)..(25): SEQ ID NO: 5597; WAN024G6A; Start 222; Stop 246
aagcaacatcatcaatcaaatcatt

SEQ ID NO: 415665 - DNA, 25 bp, Artificial
  probe
  misc_feature (1)..(25): SEQ ID NO: 5597; WAN024G6A; Start 12; Stop 36
cgtggttggtatcttggtactcatc

SEQ ID NO: 415666 - DNA, 25 bp, Artificial
  probe
  misc_feature (1)..(25): SEQ ID NO: 5597; WAN024G6A; Start 113; Stop 137
ataatcaaatcatcaaagtcaacgg

SEQ ID NO: 415667 - DNA, 25 bp, Artificial
  probe
  misc_feature (1)..(25): SEQ ID NO: 5597; WAN024G6A; Start 109; Stop 133
cagcataatcaaatcatcaaagtca

SEQ ID NO: 415668 - DNA, 25 bp, Artificial
  probe
  misc_feature (1)..(25): SEQ ID NO: 5598; WAN024CFJ; Start 73; Stop 97
gctattgatgtcatagaaagtccta

SEQ ID NO: 415669 - DNA, 25 bp, Artificial
  probe
  misc_feature (1)..(25): SEQ ID NO: 5598; WAN024CFJ; Start 72; Stop 96
agctattgatgtcatagaaagtcct

SEQ ID NO: 415670 - DNA, 25 bp, Artificial
  probe
  misc_feature (1)..(25): SEQ ID NO: 5598; WAN024CFJ; Start 38; Stop 62
ccttagacaacttaaaagcagcaag

SEQ ID NO: 415671 - DNA, 25 bp, Artificial
  probe
  misc_feature (1)..(25): SEQ ID NO: 5598; WAN024CFJ; Start 78; Stop 102
tgatgtcatagaaagtcctatttca

SEQ ID NO: 415672 - DNA, 25 bp, Artificial
  probe
  misc_feature (1)..(25): SEQ ID NO: 5598; WAN024CFJ; Start 32; Stop 56
tatttgccttagacaacttaaaagc

SEQ ID NO: 415673 - DNA, 25 bp, Artificial
  probe
  misc_feature (1)..(25): SEQ ID NO: 5598; WAN024CFJ; Start 37; Stop 61
gccttagacaacttaaaagcagcaa

SEQ ID NO: 415674 - DNA, 25 bp, Artificial
  probe
  misc_feature (1)..(25): SEQ ID NO: 5598; WAN024CFJ; Start 48; Stop 72
cttaaaagcagcaagtgtcactata

SEQ ID NO: 415675 - DNA, 25 bp, Artificial
  probe
  misc_feature (1)..(25): SEQ ID NO: 5598; WAN024CFJ; Start 76; Stop 100
attgatgtcatagaaagtcctattt

SEQ ID NO: 415676 - DNA, 25 bp, Artificial
  probe
  misc_feature (1)..(25): SEQ ID NO: 5598; WAN024CFJ; Start 71; Stop 95
tagctattgatgtcatagaaagtcc

SEQ ID NO: 415677 - DNA, 25 bp, Artificial
  probe
  misc_feature (1)..(25): SEQ ID NO: 5598; WAN024CFJ; Start 49; Stop 73
ttaaaagcagcaagtgtcactatag

SEQ ID NO: 415678 - DNA, 25 bp, Artificial
  probe
  misc_feature (1)..(25): SEQ ID NO: 5598; WAN024CFJ; Start 79; Stop 103
gatgtcatagaaagtcctatttcaa

SEQ ID NO: 415679 - DNA, 25 bp, Artificial
  probe
  misc_feature (1)..(25): SEQ ID NO: 5598; WAN024CFJ; Start 77; Stop 101
ttgatgtcatagaaagtcctatttc

SEQ ID NO: 415680 - DNA, 25 bp, Artificial
  probe
  misc_feature (1)..(25): SEQ ID NO: 5598; WAN024CFJ; Start 50; Stop 74
taaaagcagcaagtgtcactatagc

SEQ ID NO: 415681 - DNA, 25 bp, Artificial
  probe
  misc_feature (1)..(25): SEQ ID NO: 5598; WAN024CFJ; Start 74; Stop 98
ctattgatgtcatagaaagtcctat

SEQ ID NO: 415682 - DNA, 25 bp, Artificial
  probe
  misc_feature (1)..(25): SEQ ID NO: 5598; WAN024CFJ; Start 40; Stop 64
ttagacaacttaaaagcagcaagtg

SEQ ID NO: 415683 - DNA, 25 bp, Artificial
  probe
  misc_feature (1)..(25): SEQ ID NO: 5598; WAN024CFJ; Start 39; Stop 63
cttagacaacttaaaagcagcaagt

SEQ ID NO: 415684 - DNA, 25 bp, Artificial
  probe
  misc_feature (1)..(25): SEQ ID NO: 5598; WAN024CFJ; Start 34; Stop 58
tttgccttagacaacttaaaagcag

SEQ ID NO: 415685 - DNA, 25 bp, Artificial
  probe
  misc_feature (1)..(25): SEQ ID NO: 5598; WAN024CFJ; Start 33; Stop 57
atttgccttagacaacttaaaagca

SEQ ID NO: 415686 - DNA, 25 bp, Artificial
  probe
  misc_feature (1)..(25): SEQ ID NO: 5598; WAN024CFJ; Start 41; Stop 65
tagacaacttaaaagcagcaagtgt

SEQ ID NO: 415687 - DNA, 25 bp, Artificial
  probe
  misc_feature (1)..(25): SEQ ID NO: 5598; WAN024CFJ; Start 52; Stop 76
aaagcagcaagtgtcactatagcta

SEQ ID NO: 415688 - DNA, 25 bp, Artificial
  probe
  misc_feature (1)..(25): SEQ ID NO: 5598; WAN024CFJ; Start 75; Stop 99
tattgatgtcatagaaagtcctatt

SEQ ID NO: 415689 - DNA, 25 bp, Artificial
  probe
  misc_feature (1)..(25): SEQ ID NO: 5598; WAN024CFJ; Start 47; Stop 71
acttaaaagcagcaagtgtcactat

SEQ ID NO: 415690 - DNA, 25 bp, Artificial
  probe
  misc_feature (1)..(25): SEQ ID NO: 5598; WAN024CFJ; Start 46; Stop 70
aacttaaaagcagcaagtgtcacta

SEQ ID NO: 415691 - DNA, 25 bp, Artificial
  probe
  misc_feature (1)..(25): SEQ ID NO: 5598; WAN024CFJ; Start 35; Stop 59
ttgccttagacaacttaaaagcagc

SEQ ID NO: 415692 - DNA, 25 bp, Artificial
  probe
  misc_feature (1)..(25): SEQ ID NO: 5598; WAN024CFJ; Start 44; Stop 68
acaacttaaaagcagcaagtgtcac

SEQ ID NO: 415693 - DNA, 25 bp, Artificial
  probe
  misc_feature (1)..(25): SEQ ID NO: 5598; WAN024CFJ; Start 45; Stop 69
caacttaaaagcagcaagtgtcact

SEQ ID NO: 415694 - DNA, 25 bp, Artificial
  probe
  misc_feature (1)..(25): SEQ ID NO: 5598; WAN024CFJ; Start 36; Stop 60
tgccttagacaacttaaaagcagca

SEQ ID NO: 415695 - DNA, 25 bp, Artificial
  probe
  misc_feature (1)..(25): SEQ ID NO: 5598; WAN024CFJ; Start 51; Stop 75
aaaagcagcaagtgtcactatagct

SEQ ID NO: 415696 - DNA, 25 bp, Artificial
  probe
  misc_feature (1)..(25): SEQ ID NO: 5598; WAN024CFJ; Start 42; Stop 66
agacaacttaaaagcagcaagtgtc

SEQ ID NO: 415697 - DNA, 25 bp, Artificial
  probe
  misc_feature (1)..(25): SEQ ID NO: 5598; WAN024CFJ; Start 43; Stop 67
gacaacttaaaagcagcaagtgtca

SEQ ID NO: 415698 - DNA, 25 bp, Artificial
  probe
  misc_feature (1)..(25): SEQ ID NO: 5599; WAN024GHT; Start 580; Stop 604
gttatagtagtcttgctccacttca

SEQ ID NO: 415699 - DNA, 25 bp, Artificial
  probe
  misc_feature (1)..(25): SEQ ID NO: 5599; WAN024GHT; Start 579; Stop 603
agttatagtagtcttgctccacttc

SEQ ID NO: 415700 - DNA, 25 bp, Artificial
  probe
  misc_feature (1)..(25): SEQ ID NO: 5599; WAN024GHT; Start 581; Stop 605
ttatagtagtcttgctccacttcaa

SEQ ID NO: 415701 - DNA, 25 bp, Artificial
  probe
  misc_feature (1)..(25): SEQ ID NO: 5599; WAN024GHT; Start 1018; Stop 1042
tcctccatcagtctctcgtagataa

SEQ ID NO: 415702 - DNA, 25 bp, Artificial
  probe
  misc_feature (1)..(25): SEQ ID NO: 5599; WAN024GHT; Start 1017; Stop 1041
ttcctccatcagtctctcgtagata

SEQ ID NO: 415703 - DNA, 25 bp, Artificial
  probe
  misc_feature (1)..(25): SEQ ID NO: 5599; WAN024GHT; Start 310; Stop 334
tccttgaagatcagccatagagata

SEQ ID NO: 415704 - DNA, 25 bp, Artificial
  probe
  misc_feature (1)..(25): SEQ ID NO: 5599; WAN024GHT; Start 311; Stop 335
ccttgaagatcagccatagagatat

SEQ ID NO: 415705 - DNA, 25 bp, Artificial
  probe
  misc_feature (1)..(25): SEQ ID NO: 5599; WAN024GHT; Start 309; Stop 333
ttccttgaagatcagccatagagat

SEQ ID NO: 415706 - DNA, 25 bp, Artificial
  probe
  misc_feature (1)..(25): SEQ ID NO: 5599; WAN024GHT; Start 308; Stop 332
gttccttgaagatcagccatagaga

SEQ ID NO: 415707 - DNA, 25 bp, Artificial
  probe
  misc_feature (1)..(25): SEQ ID NO: 5599; WAN024GHT; Start 1013; Stop 1037
atatttcctccatcagtctctcgta

SEQ ID NO: 415708 - DNA, 25 bp, Artificial
  probe
  misc_feature (1)..(25): SEQ ID NO: 5599; WAN024GHT; Start 312; Stop 336
cttgaagatcagccatagagatatt

SEQ ID NO: 415709 - DNA, 25 bp, Artificial
  probe
  misc_feature (1)..(25): SEQ ID NO: 5599; WAN024GHT; Start 1014; Stop 1038
tatttcctccatcagtctctcgtag

SEQ ID NO: 415710 - DNA, 25 bp, Artificial
  probe
  misc_feature (1)..(25): SEQ ID NO: 5599; WAN024GHT; Start 618; Stop 642
cttgataacccataccgatgaagat

SEQ ID NO: 415711 - DNA, 25 bp, Artificial
  probe
  misc_feature (1)..(25): SEQ ID NO: 5599; WAN024GHT; Start 619; Stop 643
ttgataacccataccgatgaagata

SEQ ID NO: 415712 - DNA, 25 bp, Artificial
  probe
  misc_feature (1)..(25): SEQ ID NO: 5599; WAN024GHT; Start 616; Stop 640
gacttgataacccataccgatgaag

SEQ ID NO: 415713 - DNA, 25 bp, Artificial
  probe
  misc_feature (1)..(25): SEQ ID NO: 5599; WAN024GHT; Start 620; Stop 644
tgataacccataccgatgaagatat

SEQ ID NO: 415714 - DNA, 25 bp, Artificial
  probe
  misc_feature (1)..(25): SEQ ID NO: 5599; WAN024GHT; Start 576; Stop 600
caaagttatagtagtcttgctccac

SEQ ID NO: 415715 - DNA, 25 bp, Artificial
  probe
  misc_feature (1)..(25): SEQ ID NO: 5599; WAN024GHT; Start 575; Stop 599
tcaaagttatagtagtcttgctcca

SEQ ID NO: 415716 - DNA, 25 bp, Artificial
  probe
  misc_feature (1)..(25): SEQ ID NO: 5599; WAN024GHT; Start 617; Stop 641
acttgataacccataccgatgaaga

SEQ ID NO: 415717 - DNA, 25 bp, Artificial
  probe
  misc_feature (1)..(25): SEQ ID NO: 5599; WAN024GHT; Start 1005; Stop 1029
tagttgacatatttcctccatcagt

SEQ ID NO: 415718 - DNA, 25 bp, Artificial
  probe
  misc_feature (1)..(25): SEQ ID NO: 5599; WAN024GHT; Start 582; Stop 606
tatagtagtcttgctccacttcaaa

SEQ ID NO: 415719 - DNA, 25 bp, Artificial
  probe
  misc_feature (1)..(25): SEQ ID NO: 5599; WAN024GHT; Start 577; Stop 601
aaagttatagtagtcttgctccact

SEQ ID NO: 415720 - DNA, 25 bp, Artificial
  probe
  misc_feature (1)..(25): SEQ ID NO: 5599; WAN024GHT; Start 572; Stop 596
cgttcaaagttatagtagtcttgct

SEQ ID NO: 415721 - DNA, 25 bp, Artificial
  probe
  misc_feature (1)..(25): SEQ ID NO: 5599; WAN024GHT; Start 1012; Stop 1036
catatttcctccatcagtctctcgt

SEQ ID NO: 415722 - DNA, 25 bp, Artificial
  probe
  misc_feature (1)..(25): SEQ ID NO: 5599; WAN024GHT; Start 1011; Stop 1035
acatatttcctccatcagtctctcg

SEQ ID NO: 415723 - DNA, 25 bp, Artificial
  probe
  misc_feature (1)..(25): SEQ ID NO: 5599; WAN024GHT; Start 497; Stop 521
cggagcaagatttcttcagtgatat

SEQ ID NO: 415724 - DNA, 25 bp, Artificial
  probe
  misc_feature (1)..(25): SEQ ID NO: 5599; WAN024GHT; Start 242; Stop 266
aagtaagatggacgcaaacgaattt

SEQ ID NO: 415725 - DNA, 25 bp, Artificial
  probe
  misc_feature (1)..(25): SEQ ID NO: 5599; WAN024GHT; Start 229; Stop 253
ctctgtgaatgggaagtaagatgga

SEQ ID NO: 415726 - DNA, 25 bp, Artificial
  probe
  misc_feature (1)..(25): SEQ ID NO: 5599; WAN024GHT; Start 1010; Stop 1034
gacatatttcctccatcagtctctc

SEQ ID NO: 415727 - DNA, 25 bp, Artificial
  probe
  misc_feature (1)..(25): SEQ ID NO: 5599; WAN024GHT; Start 1008; Stop 1032
ttgacatatttcctccatcagtctc

SEQ ID NO: 415728 - DNA, 25 bp, Artificial
  probe
  misc_feature (1)..(25): SEQ ID NO: 5599; WAN024GHT; Start 1007; Stop 1031
gttgacatatttcctccatcagtct

SEQ ID NO: 415729 - DNA, 25 bp, Artificial
  probe
  misc_feature (1)..(25): SEQ ID NO: 5599; WAN024GHT; Start 1006; Stop 1030
agttgacatatttcctccatcagtc

SEQ ID NO: 415730 - DNA, 25 bp, Artificial
  probe
  misc_feature (1)..(25): SEQ ID NO: 5599; WAN024GHT; Start 574; Stop 598
ttcaaagttatagtagtcttgctcc

SEQ ID NO: 415731 - DNA, 25 bp, Artificial
  probe
  misc_feature (1)..(25): SEQ ID NO: 5600; WAN024CNP; Start 216; Stop 240
agatggttcagtagtgacgattcta

SEQ ID NO: 415732 - DNA, 25 bp, Artificial
  probe
  misc_feature (1)..(25): SEQ ID NO: 5600; WAN024CNP; Start 189; Stop 213
agatggtacagcaacaatcacattc

SEQ ID NO: 415733 - DNA, 25 bp, Artificial
  probe
  misc_feature (1)..(25): SEQ ID NO: 5600; WAN024CNP; Start 188; Stop 212
gagatggtacagcaacaatcacatt

SEQ ID NO: 415734 - DNA, 25 bp, Artificial
  probe
  misc_feature (1)..(25): SEQ ID NO: 5600; WAN024CNP; Start 215; Stop 239
cagatggttcagtagtgacgattct

SEQ ID NO: 415735 - DNA, 25 bp, Artificial
  probe
  misc_feature (1)..(25): SEQ ID NO: 5600; WAN024CNP; Start 173; Stop 197
caatcaatgtagctggagatggtac

SEQ ID NO: 415736 - DNA, 25 bp, Artificial
  probe
  misc_feature (1)..(25): SEQ ID NO: 5600; WAN024CNP; Start 190; Stop 214
gatggtacagcaacaatcacattcc

SEQ ID NO: 415737 - DNA, 25 bp, Artificial
  probe
  misc_feature (1)..(25): SEQ ID NO: 5600; WAN024CNP; Start 172; Stop 196
acaatcaatgtagctggagatggta

SEQ ID NO: 415738 - DNA, 25 bp, Artificial
  probe
  misc_feature (1)..(25): SEQ ID NO: 5600; WAN024CNP; Start 68; Stop 92
cacctgctcaaagagtagatgtaaa

SEQ ID NO: 415739 - DNA, 25 bp, Artificial
  probe
  misc_feature (1)..(25): SEQ ID NO: 5600; WAN024CNP; Start 214; Stop 238
ccagatggttcagtagtgacgattc

SEQ ID NO: 415740 - DNA, 25 bp, Artificial
  probe
  misc_feature (1)..(25): SEQ ID NO: 5600; WAN024CNP; Start 187; Stop 211
ggagatggtacagcaacaatcacat

SEQ ID NO: 415741 - DNA, 25 bp, Artificial
  probe
  misc_feature (1)..(25): SEQ ID NO: 5600; WAN024CNP; Start 204; Stop 228
aatcacattcccagatggttcagta

SEQ ID NO: 415742 - DNA, 25 bp, Artificial
  probe
  misc_feature (1)..(25): SEQ ID NO: 5600; WAN024CNP; Start 205; Stop 229
atcacattcccagatggttcagtag

SEQ ID NO: 415743 - DNA, 25 bp, Artificial
  probe
  misc_feature (1)..(25): SEQ ID NO: 5600; WAN024CNP; Start 195; Stop 219
tacagcaacaatcacattcccagat

SEQ ID NO: 415744 - DNA, 25 bp, Artificial
  probe
  misc_feature (1)..(25): SEQ ID NO: 5600; WAN024CNP; Start 174; Stop 198
aatcaatgtagctggagatggtaca

SEQ ID NO: 415745 - DNA, 25 bp, Artificial
  probe
  misc_feature (1)..(25): SEQ ID NO: 5600; WAN024CNP; Start 171; Stop 195
gacaatcaatgtagctggagatggt

SEQ ID NO: 415746 - DNA, 25 bp, Artificial
  probe
  misc_feature (1)..(25): SEQ ID NO: 5600; WAN024CNP; Start 200; Stop 224
caacaatcacattcccagatggttc

SEQ ID NO: 415747 - DNA, 25 bp, Artificial
  probe
  misc_feature (1)..(25): SEQ ID NO: 5600; WAN024CNP; Start 175; Stop 199
atcaatgtagctggagatggtacag

SEQ ID NO: 415748 - DNA, 25 bp, Artificial
  probe
  misc_feature (1)..(25): SEQ ID NO: 5600; WAN024CNP; Start 138; Stop 162
tttacaagcaaatggttcagcatta

SEQ ID NO: 415749 - DNA, 25 bp, Artificial
  probe
  misc_feature (1)..(25): SEQ ID NO: 5600; WAN024CNP; Start 139; Stop 163
ttacaagcaaatggttcagcattag

SEQ ID NO: 415750 - DNA, 25 bp, Artificial
  probe
  misc_feature (1)..(25): SEQ ID NO: 5600; WAN024CNP; Start 201; Stop 225
aacaatcacattcccagatggttca

SEQ ID NO: 415751 - DNA, 25 bp, Artificial
  probe
  misc_feature (1)..(25): SEQ ID NO: 5600; WAN024CNP; Start 140; Stop 164
tacaagcaaatggttcagcattaga

SEQ ID NO: 415752 - DNA, 25 bp, Artificial
  probe
  misc_feature (1)..(25): SEQ ID NO: 5600; WAN024CNP; Start 209; Stop 233
cattcccagatggttcagtagtgac

SEQ ID NO: 415753 - DNA, 25 bp, Artificial
  probe
  misc_feature (1)..(25): SEQ ID NO: 5600; WAN024CNP; Start 185; Stop 209
ctggagatggtacagcaacaatcac

SEQ ID NO: 415754 - DNA, 25 bp, Artificial
  probe
  misc_feature (1)..(25): SEQ ID NO: 5600; WAN024CNP; Start 67; Stop 91
gcacctgctcaaagagtagatgtaa

SEQ ID NO: 415755 - DNA, 25 bp, Artificial
  probe
  misc_feature (1)..(25): SEQ ID NO: 5600; WAN024CNP; Start 203; Stop 227
caatcacattcccagatggttcagt

SEQ ID NO: 415756 - DNA, 25 bp, Artificial
  probe
  misc_feature (1)..(25): SEQ ID NO: 5600; WAN024CNP; Start 202; Stop 226
acaatcacattcccagatggttcag

SEQ ID NO: 415757 - DNA, 25 bp, Artificial
  probe
  misc_feature (1)..(25): SEQ ID NO: 5600; WAN024CNP; Start 206; Stop 230
tcacattcccagatggttcagtagt

SEQ ID NO: 415758 - DNA, 25 bp, Artificial
  probe
  misc_feature (1)..(25): SEQ ID NO: 5600; WAN024CNP; Start 14; Stop 38
atccaaaagcacaagatagcactaa

SEQ ID NO: 415759 - DNA, 25 bp, Artificial
  probe
  misc_feature (1)..(25): SEQ ID NO: 5600; WAN024CNP; Start 186; Stop 210
tggagatggtacagcaacaatcaca

SEQ ID NO: 415760 - DNA, 25 bp, Artificial
  probe
  misc_feature (1)..(25): SEQ ID NO: 5600; WAN024CNP; Start 16; Stop 40
ccaaaagcacaagatagcactaaac

SEQ ID NO: 415761 - DNA, 25 bp, Artificial
  probe
  misc_feature (1)..(25): SEQ ID NO: 5600; WAN024CNP; Start 15; Stop 39
tccaaaagcacaagatagcactaaa

SEQ ID NO: 415762 - DNA, 25 bp, Artificial
  probe
  misc_feature (1)..(25): SEQ ID NO: 5600; WAN024CNP; Start 208; Stop 232
acattcccagatggttcagtagtga

SEQ ID NO: 415763 - DNA, 25 bp, Artificial
  probe
  misc_feature (1)..(25): SEQ ID NO: 5600; WAN024CNP; Start 194; Stop 218
gtacagcaacaatcacattcccaga

SEQ ID NO: 415764 - DNA, 25 bp, Artificial
  probe
  misc_feature (1)..(25): SEQ ID NO: 5601; WAN024F45; Start 5; Stop 29
taggaagggagagagaagatgaaat

SEQ ID NO: 415765 - DNA, 25 bp, Artificial
  probe
  misc_feature (1)..(25): SEQ ID NO: 5601; WAN024F45; Start 11; Stop 35
gggagagagaagatgaaatcaatga

SEQ ID NO: 415766 - DNA, 25 bp, Artificial
  probe
  misc_feature (1)..(25): SEQ ID NO: 5601; WAN024F45; Start 10; Stop 34
agggagagagaagatgaaatcaatg

SEQ ID NO: 415767 - DNA, 25 bp, Artificial
  probe
  misc_feature (1)..(25): SEQ ID NO: 5601; WAN024F45; Start 8; Stop 32
gaagggagagagaagatgaaatcaa

SEQ ID NO: 415768 - DNA, 25 bp, Artificial
  probe
  misc_feature (1)..(25): SEQ ID NO: 5601; WAN024F45; Start 9; Stop 33
aagggagagagaagatgaaatcaat

SEQ ID NO: 415769 - DNA, 25 bp, Artificial
  probe
  misc_feature (1)..(25): SEQ ID NO: 5601; WAN024F45; Start 4; Stop 28
gtaggaagggagagagaagatgaaa

SEQ ID NO: 415770 - DNA, 25 bp, Artificial
  probe
  misc_feature (1)..(25): SEQ ID NO: 5601; WAN024F45; Start 12; Stop 36
ggagagagaagatgaaatcaatgag

SEQ ID NO: 415771 - DNA, 25 bp, Artificial
  probe
  misc_feature (1)..(25): SEQ ID NO: 5601; WAN024F45; Start 6; Stop 30
aggaagggagagagaagatgaaatc

SEQ ID NO: 415772 - DNA, 25 bp, Artificial
  probe
  misc_feature (1)..(25): SEQ ID NO: 5601; WAN024F45; Start 7; Stop 31
ggaagggagagagaagatgaaatca

SEQ ID NO: 415773 - DNA, 25 bp, Artificial
  probe
  misc_feature (1)..(25): SEQ ID NO: 5601; WAN024F45; Start 13; Stop 37
gagagagaagatgaaatcaatgaga

SEQ ID NO: 415774 - DNA, 25 bp, Artificial
  probe
  misc_feature (1)..(25): SEQ ID NO: 5601; WAN024F45; Start 14; Stop 38
agagagaagatgaaatcaatgagaa

SEQ ID NO: 415775 - DNA, 25 bp, Artificial
  probe
  misc_feature (1)..(25): SEQ ID NO: 5601; WAN024F45; Start 3; Stop 27
ggtaggaagggagagagaagatgaa

SEQ ID NO: 415776 - DNA, 25 bp, Artificial
  probe
  misc_feature (1)..(25): SEQ ID NO: 5601; WAN024F45; Start 1; Stop 25
ttggtaggaagggagagagaagatg

SEQ ID NO: 415777 - DNA, 25 bp, Artificial
  probe
  misc_feature (1)..(25): SEQ ID NO: 5601; WAN024F45; Start 16; Stop 40
agagaagatgaaatcaatgagaatc

SEQ ID NO: 415778 - DNA, 25 bp, Artificial
  probe
  misc_feature (1)..(25): SEQ ID NO: 5601; WAN024F45; Start 15; Stop 39
gagagaagatgaaatcaatgagaat

SEQ ID NO: 415779 - DNA, 25 bp, Artificial
  probe
  misc_feature (1)..(25): SEQ ID NO: 5601; WAN024F45; Start 2; Stop 26
tggtaggaagggagagagaagatga

SEQ ID NO: 415780 - DNA, 25 bp, Artificial
  probe
  misc_feature (1)..(25): SEQ ID NO: 5601; WAN024F45; Start 17; Stop 41
gagaagatgaaatcaatgagaatct

SEQ ID NO: 415781 - DNA, 25 bp, Artificial
  probe
  misc_feature (1)..(25): SEQ ID NO: 5601; WAN024F45; Start 18; Stop 42
agaagatgaaatcaatgagaatctt

SEQ ID NO: 415782 - DNA, 25 bp, Artificial
  probe
  misc_feature (1)..(25): SEQ ID NO: 5601; WAN024F45; Start 19; Stop 43
gaagatgaaatcaatgagaatctta

SEQ ID NO: 415783 - DNA, 25 bp, Artificial
  probe
  misc_feature (1)..(25): SEQ ID NO: 5602; WAN024D5D; Start 2; Stop 26
tggtagtaatcttggcgaatattga

SEQ ID NO: 415784 - DNA, 25 bp, Artificial
  probe
  misc_feature (1)..(25): SEQ ID NO: 5602; WAN024D5D; Start 3; Stop 27
ggtagtaatcttggcgaatattgag

SEQ ID NO: 415785 - DNA, 25 bp, Artificial
  probe
  misc_feature (1)..(25): SEQ ID NO: 5602; WAN024D5D; Start 1; Stop 25
ttggtagtaatcttggcgaatattg

SEQ ID NO: 415786 - DNA, 25 bp, Artificial
  probe
  misc_feature (1)..(25): SEQ ID NO: 5602; WAN024D5D; Start 6; Stop 30
agtaatcttggcgaatattgagagc

SEQ ID NO: 415787 - DNA, 25 bp, Artificial
  probe
  misc_feature (1)..(25): SEQ ID NO: 5602; WAN024D5D; Start 157; Stop 181
atgacagtgaggcgaatagatgatc

SEQ ID NO: 415788 - DNA, 25 bp, Artificial
  probe
  misc_feature (1)..(25): SEQ ID NO: 5602; WAN024D5D; Start 69; Stop 93
ccctaataccattgatagtcccttc

SEQ ID NO: 415789 - DNA, 25 bp, Artificial
  probe
  misc_feature (1)..(25): SEQ ID NO: 5602; WAN024D5D; Start 68; Stop 92
tccctaataccattgatagtccctt

SEQ ID NO: 415790 - DNA, 25 bp, Artificial
  probe
  misc_feature (1)..(25): SEQ ID NO: 5602; WAN024D5D; Start 4; Stop 28
gtagtaatcttggcgaatattgaga

SEQ ID NO: 415791 - DNA, 25 bp, Artificial
  probe
  misc_feature (1)..(25): SEQ ID NO: 5602; WAN024D5D; Start 67; Stop 91
ctccctaataccattgatagtccct

SEQ ID NO: 415792 - DNA, 25 bp, Artificial
  probe
  misc_feature (1)..(25): SEQ ID NO: 5602; WAN024D5D; Start 5; Stop 29
tagtaatcttggcgaatattgagag

SEQ ID NO: 415793 - DNA, 25 bp, Artificial
  probe
  misc_feature (1)..(25): SEQ ID NO: 5602; WAN024D5D; Start 64; Stop 88
tcgctccctaataccattgatagtc

SEQ ID NO: 415794 - DNA, 25 bp, Artificial
  probe
  misc_feature (1)..(25): SEQ ID NO: 5602; WAN024D5D; Start 63; Stop 87
ctcgctccctaataccattgatagt

SEQ ID NO: 415795 - DNA, 25 bp, Artificial
  probe
  misc_feature (1)..(25): SEQ ID NO: 5602; WAN024D5D; Start 156; Stop 180
catgacagtgaggcgaatagatgat

SEQ ID NO: 415796 - DNA, 25 bp, Artificial
  probe
  misc_feature (1)..(25): SEQ ID NO: 5602; WAN024D5D; Start 70; Stop 94
cctaataccattgatagtcccttca

SEQ ID NO: 415797 - DNA, 25 bp, Artificial
  probe
  misc_feature (1)..(25): SEQ ID NO: 5602; WAN024D5D; Start 66; Stop 90
gctccctaataccattgatagtccc

SEQ ID NO: 415798 - DNA, 25 bp, Artificial
  probe
  misc_feature (1)..(25): SEQ ID NO: 5602; WAN024D5D; Start 190; Stop 214
cgtcttgacattctcaatcaggtat

SEQ ID NO: 415799 - DNA, 25 bp, Artificial
  probe
  misc_feature (1)..(25): SEQ ID NO: 5602; WAN024D5D; Start 65; Stop 89
cgctccctaataccattgatagtcc

SEQ ID NO: 415800 - DNA, 25 bp, Artificial
  probe
  misc_feature (1)..(25): SEQ ID NO: 5602; WAN024D5D; Start 158; Stop 182
tgacagtgaggcgaatagatgatct

SEQ ID NO: 415801 - DNA, 25 bp, Artificial
  probe
  misc_feature (1)..(25): SEQ ID NO: 5602; WAN024D5D; Start 161; Stop 185
cagtgaggcgaatagatgatctgac

SEQ ID NO: 415802 - DNA, 25 bp, Artificial
  probe
  misc_feature (1)..(25): SEQ ID NO: 5602; WAN024D5D; Start 159; Stop 183
gacagtgaggcgaatagatgatctg

SEQ ID NO: 415803 - DNA, 25 bp, Artificial
  probe
  misc_feature (1)..(25): SEQ ID NO: 5602; WAN024D5D; Start 164; Stop 188
tgaggcgaatagatgatctgacgat

SEQ ID NO: 415804 - DNA, 25 bp, Artificial
  probe
  misc_feature (1)..(25): SEQ ID NO: 5602; WAN024D5D; Start 191; Stop 215
gtcttgacattctcaatcaggtatt

SEQ ID NO: 415805 - DNA, 25 bp, Artificial
  probe
  misc_feature (1)..(25): SEQ ID NO: 5602; WAN024D5D; Start 62; Stop 86
gctcgctccctaataccattgatag

SEQ ID NO: 415806 - DNA, 25 bp, Artificial
  probe
  misc_feature (1)..(25): SEQ ID NO: 5602; WAN024D5D; Start 186; Stop 210
gatccgtcttgacattctcaatcag

SEQ ID NO: 415807 - DNA, 25 bp, Artificial
  probe
  misc_feature (1)..(25): SEQ ID NO: 5602; WAN024D5D; Start 160; Stop 184
acagtgaggcgaatagatgatctga

SEQ ID NO: 415808 - DNA, 25 bp, Artificial
  probe
  misc_feature (1)..(25): SEQ ID NO: 5602; WAN024D5D; Start 189; Stop 213
ccgtcttgacattctcaatcaggta

SEQ ID NO: 415809 - DNA, 25 bp, Artificial
  probe
  misc_feature (1)..(25): SEQ ID NO: 5602; WAN024D5D; Start 204; Stop 228
caatcaggtatttgaagatggcacc

SEQ ID NO: 415810 - DNA, 25 bp, Artificial
  probe
  misc_feature (1)..(25): SEQ ID NO: 5602; WAN024D5D; Start 187; Stop 211
atccgtcttgacattctcaatcagg

SEQ ID NO: 415811 - DNA, 25 bp, Artificial
  probe
  misc_feature (1)..(25): SEQ ID NO: 5602; WAN024D5D; Start 163; Stop 187
gtgaggcgaatagatgatctgacga

SEQ ID NO: 415812 - DNA, 25 bp, Artificial
  probe
  misc_feature (1)..(25): SEQ ID NO: 5602; WAN024D5D; Start 162; Stop 186
agtgaggcgaatagatgatctgacg

SEQ ID NO: 415813 - DNA, 25 bp, Artificial
  probe
  misc_feature (1)..(25): SEQ ID NO: 5602; WAN024D5D; Start 165; Stop 189
gaggcgaatagatgatctgacgatc

SEQ ID NO: 415814 - DNA, 25 bp, Artificial
  probe
  misc_feature (1)..(25): SEQ ID NO: 5602; WAN024D5D; Start 36; Stop 60
caatttcttccaaagcagcattttc

SEQ ID NO: 415815 - DNA, 25 bp, Artificial
  probe
  misc_feature (1)..(25): SEQ ID NO: 5602; WAN024D5D; Start 205; Stop 229
aatcaggtatttgaagatggcacca

SEQ ID NO: 415816 - DNA, 25 bp, Artificial
  probe
  misc_feature (1)..(25): SEQ ID NO: 5603; WAN024FZQ; Start 10; Stop 34
acgagcaatgataatcttaccagtt

SEQ ID NO: 415817 - DNA, 25 bp, Artificial
  probe
  misc_feature (1)..(25): SEQ ID NO: 5603; WAN024FZQ; Start 9; Stop 33
tacgagcaatgataatcttaccagt

SEQ ID NO: 415818 - DNA, 25 bp, Artificial
  probe
  misc_feature (1)..(25): SEQ ID NO: 5603; WAN024FZQ; Start 2; Stop 26
tggtagttacgagcaatgataatct

SEQ ID NO: 415819 - DNA, 25 bp, Artificial
  probe
  misc_feature (1)..(25): SEQ ID NO: 5603; WAN024FZQ; Start 52; Stop 76
accgatagcagatacgatagttgta

SEQ ID NO: 415820 - DNA, 25 bp, Artificial
  probe
  misc_feature (1)..(25): SEQ ID NO: 5603; WAN024FZQ; Start 7; Stop 31
gttacgagcaatgataatcttacca

SEQ ID NO: 415821 - DNA, 25 bp, Artificial
  probe
  misc_feature (1)..(25): SEQ ID NO: 5603; WAN024FZQ; Start 8; Stop 32
ttacgagcaatgataatcttaccag

SEQ ID NO: 415822 - DNA, 25 bp, Artificial
  probe
  misc_feature (1)..(25): SEQ ID NO: 5603; WAN024FZQ; Start 6; Stop 30
agttacgagcaatgataatcttacc

SEQ ID NO: 415823 - DNA, 25 bp, Artificial
  probe
  misc_feature (1)..(25): SEQ ID NO: 5603; WAN024FZQ; Start 3; Stop 27
ggtagttacgagcaatgataatctt

SEQ ID NO: 415824 - DNA, 25 bp, Artificial
  probe
  misc_feature (1)..(25): SEQ ID NO: 5603; WAN024FZQ; Start 80; Stop 104
ttaagagcgataacgaattggttga

SEQ ID NO: 415825 - DNA, 25 bp, Artificial
  probe
  misc_feature (1)..(25): SEQ ID NO: 5603; WAN024FZQ; Start 1; Stop 25
ttggtagttacgagcaatgataatc

SEQ ID NO: 415826 - DNA, 25 bp, Artificial
  probe
  misc_feature (1)..(25): SEQ ID NO: 5603; WAN024FZQ; Start 51; Stop 75
aaccgatagcagatacgatagttgt

SEQ ID NO: 415827 - DNA, 25 bp, Artificial
  probe
  misc_feature (1)..(25): SEQ ID NO: 5603; WAN024FZQ; Start 81; Stop 105
taagagcgataacgaattggttgac

SEQ ID NO: 415828 - DNA, 25 bp, Artificial
  probe
  misc_feature (1)..(25): SEQ ID NO: 5603; WAN024FZQ; Start 53; Stop 77
ccgatagcagatacgatagttgtat

SEQ ID NO: 415829 - DNA, 25 bp, Artificial
  probe
  misc_feature (1)..(25): SEQ ID NO: 5603; WAN024FZQ; Start 11; Stop 35
cgagcaatgataatcttaccagttt

SEQ ID NO: 415830 - DNA, 25 bp, Artificial
  probe
  misc_feature (1)..(25): SEQ ID NO: 5603; WAN024FZQ; Start 50; Stop 74
aaaccgatagcagatacgatagttg

SEQ ID NO: 415831 - DNA, 25 bp, Artificial
  probe
  misc_feature (1)..(25): SEQ ID NO: 5603; WAN024FZQ; Start 49; Stop 73
caaaccgatagcagatacgatagtt

SEQ ID NO: 415832 - DNA, 25 bp, Artificial
  probe
  misc_feature (1)..(25): SEQ ID NO: 5603; WAN024FZQ; Start 79; Stop 103
tttaagagcgataacgaattggttg

SEQ ID NO: 415833 - DNA, 25 bp, Artificial
  probe
  misc_feature (1)..(25): SEQ ID NO: 5603; WAN024FZQ; Start 78; Stop 102
ctttaagagcgataacgaattggtt

SEQ ID NO: 415834 - DNA, 25 bp, Artificial
  probe
  misc_feature (1)..(25): SEQ ID NO: 5603; WAN024FZQ; Start 87; Stop 111
cgataacgaattggttgacaaagtt

SEQ ID NO: 415835 - DNA, 25 bp, Artificial
  probe
  misc_feature (1)..(25): SEQ ID NO: 5603; WAN024FZQ; Start 82; Stop 106
aagagcgataacgaattggttgaca

SEQ ID NO: 415836 - DNA, 25 bp, Artificial
  probe
  misc_feature (1)..(25): SEQ ID NO: 5603; WAN024FZQ; Start 46; Stop 70
aaccaaaccgatagcagatacgata

SEQ ID NO: 415837 - DNA, 25 bp, Artificial
  probe
  misc_feature (1)..(25): SEQ ID NO: 5603; WAN024FZQ; Start 76; Stop 100
atctttaagagcgataacgaattgg

SEQ ID NO: 415838 - DNA, 25 bp, Artificial
  probe
  misc_feature (1)..(25): SEQ ID NO: 5603; WAN024FZQ; Start 83; Stop 107
agagcgataacgaattggttgacaa

SEQ ID NO: 415839 - DNA, 25 bp, Artificial
  probe
  misc_feature (1)..(25): SEQ ID NO: 5603; WAN024FZQ; Start 77; Stop 101
tctttaagagcgataacgaattggt

SEQ ID NO: 415840 - DNA, 25 bp, Artificial
  probe
  misc_feature (1)..(25): SEQ ID NO: 5603; WAN024FZQ; Start 88; Stop 112
gataacgaattggttgacaaagttt

SEQ ID NO: 415841 - DNA, 25 bp, Artificial
  probe
  misc_feature (1)..(25): SEQ ID NO: 5603; WAN024FZQ; Start 5; Stop 29
tagttacgagcaatgataatcttac

SEQ ID NO: 415842 - DNA, 25 bp, Artificial
  probe
  misc_feature (1)..(25): SEQ ID NO: 5603; WAN024FZQ; Start 4; Stop 28
gtagttacgagcaatgataatctta

SEQ ID NO: 415843 - DNA, 25 bp, Artificial
  probe
  misc_feature (1)..(25): SEQ ID NO: 5603; WAN024FZQ; Start 106; Stop 130
aaagtttggcaacatcaatttagtt

SEQ ID NO: 415844 - DNA, 25 bp, Artificial
  probe
  misc_feature (1)..(25): SEQ ID NO: 5603; WAN024FZQ; Start 48; Stop 72
ccaaaccgatagcagatacgatagt

SEQ ID NO: 415845 - DNA, 25 bp, Artificial
  probe
  misc_feature (1)..(25): SEQ ID NO: 5603; WAN024FZQ; Start 47; Stop 71
accaaaccgatagcagatacgatag

SEQ ID NO: 415846 - DNA, 25 bp, Artificial
  probe
  misc_feature (1)..(25): SEQ ID NO: 5603; WAN024FZQ; Start 103; Stop 127
gacaaagtttggcaacatcaattta

SEQ ID NO: 415847 - DNA, 25 bp, Artificial
  probe
  misc_feature (1)..(25): SEQ ID NO: 5603; WAN024FZQ; Start 90; Stop 114
taacgaattggttgacaaagtttgg

SEQ ID NO: 415848 - DNA, 25 bp, Artificial
  probe
  misc_feature (1)..(25): SEQ ID NO: 5603; WAN024FZQ; Start 105; Stop 129
caaagtttggcaacatcaatttagt

SEQ ID NO: 415849 - DNA, 25 bp, Artificial
  probe
  misc_feature (1)..(25): SEQ ID NO: 5604; WAN024FVT; Start 312; Stop 336
tacaaggtcgttcaattcaaggatt

SEQ ID NO: 415850 - DNA, 25 bp, Artificial
  probe
  misc_feature (1)..(25): SEQ ID NO: 5604; WAN024FVT; Start 311; Stop 335
ttacaaggtcgttcaattcaaggat

SEQ ID NO: 415851 - DNA, 25 bp, Artificial
  probe
  misc_feature (1)..(25): SEQ ID NO: 5604; WAN024FVT; Start 310; Stop 334
tttacaaggtcgttcaattcaagga

SEQ ID NO: 415852 - DNA, 25 bp, Artificial
  probe
  misc_feature (1)..(25): SEQ ID NO: 5604; WAN024FVT; Start 161; Stop 185
gtacaactttgataacgccaacttt

SEQ ID NO: 415853 - DNA, 25 bp, Artificial
  probe
  misc_feature (1)..(25): SEQ ID NO: 5604; WAN024FVT; Start 376; Stop 400
aatgccattgttatttcctccaaat

SEQ ID NO: 415854 - DNA, 25 bp, Artificial
  probe
  misc_feature (1)..(25): SEQ ID NO: 5604; WAN024FVT; Start 313; Stop 337
acaaggtcgttcaattcaaggattg

SEQ ID NO: 415855 - DNA, 25 bp, Artificial
  probe
  misc_feature (1)..(25): SEQ ID NO: 5604; WAN024FVT; Start 285; Stop 309
tacaccaaattcttcttcgatagct

SEQ ID NO: 415856 - DNA, 25 bp, Artificial
  probe
  misc_feature (1)..(25): SEQ ID NO: 5604; WAN024FVT; Start 287; Stop 311
caccaaattcttcttcgatagcttt

SEQ ID NO: 415857 - DNA, 25 bp, Artificial
  probe
  misc_feature (1)..(25): SEQ ID NO: 5604; WAN024FVT; Start 281; Stop 305
cagttacaccaaattcttcttcgat

SEQ ID NO: 415858 - DNA, 25 bp, Artificial
  probe
  misc_feature (1)..(25): SEQ ID NO: 5604; WAN024FVT; Start 284; Stop 308
ttacaccaaattcttcttcgatagc

SEQ ID NO: 415859 - DNA, 25 bp, Artificial
  probe
  misc_feature (1)..(25): SEQ ID NO: 5604; WAN024FVT; Start 113; Stop 137
cgtcaacaagttctttagcttcttt

SEQ ID NO: 415860 - DNA, 25 bp, Artificial
  probe
  misc_feature (1)..(25): SEQ ID NO: 5604; WAN024FVT; Start 286; Stop 310
acaccaaattcttcttcgatagctt

SEQ ID NO: 415861 - DNA, 25 bp, Artificial
  probe
  misc_feature (1)..(25): SEQ ID NO: 5604; WAN024FVT; Start 197; Stop 221
cagatgtcaattcaacgtcgaatga

SEQ ID NO: 415862 - DNA, 25 bp, Artificial
  probe
  misc_feature (1)..(25): SEQ ID NO: 5604; WAN024FVT; Start 112; Stop 136
ccgtcaacaagttctttagcttctt

SEQ ID NO: 415863 - DNA, 25 bp, Artificial
  probe
  misc_feature (1)..(25): SEQ ID NO: 5604; WAN024FVT; Start 282; Stop 306
agttacaccaaattcttcttcgata

SEQ ID NO: 415864 - DNA, 25 bp, Artificial
  probe
  misc_feature (1)..(25): SEQ ID NO: 5604; WAN024FVT; Start 280; Stop 304
gcagttacaccaaattcttcttcga

SEQ ID NO: 415865 - DNA, 25 bp, Artificial
  probe
  misc_feature (1)..(25): SEQ ID NO: 5604; WAN024FVT; Start 17; Stop 41
atttaagagtaactgaagctccagc

SEQ ID NO: 415866 - DNA, 25 bp, Artificial
  probe
  misc_feature (1)..(25): SEQ ID NO: 5604; WAN024FVT; Start 283; Stop 307
gttacaccaaattcttcttcgatag

SEQ ID NO: 415867 - DNA, 25 bp, Artificial
  probe
  misc_feature (1)..(25): SEQ ID NO: 5604; WAN024FVT; Start 377; Stop 401
atgccattgttatttcctccaaata

SEQ ID NO: 415868 - DNA, 25 bp, Artificial
  probe
  misc_feature (1)..(25): SEQ ID NO: 5604; WAN024FVT; Start 46; Stop 70
tccaatttagctttgatttcttcag

SEQ ID NO: 415869 - DNA, 25 bp, Artificial
  probe
  misc_feature (1)..(25): SEQ ID NO: 5604; WAN024FVT; Start 114; Stop 138
gtcaacaagttctttagcttcttta

SEQ ID NO: 415870 - DNA, 25 bp, Artificial
  probe
  misc_feature (1)..(25): SEQ ID NO: 5604; WAN024FVT; Start 198; Stop 222
agatgtcaattcaacgtcgaatgaa

SEQ ID NO: 415871 - DNA, 25 bp, Artificial
  probe
  misc_feature (1)..(25): SEQ ID NO: 5604; WAN024FVT; Start 279; Stop 303
tgcagttacaccaaattcttcttcg

SEQ ID NO: 415872 - DNA, 25 bp, Artificial
  probe
  misc_feature (1)..(25): SEQ ID NO: 5604; WAN024FVT; Start 309; Stop 333
ttttacaaggtcgttcaattcaagg

SEQ ID NO: 415873 - DNA, 25 bp, Artificial
  probe
  misc_feature (1)..(25): SEQ ID NO: 5604; WAN024FVT; Start 217; Stop 241
aatgaatctttagcagcaccagcat

SEQ ID NO: 415874 - DNA, 25 bp, Artificial
  probe
  misc_feature (1)..(25): SEQ ID NO: 5604; WAN024FVT; Start 208; Stop 232
tcaacgtcgaatgaatctttagcag

SEQ ID NO: 415875 - DNA, 25 bp, Artificial
  probe
  misc_feature (1)..(25): SEQ ID NO: 5604; WAN024FVT; Start 162; Stop 186
tacaactttgataacgccaactttt

SEQ ID NO: 415876 - DNA, 25 bp, Artificial
  probe
  misc_feature (1)..(25): SEQ ID NO: 5604; WAN024FVT; Start 110; Stop 134
caccgtcaacaagttctttagcttc

SEQ ID NO: 415877 - DNA, 25 bp, Artificial
  probe
  misc_feature (1)..(25): SEQ ID NO: 5604; WAN024FVT; Start 16; Stop 40
tatttaagagtaactgaagctccag

SEQ ID NO: 415878 - DNA, 25 bp, Artificial
  probe
  misc_feature (1)..(25): SEQ ID NO: 5604; WAN024FVT; Start 308; Stop 332
cttttacaaggtcgttcaattcaag

SEQ ID NO: 415879 - DNA, 25 bp, Artificial
  probe
  misc_feature (1)..(25): SEQ ID NO: 5604; WAN024FVT; Start 307; Stop 331
gcttttacaaggtcgttcaattcaa

SEQ ID NO: 415880 - DNA, 25 bp, Artificial
  probe
  misc_feature (1)..(25): SEQ ID NO: 5604; WAN024FVT; Start 358; Stop 382
ataatgttttcaatgttcaatgcca

SEQ ID NO: 415881 - DNA, 25 bp, Artificial
  probe
  misc_feature (1)..(25): SEQ ID NO: 5604; WAN024FVT; Start 111; Stop 135
accgtcaacaagttctttagcttct

SEQ ID NO: 415882 - DNA, 25 bp, Artificial
  probe
  misc_feature (1)..(25): SEQ ID NO: 5605; WAN024CMF; Start 77; Stop 101
tgatgaccatttatgatttgagtga

SEQ ID NO: 415883 - DNA, 25 bp, Artificial
  probe
  misc_feature (1)..(25): SEQ ID NO: 5605; WAN024CMF; Start 81; Stop 105
gaccatttatgatttgagtgatcca

SEQ ID NO: 415884 - DNA, 25 bp, Artificial
  probe
  misc_feature (1)..(25): SEQ ID NO: 5605; WAN024CMF; Start 80; Stop 104
tgaccatttatgatttgagtgatcc

SEQ ID NO: 415885 - DNA, 25 bp, Artificial
  probe
  misc_feature (1)..(25): SEQ ID NO: 5605; WAN024CMF; Start 87; Stop 111
ttatgatttgagtgatccaaggtca

SEQ ID NO: 415886 - DNA, 25 bp, Artificial
  probe
  misc_feature (1)..(25): SEQ ID NO: 5605; WAN024CMF; Start 76; Stop 100
ttgatgaccatttatgatttgagtg

SEQ ID NO: 415887 - DNA, 25 bp, Artificial
  probe
  misc_feature (1)..(25): SEQ ID NO: 5605; WAN024CMF; Start 86; Stop 110
tttatgatttgagtgatccaaggtc

SEQ ID NO: 415888 - DNA, 25 bp, Artificial
  probe
  misc_feature (1)..(25): SEQ ID NO: 5605; WAN024CMF; Start 82; Stop 106
accatttatgatttgagtgatccaa

SEQ ID NO: 415889 - DNA, 25 bp, Artificial
  probe
  misc_feature (1)..(25): SEQ ID NO: 5605; WAN024CMF; Start 85; Stop 109
atttatgatttgagtgatccaaggt

SEQ ID NO: 415890 - DNA, 25 bp, Artificial
  probe
  misc_feature (1)..(25): SEQ ID NO: 5605; WAN024CMF; Start 84; Stop 108
catttatgatttgagtgatccaagg

SEQ ID NO: 415891 - DNA, 25 bp, Artificial
  probe
  misc_feature (1)..(25): SEQ ID NO: 5605; WAN024CMF; Start 83; Stop 107
ccatttatgatttgagtgatccaag

SEQ ID NO: 415892 - DNA, 25 bp, Artificial
  probe
  misc_feature (1)..(25): SEQ ID NO: 5605; WAN024CMF; Start 78; Stop 102
gatgaccatttatgatttgagtgat

SEQ ID NO: 415893 - DNA, 25 bp, Artificial
  probe
  misc_feature (1)..(25): SEQ ID NO: 5605; WAN024CMF; Start 75; Stop 99
tttgatgaccatttatgatttgagt

SEQ ID NO: 415894 - DNA, 25 bp, Artificial
  probe
  misc_feature (1)..(25): SEQ ID NO: 5605; WAN024CMF; Start 79; Stop 103
atgaccatttatgatttgagtgatc

SEQ ID NO: 415895 - DNA, 25 bp, Artificial
  probe
  misc_feature (1)..(25): SEQ ID NO: 5605; WAN024CMF; Start 88; Stop 112
tatgatttgagtgatccaaggtcaa

SEQ ID NO: 415896 - DNA, 25 bp, Artificial
  probe
  misc_feature (1)..(25): SEQ ID NO: 5605; WAN024CMF; Start 97; Stop 121
agtgatccaaggtcaaaactaacta

SEQ ID NO: 415897 - DNA, 25 bp, Artificial
  probe
  misc_feature (1)..(25): SEQ ID NO: 5605; WAN024CMF; Start 96; Stop 120
gagtgatccaaggtcaaaactaact

SEQ ID NO: 415898 - DNA, 25 bp, Artificial
  probe
  misc_feature (1)..(25): SEQ ID NO: 5605; WAN024CMF; Start 95; Stop 119
tgagtgatccaaggtcaaaactaac

SEQ ID NO: 415899 - DNA, 25 bp, Artificial
  probe
  misc_feature (1)..(25): SEQ ID NO: 5605; WAN024CMF; Start 98; Stop 122
gtgatccaaggtcaaaactaactaa

SEQ ID NO: 415900 - DNA, 25 bp, Artificial
  probe
  misc_feature (1)..(25): SEQ ID NO: 5605; WAN024CMF; Start 99; Stop 123
tgatccaaggtcaaaactaactaat

SEQ ID NO: 415901 - DNA, 25 bp, Artificial
  probe
  misc_feature (1)..(25): SEQ ID NO: 5605; WAN024CMF; Start 67; Stop 91
caagaggttttgatgaccatttatg

SEQ ID NO: 415902 - DNA, 25 bp, Artificial
  probe
  misc_feature (1)..(25): SEQ ID NO: 5605; WAN024CMF; Start 68; Stop 92
aagaggttttgatgaccatttatga

SEQ ID NO: 415903 - DNA, 25 bp, Artificial
  probe
  misc_feature (1)..(25): SEQ ID NO: 5605; WAN024CMF; Start 69; Stop 93
agaggttttgatgaccatttatgat

SEQ ID NO: 415904 - DNA, 25 bp, Artificial
  probe
  misc_feature (1)..(25): SEQ ID NO: 5605; WAN024CMF; Start 73; Stop 97
gttttgatgaccatttatgatttga

SEQ ID NO: 415905 - DNA, 25 bp, Artificial
  probe
  misc_feature (1)..(25): SEQ ID NO: 5605; WAN024CMF; Start 70; Stop 94
gaggttttgatgaccatttatgatt

SEQ ID NO: 415906 - DNA, 25 bp, Artificial
  probe
  misc_feature (1)..(25): SEQ ID NO: 5605; WAN024CMF; Start 62; Stop 86
caattcaagaggttttgatgaccat

SEQ ID NO: 415907 - DNA, 25 bp, Artificial
  probe
  misc_feature (1)..(25): SEQ ID NO: 5605; WAN024CMF; Start 94; Stop 118
ttgagtgatccaaggtcaaaactaa

SEQ ID NO: 415908 - DNA, 25 bp, Artificial
  probe
  misc_feature (1)..(25): SEQ ID NO: 5605; WAN024CMF; Start 60; Stop 84
tacaattcaagaggttttgatgacc

SEQ ID NO: 415909 - DNA, 25 bp, Artificial
  probe
  misc_feature (1)..(25): SEQ ID NO: 5605; WAN024CMF; Start 72; Stop 96
ggttttgatgaccatttatgatttg

SEQ ID NO: 415910 - DNA, 25 bp, Artificial
  probe
  misc_feature (1)..(25): SEQ ID NO: 5605; WAN024CMF; Start 64; Stop 88
attcaagaggttttgatgaccattt

SEQ ID NO: 415911 - DNA, 25 bp, Artificial
  probe
  misc_feature (1)..(25): SEQ ID NO: 5605; WAN024CMF; Start 63; Stop 87
aattcaagaggttttgatgaccatt

SEQ ID NO: 415912 - DNA, 25 bp, Artificial
  probe
  misc_feature (1)..(25): SEQ ID NO: 5605; WAN024CMF; Start 74; Stop 98
ttttgatgaccatttatgatttgag

SEQ ID NO: 415913 - DNA, 25 bp, Artificial
  probe
  misc_feature (1)..(25): SEQ ID NO: 5605; WAN024CMF; Start 71; Stop 95
aggttttgatgaccatttatgattt

SEQ ID NO: 415914 - DNA, 25 bp, Artificial
  probe
  misc_feature (1)..(25): SEQ ID NO: 5605; WAN024CMF; Start 61; Stop 85
acaattcaagaggttttgatgacca

SEQ ID NO: 415915 - DNA, 25 bp, Artificial
  probe
  misc_feature (1)..(25): SEQ ID NO: 5606; WAN024B2S; Start 138; Stop 162
taagtatggtattagtatggcacgc

SEQ ID NO: 415916 - DNA, 25 bp, Artificial
  probe
  misc_feature (1)..(25): SEQ ID NO: 5606; WAN024B2S; Start 139; Stop 163
aagtatggtattagtatggcacgct

SEQ ID NO: 415917 - DNA, 25 bp, Artificial
  probe
  misc_feature (1)..(25): SEQ ID NO: 5606; WAN024B2S; Start 51; Stop 75
gattacagttgatgagatggcttgg

SEQ ID NO: 415918 - DNA, 25 bp, Artificial
  probe
  misc_feature (1)..(25): SEQ ID NO: 5606; WAN024B2S; Start 50; Stop 74
ggattacagttgatgagatggcttg

SEQ ID NO: 415919 - DNA, 25 bp, Artificial
  probe
  misc_feature (1)..(25): SEQ ID NO: 5606; WAN024B2S; Start 140; Stop 164
agtatggtattagtatggcacgctc

SEQ ID NO: 415920 - DNA, 25 bp, Artificial
  probe
  misc_feature (1)..(25): SEQ ID NO: 5606; WAN024B2S; Start 60; Stop 84
tgatgagatggcttggataattagg

SEQ ID NO: 415921 - DNA, 25 bp, Artificial
  probe
  misc_feature (1)..(25): SEQ ID NO: 5606; WAN024B2S; Start 132; Stop 156
tgcggctaagtatggtattagtatg

SEQ ID NO: 415922 - DNA, 25 bp, Artificial
  probe
  misc_feature (1)..(25): SEQ ID NO: 5606; WAN024B2S; Start 135; Stop 159
ggctaagtatggtattagtatggca

SEQ ID NO: 415923 - DNA, 25 bp, Artificial
  probe
  misc_feature (1)..(25): SEQ ID NO: 5606; WAN024B2S; Start 129; Stop 153
ttatgcggctaagtatggtattagt

SEQ ID NO: 415924 - DNA, 25 bp, Artificial
  probe
  misc_feature (1)..(25): SEQ ID NO: 5606; WAN024B2S; Start 134; Stop 158
cggctaagtatggtattagtatggc

SEQ ID NO: 415925 - DNA, 25 bp, Artificial
  probe
  misc_feature (1)..(25): SEQ ID NO: 5606; WAN024B2S; Start 133; Stop 157
gcggctaagtatggtattagtatgg

SEQ ID NO: 415926 - DNA, 25 bp, Artificial
  probe
  misc_feature (1)..(25): SEQ ID NO: 5606; WAN024B2S; Start 131; Stop 155
atgcggctaagtatggtattagtat

SEQ ID NO: 415927 - DNA, 25 bp, Artificial
  probe
  misc_feature (1)..(25): SEQ ID NO: 5606; WAN024B2S; Start 128; Stop 152
cttatgcggctaagtatggtattag

SEQ ID NO: 415928 - DNA, 25 bp, Artificial
  probe
  misc_feature (1)..(25): SEQ ID NO: 5606; WAN024B2S; Start 136; Stop 160
gctaagtatggtattagtatggcac

SEQ ID NO: 415929 - DNA, 25 bp, Artificial
  probe
  misc_feature (1)..(25): SEQ ID NO: 5606; WAN024B2S; Start 59; Stop 83
ttgatgagatggcttggataattag

SEQ ID NO: 415930 - DNA, 25 bp, Artificial
  probe
  misc_feature (1)..(25): SEQ ID NO: 5606; WAN024B2S; Start 137; Stop 161
ctaagtatggtattagtatggcacg

SEQ ID NO: 415931 - DNA, 25 bp, Artificial
  probe
  misc_feature (1)..(25): SEQ ID NO: 5606; WAN024B2S; Start 130; Stop 154
tatgcggctaagtatggtattagta

SEQ ID NO: 415932 - DNA, 25 bp, Artificial
  probe
  misc_feature (1)..(25): SEQ ID NO: 5606; WAN024B2S; Start 197; Stop 221
caagagtaggattactgaccaagat

SEQ ID NO: 415933 - DNA, 25 bp, Artificial
  probe
  misc_feature (1)..(25): SEQ ID NO: 5606; WAN024B2S; Start 147; Stop 171
tattagtatggcacgctcgatctta

SEQ ID NO: 415934 - DNA, 25 bp, Artificial
  probe
  misc_feature (1)..(25): SEQ ID NO: 5606; WAN024B2S; Start 198; Stop 222
aagagtaggattactgaccaagatt

SEQ ID NO: 415935 - DNA, 25 bp, Artificial
  probe
  misc_feature (1)..(25): SEQ ID NO: 5606; WAN024B2S; Start 2; Stop 26
tggtatcttctaagtatgctgcaag

SEQ ID NO: 415936 - DNA, 25 bp, Artificial
  probe
  misc_feature (1)..(25): SEQ ID NO: 5606; WAN024B2S; Start 1; Stop 25
ttggtatcttctaagtatgctgcaa

SEQ ID NO: 415937 - DNA, 25 bp, Artificial
  probe
  misc_feature (1)..(25): SEQ ID NO: 5606; WAN024B2S; Start 202; Stop 226
gtaggattactgaccaagatttctg

SEQ ID NO: 415938 - DNA, 25 bp, Artificial
  probe
  misc_feature (1)..(25): SEQ ID NO: 5606; WAN024B2S; Start 196; Stop 220
gcaagagtaggattactgaccaaga

SEQ ID NO: 415939 - DNA, 25 bp, Artificial
  probe
  misc_feature (1)..(25): SEQ ID NO: 5606; WAN024B2S; Start 195; Stop 219
agcaagagtaggattactgaccaag

SEQ ID NO: 415940 - DNA, 25 bp, Artificial
  probe
  misc_feature (1)..(25): SEQ ID NO: 5606; WAN024B2S; Start 148; Stop 172
attagtatggcacgctcgatcttaa

SEQ ID NO: 415941 - DNA, 25 bp, Artificial
  probe
  misc_feature (1)..(25): SEQ ID NO: 5606; WAN024B2S; Start 141; Stop 165
gtatggtattagtatggcacgctcg

SEQ ID NO: 415942 - DNA, 25 bp, Artificial
  probe
  misc_feature (1)..(25): SEQ ID NO: 5606; WAN024B2S; Start 194; Stop 218
cagcaagagtaggattactgaccaa

SEQ ID NO: 415943 - DNA, 25 bp, Artificial
  probe
  misc_feature (1)..(25): SEQ ID NO: 5606; WAN024B2S; Start 318; Stop 342
tcctaacaatggtcgtataaacttt

SEQ ID NO: 415944 - DNA, 25 bp, Artificial
  probe
  misc_feature (1)..(25): SEQ ID NO: 5606; WAN024B2S; Start 317; Stop 341
ttcctaacaatggtcgtataaactt

SEQ ID NO: 415945 - DNA, 25 bp, Artificial
  probe
  misc_feature (1)..(25): SEQ ID NO: 5606; WAN024B2S; Start 316; Stop 340
attcctaacaatggtcgtataaact

SEQ ID NO: 415946 - DNA, 25 bp, Artificial
  probe
  misc_feature (1)..(25): SEQ ID NO: 5606; WAN024B2S; Start 61; Stop 85
gatgagatggcttggataattaggg

SEQ ID NO: 415947 - DNA, 25 bp, Artificial
  probe
  misc_feature (1)..(25): SEQ ID NO: 5606; WAN024B2S; Start 146; Stop 170
gtattagtatggcacgctcgatctt

SEQ ID NO: 415948 - DNA, 25 bp, Artificial
  probe
  misc_feature (1)..(25): SEQ ID NO: 5607; WAN024B5S; Start 817; Stop 841
acgactatcttctacaatctcaacc

SEQ ID NO: 415949 - DNA, 25 bp, Artificial
  probe
  misc_feature (1)..(25): SEQ ID NO: 5607; WAN024B5S; Start 818; Stop 842
cgactatcttctacaatctcaacct

SEQ ID NO: 415950 - DNA, 25 bp, Artificial
  probe
  misc_feature (1)..(25): SEQ ID NO: 5607; WAN024B5S; Start 824; Stop 848
tcttctacaatctcaacctcaactt

SEQ ID NO: 415951 - DNA, 25 bp, Artificial
  probe
  misc_feature (1)..(25): SEQ ID NO: 5607; WAN024B5S; Start 823; Stop 847
atcttctacaatctcaacctcaact

SEQ ID NO: 415952 - DNA, 25 bp, Artificial
  probe
  misc_feature (1)..(25): SEQ ID NO: 5607; WAN024B5S; Start 814; Stop 838
ggaacgactatcttctacaatctca

SEQ ID NO: 415953 - DNA, 25 bp, Artificial
  probe
  misc_feature (1)..(25): SEQ ID NO: 5607; WAN024B5S; Start 421; Stop 445
gagaaggaagttaagtatcatcgtg

SEQ ID NO: 415954 - DNA, 25 bp, Artificial
  probe
  misc_feature (1)..(25): SEQ ID NO: 5607; WAN024B5S; Start 813; Stop 837
aggaacgactatcttctacaatctc

SEQ ID NO: 415955 - DNA, 25 bp, Artificial
  probe
  misc_feature (1)..(25): SEQ ID NO: 5607; WAN024B5S; Start 858; Stop 882
ggctcttggtgatacagtagatatt

SEQ ID NO: 415956 - DNA, 25 bp, Artificial
  probe
  misc_feature (1)..(25): SEQ ID NO: 5607; WAN024B5S; Start 820; Stop 844
actatcttctacaatctcaacctca

SEQ ID NO: 415957 - DNA, 25 bp, Artificial
  probe
  misc_feature (1)..(25): SEQ ID NO: 5607; WAN024B5S; Start 812; Stop 836
aaggaacgactatcttctacaatct

SEQ ID NO: 415958 - DNA, 25 bp, Artificial
  probe
  misc_feature (1)..(25): SEQ ID NO: 5607; WAN024B5S; Start 816; Stop 840
aacgactatcttctacaatctcaac

SEQ ID NO: 415959 - DNA, 25 bp, Artificial
  probe
  misc_feature (1)..(25): SEQ ID NO: 5607; WAN024B5S; Start 142; Stop 166
gacaagtacaaggaagttcaagaag

SEQ ID NO: 415960 - DNA, 25 bp, Artificial
  probe
  misc_feature (1)..(25): SEQ ID NO: 5607; WAN024B5S; Start 425; Stop 449
aggaagttaagtatcatcgtgaagc

SEQ ID NO: 415961 - DNA, 25 bp, Artificial
  probe
  misc_feature (1)..(25): SEQ ID NO: 5607; WAN024B5S; Start 422; Stop 446
agaaggaagttaagtatcatcgtga

SEQ ID NO: 415962 - DNA, 25 bp, Artificial
  probe
  misc_feature (1)..(25): SEQ ID NO: 5607; WAN024B5S; Start 420; Stop 444
tgagaaggaagttaagtatcatcgt

SEQ ID NO: 415963 - DNA, 25 bp, Artificial
  probe
  misc_feature (1)..(25): SEQ ID NO: 5607; WAN024B5S; Start 819; Stop 843
gactatcttctacaatctcaacctc

SEQ ID NO: 415964 - DNA, 25 bp, Artificial
  probe
  misc_feature (1)..(25): SEQ ID NO: 5607; WAN024B5S; Start 874; Stop 898
gtagatattccaactgttcacggtg

SEQ ID NO: 415965 - DNA, 25 bp, Artificial
  probe
  misc_feature (1)..(25): SEQ ID NO: 5607; WAN024B5S; Start 859; Stop 883
gctcttggtgatacagtagatattc

SEQ ID NO: 415966 - DNA, 25 bp, Artificial
  probe
  misc_feature (1)..(25): SEQ ID NO: 5607; WAN024B5S; Start 141; Stop 165
ggacaagtacaaggaagttcaagaa

SEQ ID NO: 415967 - DNA, 25 bp, Artificial
  probe
  misc_feature (1)..(25): SEQ ID NO: 5607; WAN024B5S; Start 857; Stop 881
cggctcttggtgatacagtagatat

SEQ ID NO: 415968 - DNA, 25 bp, Artificial
  probe
  misc_feature (1)..(25): SEQ ID NO: 5607; WAN024B5S; Start 822; Stop 846
tatcttctacaatctcaacctcaac

SEQ ID NO: 415969 - DNA, 25 bp, Artificial
  probe
  misc_feature (1)..(25): SEQ ID NO: 5607; WAN024B5S; Start 419; Stop 443
ctgagaaggaagttaagtatcatcg

SEQ ID NO: 415970 - DNA, 25 bp, Artificial
  probe
  misc_feature (1)..(25): SEQ ID NO: 5607; WAN024B5S; Start 424; Stop 448
aaggaagttaagtatcatcgtgaag

SEQ ID NO: 415971 - DNA, 25 bp, Artificial
  probe
  misc_feature (1)..(25): SEQ ID NO: 5607; WAN024B5S; Start 423; Stop 447
gaaggaagttaagtatcatcgtgaa

SEQ ID NO: 415972 - DNA, 25 bp, Artificial
  probe
  misc_feature (1)..(25): SEQ ID NO: 5607; WAN024B5S; Start 139; Stop 163
gaggacaagtacaaggaagttcaag

SEQ ID NO: 415973 - DNA, 25 bp, Artificial
  probe
  misc_feature (1)..(25): SEQ ID NO: 5607; WAN024B5S; Start 815; Stop 839
gaacgactatcttctacaatctcaa

SEQ ID NO: 415974 - DNA, 25 bp, Artificial
  probe
  misc_feature (1)..(25): SEQ ID NO: 5607; WAN024B5S; Start 873; Stop 897
agtagatattccaactgttcacggt

SEQ ID NO: 415975 - DNA, 25 bp, Artificial
  probe
  misc_feature (1)..(25): SEQ ID NO: 5607; WAN024B5S; Start 143; Stop 167
acaagtacaaggaagttcaagaagc

SEQ ID NO: 415976 - DNA, 25 bp, Artificial
  probe
  misc_feature (1)..(25): SEQ ID NO: 5607; WAN024B5S; Start 367; Stop 391
gatgatctccagtatcgtgtcaatt

SEQ ID NO: 415977 - DNA, 25 bp, Artificial
  probe
  misc_feature (1)..(25): SEQ ID NO: 5607; WAN024B5S; Start 140; Stop 164
aggacaagtacaaggaagttcaaga

SEQ ID NO: 415978 - DNA, 25 bp, Artificial
  probe
  misc_feature (1)..(25): SEQ ID NO: 5607; WAN024B5S; Start 860; Stop 884
ctcttggtgatacagtagatattcc

SEQ ID NO: 415979 - DNA, 25 bp, Artificial
  probe
  misc_feature (1)..(25): SEQ ID NO: 5607; WAN024B5S; Start 821; Stop 845
ctatcttctacaatctcaacctcaa

SEQ ID NO: 415980 - DNA, 25 bp, Artificial
  probe
  misc_feature (1)..(25): SEQ ID NO: 5607; WAN024B5S; Start 148; Stop 172
tacaaggaagttcaagaagcctatg

SEQ ID NO: 415981 - DNA, 25 bp, Artificial
  probe
  misc_feature (1)..(25): SEQ ID NO: 5608; WAN024B2T; Start 202; Stop 226
gcagcaagagtaggattattgacta

SEQ ID NO: 415982 - DNA, 25 bp, Artificial
  probe
  misc_feature (1)..(25): SEQ ID NO: 5608; WAN024B2T; Start 203; Stop 227
cagcaagagtaggattattgactaa

SEQ ID NO: 415983 - DNA, 25 bp, Artificial
  probe
  misc_feature (1)..(25): SEQ ID NO: 5608; WAN024B2T; Start 205; Stop 229
gcaagagtaggattattgactaaga

SEQ ID NO: 415984 - DNA, 25 bp, Artificial
  probe
  misc_feature (1)..(25): SEQ ID NO: 5608; WAN024B2T; Start 204; Stop 228
agcaagagtaggattattgactaag

SEQ ID NO: 415985 - DNA, 25 bp, Artificial
  probe
  misc_feature (1)..(25): SEQ ID NO: 5608; WAN024B2T; Start 201; Stop 225
ggcagcaagagtaggattattgact

SEQ ID NO: 415986 - DNA, 25 bp, Artificial
  probe
  misc_feature (1)..(25): SEQ ID NO: 5608; WAN024B2T; Start 200; Stop 224
cggcagcaagagtaggattattgac

SEQ ID NO: 415987 - DNA, 25 bp, Artificial
  probe
  misc_feature (1)..(25): SEQ ID NO: 5608; WAN024B2T; Start 206; Stop 230
caagagtaggattattgactaagat

SEQ ID NO: 415988 - DNA, 25 bp, Artificial
  probe
  misc_feature (1)..(25): SEQ ID NO: 5608; WAN024B2T; Start 232; Stop 256
tttggatggattttacgaatagctg

SEQ ID NO: 415989 - DNA, 25 bp, Artificial
  probe
  misc_feature (1)..(25): SEQ ID NO: 5608; WAN024B2T; Start 233; Stop 257
ttggatggattttacgaatagctgt

SEQ ID NO: 415990 - DNA, 25 bp, Artificial
  probe
  misc_feature (1)..(25): SEQ ID NO: 5608; WAN024B2T; Start 231; Stop 255
ttttggatggattttacgaatagct

SEQ ID NO: 415991 - DNA, 25 bp, Artificial
  probe
  misc_feature (1)..(25): SEQ ID NO: 5608; WAN024B2T; Start 199; Stop 223
gcggcagcaagagtaggattattga

SEQ ID NO: 415992 - DNA, 25 bp, Artificial
  probe
  misc_feature (1)..(25): SEQ ID NO: 5608; WAN024B2T; Start 234; Stop 258
tggatggattttacgaatagctgtg

SEQ ID NO: 415993 - DNA, 25 bp, Artificial
  probe
  misc_feature (1)..(25): SEQ ID NO: 5608; WAN024B2T; Start 235; Stop 259
ggatggattttacgaatagctgtgc

SEQ ID NO: 415994 - DNA, 25 bp, Artificial
  probe
  misc_feature (1)..(25): SEQ ID NO: 5608; WAN024B2T; Start 237; Stop 261
atggattttacgaatagctgtgctc

SEQ ID NO: 415995 - DNA, 25 bp, Artificial
  probe
  misc_feature (1)..(25): SEQ ID NO: 5608; WAN024B2T; Start 236; Stop 260
gatggattttacgaatagctgtgct

SEQ ID NO: 415996 - DNA, 25 bp, Artificial
  probe
  misc_feature (1)..(25): SEQ ID NO: 5608; WAN024B2T; Start 197; Stop 221
ctgcggcagcaagagtaggattatt

SEQ ID NO: 415997 - DNA, 25 bp, Artificial
  probe
  misc_feature (1)..(25): SEQ ID NO: 5608; WAN024B2T; Start 238; Stop 262
tggattttacgaatagctgtgctcg

SEQ ID NO: 415998 - DNA, 25 bp, Artificial
  probe
  misc_feature (1)..(25): SEQ ID NO: 5609; WAN024FRP; Start 248; Stop 272
ccaggttccagcatatcaataatag

SEQ ID NO: 415999 - DNA, 25 bp, Artificial
  probe
  misc_feature (1)..(25): SEQ ID NO: 5609; WAN024FRP; Start 247; Stop 271
accaggttccagcatatcaataata

SEQ ID NO: 416000 - DNA, 25 bp, Artificial
  probe
  misc_feature (1)..(25): SEQ ID NO: 5609; WAN024FRP; Start 246; Stop 270
caccaggttccagcatatcaataat

SEQ ID NO: 416001 - DNA, 25 bp, Artificial
  probe
  misc_feature (1)..(25): SEQ ID NO: 5609; WAN024FRP; Start 251; Stop 275
ggttccagcatatcaataatagagt

SEQ ID NO: 416002 - DNA, 25 bp, Artificial
  probe
  misc_feature (1)..(25): SEQ ID NO: 5609; WAN024FRP; Start 249; Stop 273
caggttccagcatatcaataataga

SEQ ID NO: 416003 - DNA, 25 bp, Artificial
  probe
  misc_feature (1)..(25): SEQ ID NO: 5609; WAN024FRP; Start 244; Stop 268
atcaccaggttccagcatatcaata

SEQ ID NO: 416004 - DNA, 25 bp, Artificial
  probe
  misc_feature (1)..(25): SEQ ID NO: 5609; WAN024FRP; Start 250; Stop 274
aggttccagcatatcaataatagag

SEQ ID NO: 416005 - DNA, 25 bp, Artificial
  probe
  misc_feature (1)..(25): SEQ ID NO: 5609; WAN024FRP; Start 245; Stop 269
tcaccaggttccagcatatcaataa

SEQ ID NO: 416006 - DNA, 25 bp, Artificial
  probe
  misc_feature (1)..(25): SEQ ID NO: 5609; WAN024FRP; Start 252; Stop 276
gttccagcatatcaataatagagtg

SEQ ID NO: 416007 - DNA, 25 bp, Artificial
  probe
  misc_feature (1)..(25): SEQ ID NO: 5609; WAN024FRP; Start 243; Stop 267
catcaccaggttccagcatatcaat

SEQ ID NO: 416008 - DNA, 25 bp, Artificial
  probe
  misc_feature (1)..(25): SEQ ID NO: 5609; WAN024FRP; Start 255; Stop 279
ccagcatatcaataatagagtggaa

SEQ ID NO: 416009 - DNA, 25 bp, Artificial
  probe
  misc_feature (1)..(25): SEQ ID NO: 5609; WAN024FRP; Start 253; Stop 277
ttccagcatatcaataatagagtgg

SEQ ID NO: 416010 - DNA, 25 bp, Artificial
  probe
  misc_feature (1)..(25): SEQ ID NO: 5609; WAN024FRP; Start 152; Stop 176
ttaaggaggagaagttccacatgac

SEQ ID NO: 416011 - DNA, 25 bp, Artificial
  probe
  misc_feature (1)..(25): SEQ ID NO: 5609; WAN024FRP; Start 283; Stop 307
tttatcttgcatttctcctgtctca

SEQ ID NO: 416012 - DNA, 25 bp, Artificial
  probe
  misc_feature (1)..(25): SEQ ID NO: 5609; WAN024FRP; Start 282; Stop 306
gtttatcttgcatttctcctgtctc

SEQ ID NO: 416013 - DNA, 25 bp, Artificial
  probe
  misc_feature (1)..(25): SEQ ID NO: 5609; WAN024FRP; Start 281; Stop 305
tgtttatcttgcatttctcctgtct

SEQ ID NO: 416014 - DNA, 25 bp, Artificial
  probe
  misc_feature (1)..(25): SEQ ID NO: 5609; WAN024FRP; Start 284; Stop 308
ttatcttgcatttctcctgtctcac

SEQ ID NO: 416015 - DNA, 25 bp, Artificial
  probe
  misc_feature (1)..(25): SEQ ID NO: 5609; WAN024FRP; Start 151; Stop 175
cttaaggaggagaagttccacatga

SEQ ID NO: 416016 - DNA, 25 bp, Artificial
  probe
  misc_feature (1)..(25): SEQ ID NO: 5609; WAN024FRP; Start 150; Stop 174
tcttaaggaggagaagttccacatg

SEQ ID NO: 416017 - DNA, 25 bp, Artificial
  probe
  misc_feature (1)..(25): SEQ ID NO: 5609; WAN024FRP; Start 144; Stop 168
tagtgttcttaaggaggagaagttc

SEQ ID NO: 416018 - DNA, 25 bp, Artificial
  probe
  misc_feature (1)..(25): SEQ ID NO: 5609; WAN024FRP; Start 143; Stop 167
ctagtgttcttaaggaggagaagtt

SEQ ID NO: 416019 - DNA, 25 bp, Artificial
  probe
  misc_feature (1)..(25): SEQ ID NO: 5609; WAN024FRP; Start 149; Stop 173
ttcttaaggaggagaagttccacat

SEQ ID NO: 416020 - DNA, 25 bp, Artificial
  probe
  misc_feature (1)..(25): SEQ ID NO: 5609; WAN024FRP; Start 145; Stop 169
agtgttcttaaggaggagaagttcc

SEQ ID NO: 416021 - DNA, 25 bp, Artificial
  probe
  misc_feature (1)..(25): SEQ ID NO: 5609; WAN024FRP; Start 142; Stop 166
actagtgttcttaaggaggagaagt

SEQ ID NO: 416022 - DNA, 25 bp, Artificial
  probe
  misc_feature (1)..(25): SEQ ID NO: 5609; WAN024FRP; Start 31; Stop 55
gtgggtcaattcttctgtaacgaca

SEQ ID NO: 416023 - DNA, 25 bp, Artificial
  probe
  misc_feature (1)..(25): SEQ ID NO: 5609; WAN024FRP; Start 148; Stop 172
gttcttaaggaggagaagttccaca

SEQ ID NO: 416024 - DNA, 25 bp, Artificial
  probe
  misc_feature (1)..(25): SEQ ID NO: 5609; WAN024FRP; Start 147; Stop 171
tgttcttaaggaggagaagttccac

SEQ ID NO: 416025 - DNA, 25 bp, Artificial
  probe
  misc_feature (1)..(25): SEQ ID NO: 5609; WAN024FRP; Start 146; Stop 170
gtgttcttaaggaggagaagttcca

SEQ ID NO: 416026 - DNA, 25 bp, Artificial
  probe
  misc_feature (1)..(25): SEQ ID NO: 5609; WAN024FRP; Start 285; Stop 309
tatcttgcatttctcctgtctcacg

SEQ ID NO: 416027 - DNA, 25 bp, Artificial
  probe
  misc_feature (1)..(25): SEQ ID NO: 5609; WAN024FRP; Start 370; Stop 394
ctctggcaagtggaaatcaaaatca

SEQ ID NO: 416028 - DNA, 25 bp, Artificial
  probe
  misc_feature (1)..(25): SEQ ID NO: 5609; WAN024FRP; Start 369; Stop 393
cctctggcaagtggaaatcaaaatc

SEQ ID NO: 416029 - DNA, 25 bp, Artificial
  probe
  misc_feature (1)..(25): SEQ ID NO: 5609; WAN024FRP; Start 254; Stop 278
tccagcatatcaataatagagtgga

SEQ ID NO: 416030 - DNA, 25 bp, Artificial
  probe
  misc_feature (1)..(25): SEQ ID NO: 5609; WAN024FRP; Start 371; Stop 395
tctggcaagtggaaatcaaaatcag

SEQ ID NO: 416031 - DNA, 25 bp, Artificial
  probe
  misc_feature (1)..(25): SEQ ID NO: 5610; WAN024D4F; Start 166; Stop 190
ttccagttcatagatacgtctcatc

SEQ ID NO: 416032 - DNA, 25 bp, Artificial
  probe
  misc_feature (1)..(25): SEQ ID NO: 5610; WAN024D4F; Start 167; Stop 191
tccagttcatagatacgtctcatcg

SEQ ID NO: 416033 - DNA, 25 bp, Artificial
  probe
  misc_feature (1)..(25): SEQ ID NO: 5610; WAN024D4F; Start 621; Stop 645
ttctgtagaagtcaaatggatttcc

SEQ ID NO: 416034 - DNA, 25 bp, Artificial
  probe
  misc_feature (1)..(25): SEQ ID NO: 5610; WAN024D4F; Start 170; Stop 194
agttcatagatacgtctcatcgctc

SEQ ID NO: 416035 - DNA, 25 bp, Artificial
  probe
  misc_feature (1)..(25): SEQ ID NO: 5610; WAN024D4F; Start 175; Stop 199
atagatacgtctcatcgctcgaatc

SEQ ID NO: 416036 - DNA, 25 bp, Artificial
  probe
  misc_feature (1)..(25): SEQ ID NO: 5610; WAN024D4F; Start 614; Stop 638
cggagatttctgtagaagtcaaatg

SEQ ID NO: 416037 - DNA, 25 bp, Artificial
  probe
  misc_feature (1)..(25): SEQ ID NO: 5610; WAN024D4F; Start 615; Stop 639
ggagatttctgtagaagtcaaatgg

SEQ ID NO: 416038 - DNA, 25 bp, Artificial
  probe
  misc_feature (1)..(25): SEQ ID NO: 5610; WAN024D4F; Start 169; Stop 193
cagttcatagatacgtctcatcgct

SEQ ID NO: 416039 - DNA, 25 bp, Artificial
  probe
  misc_feature (1)..(25): SEQ ID NO: 5610; WAN024D4F; Start 174; Stop 198
catagatacgtctcatcgctcgaat

SEQ ID NO: 416040 - DNA, 25 bp, Artificial
  probe
  misc_feature (1)..(25): SEQ ID NO: 5610; WAN024D4F; Start 613; Stop 637
gcggagatttctgtagaagtcaaat

SEQ ID NO: 416041 - DNA, 25 bp, Artificial
  probe
  misc_feature (1)..(25): SEQ ID NO: 5610; WAN024D4F; Start 406; Stop 430
atgttctgctgtttccttctcatca

SEQ ID NO: 416042 - DNA, 25 bp, Artificial
  probe
  misc_feature (1)..(25): SEQ ID NO: 5610; WAN024D4F; Start 616; Stop 640
gagatttctgtagaagtcaaatgga

SEQ ID NO: 416043 - DNA, 25 bp, Artificial
  probe
  misc_feature (1)..(25): SEQ ID NO: 5610; WAN024D4F; Start 164; Stop 188
gtttccagttcatagatacgtctca

SEQ ID NO: 416044 - DNA, 25 bp, Artificial
  probe
  misc_feature (1)..(25): SEQ ID NO: 5610; WAN024D4F; Start 620; Stop 644
tttctgtagaagtcaaatggatttc

SEQ ID NO: 416045 - DNA, 25 bp, Artificial
  probe
  misc_feature (1)..(25): SEQ ID NO: 5610; WAN024D4F; Start 165; Stop 189
tttccagttcatagatacgtctcat

SEQ ID NO: 416046 - DNA, 25 bp, Artificial
  probe
  misc_feature (1)..(25): SEQ ID NO: 5610; WAN024D4F; Start 168; Stop 192
ccagttcatagatacgtctcatcgc

SEQ ID NO: 416047 - DNA, 25 bp, Artificial
  probe
  misc_feature (1)..(25): SEQ ID NO: 5610; WAN024D4F; Start 617; Stop 641
agatttctgtagaagtcaaatggat

SEQ ID NO: 416048 - DNA, 25 bp, Artificial
  probe
  misc_feature (1)..(25): SEQ ID NO: 5610; WAN024D4F; Start 173; Stop 197
tcatagatacgtctcatcgctcgaa

SEQ ID NO: 416049 - DNA, 25 bp, Artificial
  probe
  misc_feature (1)..(25): SEQ ID NO: 5610; WAN024D4F; Start 172; Stop 196
ttcatagatacgtctcatcgctcga

SEQ ID NO: 416050 - DNA, 25 bp, Artificial
  probe
  misc_feature (1)..(25): SEQ ID NO: 5610; WAN024D4F; Start 171; Stop 195
gttcatagatacgtctcatcgctcg

SEQ ID NO: 416051 - DNA, 25 bp, Artificial
  probe
  misc_feature (1)..(25): SEQ ID NO: 5610; WAN024D4F; Start 624; Stop 648
tgtagaagtcaaatggatttccagt

SEQ ID NO: 416052 - DNA, 25 bp, Artificial
  probe
  misc_feature (1)..(25): SEQ ID NO: 5610; WAN024D4F; Start 622; Stop 646
tctgtagaagtcaaatggatttcca

SEQ ID NO: 416053 - DNA, 25 bp, Artificial
  probe
  misc_feature (1)..(25): SEQ ID NO: 5610; WAN024D4F; Start 545; Stop 569
ggactagctccgatgatttgataat

SEQ ID NO: 416054 - DNA, 25 bp, Artificial
  probe
  misc_feature (1)..(25): SEQ ID NO: 5610; WAN024D4F; Start 623; Stop 647
ctgtagaagtcaaatggatttccag

SEQ ID NO: 416055 - DNA, 25 bp, Artificial
  probe
  misc_feature (1)..(25): SEQ ID NO: 5610; WAN024D4F; Start 634; Stop 658
aaatggatttccagtaacttctgct

SEQ ID NO: 416056 - DNA, 25 bp, Artificial
  probe
  misc_feature (1)..(25): SEQ ID NO: 5610; WAN024D4F; Start 633; Stop 657
caaatggatttccagtaacttctgc

SEQ ID NO: 416057 - DNA, 25 bp, Artificial
  probe
  misc_feature (1)..(25): SEQ ID NO: 5610; WAN024D4F; Start 632; Stop 656
tcaaatggatttccagtaacttctg

SEQ ID NO: 416058 - DNA, 25 bp, Artificial
  probe
  misc_feature (1)..(25): SEQ ID NO: 5610; WAN024D4F; Start 631; Stop 655
gtcaaatggatttccagtaacttct

SEQ ID NO: 416059 - DNA, 25 bp, Artificial
  probe
  misc_feature (1)..(25): SEQ ID NO: 5610; WAN024D4F; Start 630; Stop 654
agtcaaatggatttccagtaacttc

SEQ ID NO: 416060 - DNA, 25 bp, Artificial
  probe
  misc_feature (1)..(25): SEQ ID NO: 5610; WAN024D4F; Start 628; Stop 652
gaagtcaaatggatttccagtaact

SEQ ID NO: 416061 - DNA, 25 bp, Artificial
  probe
  misc_feature (1)..(25): SEQ ID NO: 5610; WAN024D4F; Start 627; Stop 651
agaagtcaaatggatttccagtaac

SEQ ID NO: 416062 - DNA, 25 bp, Artificial
  probe
  misc_feature (1)..(25): SEQ ID NO: 5610; WAN024D4F; Start 547; Stop 571
actagctccgatgatttgataatcc

SEQ ID NO: 416063 - DNA, 25 bp, Artificial
  probe
  misc_feature (1)..(25): SEQ ID NO: 5610; WAN024D4F; Start 404; Stop 428
cgatgttctgctgtttccttctcat

SEQ ID NO: 416064 - DNA, 25 bp, Artificial
  probe
  misc_feature (1)..(25): SEQ ID NO: 5611; WAN024GDG; Start 207; Stop 231
ctacatctggatgagcttcttgaag

SEQ ID NO: 416065 - DNA, 25 bp, Artificial
  probe
  misc_feature (1)..(25): SEQ ID NO: 5611; WAN024GDG; Start 206; Stop 230
tctacatctggatgagcttcttgaa

SEQ ID NO: 416066 - DNA, 25 bp, Artificial
  probe
  misc_feature (1)..(25): SEQ ID NO: 5611; WAN024GDG; Start 205; Stop 229
ttctacatctggatgagcttcttga

SEQ ID NO: 416067 - DNA, 25 bp, Artificial
  probe
  misc_feature (1)..(25): SEQ ID NO: 5611; WAN024GDG; Start 208; Stop 232
tacatctggatgagcttcttgaagg

SEQ ID NO: 416068 - DNA, 25 bp, Artificial
  probe
  misc_feature (1)..(25): SEQ ID NO: 5611; WAN024GDG; Start 185; Stop 209
tccaaggctgctgtaaagatttcta

SEQ ID NO: 416069 - DNA, 25 bp, Artificial
  probe
  misc_feature (1)..(25): SEQ ID NO: 5611; WAN024GDG; Start 186; Stop 210
ccaaggctgctgtaaagatttctac

SEQ ID NO: 416070 - DNA, 25 bp, Artificial
  probe
  misc_feature (1)..(25): SEQ ID NO: 5611; WAN024GDG; Start 183; Stop 207
catccaaggctgctgtaaagatttc

SEQ ID NO: 416071 - DNA, 25 bp, Artificial
  probe
  misc_feature (1)..(25): SEQ ID NO: 5611; WAN024GDG; Start 184; Stop 208
atccaaggctgctgtaaagatttct

SEQ ID NO: 416072 - DNA, 25 bp, Artificial
  probe
  misc_feature (1)..(25): SEQ ID NO: 5611; WAN024GDG; Start 203; Stop 227
atttctacatctggatgagcttctt

SEQ ID NO: 416073 - DNA, 25 bp, Artificial
  probe
  misc_feature (1)..(25): SEQ ID NO: 5611; WAN024GDG; Start 202; Stop 226
gatttctacatctggatgagcttct

SEQ ID NO: 416074 - DNA, 25 bp, Artificial
  probe
  misc_feature (1)..(25): SEQ ID NO: 5611; WAN024GDG; Start 204; Stop 228
tttctacatctggatgagcttcttg

SEQ ID NO: 416075 - DNA, 25 bp, Artificial
  probe
  misc_feature (1)..(25): SEQ ID NO: 5611; WAN024GDG; Start 182; Stop 206
tcatccaaggctgctgtaaagattt

SEQ ID NO: 416076 - DNA, 25 bp, Artificial
  probe
  misc_feature (1)..(25): SEQ ID NO: 5611; WAN024GDG; Start 181; Stop 205
ttcatccaaggctgctgtaaagatt

SEQ ID NO: 416077 - DNA, 25 bp, Artificial
  probe
  misc_feature (1)..(25): SEQ ID NO: 5611; WAN024GDG; Start 191; Stop 215
gctgctgtaaagatttctacatctg

SEQ ID NO: 416078 - DNA, 25 bp, Artificial
  probe
  misc_feature (1)..(25): SEQ ID NO: 5611; WAN024GDG; Start 193; Stop 217
tgctgtaaagatttctacatctgga

SEQ ID NO: 416079 - DNA, 25 bp, Artificial
  probe
  misc_feature (1)..(25): SEQ ID NO: 5611; WAN024GDG; Start 192; Stop 216
ctgctgtaaagatttctacatctgg

SEQ ID NO: 416080 - DNA, 25 bp, Artificial
  probe
  misc_feature (1)..(25): SEQ ID NO: 5611; WAN024GDG; Start 188; Stop 212
aaggctgctgtaaagatttctacat

SEQ ID NO: 416081 - DNA, 25 bp, Artificial
  probe
  misc_feature (1)..(25): SEQ ID NO: 5611; WAN024GDG; Start 190; Stop 214
ggctgctgtaaagatttctacatct

SEQ ID NO: 416082 - DNA, 25 bp, Artificial
  probe
  misc_feature (1)..(25): SEQ ID NO: 5611; WAN024GDG; Start 189; Stop 213
aggctgctgtaaagatttctacatc

SEQ ID NO: 416083 - DNA, 25 bp, Artificial
  probe
  misc_feature (1)..(25): SEQ ID NO: 5611; WAN024GDG; Start 60; Stop 84
ctcctttcgtgactggaaatacttt

SEQ ID NO: 416084 - DNA, 25 bp, Artificial
  probe
  misc_feature (1)..(25): SEQ ID NO: 5611; WAN024GDG; Start 249; Stop 273
gagcagatacaaggcagacaaattt

SEQ ID NO: 416085 - DNA, 25 bp, Artificial
  probe
  misc_feature (1)..(25): SEQ ID NO: 5611; WAN024GDG; Start 194; Stop 218
gctgtaaagatttctacatctggat

SEQ ID NO: 416086 - DNA, 25 bp, Artificial
  probe
  misc_feature (1)..(25): SEQ ID NO: 5611; WAN024GDG; Start 187; Stop 211
caaggctgctgtaaagatttctaca

SEQ ID NO: 416087 - DNA, 25 bp, Artificial
  probe
  misc_feature (1)..(25): SEQ ID NO: 5611; WAN024GDG; Start 180; Stop 204
gttcatccaaggctgctgtaaagat

SEQ ID NO: 416088 - DNA, 25 bp, Artificial
  probe
  misc_feature (1)..(25): SEQ ID NO: 5611; WAN024GDG; Start 248; Stop 272
ggagcagatacaaggcagacaaatt

SEQ ID NO: 416089 - DNA, 25 bp, Artificial
  probe
  misc_feature (1)..(25): SEQ ID NO: 5611; WAN024GDG; Start 198; Stop 222
taaagatttctacatctggatgagc

SEQ ID NO: 416090 - DNA, 25 bp, Artificial
  probe
  misc_feature (1)..(25): SEQ ID NO: 5611; WAN024GDG; Start 81; Stop 105
cttttccaagtcattcttcttttcg

SEQ ID NO: 416091 - DNA, 25 bp, Artificial
  probe
  misc_feature (1)..(25): SEQ ID NO: 5611; WAN024GDG; Start 201; Stop 225
agatttctacatctggatgagcttc

SEQ ID NO: 416092 - DNA, 25 bp, Artificial
  probe
  misc_feature (1)..(25): SEQ ID NO: 5611; WAN024GDG; Start 200; Stop 224
aagatttctacatctggatgagctt

SEQ ID NO: 416093 - DNA, 25 bp, Artificial
  probe
  misc_feature (1)..(25): SEQ ID NO: 5611; WAN024GDG; Start 199; Stop 223
aaagatttctacatctggatgagct

SEQ ID NO: 416094 - DNA, 25 bp, Artificial
  probe
  misc_feature (1)..(25): SEQ ID NO: 5611; WAN024GDG; Start 144; Stop 168
caagacctggaacgatataaccgtg

SEQ ID NO: 416095 - DNA, 25 bp, Artificial
  probe
  misc_feature (1)..(25): SEQ ID NO: 5611; WAN024GDG; Start 59; Stop 83
cctcctttcgtgactggaaatactt

SEQ ID NO: 416096 - DNA, 25 bp, Artificial
  probe
  misc_feature (1)..(25): SEQ ID NO: 5611; WAN024GDG; Start 196; Stop 220
tgtaaagatttctacatctggatga

SEQ ID NO: 416097 - DNA, 25 bp, Artificial
  probe
  misc_feature (1)..(25): SEQ ID NO: 5612; WAN024EWQ; Start 163; Stop 187
gtcaagtcacggtactgttgtttag

SEQ ID NO: 416098 - DNA, 25 bp, Artificial
  probe
  misc_feature (1)..(25): SEQ ID NO: 5612; WAN024EWQ; Start 205; Stop 229
ctttggaagtcacgaacgatttctg

SEQ ID NO: 416099 - DNA, 25 bp, Artificial
  probe
  misc_feature (1)..(25): SEQ ID NO: 5612; WAN024EWQ; Start 162; Stop 186
tgtcaagtcacggtactgttgttta

SEQ ID NO: 416100 - DNA, 25 bp, Artificial
  probe
  misc_feature (1)..(25): SEQ ID NO: 5612; WAN024EWQ; Start 210; Stop 234
gaagtcacgaacgatttctggaaat

SEQ ID NO: 416101 - DNA, 25 bp, Artificial
  probe
  misc_feature (1)..(25): SEQ ID NO: 5612; WAN024EWQ; Start 211; Stop 235
aagtcacgaacgatttctggaaatg

SEQ ID NO: 416102 - DNA, 25 bp, Artificial
  probe
  misc_feature (1)..(25): SEQ ID NO: 5612; WAN024EWQ; Start 75; Stop 99
ctcatcttctacaaagggatggaag

SEQ ID NO: 416103 - DNA, 25 bp, Artificial
  probe
  misc_feature (1)..(25): SEQ ID NO: 5612; WAN024EWQ; Start 206; Stop 230
tttggaagtcacgaacgatttctgg

SEQ ID NO: 416104 - DNA, 25 bp, Artificial
  probe
  misc_feature (1)..(25): SEQ ID NO: 5612; WAN024EWQ; Start 164; Stop 188
tcaagtcacggtactgttgtttagc

SEQ ID NO: 416105 - DNA, 25 bp, Artificial
  probe
  misc_feature (1)..(25): SEQ ID NO: 5612; WAN024EWQ; Start 215; Stop 239
cacgaacgatttctggaaatggatg

SEQ ID NO: 416106 - DNA, 25 bp, Artificial
  probe
  misc_feature (1)..(25): SEQ ID NO: 5612; WAN024EWQ; Start 209; Stop 233
ggaagtcacgaacgatttctggaaa

SEQ ID NO: 416107 - DNA, 25 bp, Artificial
  probe
  misc_feature (1)..(25): SEQ ID NO: 5612; WAN024EWQ; Start 74; Stop 98
actcatcttctacaaagggatggaa

SEQ ID NO: 416108 - DNA, 25 bp, Artificial
  probe
  misc_feature (1)..(25): SEQ ID NO: 5612; WAN024EWQ; Start 216; Stop 240
acgaacgatttctggaaatggatga

SEQ ID NO: 416109 - DNA, 25 bp, Artificial
  probe
  misc_feature (1)..(25): SEQ ID NO: 5612; WAN024EWQ; Start 214; Stop 238
tcacgaacgatttctggaaatggat

SEQ ID NO: 416110 - DNA, 25 bp, Artificial
  probe
  misc_feature (1)..(25): SEQ ID NO: 5612; WAN024EWQ; Start 161; Stop 185
ctgtcaagtcacggtactgttgttt

SEQ ID NO: 416111 - DNA, 25 bp, Artificial
  probe
  misc_feature (1)..(25): SEQ ID NO: 5612; WAN024EWQ; Start 73; Stop 97
gactcatcttctacaaagggatgga

SEQ ID NO: 416112 - DNA, 25 bp, Artificial
  probe
  misc_feature (1)..(25): SEQ ID NO: 5612; WAN024EWQ; Start 160; Stop 184
cctgtcaagtcacggtactgttgtt

SEQ ID NO: 416113 - DNA, 25 bp, Artificial
  probe
  misc_feature (1)..(25): SEQ ID NO: 5612; WAN024EWQ; Start 213; Stop 237
gtcacgaacgatttctggaaatgga

SEQ ID NO: 416114 - DNA, 25 bp, Artificial
  probe
  misc_feature (1)..(25): SEQ ID NO: 5612; WAN024EWQ; Start 212; Stop 236
agtcacgaacgatttctggaaatgg

SEQ ID NO: 416115 - DNA, 25 bp, Artificial
  probe
  misc_feature (1)..(25): SEQ ID NO: 5612; WAN024EWQ; Start 169; Stop 193
tcacggtactgttgtttagcctctc

SEQ ID NO: 416116 - DNA, 25 bp, Artificial
  probe
  misc_feature (1)..(25): SEQ ID NO: 5612; WAN024EWQ; Start 208; Stop 232
tggaagtcacgaacgatttctggaa

SEQ ID NO: 416117 - DNA, 25 bp, Artificial
  probe
  misc_feature (1)..(25): SEQ ID NO: 5612; WAN024EWQ; Start 207; Stop 231
ttggaagtcacgaacgatttctgga

SEQ ID NO: 416118 - DNA, 25 bp, Artificial
  probe
  misc_feature (1)..(25): SEQ ID NO: 5612; WAN024EWQ; Start 165; Stop 189
caagtcacggtactgttgtttagcc

SEQ ID NO: 416119 - DNA, 25 bp, Artificial
  probe
  misc_feature (1)..(25): SEQ ID NO: 5612; WAN024EWQ; Start 203; Stop 227
cactttggaagtcacgaacgatttc

SEQ ID NO: 416120 - DNA, 25 bp, Artificial
  probe
  misc_feature (1)..(25): SEQ ID NO: 5612; WAN024EWQ; Start 204; Stop 228
actttggaagtcacgaacgatttct

SEQ ID NO: 416121 - DNA, 25 bp, Artificial
  probe
  misc_feature (1)..(25): SEQ ID NO: 5612; WAN024EWQ; Start 166; Stop 190
aagtcacggtactgttgtttagcct

SEQ ID NO: 416122 - DNA, 25 bp, Artificial
  probe
  misc_feature (1)..(25): SEQ ID NO: 5612; WAN024EWQ; Start 168; Stop 192
gtcacggtactgttgtttagcctct

SEQ ID NO: 416123 - DNA, 25 bp, Artificial
  probe
  misc_feature (1)..(25): SEQ ID NO: 5612; WAN024EWQ; Start 167; Stop 191
agtcacggtactgttgtttagcctc

SEQ ID NO: 416124 - DNA, 25 bp, Artificial
  probe
  misc_feature (1)..(25): SEQ ID NO: 5612; WAN024EWQ; Start 202; Stop 226
acactttggaagtcacgaacgattt

SEQ ID NO: 416125 - DNA, 25 bp, Artificial
  probe
  misc_feature (1)..(25): SEQ ID NO: 5612; WAN024EWQ; Start 201; Stop 225
gacactttggaagtcacgaacgatt

SEQ ID NO: 416126 - DNA, 25 bp, Artificial
  probe
  misc_feature (1)..(25): SEQ ID NO: 5612; WAN024EWQ; Start 173; Stop 197
ggtactgttgtttagcctctcgacc

SEQ ID NO: 416127 - DNA, 25 bp, Artificial
  probe
  misc_feature (1)..(25): SEQ ID NO: 5612; WAN024EWQ; Start 198; Stop 222
gatgacactttggaagtcacgaacg

SEQ ID NO: 416128 - DNA, 25 bp, Artificial
  probe
  misc_feature (1)..(25): SEQ ID NO: 5612; WAN024EWQ; Start 197; Stop 221
cgatgacactttggaagtcacgaac

SEQ ID NO: 416129 - DNA, 25 bp, Artificial
  probe
  misc_feature (1)..(25): SEQ ID NO: 5612; WAN024EWQ; Start 200; Stop 224
tgacactttggaagtcacgaacgat

SEQ ID NO: 416130 - DNA, 25 bp, Artificial
  probe
  misc_feature (1)..(25): SEQ ID NO: 5612; WAN024EWQ; Start 199; Stop 223
atgacactttggaagtcacgaacga

SEQ ID NO: 416131 - DNA, 25 bp, Artificial
  probe
  misc_feature (1)..(25): SEQ ID NO: 5613; WAN024AUH; Start 27; Stop 51
gatgatggacaggattagacaagag

SEQ ID NO: 416132 - DNA, 25 bp, Artificial
  probe
  misc_feature (1)..(25): SEQ ID NO: 5613; WAN024AUH; Start 28; Stop 52
atgatggacaggattagacaagagt

SEQ ID NO: 416133 - DNA, 25 bp, Artificial
  probe
  misc_feature (1)..(25): SEQ ID NO: 5613; WAN024AUH; Start 26; Stop 50
tgatgatggacaggattagacaaga

SEQ ID NO: 416134 - DNA, 25 bp, Artificial
  probe
  misc_feature (1)..(25): SEQ ID NO: 5613; WAN024AUH; Start 29; Stop 53
tgatggacaggattagacaagagtt

SEQ ID NO: 416135 - DNA, 25 bp, Artificial
  probe
  misc_feature (1)..(25): SEQ ID NO: 5613; WAN024AUH; Start 25; Stop 49
ttgatgatggacaggattagacaag

SEQ ID NO: 416136 - DNA, 25 bp, Artificial
  probe
  misc_feature (1)..(25): SEQ ID NO: 5613; WAN024AUH; Start 24; Stop 48
gttgatgatggacaggattagacaa

SEQ ID NO: 416137 - DNA, 25 bp, Artificial
  probe
  misc_feature (1)..(25): SEQ ID NO: 5613; WAN024AUH; Start 30; Stop 54
gatggacaggattagacaagagttg

SEQ ID NO: 416138 - DNA, 25 bp, Artificial
  probe
  misc_feature (1)..(25): SEQ ID NO: 5613; WAN024AUH; Start 505; Stop 529
ctaactggacaggattcaactattg

SEQ ID NO: 416139 - DNA, 25 bp, Artificial
  probe
  misc_feature (1)..(25): SEQ ID NO: 5613; WAN024AUH; Start 506; Stop 530
taactggacaggattcaactattgt

SEQ ID NO: 416140 - DNA, 25 bp, Artificial
  probe
  misc_feature (1)..(25): SEQ ID NO: 5613; WAN024AUH; Start 511; Stop 535
ggacaggattcaactattgtggatt

SEQ ID NO: 416141 - DNA, 25 bp, Artificial
  probe
  misc_feature (1)..(25): SEQ ID NO: 5613; WAN024AUH; Start 507; Stop 531
aactggacaggattcaactattgtg

SEQ ID NO: 416142 - DNA, 25 bp, Artificial
  probe
  misc_feature (1)..(25): SEQ ID NO: 5613; WAN024AUH; Start 510; Stop 534
tggacaggattcaactattgtggat

SEQ ID NO: 416143 - DNA, 25 bp, Artificial
  probe
  misc_feature (1)..(25): SEQ ID NO: 5613; WAN024AUH; Start 509; Stop 533
ctggacaggattcaactattgtgga

SEQ ID NO: 416144 - DNA, 25 bp, Artificial
  probe
  misc_feature (1)..(25): SEQ ID NO: 5613; WAN024AUH; Start 356; Stop 380
gtcaccctatcacactggatttaat

SEQ ID NO: 416145 - DNA, 25 bp, Artificial
  probe
  misc_feature (1)..(25): SEQ ID NO: 5613; WAN024AUH; Start 357; Stop 381
tcaccctatcacactggatttaatt

SEQ ID NO: 416146 - DNA, 25 bp, Artificial
  probe
  misc_feature (1)..(25): SEQ ID NO: 5613; WAN024AUH; Start 359; Stop 383
accctatcacactggatttaattcg

SEQ ID NO: 416147 - DNA, 25 bp, Artificial
  probe
  misc_feature (1)..(25): SEQ ID NO: 5613; WAN024AUH; Start 358; Stop 382
caccctatcacactggatttaattc

SEQ ID NO: 416148 - DNA, 25 bp, Artificial
  probe
  misc_feature (1)..(25): SEQ ID NO: 5613; WAN024AUH; Start 273; Stop 297
cttgaccattattctcgaagccaat

SEQ ID NO: 416149 - DNA, 25 bp, Artificial
  probe
  misc_feature (1)..(25): SEQ ID NO: 5613; WAN024AUH; Start 519; Stop 543
ttcaactattgtggatttgtctgga

SEQ ID NO: 416150 - DNA, 25 bp, Artificial
  probe
  misc_feature (1)..(25): SEQ ID NO: 5613; WAN024AUH; Start 518; Stop 542
attcaactattgtggatttgtctgg

SEQ ID NO: 416151 - DNA, 25 bp, Artificial
  probe
  misc_feature (1)..(25): SEQ ID NO: 5613; WAN024AUH; Start 514; Stop 538
caggattcaactattgtggatttgt

SEQ ID NO: 416152 - DNA, 25 bp, Artificial
  probe
  misc_feature (1)..(25): SEQ ID NO: 5613; WAN024AUH; Start 508; Stop 532
actggacaggattcaactattgtgg

SEQ ID NO: 416153 - DNA, 25 bp, Artificial
  probe
  misc_feature (1)..(25): SEQ ID NO: 5613; WAN024AUH; Start 521; Stop 545
caactattgtggatttgtctggaga

SEQ ID NO: 416154 - DNA, 25 bp, Artificial
  probe
  misc_feature (1)..(25): SEQ ID NO: 5613; WAN024AUH; Start 520; Stop 544
tcaactattgtggatttgtctggag

SEQ ID NO: 416155 - DNA, 25 bp, Artificial
  probe
  misc_feature (1)..(25): SEQ ID NO: 5613; WAN024AUH; Start 516; Stop 540
ggattcaactattgtggatttgtct

SEQ ID NO: 416156 - DNA, 25 bp, Artificial
  probe
  misc_feature (1)..(25): SEQ ID NO: 5613; WAN024AUH; Start 515; Stop 539
aggattcaactattgtggatttgtc

SEQ ID NO: 416157 - DNA, 25 bp, Artificial
  probe
  misc_feature (1)..(25): SEQ ID NO: 5613; WAN024AUH; Start 355; Stop 379
agtcaccctatcacactggatttaa

SEQ ID NO: 416158 - DNA, 25 bp, Artificial
  probe
  misc_feature (1)..(25): SEQ ID NO: 5613; WAN024AUH; Start 513; Stop 537
acaggattcaactattgtggatttg

SEQ ID NO: 416159 - DNA, 25 bp, Artificial
  probe
  misc_feature (1)..(25): SEQ ID NO: 5613; WAN024AUH; Start 517; Stop 541
gattcaactattgtggatttgtctg

SEQ ID NO: 416160 - DNA, 25 bp, Artificial
  probe
  misc_feature (1)..(25): SEQ ID NO: 5613; WAN024AUH; Start 512; Stop 536
gacaggattcaactattgtggattt

SEQ ID NO: 416161 - DNA, 25 bp, Artificial
  probe
  misc_feature (1)..(25): SEQ ID NO: 5613; WAN024AUH; Start 364; Stop 388
atcacactggatttaattcgagaga

SEQ ID NO: 416162 - DNA, 25 bp, Artificial
  probe
  misc_feature (1)..(25): SEQ ID NO: 5613; WAN024AUH; Start 365; Stop 389
tcacactggatttaattcgagagac

SEQ ID NO: 416163 - DNA, 25 bp, Artificial
  probe
  misc_feature (1)..(25): SEQ ID NO: 5613; WAN024AUH; Start 360; Stop 384
ccctatcacactggatttaattcga

SEQ ID NO: 416164 - DNA, 25 bp, Artificial
  probe
  misc_feature (1)..(25): SEQ ID NO: 5614; WAN024GBS; Start 226; Stop 250
acctccatcattctcagttcttatt

SEQ ID NO: 416165 - DNA, 25 bp, Artificial
  probe
  misc_feature (1)..(25): SEQ ID NO: 5614; WAN024GBS; Start 224; Stop 248
ttacctccatcattctcagttctta

SEQ ID NO: 416166 - DNA, 25 bp, Artificial
  probe
  misc_feature (1)..(25): SEQ ID NO: 5614; WAN024GBS; Start 225; Stop 249
tacctccatcattctcagttcttat

SEQ ID NO: 416167 - DNA, 25 bp, Artificial
  probe
  misc_feature (1)..(25): SEQ ID NO: 5614; WAN024GBS; Start 83; Stop 107
aatccttcttccttgatacgacgac

SEQ ID NO: 416168 - DNA, 25 bp, Artificial
  probe
  misc_feature (1)..(25): SEQ ID NO: 5614; WAN024GBS; Start 47; Stop 71
gtggtcacactagaagttgttacag

SEQ ID NO: 416169 - DNA, 25 bp, Artificial
  probe
  misc_feature (1)..(25): SEQ ID NO: 5614; WAN024GBS; Start 82; Stop 106
caatccttcttccttgatacgacga

SEQ ID NO: 416170 - DNA, 25 bp, Artificial
  probe
  misc_feature (1)..(25): SEQ ID NO: 5614; WAN024GBS; Start 223; Stop 247
tttacctccatcattctcagttctt

SEQ ID NO: 416171 - DNA, 25 bp, Artificial
  probe
  misc_feature (1)..(25): SEQ ID NO: 5614; WAN024GBS; Start 222; Stop 246
atttacctccatcattctcagttct

SEQ ID NO: 416172 - DNA, 25 bp, Artificial
  probe
  misc_feature (1)..(25): SEQ ID NO: 5614; WAN024GBS; Start 72; Stop 96
ctgtaatctgcaatccttcttcctt

SEQ ID NO: 416173 - DNA, 25 bp, Artificial
  probe
  misc_feature (1)..(25): SEQ ID NO: 5614; WAN024GBS; Start 220; Stop 244
cgatttacctccatcattctcagtt

SEQ ID NO: 416174 - DNA, 25 bp, Artificial
  probe
  misc_feature (1)..(25): SEQ ID NO: 5614; WAN024GBS; Start 221; Stop 245
gatttacctccatcattctcagttc

SEQ ID NO: 416175 - DNA, 25 bp, Artificial
  probe
  misc_feature (1)..(25): SEQ ID NO: 5614; WAN024GBS; Start 76; Stop 100
aatctgcaatccttcttccttgata

SEQ ID NO: 416176 - DNA, 25 bp, Artificial
  probe
  misc_feature (1)..(25): SEQ ID NO: 5614; WAN024GBS; Start 75; Stop 99
taatctgcaatccttcttccttgat

SEQ ID NO: 416177 - DNA, 25 bp, Artificial
  probe
  misc_feature (1)..(25): SEQ ID NO: 5614; WAN024GBS; Start 7; Stop 31
aatagacttgagcgggatattaagg

SEQ ID NO: 416178 - DNA, 25 bp, Artificial
  probe
  misc_feature (1)..(25): SEQ ID NO: 5614; WAN024GBS; Start 77; Stop 101
atctgcaatccttcttccttgatac

SEQ ID NO: 416179 - DNA, 25 bp, Artificial
  probe
  misc_feature (1)..(25): SEQ ID NO: 5614; WAN024GBS; Start 74; Stop 98
gtaatctgcaatccttcttccttga

SEQ ID NO: 416180 - DNA, 25 bp, Artificial
  probe
  misc_feature (1)..(25): SEQ ID NO: 5614; WAN024GBS; Start 227; Stop 251
cctccatcattctcagttcttattt

SEQ ID NO: 416181 - DNA, 25 bp, Artificial
  probe
  misc_feature (1)..(25): SEQ ID NO: 5614; WAN024GBS; Start 73; Stop 97
tgtaatctgcaatccttcttccttg

SEQ ID NO: 416182 - DNA, 25 bp, Artificial
  probe
  misc_feature (1)..(25): SEQ ID NO: 5614; WAN024GBS; Start 6; Stop 30
caatagacttgagcgggatattaag

SEQ ID NO: 416183 - DNA, 25 bp, Artificial
  probe
  misc_feature (1)..(25): SEQ ID NO: 5614; WAN024GBS; Start 48; Stop 72
tggtcacactagaagttgttacagc

SEQ ID NO: 416184 - DNA, 25 bp, Artificial
  probe
  misc_feature (1)..(25): SEQ ID NO: 5614; WAN024GBS; Start 219; Stop 243
ccgatttacctccatcattctcagt

SEQ ID NO: 416185 - DNA, 25 bp, Artificial
  probe
  misc_feature (1)..(25): SEQ ID NO: 5614; WAN024GBS; Start 218; Stop 242
accgatttacctccatcattctcag

SEQ ID NO: 416186 - DNA, 25 bp, Artificial
  probe
  misc_feature (1)..(25): SEQ ID NO: 5614; WAN024GBS; Start 8; Stop 32
atagacttgagcgggatattaaggc

SEQ ID NO: 416187 - DNA, 25 bp, Artificial
  probe
  misc_feature (1)..(25): SEQ ID NO: 5614; WAN024GBS; Start 213; Stop 237
tttccaccgatttacctccatcatt

SEQ ID NO: 416188 - DNA, 25 bp, Artificial
  probe
  misc_feature (1)..(25): SEQ ID NO: 5614; WAN024GBS; Start 217; Stop 241
caccgatttacctccatcattctca

SEQ ID NO: 416189 - DNA, 25 bp, Artificial
  probe
  misc_feature (1)..(25): SEQ ID NO: 5614; WAN024GBS; Start 88; Stop 112
ttcttccttgatacgacgaccgatt

SEQ ID NO: 416190 - DNA, 25 bp, Artificial
  probe
  misc_feature (1)..(25): SEQ ID NO: 5614; WAN024GBS; Start 49; Stop 73
ggtcacactagaagttgttacagct

SEQ ID NO: 416191 - DNA, 25 bp, Artificial
  probe
  misc_feature (1)..(25): SEQ ID NO: 5614; WAN024GBS; Start 214; Stop 238
ttccaccgatttacctccatcattc

SEQ ID NO: 416192 - DNA, 25 bp, Artificial
  probe
  misc_feature (1)..(25): SEQ ID NO: 5614; WAN024GBS; Start 81; Stop 105
gcaatccttcttccttgatacgacg

SEQ ID NO: 416193 - DNA, 25 bp, Artificial
  probe
  misc_feature (1)..(25): SEQ ID NO: 5614; WAN024GBS; Start 71; Stop 95
gctgtaatctgcaatccttcttcct

SEQ ID NO: 416194 - DNA, 25 bp, Artificial
  probe
  misc_feature (1)..(25): SEQ ID NO: 5614; WAN024GBS; Start 70; Stop 94
agctgtaatctgcaatccttcttcc

SEQ ID NO: 416195 - DNA, 25 bp, Artificial
  probe
  misc_feature (1)..(25): SEQ ID NO: 5614; WAN024GBS; Start 84; Stop 108
atccttcttccttgatacgacgacc

SEQ ID NO: 416196 - DNA, 25 bp, Artificial
  probe
  misc_feature (1)..(25): SEQ ID NO: 5614; WAN024GBS; Start 79; Stop 103
ctgcaatccttcttccttgatacga

SEQ ID NO: 416197 - DNA, 25 bp, Artificial
  probe
  misc_feature (1)..(25): SEQ ID NO: 5615; WAN024G7N; Start 119; Stop 143
ttattgcgatacttgactggatgtt

SEQ ID NO: 416198 - DNA, 25 bp, Artificial
  probe
  misc_feature (1)..(25): SEQ ID NO: 5615; WAN024G7N; Start 120; Stop 144
tattgcgatacttgactggatgttc

SEQ ID NO: 416199 - DNA, 25 bp, Artificial
  probe
  misc_feature (1)..(25): SEQ ID NO: 5615; WAN024G7N; Start 118; Stop 142
cttattgcgatacttgactggatgt

SEQ ID NO: 416200 - DNA, 25 bp, Artificial
  probe
  misc_feature (1)..(25): SEQ ID NO: 5615; WAN024G7N; Start 117; Stop 141
ccttattgcgatacttgactggatg

SEQ ID NO: 416201 - DNA, 25 bp, Artificial
  probe
  misc_feature (1)..(25): SEQ ID NO: 5615; WAN024G7N; Start 177; Stop 201
caattccagcaatcttgtagagact

SEQ ID NO: 416202 - DNA, 25 bp, Artificial
  probe
  misc_feature (1)..(25): SEQ ID NO: 5615; WAN024G7N; Start 178; Stop 202
aattccagcaatcttgtagagactg

SEQ ID NO: 416203 - DNA, 25 bp, Artificial
  probe
  misc_feature (1)..(25): SEQ ID NO: 5615; WAN024G7N; Start 188; Stop 212
atcttgtagagactgtccttgactt

SEQ ID NO: 416204 - DNA, 25 bp, Artificial
  probe
  misc_feature (1)..(25): SEQ ID NO: 5615; WAN024G7N; Start 187; Stop 211
aatcttgtagagactgtccttgact

SEQ ID NO: 416205 - DNA, 25 bp, Artificial
  probe
  misc_feature (1)..(25): SEQ ID NO: 5615; WAN024G7N; Start 186; Stop 210
caatcttgtagagactgtccttgac

SEQ ID NO: 416206 - DNA, 25 bp, Artificial
  probe
  misc_feature (1)..(25): SEQ ID NO: 5615; WAN024G7N; Start 176; Stop 200
gcaattccagcaatcttgtagagac

SEQ ID NO: 416207 - DNA, 25 bp, Artificial
  probe
  misc_feature (1)..(25): SEQ ID NO: 5615; WAN024G7N; Start 184; Stop 208
agcaatcttgtagagactgtccttg

SEQ ID NO: 416208 - DNA, 25 bp, Artificial
  probe
  misc_feature (1)..(25): SEQ ID NO: 5615; WAN024G7N; Start 189; Stop 213
tcttgtagagactgtccttgacttg

SEQ ID NO: 416209 - DNA, 25 bp, Artificial
  probe
  misc_feature (1)..(25): SEQ ID NO: 5615; WAN024G7N; Start 179; Stop 203
attccagcaatcttgtagagactgt

SEQ ID NO: 416210 - DNA, 25 bp, Artificial
  probe
  misc_feature (1)..(25): SEQ ID NO: 5615; WAN024G7N; Start 185; Stop 209
gcaatcttgtagagactgtccttga

SEQ ID NO: 416211 - DNA, 25 bp, Artificial
  probe
  misc_feature (1)..(25): SEQ ID NO: 5615; WAN024G7N; Start 116; Stop 140
gccttattgcgatacttgactggat

SEQ ID NO: 416212 - DNA, 25 bp, Artificial
  probe
  misc_feature (1)..(25): SEQ ID NO: 5615; WAN024G7N; Start 183; Stop 207
cagcaatcttgtagagactgtcctt

SEQ ID NO: 416213 - DNA, 25 bp, Artificial
  probe
  misc_feature (1)..(25): SEQ ID NO: 5615; WAN024G7N; Start 180; Stop 204
ttccagcaatcttgtagagactgtc

SEQ ID NO: 416214 - DNA, 25 bp, Artificial
  probe
  misc_feature (1)..(25): SEQ ID NO: 5615; WAN024G7N; Start 193; Stop 217
gtagagactgtccttgacttgcttg

SEQ ID NO: 416215 - DNA, 25 bp, Artificial
  probe
  misc_feature (1)..(25): SEQ ID NO: 5615; WAN024G7N; Start 190; Stop 214
cttgtagagactgtccttgacttgc

SEQ ID NO: 416216 - DNA, 25 bp, Artificial
  probe
  misc_feature (1)..(25): SEQ ID NO: 5615; WAN024G7N; Start 17; Stop 41
tcctggataaagaaatcttcaaggg

SEQ ID NO: 416217 - DNA, 25 bp, Artificial
  probe
  misc_feature (1)..(25): SEQ ID NO: 5615; WAN024G7N; Start 70; Stop 94
aaatcctgtttccaagacaccattc

SEQ ID NO: 416218 - DNA, 25 bp, Artificial
  probe
  misc_feature (1)..(25): SEQ ID NO: 5615; WAN024G7N; Start 222; Stop 246
taaacttgagctgttctggataaga

SEQ ID NO: 416219 - DNA, 25 bp, Artificial
  probe
  misc_feature (1)..(25): SEQ ID NO: 5615; WAN024G7N; Start 192; Stop 216
tgtagagactgtccttgacttgctt

SEQ ID NO: 416220 - DNA, 25 bp, Artificial
  probe
  misc_feature (1)..(25): SEQ ID NO: 5615; WAN024G7N; Start 191; Stop 215
ttgtagagactgtccttgacttgct

SEQ ID NO: 416221 - DNA, 25 bp, Artificial
  probe
  misc_feature (1)..(25): SEQ ID NO: 5615; WAN024G7N; Start 121; Stop 145
attgcgatacttgactggatgttcc

SEQ ID NO: 416222 - DNA, 25 bp, Artificial
  probe
  misc_feature (1)..(25): SEQ ID NO: 5615; WAN024G7N; Start 221; Stop 245
ttaaacttgagctgttctggataag

SEQ ID NO: 416223 - DNA, 25 bp, Artificial
  probe
  misc_feature (1)..(25): SEQ ID NO: 5615; WAN024G7N; Start 146; Stop 170
ataccaagcgtttcagcaacttcta

SEQ ID NO: 416224 - DNA, 25 bp, Artificial
  probe
  misc_feature (1)..(25): SEQ ID NO: 5615; WAN024G7N; Start 220; Stop 244
tttaaacttgagctgttctggataa

SEQ ID NO: 416225 - DNA, 25 bp, Artificial
  probe
  misc_feature (1)..(25): SEQ ID NO: 5615; WAN024G7N; Start 162; Stop 186
caacttctacatctgcaattccagc

SEQ ID NO: 416226 - DNA, 25 bp, Artificial
  probe
  misc_feature (1)..(25): SEQ ID NO: 5615; WAN024G7N; Start 16; Stop 40
atcctggataaagaaatcttcaagg

SEQ ID NO: 416227 - DNA, 25 bp, Artificial
  probe
  misc_feature (1)..(25): SEQ ID NO: 5615; WAN024G7N; Start 151; Stop 175
aagcgtttcagcaacttctacatct

SEQ ID NO: 416228 - DNA, 25 bp, Artificial
  probe
  misc_feature (1)..(25): SEQ ID NO: 5615; WAN024G7N; Start 150; Stop 174
caagcgtttcagcaacttctacatc

SEQ ID NO: 416229 - DNA, 25 bp, Artificial
  probe
  misc_feature (1)..(25): SEQ ID NO: 5615; WAN024G7N; Start 71; Stop 95
aatcctgtttccaagacaccattca

SEQ ID NO: 416230 - DNA, 25 bp, Artificial
  probe
  misc_feature (1)..(25): SEQ ID NO: 5616; WAN024FOO; Start 297; Stop 321
atgtattattcatctgaccacctgg

SEQ ID NO: 416231 - DNA, 25 bp, Artificial
  probe
  misc_feature (1)..(25): SEQ ID NO: 5616; WAN024FOO; Start 242; Stop 266
tcagccaattcaggtccactaatat

SEQ ID NO: 416232 - DNA, 25 bp, Artificial
  probe
  misc_feature (1)..(25): SEQ ID NO: 5616; WAN024FOO; Start 241; Stop 265
ttcagccaattcaggtccactaata

SEQ ID NO: 416233 - DNA, 25 bp, Artificial
  probe
  misc_feature (1)..(25): SEQ ID NO: 5616; WAN024FOO; Start 243; Stop 267
cagccaattcaggtccactaatatt

SEQ ID NO: 416234 - DNA, 25 bp, Artificial
  probe
  misc_feature (1)..(25): SEQ ID NO: 5616; WAN024FOO; Start 54; Stop 78
tgttcagttcttcttctccaggtac

SEQ ID NO: 416235 - DNA, 25 bp, Artificial
  probe
  misc_feature (1)..(25): SEQ ID NO: 5616; WAN024FOO; Start 56; Stop 80
ttcagttcttcttctccaggtactc

SEQ ID NO: 416236 - DNA, 25 bp, Artificial
  probe
  misc_feature (1)..(25): SEQ ID NO: 5616; WAN024FOO; Start 299; Stop 323
gtattattcatctgaccacctggca

SEQ ID NO: 416237 - DNA, 25 bp, Artificial
  probe
  misc_feature (1)..(25): SEQ ID NO: 5616; WAN024FOO; Start 298; Stop 322
tgtattattcatctgaccacctggc

SEQ ID NO: 416238 - DNA, 25 bp, Artificial
  probe
  misc_feature (1)..(25): SEQ ID NO: 5616; WAN024FOO; Start 53; Stop 77
ctgttcagttcttcttctccaggta

SEQ ID NO: 416239 - DNA, 25 bp, Artificial
  probe
  misc_feature (1)..(25): SEQ ID NO: 5616; WAN024FOO; Start 55; Stop 79
gttcagttcttcttctccaggtact

SEQ ID NO: 416240 - DNA, 25 bp, Artificial
  probe
  misc_feature (1)..(25): SEQ ID NO: 5616; WAN024FOO; Start 93; Stop 117
gtttagaaccagttgctacgataac

SEQ ID NO: 416241 - DNA, 25 bp, Artificial
  probe
  misc_feature (1)..(25): SEQ ID NO: 5616; WAN024FOO; Start 92; Stop 116
tgtttagaaccagttgctacgataa

SEQ ID NO: 416242 - DNA, 25 bp, Artificial
  probe
  misc_feature (1)..(25): SEQ ID NO: 5616; WAN024FOO; Start 300; Stop 324
tattattcatctgaccacctggcag

SEQ ID NO: 416243 - DNA, 25 bp, Artificial
  probe
  misc_feature (1)..(25): SEQ ID NO: 5616; WAN024FOO; Start 91; Stop 115
gtgtttagaaccagttgctacgata

SEQ ID NO: 416244 - DNA, 25 bp, Artificial
  probe
  misc_feature (1)..(25): SEQ ID NO: 5616; WAN024FOO; Start 137; Stop 161
tggtcatcagtcatcactttcttaa

SEQ ID NO: 416245 - DNA, 25 bp, Artificial
  probe
  misc_feature (1)..(25): SEQ ID NO: 5616; WAN024FOO; Start 136; Stop 160
ttggtcatcagtcatcactttctta

SEQ ID NO: 416246 - DNA, 25 bp, Artificial
  probe
  misc_feature (1)..(25): SEQ ID NO: 5616; WAN024FOO; Start 130; Stop 154
atatgtttggtcatcagtcatcact

SEQ ID NO: 416247 - DNA, 25 bp, Artificial
  probe
  misc_feature (1)..(25): SEQ ID NO: 5616; WAN024FOO; Start 131; Stop 155
tatgtttggtcatcagtcatcactt

SEQ ID NO: 416248 - DNA, 25 bp, Artificial
  probe
  misc_feature (1)..(25): SEQ ID NO: 5616; WAN024FOO; Start 135; Stop 159
tttggtcatcagtcatcactttctt

SEQ ID NO: 416249 - DNA, 25 bp, Artificial
  probe
  misc_feature (1)..(25): SEQ ID NO: 5616; WAN024FOO; Start 132; Stop 156
atgtttggtcatcagtcatcacttt

SEQ ID NO: 416250 - DNA, 25 bp, Artificial
  probe
  misc_feature (1)..(25): SEQ ID NO: 5616; WAN024FOO; Start 138; Stop 162
ggtcatcagtcatcactttcttaaa

SEQ ID NO: 416251 - DNA, 25 bp, Artificial
  probe
  misc_feature (1)..(25): SEQ ID NO: 5616; WAN024FOO; Start 244; Stop 268
agccaattcaggtccactaatatta

SEQ ID NO: 416252 - DNA, 25 bp, Artificial
  probe
  misc_feature (1)..(25): SEQ ID NO: 5616; WAN024FOO; Start 134; Stop 158
gtttggtcatcagtcatcactttct

SEQ ID NO: 416253 - DNA, 25 bp, Artificial
  probe
  misc_feature (1)..(25): SEQ ID NO: 5616; WAN024FOO; Start 133; Stop 157
tgtttggtcatcagtcatcactttc

SEQ ID NO: 416254 - DNA, 25 bp, Artificial
  probe
  misc_feature (1)..(25): SEQ ID NO: 5616; WAN024FOO; Start 57; Stop 81
tcagttcttcttctccaggtactcc

SEQ ID NO: 416255 - DNA, 25 bp, Artificial
  probe
  misc_feature (1)..(25): SEQ ID NO: 5616; WAN024FOO; Start 196; Stop 220
ataaatgtgctcaacaccaagattt

SEQ ID NO: 416256 - DNA, 25 bp, Artificial
  probe
  misc_feature (1)..(25): SEQ ID NO: 5616; WAN024FOO; Start 195; Stop 219
cataaatgtgctcaacaccaagatt

SEQ ID NO: 416257 - DNA, 25 bp, Artificial
  probe
  misc_feature (1)..(25): SEQ ID NO: 5616; WAN024FOO; Start 189; Stop 213
cataaccataaatgtgctcaacacc

SEQ ID NO: 416258 - DNA, 25 bp, Artificial
  probe
  misc_feature (1)..(25): SEQ ID NO: 5616; WAN024FOO; Start 190; Stop 214
ataaccataaatgtgctcaacacca

SEQ ID NO: 416259 - DNA, 25 bp, Artificial
  probe
  misc_feature (1)..(25): SEQ ID NO: 5616; WAN024FOO; Start 191; Stop 215
taaccataaatgtgctcaacaccaa

SEQ ID NO: 416260 - DNA, 25 bp, Artificial
  probe
  misc_feature (1)..(25): SEQ ID NO: 5616; WAN024FOO; Start 21; Stop 45
catcacacacagcacagtaagaaac

SEQ ID NO: 416261 - DNA, 25 bp, Artificial
  probe
  misc_feature (1)..(25): SEQ ID NO: 5616; WAN024FOO; Start 240; Stop 264
tttcagccaattcaggtccactaat

SEQ ID NO: 416262 - DNA, 25 bp, Artificial
  probe
  misc_feature (1)..(25): SEQ ID NO: 5616; WAN024FOO; Start 296; Stop 320
gatgtattattcatctgaccacctg

SEQ ID NO: 416263 - DNA, 25 bp, Artificial
  probe
  misc_feature (1)..(25): SEQ ID NO: 5617; WAN024EYZ; Start 216; Stop 240
tgaggttggtaagattgttaaggaa

SEQ ID NO: 416264 - DNA, 25 bp, Artificial
  probe
  misc_feature (1)..(25): SEQ ID NO: 5617; WAN024EYZ; Start 215; Stop 239
ctgaggttggtaagattgttaagga

SEQ ID NO: 416265 - DNA, 25 bp, Artificial
  probe
  misc_feature (1)..(25): SEQ ID NO: 5617; WAN024EYZ; Start 214; Stop 238
tctgaggttggtaagattgttaagg

SEQ ID NO: 416266 - DNA, 25 bp, Artificial
  probe
  misc_feature (1)..(25): SEQ ID NO: 5617; WAN024EYZ; Start 208; Stop 232
aaggattctgaggttggtaagattg

SEQ ID NO: 416267 - DNA, 25 bp, Artificial
  probe
  misc_feature (1)..(25): SEQ ID NO: 5617; WAN024EYZ; Start 210; Stop 234
ggattctgaggttggtaagattgtt

SEQ ID NO: 416268 - DNA, 25 bp, Artificial
  probe
  misc_feature (1)..(25): SEQ ID NO: 5617; WAN024EYZ; Start 207; Stop 231
taaggattctgaggttggtaagatt

SEQ ID NO: 416269 - DNA, 25 bp, Artificial
  probe
  misc_feature (1)..(25): SEQ ID NO: 5617; WAN024EYZ; Start 205; Stop 229
aataaggattctgaggttggtaaga

SEQ ID NO: 416270 - DNA, 25 bp, Artificial
  probe
  misc_feature (1)..(25): SEQ ID NO: 5617; WAN024EYZ; Start 206; Stop 230
ataaggattctgaggttggtaagat

SEQ ID NO: 416271 - DNA, 25 bp, Artificial
  probe
  misc_feature (1)..(25): SEQ ID NO: 5617; WAN024EYZ; Start 213; Stop 237
ttctgaggttggtaagattgttaag

SEQ ID NO: 416272 - DNA, 25 bp, Artificial
  probe
  misc_feature (1)..(25): SEQ ID NO: 5617; WAN024EYZ; Start 209; Stop 233
aggattctgaggttggtaagattgt

SEQ ID NO: 416273 - DNA, 25 bp, Artificial
  probe
  misc_feature (1)..(25): SEQ ID NO: 5617; WAN024EYZ; Start 211; Stop 235
gattctgaggttggtaagattgtta

SEQ ID NO: 416274 - DNA, 25 bp, Artificial
  probe
  misc_feature (1)..(25): SEQ ID NO: 5617; WAN024EYZ; Start 212; Stop 236
attctgaggttggtaagattgttaa

SEQ ID NO: 416275 - DNA, 25 bp, Artificial
  probe
  misc_feature (1)..(25): SEQ ID NO: 5617; WAN024EYZ; Start 249; Stop 273
tctatctggagatattactgaagcc

SEQ ID NO: 416276 - DNA, 25 bp, Artificial
  probe
  misc_feature (1)..(25): SEQ ID NO: 5617; WAN024EYZ; Start 3; Stop 27
ggtcagaaattattggaaggctaaa

SEQ ID NO: 416277 - DNA, 25 bp, Artificial
  probe
  misc_feature (1)..(25): SEQ ID NO: 5617; WAN024EYZ; Start 217; Stop 241
gaggttggtaagattgttaaggaaa

SEQ ID NO: 416278 - DNA, 25 bp, Artificial
  probe
  misc_feature (1)..(25): SEQ ID NO: 5617; WAN024EYZ; Start 250; Stop 274
ctatctggagatattactgaagcca

SEQ ID NO: 416279 - DNA, 25 bp, Artificial
  probe
  misc_feature (1)..(25): SEQ ID NO: 5617; WAN024EYZ; Start 204; Stop 228
aaataaggattctgaggttggtaag

SEQ ID NO: 416280 - DNA, 25 bp, Artificial
  probe
  misc_feature (1)..(25): SEQ ID NO: 5617; WAN024EYZ; Start 251; Stop 275
tatctggagatattactgaagccaa

SEQ ID NO: 416281 - DNA, 25 bp, Artificial
  probe
  misc_feature (1)..(25): SEQ ID NO: 5617; WAN024EYZ; Start 258; Stop 282
agatattactgaagccaaactcacc

SEQ ID NO: 416282 - DNA, 25 bp, Artificial
  probe
  misc_feature (1)..(25): SEQ ID NO: 5617; WAN024EYZ; Start 248; Stop 272
ctctatctggagatattactgaagc

SEQ ID NO: 416283 - DNA, 25 bp, Artificial
  probe
  misc_feature (1)..(25): SEQ ID NO: 5617; WAN024EYZ; Start 247; Stop 271
gctctatctggagatattactgaag

SEQ ID NO: 416284 - DNA, 25 bp, Artificial
  probe
  misc_feature (1)..(25): SEQ ID NO: 5617; WAN024EYZ; Start 256; Stop 280
ggagatattactgaagccaaactca

SEQ ID NO: 416285 - DNA, 25 bp, Artificial
  probe
  misc_feature (1)..(25): SEQ ID NO: 5617; WAN024EYZ; Start 257; Stop 281
gagatattactgaagccaaactcac

SEQ ID NO: 416286 - DNA, 25 bp, Artificial
  probe
  misc_feature (1)..(25): SEQ ID NO: 5617; WAN024EYZ; Start 246; Stop 270
agctctatctggagatattactgaa

SEQ ID NO: 416287 - DNA, 25 bp, Artificial
  probe
  misc_feature (1)..(25): SEQ ID NO: 5617; WAN024EYZ; Start 469; Stop 493
gaaagtgtggttcgtgacaatagta

SEQ ID NO: 416288 - DNA, 25 bp, Artificial
  probe
  misc_feature (1)..(25): SEQ ID NO: 5617; WAN024EYZ; Start 466; Stop 490
aatgaaagtgtggttcgtgacaata

SEQ ID NO: 416289 - DNA, 25 bp, Artificial
  probe
  misc_feature (1)..(25): SEQ ID NO: 5617; WAN024EYZ; Start 259; Stop 283
gatattactgaagccaaactcaccg

SEQ ID NO: 416290 - DNA, 25 bp, Artificial
  probe
  misc_feature (1)..(25): SEQ ID NO: 5617; WAN024EYZ; Start 467; Stop 491
atgaaagtgtggttcgtgacaatag

SEQ ID NO: 416291 - DNA, 25 bp, Artificial
  probe
  misc_feature (1)..(25): SEQ ID NO: 5617; WAN024EYZ; Start 260; Stop 284
atattactgaagccaaactcaccga

SEQ ID NO: 416292 - DNA, 25 bp, Artificial
  probe
  misc_feature (1)..(25): SEQ ID NO: 5617; WAN024EYZ; Start 255; Stop 279
tggagatattactgaagccaaactc

SEQ ID NO: 416293 - DNA, 25 bp, Artificial
  probe
  misc_feature (1)..(25): SEQ ID NO: 5617; WAN024EYZ; Start 254; Stop 278
ctggagatattactgaagccaaact

SEQ ID NO: 416294 - DNA, 25 bp, Artificial
  probe
  misc_feature (1)..(25): SEQ ID NO: 5617; WAN024EYZ; Start 253; Stop 277
tctggagatattactgaagccaaac

SEQ ID NO: 416295 - DNA, 25 bp, Artificial
  probe
  misc_feature (1)..(25): SEQ ID NO: 5617; WAN024EYZ; Start 261; Stop 285
tattactgaagccaaactcaccgaa

SEQ ID NO: 416296 - DNA, 25 bp, Artificial
  probe
  misc_feature (1)..(25): SEQ ID NO: 5618; WAN024D58; Start 184; Stop 208
catgatacgcttagtctgatgacag

SEQ ID NO: 416297 - DNA, 25 bp, Artificial
  probe
  misc_feature (1)..(25): SEQ ID NO: 5618; WAN024D58; Start 235; Stop 259
cttccgaatctggtaaagaatctcc

SEQ ID NO: 416298 - DNA, 25 bp, Artificial
  probe
  misc_feature (1)..(25): SEQ ID NO: 5618; WAN024D58; Start 234; Stop 258
ccttccgaatctggtaaagaatctc

SEQ ID NO: 416299 - DNA, 25 bp, Artificial
  probe
  misc_feature (1)..(25): SEQ ID NO: 5618; WAN024D58; Start 248; Stop 272
taaagaatctccagacaagcctcac

SEQ ID NO: 416300 - DNA, 25 bp, Artificial
  probe
  misc_feature (1)..(25): SEQ ID NO: 5618; WAN024D58; Start 247; Stop 271
gtaaagaatctccagacaagcctca

SEQ ID NO: 416301 - DNA, 25 bp, Artificial
  probe
  misc_feature (1)..(25): SEQ ID NO: 5618; WAN024D58; Start 231; Stop 255
aagccttccgaatctggtaaagaat

SEQ ID NO: 416302 - DNA, 25 bp, Artificial
  probe
  misc_feature (1)..(25): SEQ ID NO: 5618; WAN024D58; Start 145; Stop 169
atactccaactggtttccatacttt

SEQ ID NO: 416303 - DNA, 25 bp, Artificial
  probe
  misc_feature (1)..(25): SEQ ID NO: 5618; WAN024D58; Start 144; Stop 168
gatactccaactggtttccatactt

SEQ ID NO: 416304 - DNA, 25 bp, Artificial
  probe
  misc_feature (1)..(25): SEQ ID NO: 5618; WAN024D58; Start 306; Stop 330
ccatataaacgtgaggatagaggtc

SEQ ID NO: 416305 - DNA, 25 bp, Artificial
  probe
  misc_feature (1)..(25): SEQ ID NO: 5618; WAN024D58; Start 143; Stop 167
agatactccaactggtttccatact

SEQ ID NO: 416306 - DNA, 25 bp, Artificial
  probe
  misc_feature (1)..(25): SEQ ID NO: 5618; WAN024D58; Start 142; Stop 166
cagatactccaactggtttccatac

SEQ ID NO: 416307 - DNA, 25 bp, Artificial
  probe
  misc_feature (1)..(25): SEQ ID NO: 5618; WAN024D58; Start 233; Stop 257
gccttccgaatctggtaaagaatct

SEQ ID NO: 416308 - DNA, 25 bp, Artificial
  probe
  misc_feature (1)..(25): SEQ ID NO: 5618; WAN024D58; Start 232; Stop 256
agccttccgaatctggtaaagaatc

SEQ ID NO: 416309 - DNA, 25 bp, Artificial
  probe
  misc_feature (1)..(25): SEQ ID NO: 5618; WAN024D58; Start 141; Stop 165
acagatactccaactggtttccata

SEQ ID NO: 416310 - DNA, 25 bp, Artificial
  probe
  misc_feature (1)..(25): SEQ ID NO: 5618; WAN024D58; Start 246; Stop 270
ggtaaagaatctccagacaagcctc

SEQ ID NO: 416311 - DNA, 25 bp, Artificial
  probe
  misc_feature (1)..(25): SEQ ID NO: 5618; WAN024D58; Start 227; Stop 251
aaacaagccttccgaatctggtaaa

SEQ ID NO: 416312 - DNA, 25 bp, Artificial
  probe
  misc_feature (1)..(25): SEQ ID NO: 5618; WAN024D58; Start 236; Stop 260
ttccgaatctggtaaagaatctcca

SEQ ID NO: 416313 - DNA, 25 bp, Artificial
  probe
  misc_feature (1)..(25): SEQ ID NO: 5618; WAN024D58; Start 177; Stop 201
cttgagtcatgatacgcttagtctg

SEQ ID NO: 416314 - DNA, 25 bp, Artificial
  probe
  misc_feature (1)..(25): SEQ ID NO: 5618; WAN024D58; Start 70; Stop 94
tttcatcaagacggcataccacttt

SEQ ID NO: 416315 - DNA, 25 bp, Artificial
  probe
  misc_feature (1)..(25): SEQ ID NO: 5618; WAN024D58; Start 529; Stop 553
aggcttagcagttcctttcctattt

SEQ ID NO: 416316 - DNA, 25 bp, Artificial
  probe
  misc_feature (1)..(25): SEQ ID NO: 5618; WAN024D58; Start 307; Stop 331
catataaacgtgaggatagaggtca

SEQ ID NO: 416317 - DNA, 25 bp, Artificial
  probe
  misc_feature (1)..(25): SEQ ID NO: 5618; WAN024D58; Start 175; Stop 199
aacttgagtcatgatacgcttagtc

SEQ ID NO: 416318 - DNA, 25 bp, Artificial
  probe
  misc_feature (1)..(25): SEQ ID NO: 5618; WAN024D58; Start 174; Stop 198
gaacttgagtcatgatacgcttagt

SEQ ID NO: 416319 - DNA, 25 bp, Artificial
  probe
  misc_feature (1)..(25): SEQ ID NO: 5618; WAN024D58; Start 173; Stop 197
tgaacttgagtcatgatacgcttag

SEQ ID NO: 416320 - DNA, 25 bp, Artificial
  probe
  misc_feature (1)..(25): SEQ ID NO: 5618; WAN024D58; Start 172; Stop 196
ctgaacttgagtcatgatacgctta

SEQ ID NO: 416321 - DNA, 25 bp, Artificial
  probe
  misc_feature (1)..(25): SEQ ID NO: 5618; WAN024D58; Start 180; Stop 204
gagtcatgatacgcttagtctgatg

SEQ ID NO: 416322 - DNA, 25 bp, Artificial
  probe
  misc_feature (1)..(25): SEQ ID NO: 5618; WAN024D58; Start 364; Stop 388
attatcagcagtgatggacacagtc

SEQ ID NO: 416323 - DNA, 25 bp, Artificial
  probe
  misc_feature (1)..(25): SEQ ID NO: 5618; WAN024D58; Start 230; Stop 254
caagccttccgaatctggtaaagaa

SEQ ID NO: 416324 - DNA, 25 bp, Artificial
  probe
  misc_feature (1)..(25): SEQ ID NO: 5618; WAN024D58; Start 179; Stop 203
tgagtcatgatacgcttagtctgat

SEQ ID NO: 416325 - DNA, 25 bp, Artificial
  probe
  misc_feature (1)..(25): SEQ ID NO: 5618; WAN024D58; Start 187; Stop 211
gatacgcttagtctgatgacagata

SEQ ID NO: 416326 - DNA, 25 bp, Artificial
  probe
  misc_feature (1)..(25): SEQ ID NO: 5618; WAN024D58; Start 297; Stop 321
tcatgctttccatataaacgtgagg

SEQ ID NO: 416327 - DNA, 25 bp, Artificial
  probe
  misc_feature (1)..(25): SEQ ID NO: 5618; WAN024D58; Start 295; Stop 319
cctcatgctttccatataaacgtga

SEQ ID NO: 416328 - DNA, 25 bp, Artificial
  probe
  misc_feature (1)..(25): SEQ ID NO: 5618; WAN024D58; Start 178; Stop 202
ttgagtcatgatacgcttagtctga

SEQ ID NO: 416329 - DNA, 25 bp, Artificial
  probe
  misc_feature (1)..(25): SEQ ID NO: 5619; WAN024FG2; Start 131; Stop 155
gtaatcatcttaacctcaccttgga

SEQ ID NO: 416330 - DNA, 25 bp, Artificial
  probe
  misc_feature (1)..(25): SEQ ID NO: 5619; WAN024FG2; Start 134; Stop 158
atcatcttaacctcaccttggatac

SEQ ID NO: 416331 - DNA, 25 bp, Artificial
  probe
  misc_feature (1)..(25): SEQ ID NO: 5619; WAN024FG2; Start 133; Stop 157
aatcatcttaacctcaccttggata

SEQ ID NO: 416332 - DNA, 25 bp, Artificial
  probe
  misc_feature (1)..(25): SEQ ID NO: 5619; WAN024FG2; Start 132; Stop 156
taatcatcttaacctcaccttggat

SEQ ID NO: 416333 - DNA, 25 bp, Artificial
  probe
  misc_feature (1)..(25): SEQ ID NO: 5619; WAN024FG2; Start 267; Stop 291
cctcgctagtattaccaatctcaat

SEQ ID NO: 416334 - DNA, 25 bp, Artificial
  probe
  misc_feature (1)..(25): SEQ ID NO: 5619; WAN024FG2; Start 137; Stop 161
atcttaacctcaccttggatacgat

SEQ ID NO: 416335 - DNA, 25 bp, Artificial
  probe
  misc_feature (1)..(25): SEQ ID NO: 5619; WAN024FG2; Start 130; Stop 154
cgtaatcatcttaacctcaccttgg

SEQ ID NO: 416336 - DNA, 25 bp, Artificial
  probe
  misc_feature (1)..(25): SEQ ID NO: 5619; WAN024FG2; Start 129; Stop 153
ccgtaatcatcttaacctcaccttg

SEQ ID NO: 416337 - DNA, 25 bp, Artificial
  probe
  misc_feature (1)..(25): SEQ ID NO: 5619; WAN024FG2; Start 270; Stop 294
cgctagtattaccaatctcaatcac

SEQ ID NO: 416338 - DNA, 25 bp, Artificial
  probe
  misc_feature (1)..(25): SEQ ID NO: 5619; WAN024FG2; Start 269; Stop 293
tcgctagtattaccaatctcaatca

SEQ ID NO: 416339 - DNA, 25 bp, Artificial
  probe
  misc_feature (1)..(25): SEQ ID NO: 5619; WAN024FG2; Start 271; Stop 295
gctagtattaccaatctcaatcacc

SEQ ID NO: 416340 - DNA, 25 bp, Artificial
  probe
  misc_feature (1)..(25): SEQ ID NO: 5619; WAN024FG2; Start 268; Stop 292
ctcgctagtattaccaatctcaatc

SEQ ID NO: 416341 - DNA, 25 bp, Artificial
  probe
  misc_feature (1)..(25): SEQ ID NO: 5619; WAN024FG2; Start 138; Stop 162
tcttaacctcaccttggatacgatg

SEQ ID NO: 416342 - DNA, 25 bp, Artificial
  probe
  misc_feature (1)..(25): SEQ ID NO: 5619; WAN024FG2; Start 136; Stop 160
catcttaacctcaccttggatacga

SEQ ID NO: 416343 - DNA, 25 bp, Artificial
  probe
  misc_feature (1)..(25): SEQ ID NO: 5619; WAN024FG2; Start 135; Stop 159
tcatcttaacctcaccttggatacg

SEQ ID NO: 416344 - DNA, 25 bp, Artificial
  probe
  misc_feature (1)..(25): SEQ ID NO: 5619; WAN024FG2; Start 266; Stop 290
gcctcgctagtattaccaatctcaa

SEQ ID NO: 416345 - DNA, 25 bp, Artificial
  probe
  misc_feature (1)..(25): SEQ ID NO: 5619; WAN024FG2; Start 139; Stop 163
cttaacctcaccttggatacgatgg

SEQ ID NO: 416346 - DNA, 25 bp, Artificial
  probe
  misc_feature (1)..(25): SEQ ID NO: 5619; WAN024FG2; Start 273; Stop 297
tagtattaccaatctcaatcacccg

SEQ ID NO: 416347 - DNA, 25 bp, Artificial
  probe
  misc_feature (1)..(25): SEQ ID NO: 5619; WAN024FG2; Start 81; Stop 105
tataaatcgcaaactgggtaatggg

SEQ ID NO: 416348 - DNA, 25 bp, Artificial
  probe
  misc_feature (1)..(25): SEQ ID NO: 5619; WAN024FG2; Start 276; Stop 300
tattaccaatctcaatcacccgtct

SEQ ID NO: 416349 - DNA, 25 bp, Artificial
  probe
  misc_feature (1)..(25): SEQ ID NO: 5619; WAN024FG2; Start 275; Stop 299
gtattaccaatctcaatcacccgtc

SEQ ID NO: 416350 - DNA, 25 bp, Artificial
  probe
  misc_feature (1)..(25): SEQ ID NO: 5619; WAN024FG2; Start 274; Stop 298
agtattaccaatctcaatcacccgt

SEQ ID NO: 416351 - DNA, 25 bp, Artificial
  probe
  misc_feature (1)..(25): SEQ ID NO: 5619; WAN024FG2; Start 263; Stop 287
taagcctcgctagtattaccaatct

SEQ ID NO: 416352 - DNA, 25 bp, Artificial
  probe
  misc_feature (1)..(25): SEQ ID NO: 5619; WAN024FG2; Start 262; Stop 286
gtaagcctcgctagtattaccaatc

SEQ ID NO: 416353 - DNA, 25 bp, Artificial
  probe
  misc_feature (1)..(25): SEQ ID NO: 5619; WAN024FG2; Start 9; Stop 33
taacaaatacattcatggcttcgtg

SEQ ID NO: 416354 - DNA, 25 bp, Artificial
  probe
  misc_feature (1)..(25): SEQ ID NO: 5619; WAN024FG2; Start 8; Stop 32
ttaacaaatacattcatggcttcgt

SEQ ID NO: 416355 - DNA, 25 bp, Artificial
  probe
  misc_feature (1)..(25): SEQ ID NO: 5619; WAN024FG2; Start 272; Stop 296
ctagtattaccaatctcaatcaccc

SEQ ID NO: 416356 - DNA, 25 bp, Artificial
  probe
  misc_feature (1)..(25): SEQ ID NO: 5619; WAN024FG2; Start 80; Stop 104
ttataaatcgcaaactgggtaatgg

SEQ ID NO: 416357 - DNA, 25 bp, Artificial
  probe
  misc_feature (1)..(25): SEQ ID NO: 5619; WAN024FG2; Start 128; Stop 152
cccgtaatcatcttaacctcacctt

SEQ ID NO: 416358 - DNA, 25 bp, Artificial
  probe
  misc_feature (1)..(25): SEQ ID NO: 5619; WAN024FG2; Start 90; Stop 114
caaactgggtaatgggatagcaaac

SEQ ID NO: 416359 - DNA, 25 bp, Artificial
  probe
  misc_feature (1)..(25): SEQ ID NO: 5619; WAN024FG2; Start 3; Stop 27
ggtcattaacaaatacattcatggc

SEQ ID NO: 416360 - DNA, 25 bp, Artificial
  probe
  misc_feature (1)..(25): SEQ ID NO: 5619; WAN024FG2; Start 7; Stop 31
attaacaaatacattcatggcttcg

SEQ ID NO: 416361 - DNA, 25 bp, Artificial
  probe
  misc_feature (1)..(25): SEQ ID NO: 5619; WAN024FG2; Start 92; Stop 116
aactgggtaatgggatagcaaacat

SEQ ID NO: 416362 - DNA, 25 bp, Artificial
  probe
  misc_feature (1)..(25): SEQ ID NO: 5620; WAN024FBU; Start 48; Stop 72
caacaatacaaccattctcatcctc

SEQ ID NO: 416363 - DNA, 25 bp, Artificial
  probe
  misc_feature (1)..(25): SEQ ID NO: 5620; WAN024FBU; Start 46; Stop 70
ctcaacaatacaaccattctcatcc

SEQ ID NO: 416364 - DNA, 25 bp, Artificial
  probe
  misc_feature (1)..(25): SEQ ID NO: 5620; WAN024FBU; Start 49; Stop 73
aacaatacaaccattctcatcctca

SEQ ID NO: 416365 - DNA, 25 bp, Artificial
  probe
  misc_feature (1)..(25): SEQ ID NO: 5620; WAN024FBU; Start 47; Stop 71
tcaacaatacaaccattctcatcct

SEQ ID NO: 416366 - DNA, 25 bp, Artificial
  probe
  misc_feature (1)..(25): SEQ ID NO: 5620; WAN024FBU; Start 45; Stop 69
gctcaacaatacaaccattctcatc

SEQ ID NO: 416367 - DNA, 25 bp, Artificial
  probe
  misc_feature (1)..(25): SEQ ID NO: 5620; WAN024FBU; Start 50; Stop 74
acaatacaaccattctcatcctcac

SEQ ID NO: 416368 - DNA, 25 bp, Artificial
  probe
  misc_feature (1)..(25): SEQ ID NO: 5620; WAN024FBU; Start 44; Stop 68
tgctcaacaatacaaccattctcat

SEQ ID NO: 416369 - DNA, 25 bp, Artificial
  probe
  misc_feature (1)..(25): SEQ ID NO: 5620; WAN024FBU; Start 43; Stop 67
atgctcaacaatacaaccattctca

SEQ ID NO: 416370 - DNA, 25 bp, Artificial
  probe
  misc_feature (1)..(25): SEQ ID NO: 5620; WAN024FBU; Start 103; Stop 127
ttctccaccattcagatattgatga

SEQ ID NO: 416371 - DNA, 25 bp, Artificial
  probe
  misc_feature (1)..(25): SEQ ID NO: 5620; WAN024FBU; Start 102; Stop 126
cttctccaccattcagatattgatg

SEQ ID NO: 416372 - DNA, 25 bp, Artificial
  probe
  misc_feature (1)..(25): SEQ ID NO: 5620; WAN024FBU; Start 101; Stop 125
gcttctccaccattcagatattgat

SEQ ID NO: 416373 - DNA, 25 bp, Artificial
  probe
  misc_feature (1)..(25): SEQ ID NO: 5620; WAN024FBU; Start 51; Stop 75
caatacaaccattctcatcctcacg

SEQ ID NO: 416374 - DNA, 25 bp, Artificial
  probe
  misc_feature (1)..(25): SEQ ID NO: 5620; WAN024FBU; Start 169; Stop 193
aatcttaatctgacgctctggatga

SEQ ID NO: 416375 - DNA, 25 bp, Artificial
  probe
  misc_feature (1)..(25): SEQ ID NO: 5620; WAN024FBU; Start 168; Stop 192
caatcttaatctgacgctctggatg

SEQ ID NO: 416376 - DNA, 25 bp, Artificial
  probe
  misc_feature (1)..(25): SEQ ID NO: 5620; WAN024FBU; Start 167; Stop 191
acaatcttaatctgacgctctggat

SEQ ID NO: 416377 - DNA, 25 bp, Artificial
  probe
  misc_feature (1)..(25): SEQ ID NO: 5620; WAN024FBU; Start 154; Stop 178
ctcaatggtgcggacaatcttaatc

SEQ ID NO: 416378 - DNA, 25 bp, Artificial
  probe
  misc_feature (1)..(25): SEQ ID NO: 5620; WAN024FBU; Start 170; Stop 194
atcttaatctgacgctctggatgac

SEQ ID NO: 416379 - DNA, 25 bp, Artificial
  probe
  misc_feature (1)..(25): SEQ ID NO: 5620; WAN024FBU; Start 309; Stop 333
cgtcttgaatggcatggatgtatag

SEQ ID NO: 416380 - DNA, 25 bp, Artificial
  probe
  misc_feature (1)..(25): SEQ ID NO: 5620; WAN024FBU; Start 166; Stop 190
gacaatcttaatctgacgctctgga

SEQ ID NO: 416381 - DNA, 25 bp, Artificial
  probe
  misc_feature (1)..(25): SEQ ID NO: 5620; WAN024FBU; Start 10; Stop 34
ttcaggtgttcgatagtagtcaatg

SEQ ID NO: 416382 - DNA, 25 bp, Artificial
  probe
  misc_feature (1)..(25): SEQ ID NO: 5620; WAN024FBU; Start 157; Stop 181
aatggtgcggacaatcttaatctga

SEQ ID NO: 416383 - DNA, 25 bp, Artificial
  probe
  misc_feature (1)..(25): SEQ ID NO: 5620; WAN024FBU; Start 156; Stop 180
caatggtgcggacaatcttaatctg

SEQ ID NO: 416384 - DNA, 25 bp, Artificial
  probe
  misc_feature (1)..(25): SEQ ID NO: 5620; WAN024FBU; Start 155; Stop 179
tcaatggtgcggacaatcttaatct

SEQ ID NO: 416385 - DNA, 25 bp, Artificial
  probe
  misc_feature (1)..(25): SEQ ID NO: 5620; WAN024FBU; Start 52; Stop 76
aatacaaccattctcatcctcacgg

SEQ ID NO: 416386 - DNA, 25 bp, Artificial
  probe
  misc_feature (1)..(25): SEQ ID NO: 5620; WAN024FBU; Start 42; Stop 66
aatgctcaacaatacaaccattctc

SEQ ID NO: 416387 - DNA, 25 bp, Artificial
  probe
  misc_feature (1)..(25): SEQ ID NO: 5620; WAN024FBU; Start 41; Stop 65
caatgctcaacaatacaaccattct

SEQ ID NO: 416388 - DNA, 25 bp, Artificial
  probe
  misc_feature (1)..(25): SEQ ID NO: 5620; WAN024FBU; Start 11; Stop 35
tcaggtgttcgatagtagtcaatga

SEQ ID NO: 416389 - DNA, 25 bp, Artificial
  probe
  misc_feature (1)..(25): SEQ ID NO: 5620; WAN024FBU; Start 99; Stop 123
gagcttctccaccattcagatattg

SEQ ID NO: 416390 - DNA, 25 bp, Artificial
  probe
  misc_feature (1)..(25): SEQ ID NO: 5620; WAN024FBU; Start 16; Stop 40
tgttcgatagtagtcaatgacatcc

SEQ ID NO: 416391 - DNA, 25 bp, Artificial
  probe
  misc_feature (1)..(25): SEQ ID NO: 5620; WAN024FBU; Start 14; Stop 38
ggtgttcgatagtagtcaatgacat

SEQ ID NO: 416392 - DNA, 25 bp, Artificial
  probe
  misc_feature (1)..(25): SEQ ID NO: 5620; WAN024FBU; Start 100; Stop 124
agcttctccaccattcagatattga

SEQ ID NO: 416393 - DNA, 25 bp, Artificial
  probe
  misc_feature (1)..(25): SEQ ID NO: 5620; WAN024FBU; Start 158; Stop 182
atggtgcggacaatcttaatctgac

SEQ ID NO: 416394 - DNA, 25 bp, Artificial
  probe
  misc_feature (1)..(25): SEQ ID NO: 5620; WAN024FBU; Start 15; Stop 39
gtgttcgatagtagtcaatgacatc

SEQ ID NO: 416395 - DNA, 25 bp, Artificial
  probe
  misc_feature (1)..(25): SEQ ID NO: 5621; WAN024EXG; Start 126; Stop 150
tatccgcttgataagttgctccata

SEQ ID NO: 416396 - DNA, 25 bp, Artificial
  probe
  misc_feature (1)..(25): SEQ ID NO: 5621; WAN024EXG; Start 219; Stop 243
tcaaatcataaggcaaatccaagac

SEQ ID NO: 416397 - DNA, 25 bp, Artificial
  probe
  misc_feature (1)..(25): SEQ ID NO: 5621; WAN024EXG; Start 214; Stop 238
cggtatcaaatcataaggcaaatcc

SEQ ID NO: 416398 - DNA, 25 bp, Artificial
  probe
  misc_feature (1)..(25): SEQ ID NO: 5621; WAN024EXG; Start 215; Stop 239
ggtatcaaatcataaggcaaatcca

SEQ ID NO: 416399 - DNA, 25 bp, Artificial
  probe
  misc_feature (1)..(25): SEQ ID NO: 5621; WAN024EXG; Start 127; Stop 151
atccgcttgataagttgctccatag

SEQ ID NO: 416400 - DNA, 25 bp, Artificial
  probe
  misc_feature (1)..(25): SEQ ID NO: 5621; WAN024EXG; Start 220; Stop 244
caaatcataaggcaaatccaagacc

SEQ ID NO: 416401 - DNA, 25 bp, Artificial
  probe
  misc_feature (1)..(25): SEQ ID NO: 5621; WAN024EXG; Start 218; Stop 242
atcaaatcataaggcaaatccaaga

SEQ ID NO: 416402 - DNA, 25 bp, Artificial
  probe
  misc_feature (1)..(25): SEQ ID NO: 5621; WAN024EXG; Start 125; Stop 149
ctatccgcttgataagttgctccat

SEQ ID NO: 416403 - DNA, 25 bp, Artificial
  probe
  misc_feature (1)..(25): SEQ ID NO: 5621; WAN024EXG; Start 221; Stop 245
aaatcataaggcaaatccaagaccg

SEQ ID NO: 416404 - DNA, 25 bp, Artificial
  probe
  misc_feature (1)..(25): SEQ ID NO: 5621; WAN024EXG; Start 349; Stop 373
ctctggaacttccttcatactagct

SEQ ID NO: 416405 - DNA, 25 bp, Artificial
  probe
  misc_feature (1)..(25): SEQ ID NO: 5621; WAN024EXG; Start 347; Stop 371
agctctggaacttccttcatactag

SEQ ID NO: 416406 - DNA, 25 bp, Artificial
  probe
  misc_feature (1)..(25): SEQ ID NO: 5621; WAN024EXG; Start 216; Stop 240
gtatcaaatcataaggcaaatccaa

SEQ ID NO: 416407 - DNA, 25 bp, Artificial
  probe
  misc_feature (1)..(25): SEQ ID NO: 5621; WAN024EXG; Start 346; Stop 370
cagctctggaacttccttcatacta

SEQ ID NO: 416408 - DNA, 25 bp, Artificial
  probe
  misc_feature (1)..(25): SEQ ID NO: 5621; WAN024EXG; Start 217; Stop 241
tatcaaatcataaggcaaatccaag

SEQ ID NO: 416409 - DNA, 25 bp, Artificial
  probe
  misc_feature (1)..(25): SEQ ID NO: 5621; WAN024EXG; Start 70; Stop 94
gtctcttgtccatccatctgcatac

SEQ ID NO: 416410 - DNA, 25 bp, Artificial
  probe
  misc_feature (1)..(25): SEQ ID NO: 5621; WAN024EXG; Start 40; Stop 64
gccatctaccaagacagagaaattt

SEQ ID NO: 416411 - DNA, 25 bp, Artificial
  probe
  misc_feature (1)..(25): SEQ ID NO: 5621; WAN024EXG; Start 350; Stop 374
tctggaacttccttcatactagcta

SEQ ID NO: 416412 - DNA, 25 bp, Artificial
  probe
  misc_feature (1)..(25): SEQ ID NO: 5621; WAN024EXG; Start 351; Stop 375
ctggaacttccttcatactagctaa

SEQ ID NO: 416413 - DNA, 25 bp, Artificial
  probe
  misc_feature (1)..(25): SEQ ID NO: 5621; WAN024EXG; Start 69; Stop 93
tgtctcttgtccatccatctgcata

SEQ ID NO: 416414 - DNA, 25 bp, Artificial
  probe
  misc_feature (1)..(25): SEQ ID NO: 5621; WAN024EXG; Start 170; Stop 194
ggaactgtcttgacatgaaccagag

SEQ ID NO: 416415 - DNA, 25 bp, Artificial
  probe
  misc_feature (1)..(25): SEQ ID NO: 5621; WAN024EXG; Start 287; Stop 311
accgcattgaaaatagtctctacat

SEQ ID NO: 416416 - DNA, 25 bp, Artificial
  probe
  misc_feature (1)..(25): SEQ ID NO: 5621; WAN024EXG; Start 285; Stop 309
gaaccgcattgaaaatagtctctac

SEQ ID NO: 416417 - DNA, 25 bp, Artificial
  probe
  misc_feature (1)..(25): SEQ ID NO: 5621; WAN024EXG; Start 286; Stop 310
aaccgcattgaaaatagtctctaca

SEQ ID NO: 416418 - DNA, 25 bp, Artificial
  probe
  misc_feature (1)..(25): SEQ ID NO: 5621; WAN024EXG; Start 348; Stop 372
gctctggaacttccttcatactagc

SEQ ID NO: 416419 - DNA, 25 bp, Artificial
  probe
  misc_feature (1)..(25): SEQ ID NO: 5621; WAN024EXG; Start 281; Stop 305
atacgaaccgcattgaaaatagtct

SEQ ID NO: 416420 - DNA, 25 bp, Artificial
  probe
  misc_feature (1)..(25): SEQ ID NO: 5621; WAN024EXG; Start 280; Stop 304
catacgaaccgcattgaaaatagtc

SEQ ID NO: 416421 - DNA, 25 bp, Artificial
  probe
  misc_feature (1)..(25): SEQ ID NO: 5621; WAN024EXG; Start 213; Stop 237
ccggtatcaaatcataaggcaaatc

SEQ ID NO: 416422 - DNA, 25 bp, Artificial
  probe
  misc_feature (1)..(25): SEQ ID NO: 5621; WAN024EXG; Start 284; Stop 308
cgaaccgcattgaaaatagtctcta

SEQ ID NO: 416423 - DNA, 25 bp, Artificial
  probe
  misc_feature (1)..(25): SEQ ID NO: 5621; WAN024EXG; Start 282; Stop 306
tacgaaccgcattgaaaatagtctc

SEQ ID NO: 416424 - DNA, 25 bp, Artificial
  probe
  misc_feature (1)..(25): SEQ ID NO: 5621; WAN024EXG; Start 71; Stop 95
tctcttgtccatccatctgcatacc

SEQ ID NO: 416425 - DNA, 25 bp, Artificial
  probe
  misc_feature (1)..(25): SEQ ID NO: 5621; WAN024EXG; Start 171; Stop 195
gaactgtcttgacatgaaccagagc

SEQ ID NO: 416426 - DNA, 25 bp, Artificial
  probe
  misc_feature (1)..(25): SEQ ID NO: 5621; WAN024EXG; Start 279; Stop 303
ccatacgaaccgcattgaaaatagt

SEQ ID NO: 416427 - DNA, 25 bp, Artificial
  probe
  misc_feature (1)..(25): SEQ ID NO: 5621; WAN024EXG; Start 68; Stop 92
atgtctcttgtccatccatctgcat

SEQ ID NO: 416428 - DNA, 25 bp, Artificial
  probe
  misc_feature (1)..(25): SEQ ID NO: 5622; WAN024GCZ; Start 202; Stop 226
gtcatatctgcttcatcaacaacaa

SEQ ID NO: 416429 - DNA, 25 bp, Artificial
  probe
  misc_feature (1)..(25): SEQ ID NO: 5622; WAN024GCZ; Start 194; Stop 218
tatccaaggtcatatctgcttcatc

SEQ ID NO: 416430 - DNA, 25 bp, Artificial
  probe
  misc_feature (1)..(25): SEQ ID NO: 5622; WAN024GCZ; Start 192; Stop 216
catatccaaggtcatatctgcttca

SEQ ID NO: 416431 - DNA, 25 bp, Artificial
  probe
  misc_feature (1)..(25): SEQ ID NO: 5622; WAN024GCZ; Start 199; Stop 223
aaggtcatatctgcttcatcaacaa

SEQ ID NO: 416432 - DNA, 25 bp, Artificial
  probe
  misc_feature (1)..(25): SEQ ID NO: 5622; WAN024GCZ; Start 193; Stop 217
atatccaaggtcatatctgcttcat

SEQ ID NO: 416433 - DNA, 25 bp, Artificial
  probe
  misc_feature (1)..(25): SEQ ID NO: 5622; WAN024GCZ; Start 200; Stop 224
aggtcatatctgcttcatcaacaac

SEQ ID NO: 416434 - DNA, 25 bp, Artificial
  probe
  misc_feature (1)..(25): SEQ ID NO: 5622; WAN024GCZ; Start 191; Stop 215
ccatatccaaggtcatatctgcttc

SEQ ID NO: 416435 - DNA, 25 bp, Artificial
  probe
  misc_feature (1)..(25): SEQ ID NO: 5622; WAN024GCZ; Start 201; Stop 225
ggtcatatctgcttcatcaacaaca

SEQ ID NO: 416436 - DNA, 25 bp, Artificial
  probe
  misc_feature (1)..(25): SEQ ID NO: 5622; WAN024GCZ; Start 198; Stop 222
caaggtcatatctgcttcatcaaca

SEQ ID NO: 416437 - DNA, 25 bp, Artificial
  probe
  misc_feature (1)..(25): SEQ ID NO: 5622; WAN024GCZ; Start 195; Stop 219
atccaaggtcatatctgcttcatca

SEQ ID NO: 416438 - DNA, 25 bp, Artificial
  probe
  misc_feature (1)..(25): SEQ ID NO: 5622; WAN024GCZ; Start 197; Stop 221
ccaaggtcatatctgcttcatcaac

SEQ ID NO: 416439 - DNA, 25 bp, Artificial
  probe
  misc_feature (1)..(25): SEQ ID NO: 5622; WAN024GCZ; Start 196; Stop 220
tccaaggtcatatctgcttcatcaa

SEQ ID NO: 416440 - DNA, 25 bp, Artificial
  probe
  misc_feature (1)..(25): SEQ ID NO: 5622; WAN024GCZ; Start 183; Stop 207
caagaatcccatatccaaggtcata

SEQ ID NO: 416441 - DNA, 25 bp, Artificial
  probe
  misc_feature (1)..(25): SEQ ID NO: 5622; WAN024GCZ; Start 161; Stop 185
cagcaatcttatcaacagtttccaa

SEQ ID NO: 416442 - DNA, 25 bp, Artificial
  probe
  misc_feature (1)..(25): SEQ ID NO: 5622; WAN024GCZ; Start 187; Stop 211
aatcccatatccaaggtcatatctg

SEQ ID NO: 416443 - DNA, 25 bp, Artificial
  probe
  misc_feature (1)..(25): SEQ ID NO: 5622; WAN024GCZ; Start 203; Stop 227
tcatatctgcttcatcaacaacaaa

SEQ ID NO: 416444 - DNA, 25 bp, Artificial
  probe
  misc_feature (1)..(25): SEQ ID NO: 5622; WAN024GCZ; Start 186; Stop 210
gaatcccatatccaaggtcatatct

SEQ ID NO: 416445 - DNA, 25 bp, Artificial
  probe
  misc_feature (1)..(25): SEQ ID NO: 5622; WAN024GCZ; Start 185; Stop 209
agaatcccatatccaaggtcatatc

SEQ ID NO: 416446 - DNA, 25 bp, Artificial
  probe
  misc_feature (1)..(25): SEQ ID NO: 5622; WAN024GCZ; Start 173; Stop 197
caacagtttccaagaatcccatatc

SEQ ID NO: 416447 - DNA, 25 bp, Artificial
  probe
  misc_feature (1)..(25): SEQ ID NO: 5622; WAN024GCZ; Start 172; Stop 196
tcaacagtttccaagaatcccatat

SEQ ID NO: 416448 - DNA, 25 bp, Artificial
  probe
  misc_feature (1)..(25): SEQ ID NO: 5622; WAN024GCZ; Start 171; Stop 195
atcaacagtttccaagaatcccata

SEQ ID NO: 416449 - DNA, 25 bp, Artificial
  probe
  misc_feature (1)..(25): SEQ ID NO: 5622; WAN024GCZ; Start 170; Stop 194
tatcaacagtttccaagaatcccat

SEQ ID NO: 416450 - DNA, 25 bp, Artificial
  probe
  misc_feature (1)..(25): SEQ ID NO: 5622; WAN024GCZ; Start 168; Stop 192
cttatcaacagtttccaagaatccc

SEQ ID NO: 416451 - DNA, 25 bp, Artificial
  probe
  misc_feature (1)..(25): SEQ ID NO: 5622; WAN024GCZ; Start 169; Stop 193
ttatcaacagtttccaagaatccca

SEQ ID NO: 416452 - DNA, 25 bp, Artificial
  probe
  misc_feature (1)..(25): SEQ ID NO: 5622; WAN024GCZ; Start 162; Stop 186
agcaatcttatcaacagtttccaag

SEQ ID NO: 416453 - DNA, 25 bp, Artificial
  probe
  misc_feature (1)..(25): SEQ ID NO: 5622; WAN024GCZ; Start 177; Stop 201
agtttccaagaatcccatatccaag

SEQ ID NO: 416454 - DNA, 25 bp, Artificial
  probe
  misc_feature (1)..(25): SEQ ID NO: 5622; WAN024GCZ; Start 176; Stop 200
cagtttccaagaatcccatatccaa

SEQ ID NO: 416455 - DNA, 25 bp, Artificial
  probe
  misc_feature (1)..(25): SEQ ID NO: 5622; WAN024GCZ; Start 174; Stop 198
aacagtttccaagaatcccatatcc

SEQ ID NO: 416456 - DNA, 25 bp, Artificial
  probe
  misc_feature (1)..(25): SEQ ID NO: 5622; WAN024GCZ; Start 184; Stop 208
aagaatcccatatccaaggtcatat

SEQ ID NO: 416457 - DNA, 25 bp, Artificial
  probe
  misc_feature (1)..(25): SEQ ID NO: 5622; WAN024GCZ; Start 115; Stop 139
atagtcgctgagaagaccatgaatt

SEQ ID NO: 416458 - DNA, 25 bp, Artificial
  probe
  misc_feature (1)..(25): SEQ ID NO: 5622; WAN024GCZ; Start 160; Stop 184
ccagcaatcttatcaacagtttcca

SEQ ID NO: 416459 - DNA, 25 bp, Artificial
  probe
  misc_feature (1)..(25): SEQ ID NO: 5622; WAN024GCZ; Start 204; Stop 228
catatctgcttcatcaacaacaaat

SEQ ID NO: 416460 - DNA, 25 bp, Artificial
  probe
  misc_feature (1)..(25): SEQ ID NO: 5622; WAN024GCZ; Start 178; Stop 202
gtttccaagaatcccatatccaagg

SEQ ID NO: 416461 - DNA, 25 bp, Artificial
  probe
  misc_feature (1)..(25): SEQ ID NO: 5623; WAN024G5T; Start 183; Stop 207
gagttcatccagcaccgtattactt

SEQ ID NO: 416462 - DNA, 25 bp, Artificial
  probe
  misc_feature (1)..(25): SEQ ID NO: 5623; WAN024G5T; Start 173; Stop 197
aatcattccagagttcatccagcac

SEQ ID NO: 416463 - DNA, 25 bp, Artificial
  probe
  misc_feature (1)..(25): SEQ ID NO: 5623; WAN024G5T; Start 184; Stop 208
agttcatccagcaccgtattacttg

SEQ ID NO: 416464 - DNA, 25 bp, Artificial
  probe
  misc_feature (1)..(25): SEQ ID NO: 5623; WAN024G5T; Start 163; Stop 187
gtcagtttgaaatcattccagagtt

SEQ ID NO: 416465 - DNA, 25 bp, Artificial
  probe
  misc_feature (1)..(25): SEQ ID NO: 5623; WAN024G5T; Start 161; Stop 185
gtgtcagtttgaaatcattccagag

SEQ ID NO: 416466 - DNA, 25 bp, Artificial
  probe
  misc_feature (1)..(25): SEQ ID NO: 5623; WAN024G5T; Start 181; Stop 205
cagagttcatccagcaccgtattac

SEQ ID NO: 416467 - DNA, 25 bp, Artificial
  probe
  misc_feature (1)..(25): SEQ ID NO: 5623; WAN024G5T; Start 164; Stop 188
tcagtttgaaatcattccagagttc

SEQ ID NO: 416468 - DNA, 25 bp, Artificial
  probe
  misc_feature (1)..(25): SEQ ID NO: 5623; WAN024G5T; Start 162; Stop 186
tgtcagtttgaaatcattccagagt

SEQ ID NO: 416469 - DNA, 25 bp, Artificial
  probe
  misc_feature (1)..(25): SEQ ID NO: 5623; WAN024G5T; Start 160; Stop 184
ggtgtcagtttgaaatcattccaga

SEQ ID NO: 416470 - DNA, 25 bp, Artificial
  probe
  misc_feature (1)..(25): SEQ ID NO: 5623; WAN024G5T; Start 156; Stop 180
ttctggtgtcagtttgaaatcattc

SEQ ID NO: 416471 - DNA, 25 bp, Artificial
  probe
  misc_feature (1)..(25): SEQ ID NO: 5623; WAN024G5T; Start 155; Stop 179
cttctggtgtcagtttgaaatcatt

SEQ ID NO: 416472 - DNA, 25 bp, Artificial
  probe
  misc_feature (1)..(25): SEQ ID NO: 5623; WAN024G5T; Start 171; Stop 195
gaaatcattccagagttcatccagc

SEQ ID NO: 416473 - DNA, 25 bp, Artificial
  probe
  misc_feature (1)..(25): SEQ ID NO: 5623; WAN024G5T; Start 154; Stop 178
acttctggtgtcagtttgaaatcat

SEQ ID NO: 416474 - DNA, 25 bp, Artificial
  probe
  misc_feature (1)..(25): SEQ ID NO: 5623; WAN024G5T; Start 182; Stop 206
agagttcatccagcaccgtattact

SEQ ID NO: 416475 - DNA, 25 bp, Artificial
  probe
  misc_feature (1)..(25): SEQ ID NO: 5623; WAN024G5T; Start 172; Stop 196
aaatcattccagagttcatccagca

SEQ ID NO: 416476 - DNA, 25 bp, Artificial
  probe
  misc_feature (1)..(25): SEQ ID NO: 5623; WAN024G5T; Start 157; Stop 181
tctggtgtcagtttgaaatcattcc

SEQ ID NO: 416477 - DNA, 25 bp, Artificial
  probe
  misc_feature (1)..(25): SEQ ID NO: 5623; WAN024G5T; Start 180; Stop 204
ccagagttcatccagcaccgtatta

SEQ ID NO: 416478 - DNA, 25 bp, Artificial
  probe
  misc_feature (1)..(25): SEQ ID NO: 5623; WAN024G5T; Start 200; Stop 224
tattacttggtgtcagcttgctttg

SEQ ID NO: 416479 - DNA, 25 bp, Artificial
  probe
  misc_feature (1)..(25): SEQ ID NO: 5623; WAN024G5T; Start 199; Stop 223
gtattacttggtgtcagcttgcttt

SEQ ID NO: 416480 - DNA, 25 bp, Artificial
  probe
  misc_feature (1)..(25): SEQ ID NO: 5623; WAN024G5T; Start 159; Stop 183
tggtgtcagtttgaaatcattccag

SEQ ID NO: 416481 - DNA, 25 bp, Artificial
  probe
  misc_feature (1)..(25): SEQ ID NO: 5623; WAN024G5T; Start 158; Stop 182
ctggtgtcagtttgaaatcattcca

SEQ ID NO: 416482 - DNA, 25 bp, Artificial
  probe
  misc_feature (1)..(25): SEQ ID NO: 5623; WAN024G5T; Start 198; Stop 222
cgtattacttggtgtcagcttgctt

SEQ ID NO: 416483 - DNA, 25 bp, Artificial
  probe
  misc_feature (1)..(25): SEQ ID NO: 5623; WAN024G5T; Start 185; Stop 209
gttcatccagcaccgtattacttgg

SEQ ID NO: 416484 - DNA, 25 bp, Artificial
  probe
  misc_feature (1)..(25): SEQ ID NO: 5623; WAN024G5T; Start 174; Stop 198
atcattccagagttcatccagcacc

SEQ ID NO: 416485 - DNA, 25 bp, Artificial
  probe
  misc_feature (1)..(25): SEQ ID NO: 5623; WAN024G5T; Start 165; Stop 189
cagtttgaaatcattccagagttca

SEQ ID NO: 416486 - DNA, 25 bp, Artificial
  probe
  misc_feature (1)..(25): SEQ ID NO: 5623; WAN024G5T; Start 169; Stop 193
ttgaaatcattccagagttcatcca

SEQ ID NO: 416487 - DNA, 25 bp, Artificial
  probe
  misc_feature (1)..(25): SEQ ID NO: 5623; WAN024G5T; Start 168; Stop 192
tttgaaatcattccagagttcatcc

SEQ ID NO: 416488 - DNA, 25 bp, Artificial
  probe
  misc_feature (1)..(25): SEQ ID NO: 5623; WAN024G5T; Start 170; Stop 194
tgaaatcattccagagttcatccag

SEQ ID NO: 416489 - DNA, 25 bp, Artificial
  probe
  misc_feature (1)..(25): SEQ ID NO: 5623; WAN024G5T; Start 152; Stop 176
caacttctggtgtcagtttgaaatc

SEQ ID NO: 416490 - DNA, 25 bp, Artificial
  probe
  misc_feature (1)..(25): SEQ ID NO: 5623; WAN024G5T; Start 147; Stop 171
gatttcaacttctggtgtcagtttg

SEQ ID NO: 416491 - DNA, 25 bp, Artificial
  probe
  misc_feature (1)..(25): SEQ ID NO: 5623; WAN024G5T; Start 153; Stop 177
aacttctggtgtcagtttgaaatca

SEQ ID NO: 416492 - DNA, 25 bp, Artificial
  probe
  misc_feature (1)..(25): SEQ ID NO: 5623; WAN024G5T; Start 151; Stop 175
tcaacttctggtgtcagtttgaaat

SEQ ID NO: 416493 - DNA, 25 bp, Artificial
  probe
  misc_feature (1)..(25): SEQ ID NO: 5623; WAN024G5T; Start 148; Stop 172
atttcaacttctggtgtcagtttga

SEQ ID NO: 416494 - DNA, 25 bp, Artificial
  probe
  misc_feature (1)..(25): SEQ ID NO: 5624; WAN024G3Z; Start 233; Stop 257
tcagagatagagatacgaagagcac

SEQ ID NO: 416495 - DNA, 25 bp, Artificial
  probe
  misc_feature (1)..(25): SEQ ID NO: 5624; WAN024G3Z; Start 41; Stop 65
ataccaacttgaatgttatccgcaa

SEQ ID NO: 416496 - DNA, 25 bp, Artificial
  probe
  misc_feature (1)..(25): SEQ ID NO: 5624; WAN024G3Z; Start 238; Stop 262
gatagagatacgaagagcacggaat

SEQ ID NO: 416497 - DNA, 25 bp, Artificial
  probe
  misc_feature (1)..(25): SEQ ID NO: 5624; WAN024G3Z; Start 232; Stop 256
ctcagagatagagatacgaagagca

SEQ ID NO: 416498 - DNA, 25 bp, Artificial
  probe
  misc_feature (1)..(25): SEQ ID NO: 5624; WAN024G3Z; Start 239; Stop 263
atagagatacgaagagcacggaatc

SEQ ID NO: 416499 - DNA, 25 bp, Artificial
  probe
  misc_feature (1)..(25): SEQ ID NO: 5624; WAN024G3Z; Start 38; Stop 62
atgataccaacttgaatgttatccg

SEQ ID NO: 416500 - DNA, 25 bp, Artificial
  probe
  misc_feature (1)..(25): SEQ ID NO: 5624; WAN024G3Z; Start 234; Stop 258
cagagatagagatacgaagagcacg

SEQ ID NO: 416501 - DNA, 25 bp, Artificial
  probe
  misc_feature (1)..(25): SEQ ID NO: 5624; WAN024G3Z; Start 42; Stop 66
taccaacttgaatgttatccgcaac

SEQ ID NO: 416502 - DNA, 25 bp, Artificial
  probe
  misc_feature (1)..(25): SEQ ID NO: 5624; WAN024G3Z; Start 380; Stop 404
tatgcttcatactgctcatcttcag

SEQ ID NO: 416503 - DNA, 25 bp, Artificial
  probe
  misc_feature (1)..(25): SEQ ID NO: 5624; WAN024G3Z; Start 40; Stop 64
gataccaacttgaatgttatccgca

SEQ ID NO: 416504 - DNA, 25 bp, Artificial
  probe
  misc_feature (1)..(25): SEQ ID NO: 5624; WAN024G3Z; Start 39; Stop 63
tgataccaacttgaatgttatccgc

SEQ ID NO: 416505 - DNA, 25 bp, Artificial
  probe
  misc_feature (1)..(25): SEQ ID NO: 5624; WAN024G3Z; Start 237; Stop 261
agatagagatacgaagagcacggaa

SEQ ID NO: 416506 - DNA, 25 bp, Artificial
  probe
  misc_feature (1)..(25): SEQ ID NO: 5624; WAN024G3Z; Start 214; Stop 238
gaacatagcatctccagtctcagag

SEQ ID NO: 416507 - DNA, 25 bp, Artificial
  probe
  misc_feature (1)..(25): SEQ ID NO: 5624; WAN024G3Z; Start 285; Stop 309
gaggcatatcgaagtaaggaagttc

SEQ ID NO: 416508 - DNA, 25 bp, Artificial
  probe
  misc_feature (1)..(25): SEQ ID NO: 5624; WAN024G3Z; Start 284; Stop 308
tgaggcatatcgaagtaaggaagtt

SEQ ID NO: 416509 - DNA, 25 bp, Artificial
  probe
  misc_feature (1)..(25): SEQ ID NO: 5624; WAN024G3Z; Start 236; Stop 260
gagatagagatacgaagagcacgga

SEQ ID NO: 416510 - DNA, 25 bp, Artificial
  probe
  misc_feature (1)..(25): SEQ ID NO: 5624; WAN024G3Z; Start 235; Stop 259
agagatagagatacgaagagcacgg

SEQ ID NO: 416511 - DNA, 25 bp, Artificial
  probe
  misc_feature (1)..(25): SEQ ID NO: 5624; WAN024G3Z; Start 44; Stop 68
ccaacttgaatgttatccgcaactg

SEQ ID NO: 416512 - DNA, 25 bp, Artificial
  probe
  misc_feature (1)..(25): SEQ ID NO: 5624; WAN024G3Z; Start 37; Stop 61
catgataccaacttgaatgttatcc

SEQ ID NO: 416513 - DNA, 25 bp, Artificial
  probe
  misc_feature (1)..(25): SEQ ID NO: 5624; WAN024G3Z; Start 625; Stop 649
ttgttcatctgttgggttgataatc

SEQ ID NO: 416514 - DNA, 25 bp, Artificial
  probe
  misc_feature (1)..(25): SEQ ID NO: 5624; WAN024G3Z; Start 624; Stop 648
cttgttcatctgttgggttgataat

SEQ ID NO: 416515 - DNA, 25 bp, Artificial
  probe
  misc_feature (1)..(25): SEQ ID NO: 5624; WAN024G3Z; Start 302; Stop 326
ggaagttccttatctccaccgatat

SEQ ID NO: 416516 - DNA, 25 bp, Artificial
  probe
  misc_feature (1)..(25): SEQ ID NO: 5624; WAN024G3Z; Start 283; Stop 307
gtgaggcatatcgaagtaaggaagt

SEQ ID NO: 416517 - DNA, 25 bp, Artificial
  probe
  misc_feature (1)..(25): SEQ ID NO: 5624; WAN024G3Z; Start 311; Stop 335
ttatctccaccgatatccattgtac

SEQ ID NO: 416518 - DNA, 25 bp, Artificial
  probe
  misc_feature (1)..(25): SEQ ID NO: 5624; WAN024G3Z; Start 303; Stop 327
gaagttccttatctccaccgatatc

SEQ ID NO: 416519 - DNA, 25 bp, Artificial
  probe
  misc_feature (1)..(25): SEQ ID NO: 5624; WAN024G3Z; Start 310; Stop 334
cttatctccaccgatatccattgta

SEQ ID NO: 416520 - DNA, 25 bp, Artificial
  probe
  misc_feature (1)..(25): SEQ ID NO: 5624; WAN024G3Z; Start 631; Stop 655
atctgttgggttgataatcacttct

SEQ ID NO: 416521 - DNA, 25 bp, Artificial
  probe
  misc_feature (1)..(25): SEQ ID NO: 5624; WAN024G3Z; Start 630; Stop 654
catctgttgggttgataatcacttc

SEQ ID NO: 416522 - DNA, 25 bp, Artificial
  probe
  misc_feature (1)..(25): SEQ ID NO: 5624; WAN024G3Z; Start 629; Stop 653
tcatctgttgggttgataatcactt

SEQ ID NO: 416523 - DNA, 25 bp, Artificial
  probe
  misc_feature (1)..(25): SEQ ID NO: 5624; WAN024G3Z; Start 628; Stop 652
ttcatctgttgggttgataatcact

SEQ ID NO: 416524 - DNA, 25 bp, Artificial
  probe
  misc_feature (1)..(25): SEQ ID NO: 5624; WAN024G3Z; Start 627; Stop 651
gttcatctgttgggttgataatcac

SEQ ID NO: 416525 - DNA, 25 bp, Artificial
  probe
  misc_feature (1)..(25): SEQ ID NO: 5624; WAN024G3Z; Start 307; Stop 331
ttccttatctccaccgatatccatt

SEQ ID NO: 416526 - DNA, 25 bp, Artificial
  probe
  misc_feature (1)..(25): SEQ ID NO: 5624; WAN024G3Z; Start 43; Stop 67
accaacttgaatgttatccgcaact

SEQ ID NO: 416527 - DNA, 25 bp, Artificial
  probe
  misc_feature (1)..(25): SEQ ID NO: 5625; WAN024FNI; Start 188; Stop 212
acttcttctggaacttcaaggtatt

SEQ ID NO: 416528 - DNA, 25 bp, Artificial
  probe
  misc_feature (1)..(25): SEQ ID NO: 5625; WAN024FNI; Start 187; Stop 211
gacttcttctggaacttcaaggtat

SEQ ID NO: 416529 - DNA, 25 bp, Artificial
  probe
  misc_feature (1)..(25): SEQ ID NO: 5625; WAN024FNI; Start 186; Stop 210
agacttcttctggaacttcaaggta

SEQ ID NO: 416530 - DNA, 25 bp, Artificial
  probe
  misc_feature (1)..(25): SEQ ID NO: 5625; WAN024FNI; Start 184; Stop 208
caagacttcttctggaacttcaagg

SEQ ID NO: 416531 - DNA, 25 bp, Artificial
  probe
  misc_feature (1)..(25): SEQ ID NO: 5625; WAN024FNI; Start 185; Stop 209
aagacttcttctggaacttcaaggt

SEQ ID NO: 416532 - DNA, 25 bp, Artificial
  probe
  misc_feature (1)..(25): SEQ ID NO: 5625; WAN024FNI; Start 256; Stop 280
attcaagacttcattcagcaaatcc

SEQ ID NO: 416533 - DNA, 25 bp, Artificial
  probe
  misc_feature (1)..(25): SEQ ID NO: 5625; WAN024FNI; Start 196; Stop 220
tggaacttcaaggtatttagcatca

SEQ ID NO: 416534 - DNA, 25 bp, Artificial
  probe
  misc_feature (1)..(25): SEQ ID NO: 5625; WAN024FNI; Start 194; Stop 218
tctggaacttcaaggtatttagcat

SEQ ID NO: 416535 - DNA, 25 bp, Artificial
  probe
  misc_feature (1)..(25): SEQ ID NO: 5625; WAN024FNI; Start 193; Stop 217
ttctggaacttcaaggtatttagca

SEQ ID NO: 416536 - DNA, 25 bp, Artificial
  probe
  misc_feature (1)..(25): SEQ ID NO: 5625; WAN024FNI; Start 195; Stop 219
ctggaacttcaaggtatttagcatc

SEQ ID NO: 416537 - DNA, 25 bp, Artificial
  probe
  misc_feature (1)..(25): SEQ ID NO: 5625; WAN024FNI; Start 197; Stop 221
ggaacttcaaggtatttagcatcaa

SEQ ID NO: 416538 - DNA, 25 bp, Artificial
  probe
  misc_feature (1)..(25): SEQ ID NO: 5625; WAN024FNI; Start 105; Stop 129
cagaaatgaagtttggcaagagttt

SEQ ID NO: 416539 - DNA, 25 bp, Artificial
  probe
  misc_feature (1)..(25): SEQ ID NO: 5625; WAN024FNI; Start 252; Stop 276
ccaaattcaagacttcattcagcaa

SEQ ID NO: 416540 - DNA, 25 bp, Artificial
  probe
  misc_feature (1)..(25): SEQ ID NO: 5625; WAN024FNI; Start 250; Stop 274
aaccaaattcaagacttcattcagc

SEQ ID NO: 416541 - DNA, 25 bp, Artificial
  probe
  misc_feature (1)..(25): SEQ ID NO: 5625; WAN024FNI; Start 192; Stop 216
cttctggaacttcaaggtatttagc

SEQ ID NO: 416542 - DNA, 25 bp, Artificial
  probe
  misc_feature (1)..(25): SEQ ID NO: 5625; WAN024FNI; Start 248; Stop 272
tcaaccaaattcaagacttcattca

SEQ ID NO: 416543 - DNA, 25 bp, Artificial
  probe
  misc_feature (1)..(25): SEQ ID NO: 5625; WAN024FNI; Start 154; Stop 178
gtaacgctggtgttccttcatagaa

SEQ ID NO: 416544 - DNA, 25 bp, Artificial
  probe
  misc_feature (1)..(25): SEQ ID NO: 5625; WAN024FNI; Start 152; Stop 176
aagtaacgctggtgttccttcatag

SEQ ID NO: 416545 - DNA, 25 bp, Artificial
  probe
  misc_feature (1)..(25): SEQ ID NO: 5625; WAN024FNI; Start 368; Stop 392
attacaaactgcttacgaaggtctt

SEQ ID NO: 416546 - DNA, 25 bp, Artificial
  probe
  misc_feature (1)..(25): SEQ ID NO: 5625; WAN024FNI; Start 249; Stop 273
caaccaaattcaagacttcattcag

SEQ ID NO: 416547 - DNA, 25 bp, Artificial
  probe
  misc_feature (1)..(25): SEQ ID NO: 5625; WAN024FNI; Start 253; Stop 277
caaattcaagacttcattcagcaaa

SEQ ID NO: 416548 - DNA, 25 bp, Artificial
  probe
  misc_feature (1)..(25): SEQ ID NO: 5625; WAN024FNI; Start 183; Stop 207
ccaagacttcttctggaacttcaag

SEQ ID NO: 416549 - DNA, 25 bp, Artificial
  probe
  misc_feature (1)..(25): SEQ ID NO: 5625; WAN024FNI; Start 367; Stop 391
gattacaaactgcttacgaaggtct

SEQ ID NO: 416550 - DNA, 25 bp, Artificial
  probe
  misc_feature (1)..(25): SEQ ID NO: 5625; WAN024FNI; Start 189; Stop 213
cttcttctggaacttcaaggtattt

SEQ ID NO: 416551 - DNA, 25 bp, Artificial
  probe
  misc_feature (1)..(25): SEQ ID NO: 5625; WAN024FNI; Start 102; Stop 126
gaacagaaatgaagtttggcaagag

SEQ ID NO: 416552 - DNA, 25 bp, Artificial
  probe
  misc_feature (1)..(25): SEQ ID NO: 5625; WAN024FNI; Start 255; Stop 279
aattcaagacttcattcagcaaatc

SEQ ID NO: 416553 - DNA, 25 bp, Artificial
  probe
  misc_feature (1)..(25): SEQ ID NO: 5625; WAN024FNI; Start 251; Stop 275
accaaattcaagacttcattcagca

SEQ ID NO: 416554 - DNA, 25 bp, Artificial
  probe
  misc_feature (1)..(25): SEQ ID NO: 5625; WAN024FNI; Start 104; Stop 128
acagaaatgaagtttggcaagagtt

SEQ ID NO: 416555 - DNA, 25 bp, Artificial
  probe
  misc_feature (1)..(25): SEQ ID NO: 5625; WAN024FNI; Start 326; Stop 350
atttggtcaacaatcatttgctcac

SEQ ID NO: 416556 - DNA, 25 bp, Artificial
  probe
  misc_feature (1)..(25): SEQ ID NO: 5625; WAN024FNI; Start 247; Stop 271
ttcaaccaaattcaagacttcattc

SEQ ID NO: 416557 - DNA, 25 bp, Artificial
  probe
  misc_feature (1)..(25): SEQ ID NO: 5625; WAN024FNI; Start 97; Stop 121
gttacgaacagaaatgaagtttggc

SEQ ID NO: 416558 - DNA, 25 bp, Artificial
  probe
  misc_feature (1)..(25): SEQ ID NO: 5625; WAN024FNI; Start 182; Stop 206
accaagacttcttctggaacttcaa

SEQ ID NO: 416559 - DNA, 25 bp, Artificial
  probe
  misc_feature (1)..(25): SEQ ID NO: 5625; WAN024FNI; Start 103; Stop 127
aacagaaatgaagtttggcaagagt

SEQ ID NO: 416560 - DNA, 25 bp, Artificial
  probe
  misc_feature (1)..(25): SEQ ID NO: 5626; WAN024E2D; Start 1432; Stop 1456
gtgtgtctcttcttgcttgttattc

SEQ ID NO: 416561 - DNA, 25 bp, Artificial
  probe
  misc_feature (1)..(25): SEQ ID NO: 5626; WAN024E2D; Start 1436; Stop 1460
gtctcttcttgcttgttattcctca

SEQ ID NO: 416562 - DNA, 25 bp, Artificial
  probe
  misc_feature (1)..(25): SEQ ID NO: 5626; WAN024E2D; Start 1435; Stop 1459
tgtctcttcttgcttgttattcctc

SEQ ID NO: 416563 - DNA, 25 bp, Artificial
  probe
  misc_feature (1)..(25): SEQ ID NO: 5626; WAN024E2D; Start 1431; Stop 1455
tgtgtgtctcttcttgcttgttatt

SEQ ID NO: 416564 - DNA, 25 bp, Artificial
  probe
  misc_feature (1)..(25): SEQ ID NO: 5626; WAN024E2D; Start 1430; Stop 1454
ttgtgtgtctcttcttgcttgttat

SEQ ID NO: 416565 - DNA, 25 bp, Artificial
  probe
  misc_feature (1)..(25): SEQ ID NO: 5626; WAN024E2D; Start 868; Stop 892
gtcatcacttcaggaactctattca

SEQ ID NO: 416566 - DNA, 25 bp, Artificial
  probe
  misc_feature (1)..(25): SEQ ID NO: 5626; WAN024E2D; Start 1434; Stop 1458
gtgtctcttcttgcttgttattcct

SEQ ID NO: 416567 - DNA, 25 bp, Artificial
  probe
  misc_feature (1)..(25): SEQ ID NO: 5626; WAN024E2D; Start 869; Stop 893
tcatcacttcaggaactctattcaa

SEQ ID NO: 416568 - DNA, 25 bp, Artificial
  probe
  misc_feature (1)..(25): SEQ ID NO: 5626; WAN024E2D; Start 1433; Stop 1457
tgtgtctcttcttgcttgttattcc

SEQ ID NO: 416569 - DNA, 25 bp, Artificial
  probe
  misc_feature (1)..(25): SEQ ID NO: 5626; WAN024E2D; Start 1443; Stop 1467
cttgcttgttattcctcaacttcaa

SEQ ID NO: 416570 - DNA, 25 bp, Artificial
  probe
  misc_feature (1)..(25): SEQ ID NO: 5626; WAN024E2D; Start 1438; Stop 1462
ctcttcttgcttgttattcctcaac

SEQ ID NO: 416571 - DNA, 25 bp, Artificial
  probe
  misc_feature (1)..(25): SEQ ID NO: 5626; WAN024E2D; Start 1437; Stop 1461
tctcttcttgcttgttattcctcaa

SEQ ID NO: 416572 - DNA, 25 bp, Artificial
  probe
  misc_feature (1)..(25): SEQ ID NO: 5626; WAN024E2D; Start 1441; Stop 1465
ttcttgcttgttattcctcaacttc

SEQ ID NO: 416573 - DNA, 25 bp, Artificial
  probe
  misc_feature (1)..(25): SEQ ID NO: 5626; WAN024E2D; Start 1440; Stop 1464
cttcttgcttgttattcctcaactt

SEQ ID NO: 416574 - DNA, 25 bp, Artificial
  probe
  misc_feature (1)..(25): SEQ ID NO: 5626; WAN024E2D; Start 57; Stop 81
aaggagaacaattatggaagtcgtt

SEQ ID NO: 416575 - DNA, 25 bp, Artificial
  probe
  misc_feature (1)..(25): SEQ ID NO: 5626; WAN024E2D; Start 1439; Stop 1463
tcttcttgcttgttattcctcaact

SEQ ID NO: 416576 - DNA, 25 bp, Artificial
  probe
  misc_feature (1)..(25): SEQ ID NO: 5626; WAN024E2D; Start 1429; Stop 1453
cttgtgtgtctcttcttgcttgtta

SEQ ID NO: 416577 - DNA, 25 bp, Artificial
  probe
  misc_feature (1)..(25): SEQ ID NO: 5626; WAN024E2D; Start 1444; Stop 1468
ttgcttgttattcctcaacttcaat

SEQ ID NO: 416578 - DNA, 25 bp, Artificial
  probe
  misc_feature (1)..(25): SEQ ID NO: 5626; WAN024E2D; Start 1442; Stop 1466
tcttgcttgttattcctcaacttca

SEQ ID NO: 416579 - DNA, 25 bp, Artificial
  probe
  misc_feature (1)..(25): SEQ ID NO: 5626; WAN024E2D; Start 867; Stop 891
agtcatcacttcaggaactctattc

SEQ ID NO: 416580 - DNA, 25 bp, Artificial
  probe
  misc_feature (1)..(25): SEQ ID NO: 5626; WAN024E2D; Start 1445; Stop 1469
tgcttgttattcctcaacttcaatt

SEQ ID NO: 416581 - DNA, 25 bp, Artificial
  probe
  misc_feature (1)..(25): SEQ ID NO: 5626; WAN024E2D; Start 1420; Stop 1444
ggttatgtacttgtgtgtctcttct

SEQ ID NO: 416582 - DNA, 25 bp, Artificial
  probe
  misc_feature (1)..(25): SEQ ID NO: 5626; WAN024E2D; Start 1418; Stop 1442
ttggttatgtacttgtgtgtctctt

SEQ ID NO: 416583 - DNA, 25 bp, Artificial
  probe
  misc_feature (1)..(25): SEQ ID NO: 5626; WAN024E2D; Start 1414; Stop 1438
attgttggttatgtacttgtgtgtc

SEQ ID NO: 416584 - DNA, 25 bp, Artificial
  probe
  misc_feature (1)..(25): SEQ ID NO: 5626; WAN024E2D; Start 1419; Stop 1443
tggttatgtacttgtgtgtctcttc

SEQ ID NO: 416585 - DNA, 25 bp, Artificial
  probe
  misc_feature (1)..(25): SEQ ID NO: 5626; WAN024E2D; Start 870; Stop 894
catcacttcaggaactctattcaat

SEQ ID NO: 416586 - DNA, 25 bp, Artificial
  probe
  misc_feature (1)..(25): SEQ ID NO: 5626; WAN024E2D; Start 1415; Stop 1439
ttgttggttatgtacttgtgtgtct

SEQ ID NO: 416587 - DNA, 25 bp, Artificial
  probe
  misc_feature (1)..(25): SEQ ID NO: 5626; WAN024E2D; Start 1417; Stop 1441
gttggttatgtacttgtgtgtctct

SEQ ID NO: 416588 - DNA, 25 bp, Artificial
  probe
  misc_feature (1)..(25): SEQ ID NO: 5626; WAN024E2D; Start 1423; Stop 1447
tatgtacttgtgtgtctcttcttgc

SEQ ID NO: 416589 - DNA, 25 bp, Artificial
  probe
  misc_feature (1)..(25): SEQ ID NO: 5626; WAN024E2D; Start 1411; Stop 1435
ggtattgttggttatgtacttgtgt

SEQ ID NO: 416590 - DNA, 25 bp, Artificial
  probe
  misc_feature (1)..(25): SEQ ID NO: 5626; WAN024E2D; Start 1410; Stop 1434
tggtattgttggttatgtacttgtg

SEQ ID NO: 416591 - DNA, 25 bp, Artificial
  probe
  misc_feature (1)..(25): SEQ ID NO: 5626; WAN024E2D; Start 871; Stop 895
atcacttcaggaactctattcaatc

SEQ ID NO: 416592 - DNA, 25 bp, Artificial
  probe
  misc_feature (1)..(25): SEQ ID NO: 5626; WAN024E2D; Start 1416; Stop 1440
tgttggttatgtacttgtgtgtctc

SEQ ID NO: 416593 - DNA, 25 bp, Artificial
  probe
  misc_feature (1)..(25): SEQ ID NO: 5627; WAN024FF3; Start 16; Stop 40
aatcaagaaaccaccaagaccaaat

SEQ ID NO: 416594 - DNA, 25 bp, Artificial
  probe
  misc_feature (1)..(25): SEQ ID NO: 5627; WAN024FF3; Start 275; Stop 299
aaaccaaagaagttcatcgctgtta

SEQ ID NO: 416595 - DNA, 25 bp, Artificial
  probe
  misc_feature (1)..(25): SEQ ID NO: 5627; WAN024FF3; Start 262; Stop 286
aacaacagggatgaaaccaaagaag

SEQ ID NO: 416596 - DNA, 25 bp, Artificial
  probe
  misc_feature (1)..(25): SEQ ID NO: 5627; WAN024FF3; Start 17; Stop 41
atcaagaaaccaccaagaccaaatg

SEQ ID NO: 416597 - DNA, 25 bp, Artificial
  probe
  misc_feature (1)..(25): SEQ ID NO: 5627; WAN024FF3; Start 265; Stop 289
aacagggatgaaaccaaagaagttc

SEQ ID NO: 416598 - DNA, 25 bp, Artificial
  probe
  misc_feature (1)..(25): SEQ ID NO: 5627; WAN024FF3; Start 155; Stop 179
gttaccaagaggtcaatgacatctg

SEQ ID NO: 416599 - DNA, 25 bp, Artificial
  probe
  misc_feature (1)..(25): SEQ ID NO: 5627; WAN024FF3; Start 161; Stop 185
aagaggtcaatgacatctggaacaa

SEQ ID NO: 416600 - DNA, 25 bp, Artificial
  probe
  misc_feature (1)..(25): SEQ ID NO: 5627; WAN024FF3; Start 261; Stop 285
caacaacagggatgaaaccaaagaa

SEQ ID NO: 416601 - DNA, 25 bp, Artificial
  probe
  misc_feature (1)..(25): SEQ ID NO: 5627; WAN024FF3; Start 15; Stop 39
caatcaagaaaccaccaagaccaaa

SEQ ID NO: 416602 - DNA, 25 bp, Artificial
  probe
  misc_feature (1)..(25): SEQ ID NO: 5627; WAN024FF3; Start 264; Stop 288
caacagggatgaaaccaaagaagtt

SEQ ID NO: 416603 - DNA, 25 bp, Artificial
  probe
  misc_feature (1)..(25): SEQ ID NO: 5627; WAN024FF3; Start 154; Stop 178
tgttaccaagaggtcaatgacatct

SEQ ID NO: 416604 - DNA, 25 bp, Artificial
  probe
  misc_feature (1)..(25): SEQ ID NO: 5627; WAN024FF3; Start 153; Stop 177
gtgttaccaagaggtcaatgacatc

SEQ ID NO: 416605 - DNA, 25 bp, Artificial
  probe
  misc_feature (1)..(25): SEQ ID NO: 5627; WAN024FF3; Start 106; Stop 130
aatgacaaagagtccaaggatagac

SEQ ID NO: 416606 - DNA, 25 bp, Artificial
  probe
  misc_feature (1)..(25): SEQ ID NO: 5627; WAN024FF3; Start 105; Stop 129
caatgacaaagagtccaaggataga

SEQ ID NO: 416607 - DNA, 25 bp, Artificial
  probe
  misc_feature (1)..(25): SEQ ID NO: 5627; WAN024FF3; Start 166; Stop 190
gtcaatgacatctggaacaaccttg

SEQ ID NO: 416608 - DNA, 25 bp, Artificial
  probe
  misc_feature (1)..(25): SEQ ID NO: 5627; WAN024FF3; Start 276; Stop 300
aaccaaagaagttcatcgctgttac

SEQ ID NO: 416609 - DNA, 25 bp, Artificial
  probe
  misc_feature (1)..(25): SEQ ID NO: 5627; WAN024FF3; Start 114; Stop 138
agagtccaaggatagacatgaccaa

SEQ ID NO: 416610 - DNA, 25 bp, Artificial
  probe
  misc_feature (1)..(25): SEQ ID NO: 5627; WAN024FF3; Start 113; Stop 137
aagagtccaaggatagacatgacca

SEQ ID NO: 416611 - DNA, 25 bp, Artificial
  probe
  misc_feature (1)..(25): SEQ ID NO: 5627; WAN024FF3; Start 108; Stop 132
tgacaaagagtccaaggatagacat

SEQ ID NO: 416612 - DNA, 25 bp, Artificial
  probe
  misc_feature (1)..(25): SEQ ID NO: 5627; WAN024FF3; Start 107; Stop 131
atgacaaagagtccaaggatagaca

SEQ ID NO: 416613 - DNA, 25 bp, Artificial
  probe
  misc_feature (1)..(25): SEQ ID NO: 5627; WAN024FF3; Start 104; Stop 128
ccaatgacaaagagtccaaggatag

SEQ ID NO: 416614 - DNA, 25 bp, Artificial
  probe
  misc_feature (1)..(25): SEQ ID NO: 5627; WAN024FF3; Start 156; Stop 180
ttaccaagaggtcaatgacatctgg

SEQ ID NO: 416615 - DNA, 25 bp, Artificial
  probe
  misc_feature (1)..(25): SEQ ID NO: 5627; WAN024FF3; Start 162; Stop 186
agaggtcaatgacatctggaacaac

SEQ ID NO: 416616 - DNA, 25 bp, Artificial
  probe
  misc_feature (1)..(25): SEQ ID NO: 5627; WAN024FF3; Start 160; Stop 184
caagaggtcaatgacatctggaaca

SEQ ID NO: 416617 - DNA, 25 bp, Artificial
  probe
  misc_feature (1)..(25): SEQ ID NO: 5627; WAN024FF3; Start 263; Stop 287
acaacagggatgaaaccaaagaagt

SEQ ID NO: 416618 - DNA, 25 bp, Artificial
  probe
  misc_feature (1)..(25): SEQ ID NO: 5627; WAN024FF3; Start 274; Stop 298
gaaaccaaagaagttcatcgctgtt

SEQ ID NO: 416619 - DNA, 25 bp, Artificial
  probe
  misc_feature (1)..(25): SEQ ID NO: 5627; WAN024FF3; Start 111; Stop 135
caaagagtccaaggatagacatgac

SEQ ID NO: 416620 - DNA, 25 bp, Artificial
  probe
  misc_feature (1)..(25): SEQ ID NO: 5627; WAN024FF3; Start 109; Stop 133
gacaaagagtccaaggatagacatg

SEQ ID NO: 416621 - DNA, 25 bp, Artificial
  probe
  misc_feature (1)..(25): SEQ ID NO: 5627; WAN024FF3; Start 167; Stop 191
tcaatgacatctggaacaaccttgc

SEQ ID NO: 416622 - DNA, 25 bp, Artificial
  probe
  misc_feature (1)..(25): SEQ ID NO: 5627; WAN024FF3; Start 103; Stop 127
tccaatgacaaagagtccaaggata

SEQ ID NO: 416623 - DNA, 25 bp, Artificial
  probe
  misc_feature (1)..(25): SEQ ID NO: 5627; WAN024FF3; Start 110; Stop 134
acaaagagtccaaggatagacatga

SEQ ID NO: 416624 - DNA, 25 bp, Artificial
  probe
  misc_feature (1)..(25): SEQ ID NO: 5627; WAN024FF3; Start 277; Stop 301
accaaagaagttcatcgctgttact

SEQ ID NO: 416625 - DNA, 25 bp, Artificial
  probe
  misc_feature (1)..(25): SEQ ID NO: 5627; WAN024FF3; Start 152; Stop 176
ggtgttaccaagaggtcaatgacat

SEQ ID NO: 416626 - DNA, 25 bp, Artificial
  probe
  misc_feature (1)..(25): SEQ ID NO: 5628; WAN024FEQ; Start 786; Stop 810
ccatatagcctcttatcttacgaca

SEQ ID NO: 416627 - DNA, 25 bp, Artificial
  probe
  misc_feature (1)..(25): SEQ ID NO: 5628; WAN024FEQ; Start 543; Stop 567
cagtattcgtgtaacagacctaagt

SEQ ID NO: 416628 - DNA, 25 bp, Artificial
  probe
  misc_feature (1)..(25): SEQ ID NO: 5628; WAN024FEQ; Start 797; Stop 821
cttatcttacgacaggtcaggttac

SEQ ID NO: 416629 - DNA, 25 bp, Artificial
  probe
  misc_feature (1)..(25): SEQ ID NO: 5628; WAN024FEQ; Start 796; Stop 820
tcttatcttacgacaggtcaggtta

SEQ ID NO: 416630 - DNA, 25 bp, Artificial
  probe
  misc_feature (1)..(25): SEQ ID NO: 5628; WAN024FEQ; Start 542; Stop 566
ccagtattcgtgtaacagacctaag

SEQ ID NO: 416631 - DNA, 25 bp, Artificial
  probe
  misc_feature (1)..(25): SEQ ID NO: 5628; WAN024FEQ; Start 798; Stop 822
ttatcttacgacaggtcaggttact

SEQ ID NO: 416632 - DNA, 25 bp, Artificial
  probe
  misc_feature (1)..(25): SEQ ID NO: 5628; WAN024FEQ; Start 795; Stop 819
ctcttatcttacgacaggtcaggtt

SEQ ID NO: 416633 - DNA, 25 bp, Artificial
  probe
  misc_feature (1)..(25): SEQ ID NO: 5628; WAN024FEQ; Start 787; Stop 811
catatagcctcttatcttacgacag

SEQ ID NO: 416634 - DNA, 25 bp, Artificial
  probe
  misc_feature (1)..(25): SEQ ID NO: 5628; WAN024FEQ; Start 544; Stop 568
agtattcgtgtaacagacctaagtc

SEQ ID NO: 416635 - DNA, 25 bp, Artificial
  probe
  misc_feature (1)..(25): SEQ ID NO: 5628; WAN024FEQ; Start 789; Stop 813
tatagcctcttatcttacgacaggt

SEQ ID NO: 416636 - DNA, 25 bp, Artificial
  probe
  misc_feature (1)..(25): SEQ ID NO: 5628; WAN024FEQ; Start 545; Stop 569
gtattcgtgtaacagacctaagtcg

SEQ ID NO: 416637 - DNA, 25 bp, Artificial
  probe
  misc_feature (1)..(25): SEQ ID NO: 5628; WAN024FEQ; Start 788; Stop 812
atatagcctcttatcttacgacagg

SEQ ID NO: 416638 - DNA, 25 bp, Artificial
  probe
  misc_feature (1)..(25): SEQ ID NO: 5628; WAN024FEQ; Start 799; Stop 823
tatcttacgacaggtcaggttactg

SEQ ID NO: 416639 - DNA, 25 bp, Artificial
  probe
  misc_feature (1)..(25): SEQ ID NO: 5628; WAN024FEQ; Start 541; Stop 565
gccagtattcgtgtaacagacctaa

SEQ ID NO: 416640 - DNA, 25 bp, Artificial
  probe
  misc_feature (1)..(25): SEQ ID NO: 5628; WAN024FEQ; Start 790; Stop 814
atagcctcttatcttacgacaggtc

SEQ ID NO: 416641 - DNA, 25 bp, Artificial
  probe
  misc_feature (1)..(25): SEQ ID NO: 5628; WAN024FEQ; Start 203; Stop 227
ttatcgaagacagagaccagttaga

SEQ ID NO: 416642 - DNA, 25 bp, Artificial
  probe
  misc_feature (1)..(25): SEQ ID NO: 5628; WAN024FEQ; Start 478; Stop 502
aaggaagaatacggagaggagagag

SEQ ID NO: 416643 - DNA, 25 bp, Artificial
  probe
  misc_feature (1)..(25): SEQ ID NO: 5628; WAN024FEQ; Start 204; Stop 228
tatcgaagacagagaccagttagac

SEQ ID NO: 416644 - DNA, 25 bp, Artificial
  probe
  misc_feature (1)..(25): SEQ ID NO: 5628; WAN024FEQ; Start 477; Stop 501
caaggaagaatacggagaggagaga

SEQ ID NO: 416645 - DNA, 25 bp, Artificial
  probe
  misc_feature (1)..(25): SEQ ID NO: 5628; WAN024FEQ; Start 476; Stop 500
tcaaggaagaatacggagaggagag

SEQ ID NO: 416646 - DNA, 25 bp, Artificial
  probe
  misc_feature (1)..(25): SEQ ID NO: 5628; WAN024FEQ; Start 785; Stop 809
cccatatagcctcttatcttacgac

SEQ ID NO: 416647 - DNA, 25 bp, Artificial
  probe
  misc_feature (1)..(25): SEQ ID NO: 5628; WAN024FEQ; Start 782; Stop 806
cagcccatatagcctcttatcttac

SEQ ID NO: 416648 - DNA, 25 bp, Artificial
  probe
  misc_feature (1)..(25): SEQ ID NO: 5628; WAN024FEQ; Start 781; Stop 805
acagcccatatagcctcttatctta

SEQ ID NO: 416649 - DNA, 25 bp, Artificial
  probe
  misc_feature (1)..(25): SEQ ID NO: 5628; WAN024FEQ; Start 1016; Stop 1040
tcaaatacaataaagaaacggcaga

SEQ ID NO: 416650 - DNA, 25 bp, Artificial
  probe
  misc_feature (1)..(25): SEQ ID NO: 5628; WAN024FEQ; Start 1248; Stop 1272
cctcattacacctgaattgtatgga

SEQ ID NO: 416651 - DNA, 25 bp, Artificial
  probe
  misc_feature (1)..(25): SEQ ID NO: 5628; WAN024FEQ; Start 1247; Stop 1271
tcctcattacacctgaattgtatgg

SEQ ID NO: 416652 - DNA, 25 bp, Artificial
  probe
  misc_feature (1)..(25): SEQ ID NO: 5628; WAN024FEQ; Start 1243; Stop 1267
tgtatcctcattacacctgaattgt

SEQ ID NO: 416653 - DNA, 25 bp, Artificial
  probe
  misc_feature (1)..(25): SEQ ID NO: 5628; WAN024FEQ; Start 780; Stop 804
aacagcccatatagcctcttatctt

SEQ ID NO: 416654 - DNA, 25 bp, Artificial
  probe
  misc_feature (1)..(25): SEQ ID NO: 5628; WAN024FEQ; Start 779; Stop 803
aaacagcccatatagcctcttatct

SEQ ID NO: 416655 - DNA, 25 bp, Artificial
  probe
  misc_feature (1)..(25): SEQ ID NO: 5628; WAN024FEQ; Start 1241; Stop 1265
gctgtatcctcattacacctgaatt

SEQ ID NO: 416656 - DNA, 25 bp, Artificial
  probe
  misc_feature (1)..(25): SEQ ID NO: 5628; WAN024FEQ; Start 5; Stop 29
tgactaaagtagaaacggctagaag

SEQ ID NO: 416657 - DNA, 25 bp, Artificial
  probe
  misc_feature (1)..(25): SEQ ID NO: 5628; WAN024FEQ; Start 4; Stop 28
gtgactaaagtagaaacggctagaa

SEQ ID NO: 416658 - DNA, 25 bp, Artificial
  probe
  misc_feature (1)..(25): SEQ ID NO: 5628; WAN024FEQ; Start 1242; Stop 1266
ctgtatcctcattacacctgaattg

SEQ ID NO: 416659 - DNA, 25 bp, Artificial
  probe
  misc_feature (1)..(25): SEQ ID NO: 5629; WAN024A68; Start 6; Stop 30
gagagatcaccaagtaatgcacatt

SEQ ID NO: 416660 - DNA, 25 bp, Artificial
  probe
  misc_feature (1)..(25): SEQ ID NO: 5629; WAN024A68; Start 9; Stop 33
agatcaccaagtaatgcacattgaa

SEQ ID NO: 416661 - DNA, 25 bp, Artificial
  probe
  misc_feature (1)..(25): SEQ ID NO: 5629; WAN024A68; Start 7; Stop 31
agagatcaccaagtaatgcacattg

SEQ ID NO: 416662 - DNA, 25 bp, Artificial
  probe
  misc_feature (1)..(25): SEQ ID NO: 5629; WAN024A68; Start 8; Stop 32
gagatcaccaagtaatgcacattga

SEQ ID NO: 416663 - DNA, 25 bp, Artificial
  probe
  misc_feature (1)..(25): SEQ ID NO: 5629; WAN024A68; Start 5; Stop 29
tgagagatcaccaagtaatgcacat

SEQ ID NO: 416664 - DNA, 25 bp, Artificial
  probe
  misc_feature (1)..(25): SEQ ID NO: 5629; WAN024A68; Start 10; Stop 34
gatcaccaagtaatgcacattgaaa

SEQ ID NO: 416665 - DNA, 25 bp, Artificial
  probe
  misc_feature (1)..(25): SEQ ID NO: 5629; WAN024A68; Start 61; Stop 85
aagaaaataaaccgaaaacgctgta

SEQ ID NO: 416666 - DNA, 25 bp, Artificial
  probe
  misc_feature (1)..(25): SEQ ID NO: 5629; WAN024A68; Start 62; Stop 86
agaaaataaaccgaaaacgctgtag

SEQ ID NO: 416667 - DNA, 25 bp, Artificial
  probe
  misc_feature (1)..(25): SEQ ID NO: 5629; WAN024A68; Start 64; Stop 88
aaaataaaccgaaaacgctgtagta

SEQ ID NO: 416668 - DNA, 25 bp, Artificial
  probe
  misc_feature (1)..(25): SEQ ID NO: 5629; WAN024A68; Start 65; Stop 89
aaataaaccgaaaacgctgtagtat

SEQ ID NO: 416669 - DNA, 25 bp, Artificial
  probe
  misc_feature (1)..(25): SEQ ID NO: 5629; WAN024A68; Start 63; Stop 87
gaaaataaaccgaaaacgctgtagt

SEQ ID NO: 416670 - DNA, 25 bp, Artificial
  probe
  misc_feature (1)..(25): SEQ ID NO: 5629; WAN024A68; Start 57; Stop 81
taacaagaaaataaaccgaaaacgc

SEQ ID NO: 416671 - DNA, 25 bp, Artificial
  probe
  misc_feature (1)..(25): SEQ ID NO: 5629; WAN024A68; Start 58; Stop 82
aacaagaaaataaaccgaaaacgct

SEQ ID NO: 416672 - DNA, 25 bp, Artificial
  probe
  misc_feature (1)..(25): SEQ ID NO: 5629; WAN024A68; Start 68; Stop 92
taaaccgaaaacgctgtagtattaa

SEQ ID NO: 416673 - DNA, 25 bp, Artificial
  probe
  misc_feature (1)..(25): SEQ ID NO: 5629; WAN024A68; Start 66; Stop 90
aataaaccgaaaacgctgtagtatt

SEQ ID NO: 416674 - DNA, 25 bp, Artificial
  probe
  misc_feature (1)..(25): SEQ ID NO: 5629; WAN024A68; Start 67; Stop 91
ataaaccgaaaacgctgtagtatta

SEQ ID NO: 416675 - DNA, 25 bp, Artificial
  probe
  misc_feature (1)..(25): SEQ ID NO: 5629; WAN024A68; Start 60; Stop 84
caagaaaataaaccgaaaacgctgt

SEQ ID NO: 416676 - DNA, 25 bp, Artificial
  probe
  misc_feature (1)..(25): SEQ ID NO: 5629; WAN024A68; Start 59; Stop 83
acaagaaaataaaccgaaaacgctg

SEQ ID NO: 416677 - DNA, 25 bp, Artificial
  probe
  misc_feature (1)..(25): SEQ ID NO: 5629; WAN024A68; Start 91; Stop 115
aataagagtttatgactgaaaggtc

SEQ ID NO: 416678 - DNA, 25 bp, Artificial
  probe
  misc_feature (1)..(25): SEQ ID NO: 5629; WAN024A68; Start 56; Stop 80
gtaacaagaaaataaaccgaaaacg

SEQ ID NO: 416679 - DNA, 25 bp, Artificial
  probe
  misc_feature (1)..(25): SEQ ID NO: 5629; WAN024A68; Start 69; Stop 93
aaaccgaaaacgctgtagtattaat

SEQ ID NO: 416680 - DNA, 25 bp, Artificial
  probe
  misc_feature (1)..(25): SEQ ID NO: 5629; WAN024A68; Start 14; Stop 38
accaagtaatgcacattgaaaattg

SEQ ID NO: 416681 - DNA, 25 bp, Artificial
  probe
  misc_feature (1)..(25): SEQ ID NO: 5629; WAN024A68; Start 13; Stop 37
caccaagtaatgcacattgaaaatt

SEQ ID NO: 416682 - DNA, 25 bp, Artificial
  probe
  misc_feature (1)..(25): SEQ ID NO: 5629; WAN024A68; Start 12; Stop 36
tcaccaagtaatgcacattgaaaat

SEQ ID NO: 416683 - DNA, 25 bp, Artificial
  probe
  misc_feature (1)..(25): SEQ ID NO: 5629; WAN024A68; Start 11; Stop 35
atcaccaagtaatgcacattgaaaa

SEQ ID NO: 416684 - DNA, 25 bp, Artificial
  probe
  misc_feature (1)..(25): SEQ ID NO: 5629; WAN024A68; Start 15; Stop 39
ccaagtaatgcacattgaaaattga

SEQ ID NO: 416685 - DNA, 25 bp, Artificial
  probe
  misc_feature (1)..(25): SEQ ID NO: 5629; WAN024A68; Start 55; Stop 79
agtaacaagaaaataaaccgaaaac

SEQ ID NO: 416686 - DNA, 25 bp, Artificial
  probe
  misc_feature (1)..(25): SEQ ID NO: 5629; WAN024A68; Start 90; Stop 114
taataagagtttatgactgaaaggt

SEQ ID NO: 416687 - DNA, 25 bp, Artificial
  probe
  misc_feature (1)..(25): SEQ ID NO: 5629; WAN024A68; Start 95; Stop 119
agagtttatgactgaaaggtcagaa

SEQ ID NO: 416688 - DNA, 25 bp, Artificial
  probe
  misc_feature (1)..(25): SEQ ID NO: 5629; WAN024A68; Start 94; Stop 118
aagagtttatgactgaaaggtcaga

SEQ ID NO: 416689 - DNA, 25 bp, Artificial
  probe
  misc_feature (1)..(25): SEQ ID NO: 5629; WAN024A68; Start 96; Stop 120
gagtttatgactgaaaggtcagaaa

SEQ ID NO: 416690 - DNA, 25 bp, Artificial
  probe
  misc_feature (1)..(25): SEQ ID NO: 5629; WAN024A68; Start 71; Stop 95
accgaaaacgctgtagtattaataa

SEQ ID NO: 416691 - DNA, 25 bp, Artificial
  probe
  misc_feature (1)..(25): SEQ ID NO: 5629; WAN024A68; Start 70; Stop 94
aaccgaaaacgctgtagtattaata

SEQ ID NO: 416692 - DNA, 25 bp, Artificial
  probe
  misc_feature (1)..(25): SEQ ID NO: 5630; WAN024G8W; Start 370; Stop 394
gtatctgtcgagaagtatggtgaac

SEQ ID NO: 416693 - DNA, 25 bp, Artificial
  probe
  misc_feature (1)..(25): SEQ ID NO: 5630; WAN024G8W; Start 365; Stop 389
ctgttgtatctgtcgagaagtatgg

SEQ ID NO: 416694 - DNA, 25 bp, Artificial
  probe
  misc_feature (1)..(25): SEQ ID NO: 5630; WAN024G8W; Start 369; Stop 393
tgtatctgtcgagaagtatggtgaa

SEQ ID NO: 416695 - DNA, 25 bp, Artificial
  probe
  misc_feature (1)..(25): SEQ ID NO: 5630; WAN024G8W; Start 368; Stop 392
ttgtatctgtcgagaagtatggtga

SEQ ID NO: 416696 - DNA, 25 bp, Artificial
  probe
  misc_feature (1)..(25): SEQ ID NO: 5630; WAN024G8W; Start 367; Stop 391
gttgtatctgtcgagaagtatggtg

SEQ ID NO: 416697 - DNA, 25 bp, Artificial
  probe
  misc_feature (1)..(25): SEQ ID NO: 5630; WAN024G8W; Start 396; Stop 420
aattccagcaccaaagataacgata

SEQ ID NO: 416698 - DNA, 25 bp, Artificial
  probe
  misc_feature (1)..(25): SEQ ID NO: 5630; WAN024G8W; Start 239; Stop 263
ggtgggtcaattcttcaaacttaac

SEQ ID NO: 416699 - DNA, 25 bp, Artificial
  probe
  misc_feature (1)..(25): SEQ ID NO: 5630; WAN024G8W; Start 366; Stop 390
tgttgtatctgtcgagaagtatggt

SEQ ID NO: 416700 - DNA, 25 bp, Artificial
  probe
  misc_feature (1)..(25): SEQ ID NO: 5630; WAN024G8W; Start 364; Stop 388
gctgttgtatctgtcgagaagtatg

SEQ ID NO: 416701 - DNA, 25 bp, Artificial
  probe
  misc_feature (1)..(25): SEQ ID NO: 5630; WAN024G8W; Start 397; Stop 421
attccagcaccaaagataacgatac

SEQ ID NO: 416702 - DNA, 25 bp, Artificial
  probe
  misc_feature (1)..(25): SEQ ID NO: 5630; WAN024G8W; Start 371; Stop 395
tatctgtcgagaagtatggtgaacc

SEQ ID NO: 416703 - DNA, 25 bp, Artificial
  probe
  misc_feature (1)..(25): SEQ ID NO: 5630; WAN024G8W; Start 238; Stop 262
cggtgggtcaattcttcaaacttaa

SEQ ID NO: 416704 - DNA, 25 bp, Artificial
  probe
  misc_feature (1)..(25): SEQ ID NO: 5630; WAN024G8W; Start 199; Stop 223
gttgagtccatgatacgaagacctt

SEQ ID NO: 416705 - DNA, 25 bp, Artificial
  probe
  misc_feature (1)..(25): SEQ ID NO: 5630; WAN024G8W; Start 395; Stop 419
caattccagcaccaaagataacgat

SEQ ID NO: 416706 - DNA, 25 bp, Artificial
  probe
  misc_feature (1)..(25): SEQ ID NO: 5630; WAN024G8W; Start 392; Stop 416
aaccaattccagcaccaaagataac

SEQ ID NO: 416707 - DNA, 25 bp, Artificial
  probe
  misc_feature (1)..(25): SEQ ID NO: 5630; WAN024G8W; Start 391; Stop 415
gaaccaattccagcaccaaagataa

SEQ ID NO: 416708 - DNA, 25 bp, Artificial
  probe
  misc_feature (1)..(25): SEQ ID NO: 5630; WAN024G8W; Start 45; Stop 69
cgttagccatattctttcttattcc

SEQ ID NO: 416709 - DNA, 25 bp, Artificial
  probe
  misc_feature (1)..(25): SEQ ID NO: 5630; WAN024G8W; Start 379; Stop 403
gagaagtatggtgaaccaattccag

SEQ ID NO: 416710 - DNA, 25 bp, Artificial
  probe
  misc_feature (1)..(25): SEQ ID NO: 5630; WAN024G8W; Start 84; Stop 108
atttgaaactgttgttccgatattt

SEQ ID NO: 416711 - DNA, 25 bp, Artificial
  probe
  misc_feature (1)..(25): SEQ ID NO: 5630; WAN024G8W; Start 363; Stop 387
cgctgttgtatctgtcgagaagtat

SEQ ID NO: 416712 - DNA, 25 bp, Artificial
  probe
  misc_feature (1)..(25): SEQ ID NO: 5630; WAN024G8W; Start 376; Stop 400
gtcgagaagtatggtgaaccaattc

SEQ ID NO: 416713 - DNA, 25 bp, Artificial
  probe
  misc_feature (1)..(25): SEQ ID NO: 5630; WAN024G8W; Start 197; Stop 221
ctgttgagtccatgatacgaagacc

SEQ ID NO: 416714 - DNA, 25 bp, Artificial
  probe
  misc_feature (1)..(25): SEQ ID NO: 5630; WAN024G8W; Start 237; Stop 261
acggtgggtcaattcttcaaactta

SEQ ID NO: 416715 - DNA, 25 bp, Artificial
  probe
  misc_feature (1)..(25): SEQ ID NO: 5630; WAN024G8W; Start 390; Stop 414
tgaaccaattccagcaccaaagata

SEQ ID NO: 416716 - DNA, 25 bp, Artificial
  probe
  misc_feature (1)..(25): SEQ ID NO: 5630; WAN024G8W; Start 83; Stop 107
tatttgaaactgttgttccgatatt

SEQ ID NO: 416717 - DNA, 25 bp, Artificial
  probe
  misc_feature (1)..(25): SEQ ID NO: 5630; WAN024G8W; Start 82; Stop 106
ttatttgaaactgttgttccgatat

SEQ ID NO: 416718 - DNA, 25 bp, Artificial
  probe
  misc_feature (1)..(25): SEQ ID NO: 5630; WAN024G8W; Start 81; Stop 105
attatttgaaactgttgttccgata

SEQ ID NO: 416719 - DNA, 25 bp, Artificial
  probe
  misc_feature (1)..(25): SEQ ID NO: 5630; WAN024G8W; Start 80; Stop 104
tattatttgaaactgttgttccgat

SEQ ID NO: 416720 - DNA, 25 bp, Artificial
  probe
  misc_feature (1)..(25): SEQ ID NO: 5630; WAN024G8W; Start 79; Stop 103
atattatttgaaactgttgttccga

SEQ ID NO: 416721 - DNA, 25 bp, Artificial
  probe
  misc_feature (1)..(25): SEQ ID NO: 5630; WAN024G8W; Start 375; Stop 399
tgtcgagaagtatggtgaaccaatt

SEQ ID NO: 416722 - DNA, 25 bp, Artificial
  probe
  misc_feature (1)..(25): SEQ ID NO: 5630; WAN024G8W; Start 198; Stop 222
tgttgagtccatgatacgaagacct

SEQ ID NO: 416723 - DNA, 25 bp, Artificial
  probe
  misc_feature (1)..(25): SEQ ID NO: 5630; WAN024G8W; Start 398; Stop 422
ttccagcaccaaagataacgatacg

SEQ ID NO: 416724 - DNA, 25 bp, Artificial
  probe
  misc_feature (1)..(25): SEQ ID NO: 5630; WAN024G8W; Start 200; Stop 224
ttgagtccatgatacgaagaccttt

SEQ ID NO: 416725 - DNA, 25 bp, Artificial
  probe
  misc_feature (1)..(25): SEQ ID NO: 5631; WAN024FZT; Start 107; Stop 131
aagaagaatcgctggcaatgatata

SEQ ID NO: 416726 - DNA, 25 bp, Artificial
  probe
  misc_feature (1)..(25): SEQ ID NO: 5631; WAN024FZT; Start 156; Stop 180
taatcctgcgagagtagttgtagtt

SEQ ID NO: 416727 - DNA, 25 bp, Artificial
  probe
  misc_feature (1)..(25): SEQ ID NO: 5631; WAN024FZT; Start 155; Stop 179
ttaatcctgcgagagtagttgtagt

SEQ ID NO: 416728 - DNA, 25 bp, Artificial
  probe
  misc_feature (1)..(25): SEQ ID NO: 5631; WAN024FZT; Start 108; Stop 132
agaagaatcgctggcaatgatatat

SEQ ID NO: 416729 - DNA, 25 bp, Artificial
  probe
  misc_feature (1)..(25): SEQ ID NO: 5631; WAN024FZT; Start 109; Stop 133
gaagaatcgctggcaatgatatatt

SEQ ID NO: 416730 - DNA, 25 bp, Artificial
  probe
  misc_feature (1)..(25): SEQ ID NO: 5631; WAN024FZT; Start 46; Stop 70
atcaattccatatcaataccagtgt

SEQ ID NO: 416731 - DNA, 25 bp, Artificial
  probe
  misc_feature (1)..(25): SEQ ID NO: 5631; WAN024FZT; Start 157; Stop 181
aatcctgcgagagtagttgtagttg

SEQ ID NO: 416732 - DNA, 25 bp, Artificial
  probe
  misc_feature (1)..(25): SEQ ID NO: 5631; WAN024FZT; Start 268; Stop 292
aattcagtaaccaggtgctcgtatt

SEQ ID NO: 416733 - DNA, 25 bp, Artificial
  probe
  misc_feature (1)..(25): SEQ ID NO: 5631; WAN024FZT; Start 47; Stop 71
tcaattccatatcaataccagtgta

SEQ ID NO: 416734 - DNA, 25 bp, Artificial
  probe
  misc_feature (1)..(25): SEQ ID NO: 5631; WAN024FZT; Start 154; Stop 178
tttaatcctgcgagagtagttgtag

SEQ ID NO: 416735 - DNA, 25 bp, Artificial
  probe
  misc_feature (1)..(25): SEQ ID NO: 5631; WAN024FZT; Start 45; Stop 69
aatcaattccatatcaataccagtg

SEQ ID NO: 416736 - DNA, 25 bp, Artificial
  probe
  misc_feature (1)..(25): SEQ ID NO: 5631; WAN024FZT; Start 195; Stop 219
tgatgaagcagtccatttcttgata

SEQ ID NO: 416737 - DNA, 25 bp, Artificial
  probe
  misc_feature (1)..(25): SEQ ID NO: 5631; WAN024FZT; Start 34; Stop 58
gcgattgccttaatcaattccatat

SEQ ID NO: 416738 - DNA, 25 bp, Artificial
  probe
  misc_feature (1)..(25): SEQ ID NO: 5631; WAN024FZT; Start 196; Stop 220
gatgaagcagtccatttcttgataa

SEQ ID NO: 416739 - DNA, 25 bp, Artificial
  probe
  misc_feature (1)..(25): SEQ ID NO: 5631; WAN024FZT; Start 194; Stop 218
atgatgaagcagtccatttcttgat

SEQ ID NO: 416740 - DNA, 25 bp, Artificial
  probe
  misc_feature (1)..(25): SEQ ID NO: 5631; WAN024FZT; Start 106; Stop 130
aaagaagaatcgctggcaatgatat

SEQ ID NO: 416741 - DNA, 25 bp, Artificial
  probe
  misc_feature (1)..(25): SEQ ID NO: 5631; WAN024FZT; Start 33; Stop 57
agcgattgccttaatcaattccata

SEQ ID NO: 416742 - DNA, 25 bp, Artificial
  probe
  misc_feature (1)..(25): SEQ ID NO: 5631; WAN024FZT; Start 32; Stop 56
tagcgattgccttaatcaattccat

SEQ ID NO: 416743 - DNA, 25 bp, Artificial
  probe
  misc_feature (1)..(25): SEQ ID NO: 5631; WAN024FZT; Start 197; Stop 221
atgaagcagtccatttcttgataat

SEQ ID NO: 416744 - DNA, 25 bp, Artificial
  probe
  misc_feature (1)..(25): SEQ ID NO: 5631; WAN024FZT; Start 31; Stop 55
ttagcgattgccttaatcaattcca

SEQ ID NO: 416745 - DNA, 25 bp, Artificial
  probe
  misc_feature (1)..(25): SEQ ID NO: 5631; WAN024FZT; Start 198; Stop 222
tgaagcagtccatttcttgataatt

SEQ ID NO: 416746 - DNA, 25 bp, Artificial
  probe
  misc_feature (1)..(25): SEQ ID NO: 5631; WAN024FZT; Start 190; Stop 214
gaagatgatgaagcagtccatttct

SEQ ID NO: 416747 - DNA, 25 bp, Artificial
  probe
  misc_feature (1)..(25): SEQ ID NO: 5631; WAN024FZT; Start 193; Stop 217
gatgatgaagcagtccatttcttga

SEQ ID NO: 416748 - DNA, 25 bp, Artificial
  probe
  misc_feature (1)..(25): SEQ ID NO: 5631; WAN024FZT; Start 189; Stop 213
tgaagatgatgaagcagtccatttc

SEQ ID NO: 416749 - DNA, 25 bp, Artificial
  probe
  misc_feature (1)..(25): SEQ ID NO: 5631; WAN024FZT; Start 23; Stop 47
cttggtctttagcgattgccttaat

SEQ ID NO: 416750 - DNA, 25 bp, Artificial
  probe
  misc_feature (1)..(25): SEQ ID NO: 5631; WAN024FZT; Start 192; Stop 216
agatgatgaagcagtccatttcttg

SEQ ID NO: 416751 - DNA, 25 bp, Artificial
  probe
  misc_feature (1)..(25): SEQ ID NO: 5631; WAN024FZT; Start 38; Stop 62
ttgccttaatcaattccatatcaat

SEQ ID NO: 416752 - DNA, 25 bp, Artificial
  probe
  misc_feature (1)..(25): SEQ ID NO: 5631; WAN024FZT; Start 35; Stop 59
cgattgccttaatcaattccatatc

SEQ ID NO: 416753 - DNA, 25 bp, Artificial
  probe
  misc_feature (1)..(25): SEQ ID NO: 5631; WAN024FZT; Start 110; Stop 134
aagaatcgctggcaatgatatattt

SEQ ID NO: 416754 - DNA, 25 bp, Artificial
  probe
  misc_feature (1)..(25): SEQ ID NO: 5631; WAN024FZT; Start 270; Stop 294
ttcagtaaccaggtgctcgtattta

SEQ ID NO: 416755 - DNA, 25 bp, Artificial
  probe
  misc_feature (1)..(25): SEQ ID NO: 5631; WAN024FZT; Start 266; Stop 290
taaattcagtaaccaggtgctcgta

SEQ ID NO: 416756 - DNA, 25 bp, Artificial
  probe
  misc_feature (1)..(25): SEQ ID NO: 5631; WAN024FZT; Start 248; Stop 272
tttcagacaaggcttggttaaattc

SEQ ID NO: 416757 - DNA, 25 bp, Artificial
  probe
  misc_feature (1)..(25): SEQ ID NO: 5631; WAN024FZT; Start 253; Stop 277
gacaaggcttggttaaattcagtaa

SEQ ID NO: 416758 - DNA, 25 bp, Artificial
  probe
  misc_feature (1)..(25): SEQ ID NO: 5632; WAN024GC7; Start 105; Stop 129
cctccaggaagaacaatcatatcat

SEQ ID NO: 416759 - DNA, 25 bp, Artificial
  probe
  misc_feature (1)..(25): SEQ ID NO: 5632; WAN024GC7; Start 101; Stop 125
catacctccaggaagaacaatcata

SEQ ID NO: 416760 - DNA, 25 bp, Artificial
  probe
  misc_feature (1)..(25): SEQ ID NO: 5632; WAN024GC7; Start 103; Stop 127
tacctccaggaagaacaatcatatc

SEQ ID NO: 416761 - DNA, 25 bp, Artificial
  probe
  misc_feature (1)..(25): SEQ ID NO: 5632; WAN024GC7; Start 102; Stop 126
atacctccaggaagaacaatcatat

SEQ ID NO: 416762 - DNA, 25 bp, Artificial
  probe
  misc_feature (1)..(25): SEQ ID NO: 5632; WAN024GC7; Start 104; Stop 128
acctccaggaagaacaatcatatca

SEQ ID NO: 416763 - DNA, 25 bp, Artificial
  probe
  misc_feature (1)..(25): SEQ ID NO: 5632; WAN024GC7; Start 108; Stop 132
ccaggaagaacaatcatatcatagt

SEQ ID NO: 416764 - DNA, 25 bp, Artificial
  probe
  misc_feature (1)..(25): SEQ ID NO: 5632; WAN024GC7; Start 152; Stop 176
gacatgatctgctcttacttggatt

SEQ ID NO: 416765 - DNA, 25 bp, Artificial
  probe
  misc_feature (1)..(25): SEQ ID NO: 5632; WAN024GC7; Start 153; Stop 177
acatgatctgctcttacttggattg

SEQ ID NO: 416766 - DNA, 25 bp, Artificial
  probe
  misc_feature (1)..(25): SEQ ID NO: 5632; WAN024GC7; Start 107; Stop 131
tccaggaagaacaatcatatcatag

SEQ ID NO: 416767 - DNA, 25 bp, Artificial
  probe
  misc_feature (1)..(25): SEQ ID NO: 5632; WAN024GC7; Start 106; Stop 130
ctccaggaagaacaatcatatcata

SEQ ID NO: 416768 - DNA, 25 bp, Artificial
  probe
  misc_feature (1)..(25): SEQ ID NO: 5632; WAN024GC7; Start 151; Stop 175
agacatgatctgctcttacttggat

SEQ ID NO: 416769 - DNA, 25 bp, Artificial
  probe
  misc_feature (1)..(25): SEQ ID NO: 5632; WAN024GC7; Start 154; Stop 178
catgatctgctcttacttggattgc

SEQ ID NO: 416770 - DNA, 25 bp, Artificial
  probe
  misc_feature (1)..(25): SEQ ID NO: 5632; WAN024GC7; Start 100; Stop 124
gcatacctccaggaagaacaatcat

SEQ ID NO: 416771 - DNA, 25 bp, Artificial
  probe
  misc_feature (1)..(25): SEQ ID NO: 5632; WAN024GC7; Start 109; Stop 133
caggaagaacaatcatatcatagtc

SEQ ID NO: 416772 - DNA, 25 bp, Artificial
  probe
  misc_feature (1)..(25): SEQ ID NO: 5632; WAN024GC7; Start 111; Stop 135
ggaagaacaatcatatcatagtctg

SEQ ID NO: 416773 - DNA, 25 bp, Artificial
  probe
  misc_feature (1)..(25): SEQ ID NO: 5632; WAN024GC7; Start 110; Stop 134
aggaagaacaatcatatcatagtct

SEQ ID NO: 416774 - DNA, 25 bp, Artificial
  probe
  misc_feature (1)..(25): SEQ ID NO: 5632; WAN024GC7; Start 150; Stop 174
aagacatgatctgctcttacttgga

SEQ ID NO: 416775 - DNA, 25 bp, Artificial
  probe
  misc_feature (1)..(25): SEQ ID NO: 5632; WAN024GC7; Start 112; Stop 136
gaagaacaatcatatcatagtctga

SEQ ID NO: 416776 - DNA, 25 bp, Artificial
  probe
  misc_feature (1)..(25): SEQ ID NO: 5632; WAN024GC7; Start 65; Stop 89
caaggtctgattatcacgtaaatgt

SEQ ID NO: 416777 - DNA, 25 bp, Artificial
  probe
  misc_feature (1)..(25): SEQ ID NO: 5632; WAN024GC7; Start 64; Stop 88
tcaaggtctgattatcacgtaaatg

SEQ ID NO: 416778 - DNA, 25 bp, Artificial
  probe
  misc_feature (1)..(25): SEQ ID NO: 5632; WAN024GC7; Start 99; Stop 123
ggcatacctccaggaagaacaatca

SEQ ID NO: 416779 - DNA, 25 bp, Artificial
  probe
  misc_feature (1)..(25): SEQ ID NO: 5632; WAN024GC7; Start 197; Stop 221
ctcttcaaaaccaaccatatcacat

SEQ ID NO: 416780 - DNA, 25 bp, Artificial
  probe
  misc_feature (1)..(25): SEQ ID NO: 5632; WAN024GC7; Start 148; Stop 172
caaagacatgatctgctcttacttg

SEQ ID NO: 416781 - DNA, 25 bp, Artificial
  probe
  misc_feature (1)..(25): SEQ ID NO: 5632; WAN024GC7; Start 147; Stop 171
tcaaagacatgatctgctcttactt

SEQ ID NO: 416782 - DNA, 25 bp, Artificial
  probe
  misc_feature (1)..(25): SEQ ID NO: 5632; WAN024GC7; Start 72; Stop 96
tgattatcacgtaaatgtgcagaac

SEQ ID NO: 416783 - DNA, 25 bp, Artificial
  probe
  misc_feature (1)..(25): SEQ ID NO: 5632; WAN024GC7; Start 71; Stop 95
ctgattatcacgtaaatgtgcagaa

SEQ ID NO: 416784 - DNA, 25 bp, Artificial
  probe
  misc_feature (1)..(25): SEQ ID NO: 5632; WAN024GC7; Start 69; Stop 93
gtctgattatcacgtaaatgtgcag

SEQ ID NO: 416785 - DNA, 25 bp, Artificial
  probe
  misc_feature (1)..(25): SEQ ID NO: 5632; WAN024GC7; Start 13; Stop 37
aaatggctgctagtttcttcccttc

SEQ ID NO: 416786 - DNA, 25 bp, Artificial
  probe
  misc_feature (1)..(25): SEQ ID NO: 5632; WAN024GC7; Start 73; Stop 97
gattatcacgtaaatgtgcagaacc

SEQ ID NO: 416787 - DNA, 25 bp, Artificial
  probe
  misc_feature (1)..(25): SEQ ID NO: 5632; WAN024GC7; Start 149; Stop 173
aaagacatgatctgctcttacttgg

SEQ ID NO: 416788 - DNA, 25 bp, Artificial
  probe
  misc_feature (1)..(25): SEQ ID NO: 5632; WAN024GC7; Start 66; Stop 90
aaggtctgattatcacgtaaatgtg

SEQ ID NO: 416789 - DNA, 25 bp, Artificial
  probe
  misc_feature (1)..(25): SEQ ID NO: 5632; WAN024GC7; Start 146; Stop 170
atcaaagacatgatctgctcttact

SEQ ID NO: 416790 - DNA, 25 bp, Artificial
  probe
  misc_feature (1)..(25): SEQ ID NO: 5632; WAN024GC7; Start 145; Stop 169
catcaaagacatgatctgctcttac

SEQ ID NO: 416791 - DNA, 25 bp, Artificial
  probe
  misc_feature (1)..(25): SEQ ID NO: 5633; WAN024G2C; Start 191; Stop 215
tctatatctctgtcaatggtgttgc

SEQ ID NO: 416792 - DNA, 25 bp, Artificial
  probe
  misc_feature (1)..(25): SEQ ID NO: 5633; WAN024G2C; Start 192; Stop 216
ctatatctctgtcaatggtgttgcg

SEQ ID NO: 416793 - DNA, 25 bp, Artificial
  probe
  misc_feature (1)..(25): SEQ ID NO: 5633; WAN024G2C; Start 190; Stop 214
ttctatatctctgtcaatggtgttg

SEQ ID NO: 416794 - DNA, 25 bp, Artificial
  probe
  misc_feature (1)..(25): SEQ ID NO: 5633; WAN024G2C; Start 175; Stop 199
ccttctcagcgttctttctatatct

SEQ ID NO: 416795 - DNA, 25 bp, Artificial
  probe
  misc_feature (1)..(25): SEQ ID NO: 5633; WAN024G2C; Start 174; Stop 198
accttctcagcgttctttctatatc

SEQ ID NO: 416796 - DNA, 25 bp, Artificial
  probe
  misc_feature (1)..(25): SEQ ID NO: 5633; WAN024G2C; Start 182; Stop 206
agcgttctttctatatctctgtcaa

SEQ ID NO: 416797 - DNA, 25 bp, Artificial
  probe
  misc_feature (1)..(25): SEQ ID NO: 5633; WAN024G2C; Start 173; Stop 197
caccttctcagcgttctttctatat

SEQ ID NO: 416798 - DNA, 25 bp, Artificial
  probe
  misc_feature (1)..(25): SEQ ID NO: 5633; WAN024G2C; Start 177; Stop 201
ttctcagcgttctttctatatctct

SEQ ID NO: 416799 - DNA, 25 bp, Artificial
  probe
  misc_feature (1)..(25): SEQ ID NO: 5633; WAN024G2C; Start 193; Stop 217
tatatctctgtcaatggtgttgcgg

SEQ ID NO: 416800 - DNA, 25 bp, Artificial
  probe
  misc_feature (1)..(25): SEQ ID NO: 5633; WAN024G2C; Start 176; Stop 200
cttctcagcgttctttctatatctc

SEQ ID NO: 416801 - DNA, 25 bp, Artificial
  probe
  misc_feature (1)..(25): SEQ ID NO: 5633; WAN024G2C; Start 183; Stop 207
gcgttctttctatatctctgtcaat

SEQ ID NO: 416802 - DNA, 25 bp, Artificial
  probe
  misc_feature (1)..(25): SEQ ID NO: 5633; WAN024G2C; Start 25; Stop 49
gaaactccttcaaacttagccattg

SEQ ID NO: 416803 - DNA, 25 bp, Artificial
  probe
  misc_feature (1)..(25): SEQ ID NO: 5633; WAN024G2C; Start 213; Stop 237
tgcggtatctggtgaggtatcataa

SEQ ID NO: 416804 - DNA, 25 bp, Artificial
  probe
  misc_feature (1)..(25): SEQ ID NO: 5633; WAN024G2C; Start 212; Stop 236
ttgcggtatctggtgaggtatcata

SEQ ID NO: 416805 - DNA, 25 bp, Artificial
  probe
  misc_feature (1)..(25): SEQ ID NO: 5633; WAN024G2C; Start 172; Stop 196
acaccttctcagcgttctttctata

SEQ ID NO: 416806 - DNA, 25 bp, Artificial
  probe
  misc_feature (1)..(25): SEQ ID NO: 5633; WAN024G2C; Start 188; Stop 212
ctttctatatctctgtcaatggtgt

SEQ ID NO: 416807 - DNA, 25 bp, Artificial
  probe
  misc_feature (1)..(25): SEQ ID NO: 5633; WAN024G2C; Start 181; Stop 205
cagcgttctttctatatctctgtca

SEQ ID NO: 416808 - DNA, 25 bp, Artificial
  probe
  misc_feature (1)..(25): SEQ ID NO: 5633; WAN024G2C; Start 180; Stop 204
tcagcgttctttctatatctctgtc

SEQ ID NO: 416809 - DNA, 25 bp, Artificial
  probe
  misc_feature (1)..(25): SEQ ID NO: 5633; WAN024G2C; Start 179; Stop 203
ctcagcgttctttctatatctctgt

SEQ ID NO: 416810 - DNA, 25 bp, Artificial
  probe
  misc_feature (1)..(25): SEQ ID NO: 5633; WAN024G2C; Start 178; Stop 202
tctcagcgttctttctatatctctg

SEQ ID NO: 416811 - DNA, 25 bp, Artificial
  probe
  misc_feature (1)..(25): SEQ ID NO: 5633; WAN024G2C; Start 187; Stop 211
tctttctatatctctgtcaatggtg

SEQ ID NO: 416812 - DNA, 25 bp, Artificial
  probe
  misc_feature (1)..(25): SEQ ID NO: 5633; WAN024G2C; Start 189; Stop 213
tttctatatctctgtcaatggtgtt

SEQ ID NO: 416813 - DNA, 25 bp, Artificial
  probe
  misc_feature (1)..(25): SEQ ID NO: 5633; WAN024G2C; Start 171; Stop 195
aacaccttctcagcgttctttctat

SEQ ID NO: 416814 - DNA, 25 bp, Artificial
  probe
  misc_feature (1)..(25): SEQ ID NO: 5633; WAN024G2C; Start 26; Stop 50
aaactccttcaaacttagccattgc

SEQ ID NO: 416815 - DNA, 25 bp, Artificial
  probe
  misc_feature (1)..(25): SEQ ID NO: 5633; WAN024G2C; Start 184; Stop 208
cgttctttctatatctctgtcaatg

SEQ ID NO: 416816 - DNA, 25 bp, Artificial
  probe
  misc_feature (1)..(25): SEQ ID NO: 5633; WAN024G2C; Start 195; Stop 219
tatctctgtcaatggtgttgcggta

SEQ ID NO: 416817 - DNA, 25 bp, Artificial
  probe
  misc_feature (1)..(25): SEQ ID NO: 5633; WAN024G2C; Start 24; Stop 48
ggaaactccttcaaacttagccatt

SEQ ID NO: 416818 - DNA, 25 bp, Artificial
  probe
  misc_feature (1)..(25): SEQ ID NO: 5633; WAN024G2C; Start 186; Stop 210
ttctttctatatctctgtcaatggt

SEQ ID NO: 416819 - DNA, 25 bp, Artificial
  probe
  misc_feature (1)..(25): SEQ ID NO: 5633; WAN024G2C; Start 185; Stop 209
gttctttctatatctctgtcaatgg

SEQ ID NO: 416820 - DNA, 25 bp, Artificial
  probe
  misc_feature (1)..(25): SEQ ID NO: 5633; WAN024G2C; Start 38; Stop 62
acttagccattgctttcataaatgt

SEQ ID NO: 416821 - DNA, 25 bp, Artificial
  probe
  misc_feature (1)..(25): SEQ ID NO: 5633; WAN024G2C; Start 34; Stop 58
tcaaacttagccattgctttcataa

SEQ ID NO: 416822 - DNA, 25 bp, Artificial
  probe
  misc_feature (1)..(25): SEQ ID NO: 5633; WAN024G2C; Start 33; Stop 57
ttcaaacttagccattgctttcata

SEQ ID NO: 416823 - DNA, 25 bp, Artificial
  probe
  misc_feature (1)..(25): SEQ ID NO: 5633; WAN024G2C; Start 32; Stop 56
cttcaaacttagccattgctttcat

SEQ ID NO: 416824 - DNA, 25 bp, Artificial
  probe
  misc_feature (1)..(25): SEQ ID NO: 5634; WAN024B7E; Start 226; Stop 250
agatggctctttgtcaactgtagtg

SEQ ID NO: 416825 - DNA, 25 bp, Artificial
  probe
  misc_feature (1)..(25): SEQ ID NO: 5634; WAN024B7E; Start 227; Stop 251
gatggctctttgtcaactgtagtgg

SEQ ID NO: 416826 - DNA, 25 bp, Artificial
  probe
  misc_feature (1)..(25): SEQ ID NO: 5634; WAN024B7E; Start 225; Stop 249
aagatggctctttgtcaactgtagt

SEQ ID NO: 416827 - DNA, 25 bp, Artificial
  probe
  misc_feature (1)..(25): SEQ ID NO: 5634; WAN024B7E; Start 210; Stop 234
gactacgaggaagaaaagatggctc

SEQ ID NO: 416828 - DNA, 25 bp, Artificial
  probe
  misc_feature (1)..(25): SEQ ID NO: 5634; WAN024B7E; Start 211; Stop 235
actacgaggaagaaaagatggctct

SEQ ID NO: 416829 - DNA, 25 bp, Artificial
  probe
  misc_feature (1)..(25): SEQ ID NO: 5634; WAN024B7E; Start 212; Stop 236
ctacgaggaagaaaagatggctctt

SEQ ID NO: 416830 - DNA, 25 bp, Artificial
  probe
  misc_feature (1)..(25): SEQ ID NO: 5634; WAN024B7E; Start 262; Stop 286
gctaagctcgagaaaggacaaattt

SEQ ID NO: 416831 - DNA, 25 bp, Artificial
  probe
  misc_feature (1)..(25): SEQ ID NO: 5634; WAN024B7E; Start 224; Stop 248
aaagatggctctttgtcaactgtag

SEQ ID NO: 416832 - DNA, 25 bp, Artificial
  probe
  misc_feature (1)..(25): SEQ ID NO: 5634; WAN024B7E; Start 209; Stop 233
cgactacgaggaagaaaagatggct

SEQ ID NO: 416833 - DNA, 25 bp, Artificial
  probe
  misc_feature (1)..(25): SEQ ID NO: 5634; WAN024B7E; Start 206; Stop 230
aggcgactacgaggaagaaaagatg

SEQ ID NO: 416834 - DNA, 25 bp, Artificial
  probe
  misc_feature (1)..(25): SEQ ID NO: 5634; WAN024B7E; Start 263; Stop 287
ctaagctcgagaaaggacaaatttt

SEQ ID NO: 416835 - DNA, 25 bp, Artificial
  probe
  misc_feature (1)..(25): SEQ ID NO: 5634; WAN024B7E; Start 264; Stop 288
taagctcgagaaaggacaaattttg

SEQ ID NO: 416836 - DNA, 25 bp, Artificial
  probe
  misc_feature (1)..(25): SEQ ID NO: 5634; WAN024B7E; Start 223; Stop 247
aaaagatggctctttgtcaactgta

SEQ ID NO: 416837 - DNA, 25 bp, Artificial
  probe
  misc_feature (1)..(25): SEQ ID NO: 5634; WAN024B7E; Start 219; Stop 243
gaagaaaagatggctctttgtcaac

SEQ ID NO: 416838 - DNA, 25 bp, Artificial
  probe
  misc_feature (1)..(25): SEQ ID NO: 5634; WAN024B7E; Start 261; Stop 285
agctaagctcgagaaaggacaaatt

SEQ ID NO: 416839 - DNA, 25 bp, Artificial
  probe
  misc_feature (1)..(25): SEQ ID NO: 5634; WAN024B7E; Start 220; Stop 244
aagaaaagatggctctttgtcaact

SEQ ID NO: 416840 - DNA, 25 bp, Artificial
  probe
  misc_feature (1)..(25): SEQ ID NO: 5634; WAN024B7E; Start 221; Stop 245
agaaaagatggctctttgtcaactg

SEQ ID NO: 416841 - DNA, 25 bp, Artificial
  probe
  misc_feature (1)..(25): SEQ ID NO: 5634; WAN024B7E; Start 218; Stop 242
ggaagaaaagatggctctttgtcaa

SEQ ID NO: 416842 - DNA, 25 bp, Artificial
  probe
  misc_feature (1)..(25): SEQ ID NO: 5634; WAN024B7E; Start 216; Stop 240
gaggaagaaaagatggctctttgtc

SEQ ID NO: 416843 - DNA, 25 bp, Artificial
  probe
  misc_feature (1)..(25): SEQ ID NO: 5634; WAN024B7E; Start 222; Stop 246
gaaaagatggctctttgtcaactgt

SEQ ID NO: 416844 - DNA, 25 bp, Artificial
  probe
  misc_feature (1)..(25): SEQ ID NO: 5634; WAN024B7E; Start 213; Stop 237
tacgaggaagaaaagatggctcttt

SEQ ID NO: 416845 - DNA, 25 bp, Artificial
  probe
  misc_feature (1)..(25): SEQ ID NO: 5634; WAN024B7E; Start 260; Stop 284
cagctaagctcgagaaaggacaaat

SEQ ID NO: 416846 - DNA, 25 bp, Artificial
  probe
  misc_feature (1)..(25): SEQ ID NO: 5634; WAN024B7E; Start 217; Stop 241
aggaagaaaagatggctctttgtca

SEQ ID NO: 416847 - DNA, 25 bp, Artificial
  probe
  misc_feature (1)..(25): SEQ ID NO: 5634; WAN024B7E; Start 215; Stop 239
cgaggaagaaaagatggctctttgt

SEQ ID NO: 416848 - DNA, 25 bp, Artificial
  probe
  misc_feature (1)..(25): SEQ ID NO: 5634; WAN024B7E; Start 214; Stop 238
acgaggaagaaaagatggctctttg

SEQ ID NO: 416849 - DNA, 25 bp, Artificial
  probe
  misc_feature (1)..(25): SEQ ID NO: 5634; WAN024B7E; Start 265; Stop 289
aagctcgagaaaggacaaattttgt

SEQ ID NO: 416850 - DNA, 25 bp, Artificial
  probe
  misc_feature (1)..(25): SEQ ID NO: 5635; WAN024BDU; Start 58; Stop 82
cattatttgttgccgctttctgtaa

SEQ ID NO: 416851 - DNA, 25 bp, Artificial
  probe
  misc_feature (1)..(25): SEQ ID NO: 5635; WAN024BDU; Start 59; Stop 83
attatttgttgccgctttctgtaag

SEQ ID NO: 416852 - DNA, 25 bp, Artificial
  probe
  misc_feature (1)..(25): SEQ ID NO: 5635; WAN024BDU; Start 55; Stop 79
tttcattatttgttgccgctttctg

SEQ ID NO: 416853 - DNA, 25 bp, Artificial
  probe
  misc_feature (1)..(25): SEQ ID NO: 5635; WAN024BDU; Start 57; Stop 81
tcattatttgttgccgctttctgta

SEQ ID NO: 416854 - DNA, 25 bp, Artificial
  probe
  misc_feature (1)..(25): SEQ ID NO: 5635; WAN024BDU; Start 56; Stop 80
ttcattatttgttgccgctttctgt

SEQ ID NO: 416855 - DNA, 25 bp, Artificial
  probe
  misc_feature (1)..(25): SEQ ID NO: 5635; WAN024BDU; Start 60; Stop 84
ttatttgttgccgctttctgtaagg

SEQ ID NO: 416856 - DNA, 25 bp, Artificial
  probe
  misc_feature (1)..(25): SEQ ID NO: 5635; WAN024BDU; Start 53; Stop 77
attttcattatttgttgccgctttc

SEQ ID NO: 416857 - DNA, 25 bp, Artificial
  probe
  misc_feature (1)..(25): SEQ ID NO: 5635; WAN024BDU; Start 52; Stop 76
cattttcattatttgttgccgcttt

SEQ ID NO: 416858 - DNA, 25 bp, Artificial
  probe
  misc_feature (1)..(25): SEQ ID NO: 5635; WAN024BDU; Start 54; Stop 78
ttttcattatttgttgccgctttct

SEQ ID NO: 416859 - DNA, 25 bp, Artificial
  probe
  misc_feature (1)..(25): SEQ ID NO: 5635; WAN024BDU; Start 1; Stop 25
ttggttaacaatcataaaggttggc

SEQ ID NO: 416860 - DNA, 25 bp, Artificial
  probe
  misc_feature (1)..(25): SEQ ID NO: 5635; WAN024BDU; Start 51; Stop 75
acattttcattatttgttgccgctt

SEQ ID NO: 416861 - DNA, 25 bp, Artificial
  probe
  misc_feature (1)..(25): SEQ ID NO: 5635; WAN024BDU; Start 48; Stop 72
tagacattttcattatttgttgccg

SEQ ID NO: 416862 - DNA, 25 bp, Artificial
  probe
  misc_feature (1)..(25): SEQ ID NO: 5635; WAN024BDU; Start 50; Stop 74
gacattttcattatttgttgccgct

SEQ ID NO: 416863 - DNA, 25 bp, Artificial
  probe
  misc_feature (1)..(25): SEQ ID NO: 5635; WAN024BDU; Start 49; Stop 73
agacattttcattatttgttgccgc

SEQ ID NO: 416864 - DNA, 25 bp, Artificial
  probe
  misc_feature (1)..(25): SEQ ID NO: 5635; WAN024BDU; Start 2; Stop 26
tggttaacaatcataaaggttggcc

SEQ ID NO: 416865 - DNA, 25 bp, Artificial
  probe
  misc_feature (1)..(25): SEQ ID NO: 5635; WAN024BDU; Start 47; Stop 71
gtagacattttcattatttgttgcc

SEQ ID NO: 416866 - DNA, 25 bp, Artificial
  probe
  misc_feature (1)..(25): SEQ ID NO: 5635; WAN024BDU; Start 46; Stop 70
agtagacattttcattatttgttgc

SEQ ID NO: 416867 - DNA, 25 bp, Artificial
  probe
  misc_feature (1)..(25): SEQ ID NO: 5636; WAN024GAH; Start 123; Stop 147
tggtcacaactgtaacattcttatt

SEQ ID NO: 416868 - DNA, 25 bp, Artificial
  probe
  misc_feature (1)..(25): SEQ ID NO: 5636; WAN024GAH; Start 1; Stop 25
ttggttaatctggttaagagcaacg

SEQ ID NO: 416869 - DNA, 25 bp, Artificial
  probe
  misc_feature (1)..(25): SEQ ID NO: 5636; WAN024GAH; Start 128; Stop 152
acaactgtaacattcttattgacca

SEQ ID NO: 416870 - DNA, 25 bp, Artificial
  probe
  misc_feature (1)..(25): SEQ ID NO: 5636; WAN024GAH; Start 122; Stop 146
ttggtcacaactgtaacattcttat

SEQ ID NO: 416871 - DNA, 25 bp, Artificial
  probe
  misc_feature (1)..(25): SEQ ID NO: 5636; WAN024GAH; Start 127; Stop 151
cacaactgtaacattcttattgacc

SEQ ID NO: 416872 - DNA, 25 bp, Artificial
  probe
  misc_feature (1)..(25): SEQ ID NO: 5636; WAN024GAH; Start 124; Stop 148
ggtcacaactgtaacattcttattg

SEQ ID NO: 416873 - DNA, 25 bp, Artificial
  probe
  misc_feature (1)..(25): SEQ ID NO: 5636; WAN024GAH; Start 129; Stop 153
caactgtaacattcttattgaccaa

SEQ ID NO: 416874 - DNA, 25 bp, Artificial
  probe
  misc_feature (1)..(25): SEQ ID NO: 5636; WAN024GAH; Start 126; Stop 150
tcacaactgtaacattcttattgac

SEQ ID NO: 416875 - DNA, 25 bp, Artificial
  probe
  misc_feature (1)..(25): SEQ ID NO: 5636; WAN024GAH; Start 125; Stop 149
gtcacaactgtaacattcttattga

SEQ ID NO: 416876 - DNA, 25 bp, Artificial
  probe
  misc_feature (1)..(25): SEQ ID NO: 5636; WAN024GAH; Start 275; Stop 299
tcttgaatggtttcttcttcctgta

SEQ ID NO: 416877 - DNA, 25 bp, Artificial
  probe
  misc_feature (1)..(25): SEQ ID NO: 5636; WAN024GAH; Start 273; Stop 297
tttcttgaatggtttcttcttcctg

SEQ ID NO: 416878 - DNA, 25 bp, Artificial
  probe
  misc_feature (1)..(25): SEQ ID NO: 5636; WAN024GAH; Start 274; Stop 298
ttcttgaatggtttcttcttcctgt

SEQ ID NO: 416879 - DNA, 25 bp, Artificial
  probe
  misc_feature (1)..(25): SEQ ID NO: 5636; WAN024GAH; Start 276; Stop 300
cttgaatggtttcttcttcctgtaa

SEQ ID NO: 416880 - DNA, 25 bp, Artificial
  probe
  misc_feature (1)..(25): SEQ ID NO: 5636; WAN024GAH; Start 207; Stop 231
tttctttaatgagagaggctgcttt

SEQ ID NO: 416881 - DNA, 25 bp, Artificial
  probe
  misc_feature (1)..(25): SEQ ID NO: 5636; WAN024GAH; Start 208; Stop 232
ttctttaatgagagaggctgctttc

SEQ ID NO: 416882 - DNA, 25 bp, Artificial
  probe
  misc_feature (1)..(25): SEQ ID NO: 5636; WAN024GAH; Start 131; Stop 155
actgtaacattcttattgaccaatt

SEQ ID NO: 416883 - DNA, 25 bp, Artificial
  probe
  misc_feature (1)..(25): SEQ ID NO: 5636; WAN024GAH; Start 130; Stop 154
aactgtaacattcttattgaccaat

SEQ ID NO: 416884 - DNA, 25 bp, Artificial
  probe
  misc_feature (1)..(25): SEQ ID NO: 5636; WAN024GAH; Start 210; Stop 234
ctttaatgagagaggctgctttctg

SEQ ID NO: 416885 - DNA, 25 bp, Artificial
  probe
  misc_feature (1)..(25): SEQ ID NO: 5636; WAN024GAH; Start 209; Stop 233
tctttaatgagagaggctgctttct

SEQ ID NO: 416886 - DNA, 25 bp, Artificial
  probe
  misc_feature (1)..(25): SEQ ID NO: 5636; WAN024GAH; Start 211; Stop 235
tttaatgagagaggctgctttctga

SEQ ID NO: 416887 - DNA, 25 bp, Artificial
  probe
  misc_feature (1)..(25): SEQ ID NO: 5636; WAN024GAH; Start 133; Stop 157
tgtaacattcttattgaccaattca

SEQ ID NO: 416888 - DNA, 25 bp, Artificial
  probe
  misc_feature (1)..(25): SEQ ID NO: 5636; WAN024GAH; Start 2; Stop 26
tggttaatctggttaagagcaacgc

SEQ ID NO: 416889 - DNA, 25 bp, Artificial
  probe
  misc_feature (1)..(25): SEQ ID NO: 5636; WAN024GAH; Start 132; Stop 156
ctgtaacattcttattgaccaattc

SEQ ID NO: 416890 - DNA, 25 bp, Artificial
  probe
  misc_feature (1)..(25): SEQ ID NO: 5636; WAN024GAH; Start 212; Stop 236
ttaatgagagaggctgctttctgag

SEQ ID NO: 416891 - DNA, 25 bp, Artificial
  probe
  misc_feature (1)..(25): SEQ ID NO: 5636; WAN024GAH; Start 3; Stop 27
ggttaatctggttaagagcaacgcc

SEQ ID NO: 416892 - DNA, 25 bp, Artificial
  probe
  misc_feature (1)..(25): SEQ ID NO: 5636; WAN024GAH; Start 121; Stop 145
gttggtcacaactgtaacattctta

SEQ ID NO: 416893 - DNA, 25 bp, Artificial
  probe
  misc_feature (1)..(25): SEQ ID NO: 5636; WAN024GAH; Start 134; Stop 158
gtaacattcttattgaccaattcat

SEQ ID NO: 416894 - DNA, 25 bp, Artificial
  probe
  misc_feature (1)..(25): SEQ ID NO: 5636; WAN024GAH; Start 206; Stop 230
ttttctttaatgagagaggctgctt

SEQ ID NO: 416895 - DNA, 25 bp, Artificial
  probe
  misc_feature (1)..(25): SEQ ID NO: 5636; WAN024GAH; Start 272; Stop 296
ttttcttgaatggtttcttcttcct

SEQ ID NO: 416896 - DNA, 25 bp, Artificial
  probe
  misc_feature (1)..(25): SEQ ID NO: 5636; WAN024GAH; Start 135; Stop 159
taacattcttattgaccaattcatg

SEQ ID NO: 416897 - DNA, 25 bp, Artificial
  probe
  misc_feature (1)..(25): SEQ ID NO: 5636; WAN024GAH; Start 136; Stop 160
aacattcttattgaccaattcatga

SEQ ID NO: 416898 - DNA, 25 bp, Artificial
  probe
  misc_feature (1)..(25): SEQ ID NO: 5636; WAN024GAH; Start 71; Stop 95
atgacagttggaatctgcttttcaa

SEQ ID NO: 416899 - DNA, 25 bp, Artificial
  probe
  misc_feature (1)..(25): SEQ ID NO: 5636; WAN024GAH; Start 174; Stop 198
ttgttgttccagcatcgataaagat

SEQ ID NO: 416900 - DNA, 25 bp, Artificial
  probe
  misc_feature (1)..(25): SEQ ID NO: 5637; WAN024G3T; Start 31; Stop 55
tcacctcgtttcctactactatctt

SEQ ID NO: 416901 - DNA, 25 bp, Artificial
  probe
  misc_feature (1)..(25): SEQ ID NO: 5637; WAN024G3T; Start 30; Stop 54
atcacctcgtttcctactactatct

SEQ ID NO: 416902 - DNA, 25 bp, Artificial
  probe
  misc_feature (1)..(25): SEQ ID NO: 5637; WAN024G3T; Start 23; Stop 47
gcatattatcacctcgtttcctact

SEQ ID NO: 416903 - DNA, 25 bp, Artificial
  probe
  misc_feature (1)..(25): SEQ ID NO: 5637; WAN024G3T; Start 22; Stop 46
agcatattatcacctcgtttcctac

SEQ ID NO: 416904 - DNA, 25 bp, Artificial
  probe
  misc_feature (1)..(25): SEQ ID NO: 5637; WAN024G3T; Start 34; Stop 58
cctcgtttcctactactatcttacc

SEQ ID NO: 416905 - DNA, 25 bp, Artificial
  probe
  misc_feature (1)..(25): SEQ ID NO: 5637; WAN024G3T; Start 35; Stop 59
ctcgtttcctactactatcttacca

SEQ ID NO: 416906 - DNA, 25 bp, Artificial
  probe
  misc_feature (1)..(25): SEQ ID NO: 5637; WAN024G3T; Start 33; Stop 57
acctcgtttcctactactatcttac

SEQ ID NO: 416907 - DNA, 25 bp, Artificial
  probe
  misc_feature (1)..(25): SEQ ID NO: 5637; WAN024G3T; Start 32; Stop 56
cacctcgtttcctactactatctta

SEQ ID NO: 416908 - DNA, 25 bp, Artificial
  probe
  misc_feature (1)..(25): SEQ ID NO: 5637; WAN024G3T; Start 29; Stop 53
tatcacctcgtttcctactactatc

SEQ ID NO: 416909 - DNA, 25 bp, Artificial
  probe
  misc_feature (1)..(25): SEQ ID NO: 5637; WAN024G3T; Start 21; Stop 45
gagcatattatcacctcgtttccta

SEQ ID NO: 416910 - DNA, 25 bp, Artificial
  probe
  misc_feature (1)..(25): SEQ ID NO: 5637; WAN024G3T; Start 36; Stop 60
tcgtttcctactactatcttaccat

SEQ ID NO: 416911 - DNA, 25 bp, Artificial
  probe
  misc_feature (1)..(25): SEQ ID NO: 5637; WAN024G3T; Start 28; Stop 52
ttatcacctcgtttcctactactat

SEQ ID NO: 416912 - DNA, 25 bp, Artificial
  probe
  misc_feature (1)..(25): SEQ ID NO: 5637; WAN024G3T; Start 27; Stop 51
attatcacctcgtttcctactacta

SEQ ID NO: 416913 - DNA, 25 bp, Artificial
  probe
  misc_feature (1)..(25): SEQ ID NO: 5637; WAN024G3T; Start 26; Stop 50
tattatcacctcgtttcctactact

SEQ ID NO: 416914 - DNA, 25 bp, Artificial
  probe
  misc_feature (1)..(25): SEQ ID NO: 5637; WAN024G3T; Start 17; Stop 41
gtttgagcatattatcacctcgttt

SEQ ID NO: 416915 - DNA, 25 bp, Artificial
  probe
  misc_feature (1)..(25): SEQ ID NO: 5637; WAN024G3T; Start 14; Stop 38
cttgtttgagcatattatcacctcg

SEQ ID NO: 416916 - DNA, 25 bp, Artificial
  probe
  misc_feature (1)..(25): SEQ ID NO: 5637; WAN024G3T; Start 18; Stop 42
tttgagcatattatcacctcgtttc

SEQ ID NO: 416917 - DNA, 25 bp, Artificial
  probe
  misc_feature (1)..(25): SEQ ID NO: 5637; WAN024G3T; Start 16; Stop 40
tgtttgagcatattatcacctcgtt

SEQ ID NO: 416918 - DNA, 25 bp, Artificial
  probe
  misc_feature (1)..(25): SEQ ID NO: 5637; WAN024G3T; Start 15; Stop 39
ttgtttgagcatattatcacctcgt

SEQ ID NO: 416919 - DNA, 25 bp, Artificial
  probe
  misc_feature (1)..(25): SEQ ID NO: 5637; WAN024G3T; Start 19; Stop 43
ttgagcatattatcacctcgtttcc

SEQ ID NO: 416920 - DNA, 25 bp, Artificial
  probe
  misc_feature (1)..(25): SEQ ID NO: 5637; WAN024G3T; Start 13; Stop 37
tcttgtttgagcatattatcacctc

SEQ ID NO: 416921 - DNA, 25 bp, Artificial
  probe
  misc_feature (1)..(25): SEQ ID NO: 5637; WAN024G3T; Start 12; Stop 36
ttcttgtttgagcatattatcacct

SEQ ID NO: 416922 - DNA, 25 bp, Artificial
  probe
  misc_feature (1)..(25): SEQ ID NO: 5637; WAN024G3T; Start 20; Stop 44
tgagcatattatcacctcgtttcct

SEQ ID NO: 416923 - DNA, 25 bp, Artificial
  probe
  misc_feature (1)..(25): SEQ ID NO: 5637; WAN024G3T; Start 25; Stop 49
atattatcacctcgtttcctactac

SEQ ID NO: 416924 - DNA, 25 bp, Artificial
  probe
  misc_feature (1)..(25): SEQ ID NO: 5637; WAN024G3T; Start 24; Stop 48
catattatcacctcgtttcctacta

SEQ ID NO: 416925 - DNA, 25 bp, Artificial
  probe
  misc_feature (1)..(25): SEQ ID NO: 5637; WAN024G3T; Start 11; Stop 35
tttcttgtttgagcatattatcacc

SEQ ID NO: 416926 - DNA, 25 bp, Artificial
  probe
  misc_feature (1)..(25): SEQ ID NO: 5637; WAN024G3T; Start 56; Stop 80
accataaactagctcatcattcaaa

SEQ ID NO: 416927 - DNA, 25 bp, Artificial
  probe
  misc_feature (1)..(25): SEQ ID NO: 5637; WAN024G3T; Start 37; Stop 61
cgtttcctactactatcttaccata

SEQ ID NO: 416928 - DNA, 25 bp, Artificial
  probe
  misc_feature (1)..(25): SEQ ID NO: 5637; WAN024G3T; Start 55; Stop 79
taccataaactagctcatcattcaa

SEQ ID NO: 416929 - DNA, 25 bp, Artificial
  probe
  misc_feature (1)..(25): SEQ ID NO: 5637; WAN024G3T; Start 54; Stop 78
ttaccataaactagctcatcattca

SEQ ID NO: 416930 - DNA, 25 bp, Artificial
  probe
  misc_feature (1)..(25): SEQ ID NO: 5637; WAN024G3T; Start 52; Stop 76
tcttaccataaactagctcatcatt

SEQ ID NO: 416931 - DNA, 25 bp, Artificial
  probe
  misc_feature (1)..(25): SEQ ID NO: 5637; WAN024G3T; Start 57; Stop 81
ccataaactagctcatcattcaaat

SEQ ID NO: 416932 - DNA, 25 bp, Artificial
  probe
  misc_feature (1)..(25): SEQ ID NO: 5637; WAN024G3T; Start 53; Stop 77
cttaccataaactagctcatcattc

SEQ ID NO: 416933 - DNA, 25 bp, Artificial
  probe
  misc_feature (1)..(25): SEQ ID NO: 5638; WAN024G3S; Start 50; Stop 74
ctaatgttgttcctggtccaatgaa

SEQ ID NO: 416934 - DNA, 25 bp, Artificial
  probe
  misc_feature (1)..(25): SEQ ID NO: 5638; WAN024G3S; Start 48; Stop 72
ctctaatgttgttcctggtccaatg

SEQ ID NO: 416935 - DNA, 25 bp, Artificial
  probe
  misc_feature (1)..(25): SEQ ID NO: 5638; WAN024G3S; Start 49; Stop 73
tctaatgttgttcctggtccaatga

SEQ ID NO: 416936 - DNA, 25 bp, Artificial
  probe
  misc_feature (1)..(25): SEQ ID NO: 5638; WAN024G3S; Start 47; Stop 71
actctaatgttgttcctggtccaat

SEQ ID NO: 416937 - DNA, 25 bp, Artificial
  probe
  misc_feature (1)..(25): SEQ ID NO: 5638; WAN024G3S; Start 46; Stop 70
aactctaatgttgttcctggtccaa

SEQ ID NO: 416938 - DNA, 25 bp, Artificial
  probe
  misc_feature (1)..(25): SEQ ID NO: 5638; WAN024G3S; Start 217; Stop 241
acacgaatcagcaaatctttatcag

SEQ ID NO: 416939 - DNA, 25 bp, Artificial
  probe
  misc_feature (1)..(25): SEQ ID NO: 5638; WAN024G3S; Start 216; Stop 240
cacacgaatcagcaaatctttatca

SEQ ID NO: 416940 - DNA, 25 bp, Artificial
  probe
  misc_feature (1)..(25): SEQ ID NO: 5638; WAN024G3S; Start 14; Stop 38
ggatattgtcaataggcaactcacg

SEQ ID NO: 416941 - DNA, 25 bp, Artificial
  probe
  misc_feature (1)..(25): SEQ ID NO: 5638; WAN024G3S; Start 13; Stop 37
cggatattgtcaataggcaactcac

SEQ ID NO: 416942 - DNA, 25 bp, Artificial
  probe
  misc_feature (1)..(25): SEQ ID NO: 5638; WAN024G3S; Start 218; Stop 242
cacgaatcagcaaatctttatcagc

SEQ ID NO: 416943 - DNA, 25 bp, Artificial
  probe
  misc_feature (1)..(25): SEQ ID NO: 5638; WAN024G3S; Start 215; Stop 239
gcacacgaatcagcaaatctttatc

SEQ ID NO: 416944 - DNA, 25 bp, Artificial
  probe
  misc_feature (1)..(25): SEQ ID NO: 5638; WAN024G3S; Start 15; Stop 39
gatattgtcaataggcaactcacgc

SEQ ID NO: 416945 - DNA, 25 bp, Artificial
  probe
  misc_feature (1)..(25): SEQ ID NO: 5638; WAN024G3S; Start 80; Stop 104
tttctctttcttctactagactgcc

SEQ ID NO: 416946 - DNA, 25 bp, Artificial
  probe
  misc_feature (1)..(25): SEQ ID NO: 5638; WAN024G3S; Start 81; Stop 105
ttctctttcttctactagactgcct

SEQ ID NO: 416947 - DNA, 25 bp, Artificial
  probe
  misc_feature (1)..(25): SEQ ID NO: 5638; WAN024G3S; Start 51; Stop 75
taatgttgttcctggtccaatgaaa

SEQ ID NO: 416948 - DNA, 25 bp, Artificial
  probe
  misc_feature (1)..(25): SEQ ID NO: 5638; WAN024G3S; Start 82; Stop 106
tctctttcttctactagactgcctg

SEQ ID NO: 416949 - DNA, 25 bp, Artificial
  probe
  misc_feature (1)..(25): SEQ ID NO: 5638; WAN024G3S; Start 79; Stop 103
gtttctctttcttctactagactgc

SEQ ID NO: 416950 - DNA, 25 bp, Artificial
  probe
  misc_feature (1)..(25): SEQ ID NO: 5638; WAN024G3S; Start 45; Stop 69
aaactctaatgttgttcctggtcca

SEQ ID NO: 416951 - DNA, 25 bp, Artificial
  probe
  misc_feature (1)..(25): SEQ ID NO: 5638; WAN024G3S; Start 12; Stop 36
gcggatattgtcaataggcaactca

SEQ ID NO: 416952 - DNA, 25 bp, Artificial
  probe
  misc_feature (1)..(25): SEQ ID NO: 5638; WAN024G3S; Start 83; Stop 107
ctctttcttctactagactgcctgc

SEQ ID NO: 416953 - DNA, 25 bp, Artificial
  probe
  misc_feature (1)..(25): SEQ ID NO: 5638; WAN024G3S; Start 78; Stop 102
agtttctctttcttctactagactg

SEQ ID NO: 416954 - DNA, 25 bp, Artificial
  probe
  misc_feature (1)..(25): SEQ ID NO: 5638; WAN024G3S; Start 227; Stop 251
gcaaatctttatcagctaattcctg

SEQ ID NO: 416955 - DNA, 25 bp, Artificial
  probe
  misc_feature (1)..(25): SEQ ID NO: 5638; WAN024G3S; Start 86; Stop 110
tttcttctactagactgcctgcaaa

SEQ ID NO: 416956 - DNA, 25 bp, Artificial
  probe
  misc_feature (1)..(25): SEQ ID NO: 5638; WAN024G3S; Start 58; Stop 82
gttcctggtccaatgaaaatagttt

SEQ ID NO: 416957 - DNA, 25 bp, Artificial
  probe
  misc_feature (1)..(25): SEQ ID NO: 5638; WAN024G3S; Start 57; Stop 81
tgttcctggtccaatgaaaatagtt

SEQ ID NO: 416958 - DNA, 25 bp, Artificial
  probe
  misc_feature (1)..(25): SEQ ID NO: 5638; WAN024G3S; Start 44; Stop 68
aaaactctaatgttgttcctggtcc

SEQ ID NO: 416959 - DNA, 25 bp, Artificial
  probe
  misc_feature (1)..(25): SEQ ID NO: 5638; WAN024G3S; Start 169; Stop 193
tcattagtcaaaagggagttggttc

SEQ ID NO: 416960 - DNA, 25 bp, Artificial
  probe
  misc_feature (1)..(25): SEQ ID NO: 5638; WAN024G3S; Start 55; Stop 79
gttgttcctggtccaatgaaaatag

SEQ ID NO: 416961 - DNA, 25 bp, Artificial
  probe
  misc_feature (1)..(25): SEQ ID NO: 5638; WAN024G3S; Start 85; Stop 109
ctttcttctactagactgcctgcaa

SEQ ID NO: 416962 - DNA, 25 bp, Artificial
  probe
  misc_feature (1)..(25): SEQ ID NO: 5638; WAN024G3S; Start 220; Stop 244
cgaatcagcaaatctttatcagcta

SEQ ID NO: 416963 - DNA, 25 bp, Artificial
  probe
  misc_feature (1)..(25): SEQ ID NO: 5638; WAN024G3S; Start 56; Stop 80
ttgttcctggtccaatgaaaatagt

SEQ ID NO: 416964 - DNA, 25 bp, Artificial
  probe
  misc_feature (1)..(25): SEQ ID NO: 5638; WAN024G3S; Start 54; Stop 78
tgttgttcctggtccaatgaaaata

SEQ ID NO: 416965 - DNA, 25 bp, Artificial
  probe
  misc_feature (1)..(25): SEQ ID NO: 5638; WAN024G3S; Start 168; Stop 192
ctcattagtcaaaagggagttggtt

SEQ ID NO: 416966 - DNA, 25 bp, Artificial
  probe
  misc_feature (1)..(25): SEQ ID NO: 5639; WAN024FRB; Start 23; Stop 47
ttgctccttgggtgaataaagttta

SEQ ID NO: 416967 - DNA, 25 bp, Artificial
  probe
  misc_feature (1)..(25): SEQ ID NO: 5639; WAN024FRB; Start 21; Stop 45
atttgctccttgggtgaataaagtt

SEQ ID NO: 416968 - DNA, 25 bp, Artificial
  probe
  misc_feature (1)..(25): SEQ ID NO: 5639; WAN024FRB; Start 22; Stop 46
tttgctccttgggtgaataaagttt

SEQ ID NO: 416969 - DNA, 25 bp, Artificial
  probe
  misc_feature (1)..(25): SEQ ID NO: 5639; WAN024FRB; Start 20; Stop 44
aatttgctccttgggtgaataaagt

SEQ ID NO: 416970 - DNA, 25 bp, Artificial
  probe
  misc_feature (1)..(25): SEQ ID NO: 5639; WAN024FRB; Start 25; Stop 49
gctccttgggtgaataaagtttatc

SEQ ID NO: 416971 - DNA, 25 bp, Artificial
  probe
  misc_feature (1)..(25): SEQ ID NO: 5639; WAN024FRB; Start 24; Stop 48
tgctccttgggtgaataaagtttat

SEQ ID NO: 416972 - DNA, 25 bp, Artificial
  probe
  misc_feature (1)..(25): SEQ ID NO: 5639; WAN024FRB; Start 26; Stop 50
ctccttgggtgaataaagtttatct

SEQ ID NO: 416973 - DNA, 25 bp, Artificial
  probe
  misc_feature (1)..(25): SEQ ID NO: 5639; WAN024FRB; Start 28; Stop 52
ccttgggtgaataaagtttatcttg

SEQ ID NO: 416974 - DNA, 25 bp, Artificial
  probe
  misc_feature (1)..(25): SEQ ID NO: 5639; WAN024FRB; Start 27; Stop 51
tccttgggtgaataaagtttatctt

SEQ ID NO: 416975 - DNA, 25 bp, Artificial
  probe
  misc_feature (1)..(25): SEQ ID NO: 5639; WAN024FRB; Start 19; Stop 43
aaatttgctccttgggtgaataaag

SEQ ID NO: 416976 - DNA, 25 bp, Artificial
  probe
  misc_feature (1)..(25): SEQ ID NO: 5639; WAN024FRB; Start 29; Stop 53
cttgggtgaataaagtttatcttgt

SEQ ID NO: 416977 - DNA, 25 bp, Artificial
  probe
  misc_feature (1)..(25): SEQ ID NO: 5639; WAN024FRB; Start 30; Stop 54
ttgggtgaataaagtttatcttgtt

SEQ ID NO: 416978 - DNA, 25 bp, Artificial
  probe
  misc_feature (1)..(25): SEQ ID NO: 5639; WAN024FRB; Start 31; Stop 55
tgggtgaataaagtttatcttgtta

SEQ ID NO: 416979 - DNA, 25 bp, Artificial
  probe
  misc_feature (1)..(25): SEQ ID NO: 5639; WAN024FRB; Start 32; Stop 56
gggtgaataaagtttatcttgttac

SEQ ID NO: 416980 - DNA, 25 bp, Artificial
  probe
  misc_feature (1)..(25): SEQ ID NO: 5639; WAN024FRB; Start 18; Stop 42
aaaatttgctccttgggtgaataaa

SEQ ID NO: 416981 - DNA, 25 bp, Artificial
  probe
  misc_feature (1)..(25): SEQ ID NO: 5639; WAN024FRB; Start 33; Stop 57
ggtgaataaagtttatcttgttaca

SEQ ID NO: 416982 - DNA, 25 bp, Artificial
  probe
  misc_feature (1)..(25): SEQ ID NO: 5639; WAN024FRB; Start 41; Stop 65
aagtttatcttgttacagaaaatca

SEQ ID NO: 416983 - DNA, 25 bp, Artificial
  probe
  misc_feature (1)..(25): SEQ ID NO: 5639; WAN024FRB; Start 42; Stop 66
agtttatcttgttacagaaaatcaa

SEQ ID NO: 416984 - DNA, 25 bp, Artificial
  probe
  misc_feature (1)..(25): SEQ ID NO: 5640; WAN024GFP; Start 628; Stop 652
tatgaagcaacctctgacctgatta

SEQ ID NO: 416985 - DNA, 25 bp, Artificial
  probe
  misc_feature (1)..(25): SEQ ID NO: 5640; WAN024GFP; Start 627; Stop 651
ttatgaagcaacctctgacctgatt

SEQ ID NO: 416986 - DNA, 25 bp, Artificial
  probe
  misc_feature (1)..(25): SEQ ID NO: 5640; WAN024GFP; Start 629; Stop 653
atgaagcaacctctgacctgattaa

SEQ ID NO: 416987 - DNA, 25 bp, Artificial
  probe
  misc_feature (1)..(25): SEQ ID NO: 5640; WAN024GFP; Start 623; Stop 647
ctacttatgaagcaacctctgacct

SEQ ID NO: 416988 - DNA, 25 bp, Artificial
  probe
  misc_feature (1)..(25): SEQ ID NO: 5640; WAN024GFP; Start 16; Stop 40
cagacgactaaggtcagtatcaata

SEQ ID NO: 416989 - DNA, 25 bp, Artificial
  probe
  misc_feature (1)..(25): SEQ ID NO: 5640; WAN024GFP; Start 624; Stop 648
tacttatgaagcaacctctgacctg

SEQ ID NO: 416990 - DNA, 25 bp, Artificial
  probe
  misc_feature (1)..(25): SEQ ID NO: 5640; WAN024GFP; Start 622; Stop 646
actacttatgaagcaacctctgacc

SEQ ID NO: 416991 - DNA, 25 bp, Artificial
  probe
  misc_feature (1)..(25): SEQ ID NO: 5640; WAN024GFP; Start 17; Stop 41
agacgactaaggtcagtatcaataa

SEQ ID NO: 416992 - DNA, 25 bp, Artificial
  probe
  misc_feature (1)..(25): SEQ ID NO: 5640; WAN024GFP; Start 626; Stop 650
cttatgaagcaacctctgacctgat

SEQ ID NO: 416993 - DNA, 25 bp, Artificial
  probe
  misc_feature (1)..(25): SEQ ID NO: 5640; WAN024GFP; Start 480; Stop 504
gcgttatgaacaggctatcaatgag

SEQ ID NO: 416994 - DNA, 25 bp, Artificial
  probe
  misc_feature (1)..(25): SEQ ID NO: 5640; WAN024GFP; Start 466; Stop 490
gaagttattcgagagcgttatgaac

SEQ ID NO: 416995 - DNA, 25 bp, Artificial
  probe
  misc_feature (1)..(25): SEQ ID NO: 5640; WAN024GFP; Start 630; Stop 654
tgaagcaacctctgacctgattaac

SEQ ID NO: 416996 - DNA, 25 bp, Artificial
  probe
  misc_feature (1)..(25): SEQ ID NO: 5640; WAN024GFP; Start 467; Stop 491
aagttattcgagagcgttatgaaca

SEQ ID NO: 416997 - DNA, 25 bp, Artificial
  probe
  misc_feature (1)..(25): SEQ ID NO: 5640; WAN024GFP; Start 98; Stop 122
taatggaaacgagaaacagaggaat

SEQ ID NO: 416998 - DNA, 25 bp, Artificial
  probe
  misc_feature (1)..(25): SEQ ID NO: 5640; WAN024GFP; Start 465; Stop 489
ggaagttattcgagagcgttatgaa

SEQ ID NO: 416999 - DNA, 25 bp, Artificial
  probe
  misc_feature (1)..(25): SEQ ID NO: 5640; WAN024GFP; Start 468; Stop 492
agttattcgagagcgttatgaacag

SEQ ID NO: 417000 - DNA, 25 bp, Artificial
  probe
  misc_feature (1)..(25): SEQ ID NO: 5640; WAN024GFP; Start 18; Stop 42
gacgactaaggtcagtatcaataat

SEQ ID NO: 417001 - DNA, 25 bp, Artificial
  probe
  misc_feature (1)..(25): SEQ ID NO: 5640; WAN024GFP; Start 97; Stop 121
ctaatggaaacgagaaacagaggaa

SEQ ID NO: 417002 - DNA, 25 bp, Artificial
  probe
  misc_feature (1)..(25): SEQ ID NO: 5640; WAN024GFP; Start 116; Stop 140
gaggaatttataggaaagtcaggct

SEQ ID NO: 417003 - DNA, 25 bp, Artificial
  probe
  misc_feature (1)..(25): SEQ ID NO: 5640; WAN024GFP; Start 115; Stop 139
agaggaatttataggaaagtcaggc

SEQ ID NO: 417004 - DNA, 25 bp, Artificial
  probe
  misc_feature (1)..(25): SEQ ID NO: 5640; WAN024GFP; Start 101; Stop 125
tggaaacgagaaacagaggaattta

SEQ ID NO: 417005 - DNA, 25 bp, Artificial
  probe
  misc_feature (1)..(25): SEQ ID NO: 5640; WAN024GFP; Start 102; Stop 126
ggaaacgagaaacagaggaatttat

SEQ ID NO: 417006 - DNA, 25 bp, Artificial
  probe
  misc_feature (1)..(25): SEQ ID NO: 5640; WAN024GFP; Start 15; Stop 39
gcagacgactaaggtcagtatcaat

SEQ ID NO: 417007 - DNA, 25 bp, Artificial
  probe
  misc_feature (1)..(25): SEQ ID NO: 5640; WAN024GFP; Start 106; Stop 130
acgagaaacagaggaatttatagga

SEQ ID NO: 417008 - DNA, 25 bp, Artificial
  probe
  misc_feature (1)..(25): SEQ ID NO: 5640; WAN024GFP; Start 1; Stop 25
ttggttaggataatgcagacgacta

SEQ ID NO: 417009 - DNA, 25 bp, Artificial
  probe
  misc_feature (1)..(25): SEQ ID NO: 5640; WAN024GFP; Start 99; Stop 123
aatggaaacgagaaacagaggaatt

SEQ ID NO: 417010 - DNA, 25 bp, Artificial
  probe
  misc_feature (1)..(25): SEQ ID NO: 5640; WAN024GFP; Start 117; Stop 141
aggaatttataggaaagtcaggctt

SEQ ID NO: 417011 - DNA, 25 bp, Artificial
  probe
  misc_feature (1)..(25): SEQ ID NO: 5640; WAN024GFP; Start 100; Stop 124
atggaaacgagaaacagaggaattt

SEQ ID NO: 417012 - DNA, 25 bp, Artificial
  probe
  misc_feature (1)..(25): SEQ ID NO: 5640; WAN024GFP; Start 463; Stop 487
gtggaagttattcgagagcgttatg

SEQ ID NO: 417013 - DNA, 25 bp, Artificial
  probe
  misc_feature (1)..(25): SEQ ID NO: 5640; WAN024GFP; Start 114; Stop 138
cagaggaatttataggaaagtcagg

SEQ ID NO: 417014 - DNA, 25 bp, Artificial
  probe
  misc_feature (1)..(25): SEQ ID NO: 5640; WAN024GFP; Start 469; Stop 493
gttattcgagagcgttatgaacagg

SEQ ID NO: 417015 - DNA, 25 bp, Artificial
  probe
  misc_feature (1)..(25): SEQ ID NO: 5640; WAN024GFP; Start 105; Stop 129
aacgagaaacagaggaatttatagg

SEQ ID NO: 417016 - DNA, 25 bp, Artificial
  probe
  misc_feature (1)..(25): SEQ ID NO: 5640; WAN024GFP; Start 464; Stop 488
tggaagttattcgagagcgttatga

SEQ ID NO: 417017 - DNA, 25 bp, Artificial
  probe
  misc_feature (1)..(25): SEQ ID NO: 5641; WAN024CME; Start 110; Stop 134
tcgcttatataggtgtattctctgc

SEQ ID NO: 417018 - DNA, 25 bp, Artificial
  probe
  misc_feature (1)..(25): SEQ ID NO: 5641; WAN024CME; Start 111; Stop 135
cgcttatataggtgtattctctgct

SEQ ID NO: 417019 - DNA, 25 bp, Artificial
  probe
  misc_feature (1)..(25): SEQ ID NO: 5641; WAN024CME; Start 112; Stop 136
gcttatataggtgtattctctgctt

SEQ ID NO: 417020 - DNA, 25 bp, Artificial
  probe
  misc_feature (1)..(25): SEQ ID NO: 5641; WAN024CME; Start 100; Stop 124
caacaactaatcgcttatataggtg

SEQ ID NO: 417021 - DNA, 25 bp, Artificial
  probe
  misc_feature (1)..(25): SEQ ID NO: 5641; WAN024CME; Start 120; Stop 144
aggtgtattctctgcttgtttatca

SEQ ID NO: 417022 - DNA, 25 bp, Artificial
  probe
  misc_feature (1)..(25): SEQ ID NO: 5641; WAN024CME; Start 109; Stop 133
atcgcttatataggtgtattctctg

SEQ ID NO: 417023 - DNA, 25 bp, Artificial
  probe
  misc_feature (1)..(25): SEQ ID NO: 5641; WAN024CME; Start 99; Stop 123
tcaacaactaatcgcttatataggt

SEQ ID NO: 417024 - DNA, 25 bp, Artificial
  probe
  misc_feature (1)..(25): SEQ ID NO: 5641; WAN024CME; Start 125; Stop 149
tattctctgcttgtttatcacgctt

SEQ ID NO: 417025 - DNA, 25 bp, Artificial
  probe
  misc_feature (1)..(25): SEQ ID NO: 5641; WAN024CME; Start 17; Stop 41
ccaatcaacttatgtttatcggctt

SEQ ID NO: 417026 - DNA, 25 bp, Artificial
  probe
  misc_feature (1)..(25): SEQ ID NO: 5641; WAN024CME; Start 15; Stop 39
aaccaatcaacttatgtttatcggc

SEQ ID NO: 417027 - DNA, 25 bp, Artificial
  probe
  misc_feature (1)..(25): SEQ ID NO: 5641; WAN024CME; Start 101; Stop 125
aacaactaatcgcttatataggtgt

SEQ ID NO: 417028 - DNA, 25 bp, Artificial
  probe
  misc_feature (1)..(25): SEQ ID NO: 5641; WAN024CME; Start 19; Stop 43
aatcaacttatgtttatcggcttgg

SEQ ID NO: 417029 - DNA, 25 bp, Artificial
  probe
  misc_feature (1)..(25): SEQ ID NO: 5641; WAN024CME; Start 16; Stop 40
accaatcaacttatgtttatcggct

SEQ ID NO: 417030 - DNA, 25 bp, Artificial
  probe
  misc_feature (1)..(25): SEQ ID NO: 5641; WAN024CME; Start 124; Stop 148
gtattctctgcttgtttatcacgct

SEQ ID NO: 417031 - DNA, 25 bp, Artificial
  probe
  misc_feature (1)..(25): SEQ ID NO: 5641; WAN024CME; Start 26; Stop 50
ttatgtttatcggcttggcagattt

SEQ ID NO: 417032 - DNA, 25 bp, Artificial
  probe
  misc_feature (1)..(25): SEQ ID NO: 5641; WAN024CME; Start 119; Stop 143
taggtgtattctctgcttgtttatc

SEQ ID NO: 417033 - DNA, 25 bp, Artificial
  probe
  misc_feature (1)..(25): SEQ ID NO: 5641; WAN024CME; Start 18; Stop 42
caatcaacttatgtttatcggcttg

SEQ ID NO: 417034 - DNA, 25 bp, Artificial
  probe
  misc_feature (1)..(25): SEQ ID NO: 5641; WAN024CME; Start 123; Stop 147
tgtattctctgcttgtttatcacgc

SEQ ID NO: 417035 - DNA, 25 bp, Artificial
  probe
  misc_feature (1)..(25): SEQ ID NO: 5641; WAN024CME; Start 25; Stop 49
cttatgtttatcggcttggcagatt

SEQ ID NO: 417036 - DNA, 25 bp, Artificial
  probe
  misc_feature (1)..(25): SEQ ID NO: 5641; WAN024CME; Start 14; Stop 38
gaaccaatcaacttatgtttatcgg

SEQ ID NO: 417037 - DNA, 25 bp, Artificial
  probe
  misc_feature (1)..(25): SEQ ID NO: 5641; WAN024CME; Start 115; Stop 139
tatataggtgtattctctgcttgtt

SEQ ID NO: 417038 - DNA, 25 bp, Artificial
  probe
  misc_feature (1)..(25): SEQ ID NO: 5641; WAN024CME; Start 114; Stop 138
ttatataggtgtattctctgcttgt

SEQ ID NO: 417039 - DNA, 25 bp, Artificial
  probe
  misc_feature (1)..(25): SEQ ID NO: 5641; WAN024CME; Start 108; Stop 132
aatcgcttatataggtgtattctct

SEQ ID NO: 417040 - DNA, 25 bp, Artificial
  probe
  misc_feature (1)..(25): SEQ ID NO: 5641; WAN024CME; Start 126; Stop 150
attctctgcttgtttatcacgcttc

SEQ ID NO: 417041 - DNA, 25 bp, Artificial
  probe
  misc_feature (1)..(25): SEQ ID NO: 5641; WAN024CME; Start 92; Stop 116
aattctatcaacaactaatcgctta

SEQ ID NO: 417042 - DNA, 25 bp, Artificial
  probe
  misc_feature (1)..(25): SEQ ID NO: 5641; WAN024CME; Start 93; Stop 117
attctatcaacaactaatcgcttat

SEQ ID NO: 417043 - DNA, 25 bp, Artificial
  probe
  misc_feature (1)..(25): SEQ ID NO: 5641; WAN024CME; Start 118; Stop 142
ataggtgtattctctgcttgtttat

SEQ ID NO: 417044 - DNA, 25 bp, Artificial
  probe
  misc_feature (1)..(25): SEQ ID NO: 5641; WAN024CME; Start 54; Stop 78
gtttgtcatttgtttgtatagaggt

SEQ ID NO: 417045 - DNA, 25 bp, Artificial
  probe
  misc_feature (1)..(25): SEQ ID NO: 5641; WAN024CME; Start 53; Stop 77
tgtttgtcatttgtttgtatagagg

SEQ ID NO: 417046 - DNA, 25 bp, Artificial
  probe
  misc_feature (1)..(25): SEQ ID NO: 5641; WAN024CME; Start 121; Stop 145
ggtgtattctctgcttgtttatcac

SEQ ID NO: 417047 - DNA, 25 bp, Artificial
  probe
  misc_feature (1)..(25): SEQ ID NO: 5641; WAN024CME; Start 116; Stop 140
atataggtgtattctctgcttgttt

SEQ ID NO: 417048 - DNA, 25 bp, Artificial
  probe
  misc_feature (1)..(25): SEQ ID NO: 5641; WAN024CME; Start 122; Stop 146
gtgtattctctgcttgtttatcacg

SEQ ID NO: 417049 - DNA, 25 bp, Artificial
  probe
  misc_feature (1)..(25): SEQ ID NO: 5641; WAN024CME; Start 102; Stop 126
acaactaatcgcttatataggtgta

SEQ ID NO: 417050 - DNA, 25 bp, Artificial
  probe
  misc_feature (1)..(25): SEQ ID NO: 5642; WAN024CLW; Start 48; Stop 72
tattacttctcaaagggcgatttct

SEQ ID NO: 417051 - DNA, 25 bp, Artificial
  probe
  misc_feature (1)..(25): SEQ ID NO: 5642; WAN024CLW; Start 47; Stop 71
ctattacttctcaaagggcgatttc

SEQ ID NO: 417052 - DNA, 25 bp, Artificial
  probe
  misc_feature (1)..(25): SEQ ID NO: 5642; WAN024CLW; Start 17; Stop 41
acttggtttatatggtcgtggaaag

SEQ ID NO: 417053 - DNA, 25 bp, Artificial
  probe
  misc_feature (1)..(25): SEQ ID NO: 5642; WAN024CLW; Start 49; Stop 73
attacttctcaaagggcgatttctc

SEQ ID NO: 417054 - DNA, 25 bp, Artificial
  probe
  misc_feature (1)..(25): SEQ ID NO: 5642; WAN024CLW; Start 46; Stop 70
gctattacttctcaaagggcgattt

SEQ ID NO: 417055 - DNA, 25 bp, Artificial
  probe
  misc_feature (1)..(25): SEQ ID NO: 5642; WAN024CLW; Start 50; Stop 74
ttacttctcaaagggcgatttctca

SEQ ID NO: 417056 - DNA, 25 bp, Artificial
  probe
  misc_feature (1)..(25): SEQ ID NO: 5642; WAN024CLW; Start 18; Stop 42
cttggtttatatggtcgtggaaagc

SEQ ID NO: 417057 - DNA, 25 bp, Artificial
  probe
  misc_feature (1)..(25): SEQ ID NO: 5642; WAN024CLW; Start 16; Stop 40
cacttggtttatatggtcgtggaaa

SEQ ID NO: 417058 - DNA, 25 bp, Artificial
  probe
  misc_feature (1)..(25): SEQ ID NO: 5642; WAN024CLW; Start 4; Stop 28
gttagtttgccacacttggtttata

SEQ ID NO: 417059 - DNA, 25 bp, Artificial
  probe
  misc_feature (1)..(25): SEQ ID NO: 5642; WAN024CLW; Start 6; Stop 30
tagtttgccacacttggtttatatg

SEQ ID NO: 417060 - DNA, 25 bp, Artificial
  probe
  misc_feature (1)..(25): SEQ ID NO: 5642; WAN024CLW; Start 20; Stop 44
tggtttatatggtcgtggaaagcat

SEQ ID NO: 417061 - DNA, 25 bp, Artificial
  probe
  misc_feature (1)..(25): SEQ ID NO: 5642; WAN024CLW; Start 19; Stop 43
ttggtttatatggtcgtggaaagca

SEQ ID NO: 417062 - DNA, 25 bp, Artificial
  probe
  misc_feature (1)..(25): SEQ ID NO: 5642; WAN024CLW; Start 5; Stop 29
ttagtttgccacacttggtttatat

SEQ ID NO: 417063 - DNA, 25 bp, Artificial
  probe
  misc_feature (1)..(25): SEQ ID NO: 5642; WAN024CLW; Start 51; Stop 75
tacttctcaaagggcgatttctcac

SEQ ID NO: 417064 - DNA, 25 bp, Artificial
  probe
  misc_feature (1)..(25): SEQ ID NO: 5642; WAN024CLW; Start 22; Stop 46
gtttatatggtcgtggaaagcatgg

SEQ ID NO: 417065 - DNA, 25 bp, Artificial
  probe
  misc_feature (1)..(25): SEQ ID NO: 5642; WAN024CLW; Start 21; Stop 45
ggtttatatggtcgtggaaagcatg

SEQ ID NO: 417066 - DNA, 25 bp, Artificial
  probe
  misc_feature (1)..(25): SEQ ID NO: 5642; WAN024CLW; Start 45; Stop 69
ggctattacttctcaaagggcgatt

SEQ ID NO: 417067 - DNA, 25 bp, Artificial
  probe
  misc_feature (1)..(25): SEQ ID NO: 5642; WAN024CLW; Start 9; Stop 33
tttgccacacttggtttatatggtc

SEQ ID NO: 417068 - DNA, 25 bp, Artificial
  probe
  misc_feature (1)..(25): SEQ ID NO: 5642; WAN024CLW; Start 7; Stop 31
agtttgccacacttggtttatatgg

SEQ ID NO: 417069 - DNA, 25 bp, Artificial
  probe
  misc_feature (1)..(25): SEQ ID NO: 5642; WAN024CLW; Start 15; Stop 39
acacttggtttatatggtcgtggaa

SEQ ID NO: 417070 - DNA, 25 bp, Artificial
  probe
  misc_feature (1)..(25): SEQ ID NO: 5642; WAN024CLW; Start 3; Stop 27
ggttagtttgccacacttggtttat

SEQ ID NO: 417071 - DNA, 25 bp, Artificial
  probe
  misc_feature (1)..(25): SEQ ID NO: 5642; WAN024CLW; Start 8; Stop 32
gtttgccacacttggtttatatggt

SEQ ID NO: 417072 - DNA, 25 bp, Artificial
  probe
  misc_feature (1)..(25): SEQ ID NO: 5642; WAN024CLW; Start 38; Stop 62
aaagcatggctattacttctcaaag

SEQ ID NO: 417073 - DNA, 25 bp, Artificial
  probe
  misc_feature (1)..(25): SEQ ID NO: 5642; WAN024CLW; Start 37; Stop 61
gaaagcatggctattacttctcaaa

SEQ ID NO: 417074 - DNA, 25 bp, Artificial
  probe
  misc_feature (1)..(25): SEQ ID NO: 5642; WAN024CLW; Start 39; Stop 63
aagcatggctattacttctcaaagg

SEQ ID NO: 417075 - DNA, 25 bp, Artificial
  probe
  misc_feature (1)..(25): SEQ ID NO: 5642; WAN024CLW; Start 36; Stop 60
ggaaagcatggctattacttctcaa

SEQ ID NO: 417076 - DNA, 25 bp, Artificial
  probe
  misc_feature (1)..(25): SEQ ID NO: 5642; WAN024CLW; Start 14; Stop 38
cacacttggtttatatggtcgtgga

SEQ ID NO: 417077 - DNA, 25 bp, Artificial
  probe
  misc_feature (1)..(25): SEQ ID NO: 5642; WAN024CLW; Start 34; Stop 58
gtggaaagcatggctattacttctc

SEQ ID NO: 417078 - DNA, 25 bp, Artificial
  probe
  misc_feature (1)..(25): SEQ ID NO: 5642; WAN024CLW; Start 44; Stop 68
tggctattacttctcaaagggcgat

SEQ ID NO: 417079 - DNA, 25 bp, Artificial
  probe
  misc_feature (1)..(25): SEQ ID NO: 5642; WAN024CLW; Start 43; Stop 67
atggctattacttctcaaagggcga

SEQ ID NO: 417080 - DNA, 25 bp, Artificial
  probe
  misc_feature (1)..(25): SEQ ID NO: 5642; WAN024CLW; Start 35; Stop 59
tggaaagcatggctattacttctca

SEQ ID NO: 417081 - DNA, 25 bp, Artificial
  probe
  misc_feature (1)..(25): SEQ ID NO: 5642; WAN024CLW; Start 2; Stop 26
tggttagtttgccacacttggttta

SEQ ID NO: 417082 - DNA, 25 bp, Artificial
  probe
  misc_feature (1)..(25): SEQ ID NO: 5642; WAN024CLW; Start 23; Stop 47
tttatatggtcgtggaaagcatggc

SEQ ID NO: 417083 - DNA, 25 bp, Artificial
  probe
  misc_feature (1)..(25): SEQ ID NO: 5643; WAN024CRP; Start 252; Stop 276
ccatcaaggtacgataggtatcttc

SEQ ID NO: 417084 - DNA, 25 bp, Artificial
  probe
  misc_feature (1)..(25): SEQ ID NO: 5643; WAN024CRP; Start 254; Stop 278
atcaaggtacgataggtatcttctg

SEQ ID NO: 417085 - DNA, 25 bp, Artificial
  probe
  misc_feature (1)..(25): SEQ ID NO: 5643; WAN024CRP; Start 253; Stop 277
catcaaggtacgataggtatcttct

SEQ ID NO: 417086 - DNA, 25 bp, Artificial
  probe
  misc_feature (1)..(25): SEQ ID NO: 5643; WAN024CRP; Start 255; Stop 279
tcaaggtacgataggtatcttctga

SEQ ID NO: 417087 - DNA, 25 bp, Artificial
  probe
  misc_feature (1)..(25): SEQ ID NO: 5643; WAN024CRP; Start 251; Stop 275
gccatcaaggtacgataggtatctt

SEQ ID NO: 417088 - DNA, 25 bp, Artificial
  probe
  misc_feature (1)..(25): SEQ ID NO: 5643; WAN024CRP; Start 173; Stop 197
ttcacaacctcaaacaatttcttgg

SEQ ID NO: 417089 - DNA, 25 bp, Artificial
  probe
  misc_feature (1)..(25): SEQ ID NO: 5643; WAN024CRP; Start 172; Stop 196
tttcacaacctcaaacaatttcttg

SEQ ID NO: 417090 - DNA, 25 bp, Artificial
  probe
  misc_feature (1)..(25): SEQ ID NO: 5643; WAN024CRP; Start 72; Stop 96
caatgcccaagatttcttccaattc

SEQ ID NO: 417091 - DNA, 25 bp, Artificial
  probe
  misc_feature (1)..(25): SEQ ID NO: 5643; WAN024CRP; Start 73; Stop 97
aatgcccaagatttcttccaattct

SEQ ID NO: 417092 - DNA, 25 bp, Artificial
  probe
  misc_feature (1)..(25): SEQ ID NO: 5643; WAN024CRP; Start 1; Stop 25
ttggttatagaggtcatacaagccc

SEQ ID NO: 417093 - DNA, 25 bp, Artificial
  probe
  misc_feature (1)..(25): SEQ ID NO: 5643; WAN024CRP; Start 250; Stop 274
cgccatcaaggtacgataggtatct

SEQ ID NO: 417094 - DNA, 25 bp, Artificial
  probe
  misc_feature (1)..(25): SEQ ID NO: 5643; WAN024CRP; Start 129; Stop 153
ggtccagcttgttcataaaggtaaa

SEQ ID NO: 417095 - DNA, 25 bp, Artificial
  probe
  misc_feature (1)..(25): SEQ ID NO: 5643; WAN024CRP; Start 174; Stop 198
tcacaacctcaaacaatttcttggt

SEQ ID NO: 417096 - DNA, 25 bp, Artificial
  probe
  misc_feature (1)..(25): SEQ ID NO: 5643; WAN024CRP; Start 171; Stop 195
gtttcacaacctcaaacaatttctt

SEQ ID NO: 417097 - DNA, 25 bp, Artificial
  probe
  misc_feature (1)..(25): SEQ ID NO: 5643; WAN024CRP; Start 71; Stop 95
gcaatgcccaagatttcttccaatt

SEQ ID NO: 417098 - DNA, 25 bp, Artificial
  probe
  misc_feature (1)..(25): SEQ ID NO: 5643; WAN024CRP; Start 74; Stop 98
atgcccaagatttcttccaattctt

SEQ ID NO: 417099 - DNA, 25 bp, Artificial
  probe
  misc_feature (1)..(25): SEQ ID NO: 5643; WAN024CRP; Start 2; Stop 26
tggttatagaggtcatacaagccct

SEQ ID NO: 417100 - DNA, 25 bp, Artificial
  probe
  misc_feature (1)..(25): SEQ ID NO: 5643; WAN024CRP; Start 69; Stop 93
tagcaatgcccaagatttcttccaa

SEQ ID NO: 417101 - DNA, 25 bp, Artificial
  probe
  misc_feature (1)..(25): SEQ ID NO: 5643; WAN024CRP; Start 249; Stop 273
ccgccatcaaggtacgataggtatc

SEQ ID NO: 417102 - DNA, 25 bp, Artificial
  probe
  misc_feature (1)..(25): SEQ ID NO: 5643; WAN024CRP; Start 68; Stop 92
ctagcaatgcccaagatttcttcca

SEQ ID NO: 417103 - DNA, 25 bp, Artificial
  probe
  misc_feature (1)..(25): SEQ ID NO: 5643; WAN024CRP; Start 187; Stop 211
caatttcttggtttgagcctcgatc

SEQ ID NO: 417104 - DNA, 25 bp, Artificial
  probe
  misc_feature (1)..(25): SEQ ID NO: 5643; WAN024CRP; Start 70; Stop 94
agcaatgcccaagatttcttccaat

SEQ ID NO: 417105 - DNA, 25 bp, Artificial
  probe
  misc_feature (1)..(25): SEQ ID NO: 5643; WAN024CRP; Start 128; Stop 152
cggtccagcttgttcataaaggtaa

SEQ ID NO: 417106 - DNA, 25 bp, Artificial
  probe
  misc_feature (1)..(25): SEQ ID NO: 5643; WAN024CRP; Start 184; Stop 208
aaacaatttcttggtttgagcctcg

SEQ ID NO: 417107 - DNA, 25 bp, Artificial
  probe
  misc_feature (1)..(25): SEQ ID NO: 5643; WAN024CRP; Start 186; Stop 210
acaatttcttggtttgagcctcgat

SEQ ID NO: 417108 - DNA, 25 bp, Artificial
  probe
  misc_feature (1)..(25): SEQ ID NO: 5643; WAN024CRP; Start 188; Stop 212
aatttcttggtttgagcctcgatcc

SEQ ID NO: 417109 - DNA, 25 bp, Artificial
  probe
  misc_feature (1)..(25): SEQ ID NO: 5643; WAN024CRP; Start 185; Stop 209
aacaatttcttggtttgagcctcga

SEQ ID NO: 417110 - DNA, 25 bp, Artificial
  probe
  misc_feature (1)..(25): SEQ ID NO: 5643; WAN024CRP; Start 47; Stop 71
ataggccagttcatagggtagctag

SEQ ID NO: 417111 - DNA, 25 bp, Artificial
  probe
  misc_feature (1)..(25): SEQ ID NO: 5643; WAN024CRP; Start 46; Stop 70
gataggccagttcatagggtagcta

SEQ ID NO: 417112 - DNA, 25 bp, Artificial
  probe
  misc_feature (1)..(25): SEQ ID NO: 5643; WAN024CRP; Start 176; Stop 200
acaacctcaaacaatttcttggttt

SEQ ID NO: 417113 - DNA, 25 bp, Artificial
  probe
  misc_feature (1)..(25): SEQ ID NO: 5643; WAN024CRP; Start 127; Stop 151
acggtccagcttgttcataaaggta

SEQ ID NO: 417114 - DNA, 25 bp, Artificial
  probe
  misc_feature (1)..(25): SEQ ID NO: 5643; WAN024CRP; Start 175; Stop 199
cacaacctcaaacaatttcttggtt

SEQ ID NO: 417115 - DNA, 25 bp, Artificial
  probe
  misc_feature (1)..(25): SEQ ID NO: 5643; WAN024CRP; Start 124; Stop 148
gtcacggtccagcttgttcataaag

SEQ ID NO: 417116 - DNA, 25 bp, Artificial
  probe
  misc_feature (1)..(25): SEQ ID NO: 5644; WAN024GE4; Start 174; Stop 198
gatctgctggtcatttagttcttcc

SEQ ID NO: 417117 - DNA, 25 bp, Artificial
  probe
  misc_feature (1)..(25): SEQ ID NO: 5644; WAN024GE4; Start 173; Stop 197
cgatctgctggtcatttagttcttc

SEQ ID NO: 417118 - DNA, 25 bp, Artificial
  probe
  misc_feature (1)..(25): SEQ ID NO: 5644; WAN024GE4; Start 190; Stop 214
agttcttccatatgttctgtagaca

SEQ ID NO: 417119 - DNA, 25 bp, Artificial
  probe
  misc_feature (1)..(25): SEQ ID NO: 5644; WAN024GE4; Start 53; Stop 77
gttctttatcgaggttggcatattt

SEQ ID NO: 417120 - DNA, 25 bp, Artificial
  probe
  misc_feature (1)..(25): SEQ ID NO: 5644; WAN024GE4; Start 44; Stop 68
cgtgtaattgttctttatcgaggtt

SEQ ID NO: 417121 - DNA, 25 bp, Artificial
  probe
  misc_feature (1)..(25): SEQ ID NO: 5644; WAN024GE4; Start 52; Stop 76
tgttctttatcgaggttggcatatt

SEQ ID NO: 417122 - DNA, 25 bp, Artificial
  probe
  misc_feature (1)..(25): SEQ ID NO: 5644; WAN024GE4; Start 51; Stop 75
ttgttctttatcgaggttggcatat

SEQ ID NO: 417123 - DNA, 25 bp, Artificial
  probe
  misc_feature (1)..(25): SEQ ID NO: 5644; WAN024GE4; Start 50; Stop 74
attgttctttatcgaggttggcata

SEQ ID NO: 417124 - DNA, 25 bp, Artificial
  probe
  misc_feature (1)..(25): SEQ ID NO: 5644; WAN024GE4; Start 47; Stop 71
gtaattgttctttatcgaggttggc

SEQ ID NO: 417125 - DNA, 25 bp, Artificial
  probe
  misc_feature (1)..(25): SEQ ID NO: 5644; WAN024GE4; Start 178; Stop 202
tgctggtcatttagttcttccatat

SEQ ID NO: 417126 - DNA, 25 bp, Artificial
  probe
  misc_feature (1)..(25): SEQ ID NO: 5644; WAN024GE4; Start 48; Stop 72
taattgttctttatcgaggttggca

SEQ ID NO: 417127 - DNA, 25 bp, Artificial
  probe
  misc_feature (1)..(25): SEQ ID NO: 5644; WAN024GE4; Start 46; Stop 70
tgtaattgttctttatcgaggttgg

SEQ ID NO: 417128 - DNA, 25 bp, Artificial
  probe
  misc_feature (1)..(25): SEQ ID NO: 5644; WAN024GE4; Start 177; Stop 201
ctgctggtcatttagttcttccata

SEQ ID NO: 417129 - DNA, 25 bp, Artificial
  probe
  misc_feature (1)..(25): SEQ ID NO: 5644; WAN024GE4; Start 172; Stop 196
acgatctgctggtcatttagttctt

SEQ ID NO: 417130 - DNA, 25 bp, Artificial
  probe
  misc_feature (1)..(25): SEQ ID NO: 5644; WAN024GE4; Start 49; Stop 73
aattgttctttatcgaggttggcat

SEQ ID NO: 417131 - DNA, 25 bp, Artificial
  probe
  misc_feature (1)..(25): SEQ ID NO: 5644; WAN024GE4; Start 171; Stop 195
aacgatctgctggtcatttagttct

SEQ ID NO: 417132 - DNA, 25 bp, Artificial
  probe
  misc_feature (1)..(25): SEQ ID NO: 5644; WAN024GE4; Start 45; Stop 69
gtgtaattgttctttatcgaggttg

SEQ ID NO: 417133 - DNA, 25 bp, Artificial
  probe
  misc_feature (1)..(25): SEQ ID NO: 5644; WAN024GE4; Start 189; Stop 213
tagttcttccatatgttctgtagac

SEQ ID NO: 417134 - DNA, 25 bp, Artificial
  probe
  misc_feature (1)..(25): SEQ ID NO: 5644; WAN024GE4; Start 54; Stop 78
ttctttatcgaggttggcatattta

SEQ ID NO: 417135 - DNA, 25 bp, Artificial
  probe
  misc_feature (1)..(25): SEQ ID NO: 5644; WAN024GE4; Start 59; Stop 83
tatcgaggttggcatatttatcttt

SEQ ID NO: 417136 - DNA, 25 bp, Artificial
  probe
  misc_feature (1)..(25): SEQ ID NO: 5644; WAN024GE4; Start 58; Stop 82
ttatcgaggttggcatatttatctt

SEQ ID NO: 417137 - DNA, 25 bp, Artificial
  probe
  misc_feature (1)..(25): SEQ ID NO: 5644; WAN024GE4; Start 57; Stop 81
tttatcgaggttggcatatttatct

SEQ ID NO: 417138 - DNA, 25 bp, Artificial
  probe
  misc_feature (1)..(25): SEQ ID NO: 5644; WAN024GE4; Start 55; Stop 79
tctttatcgaggttggcatatttat

SEQ ID NO: 417139 - DNA, 25 bp, Artificial
  probe
  misc_feature (1)..(25): SEQ ID NO: 5644; WAN024GE4; Start 56; Stop 80
ctttatcgaggttggcatatttatc

SEQ ID NO: 417140 - DNA, 25 bp, Artificial
  probe
  misc_feature (1)..(25): SEQ ID NO: 5644; WAN024GE4; Start 176; Stop 200
tctgctggtcatttagttcttccat

SEQ ID NO: 417141 - DNA, 25 bp, Artificial
  probe
  misc_feature (1)..(25): SEQ ID NO: 5644; WAN024GE4; Start 175; Stop 199
atctgctggtcatttagttcttcca

SEQ ID NO: 417142 - DNA, 25 bp, Artificial
  probe
  misc_feature (1)..(25): SEQ ID NO: 5644; WAN024GE4; Start 188; Stop 212
ttagttcttccatatgttctgtaga

SEQ ID NO: 417143 - DNA, 25 bp, Artificial
  probe
  misc_feature (1)..(25): SEQ ID NO: 5644; WAN024GE4; Start 86; Stop 110
attcttgtgaatttgcagtacgttc

SEQ ID NO: 417144 - DNA, 25 bp, Artificial
  probe
  misc_feature (1)..(25): SEQ ID NO: 5644; WAN024GE4; Start 43; Stop 67
tcgtgtaattgttctttatcgaggt

SEQ ID NO: 417145 - DNA, 25 bp, Artificial
  probe
  misc_feature (1)..(25): SEQ ID NO: 5644; WAN024GE4; Start 42; Stop 66
atcgtgtaattgttctttatcgagg

SEQ ID NO: 417146 - DNA, 25 bp, Artificial
  probe
  misc_feature (1)..(25): SEQ ID NO: 5644; WAN024GE4; Start 192; Stop 216
ttcttccatatgttctgtagacatg

SEQ ID NO: 417147 - DNA, 25 bp, Artificial
  probe
  misc_feature (1)..(25): SEQ ID NO: 5644; WAN024GE4; Start 191; Stop 215
gttcttccatatgttctgtagacat

SEQ ID NO: 417148 - DNA, 25 bp, Artificial
  probe
  misc_feature (1)..(25): SEQ ID NO: 5644; WAN024GE4; Start 169; Stop 193
cgaacgatctgctggtcatttagtt

SEQ ID NO: 417149 - DNA, 25 bp, Artificial
  probe
  misc_feature (1)..(25): SEQ ID NO: 5645; WAN024GIU; Start 357; Stop 381
acgcaatctggataagaactaacta

SEQ ID NO: 417150 - DNA, 25 bp, Artificial
  probe
  misc_feature (1)..(25): SEQ ID NO: 5645; WAN024GIU; Start 356; Stop 380
tacgcaatctggataagaactaact

SEQ ID NO: 417151 - DNA, 25 bp, Artificial
  probe
  misc_feature (1)..(25): SEQ ID NO: 5645; WAN024GIU; Start 355; Stop 379
ctacgcaatctggataagaactaac

SEQ ID NO: 417152 - DNA, 25 bp, Artificial
  probe
  misc_feature (1)..(25): SEQ ID NO: 5645; WAN024GIU; Start 354; Stop 378
gctacgcaatctggataagaactaa

SEQ ID NO: 417153 - DNA, 25 bp, Artificial
  probe
  misc_feature (1)..(25): SEQ ID NO: 5645; WAN024GIU; Start 358; Stop 382
cgcaatctggataagaactaactaa

SEQ ID NO: 417154 - DNA, 25 bp, Artificial
  probe
  misc_feature (1)..(25): SEQ ID NO: 5645; WAN024GIU; Start 190; Stop 214
ttgagtaaccttgcttcggataacc

SEQ ID NO: 417155 - DNA, 25 bp, Artificial
  probe
  misc_feature (1)..(25): SEQ ID NO: 5645; WAN024GIU; Start 330; Stop 354
gtatggaaacaagattgacgagatg

SEQ ID NO: 417156 - DNA, 25 bp, Artificial
  probe
  misc_feature (1)..(25): SEQ ID NO: 5645; WAN024GIU; Start 329; Stop 353
agtatggaaacaagattgacgagat

SEQ ID NO: 417157 - DNA, 25 bp, Artificial
  probe
  misc_feature (1)..(25): SEQ ID NO: 5645; WAN024GIU; Start 328; Stop 352
gagtatggaaacaagattgacgaga

SEQ ID NO: 417158 - DNA, 25 bp, Artificial
  probe
  misc_feature (1)..(25): SEQ ID NO: 5645; WAN024GIU; Start 66; Stop 90
aatcaagcgtgaagtcaatgagatt

SEQ ID NO: 417159 - DNA, 25 bp, Artificial
  probe
  misc_feature (1)..(25): SEQ ID NO: 5645; WAN024GIU; Start 189; Stop 213
tttgagtaaccttgcttcggataac

SEQ ID NO: 417160 - DNA, 25 bp, Artificial
  probe
  misc_feature (1)..(25): SEQ ID NO: 5645; WAN024GIU; Start 192; Stop 216
gagtaaccttgcttcggataaccaa

SEQ ID NO: 417161 - DNA, 25 bp, Artificial
  probe
  misc_feature (1)..(25): SEQ ID NO: 5645; WAN024GIU; Start 331; Stop 355
tatggaaacaagattgacgagatgc

SEQ ID NO: 417162 - DNA, 25 bp, Artificial
  probe
  misc_feature (1)..(25): SEQ ID NO: 5645; WAN024GIU; Start 327; Stop 351
cgagtatggaaacaagattgacgag

SEQ ID NO: 417163 - DNA, 25 bp, Artificial
  probe
  misc_feature (1)..(25): SEQ ID NO: 5645; WAN024GIU; Start 67; Stop 91
atcaagcgtgaagtcaatgagattt

SEQ ID NO: 417164 - DNA, 25 bp, Artificial
  probe
  misc_feature (1)..(25): SEQ ID NO: 5645; WAN024GIU; Start 65; Stop 89
aaatcaagcgtgaagtcaatgagat

SEQ ID NO: 417165 - DNA, 25 bp, Artificial
  probe
  misc_feature (1)..(25): SEQ ID NO: 5645; WAN024GIU; Start 359; Stop 383
gcaatctggataagaactaactaat

SEQ ID NO: 417166 - DNA, 25 bp, Artificial
  probe
  misc_feature (1)..(25): SEQ ID NO: 5645; WAN024GIU; Start 334; Stop 358
ggaaacaagattgacgagatgctac

SEQ ID NO: 417167 - DNA, 25 bp, Artificial
  probe
  misc_feature (1)..(25): SEQ ID NO: 5645; WAN024GIU; Start 160; Stop 184
ttgtctgttgccaaggtttattaca

SEQ ID NO: 417168 - DNA, 25 bp, Artificial
  probe
  misc_feature (1)..(25): SEQ ID NO: 5645; WAN024GIU; Start 333; Stop 357
tggaaacaagattgacgagatgcta

SEQ ID NO: 417169 - DNA, 25 bp, Artificial
  probe
  misc_feature (1)..(25): SEQ ID NO: 5645; WAN024GIU; Start 64; Stop 88
gaaatcaagcgtgaagtcaatgaga

SEQ ID NO: 417170 - DNA, 25 bp, Artificial
  probe
  misc_feature (1)..(25): SEQ ID NO: 5645; WAN024GIU; Start 335; Stop 359
gaaacaagattgacgagatgctacg

SEQ ID NO: 417171 - DNA, 25 bp, Artificial
  probe
  misc_feature (1)..(25): SEQ ID NO: 5645; WAN024GIU; Start 191; Stop 215
tgagtaaccttgcttcggataacca

SEQ ID NO: 417172 - DNA, 25 bp, Artificial
  probe
  misc_feature (1)..(25): SEQ ID NO: 5645; WAN024GIU; Start 161; Stop 185
tgtctgttgccaaggtttattacac

SEQ ID NO: 417173 - DNA, 25 bp, Artificial
  probe
  misc_feature (1)..(25): SEQ ID NO: 5645; WAN024GIU; Start 1; Stop 25
ttggttcaaagtagagaaaggaata

SEQ ID NO: 417174 - DNA, 25 bp, Artificial
  probe
  misc_feature (1)..(25): SEQ ID NO: 5645; WAN024GIU; Start 2; Stop 26
tggttcaaagtagagaaaggaatat

SEQ ID NO: 417175 - DNA, 25 bp, Artificial
  probe
  misc_feature (1)..(25): SEQ ID NO: 5645; WAN024GIU; Start 324; Stop 348
catcgagtatggaaacaagattgac

SEQ ID NO: 417176 - DNA, 25 bp, Artificial
  probe
  misc_feature (1)..(25): SEQ ID NO: 5645; WAN024GIU; Start 166; Stop 190
gttgccaaggtttattacaccattt

SEQ ID NO: 417177 - DNA, 25 bp, Artificial
  probe
  misc_feature (1)..(25): SEQ ID NO: 5645; WAN024GIU; Start 353; Stop 377
tgctacgcaatctggataagaacta

SEQ ID NO: 417178 - DNA, 25 bp, Artificial
  probe
  misc_feature (1)..(25): SEQ ID NO: 5645; WAN024GIU; Start 193; Stop 217
agtaaccttgcttcggataaccaaa

SEQ ID NO: 417179 - DNA, 25 bp, Artificial
  probe
  misc_feature (1)..(25): SEQ ID NO: 5645; WAN024GIU; Start 61; Stop 85
atggaaatcaagcgtgaagtcaatg

SEQ ID NO: 417180 - DNA, 25 bp, Artificial
  probe
  misc_feature (1)..(25): SEQ ID NO: 5645; WAN024GIU; Start 325; Stop 349
atcgagtatggaaacaagattgacg

SEQ ID NO: 417181 - DNA, 25 bp, Artificial
  probe
  misc_feature (1)..(25): SEQ ID NO: 5645; WAN024GIU; Start 260; Stop 284
gtgaacttggtcgcaatttgaaatt

SEQ ID NO: 417182 - DNA, 25 bp, Artificial
  probe
  misc_feature (1)..(25): SEQ ID NO: 5646; WAN024CES; Start 429; Stop 453
cagcgataatggtatggaagaatgg

SEQ ID NO: 417183 - DNA, 25 bp, Artificial
  probe
  misc_feature (1)..(25): SEQ ID NO: 5646; WAN024CES; Start 65; Stop 89
aagttaatcactgttgctacaagag

SEQ ID NO: 417184 - DNA, 25 bp, Artificial
  probe
  misc_feature (1)..(25): SEQ ID NO: 5646; WAN024CES; Start 181; Stop 205
gtaagcaaattccaactgtttccaa

SEQ ID NO: 417185 - DNA, 25 bp, Artificial
  probe
  misc_feature (1)..(25): SEQ ID NO: 5646; WAN024CES; Start 428; Stop 452
ccagcgataatggtatggaagaatg

SEQ ID NO: 417186 - DNA, 25 bp, Artificial
  probe
  misc_feature (1)..(25): SEQ ID NO: 5646; WAN024CES; Start 182; Stop 206
taagcaaattccaactgtttccaac

SEQ ID NO: 417187 - DNA, 25 bp, Artificial
  probe
  misc_feature (1)..(25): SEQ ID NO: 5646; WAN024CES; Start 179; Stop 203
ttgtaagcaaattccaactgtttcc

SEQ ID NO: 417188 - DNA, 25 bp, Artificial
  probe
  misc_feature (1)..(25): SEQ ID NO: 5646; WAN024CES; Start 34; Stop 58
ttcaccgattggcaacttgtaagaa

SEQ ID NO: 417189 - DNA, 25 bp, Artificial
  probe
  misc_feature (1)..(25): SEQ ID NO: 5646; WAN024CES; Start 180; Stop 204
tgtaagcaaattccaactgtttcca

SEQ ID NO: 417190 - DNA, 25 bp, Artificial
  probe
  misc_feature (1)..(25): SEQ ID NO: 5646; WAN024CES; Start 37; Stop 61
accgattggcaacttgtaagaaatt

SEQ ID NO: 417191 - DNA, 25 bp, Artificial
  probe
  misc_feature (1)..(25): SEQ ID NO: 5646; WAN024CES; Start 296; Stop 320
atgatagcaggtacaagtgaaccaa

SEQ ID NO: 417192 - DNA, 25 bp, Artificial
  probe
  misc_feature (1)..(25): SEQ ID NO: 5646; WAN024CES; Start 66; Stop 90
agttaatcactgttgctacaagagc

SEQ ID NO: 417193 - DNA, 25 bp, Artificial
  probe
  misc_feature (1)..(25): SEQ ID NO: 5646; WAN024CES; Start 62; Stop 86
tcaaagttaatcactgttgctacaa

SEQ ID NO: 417194 - DNA, 25 bp, Artificial
  probe
  misc_feature (1)..(25): SEQ ID NO: 5646; WAN024CES; Start 61; Stop 85
ttcaaagttaatcactgttgctaca

SEQ ID NO: 417195 - DNA, 25 bp, Artificial
  probe
  misc_feature (1)..(25): SEQ ID NO: 5646; WAN024CES; Start 203; Stop 227
caacggaagatgtcatacgctactg

SEQ ID NO: 417196 - DNA, 25 bp, Artificial
  probe
  misc_feature (1)..(25): SEQ ID NO: 5646; WAN024CES; Start 64; Stop 88
aaagttaatcactgttgctacaaga

SEQ ID NO: 417197 - DNA, 25 bp, Artificial
  probe
  misc_feature (1)..(25): SEQ ID NO: 5646; WAN024CES; Start 63; Stop 87
caaagttaatcactgttgctacaag

SEQ ID NO: 417198 - DNA, 25 bp, Artificial
  probe
  misc_feature (1)..(25): SEQ ID NO: 5646; WAN024CES; Start 60; Stop 84
tttcaaagttaatcactgttgctac

SEQ ID NO: 417199 - DNA, 25 bp, Artificial
  probe
  misc_feature (1)..(25): SEQ ID NO: 5646; WAN024CES; Start 36; Stop 60
caccgattggcaacttgtaagaaat

SEQ ID NO: 417200 - DNA, 25 bp, Artificial
  probe
  misc_feature (1)..(25): SEQ ID NO: 5646; WAN024CES; Start 58; Stop 82
aatttcaaagttaatcactgttgct

SEQ ID NO: 417201 - DNA, 25 bp, Artificial
  probe
  misc_feature (1)..(25): SEQ ID NO: 5646; WAN024CES; Start 295; Stop 319
catgatagcaggtacaagtgaacca

SEQ ID NO: 417202 - DNA, 25 bp, Artificial
  probe
  misc_feature (1)..(25): SEQ ID NO: 5646; WAN024CES; Start 98; Stop 122
atgaagacaccaagtacagatgcag

SEQ ID NO: 417203 - DNA, 25 bp, Artificial
  probe
  misc_feature (1)..(25): SEQ ID NO: 5646; WAN024CES; Start 38; Stop 62
ccgattggcaacttgtaagaaattt

SEQ ID NO: 417204 - DNA, 25 bp, Artificial
  probe
  misc_feature (1)..(25): SEQ ID NO: 5646; WAN024CES; Start 208; Stop 232
gaagatgtcatacgctactgcaact

SEQ ID NO: 417205 - DNA, 25 bp, Artificial
  probe
  misc_feature (1)..(25): SEQ ID NO: 5646; WAN024CES; Start 94; Stop 118
catcatgaagacaccaagtacagat

SEQ ID NO: 417206 - DNA, 25 bp, Artificial
  probe
  misc_feature (1)..(25): SEQ ID NO: 5646; WAN024CES; Start 143; Stop 167
gtactttgcatgttgttgataaggt

SEQ ID NO: 417207 - DNA, 25 bp, Artificial
  probe
  misc_feature (1)..(25): SEQ ID NO: 5646; WAN024CES; Start 141; Stop 165
aggtactttgcatgttgttgataag

SEQ ID NO: 417208 - DNA, 25 bp, Artificial
  probe
  misc_feature (1)..(25): SEQ ID NO: 5646; WAN024CES; Start 95; Stop 119
atcatgaagacaccaagtacagatg

SEQ ID NO: 417209 - DNA, 25 bp, Artificial
  probe
  misc_feature (1)..(25): SEQ ID NO: 5646; WAN024CES; Start 145; Stop 169
actttgcatgttgttgataaggtta

SEQ ID NO: 417210 - DNA, 25 bp, Artificial
  probe
  misc_feature (1)..(25): SEQ ID NO: 5646; WAN024CES; Start 144; Stop 168
tactttgcatgttgttgataaggtt

SEQ ID NO: 417211 - DNA, 25 bp, Artificial
  probe
  misc_feature (1)..(25): SEQ ID NO: 5646; WAN024CES; Start 142; Stop 166
ggtactttgcatgttgttgataagg

SEQ ID NO: 417212 - DNA, 25 bp, Artificial
  probe
  misc_feature (1)..(25): SEQ ID NO: 5646; WAN024CES; Start 140; Stop 164
aaggtactttgcatgttgttgataa

SEQ ID NO: 417213 - DNA, 25 bp, Artificial
  probe
  misc_feature (1)..(25): SEQ ID NO: 5646; WAN024CES; Start 124; Stop 148
gtcaatcaaagctgtcaaggtactt

SEQ ID NO: 417214 - DNA, 25 bp, Artificial
  probe
  misc_feature (1)..(25): SEQ ID NO: 5646; WAN024CES; Start 139; Stop 163
caaggtactttgcatgttgttgata

SEQ ID NO: 417215 - DNA, 25 bp, Artificial
  probe
  misc_feature (1)..(25): SEQ ID NO: 5647; WAN024D4E; Start 64; Stop 88
atgtatcttctccttcttgtggtca

SEQ ID NO: 417216 - DNA, 25 bp, Artificial
  probe
  misc_feature (1)..(25): SEQ ID NO: 5647; WAN024D4E; Start 65; Stop 89
tgtatcttctccttcttgtggtcaa

SEQ ID NO: 417217 - DNA, 25 bp, Artificial
  probe
  misc_feature (1)..(25): SEQ ID NO: 5647; WAN024D4E; Start 63; Stop 87
catgtatcttctccttcttgtggtc

SEQ ID NO: 417218 - DNA, 25 bp, Artificial
  probe
  misc_feature (1)..(25): SEQ ID NO: 5647; WAN024D4E; Start 67; Stop 91
tatcttctccttcttgtggtcaaag

SEQ ID NO: 417219 - DNA, 25 bp, Artificial
  probe
  misc_feature (1)..(25): SEQ ID NO: 5647; WAN024D4E; Start 66; Stop 90
gtatcttctccttcttgtggtcaaa

SEQ ID NO: 417220 - DNA, 25 bp, Artificial
  probe
  misc_feature (1)..(25): SEQ ID NO: 5647; WAN024D4E; Start 154; Stop 178
ttgaccaatttcttcataaagcgaa

SEQ ID NO: 417221 - DNA, 25 bp, Artificial
  probe
  misc_feature (1)..(25): SEQ ID NO: 5647; WAN024D4E; Start 153; Stop 177
tttgaccaatttcttcataaagcga

SEQ ID NO: 417222 - DNA, 25 bp, Artificial
  probe
  misc_feature (1)..(25): SEQ ID NO: 5647; WAN024D4E; Start 146; Stop 170
tcagggatttgaccaatttcttcat

SEQ ID NO: 417223 - DNA, 25 bp, Artificial
  probe
  misc_feature (1)..(25): SEQ ID NO: 5647; WAN024D4E; Start 147; Stop 171
cagggatttgaccaatttcttcata

SEQ ID NO: 417224 - DNA, 25 bp, Artificial
  probe
  misc_feature (1)..(25): SEQ ID NO: 5647; WAN024D4E; Start 152; Stop 176
atttgaccaatttcttcataaagcg

SEQ ID NO: 417225 - DNA, 25 bp, Artificial
  probe
  misc_feature (1)..(25): SEQ ID NO: 5647; WAN024D4E; Start 145; Stop 169
ctcagggatttgaccaatttcttca

SEQ ID NO: 417226 - DNA, 25 bp, Artificial
  probe
  misc_feature (1)..(25): SEQ ID NO: 5647; WAN024D4E; Start 148; Stop 172
agggatttgaccaatttcttcataa

SEQ ID NO: 417227 - DNA, 25 bp, Artificial
  probe
  misc_feature (1)..(25): SEQ ID NO: 5647; WAN024D4E; Start 144; Stop 168
cctcagggatttgaccaatttcttc

SEQ ID NO: 417228 - DNA, 25 bp, Artificial
  probe
  misc_feature (1)..(25): SEQ ID NO: 5647; WAN024D4E; Start 149; Stop 173
gggatttgaccaatttcttcataaa

SEQ ID NO: 417229 - DNA, 25 bp, Artificial
  probe
  misc_feature (1)..(25): SEQ ID NO: 5647; WAN024D4E; Start 97; Stop 121
atagctctcatagacaaagaaatgc

SEQ ID NO: 417230 - DNA, 25 bp, Artificial
  probe
  misc_feature (1)..(25): SEQ ID NO: 5647; WAN024D4E; Start 98; Stop 122
tagctctcatagacaaagaaatgca

SEQ ID NO: 417231 - DNA, 25 bp, Artificial
  probe
  misc_feature (1)..(25): SEQ ID NO: 5647; WAN024D4E; Start 151; Stop 175
gatttgaccaatttcttcataaagc

SEQ ID NO: 417232 - DNA, 25 bp, Artificial
  probe
  misc_feature (1)..(25): SEQ ID NO: 5647; WAN024D4E; Start 155; Stop 179
tgaccaatttcttcataaagcgaaa

SEQ ID NO: 417233 - DNA, 25 bp, Artificial
  probe
  misc_feature (1)..(25): SEQ ID NO: 5647; WAN024D4E; Start 53; Stop 77
tcctctatgacatgtatcttctcct

SEQ ID NO: 417234 - DNA, 25 bp, Artificial
  probe
  misc_feature (1)..(25): SEQ ID NO: 5647; WAN024D4E; Start 170; Stop 194
taaagcgaaatcatatcgtaaccca

SEQ ID NO: 417235 - DNA, 25 bp, Artificial
  probe
  misc_feature (1)..(25): SEQ ID NO: 5647; WAN024D4E; Start 143; Stop 167
tcctcagggatttgaccaatttctt

SEQ ID NO: 417236 - DNA, 25 bp, Artificial
  probe
  misc_feature (1)..(25): SEQ ID NO: 5647; WAN024D4E; Start 50; Stop 74
gcatcctctatgacatgtatcttct

SEQ ID NO: 417237 - DNA, 25 bp, Artificial
  probe
  misc_feature (1)..(25): SEQ ID NO: 5647; WAN024D4E; Start 49; Stop 73
tgcatcctctatgacatgtatcttc

SEQ ID NO: 417238 - DNA, 25 bp, Artificial
  probe
  misc_feature (1)..(25): SEQ ID NO: 5647; WAN024D4E; Start 169; Stop 193
ataaagcgaaatcatatcgtaaccc

SEQ ID NO: 417239 - DNA, 25 bp, Artificial
  probe
  misc_feature (1)..(25): SEQ ID NO: 5647; WAN024D4E; Start 54; Stop 78
cctctatgacatgtatcttctcctt

SEQ ID NO: 417240 - DNA, 25 bp, Artificial
  probe
  misc_feature (1)..(25): SEQ ID NO: 5647; WAN024D4E; Start 52; Stop 76
atcctctatgacatgtatcttctcc

SEQ ID NO: 417241 - DNA, 25 bp, Artificial
  probe
  misc_feature (1)..(25): SEQ ID NO: 5647; WAN024D4E; Start 177; Stop 201
aaatcatatcgtaacccacaaaacc

SEQ ID NO: 417242 - DNA, 25 bp, Artificial
  probe
  misc_feature (1)..(25): SEQ ID NO: 5647; WAN024D4E; Start 180; Stop 204
tcatatcgtaacccacaaaaccaat

SEQ ID NO: 417243 - DNA, 25 bp, Artificial
  probe
  misc_feature (1)..(25): SEQ ID NO: 5647; WAN024D4E; Start 179; Stop 203
atcatatcgtaacccacaaaaccaa

SEQ ID NO: 417244 - DNA, 25 bp, Artificial
  probe
  misc_feature (1)..(25): SEQ ID NO: 5647; WAN024D4E; Start 178; Stop 202
aatcatatcgtaacccacaaaacca

SEQ ID NO: 417245 - DNA, 25 bp, Artificial
  probe
  misc_feature (1)..(25): SEQ ID NO: 5647; WAN024D4E; Start 164; Stop 188
tcttcataaagcgaaatcatatcgt

SEQ ID NO: 417246 - DNA, 25 bp, Artificial
  probe
  misc_feature (1)..(25): SEQ ID NO: 5647; WAN024D4E; Start 150; Stop 174
ggatttgaccaatttcttcataaag

SEQ ID NO: 417247 - DNA, 25 bp, Artificial
  probe
  misc_feature (1)..(25): SEQ ID NO: 5647; WAN024D4E; Start 168; Stop 192
cataaagcgaaatcatatcgtaacc

SEQ ID NO: 417248 - DNA, 25 bp, Artificial
  probe
  misc_feature (1)..(25): SEQ ID NO: 5648; WAN024GK5; Start 48; Stop 72
cttcatagtttattgtcgtttcgga

SEQ ID NO: 417249 - DNA, 25 bp, Artificial
  probe
  misc_feature (1)..(25): SEQ ID NO: 5648; WAN024GK5; Start 47; Stop 71
tcttcatagtttattgtcgtttcgg

SEQ ID NO: 417250 - DNA, 25 bp, Artificial
  probe
  misc_feature (1)..(25): SEQ ID NO: 5648; WAN024GK5; Start 127; Stop 151
gacgacgagttagtaaggaagctag

SEQ ID NO: 417251 - DNA, 25 bp, Artificial
  probe
  misc_feature (1)..(25): SEQ ID NO: 5648; WAN024GK5; Start 81; Stop 105
ctattatgtaaattgcgacacgagg

SEQ ID NO: 417252 - DNA, 25 bp, Artificial
  probe
  misc_feature (1)..(25): SEQ ID NO: 5648; WAN024GK5; Start 82; Stop 106
tattatgtaaattgcgacacgagga

SEQ ID NO: 417253 - DNA, 25 bp, Artificial
  probe
  misc_feature (1)..(25): SEQ ID NO: 5648; WAN024GK5; Start 80; Stop 104
tctattatgtaaattgcgacacgag

SEQ ID NO: 417254 - DNA, 25 bp, Artificial
  probe
  misc_feature (1)..(25): SEQ ID NO: 5648; WAN024GK5; Start 46; Stop 70
ttcttcatagtttattgtcgtttcg

SEQ ID NO: 417255 - DNA, 25 bp, Artificial
  probe
  misc_feature (1)..(25): SEQ ID NO: 5648; WAN024GK5; Start 49; Stop 73
ttcatagtttattgtcgtttcggac

SEQ ID NO: 417256 - DNA, 25 bp, Artificial
  probe
  misc_feature (1)..(25): SEQ ID NO: 5648; WAN024GK5; Start 79; Stop 103
ttctattatgtaaattgcgacacga

SEQ ID NO: 417257 - DNA, 25 bp, Artificial
  probe
  misc_feature (1)..(25): SEQ ID NO: 5648; WAN024GK5; Start 83; Stop 107
attatgtaaattgcgacacgaggag

SEQ ID NO: 417258 - DNA, 25 bp, Artificial
  probe
  misc_feature (1)..(25): SEQ ID NO: 5648; WAN024GK5; Start 78; Stop 102
tttctattatgtaaattgcgacacg

SEQ ID NO: 417259 - DNA, 25 bp, Artificial
  probe
  misc_feature (1)..(25): SEQ ID NO: 5648; WAN024GK5; Start 14; Stop 38
ctcactattacaaagccaaacatat

SEQ ID NO: 417260 - DNA, 25 bp, Artificial
  probe
  misc_feature (1)..(25): SEQ ID NO: 5648; WAN024GK5; Start 4; Stop 28
gttcgcttcgctcactattacaaag

SEQ ID NO: 417261 - DNA, 25 bp, Artificial
  probe
  misc_feature (1)..(25): SEQ ID NO: 5648; WAN024GK5; Start 133; Stop 157
gagttagtaaggaagctaggcaaac

SEQ ID NO: 417262 - DNA, 25 bp, Artificial
  probe
  misc_feature (1)..(25): SEQ ID NO: 5648; WAN024GK5; Start 131; Stop 155
acgagttagtaaggaagctaggcaa

SEQ ID NO: 417263 - DNA, 25 bp, Artificial
  probe
  misc_feature (1)..(25): SEQ ID NO: 5648; WAN024GK5; Start 15; Stop 39
tcactattacaaagccaaacatatt

SEQ ID NO: 417264 - DNA, 25 bp, Artificial
  probe
  misc_feature (1)..(25): SEQ ID NO: 5648; WAN024GK5; Start 128; Stop 152
acgacgagttagtaaggaagctagg

SEQ ID NO: 417265 - DNA, 25 bp, Artificial
  probe
  misc_feature (1)..(25): SEQ ID NO: 5648; WAN024GK5; Start 84; Stop 108
ttatgtaaattgcgacacgaggagt

SEQ ID NO: 417266 - DNA, 25 bp, Artificial
  probe
  misc_feature (1)..(25): SEQ ID NO: 5648; WAN024GK5; Start 43; Stop 67
tctttcttcatagtttattgtcgtt

SEQ ID NO: 417267 - DNA, 25 bp, Artificial
  probe
  misc_feature (1)..(25): SEQ ID NO: 5648; WAN024GK5; Start 13; Stop 37
gctcactattacaaagccaaacata

SEQ ID NO: 417268 - DNA, 25 bp, Artificial
  probe
  misc_feature (1)..(25): SEQ ID NO: 5648; WAN024GK5; Start 130; Stop 154
gacgagttagtaaggaagctaggca

SEQ ID NO: 417269 - DNA, 25 bp, Artificial
  probe
  misc_feature (1)..(25): SEQ ID NO: 5648; WAN024GK5; Start 132; Stop 156
cgagttagtaaggaagctaggcaaa

SEQ ID NO: 417270 - DNA, 25 bp, Artificial
  probe
  misc_feature (1)..(25): SEQ ID NO: 5648; WAN024GK5; Start 42; Stop 66
atctttcttcatagtttattgtcgt

SEQ ID NO: 417271 - DNA, 25 bp, Artificial
  probe
  misc_feature (1)..(25): SEQ ID NO: 5648; WAN024GK5; Start 126; Stop 150
cgacgacgagttagtaaggaagcta

SEQ ID NO: 417272 - DNA, 25 bp, Artificial
  probe
  misc_feature (1)..(25): SEQ ID NO: 5648; WAN024GK5; Start 64; Stop 88
cgtttcggacaagttttctattatg

SEQ ID NO: 417273 - DNA, 25 bp, Artificial
  probe
  misc_feature (1)..(25): SEQ ID NO: 5648; WAN024GK5; Start 63; Stop 87
tcgtttcggacaagttttctattat

SEQ ID NO: 417274 - DNA, 25 bp, Artificial
  probe
  misc_feature (1)..(25): SEQ ID NO: 5648; WAN024GK5; Start 2; Stop 26
tggttcgcttcgctcactattacaa

SEQ ID NO: 417275 - DNA, 25 bp, Artificial
  probe
  misc_feature (1)..(25): SEQ ID NO: 5648; WAN024GK5; Start 1; Stop 25
ttggttcgcttcgctcactattaca

SEQ ID NO: 417276 - DNA, 25 bp, Artificial
  probe
  misc_feature (1)..(25): SEQ ID NO: 5648; WAN024GK5; Start 85; Stop 109
tatgtaaattgcgacacgaggagtc

SEQ ID NO: 417277 - DNA, 25 bp, Artificial
  probe
  misc_feature (1)..(25): SEQ ID NO: 5648; WAN024GK5; Start 3; Stop 27
ggttcgcttcgctcactattacaaa

SEQ ID NO: 417278 - DNA, 25 bp, Artificial
  probe
  misc_feature (1)..(25): SEQ ID NO: 5648; WAN024GK5; Start 134; Stop 158
agttagtaaggaagctaggcaaacg

SEQ ID NO: 417279 - DNA, 25 bp, Artificial
  probe
  misc_feature (1)..(25): SEQ ID NO: 5648; WAN024GK5; Start 16; Stop 40
cactattacaaagccaaacatattt

SEQ ID NO: 417280 - DNA, 25 bp, Artificial
  probe
  misc_feature (1)..(25): SEQ ID NO: 5648; WAN024GK5; Start 9; Stop 33
cttcgctcactattacaaagccaaa

SEQ ID NO: 417281 - DNA, 25 bp, Artificial
  probe
  misc_feature (1)..(25): SEQ ID NO: 5649; WAN024FHY; Start 169; Stop 193
ataacatcacctggattagcaaacc

SEQ ID NO: 417282 - DNA, 25 bp, Artificial
  probe
  misc_feature (1)..(25): SEQ ID NO: 5649; WAN024FHY; Start 168; Stop 192
tataacatcacctggattagcaaac

SEQ ID NO: 417283 - DNA, 25 bp, Artificial
  probe
  misc_feature (1)..(25): SEQ ID NO: 5649; WAN024FHY; Start 79; Stop 103
aataatctttgcgaccgtactctta

SEQ ID NO: 417284 - DNA, 25 bp, Artificial
  probe
  misc_feature (1)..(25): SEQ ID NO: 5649; WAN024FHY; Start 80; Stop 104
ataatctttgcgaccgtactcttac

SEQ ID NO: 417285 - DNA, 25 bp, Artificial
  probe
  misc_feature (1)..(25): SEQ ID NO: 5649; WAN024FHY; Start 109; Stop 133
ggaagcaggaccatcaatagcaatt

SEQ ID NO: 417286 - DNA, 25 bp, Artificial
  probe
  misc_feature (1)..(25): SEQ ID NO: 5649; WAN024FHY; Start 110; Stop 134
gaagcaggaccatcaatagcaattt

SEQ ID NO: 417287 - DNA, 25 bp, Artificial
  probe
  misc_feature (1)..(25): SEQ ID NO: 5649; WAN024FHY; Start 35; Stop 59
tacatagctcctgtatcaaggtagg

SEQ ID NO: 417288 - DNA, 25 bp, Artificial
  probe
  misc_feature (1)..(25): SEQ ID NO: 5649; WAN024FHY; Start 182; Stop 206
gattagcaaaccaagatcctgtagc

SEQ ID NO: 417289 - DNA, 25 bp, Artificial
  probe
  misc_feature (1)..(25): SEQ ID NO: 5649; WAN024FHY; Start 78; Stop 102
caataatctttgcgaccgtactctt

SEQ ID NO: 417290 - DNA, 25 bp, Artificial
  probe
  misc_feature (1)..(25): SEQ ID NO: 5649; WAN024FHY; Start 38; Stop 62
atagctcctgtatcaaggtaggtga

SEQ ID NO: 417291 - DNA, 25 bp, Artificial
  probe
  misc_feature (1)..(25): SEQ ID NO: 5649; WAN024FHY; Start 37; Stop 61
catagctcctgtatcaaggtaggtg

SEQ ID NO: 417292 - DNA, 25 bp, Artificial
  probe
  misc_feature (1)..(25): SEQ ID NO: 5649; WAN024FHY; Start 111; Stop 135
aagcaggaccatcaatagcaatttg

SEQ ID NO: 417293 - DNA, 25 bp, Artificial
  probe
  misc_feature (1)..(25): SEQ ID NO: 5649; WAN024FHY; Start 39; Stop 63
tagctcctgtatcaaggtaggtgaa

SEQ ID NO: 417294 - DNA, 25 bp, Artificial
  probe
  misc_feature (1)..(25): SEQ ID NO: 5649; WAN024FHY; Start 36; Stop 60
acatagctcctgtatcaaggtaggt

SEQ ID NO: 417295 - DNA, 25 bp, Artificial
  probe
  misc_feature (1)..(25): SEQ ID NO: 5649; WAN024FHY; Start 167; Stop 191
ttataacatcacctggattagcaaa

SEQ ID NO: 417296 - DNA, 25 bp, Artificial
  probe
  misc_feature (1)..(25): SEQ ID NO: 5649; WAN024FHY; Start 166; Stop 190
tttataacatcacctggattagcaa

SEQ ID NO: 417297 - DNA, 25 bp, Artificial
  probe
  misc_feature (1)..(25): SEQ ID NO: 5649; WAN024FHY; Start 81; Stop 105
taatctttgcgaccgtactcttacc

SEQ ID NO: 417298 - DNA, 25 bp, Artificial
  probe
  misc_feature (1)..(25): SEQ ID NO: 5649; WAN024FHY; Start 183; Stop 207
attagcaaaccaagatcctgtagcc

SEQ ID NO: 417299 - DNA, 25 bp, Artificial
  probe
  misc_feature (1)..(25): SEQ ID NO: 5649; WAN024FHY; Start 170; Stop 194
taacatcacctggattagcaaacca

SEQ ID NO: 417300 - DNA, 25 bp, Artificial
  probe
  misc_feature (1)..(25): SEQ ID NO: 5649; WAN024FHY; Start 17; Stop 41
atataggtcgctgcacgatacatag

SEQ ID NO: 417301 - DNA, 25 bp, Artificial
  probe
  misc_feature (1)..(25): SEQ ID NO: 5649; WAN024FHY; Start 174; Stop 198
atcacctggattagcaaaccaagat

SEQ ID NO: 417302 - DNA, 25 bp, Artificial
  probe
  misc_feature (1)..(25): SEQ ID NO: 5649; WAN024FHY; Start 138; Stop 162
ttgttttcatatcggctcctatttt

SEQ ID NO: 417303 - DNA, 25 bp, Artificial
  probe
  misc_feature (1)..(25): SEQ ID NO: 5649; WAN024FHY; Start 137; Stop 161
attgttttcatatcggctcctattt

SEQ ID NO: 417304 - DNA, 25 bp, Artificial
  probe
  misc_feature (1)..(25): SEQ ID NO: 5649; WAN024FHY; Start 114; Stop 138
caggaccatcaatagcaatttgaat

SEQ ID NO: 417305 - DNA, 25 bp, Artificial
  probe
  misc_feature (1)..(25): SEQ ID NO: 5649; WAN024FHY; Start 16; Stop 40
catataggtcgctgcacgatacata

SEQ ID NO: 417306 - DNA, 25 bp, Artificial
  probe
  misc_feature (1)..(25): SEQ ID NO: 5649; WAN024FHY; Start 135; Stop 159
gaattgttttcatatcggctcctat

SEQ ID NO: 417307 - DNA, 25 bp, Artificial
  probe
  misc_feature (1)..(25): SEQ ID NO: 5649; WAN024FHY; Start 136; Stop 160
aattgttttcatatcggctcctatt

SEQ ID NO: 417308 - DNA, 25 bp, Artificial
  probe
  misc_feature (1)..(25): SEQ ID NO: 5649; WAN024FHY; Start 115; Stop 139
aggaccatcaatagcaatttgaatt

SEQ ID NO: 417309 - DNA, 25 bp, Artificial
  probe
  misc_feature (1)..(25): SEQ ID NO: 5649; WAN024FHY; Start 139; Stop 163
tgttttcatatcggctcctatttta

SEQ ID NO: 417310 - DNA, 25 bp, Artificial
  probe
  misc_feature (1)..(25): SEQ ID NO: 5649; WAN024FHY; Start 171; Stop 195
aacatcacctggattagcaaaccaa

SEQ ID NO: 417311 - DNA, 25 bp, Artificial
  probe
  misc_feature (1)..(25): SEQ ID NO: 5649; WAN024FHY; Start 175; Stop 199
tcacctggattagcaaaccaagatc

SEQ ID NO: 417312 - DNA, 25 bp, Artificial
  probe
  misc_feature (1)..(25): SEQ ID NO: 5649; WAN024FHY; Start 116; Stop 140
ggaccatcaatagcaatttgaattg

SEQ ID NO: 417313 - DNA, 25 bp, Artificial
  probe
  misc_feature (1)..(25): SEQ ID NO: 5649; WAN024FHY; Start 173; Stop 197
catcacctggattagcaaaccaaga

SEQ ID NO: 417314 - DNA, 25 bp, Artificial
  probe
  misc_feature (1)..(25): SEQ ID NO: 5650; WAN024GCH; Start 38; Stop 62
tgaccagtattagccatagcaagag

SEQ ID NO: 417315 - DNA, 25 bp, Artificial
  probe
  misc_feature (1)..(25): SEQ ID NO: 5650; WAN024GCH; Start 37; Stop 61
ttgaccagtattagccatagcaaga

SEQ ID NO: 417316 - DNA, 25 bp, Artificial
  probe
  misc_feature (1)..(25): SEQ ID NO: 5650; WAN024GCH; Start 36; Stop 60
gttgaccagtattagccatagcaag

SEQ ID NO: 417317 - DNA, 25 bp, Artificial
  probe
  misc_feature (1)..(25): SEQ ID NO: 5650; WAN024GCH; Start 221; Stop 245
gtaataccgttatagtagccttctt

SEQ ID NO: 417318 - DNA, 25 bp, Artificial
  probe
  misc_feature (1)..(25): SEQ ID NO: 5650; WAN024GCH; Start 123; Stop 147
tagtcttatccttgtcatgccagat

SEQ ID NO: 417319 - DNA, 25 bp, Artificial
  probe
  misc_feature (1)..(25): SEQ ID NO: 5650; WAN024GCH; Start 122; Stop 146
ttagtcttatccttgtcatgccaga

SEQ ID NO: 417320 - DNA, 25 bp, Artificial
  probe
  misc_feature (1)..(25): SEQ ID NO: 5650; WAN024GCH; Start 81; Stop 105
aataaggagtaatctcgttcttgaa

SEQ ID NO: 417321 - DNA, 25 bp, Artificial
  probe
  misc_feature (1)..(25): SEQ ID NO: 5650; WAN024GCH; Start 224; Stop 248
ataccgttatagtagccttctttgg

SEQ ID NO: 417322 - DNA, 25 bp, Artificial
  probe
  misc_feature (1)..(25): SEQ ID NO: 5650; WAN024GCH; Start 106; Stop 130
accagttcctttgtctttagtctta

SEQ ID NO: 417323 - DNA, 25 bp, Artificial
  probe
  misc_feature (1)..(25): SEQ ID NO: 5650; WAN024GCH; Start 105; Stop 129
aaccagttcctttgtctttagtctt

SEQ ID NO: 417324 - DNA, 25 bp, Artificial
  probe
  misc_feature (1)..(25): SEQ ID NO: 5650; WAN024GCH; Start 104; Stop 128
aaaccagttcctttgtctttagtct

SEQ ID NO: 417325 - DNA, 25 bp, Artificial
  probe
  misc_feature (1)..(25): SEQ ID NO: 5650; WAN024GCH; Start 216; Stop 240
ggaaggtaataccgttatagtagcc

SEQ ID NO: 417326 - DNA, 25 bp, Artificial
  probe
  misc_feature (1)..(25): SEQ ID NO: 5650; WAN024GCH; Start 215; Stop 239
tggaaggtaataccgttatagtagc

SEQ ID NO: 417327 - DNA, 25 bp, Artificial
  probe
  misc_feature (1)..(25): SEQ ID NO: 5650; WAN024GCH; Start 103; Stop 127
gaaaccagttcctttgtctttagtc

SEQ ID NO: 417328 - DNA, 25 bp, Artificial
  probe
  misc_feature (1)..(25): SEQ ID NO: 5650; WAN024GCH; Start 101; Stop 125
ttgaaaccagttcctttgtctttag

SEQ ID NO: 417329 - DNA, 25 bp, Artificial
  probe
  misc_feature (1)..(25): SEQ ID NO: 5650; WAN024GCH; Start 100; Stop 124
cttgaaaccagttcctttgtcttta

SEQ ID NO: 417330 - DNA, 25 bp, Artificial
  probe
  misc_feature (1)..(25): SEQ ID NO: 5650; WAN024GCH; Start 102; Stop 126
tgaaaccagttcctttgtctttagt

SEQ ID NO: 417331 - DNA, 25 bp, Artificial
  probe
  misc_feature (1)..(25): SEQ ID NO: 5650; WAN024GCH; Start 39; Stop 63
gaccagtattagccatagcaagagc

SEQ ID NO: 417332 - DNA, 25 bp, Artificial
  probe
  misc_feature (1)..(25): SEQ ID NO: 5650; WAN024GCH; Start 89; Stop 113
gtaatctcgttcttgaaaccagttc

SEQ ID NO: 417333 - DNA, 25 bp, Artificial
  probe
  misc_feature (1)..(25): SEQ ID NO: 5650; WAN024GCH; Start 220; Stop 244
ggtaataccgttatagtagccttct

SEQ ID NO: 417334 - DNA, 25 bp, Artificial
  probe
  misc_feature (1)..(25): SEQ ID NO: 5650; WAN024GCH; Start 219; Stop 243
aggtaataccgttatagtagccttc

SEQ ID NO: 417335 - DNA, 25 bp, Artificial
  probe
  misc_feature (1)..(25): SEQ ID NO: 5650; WAN024GCH; Start 217; Stop 241
gaaggtaataccgttatagtagcct

SEQ ID NO: 417336 - DNA, 25 bp, Artificial
  probe
  misc_feature (1)..(25): SEQ ID NO: 5650; WAN024GCH; Start 88; Stop 112
agtaatctcgttcttgaaaccagtt

SEQ ID NO: 417337 - DNA, 25 bp, Artificial
  probe
  misc_feature (1)..(25): SEQ ID NO: 5650; WAN024GCH; Start 213; Stop 237
ggtggaaggtaataccgttatagta

SEQ ID NO: 417338 - DNA, 25 bp, Artificial
  probe
  misc_feature (1)..(25): SEQ ID NO: 5650; WAN024GCH; Start 35; Stop 59
ggttgaccagtattagccatagcaa

SEQ ID NO: 417339 - DNA, 25 bp, Artificial
  probe
  misc_feature (1)..(25): SEQ ID NO: 5650; WAN024GCH; Start 99; Stop 123
tcttgaaaccagttcctttgtcttt

SEQ ID NO: 417340 - DNA, 25 bp, Artificial
  probe
  misc_feature (1)..(25): SEQ ID NO: 5650; WAN024GCH; Start 98; Stop 122
ttcttgaaaccagttcctttgtctt

SEQ ID NO: 417341 - DNA, 25 bp, Artificial
  probe
  misc_feature (1)..(25): SEQ ID NO: 5650; WAN024GCH; Start 124; Stop 148
agtcttatccttgtcatgccagatg

SEQ ID NO: 417342 - DNA, 25 bp, Artificial
  probe
  misc_feature (1)..(25): SEQ ID NO: 5650; WAN024GCH; Start 113; Stop 137
cctttgtctttagtcttatccttgt

SEQ ID NO: 417343 - DNA, 25 bp, Artificial
  probe
  misc_feature (1)..(25): SEQ ID NO: 5650; WAN024GCH; Start 107; Stop 131
ccagttcctttgtctttagtcttat

SEQ ID NO: 417344 - DNA, 25 bp, Artificial
  probe
  misc_feature (1)..(25): SEQ ID NO: 5650; WAN024GCH; Start 90; Stop 114
taatctcgttcttgaaaccagttcc

SEQ ID NO: 417345 - DNA, 25 bp, Artificial
  probe
  misc_feature (1)..(25): SEQ ID NO: 5650; WAN024GCH; Start 223; Stop 247
aataccgttatagtagccttctttg

SEQ ID NO: 417346 - DNA, 25 bp, Artificial
  probe
  misc_feature (1)..(25): SEQ ID NO: 5650; WAN024GCH; Start 42; Stop 66
cagtattagccatagcaagagcacc

SEQ ID NO: 417347 - DNA, 25 bp, Artificial
  probe
  misc_feature (1)..(25): SEQ ID NO: 5651; WAN024B4U; Start 75; Stop 99
cataaccttccaactgaaccatctt

SEQ ID NO: 417348 - DNA, 25 bp, Artificial
  probe
  misc_feature (1)..(25): SEQ ID NO: 5651; WAN024B4U; Start 231; Stop 255
gcttgttggttggaatatcattgat

SEQ ID NO: 417349 - DNA, 25 bp, Artificial
  probe
  misc_feature (1)..(25): SEQ ID NO: 5651; WAN024B4U; Start 76; Stop 100
ataaccttccaactgaaccatcttg

SEQ ID NO: 417350 - DNA, 25 bp, Artificial
  probe
  misc_feature (1)..(25): SEQ ID NO: 5651; WAN024B4U; Start 74; Stop 98
tcataaccttccaactgaaccatct

SEQ ID NO: 417351 - DNA, 25 bp, Artificial
  probe
  misc_feature (1)..(25): SEQ ID NO: 5651; WAN024B4U; Start 230; Stop 254
cgcttgttggttggaatatcattga

SEQ ID NO: 417352 - DNA, 25 bp, Artificial
  probe
  misc_feature (1)..(25): SEQ ID NO: 5651; WAN024B4U; Start 85; Stop 109
caactgaaccatcttgagaacttcc

SEQ ID NO: 417353 - DNA, 25 bp, Artificial
  probe
  misc_feature (1)..(25): SEQ ID NO: 5651; WAN024B4U; Start 84; Stop 108
ccaactgaaccatcttgagaacttc

SEQ ID NO: 417354 - DNA, 25 bp, Artificial
  probe
  misc_feature (1)..(25): SEQ ID NO: 5651; WAN024B4U; Start 81; Stop 105
cttccaactgaaccatcttgagaac

SEQ ID NO: 417355 - DNA, 25 bp, Artificial
  probe
  misc_feature (1)..(25): SEQ ID NO: 5651; WAN024B4U; Start 77; Stop 101
taaccttccaactgaaccatcttga

SEQ ID NO: 417356 - DNA, 25 bp, Artificial
  probe
  misc_feature (1)..(25): SEQ ID NO: 5651; WAN024B4U; Start 202; Stop 226
ataggattggaagacggtatgtacg

SEQ ID NO: 417357 - DNA, 25 bp, Artificial
  probe
  misc_feature (1)..(25): SEQ ID NO: 5651; WAN024B4U; Start 83; Stop 107
tccaactgaaccatcttgagaactt

SEQ ID NO: 417358 - DNA, 25 bp, Artificial
  probe
  misc_feature (1)..(25): SEQ ID NO: 5651; WAN024B4U; Start 82; Stop 106
ttccaactgaaccatcttgagaact

SEQ ID NO: 417359 - DNA, 25 bp, Artificial
  probe
  misc_feature (1)..(25): SEQ ID NO: 5651; WAN024B4U; Start 201; Stop 225
cataggattggaagacggtatgtac

SEQ ID NO: 417360 - DNA, 25 bp, Artificial
  probe
  misc_feature (1)..(25): SEQ ID NO: 5651; WAN024B4U; Start 234; Stop 258
tgttggttggaatatcattgatacg

SEQ ID NO: 417361 - DNA, 25 bp, Artificial
  probe
  misc_feature (1)..(25): SEQ ID NO: 5651; WAN024B4U; Start 240; Stop 264
ttggaatatcattgatacgaacacc

SEQ ID NO: 417362 - DNA, 25 bp, Artificial
  probe
  misc_feature (1)..(25): SEQ ID NO: 5651; WAN024B4U; Start 238; Stop 262
ggttggaatatcattgatacgaaca

SEQ ID NO: 417363 - DNA, 25 bp, Artificial
  probe
  misc_feature (1)..(25): SEQ ID NO: 5651; WAN024B4U; Start 237; Stop 261
tggttggaatatcattgatacgaac

SEQ ID NO: 417364 - DNA, 25 bp, Artificial
  probe
  misc_feature (1)..(25): SEQ ID NO: 5651; WAN024B4U; Start 235; Stop 259
gttggttggaatatcattgatacga

SEQ ID NO: 417365 - DNA, 25 bp, Artificial
  probe
  misc_feature (1)..(25): SEQ ID NO: 5651; WAN024B4U; Start 241; Stop 265
tggaatatcattgatacgaacaccg

SEQ ID NO: 417366 - DNA, 25 bp, Artificial
  probe
  misc_feature (1)..(25): SEQ ID NO: 5651; WAN024B4U; Start 80; Stop 104
ccttccaactgaaccatcttgagaa

SEQ ID NO: 417367 - DNA, 25 bp, Artificial
  probe
  misc_feature (1)..(25): SEQ ID NO: 5651; WAN024B4U; Start 236; Stop 260
ttggttggaatatcattgatacgaa

SEQ ID NO: 417368 - DNA, 25 bp, Artificial
  probe
  misc_feature (1)..(25): SEQ ID NO: 5651; WAN024B4U; Start 200; Stop 224
gcataggattggaagacggtatgta

SEQ ID NO: 417369 - DNA, 25 bp, Artificial
  probe
  misc_feature (1)..(25): SEQ ID NO: 5651; WAN024B4U; Start 239; Stop 263
gttggaatatcattgatacgaacac

SEQ ID NO: 417370 - DNA, 25 bp, Artificial
  probe
  misc_feature (1)..(25): SEQ ID NO: 5651; WAN024B4U; Start 86; Stop 110
aactgaaccatcttgagaacttccg

SEQ ID NO: 417371 - DNA, 25 bp, Artificial
  probe
  misc_feature (1)..(25): SEQ ID NO: 5651; WAN024B4U; Start 78; Stop 102
aaccttccaactgaaccatcttgag

SEQ ID NO: 417372 - DNA, 25 bp, Artificial
  probe
  misc_feature (1)..(25): SEQ ID NO: 5651; WAN024B4U; Start 197; Stop 221
aaggcataggattggaagacggtat

SEQ ID NO: 417373 - DNA, 25 bp, Artificial
  probe
  misc_feature (1)..(25): SEQ ID NO: 5651; WAN024B4U; Start 233; Stop 257
ttgttggttggaatatcattgatac

SEQ ID NO: 417374 - DNA, 25 bp, Artificial
  probe
  misc_feature (1)..(25): SEQ ID NO: 5651; WAN024B4U; Start 90; Stop 114
gaaccatcttgagaacttccgctac

SEQ ID NO: 417375 - DNA, 25 bp, Artificial
  probe
  misc_feature (1)..(25): SEQ ID NO: 5651; WAN024B4U; Start 192; Stop 216
ggaacaaggcataggattggaagac

SEQ ID NO: 417376 - DNA, 25 bp, Artificial
  probe
  misc_feature (1)..(25): SEQ ID NO: 5651; WAN024B4U; Start 232; Stop 256
cttgttggttggaatatcattgata

SEQ ID NO: 417377 - DNA, 25 bp, Artificial
  probe
  misc_feature (1)..(25): SEQ ID NO: 5651; WAN024B4U; Start 73; Stop 97
ttcataaccttccaactgaaccatc

SEQ ID NO: 417378 - DNA, 25 bp, Artificial
  probe
  misc_feature (1)..(25): SEQ ID NO: 5651; WAN024B4U; Start 79; Stop 103
accttccaactgaaccatcttgaga

SEQ ID NO: 417379 - DNA, 25 bp, Artificial
  probe
  misc_feature (1)..(25): SEQ ID NO: 5651; WAN024B4U; Start 246; Stop 270
tatcattgatacgaacaccgtctag

SEQ ID NO: 417380 - DNA, 25 bp, Artificial
  probe
  misc_feature (1)..(25): SEQ ID NO: 5652; WAN024E2O; Start 57; Stop 81
tgtcttaatccaagtaccacagttg

SEQ ID NO: 417381 - DNA, 25 bp, Artificial
  probe
  misc_feature (1)..(25): SEQ ID NO: 5652; WAN024E2O; Start 61; Stop 85
ttaatccaagtaccacagttgccta

SEQ ID NO: 417382 - DNA, 25 bp, Artificial
  probe
  misc_feature (1)..(25): SEQ ID NO: 5652; WAN024E2O; Start 56; Stop 80
gtgtcttaatccaagtaccacagtt

SEQ ID NO: 417383 - DNA, 25 bp, Artificial
  probe
  misc_feature (1)..(25): SEQ ID NO: 5652; WAN024E2O; Start 58; Stop 82
gtcttaatccaagtaccacagttgc

SEQ ID NO: 417384 - DNA, 25 bp, Artificial
  probe
  misc_feature (1)..(25): SEQ ID NO: 5652; WAN024E2O; Start 62; Stop 86
taatccaagtaccacagttgcctag

SEQ ID NO: 417385 - DNA, 25 bp, Artificial
  probe
  misc_feature (1)..(25): SEQ ID NO: 5652; WAN024E2O; Start 180; Stop 204
tgactctcttgtaatttctttgacg

SEQ ID NO: 417386 - DNA, 25 bp, Artificial
  probe
  misc_feature (1)..(25): SEQ ID NO: 5652; WAN024E2O; Start 60; Stop 84
cttaatccaagtaccacagttgcct

SEQ ID NO: 417387 - DNA, 25 bp, Artificial
  probe
  misc_feature (1)..(25): SEQ ID NO: 5652; WAN024E2O; Start 59; Stop 83
tcttaatccaagtaccacagttgcc

SEQ ID NO: 417388 - DNA, 25 bp, Artificial
  probe
  misc_feature (1)..(25): SEQ ID NO: 5652; WAN024E2O; Start 55; Stop 79
ggtgtcttaatccaagtaccacagt

SEQ ID NO: 417389 - DNA, 25 bp, Artificial
  probe
  misc_feature (1)..(25): SEQ ID NO: 5652; WAN024E2O; Start 177; Stop 201
ccatgactctcttgtaatttctttg

SEQ ID NO: 417390 - DNA, 25 bp, Artificial
  probe
  misc_feature (1)..(25): SEQ ID NO: 5652; WAN024E2O; Start 176; Stop 200
tccatgactctcttgtaatttcttt

SEQ ID NO: 417391 - DNA, 25 bp, Artificial
  probe
  misc_feature (1)..(25): SEQ ID NO: 5652; WAN024E2O; Start 189; Stop 213
tgtaatttctttgacgtttggcata

SEQ ID NO: 417392 - DNA, 25 bp, Artificial
  probe
  misc_feature (1)..(25): SEQ ID NO: 5652; WAN024E2O; Start 188; Stop 212
ttgtaatttctttgacgtttggcat

SEQ ID NO: 417393 - DNA, 25 bp, Artificial
  probe
  misc_feature (1)..(25): SEQ ID NO: 5652; WAN024E2O; Start 175; Stop 199
atccatgactctcttgtaatttctt

SEQ ID NO: 417394 - DNA, 25 bp, Artificial
  probe
  misc_feature (1)..(25): SEQ ID NO: 5652; WAN024E2O; Start 174; Stop 198
aatccatgactctcttgtaatttct

SEQ ID NO: 417395 - DNA, 25 bp, Artificial
  probe
  misc_feature (1)..(25): SEQ ID NO: 5652; WAN024E2O; Start 179; Stop 203
atgactctcttgtaatttctttgac

SEQ ID NO: 417396 - DNA, 25 bp, Artificial
  probe
  misc_feature (1)..(25): SEQ ID NO: 5652; WAN024E2O; Start 181; Stop 205
gactctcttgtaatttctttgacgt

SEQ ID NO: 417397 - DNA, 25 bp, Artificial
  probe
  misc_feature (1)..(25): SEQ ID NO: 5652; WAN024E2O; Start 186; Stop 210
tcttgtaatttctttgacgtttggc

SEQ ID NO: 417398 - DNA, 25 bp, Artificial
  probe
  misc_feature (1)..(25): SEQ ID NO: 5652; WAN024E2O; Start 185; Stop 209
ctcttgtaatttctttgacgtttgg

SEQ ID NO: 417399 - DNA, 25 bp, Artificial
  probe
  misc_feature (1)..(25): SEQ ID NO: 5652; WAN024E2O; Start 187; Stop 211
cttgtaatttctttgacgtttggca

SEQ ID NO: 417400 - DNA, 25 bp, Artificial
  probe
  misc_feature (1)..(25): SEQ ID NO: 5652; WAN024E2O; Start 182; Stop 206
actctcttgtaatttctttgacgtt

SEQ ID NO: 417401 - DNA, 25 bp, Artificial
  probe
  misc_feature (1)..(25): SEQ ID NO: 5652; WAN024E2O; Start 103; Stop 127
ttgccttcaggtacgacttcttctt

SEQ ID NO: 417402 - DNA, 25 bp, Artificial
  probe
  misc_feature (1)..(25): SEQ ID NO: 5652; WAN024E2O; Start 190; Stop 214
gtaatttctttgacgtttggcatat

SEQ ID NO: 417403 - DNA, 25 bp, Artificial
  probe
  misc_feature (1)..(25): SEQ ID NO: 5652; WAN024E2O; Start 108; Stop 132
ttcaggtacgacttcttcttcgatt

SEQ ID NO: 417404 - DNA, 25 bp, Artificial
  probe
  misc_feature (1)..(25): SEQ ID NO: 5652; WAN024E2O; Start 193; Stop 217
atttctttgacgtttggcatatgtt

SEQ ID NO: 417405 - DNA, 25 bp, Artificial
  probe
  misc_feature (1)..(25): SEQ ID NO: 5652; WAN024E2O; Start 192; Stop 216
aatttctttgacgtttggcatatgt

SEQ ID NO: 417406 - DNA, 25 bp, Artificial
  probe
  misc_feature (1)..(25): SEQ ID NO: 5652; WAN024E2O; Start 184; Stop 208
tctcttgtaatttctttgacgtttg

SEQ ID NO: 417407 - DNA, 25 bp, Artificial
  probe
  misc_feature (1)..(25): SEQ ID NO: 5652; WAN024E2O; Start 178; Stop 202
catgactctcttgtaatttctttga

SEQ ID NO: 417408 - DNA, 25 bp, Artificial
  probe
  misc_feature (1)..(25): SEQ ID NO: 5652; WAN024E2O; Start 107; Stop 131
cttcaggtacgacttcttcttcgat

SEQ ID NO: 417409 - DNA, 25 bp, Artificial
  probe
  misc_feature (1)..(25): SEQ ID NO: 5652; WAN024E2O; Start 129; Stop 153
gatttcttcgttcaaccatgttccc

SEQ ID NO: 417410 - DNA, 25 bp, Artificial
  probe
  misc_feature (1)..(25): SEQ ID NO: 5652; WAN024E2O; Start 194; Stop 218
tttctttgacgtttggcatatgttg

SEQ ID NO: 417411 - DNA, 25 bp, Artificial
  probe
  misc_feature (1)..(25): SEQ ID NO: 5652; WAN024E2O; Start 183; Stop 207
ctctcttgtaatttctttgacgttt

SEQ ID NO: 417412 - DNA, 25 bp, Artificial
  probe
  misc_feature (1)..(25): SEQ ID NO: 5652; WAN024E2O; Start 191; Stop 215
taatttctttgacgtttggcatatg

SEQ ID NO: 417413 - DNA, 25 bp, Artificial
  probe
  misc_feature (1)..(25): SEQ ID NO: 5654; WAN024B7L; Start 215; Stop 239
cctattcacctgagtacaatcctat

SEQ ID NO: 417414 - DNA, 25 bp, Artificial
  probe
  misc_feature (1)..(25): SEQ ID NO: 5654; WAN024B7L; Start 216; Stop 240
ctattcacctgagtacaatcctatt

SEQ ID NO: 417415 - DNA, 25 bp, Artificial
  probe
  misc_feature (1)..(25): SEQ ID NO: 5654; WAN024B7L; Start 221; Stop 245
cacctgagtacaatcctattgagaa

SEQ ID NO: 417416 - DNA, 25 bp, Artificial
  probe
  misc_feature (1)..(25): SEQ ID NO: 5654; WAN024B7L; Start 219; Stop 243
ttcacctgagtacaatcctattgag

SEQ ID NO: 417417 - DNA, 25 bp, Artificial
  probe
  misc_feature (1)..(25): SEQ ID NO: 5654; WAN024B7L; Start 220; Stop 244
tcacctgagtacaatcctattgaga

SEQ ID NO: 417418 - DNA, 25 bp, Artificial
  probe
  misc_feature (1)..(25): SEQ ID NO: 5654; WAN024B7L; Start 93; Stop 117
atttctcttaccaacattaaccaca

SEQ ID NO: 417419 - DNA, 25 bp, Artificial
  probe
  misc_feature (1)..(25): SEQ ID NO: 5654; WAN024B7L; Start 218; Stop 242
attcacctgagtacaatcctattga

SEQ ID NO: 417420 - DNA, 25 bp, Artificial
  probe
  misc_feature (1)..(25): SEQ ID NO: 5654; WAN024B7L; Start 214; Stop 238
ccctattcacctgagtacaatccta

SEQ ID NO: 417421 - DNA, 25 bp, Artificial
  probe
  misc_feature (1)..(25): SEQ ID NO: 5654; WAN024B7L; Start 201; Stop 225
tttacctcttcctccctattcacct

SEQ ID NO: 417422 - DNA, 25 bp, Artificial
  probe
  misc_feature (1)..(25): SEQ ID NO: 5654; WAN024B7L; Start 174; Stop 198
cttgtgtgaagagtttgggcataaa

SEQ ID NO: 417423 - DNA, 25 bp, Artificial
  probe
  misc_feature (1)..(25): SEQ ID NO: 5654; WAN024B7L; Start 92; Stop 116
aatttctcttaccaacattaaccac

SEQ ID NO: 417424 - DNA, 25 bp, Artificial
  probe
  misc_feature (1)..(25): SEQ ID NO: 5654; WAN024B7L; Start 217; Stop 241
tattcacctgagtacaatcctattg

SEQ ID NO: 417425 - DNA, 25 bp, Artificial
  probe
  misc_feature (1)..(25): SEQ ID NO: 5654; WAN024B7L; Start 213; Stop 237
tccctattcacctgagtacaatcct

SEQ ID NO: 417426 - DNA, 25 bp, Artificial
  probe
  misc_feature (1)..(25): SEQ ID NO: 5654; WAN024B7L; Start 202; Stop 226
ttacctcttcctccctattcacctg

SEQ ID NO: 417427 - DNA, 25 bp, Artificial
  probe
  misc_feature (1)..(25): SEQ ID NO: 5654; WAN024B7L; Start 206; Stop 230
ctcttcctccctattcacctgagta

SEQ ID NO: 417428 - DNA, 25 bp, Artificial
  probe
  misc_feature (1)..(25): SEQ ID NO: 5654; WAN024B7L; Start 212; Stop 236
ctccctattcacctgagtacaatcc

SEQ ID NO: 417429 - DNA, 25 bp, Artificial
  probe
  misc_feature (1)..(25): SEQ ID NO: 5654; WAN024B7L; Start 211; Stop 235
cctccctattcacctgagtacaatc

SEQ ID NO: 417430 - DNA, 25 bp, Artificial
  probe
  misc_feature (1)..(25): SEQ ID NO: 5654; WAN024B7L; Start 210; Stop 234
tcctccctattcacctgagtacaat

SEQ ID NO: 417431 - DNA, 25 bp, Artificial
  probe
  misc_feature (1)..(25): SEQ ID NO: 5654; WAN024B7L; Start 135; Stop 159
ggataatgcaagattccatagaatg

SEQ ID NO: 417432 - DNA, 25 bp, Artificial
  probe
  misc_feature (1)..(25): SEQ ID NO: 5654; WAN024B7L; Start 209; Stop 233
ttcctccctattcacctgagtacaa

SEQ ID NO: 417433 - DNA, 25 bp, Artificial
  probe
  misc_feature (1)..(25): SEQ ID NO: 5654; WAN024B7L; Start 222; Stop 246
acctgagtacaatcctattgagaaa

SEQ ID NO: 417434 - DNA, 25 bp, Artificial
  probe
  misc_feature (1)..(25): SEQ ID NO: 5654; WAN024B7L; Start 161; Stop 185
ggaagctagaactcttgtgtgaaga

SEQ ID NO: 417435 - DNA, 25 bp, Artificial
  probe
  misc_feature (1)..(25): SEQ ID NO: 5654; WAN024B7L; Start 207; Stop 231
tcttcctccctattcacctgagtac

SEQ ID NO: 417436 - DNA, 25 bp, Artificial
  probe
  misc_feature (1)..(25): SEQ ID NO: 5654; WAN024B7L; Start 199; Stop 223
cttttacctcttcctccctattcac

SEQ ID NO: 417437 - DNA, 25 bp, Artificial
  probe
  misc_feature (1)..(25): SEQ ID NO: 5654; WAN024B7L; Start 197; Stop 221
aacttttacctcttcctccctattc

SEQ ID NO: 417438 - DNA, 25 bp, Artificial
  probe
  misc_feature (1)..(25): SEQ ID NO: 5654; WAN024B7L; Start 253; Stop 277
gctcttttgtcttgttcttgtttca

SEQ ID NO: 417439 - DNA, 25 bp, Artificial
  probe
  misc_feature (1)..(25): SEQ ID NO: 5654; WAN024B7L; Start 198; Stop 222
acttttacctcttcctccctattca

SEQ ID NO: 417440 - DNA, 25 bp, Artificial
  probe
  misc_feature (1)..(25): SEQ ID NO: 5654; WAN024B7L; Start 193; Stop 217
cataaacttttacctcttcctccct

SEQ ID NO: 417441 - DNA, 25 bp, Artificial
  probe
  misc_feature (1)..(25): SEQ ID NO: 5654; WAN024B7L; Start 196; Stop 220
aaacttttacctcttcctccctatt

SEQ ID NO: 417442 - DNA, 25 bp, Artificial
  probe
  misc_feature (1)..(25): SEQ ID NO: 5654; WAN024B7L; Start 187; Stop 211
tttgggcataaacttttacctcttc

SEQ ID NO: 417443 - DNA, 25 bp, Artificial
  probe
  misc_feature (1)..(25): SEQ ID NO: 5654; WAN024B7L; Start 208; Stop 232
cttcctccctattcacctgagtaca

SEQ ID NO: 417444 - DNA, 25 bp, Artificial
  probe
  misc_feature (1)..(25): SEQ ID NO: 5654; WAN024B7L; Start 203; Stop 227
tacctcttcctccctattcacctga

SEQ ID NO: 417445 - DNA, 25 bp, Artificial
  probe
  misc_feature (1)..(25): SEQ ID NO: 5654; WAN024B7L; Start 113; Stop 137
ccacaccatcggttattattatgga

SEQ ID NO: 417446 - DNA, 25 bp, Artificial
  probe
  misc_feature (1)..(25): SEQ ID NO: 5655; WAN024FDQ; Start 1068; Stop 1092
gttagaaggaactgaagatggaact

SEQ ID NO: 417447 - DNA, 25 bp, Artificial
  probe
  misc_feature (1)..(25): SEQ ID NO: 5655; WAN024FDQ; Start 1067; Stop 1091
tgttagaaggaactgaagatggaac

SEQ ID NO: 417448 - DNA, 25 bp, Artificial
  probe
  misc_feature (1)..(25): SEQ ID NO: 5655; WAN024FDQ; Start 1066; Stop 1090
atgttagaaggaactgaagatggaa

SEQ ID NO: 417449 - DNA, 25 bp, Artificial
  probe
  misc_feature (1)..(25): SEQ ID NO: 5655; WAN024FDQ; Start 1065; Stop 1089
aatgttagaaggaactgaagatgga

SEQ ID NO: 417450 - DNA, 25 bp, Artificial
  probe
  misc_feature (1)..(25): SEQ ID NO: 5655; WAN024FDQ; Start 1069; Stop 1093
ttagaaggaactgaagatggaacta

SEQ ID NO: 417451 - DNA, 25 bp, Artificial
  probe
  misc_feature (1)..(25): SEQ ID NO: 5655; WAN024FDQ; Start 1072; Stop 1096
gaaggaactgaagatggaactagaa

SEQ ID NO: 417452 - DNA, 25 bp, Artificial
  probe
  misc_feature (1)..(25): SEQ ID NO: 5655; WAN024FDQ; Start 1071; Stop 1095
agaaggaactgaagatggaactaga

SEQ ID NO: 417453 - DNA, 25 bp, Artificial
  probe
  misc_feature (1)..(25): SEQ ID NO: 5655; WAN024FDQ; Start 1070; Stop 1094
tagaaggaactgaagatggaactag

SEQ ID NO: 417454 - DNA, 25 bp, Artificial
  probe
  misc_feature (1)..(25): SEQ ID NO: 5655; WAN024FDQ; Start 391; Stop 415
gttcatctcggcttgatattattgg

SEQ ID NO: 417455 - DNA, 25 bp, Artificial
  probe
  misc_feature (1)..(25): SEQ ID NO: 5655; WAN024FDQ; Start 390; Stop 414
ggttcatctcggcttgatattattg

SEQ ID NO: 417456 - DNA, 25 bp, Artificial
  probe
  misc_feature (1)..(25): SEQ ID NO: 5655; WAN024FDQ; Start 389; Stop 413
tggttcatctcggcttgatattatt

SEQ ID NO: 417457 - DNA, 25 bp, Artificial
  probe
  misc_feature (1)..(25): SEQ ID NO: 5655; WAN024FDQ; Start 388; Stop 412
atggttcatctcggcttgatattat

SEQ ID NO: 417458 - DNA, 25 bp, Artificial
  probe
  misc_feature (1)..(25): SEQ ID NO: 5655; WAN024FDQ; Start 897; Stop 921
actgtccaatcttcaagtgatacaa

SEQ ID NO: 417459 - DNA, 25 bp, Artificial
  probe
  misc_feature (1)..(25): SEQ ID NO: 5655; WAN024FDQ; Start 896; Stop 920
aactgtccaatcttcaagtgataca

SEQ ID NO: 417460 - DNA, 25 bp, Artificial
  probe
  misc_feature (1)..(25): SEQ ID NO: 5655; WAN024FDQ; Start 898; Stop 922
ctgtccaatcttcaagtgatacaag

SEQ ID NO: 417461 - DNA, 25 bp, Artificial
  probe
  misc_feature (1)..(25): SEQ ID NO: 5655; WAN024FDQ; Start 392; Stop 416
ttcatctcggcttgatattattggc

SEQ ID NO: 417462 - DNA, 25 bp, Artificial
  probe
  misc_feature (1)..(25): SEQ ID NO: 5655; WAN024FDQ; Start 899; Stop 923
tgtccaatcttcaagtgatacaagc

SEQ ID NO: 417463 - DNA, 25 bp, Artificial
  probe
  misc_feature (1)..(25): SEQ ID NO: 5655; WAN024FDQ; Start 966; Stop 990
taaggctctcaagattgctagacag

SEQ ID NO: 417464 - DNA, 25 bp, Artificial
  probe
  misc_feature (1)..(25): SEQ ID NO: 5655; WAN024FDQ; Start 993; Stop 1017
aatggatagtagtcgaatgttgagg

SEQ ID NO: 417465 - DNA, 25 bp, Artificial
  probe
  misc_feature (1)..(25): SEQ ID NO: 5655; WAN024FDQ; Start 965; Stop 989
gtaaggctctcaagattgctagaca

SEQ ID NO: 417466 - DNA, 25 bp, Artificial
  probe
  misc_feature (1)..(25): SEQ ID NO: 5655; WAN024FDQ; Start 684; Stop 708
tgtattaggtatgcaaggtgaagtt

SEQ ID NO: 417467 - DNA, 25 bp, Artificial
  probe
  misc_feature (1)..(25): SEQ ID NO: 5655; WAN024FDQ; Start 27; Stop 51
tgggacttatttggtttatgtgcta

SEQ ID NO: 417468 - DNA, 25 bp, Artificial
  probe
  misc_feature (1)..(25): SEQ ID NO: 5655; WAN024FDQ; Start 25; Stop 49
attgggacttatttggtttatgtgc

SEQ ID NO: 417469 - DNA, 25 bp, Artificial
  probe
  misc_feature (1)..(25): SEQ ID NO: 5655; WAN024FDQ; Start 683; Stop 707
gtgtattaggtatgcaaggtgaagt

SEQ ID NO: 417470 - DNA, 25 bp, Artificial
  probe
  misc_feature (1)..(25): SEQ ID NO: 5655; WAN024FDQ; Start 889; Stop 913
tctctcaaactgtccaatcttcaag

SEQ ID NO: 417471 - DNA, 25 bp, Artificial
  probe
  misc_feature (1)..(25): SEQ ID NO: 5655; WAN024FDQ; Start 888; Stop 912
gtctctcaaactgtccaatcttcaa

SEQ ID NO: 417472 - DNA, 25 bp, Artificial
  probe
  misc_feature (1)..(25): SEQ ID NO: 5655; WAN024FDQ; Start 26; Stop 50
ttgggacttatttggtttatgtgct

SEQ ID NO: 417473 - DNA, 25 bp, Artificial
  probe
  misc_feature (1)..(25): SEQ ID NO: 5655; WAN024FDQ; Start 883; Stop 907
tttctgtctctcaaactgtccaatc

SEQ ID NO: 417474 - DNA, 25 bp, Artificial
  probe
  misc_feature (1)..(25): SEQ ID NO: 5655; WAN024FDQ; Start 137; Stop 161
ttggttatgccttcgctcttctaag

SEQ ID NO: 417475 - DNA, 25 bp, Artificial
  probe
  misc_feature (1)..(25): SEQ ID NO: 5655; WAN024FDQ; Start 962; Stop 986
ctcgtaaggctctcaagattgctag

SEQ ID NO: 417476 - DNA, 25 bp, Artificial
  probe
  misc_feature (1)..(25): SEQ ID NO: 5655; WAN024FDQ; Start 682; Stop 706
ggtgtattaggtatgcaaggtgaag

SEQ ID NO: 417477 - DNA, 25 bp, Artificial
  probe
  misc_feature (1)..(25): SEQ ID NO: 5655; WAN024FDQ; Start 679; Stop 703
gatggtgtattaggtatgcaaggtg

SEQ ID NO: 417478 - DNA, 25 bp, Artificial
  probe
  misc_feature (1)..(25): SEQ ID NO: 5655; WAN024FDQ; Start 1061; Stop 1085
aggaaatgttagaaggaactgaaga

SEQ ID NO: 417479 - DNA, 25 bp, Artificial
  probe
  misc_feature (1)..(25): SEQ ID NO: 5656; WAN024FNB; Start 17; Stop 41
gtgatggcaataactacaagtacat

SEQ ID NO: 417480 - DNA, 25 bp, Artificial
  probe
  misc_feature (1)..(25): SEQ ID NO: 5656; WAN024FNB; Start 16; Stop 40
ggtgatggcaataactacaagtaca

SEQ ID NO: 417481 - DNA, 25 bp, Artificial
  probe
  misc_feature (1)..(25): SEQ ID NO: 5656; WAN024FNB; Start 18; Stop 42
tgatggcaataactacaagtacatg

SEQ ID NO: 417482 - DNA, 25 bp, Artificial
  probe
  misc_feature (1)..(25): SEQ ID NO: 5656; WAN024FNB; Start 19; Stop 43
gatggcaataactacaagtacatga

SEQ ID NO: 417483 - DNA, 25 bp, Artificial
  probe
  misc_feature (1)..(25): SEQ ID NO: 5656; WAN024FNB; Start 20; Stop 44
atggcaataactacaagtacatgaa

SEQ ID NO: 417484 - DNA, 25 bp, Artificial
  probe
  misc_feature (1)..(25): SEQ ID NO: 5656; WAN024FNB; Start 12; Stop 36
taagggtgatggcaataactacaag

SEQ ID NO: 417485 - DNA, 25 bp, Artificial
  probe
  misc_feature (1)..(25): SEQ ID NO: 5656; WAN024FNB; Start 10; Stop 34
attaagggtgatggcaataactaca

SEQ ID NO: 417486 - DNA, 25 bp, Artificial
  probe
  misc_feature (1)..(25): SEQ ID NO: 5656; WAN024FNB; Start 11; Stop 35
ttaagggtgatggcaataactacaa

SEQ ID NO: 417487 - DNA, 25 bp, Artificial
  probe
  misc_feature (1)..(25): SEQ ID NO: 5656; WAN024FNB; Start 7; Stop 31
ggtattaagggtgatggcaataact

SEQ ID NO: 417488 - DNA, 25 bp, Artificial
  probe
  misc_feature (1)..(25): SEQ ID NO: 5656; WAN024FNB; Start 5; Stop 29
ttggtattaagggtgatggcaataa

SEQ ID NO: 417489 - DNA, 25 bp, Artificial
  probe
  misc_feature (1)..(25): SEQ ID NO: 5656; WAN024FNB; Start 6; Stop 30
tggtattaagggtgatggcaataac

SEQ ID NO: 417490 - DNA, 25 bp, Artificial
  probe
  misc_feature (1)..(25): SEQ ID NO: 5656; WAN024FNB; Start 4; Stop 28
gttggtattaagggtgatggcaata

SEQ ID NO: 417491 - DNA, 25 bp, Artificial
  probe
  misc_feature (1)..(25): SEQ ID NO: 5656; WAN024FNB; Start 9; Stop 33
tattaagggtgatggcaataactac

SEQ ID NO: 417492 - DNA, 25 bp, Artificial
  probe
  misc_feature (1)..(25): SEQ ID NO: 5656; WAN024FNB; Start 8; Stop 32
gtattaagggtgatggcaataacta

SEQ ID NO: 417493 - DNA, 25 bp, Artificial
  probe
  misc_feature (1)..(25): SEQ ID NO: 5656; WAN024FNB; Start 14; Stop 38
agggtgatggcaataactacaagta

SEQ ID NO: 417494 - DNA, 25 bp, Artificial
  probe
  misc_feature (1)..(25): SEQ ID NO: 5656; WAN024FNB; Start 86; Stop 110
ctaagaccaaatgggagcaagaaag

SEQ ID NO: 417495 - DNA, 25 bp, Artificial
  probe
  misc_feature (1)..(25): SEQ ID NO: 5656; WAN024FNB; Start 15; Stop 39
gggtgatggcaataactacaagtac

SEQ ID NO: 417496 - DNA, 25 bp, Artificial
  probe
  misc_feature (1)..(25): SEQ ID NO: 5656; WAN024FNB; Start 13; Stop 37
aagggtgatggcaataactacaagt

SEQ ID NO: 417497 - DNA, 25 bp, Artificial
  probe
  misc_feature (1)..(25): SEQ ID NO: 5656; WAN024FNB; Start 21; Stop 45
tggcaataactacaagtacatgaaa

SEQ ID NO: 417498 - DNA, 25 bp, Artificial
  probe
  misc_feature (1)..(25): SEQ ID NO: 5656; WAN024FNB; Start 22; Stop 46
ggcaataactacaagtacatgaaac

SEQ ID NO: 417499 - DNA, 25 bp, Artificial
  probe
  misc_feature (1)..(25): SEQ ID NO: 5656; WAN024FNB; Start 52; Stop 76
aaagatactgtaacaaccaaacggt

SEQ ID NO: 417500 - DNA, 25 bp, Artificial
  probe
  misc_feature (1)..(25): SEQ ID NO: 5656; WAN024FNB; Start 28; Stop 52
aactacaagtacatgaaactgcaaa

SEQ ID NO: 417501 - DNA, 25 bp, Artificial
  probe
  misc_feature (1)..(25): SEQ ID NO: 5656; WAN024FNB; Start 3; Stop 27
ggttggtattaagggtgatggcaat

SEQ ID NO: 417502 - DNA, 25 bp, Artificial
  probe
  misc_feature (1)..(25): SEQ ID NO: 5656; WAN024FNB; Start 25; Stop 49
aataactacaagtacatgaaactgc

SEQ ID NO: 417503 - DNA, 25 bp, Artificial
  probe
  misc_feature (1)..(25): SEQ ID NO: 5656; WAN024FNB; Start 23; Stop 47
gcaataactacaagtacatgaaact

SEQ ID NO: 417504 - DNA, 25 bp, Artificial
  probe
  misc_feature (1)..(25): SEQ ID NO: 5656; WAN024FNB; Start 27; Stop 51
taactacaagtacatgaaactgcaa

SEQ ID NO: 417505 - DNA, 25 bp, Artificial
  probe
  misc_feature (1)..(25): SEQ ID NO: 5656; WAN024FNB; Start 51; Stop 75
aaaagatactgtaacaaccaaacgg

SEQ ID NO: 417506 - DNA, 25 bp, Artificial
  probe
  misc_feature (1)..(25): SEQ ID NO: 5656; WAN024FNB; Start 26; Stop 50
ataactacaagtacatgaaactgca

SEQ ID NO: 417507 - DNA, 25 bp, Artificial
  probe
  misc_feature (1)..(25): SEQ ID NO: 5656; WAN024FNB; Start 87; Stop 111
taagaccaaatgggagcaagaaagc

SEQ ID NO: 417508 - DNA, 25 bp, Artificial
  probe
  misc_feature (1)..(25): SEQ ID NO: 5656; WAN024FNB; Start 1; Stop 25
ttggttggtattaagggtgatggca

SEQ ID NO: 417509 - DNA, 25 bp, Artificial
  probe
  misc_feature (1)..(25): SEQ ID NO: 5656; WAN024FNB; Start 2; Stop 26
tggttggtattaagggtgatggcaa

SEQ ID NO: 417510 - DNA, 25 bp, Artificial
  probe
  misc_feature (1)..(25): SEQ ID NO: 5656; WAN024FNB; Start 24; Stop 48
caataactacaagtacatgaaactg

SEQ ID NO: 417511 - DNA, 25 bp, Artificial
  probe
  misc_feature (1)..(25): SEQ ID NO: 5656; WAN024FNB; Start 29; Stop 53
actacaagtacatgaaactgcaaaa

SEQ ID NO: 417512 - DNA, 25 bp, Artificial
  probe
  misc_feature (1)..(25): SEQ ID NO: 5657; WAN024G2H; Start 8; Stop 32
gtcttctgcggtggaatatagtcaa

SEQ ID NO: 417513 - DNA, 25 bp, Artificial
  probe
  misc_feature (1)..(25): SEQ ID NO: 5657; WAN024G2H; Start 151; Stop 175
accatctcgcaaatatctaaactga

SEQ ID NO: 417514 - DNA, 25 bp, Artificial
  probe
  misc_feature (1)..(25): SEQ ID NO: 5657; WAN024G2H; Start 150; Stop 174
caccatctcgcaaatatctaaactg

SEQ ID NO: 417515 - DNA, 25 bp, Artificial
  probe
  misc_feature (1)..(25): SEQ ID NO: 5657; WAN024G2H; Start 149; Stop 173
ccaccatctcgcaaatatctaaact

SEQ ID NO: 417516 - DNA, 25 bp, Artificial
  probe
  misc_feature (1)..(25): SEQ ID NO: 5657; WAN024G2H; Start 152; Stop 176
ccatctcgcaaatatctaaactgat

SEQ ID NO: 417517 - DNA, 25 bp, Artificial
  probe
  misc_feature (1)..(25): SEQ ID NO: 5657; WAN024G2H; Start 102; Stop 126
cttcgtcaaatgttgctttatcaaa

SEQ ID NO: 417518 - DNA, 25 bp, Artificial
  probe
  misc_feature (1)..(25): SEQ ID NO: 5657; WAN024G2H; Start 101; Stop 125
gcttcgtcaaatgttgctttatcaa

SEQ ID NO: 417519 - DNA, 25 bp, Artificial
  probe
  misc_feature (1)..(25): SEQ ID NO: 5657; WAN024G2H; Start 4; Stop 28
gttggtcttctgcggtggaatatag

SEQ ID NO: 417520 - DNA, 25 bp, Artificial
  probe
  misc_feature (1)..(25): SEQ ID NO: 5657; WAN024G2H; Start 148; Stop 172
cccaccatctcgcaaatatctaaac

SEQ ID NO: 417521 - DNA, 25 bp, Artificial
  probe
  misc_feature (1)..(25): SEQ ID NO: 5657; WAN024G2H; Start 9; Stop 33
tcttctgcggtggaatatagtcaaa

SEQ ID NO: 417522 - DNA, 25 bp, Artificial
  probe
  misc_feature (1)..(25): SEQ ID NO: 5657; WAN024G2H; Start 5; Stop 29
ttggtcttctgcggtggaatatagt

SEQ ID NO: 417523 - DNA, 25 bp, Artificial
  probe
  misc_feature (1)..(25): SEQ ID NO: 5657; WAN024G2H; Start 176; Stop 200
tcaatcgtaatccctgttacttcat

SEQ ID NO: 417524 - DNA, 25 bp, Artificial
  probe
  misc_feature (1)..(25): SEQ ID NO: 5657; WAN024G2H; Start 175; Stop 199
atcaatcgtaatccctgttacttca

SEQ ID NO: 417525 - DNA, 25 bp, Artificial
  probe
  misc_feature (1)..(25): SEQ ID NO: 5657; WAN024G2H; Start 153; Stop 177
catctcgcaaatatctaaactgatc

SEQ ID NO: 417526 - DNA, 25 bp, Artificial
  probe
  misc_feature (1)..(25): SEQ ID NO: 5657; WAN024G2H; Start 7; Stop 31
ggtcttctgcggtggaatatagtca

SEQ ID NO: 417527 - DNA, 25 bp, Artificial
  probe
  misc_feature (1)..(25): SEQ ID NO: 5657; WAN024G2H; Start 6; Stop 30
tggtcttctgcggtggaatatagtc

SEQ ID NO: 417528 - DNA, 25 bp, Artificial
  probe
  misc_feature (1)..(25): SEQ ID NO: 5657; WAN024G2H; Start 174; Stop 198
gatcaatcgtaatccctgttacttc

SEQ ID NO: 417529 - DNA, 25 bp, Artificial
  probe
  misc_feature (1)..(25): SEQ ID NO: 5657; WAN024G2H; Start 177; Stop 201
caatcgtaatccctgttacttcata

SEQ ID NO: 417530 - DNA, 25 bp, Artificial
  probe
  misc_feature (1)..(25): SEQ ID NO: 5657; WAN024G2H; Start 104; Stop 128
tcgtcaaatgttgctttatcaaaga

SEQ ID NO: 417531 - DNA, 25 bp, Artificial
  probe
  misc_feature (1)..(25): SEQ ID NO: 5657; WAN024G2H; Start 110; Stop 134
aatgttgctttatcaaagagatgcc

SEQ ID NO: 417532 - DNA, 25 bp, Artificial
  probe
  misc_feature (1)..(25): SEQ ID NO: 5657; WAN024G2H; Start 105; Stop 129
cgtcaaatgttgctttatcaaagag

SEQ ID NO: 417533 - DNA, 25 bp, Artificial
  probe
  misc_feature (1)..(25): SEQ ID NO: 5657; WAN024G2H; Start 103; Stop 127
ttcgtcaaatgttgctttatcaaag

SEQ ID NO: 417534 - DNA, 25 bp, Artificial
  probe
  misc_feature (1)..(25): SEQ ID NO: 5657; WAN024G2H; Start 109; Stop 133
aaatgttgctttatcaaagagatgc

SEQ ID NO: 417535 - DNA, 25 bp, Artificial
  probe
  misc_feature (1)..(25): SEQ ID NO: 5657; WAN024G2H; Start 147; Stop 171
gcccaccatctcgcaaatatctaaa

SEQ ID NO: 417536 - DNA, 25 bp, Artificial
  probe
  misc_feature (1)..(25): SEQ ID NO: 5657; WAN024G2H; Start 179; Stop 203
atcgtaatccctgttacttcataaa

SEQ ID NO: 417537 - DNA, 25 bp, Artificial
  probe
  misc_feature (1)..(25): SEQ ID NO: 5657; WAN024G2H; Start 178; Stop 202
aatcgtaatccctgttacttcataa

SEQ ID NO: 417538 - DNA, 25 bp, Artificial
  probe
  misc_feature (1)..(25): SEQ ID NO: 5657; WAN024G2H; Start 3; Stop 27
ggttggtcttctgcggtggaatata

SEQ ID NO: 417539 - DNA, 25 bp, Artificial
  probe
  misc_feature (1)..(25): SEQ ID NO: 5657; WAN024G2H; Start 211; Stop 235
ttcaggaacaaaggcatcaaaatta

SEQ ID NO: 417540 - DNA, 25 bp, Artificial
  probe
  misc_feature (1)..(25): SEQ ID NO: 5657; WAN024G2H; Start 106; Stop 130
gtcaaatgttgctttatcaaagaga

SEQ ID NO: 417541 - DNA, 25 bp, Artificial
  probe
  misc_feature (1)..(25): SEQ ID NO: 5657; WAN024G2H; Start 214; Stop 238
aggaacaaaggcatcaaaattatca

SEQ ID NO: 417542 - DNA, 25 bp, Artificial
  probe
  misc_feature (1)..(25): SEQ ID NO: 5657; WAN024G2H; Start 212; Stop 236
tcaggaacaaaggcatcaaaattat

SEQ ID NO: 417543 - DNA, 25 bp, Artificial
  probe
  misc_feature (1)..(25): SEQ ID NO: 5657; WAN024G2H; Start 111; Stop 135
atgttgctttatcaaagagatgccc

SEQ ID NO: 417544 - DNA, 25 bp, Artificial
  probe
  misc_feature (1)..(25): SEQ ID NO: 5657; WAN024G2H; Start 213; Stop 237
caggaacaaaggcatcaaaattatc

SEQ ID NO: 417545 - DNA, 25 bp, Artificial
  probe
  misc_feature (1)..(25): SEQ ID NO: 5658; WAN024CG6; Start 205; Stop 229
aatggtcgtatctggtgtgatgata

SEQ ID NO: 417546 - DNA, 25 bp, Artificial
  probe
  misc_feature (1)..(25): SEQ ID NO: 5658; WAN024CG6; Start 204; Stop 228
aaatggtcgtatctggtgtgatgat

SEQ ID NO: 417547 - DNA, 25 bp, Artificial
  probe
  misc_feature (1)..(25): SEQ ID NO: 5658; WAN024CG6; Start 69; Stop 93
tttcaatcaatgtcaacatagcccg

SEQ ID NO: 417548 - DNA, 25 bp, Artificial
  probe
  misc_feature (1)..(25): SEQ ID NO: 5658; WAN024CG6; Start 118; Stop 142
cgagttcatgtttcggatcatattt

SEQ ID NO: 417549 - DNA, 25 bp, Artificial
  probe
  misc_feature (1)..(25): SEQ ID NO: 5658; WAN024CG6; Start 192; Stop 216
tgtagtcaatcaaaatggtcgtatc

SEQ ID NO: 417550 - DNA, 25 bp, Artificial
  probe
  misc_feature (1)..(25): SEQ ID NO: 5658; WAN024CG6; Start 194; Stop 218
tagtcaatcaaaatggtcgtatctg

SEQ ID NO: 417551 - DNA, 25 bp, Artificial
  probe
  misc_feature (1)..(25): SEQ ID NO: 5658; WAN024CG6; Start 193; Stop 217
gtagtcaatcaaaatggtcgtatct

SEQ ID NO: 417552 - DNA, 25 bp, Artificial
  probe
  misc_feature (1)..(25): SEQ ID NO: 5658; WAN024CG6; Start 195; Stop 219
agtcaatcaaaatggtcgtatctgg

SEQ ID NO: 417553 - DNA, 25 bp, Artificial
  probe
  misc_feature (1)..(25): SEQ ID NO: 5658; WAN024CG6; Start 70; Stop 94
ttcaatcaatgtcaacatagcccgt

SEQ ID NO: 417554 - DNA, 25 bp, Artificial
  probe
  misc_feature (1)..(25): SEQ ID NO: 5658; WAN024CG6; Start 71; Stop 95
tcaatcaatgtcaacatagcccgtt

SEQ ID NO: 417555 - DNA, 25 bp, Artificial
  probe
  misc_feature (1)..(25): SEQ ID NO: 5658; WAN024CG6; Start 196; Stop 220
gtcaatcaaaatggtcgtatctggt

SEQ ID NO: 417556 - DNA, 25 bp, Artificial
  probe
  misc_feature (1)..(25): SEQ ID NO: 5658; WAN024CG6; Start 159; Stop 183
agttcttgacgatatttccaaaacg

SEQ ID NO: 417557 - DNA, 25 bp, Artificial
  probe
  misc_feature (1)..(25): SEQ ID NO: 5658; WAN024CG6; Start 135; Stop 159
tcatattttctgggaagactgtcaa

SEQ ID NO: 417558 - DNA, 25 bp, Artificial
  probe
  misc_feature (1)..(25): SEQ ID NO: 5658; WAN024CG6; Start 134; Stop 158
atcatattttctgggaagactgtca

SEQ ID NO: 417559 - DNA, 25 bp, Artificial
  probe
  misc_feature (1)..(25): SEQ ID NO: 5658; WAN024CG6; Start 197; Stop 221
tcaatcaaaatggtcgtatctggtg

SEQ ID NO: 417560 - DNA, 25 bp, Artificial
  probe
  misc_feature (1)..(25): SEQ ID NO: 5658; WAN024CG6; Start 191; Stop 215
atgtagtcaatcaaaatggtcgtat

SEQ ID NO: 417561 - DNA, 25 bp, Artificial
  probe
  misc_feature (1)..(25): SEQ ID NO: 5658; WAN024CG6; Start 136; Stop 160
catattttctgggaagactgtcaag

SEQ ID NO: 417562 - DNA, 25 bp, Artificial
  probe
  misc_feature (1)..(25): SEQ ID NO: 5658; WAN024CG6; Start 199; Stop 223
aatcaaaatggtcgtatctggtgtg

SEQ ID NO: 417563 - DNA, 25 bp, Artificial
  probe
  misc_feature (1)..(25): SEQ ID NO: 5658; WAN024CG6; Start 198; Stop 222
caatcaaaatggtcgtatctggtgt

SEQ ID NO: 417564 - DNA, 25 bp, Artificial
  probe
  misc_feature (1)..(25): SEQ ID NO: 5658; WAN024CG6; Start 138; Stop 162
tattttctgggaagactgtcaagtt

SEQ ID NO: 417565 - DNA, 25 bp, Artificial
  probe
  misc_feature (1)..(25): SEQ ID NO: 5658; WAN024CG6; Start 137; Stop 161
atattttctgggaagactgtcaagt

SEQ ID NO: 417566 - DNA, 25 bp, Artificial
  probe
  misc_feature (1)..(25): SEQ ID NO: 5658; WAN024CG6; Start 160; Stop 184
gttcttgacgatatttccaaaacgg

SEQ ID NO: 417567 - DNA, 25 bp, Artificial
  probe
  misc_feature (1)..(25): SEQ ID NO: 5658; WAN024CG6; Start 180; Stop 204
aacggttgagcatgtagtcaatcaa

SEQ ID NO: 417568 - DNA, 25 bp, Artificial
  probe
  misc_feature (1)..(25): SEQ ID NO: 5658; WAN024CG6; Start 163; Stop 187
cttgacgatatttccaaaacggttg

SEQ ID NO: 417569 - DNA, 25 bp, Artificial
  probe
  misc_feature (1)..(25): SEQ ID NO: 5658; WAN024CG6; Start 162; Stop 186
tcttgacgatatttccaaaacggtt

SEQ ID NO: 417570 - DNA, 25 bp, Artificial
  probe
  misc_feature (1)..(25): SEQ ID NO: 5658; WAN024CG6; Start 161; Stop 185
ttcttgacgatatttccaaaacggt

SEQ ID NO: 417571 - DNA, 25 bp, Artificial
  probe
  misc_feature (1)..(25): SEQ ID NO: 5658; WAN024CG6; Start 141; Stop 165
tttctgggaagactgtcaagttctt

SEQ ID NO: 417572 - DNA, 25 bp, Artificial
  probe
  misc_feature (1)..(25): SEQ ID NO: 5658; WAN024CG6; Start 127; Stop 151
gtttcggatcatattttctgggaag

SEQ ID NO: 417573 - DNA, 25 bp, Artificial
  probe
  misc_feature (1)..(25): SEQ ID NO: 5658; WAN024CG6; Start 125; Stop 149
atgtttcggatcatattttctggga

SEQ ID NO: 417574 - DNA, 25 bp, Artificial
  probe
  misc_feature (1)..(25): SEQ ID NO: 5658; WAN024CG6; Start 68; Stop 92
ttttcaatcaatgtcaacatagccc

SEQ ID NO: 417575 - DNA, 25 bp, Artificial
  probe
  misc_feature (1)..(25): SEQ ID NO: 5658; WAN024CG6; Start 128; Stop 152
tttcggatcatattttctgggaaga

SEQ ID NO: 417576 - DNA, 25 bp, Artificial
  probe
  misc_feature (1)..(25): SEQ ID NO: 5658; WAN024CG6; Start 126; Stop 150
tgtttcggatcatattttctgggaa

SEQ ID NO: 417577 - DNA, 25 bp, Artificial
  probe
  misc_feature (1)..(25): SEQ ID NO: 5658; WAN024CG6; Start 117; Stop 141
tcgagttcatgtttcggatcatatt

SEQ ID NO: 417578 - DNA, 25 bp, Artificial
  probe
  misc_feature (1)..(25): SEQ ID NO: 5659; WAN024DPE; Start 32; Stop 56
gacttggacctcagatgtacactat

SEQ ID NO: 417579 - DNA, 25 bp, Artificial
  probe
  misc_feature (1)..(25): SEQ ID NO: 5659; WAN024DPE; Start 33; Stop 57
acttggacctcagatgtacactatg

SEQ ID NO: 417580 - DNA, 25 bp, Artificial
  probe
  misc_feature (1)..(25): SEQ ID NO: 5659; WAN024DPE; Start 34; Stop 58
cttggacctcagatgtacactatgc

SEQ ID NO: 417581 - DNA, 25 bp, Artificial
  probe
  misc_feature (1)..(25): SEQ ID NO: 5659; WAN024DPE; Start 31; Stop 55
ggacttggacctcagatgtacacta

SEQ ID NO: 417582 - DNA, 25 bp, Artificial
  probe
  misc_feature (1)..(25): SEQ ID NO: 5659; WAN024DPE; Start 14; Stop 38
cagcaaatatccacagaggacttgg

SEQ ID NO: 417583 - DNA, 25 bp, Artificial
  probe
  misc_feature (1)..(25): SEQ ID NO: 5659; WAN024DPE; Start 49; Stop 73
tacactatgcctgtcggacaaagaa

SEQ ID NO: 417584 - DNA, 25 bp, Artificial
  probe
  misc_feature (1)..(25): SEQ ID NO: 5659; WAN024DPE; Start 13; Stop 37
gcagcaaatatccacagaggacttg

SEQ ID NO: 417585 - DNA, 25 bp, Artificial
  probe
  misc_feature (1)..(25): SEQ ID NO: 5659; WAN024DPE; Start 35; Stop 59
ttggacctcagatgtacactatgcc

SEQ ID NO: 417586 - DNA, 25 bp, Artificial
  probe
  misc_feature (1)..(25): SEQ ID NO: 5659; WAN024DPE; Start 39; Stop 63
acctcagatgtacactatgcctgtc

SEQ ID NO: 417587 - DNA, 25 bp, Artificial
  probe
  misc_feature (1)..(25): SEQ ID NO: 5659; WAN024DPE; Start 38; Stop 62
gacctcagatgtacactatgcctgt

SEQ ID NO: 417588 - DNA, 25 bp, Artificial
  probe
  misc_feature (1)..(25): SEQ ID NO: 5659; WAN024DPE; Start 48; Stop 72
gtacactatgcctgtcggacaaaga

SEQ ID NO: 417589 - DNA, 25 bp, Artificial
  probe
  misc_feature (1)..(25): SEQ ID NO: 5659; WAN024DPE; Start 50; Stop 74
acactatgcctgtcggacaaagaaa

SEQ ID NO: 417590 - DNA, 25 bp, Artificial
  probe
  misc_feature (1)..(25): SEQ ID NO: 5659; WAN024DPE; Start 37; Stop 61
ggacctcagatgtacactatgcctg

SEQ ID NO: 417591 - DNA, 25 bp, Artificial
  probe
  misc_feature (1)..(25): SEQ ID NO: 5659; WAN024DPE; Start 36; Stop 60
tggacctcagatgtacactatgcct

SEQ ID NO: 417592 - DNA, 25 bp, Artificial
  probe
  misc_feature (1)..(25): SEQ ID NO: 5659; WAN024DPE; Start 45; Stop 69
gatgtacactatgcctgtcggacaa

SEQ ID NO: 417593 - DNA, 25 bp, Artificial
  probe
  misc_feature (1)..(25): SEQ ID NO: 5659; WAN024DPE; Start 19; Stop 43
aatatccacagaggacttggacctc

SEQ ID NO: 417594 - DNA, 25 bp, Artificial
  probe
  misc_feature (1)..(25): SEQ ID NO: 5659; WAN024DPE; Start 12; Stop 36
tgcagcaaatatccacagaggactt

SEQ ID NO: 417595 - DNA, 25 bp, Artificial
  probe
  misc_feature (1)..(25): SEQ ID NO: 5659; WAN024DPE; Start 30; Stop 54
aggacttggacctcagatgtacact

SEQ ID NO: 417596 - DNA, 25 bp, Artificial
  probe
  misc_feature (1)..(25): SEQ ID NO: 5659; WAN024DPE; Start 51; Stop 75
cactatgcctgtcggacaaagaaaa

SEQ ID NO: 417597 - DNA, 25 bp, Artificial
  probe
  misc_feature (1)..(25): SEQ ID NO: 5659; WAN024DPE; Start 41; Stop 65
ctcagatgtacactatgcctgtcgg

SEQ ID NO: 417598 - DNA, 25 bp, Artificial
  probe
  misc_feature (1)..(25): SEQ ID NO: 5659; WAN024DPE; Start 40; Stop 64
cctcagatgtacactatgcctgtcg

SEQ ID NO: 417599 - DNA, 25 bp, Artificial
  probe
  misc_feature (1)..(25): SEQ ID NO: 5659; WAN024DPE; Start 43; Stop 67
cagatgtacactatgcctgtcggac

SEQ ID NO: 417600 - DNA, 25 bp, Artificial
  probe
  misc_feature (1)..(25): SEQ ID NO: 5659; WAN024DPE; Start 17; Stop 41
caaatatccacagaggacttggacc

SEQ ID NO: 417601 - DNA, 25 bp, Artificial
  probe
  misc_feature (1)..(25): SEQ ID NO: 5659; WAN024DPE; Start 27; Stop 51
cagaggacttggacctcagatgtac

SEQ ID NO: 417602 - DNA, 25 bp, Artificial
  probe
  misc_feature (1)..(25): SEQ ID NO: 5659; WAN024DPE; Start 18; Stop 42
aaatatccacagaggacttggacct

SEQ ID NO: 417603 - DNA, 25 bp, Artificial
  probe
  misc_feature (1)..(25): SEQ ID NO: 5659; WAN024DPE; Start 42; Stop 66
tcagatgtacactatgcctgtcgga

SEQ ID NO: 417604 - DNA, 25 bp, Artificial
  probe
  misc_feature (1)..(25): SEQ ID NO: 5659; WAN024DPE; Start 46; Stop 70
atgtacactatgcctgtcggacaaa

SEQ ID NO: 417605 - DNA, 25 bp, Artificial
  probe
  misc_feature (1)..(25): SEQ ID NO: 5659; WAN024DPE; Start 44; Stop 68
agatgtacactatgcctgtcggaca

SEQ ID NO: 417606 - DNA, 25 bp, Artificial
  probe
  misc_feature (1)..(25): SEQ ID NO: 5659; WAN024DPE; Start 26; Stop 50
acagaggacttggacctcagatgta

SEQ ID NO: 417607 - DNA, 25 bp, Artificial
  probe
  misc_feature (1)..(25): SEQ ID NO: 5659; WAN024DPE; Start 16; Stop 40
gcaaatatccacagaggacttggac

SEQ ID NO: 417608 - DNA, 25 bp, Artificial
  probe
  misc_feature (1)..(25): SEQ ID NO: 5659; WAN024DPE; Start 15; Stop 39
agcaaatatccacagaggacttgga

SEQ ID NO: 417609 - DNA, 25 bp, Artificial
  probe
  misc_feature (1)..(25): SEQ ID NO: 5659; WAN024DPE; Start 20; Stop 44
atatccacagaggacttggacctca

SEQ ID NO: 417610 - DNA, 25 bp, Artificial
  probe
  misc_feature (1)..(25): SEQ ID NO: 5659; WAN024DPE; Start 47; Stop 71
tgtacactatgcctgtcggacaaag

SEQ ID NO: 417611 - DNA, 25 bp, Artificial
  probe
  misc_feature (1)..(25): SEQ ID NO: 5660; WAN024D72; Start 207; Stop 231
agttaatggaacagatgtcactcat

SEQ ID NO: 417612 - DNA, 25 bp, Artificial
  probe
  misc_feature (1)..(25): SEQ ID NO: 5660; WAN024D72; Start 206; Stop 230
aagttaatggaacagatgtcactca

SEQ ID NO: 417613 - DNA, 25 bp, Artificial
  probe
  misc_feature (1)..(25): SEQ ID NO: 5660; WAN024D72; Start 204; Stop 228
tgaagttaatggaacagatgtcact

SEQ ID NO: 417614 - DNA, 25 bp, Artificial
  probe
  misc_feature (1)..(25): SEQ ID NO: 5660; WAN024D72; Start 205; Stop 229
gaagttaatggaacagatgtcactc

SEQ ID NO: 417615 - DNA, 25 bp, Artificial
  probe
  misc_feature (1)..(25): SEQ ID NO: 5660; WAN024D72; Start 951; Stop 975
tgtaacaagtattgatagtcaggct

SEQ ID NO: 417616 - DNA, 25 bp, Artificial
  probe
  misc_feature (1)..(25): SEQ ID NO: 5660; WAN024D72; Start 203; Stop 227
ttgaagttaatggaacagatgtcac

SEQ ID NO: 417617 - DNA, 25 bp, Artificial
  probe
  misc_feature (1)..(25): SEQ ID NO: 5660; WAN024D72; Start 953; Stop 977
taacaagtattgatagtcaggctgc

SEQ ID NO: 417618 - DNA, 25 bp, Artificial
  probe
  misc_feature (1)..(25): SEQ ID NO: 5660; WAN024D72; Start 952; Stop 976
gtaacaagtattgatagtcaggctg

SEQ ID NO: 417619 - DNA, 25 bp, Artificial
  probe
  misc_feature (1)..(25): SEQ ID NO: 5660; WAN024D72; Start 956; Stop 980
caagtattgatagtcaggctgctat

SEQ ID NO: 417620 - DNA, 25 bp, Artificial
  probe
  misc_feature (1)..(25): SEQ ID NO: 5660; WAN024D72; Start 957; Stop 981
aagtattgatagtcaggctgctatt

SEQ ID NO: 417621 - DNA, 25 bp, Artificial
  probe
  misc_feature (1)..(25): SEQ ID NO: 5660; WAN024D72; Start 950; Stop 974
atgtaacaagtattgatagtcaggc

SEQ ID NO: 417622 - DNA, 25 bp, Artificial
  probe
  misc_feature (1)..(25): SEQ ID NO: 5660; WAN024D72; Start 202; Stop 226
attgaagttaatggaacagatgtca

SEQ ID NO: 417623 - DNA, 25 bp, Artificial
  probe
  misc_feature (1)..(25): SEQ ID NO: 5660; WAN024D72; Start 955; Stop 979
acaagtattgatagtcaggctgcta

SEQ ID NO: 417624 - DNA, 25 bp, Artificial
  probe
  misc_feature (1)..(25): SEQ ID NO: 5660; WAN024D72; Start 961; Stop 985
attgatagtcaggctgctattagat

SEQ ID NO: 417625 - DNA, 25 bp, Artificial
  probe
  misc_feature (1)..(25): SEQ ID NO: 5660; WAN024D72; Start 958; Stop 982
agtattgatagtcaggctgctatta

SEQ ID NO: 417626 - DNA, 25 bp, Artificial
  probe
  misc_feature (1)..(25): SEQ ID NO: 5660; WAN024D72; Start 195; Stop 219
aggaagtattgaagttaatggaaca

SEQ ID NO: 417627 - DNA, 25 bp, Artificial
  probe
  misc_feature (1)..(25): SEQ ID NO: 5660; WAN024D72; Start 187; Stop 211
ccatcatcaggaagtattgaagtta

SEQ ID NO: 417628 - DNA, 25 bp, Artificial
  probe
  misc_feature (1)..(25): SEQ ID NO: 5660; WAN024D72; Start 962; Stop 986
ttgatagtcaggctgctattagatc

SEQ ID NO: 417629 - DNA, 25 bp, Artificial
  probe
  misc_feature (1)..(25): SEQ ID NO: 5660; WAN024D72; Start 959; Stop 983
gtattgatagtcaggctgctattag

SEQ ID NO: 417630 - DNA, 25 bp, Artificial
  probe
  misc_feature (1)..(25): SEQ ID NO: 5660; WAN024D72; Start 960; Stop 984
tattgatagtcaggctgctattaga

SEQ ID NO: 417631 - DNA, 25 bp, Artificial
  probe
  misc_feature (1)..(25): SEQ ID NO: 5660; WAN024D72; Start 196; Stop 220
ggaagtattgaagttaatggaacag

SEQ ID NO: 417632 - DNA, 25 bp, Artificial
  probe
  misc_feature (1)..(25): SEQ ID NO: 5660; WAN024D72; Start 194; Stop 218
caggaagtattgaagttaatggaac

SEQ ID NO: 417633 - DNA, 25 bp, Artificial
  probe
  misc_feature (1)..(25): SEQ ID NO: 5660; WAN024D72; Start 328; Stop 352
gttaagaaggtagctccagatgtta

SEQ ID NO: 417634 - DNA, 25 bp, Artificial
  probe
  misc_feature (1)..(25): SEQ ID NO: 5660; WAN024D72; Start 186; Stop 210
tccatcatcaggaagtattgaagtt

SEQ ID NO: 417635 - DNA, 25 bp, Artificial
  probe
  misc_feature (1)..(25): SEQ ID NO: 5660; WAN024D72; Start 185; Stop 209
atccatcatcaggaagtattgaagt

SEQ ID NO: 417636 - DNA, 25 bp, Artificial
  probe
  misc_feature (1)..(25): SEQ ID NO: 5660; WAN024D72; Start 954; Stop 978
aacaagtattgatagtcaggctgct

SEQ ID NO: 417637 - DNA, 25 bp, Artificial
  probe
  misc_feature (1)..(25): SEQ ID NO: 5660; WAN024D72; Start 193; Stop 217
tcaggaagtattgaagttaatggaa

SEQ ID NO: 417638 - DNA, 25 bp, Artificial
  probe
  misc_feature (1)..(25): SEQ ID NO: 5660; WAN024D72; Start 332; Stop 356
agaaggtagctccagatgttattaa

SEQ ID NO: 417639 - DNA, 25 bp, Artificial
  probe
  misc_feature (1)..(25): SEQ ID NO: 5660; WAN024D72; Start 331; Stop 355
aagaaggtagctccagatgttatta

SEQ ID NO: 417640 - DNA, 25 bp, Artificial
  probe
  misc_feature (1)..(25): SEQ ID NO: 5660; WAN024D72; Start 330; Stop 354
taagaaggtagctccagatgttatt

SEQ ID NO: 417641 - DNA, 25 bp, Artificial
  probe
  misc_feature (1)..(25): SEQ ID NO: 5660; WAN024D72; Start 329; Stop 353
ttaagaaggtagctccagatgttat

SEQ ID NO: 417642 - DNA, 25 bp, Artificial
  probe
  misc_feature (1)..(25): SEQ ID NO: 5660; WAN024D72; Start 647; Stop 671
ttaacaatggatacatcgaacaggt

SEQ ID NO: 417643 - DNA, 25 bp, Artificial
  probe
  misc_feature (1)..(25): SEQ ID NO: 5660; WAN024D72; Start 327; Stop 351
agttaagaaggtagctccagatgtt

SEQ ID NO: 417644 - DNA, 25 bp, Artificial
  probe
  misc_feature (1)..(25): SEQ ID NO: 5661; WAN024B7I; Start 102; Stop 126
gcttctgttatactacctattcgct

SEQ ID NO: 417645 - DNA, 25 bp, Artificial
  probe
  misc_feature (1)..(25): SEQ ID NO: 5661; WAN024B7I; Start 95; Stop 119
gtgtgatgcttctgttatactacct

SEQ ID NO: 417646 - DNA, 25 bp, Artificial
  probe
  misc_feature (1)..(25): SEQ ID NO: 5661; WAN024B7I; Start 101; Stop 125
tgcttctgttatactacctattcgc

SEQ ID NO: 417647 - DNA, 25 bp, Artificial
  probe
  misc_feature (1)..(25): SEQ ID NO: 5661; WAN024B7I; Start 105; Stop 129
tctgttatactacctattcgctcac

SEQ ID NO: 417648 - DNA, 25 bp, Artificial
  probe
  misc_feature (1)..(25): SEQ ID NO: 5661; WAN024B7I; Start 104; Stop 128
ttctgttatactacctattcgctca

SEQ ID NO: 417649 - DNA, 25 bp, Artificial
  probe
  misc_feature (1)..(25): SEQ ID NO: 5661; WAN024B7I; Start 96; Stop 120
tgtgatgcttctgttatactaccta

SEQ ID NO: 417650 - DNA, 25 bp, Artificial
  probe
  misc_feature (1)..(25): SEQ ID NO: 5661; WAN024B7I; Start 94; Stop 118
cgtgtgatgcttctgttatactacc

SEQ ID NO: 417651 - DNA, 25 bp, Artificial
  probe
  misc_feature (1)..(25): SEQ ID NO: 5661; WAN024B7I; Start 112; Stop 136
tactacctattcgctcacaataaga

SEQ ID NO: 417652 - DNA, 25 bp, Artificial
  probe
  misc_feature (1)..(25): SEQ ID NO: 5661; WAN024B7I; Start 103; Stop 127
cttctgttatactacctattcgctc

SEQ ID NO: 417653 - DNA, 25 bp, Artificial
  probe
  misc_feature (1)..(25): SEQ ID NO: 5661; WAN024B7I; Start 117; Stop 141
cctattcgctcacaataagagagaa

SEQ ID NO: 417654 - DNA, 25 bp, Artificial
  probe
  misc_feature (1)..(25): SEQ ID NO: 5661; WAN024B7I; Start 113; Stop 137
actacctattcgctcacaataagag

SEQ ID NO: 417655 - DNA, 25 bp, Artificial
  probe
  misc_feature (1)..(25): SEQ ID NO: 5661; WAN024B7I; Start 120; Stop 144
attcgctcacaataagagagaactt

SEQ ID NO: 417656 - DNA, 25 bp, Artificial
  probe
  misc_feature (1)..(25): SEQ ID NO: 5661; WAN024B7I; Start 115; Stop 139
tacctattcgctcacaataagagag

SEQ ID NO: 417657 - DNA, 25 bp, Artificial
  probe
  misc_feature (1)..(25): SEQ ID NO: 5661; WAN024B7I; Start 114; Stop 138
ctacctattcgctcacaataagaga

SEQ ID NO: 417658 - DNA, 25 bp, Artificial
  probe
  misc_feature (1)..(25): SEQ ID NO: 5661; WAN024B7I; Start 108; Stop 132
gttatactacctattcgctcacaat

SEQ ID NO: 417659 - DNA, 25 bp, Artificial
  probe
  misc_feature (1)..(25): SEQ ID NO: 5661; WAN024B7I; Start 119; Stop 143
tattcgctcacaataagagagaact

SEQ ID NO: 417660 - DNA, 25 bp, Artificial
  probe
  misc_feature (1)..(25): SEQ ID NO: 5661; WAN024B7I; Start 118; Stop 142
ctattcgctcacaataagagagaac

SEQ ID NO: 417661 - DNA, 25 bp, Artificial
  probe
  misc_feature (1)..(25): SEQ ID NO: 5661; WAN024B7I; Start 106; Stop 130
ctgttatactacctattcgctcaca

SEQ ID NO: 417662 - DNA, 25 bp, Artificial
  probe
  misc_feature (1)..(25): SEQ ID NO: 5661; WAN024B7I; Start 100; Stop 124
atgcttctgttatactacctattcg

SEQ ID NO: 417663 - DNA, 25 bp, Artificial
  probe
  misc_feature (1)..(25): SEQ ID NO: 5661; WAN024B7I; Start 107; Stop 131
tgttatactacctattcgctcacaa

SEQ ID NO: 417664 - DNA, 25 bp, Artificial
  probe
  misc_feature (1)..(25): SEQ ID NO: 5661; WAN024B7I; Start 116; Stop 140
acctattcgctcacaataagagaga

SEQ ID NO: 417665 - DNA, 25 bp, Artificial
  probe
  misc_feature (1)..(25): SEQ ID NO: 5661; WAN024B7I; Start 111; Stop 135
atactacctattcgctcacaataag

SEQ ID NO: 417666 - DNA, 25 bp, Artificial
  probe
  misc_feature (1)..(25): SEQ ID NO: 5661; WAN024B7I; Start 97; Stop 121
gtgatgcttctgttatactacctat

SEQ ID NO: 417667 - DNA, 25 bp, Artificial
  probe
  misc_feature (1)..(25): SEQ ID NO: 5661; WAN024B7I; Start 93; Stop 117
acgtgtgatgcttctgttatactac

SEQ ID NO: 417668 - DNA, 25 bp, Artificial
  probe
  misc_feature (1)..(25): SEQ ID NO: 5661; WAN024B7I; Start 92; Stop 116
aacgtgtgatgcttctgttatacta

SEQ ID NO: 417669 - DNA, 25 bp, Artificial
  probe
  misc_feature (1)..(25): SEQ ID NO: 5661; WAN024B7I; Start 98; Stop 122
tgatgcttctgttatactacctatt

SEQ ID NO: 417670 - DNA, 25 bp, Artificial
  probe
  misc_feature (1)..(25): SEQ ID NO: 5661; WAN024B7I; Start 121; Stop 145
ttcgctcacaataagagagaacttt

SEQ ID NO: 417671 - DNA, 25 bp, Artificial
  probe
  misc_feature (1)..(25): SEQ ID NO: 5661; WAN024B7I; Start 110; Stop 134
tatactacctattcgctcacaataa

SEQ ID NO: 417672 - DNA, 25 bp, Artificial
  probe
  misc_feature (1)..(25): SEQ ID NO: 5661; WAN024B7I; Start 109; Stop 133
ttatactacctattcgctcacaata

SEQ ID NO: 417673 - DNA, 25 bp, Artificial
  probe
  misc_feature (1)..(25): SEQ ID NO: 5661; WAN024B7I; Start 99; Stop 123
gatgcttctgttatactacctattc

SEQ ID NO: 417674 - DNA, 25 bp, Artificial
  probe
  misc_feature (1)..(25): SEQ ID NO: 5661; WAN024B7I; Start 91; Stop 115
aaacgtgtgatgcttctgttatact

SEQ ID NO: 417675 - DNA, 25 bp, Artificial
  probe
  misc_feature (1)..(25): SEQ ID NO: 5661; WAN024B7I; Start 68; Stop 92
aatggtattacgtgagatttggaaa

SEQ ID NO: 417676 - DNA, 25 bp, Artificial
  probe
  misc_feature (1)..(25): SEQ ID NO: 5661; WAN024B7I; Start 5; Stop 29
ttttgttccttttacttggtggttt

SEQ ID NO: 417677 - DNA, 25 bp, Artificial
  probe
  misc_feature (1)..(25): SEQ ID NO: 5662; WAN024DR4; Start 9; Stop 33
ttcttctctaccaactcccaataac

SEQ ID NO: 417678 - DNA, 25 bp, Artificial
  probe
  misc_feature (1)..(25): SEQ ID NO: 5662; WAN024DR4; Start 10; Stop 34
tcttctctaccaactcccaataact

SEQ ID NO: 417679 - DNA, 25 bp, Artificial
  probe
  misc_feature (1)..(25): SEQ ID NO: 5662; WAN024DR4; Start 8; Stop 32
tttcttctctaccaactcccaataa

SEQ ID NO: 417680 - DNA, 25 bp, Artificial
  probe
  misc_feature (1)..(25): SEQ ID NO: 5662; WAN024DR4; Start 11; Stop 35
cttctctaccaactcccaataacta

SEQ ID NO: 417681 - DNA, 25 bp, Artificial
  probe
  misc_feature (1)..(25): SEQ ID NO: 5662; WAN024DR4; Start 12; Stop 36
ttctctaccaactcccaataactat

SEQ ID NO: 417682 - DNA, 25 bp, Artificial
  probe
  misc_feature (1)..(25): SEQ ID NO: 5662; WAN024DR4; Start 13; Stop 37
tctctaccaactcccaataactatt

SEQ ID NO: 417683 - DNA, 25 bp, Artificial
  probe
  misc_feature (1)..(25): SEQ ID NO: 5662; WAN024DR4; Start 14; Stop 38
ctctaccaactcccaataactattt

SEQ ID NO: 417684 - DNA, 25 bp, Artificial
  probe
  misc_feature (1)..(25): SEQ ID NO: 5662; WAN024DR4; Start 7; Stop 31
ttttcttctctaccaactcccaata

SEQ ID NO: 417685 - DNA, 25 bp, Artificial
  probe
  misc_feature (1)..(25): SEQ ID NO: 5662; WAN024DR4; Start 15; Stop 39
tctaccaactcccaataactatttt

SEQ ID NO: 417686 - DNA, 25 bp, Artificial
  probe
  misc_feature (1)..(25): SEQ ID NO: 5662; WAN024DR4; Start 16; Stop 40
ctaccaactcccaataactattttg

SEQ ID NO: 417687 - DNA, 25 bp, Artificial
  probe
  misc_feature (1)..(25): SEQ ID NO: 5662; WAN024DR4; Start 32; Stop 56
actattttggctttatttccagagt

SEQ ID NO: 417688 - DNA, 25 bp, Artificial
  probe
  misc_feature (1)..(25): SEQ ID NO: 5662; WAN024DR4; Start 31; Stop 55
aactattttggctttatttccagag

SEQ ID NO: 417689 - DNA, 25 bp, Artificial
  probe
  misc_feature (1)..(25): SEQ ID NO: 5662; WAN024DR4; Start 37; Stop 61
tttggctttatttccagagtatttt

SEQ ID NO: 417690 - DNA, 25 bp, Artificial
  probe
  misc_feature (1)..(25): SEQ ID NO: 5662; WAN024DR4; Start 36; Stop 60
ttttggctttatttccagagtattt

SEQ ID NO: 417691 - DNA, 25 bp, Artificial
  probe
  misc_feature (1)..(25): SEQ ID NO: 5662; WAN024DR4; Start 40; Stop 64
ggctttatttccagagtattttatg

SEQ ID NO: 417692 - DNA, 25 bp, Artificial
  probe
  misc_feature (1)..(25): SEQ ID NO: 5662; WAN024DR4; Start 35; Stop 59
attttggctttatttccagagtatt

SEQ ID NO: 417693 - DNA, 25 bp, Artificial
  probe
  misc_feature (1)..(25): SEQ ID NO: 5662; WAN024DR4; Start 33; Stop 57
ctattttggctttatttccagagta

SEQ ID NO: 417694 - DNA, 25 bp, Artificial
  probe
  misc_feature (1)..(25): SEQ ID NO: 5662; WAN024DR4; Start 38; Stop 62
ttggctttatttccagagtatttta

SEQ ID NO: 417695 - DNA, 25 bp, Artificial
  probe
  misc_feature (1)..(25): SEQ ID NO: 5662; WAN024DR4; Start 30; Stop 54
taactattttggctttatttccaga

SEQ ID NO: 417696 - DNA, 25 bp, Artificial
  probe
  misc_feature (1)..(25): SEQ ID NO: 5662; WAN024DR4; Start 39; Stop 63
tggctttatttccagagtattttat

SEQ ID NO: 417697 - DNA, 25 bp, Artificial
  probe
  misc_feature (1)..(25): SEQ ID NO: 5662; WAN024DR4; Start 34; Stop 58
tattttggctttatttccagagtat

SEQ ID NO: 417698 - DNA, 25 bp, Artificial
  probe
  misc_feature (1)..(25): SEQ ID NO: 5662; WAN024DR4; Start 41; Stop 65
gctttatttccagagtattttatgg

SEQ ID NO: 417699 - DNA, 25 bp, Artificial
  probe
  misc_feature (1)..(25): SEQ ID NO: 5662; WAN024DR4; Start 20; Stop 44
caactcccaataactattttggctt

SEQ ID NO: 417700 - DNA, 25 bp, Artificial
  probe
  misc_feature (1)..(25): SEQ ID NO: 5662; WAN024DR4; Start 21; Stop 45
aactcccaataactattttggcttt

SEQ ID NO: 417701 - DNA, 25 bp, Artificial
  probe
  misc_feature (1)..(25): SEQ ID NO: 5662; WAN024DR4; Start 19; Stop 43
ccaactcccaataactattttggct

SEQ ID NO: 417702 - DNA, 25 bp, Artificial
  probe
  misc_feature (1)..(25): SEQ ID NO: 5662; WAN024DR4; Start 17; Stop 41
taccaactcccaataactattttgg

SEQ ID NO: 417703 - DNA, 25 bp, Artificial
  probe
  misc_feature (1)..(25): SEQ ID NO: 5662; WAN024DR4; Start 29; Stop 53
ataactattttggctttatttccag

SEQ ID NO: 417704 - DNA, 25 bp, Artificial
  probe
  misc_feature (1)..(25): SEQ ID NO: 5662; WAN024DR4; Start 18; Stop 42
accaactcccaataactattttggc

SEQ ID NO: 417705 - DNA, 25 bp, Artificial
  probe
  misc_feature (1)..(25): SEQ ID NO: 5662; WAN024DR4; Start 22; Stop 46
actcccaataactattttggcttta

SEQ ID NO: 417706 - DNA, 25 bp, Artificial
  probe
  misc_feature (1)..(25): SEQ ID NO: 5662; WAN024DR4; Start 23; Stop 47
ctcccaataactattttggctttat

SEQ ID NO: 417707 - DNA, 25 bp, Artificial
  probe
  misc_feature (1)..(25): SEQ ID NO: 5662; WAN024DR4; Start 42; Stop 66
ctttatttccagagtattttatggt

SEQ ID NO: 417708 - DNA, 25 bp, Artificial
  probe
  misc_feature (1)..(25): SEQ ID NO: 5662; WAN024DR4; Start 28; Stop 52
aataactattttggctttatttcca

SEQ ID NO: 417709 - DNA, 25 bp, Artificial
  probe
  misc_feature (1)..(25): SEQ ID NO: 5662; WAN024DR4; Start 24; Stop 48
tcccaataactattttggctttatt

SEQ ID NO: 417710 - DNA, 25 bp, Artificial
  probe
  misc_feature (1)..(25): SEQ ID NO: 5663; WAN024FXM; Start 37; Stop 61
tttcttggaaatatctttctcaaag

SEQ ID NO: 417711 - DNA, 25 bp, Artificial
  probe
  misc_feature (1)..(25): SEQ ID NO: 5663; WAN024FXM; Start 57; Stop 81
caaagacaaaatcttaaagtatgct

SEQ ID NO: 417712 - DNA, 25 bp, Artificial
  probe
  misc_feature (1)..(25): SEQ ID NO: 5663; WAN024FXM; Start 56; Stop 80
tcaaagacaaaatcttaaagtatgc

SEQ ID NO: 417713 - DNA, 25 bp, Artificial
  probe
  misc_feature (1)..(25): SEQ ID NO: 5663; WAN024FXM; Start 40; Stop 64
cttggaaatatctttctcaaagaca

SEQ ID NO: 417714 - DNA, 25 bp, Artificial
  probe
  misc_feature (1)..(25): SEQ ID NO: 5663; WAN024FXM; Start 39; Stop 63
tcttggaaatatctttctcaaagac

SEQ ID NO: 417715 - DNA, 25 bp, Artificial
  probe
  misc_feature (1)..(25): SEQ ID NO: 5663; WAN024FXM; Start 42; Stop 66
tggaaatatctttctcaaagacaaa

SEQ ID NO: 417716 - DNA, 25 bp, Artificial
  probe
  misc_feature (1)..(25): SEQ ID NO: 5663; WAN024FXM; Start 41; Stop 65
ttggaaatatctttctcaaagacaa

SEQ ID NO: 417717 - DNA, 25 bp, Artificial
  probe
  misc_feature (1)..(25): SEQ ID NO: 5663; WAN024FXM; Start 38; Stop 62
ttcttggaaatatctttctcaaaga

SEQ ID NO: 417718 - DNA, 25 bp, Artificial
  probe
  misc_feature (1)..(25): SEQ ID NO: 5663; WAN024FXM; Start 52; Stop 76
tttctcaaagacaaaatcttaaagt

SEQ ID NO: 417719 - DNA, 25 bp, Artificial
  probe
  misc_feature (1)..(25): SEQ ID NO: 5663; WAN024FXM; Start 36; Stop 60
ttttcttggaaatatctttctcaaa

SEQ ID NO: 417720 - DNA, 25 bp, Artificial
  probe
  misc_feature (1)..(25): SEQ ID NO: 5663; WAN024FXM; Start 51; Stop 75
ctttctcaaagacaaaatcttaaag

SEQ ID NO: 417721 - DNA, 25 bp, Artificial
  probe
  misc_feature (1)..(25): SEQ ID NO: 5663; WAN024FXM; Start 58; Stop 82
aaagacaaaatcttaaagtatgcta

SEQ ID NO: 417722 - DNA, 25 bp, Artificial
  probe
  misc_feature (1)..(25): SEQ ID NO: 5663; WAN024FXM; Start 43; Stop 67
ggaaatatctttctcaaagacaaaa

SEQ ID NO: 417723 - DNA, 25 bp, Artificial
  probe
  misc_feature (1)..(25): SEQ ID NO: 5663; WAN024FXM; Start 50; Stop 74
tctttctcaaagacaaaatcttaaa

SEQ ID NO: 417724 - DNA, 25 bp, Artificial
  probe
  misc_feature (1)..(25): SEQ ID NO: 5663; WAN024FXM; Start 49; Stop 73
atctttctcaaagacaaaatcttaa

SEQ ID NO: 417725 - DNA, 25 bp, Artificial
  probe
  misc_feature (1)..(25): SEQ ID NO: 5664; WAN024CRB; Start 213; Stop 237
cttggtccttgacataatcctcatc

SEQ ID NO: 417726 - DNA, 25 bp, Artificial
  probe
  misc_feature (1)..(25): SEQ ID NO: 5664; WAN024CRB; Start 211; Stop 235
tacttggtccttgacataatcctca

SEQ ID NO: 417727 - DNA, 25 bp, Artificial
  probe
  misc_feature (1)..(25): SEQ ID NO: 5664; WAN024CRB; Start 207; Stop 231
atggtacttggtccttgacataatc

SEQ ID NO: 417728 - DNA, 25 bp, Artificial
  probe
  misc_feature (1)..(25): SEQ ID NO: 5664; WAN024CRB; Start 214; Stop 238
ttggtccttgacataatcctcatca

SEQ ID NO: 417729 - DNA, 25 bp, Artificial
  probe
  misc_feature (1)..(25): SEQ ID NO: 5664; WAN024CRB; Start 212; Stop 236
acttggtccttgacataatcctcat

SEQ ID NO: 417730 - DNA, 25 bp, Artificial
  probe
  misc_feature (1)..(25): SEQ ID NO: 5664; WAN024CRB; Start 210; Stop 234
gtacttggtccttgacataatcctc

SEQ ID NO: 417731 - DNA, 25 bp, Artificial
  probe
  misc_feature (1)..(25): SEQ ID NO: 5664; WAN024CRB; Start 206; Stop 230
catggtacttggtccttgacataat

SEQ ID NO: 417732 - DNA, 25 bp, Artificial
  probe
  misc_feature (1)..(25): SEQ ID NO: 5664; WAN024CRB; Start 215; Stop 239
tggtccttgacataatcctcatcac

SEQ ID NO: 417733 - DNA, 25 bp, Artificial
  probe
  misc_feature (1)..(25): SEQ ID NO: 5664; WAN024CRB; Start 209; Stop 233
ggtacttggtccttgacataatcct

SEQ ID NO: 417734 - DNA, 25 bp, Artificial
  probe
  misc_feature (1)..(25): SEQ ID NO: 5664; WAN024CRB; Start 208; Stop 232
tggtacttggtccttgacataatcc

SEQ ID NO: 417735 - DNA, 25 bp, Artificial
  probe
  misc_feature (1)..(25): SEQ ID NO: 5664; WAN024CRB; Start 216; Stop 240
ggtccttgacataatcctcatcacg

SEQ ID NO: 417736 - DNA, 25 bp, Artificial
  probe
  misc_feature (1)..(25): SEQ ID NO: 5664; WAN024CRB; Start 205; Stop 229
gcatggtacttggtccttgacataa

SEQ ID NO: 417737 - DNA, 25 bp, Artificial
  probe
  misc_feature (1)..(25): SEQ ID NO: 5664; WAN024CRB; Start 217; Stop 241
gtccttgacataatcctcatcacgt

SEQ ID NO: 417738 - DNA, 25 bp, Artificial
  probe
  misc_feature (1)..(25): SEQ ID NO: 5664; WAN024CRB; Start 119; Stop 143
cccttgaccacacctgtaaacatag

SEQ ID NO: 417739 - DNA, 25 bp, Artificial
  probe
  misc_feature (1)..(25): SEQ ID NO: 5664; WAN024CRB; Start 204; Stop 228
agcatggtacttggtccttgacata

SEQ ID NO: 417740 - DNA, 25 bp, Artificial
  probe
  misc_feature (1)..(25): SEQ ID NO: 5664; WAN024CRB; Start 118; Stop 142
tcccttgaccacacctgtaaacata

SEQ ID NO: 417741 - DNA, 25 bp, Artificial
  probe
  misc_feature (1)..(25): SEQ ID NO: 5664; WAN024CRB; Start 152; Stop 176
tggaggttgttttggataatctcat

SEQ ID NO: 417742 - DNA, 25 bp, Artificial
  probe
  misc_feature (1)..(25): SEQ ID NO: 5664; WAN024CRB; Start 120; Stop 144
ccttgaccacacctgtaaacatagg

SEQ ID NO: 417743 - DNA, 25 bp, Artificial
  probe
  misc_feature (1)..(25): SEQ ID NO: 5664; WAN024CRB; Start 151; Stop 175
gtggaggttgttttggataatctca

SEQ ID NO: 417744 - DNA, 25 bp, Artificial
  probe
  misc_feature (1)..(25): SEQ ID NO: 5664; WAN024CRB; Start 150; Stop 174
ggtggaggttgttttggataatctc

SEQ ID NO: 417745 - DNA, 25 bp, Artificial
  probe
  misc_feature (1)..(25): SEQ ID NO: 5664; WAN024CRB; Start 153; Stop 177
ggaggttgttttggataatctcatg

SEQ ID NO: 417746 - DNA, 25 bp, Artificial
  probe
  misc_feature (1)..(25): SEQ ID NO: 5664; WAN024CRB; Start 121; Stop 145
cttgaccacacctgtaaacataggc

SEQ ID NO: 417747 - DNA, 25 bp, Artificial
  probe
  misc_feature (1)..(25): SEQ ID NO: 5664; WAN024CRB; Start 149; Stop 173
cggtggaggttgttttggataatct

SEQ ID NO: 417748 - DNA, 25 bp, Artificial
  probe
  misc_feature (1)..(25): SEQ ID NO: 5664; WAN024CRB; Start 117; Stop 141
ctcccttgaccacacctgtaaacat

SEQ ID NO: 417749 - DNA, 25 bp, Artificial
  probe
  misc_feature (1)..(25): SEQ ID NO: 5664; WAN024CRB; Start 203; Stop 227
cagcatggtacttggtccttgacat

SEQ ID NO: 417750 - DNA, 25 bp, Artificial
  probe
  misc_feature (1)..(25): SEQ ID NO: 5664; WAN024CRB; Start 148; Stop 172
acggtggaggttgttttggataatc

SEQ ID NO: 417751 - DNA, 25 bp, Artificial
  probe
  misc_feature (1)..(25): SEQ ID NO: 5664; WAN024CRB; Start 162; Stop 186
tttggataatctcatgactggtacc

SEQ ID NO: 417752 - DNA, 25 bp, Artificial
  probe
  misc_feature (1)..(25): SEQ ID NO: 5664; WAN024CRB; Start 191; Stop 215
gtataggtcaaccagcatggtactt

SEQ ID NO: 417753 - DNA, 25 bp, Artificial
  probe
  misc_feature (1)..(25): SEQ ID NO: 5664; WAN024CRB; Start 147; Stop 171
cacggtggaggttgttttggataat

SEQ ID NO: 417754 - DNA, 25 bp, Artificial
  probe
  misc_feature (1)..(25): SEQ ID NO: 5664; WAN024CRB; Start 192; Stop 216
tataggtcaaccagcatggtacttg

SEQ ID NO: 417755 - DNA, 25 bp, Artificial
  probe
  misc_feature (1)..(25): SEQ ID NO: 5664; WAN024CRB; Start 159; Stop 183
tgttttggataatctcatgactggt

SEQ ID NO: 417756 - DNA, 25 bp, Artificial
  probe
  misc_feature (1)..(25): SEQ ID NO: 5664; WAN024CRB; Start 158; Stop 182
ttgttttggataatctcatgactgg

SEQ ID NO: 417757 - DNA, 25 bp, Artificial
  probe
  misc_feature (1)..(25): SEQ ID NO: 5664; WAN024CRB; Start 156; Stop 180
ggttgttttggataatctcatgact

SEQ ID NO: 417758 - DNA, 25 bp, Artificial
  probe
  misc_feature (1)..(25): SEQ ID NO: 5665; WAN024G7E; Start 7; Stop 31
aatgactggaatggattggctgatt

SEQ ID NO: 417759 - DNA, 25 bp, Artificial
  probe
  misc_feature (1)..(25): SEQ ID NO: 5665; WAN024G7E; Start 142; Stop 166
acacaaattgagacggactaactaa

SEQ ID NO: 417760 - DNA, 25 bp, Artificial
  probe
  misc_feature (1)..(25): SEQ ID NO: 5665; WAN024G7E; Start 141; Stop 165
aacacaaattgagacggactaacta

SEQ ID NO: 417761 - DNA, 25 bp, Artificial
  probe
  misc_feature (1)..(25): SEQ ID NO: 5665; WAN024G7E; Start 11; Stop 35
actggaatggattggctgatttaat

SEQ ID NO: 417762 - DNA, 25 bp, Artificial
  probe
  misc_feature (1)..(25): SEQ ID NO: 5665; WAN024G7E; Start 13; Stop 37
tggaatggattggctgatttaatag

SEQ ID NO: 417763 - DNA, 25 bp, Artificial
  probe
  misc_feature (1)..(25): SEQ ID NO: 5665; WAN024G7E; Start 12; Stop 36
ctggaatggattggctgatttaata

SEQ ID NO: 417764 - DNA, 25 bp, Artificial
  probe
  misc_feature (1)..(25): SEQ ID NO: 5665; WAN024G7E; Start 143; Stop 167
cacaaattgagacggactaactaat

SEQ ID NO: 417765 - DNA, 25 bp, Artificial
  probe
  misc_feature (1)..(25): SEQ ID NO: 5665; WAN024G7E; Start 140; Stop 164
aaacacaaattgagacggactaact

SEQ ID NO: 417766 - DNA, 25 bp, Artificial
  probe
  misc_feature (1)..(25): SEQ ID NO: 5665; WAN024G7E; Start 10; Stop 34
gactggaatggattggctgatttaa

SEQ ID NO: 417767 - DNA, 25 bp, Artificial
  probe
  misc_feature (1)..(25): SEQ ID NO: 5665; WAN024G7E; Start 57; Stop 81
tgctggtgctttagatttagataat

SEQ ID NO: 417768 - DNA, 25 bp, Artificial
  probe
  misc_feature (1)..(25): SEQ ID NO: 5665; WAN024G7E; Start 56; Stop 80
atgctggtgctttagatttagataa

SEQ ID NO: 417769 - DNA, 25 bp, Artificial
  probe
  misc_feature (1)..(25): SEQ ID NO: 5665; WAN024G7E; Start 53; Stop 77
aatatgctggtgctttagatttaga

SEQ ID NO: 417770 - DNA, 25 bp, Artificial
  probe
  misc_feature (1)..(25): SEQ ID NO: 5665; WAN024G7E; Start 54; Stop 78
atatgctggtgctttagatttagat

SEQ ID NO: 417771 - DNA, 25 bp, Artificial
  probe
  misc_feature (1)..(25): SEQ ID NO: 5665; WAN024G7E; Start 9; Stop 33
tgactggaatggattggctgattta

SEQ ID NO: 417772 - DNA, 25 bp, Artificial
  probe
  misc_feature (1)..(25): SEQ ID NO: 5665; WAN024G7E; Start 55; Stop 79
tatgctggtgctttagatttagata

SEQ ID NO: 417773 - DNA, 25 bp, Artificial
  probe
  misc_feature (1)..(25): SEQ ID NO: 5665; WAN024G7E; Start 8; Stop 32
atgactggaatggattggctgattt

SEQ ID NO: 417774 - DNA, 25 bp, Artificial
  probe
  misc_feature (1)..(25): SEQ ID NO: 5665; WAN024G7E; Start 72; Stop 96
tttagataatctacccgatccaacg

SEQ ID NO: 417775 - DNA, 25 bp, Artificial
  probe
  misc_feature (1)..(25): SEQ ID NO: 5665; WAN024G7E; Start 52; Stop 76
aaatatgctggtgctttagatttag

SEQ ID NO: 417776 - DNA, 25 bp, Artificial
  probe
  misc_feature (1)..(25): SEQ ID NO: 5665; WAN024G7E; Start 15; Stop 39
gaatggattggctgatttaatagca

SEQ ID NO: 417777 - DNA, 25 bp, Artificial
  probe
  misc_feature (1)..(25): SEQ ID NO: 5665; WAN024G7E; Start 14; Stop 38
ggaatggattggctgatttaatagc

SEQ ID NO: 417778 - DNA, 25 bp, Artificial
  probe
  misc_feature (1)..(25): SEQ ID NO: 5665; WAN024G7E; Start 18; Stop 42
tggattggctgatttaatagcaaat

SEQ ID NO: 417779 - DNA, 25 bp, Artificial
  probe
  misc_feature (1)..(25): SEQ ID NO: 5665; WAN024G7E; Start 17; Stop 41
atggattggctgatttaatagcaaa

SEQ ID NO: 417780 - DNA, 25 bp, Artificial
  probe
  misc_feature (1)..(25): SEQ ID NO: 5665; WAN024G7E; Start 16; Stop 40
aatggattggctgatttaatagcaa

SEQ ID NO: 417781 - DNA, 25 bp, Artificial
  probe
  misc_feature (1)..(25): SEQ ID NO: 5665; WAN024G7E; Start 58; Stop 82
gctggtgctttagatttagataatc

SEQ ID NO: 417782 - DNA, 25 bp, Artificial
  probe
  misc_feature (1)..(25): SEQ ID NO: 5665; WAN024G7E; Start 139; Stop 163
aaaacacaaattgagacggactaac

SEQ ID NO: 417783 - DNA, 25 bp, Artificial
  probe
  misc_feature (1)..(25): SEQ ID NO: 5665; WAN024G7E; Start 6; Stop 30
caatgactggaatggattggctgat

SEQ ID NO: 417784 - DNA, 25 bp, Artificial
  probe
  misc_feature (1)..(25): SEQ ID NO: 5665; WAN024G7E; Start 73; Stop 97
ttagataatctacccgatccaacgc

SEQ ID NO: 417785 - DNA, 25 bp, Artificial
  probe
  misc_feature (1)..(25): SEQ ID NO: 5665; WAN024G7E; Start 71; Stop 95
atttagataatctacccgatccaac

SEQ ID NO: 417786 - DNA, 25 bp, Artificial
  probe
  misc_feature (1)..(25): SEQ ID NO: 5665; WAN024G7E; Start 70; Stop 94
gatttagataatctacccgatccaa

SEQ ID NO: 417787 - DNA, 25 bp, Artificial
  probe
  misc_feature (1)..(25): SEQ ID NO: 5665; WAN024G7E; Start 50; Stop 74
caaaatatgctggtgctttagattt

SEQ ID NO: 417788 - DNA, 25 bp, Artificial
  probe
  misc_feature (1)..(25): SEQ ID NO: 5665; WAN024G7E; Start 74; Stop 98
tagataatctacccgatccaacgcc

SEQ ID NO: 417789 - DNA, 25 bp, Artificial
  probe
  misc_feature (1)..(25): SEQ ID NO: 5665; WAN024G7E; Start 5; Stop 29
acaatgactggaatggattggctga

SEQ ID NO: 417790 - DNA, 25 bp, Artificial
  probe
  misc_feature (1)..(25): SEQ ID NO: 5665; WAN024G7E; Start 51; Stop 75
aaaatatgctggtgctttagattta

SEQ ID NO: 417791 - DNA, 25 bp, Artificial
  probe
  misc_feature (1)..(25): SEQ ID NO: 5666; WAN024GNH; Start 32; Stop 56
actatcgtgatgattggaaatatct

SEQ ID NO: 417792 - DNA, 25 bp, Artificial
  probe
  misc_feature (1)..(25): SEQ ID NO: 5666; WAN024GNH; Start 31; Stop 55
cactatcgtgatgattggaaatatc

SEQ ID NO: 417793 - DNA, 25 bp, Artificial
  probe
  misc_feature (1)..(25): SEQ ID NO: 5666; WAN024GNH; Start 33; Stop 57
ctatcgtgatgattggaaatatctt

SEQ ID NO: 417794 - DNA, 25 bp, Artificial
  probe
  misc_feature (1)..(25): SEQ ID NO: 5666; WAN024GNH; Start 34; Stop 58
tatcgtgatgattggaaatatcttt

SEQ ID NO: 417795 - DNA, 25 bp, Artificial
  probe
  misc_feature (1)..(25): SEQ ID NO: 5666; WAN024GNH; Start 35; Stop 59
atcgtgatgattggaaatatctttc

SEQ ID NO: 417796 - DNA, 25 bp, Artificial
  probe
  misc_feature (1)..(25): SEQ ID NO: 5666; WAN024GNH; Start 26; Stop 50
gctctcactatcgtgatgattggaa

SEQ ID NO: 417797 - DNA, 25 bp, Artificial
  probe
  misc_feature (1)..(25): SEQ ID NO: 5666; WAN024GNH; Start 24; Stop 48
aagctctcactatcgtgatgattgg

SEQ ID NO: 417798 - DNA, 25 bp, Artificial
  probe
  misc_feature (1)..(25): SEQ ID NO: 5666; WAN024GNH; Start 28; Stop 52
tctcactatcgtgatgattggaaat

SEQ ID NO: 417799 - DNA, 25 bp, Artificial
  probe
  misc_feature (1)..(25): SEQ ID NO: 5666; WAN024GNH; Start 27; Stop 51
ctctcactatcgtgatgattggaaa

SEQ ID NO: 417800 - DNA, 25 bp, Artificial
  probe
  misc_feature (1)..(25): SEQ ID NO: 5666; WAN024GNH; Start 29; Stop 53
ctcactatcgtgatgattggaaata

SEQ ID NO: 417801 - DNA, 25 bp, Artificial
  probe
  misc_feature (1)..(25): SEQ ID NO: 5666; WAN024GNH; Start 23; Stop 47
aaagctctcactatcgtgatgattg

SEQ ID NO: 417802 - DNA, 25 bp, Artificial
  probe
  misc_feature (1)..(25): SEQ ID NO: 5666; WAN024GNH; Start 25; Stop 49
agctctcactatcgtgatgattgga

SEQ ID NO: 417803 - DNA, 25 bp, Artificial
  probe
  misc_feature (1)..(25): SEQ ID NO: 5666; WAN024GNH; Start 30; Stop 54
tcactatcgtgatgattggaaatat

SEQ ID NO: 417804 - DNA, 25 bp, Artificial
  probe
  misc_feature (1)..(25): SEQ ID NO: 5666; WAN024GNH; Start 53; Stop 77
atctttccattttgaaaactctttt

SEQ ID NO: 417805 - DNA, 25 bp, Artificial
  probe
  misc_feature (1)..(25): SEQ ID NO: 5666; WAN024GNH; Start 22; Stop 46
aaaagctctcactatcgtgatgatt

SEQ ID NO: 417806 - DNA, 25 bp, Artificial
  probe
  misc_feature (1)..(25): SEQ ID NO: 5666; WAN024GNH; Start 65; Stop 89
tgaaaactcttttccacagtcaaac

SEQ ID NO: 417807 - DNA, 25 bp, Artificial
  probe
  misc_feature (1)..(25): SEQ ID NO: 5666; WAN024GNH; Start 64; Stop 88
ttgaaaactcttttccacagtcaaa

SEQ ID NO: 417808 - DNA, 25 bp, Artificial
  probe
  misc_feature (1)..(25): SEQ ID NO: 5666; WAN024GNH; Start 63; Stop 87
tttgaaaactcttttccacagtcaa

SEQ ID NO: 417809 - DNA, 25 bp, Artificial
  probe
  misc_feature (1)..(25): SEQ ID NO: 5666; WAN024GNH; Start 62; Stop 86
ttttgaaaactcttttccacagtca

SEQ ID NO: 417810 - DNA, 25 bp, Artificial
  probe
  misc_feature (1)..(25): SEQ ID NO: 5666; WAN024GNH; Start 58; Stop 82
tccattttgaaaactcttttccaca

SEQ ID NO: 417811 - DNA, 25 bp, Artificial
  probe
  misc_feature (1)..(25): SEQ ID NO: 5666; WAN024GNH; Start 59; Stop 83
ccattttgaaaactcttttccacag

SEQ ID NO: 417812 - DNA, 25 bp, Artificial
  probe
  misc_feature (1)..(25): SEQ ID NO: 5666; WAN024GNH; Start 60; Stop 84
cattttgaaaactcttttccacagt

SEQ ID NO: 417813 - DNA, 25 bp, Artificial
  probe
  misc_feature (1)..(25): SEQ ID NO: 5666; WAN024GNH; Start 57; Stop 81
ttccattttgaaaactcttttccac

SEQ ID NO: 417814 - DNA, 25 bp, Artificial
  probe
  misc_feature (1)..(25): SEQ ID NO: 5666; WAN024GNH; Start 66; Stop 90
gaaaactcttttccacagtcaaacg

SEQ ID NO: 417815 - DNA, 25 bp, Artificial
  probe
  misc_feature (1)..(25): SEQ ID NO: 5666; WAN024GNH; Start 61; Stop 85
attttgaaaactcttttccacagtc

SEQ ID NO: 417816 - DNA, 25 bp, Artificial
  probe
  misc_feature (1)..(25): SEQ ID NO: 5666; WAN024GNH; Start 52; Stop 76
tatctttccattttgaaaactcttt

SEQ ID NO: 417817 - DNA, 25 bp, Artificial
  probe
  misc_feature (1)..(25): SEQ ID NO: 5666; WAN024GNH; Start 56; Stop 80
tttccattttgaaaactcttttcca

SEQ ID NO: 417818 - DNA, 25 bp, Artificial
  probe
  misc_feature (1)..(25): SEQ ID NO: 5666; WAN024GNH; Start 51; Stop 75
atatctttccattttgaaaactctt

SEQ ID NO: 417819 - DNA, 25 bp, Artificial
  probe
  misc_feature (1)..(25): SEQ ID NO: 5666; WAN024GNH; Start 50; Stop 74
aatatctttccattttgaaaactct

SEQ ID NO: 417820 - DNA, 25 bp, Artificial
  probe
  misc_feature (1)..(25): SEQ ID NO: 5666; WAN024GNH; Start 55; Stop 79
ctttccattttgaaaactcttttcc

SEQ ID NO: 417821 - DNA, 25 bp, Artificial
  probe
  misc_feature (1)..(25): SEQ ID NO: 5666; WAN024GNH; Start 54; Stop 78
tctttccattttgaaaactcttttc

SEQ ID NO: 417822 - DNA, 25 bp, Artificial
  probe
  misc_feature (1)..(25): SEQ ID NO: 5667; WAN024AVF; Start 30; Stop 54
aagaatagaaagaacctggctaaca

SEQ ID NO: 417823 - DNA, 25 bp, Artificial
  probe
  misc_feature (1)..(25): SEQ ID NO: 5667; WAN024AVF; Start 26; Stop 50
ttgaaagaatagaaagaacctggct

SEQ ID NO: 417824 - DNA, 25 bp, Artificial
  probe
  misc_feature (1)..(25): SEQ ID NO: 5667; WAN024AVF; Start 27; Stop 51
tgaaagaatagaaagaacctggcta

SEQ ID NO: 417825 - DNA, 25 bp, Artificial
  probe
  misc_feature (1)..(25): SEQ ID NO: 5667; WAN024AVF; Start 25; Stop 49
attgaaagaatagaaagaacctggc

SEQ ID NO: 417826 - DNA, 25 bp, Artificial
  probe
  misc_feature (1)..(25): SEQ ID NO: 5667; WAN024AVF; Start 29; Stop 53
aaagaatagaaagaacctggctaac

SEQ ID NO: 417827 - DNA, 25 bp, Artificial
  probe
  misc_feature (1)..(25): SEQ ID NO: 5667; WAN024AVF; Start 28; Stop 52
gaaagaatagaaagaacctggctaa

SEQ ID NO: 417828 - DNA, 25 bp, Artificial
  probe
  misc_feature (1)..(25): SEQ ID NO: 5667; WAN024AVF; Start 31; Stop 55
agaatagaaagaacctggctaacag

SEQ ID NO: 417829 - DNA, 25 bp, Artificial
  probe
  misc_feature (1)..(25): SEQ ID NO: 5667; WAN024AVF; Start 24; Stop 48
aattgaaagaatagaaagaacctgg

SEQ ID NO: 417830 - DNA, 25 bp, Artificial
  probe
  misc_feature (1)..(25): SEQ ID NO: 5667; WAN024AVF; Start 32; Stop 56
gaatagaaagaacctggctaacagc

SEQ ID NO: 417831 - DNA, 25 bp, Artificial
  probe
  misc_feature (1)..(25): SEQ ID NO: 5667; WAN024AVF; Start 23; Stop 47
aaattgaaagaatagaaagaacctg

SEQ ID NO: 417832 - DNA, 25 bp, Artificial
  probe
  misc_feature (1)..(25): SEQ ID NO: 5667; WAN024AVF; Start 21; Stop 45
tgaaattgaaagaatagaaagaacc

SEQ ID NO: 417833 - DNA, 25 bp, Artificial
  probe
  misc_feature (1)..(25): SEQ ID NO: 5667; WAN024AVF; Start 33; Stop 57
aatagaaagaacctggctaacagct

SEQ ID NO: 417834 - DNA, 25 bp, Artificial
  probe
  misc_feature (1)..(25): SEQ ID NO: 5667; WAN024AVF; Start 22; Stop 46
gaaattgaaagaatagaaagaacct

SEQ ID NO: 417835 - DNA, 25 bp, Artificial
  probe
  misc_feature (1)..(25): SEQ ID NO: 5667; WAN024AVF; Start 34; Stop 58
atagaaagaacctggctaacagctc

SEQ ID NO: 417836 - DNA, 25 bp, Artificial
  probe
  misc_feature (1)..(25): SEQ ID NO: 5667; WAN024AVF; Start 35; Stop 59
tagaaagaacctggctaacagctca

SEQ ID NO: 417837 - DNA, 25 bp, Artificial
  probe
  misc_feature (1)..(25): SEQ ID NO: 5667; WAN024AVF; Start 10; Stop 34
aatccattcattgaaattgaaagaa

SEQ ID NO: 417838 - DNA, 25 bp, Artificial
  probe
  misc_feature (1)..(25): SEQ ID NO: 5667; WAN024AVF; Start 9; Stop 33
aaatccattcattgaaattgaaaga

SEQ ID NO: 417839 - DNA, 25 bp, Artificial
  probe
  misc_feature (1)..(25): SEQ ID NO: 5667; WAN024AVF; Start 11; Stop 35
atccattcattgaaattgaaagaat

SEQ ID NO: 417840 - DNA, 25 bp, Artificial
  probe
  misc_feature (1)..(25): SEQ ID NO: 5667; WAN024AVF; Start 12; Stop 36
tccattcattgaaattgaaagaata

SEQ ID NO: 417841 - DNA, 25 bp, Artificial
  probe
  misc_feature (1)..(25): SEQ ID NO: 5667; WAN024AVF; Start 13; Stop 37
ccattcattgaaattgaaagaatag

SEQ ID NO: 417842 - DNA, 25 bp, Artificial
  probe
  misc_feature (1)..(25): SEQ ID NO: 5667; WAN024AVF; Start 37; Stop 61
gaaagaacctggctaacagctcact

SEQ ID NO: 417843 - DNA, 25 bp, Artificial
  probe
  misc_feature (1)..(25): SEQ ID NO: 5667; WAN024AVF; Start 36; Stop 60
agaaagaacctggctaacagctcac

SEQ ID NO: 417844 - DNA, 25 bp, Artificial
  probe
  misc_feature (1)..(25): SEQ ID NO: 5667; WAN024AVF; Start 8; Stop 32
aaaatccattcattgaaattgaaag

SEQ ID NO: 417845 - DNA, 25 bp, Artificial
  probe
  misc_feature (1)..(25): SEQ ID NO: 5668; WAN0249HE; Start 39; Stop 63
ctctttctgctatatcggaggacag

SEQ ID NO: 417846 - DNA, 25 bp, Artificial
  probe
  misc_feature (1)..(25): SEQ ID NO: 5668; WAN0249HE; Start 43; Stop 67
ttctgctatatcggaggacagatag

SEQ ID NO: 417847 - DNA, 25 bp, Artificial
  probe
  misc_feature (1)..(25): SEQ ID NO: 5668; WAN0249HE; Start 31; Stop 55
tttccagcctctttctgctatatcg

SEQ ID NO: 417848 - DNA, 25 bp, Artificial
  probe
  misc_feature (1)..(25): SEQ ID NO: 5668; WAN0249HE; Start 42; Stop 66
tttctgctatatcggaggacagata

SEQ ID NO: 417849 - DNA, 25 bp, Artificial
  probe
  misc_feature (1)..(25): SEQ ID NO: 5668; WAN0249HE; Start 41; Stop 65
ctttctgctatatcggaggacagat

SEQ ID NO: 417850 - DNA, 25 bp, Artificial
  probe
  misc_feature (1)..(25): SEQ ID NO: 5668; WAN0249HE; Start 30; Stop 54
ttttccagcctctttctgctatatc

SEQ ID NO: 417851 - DNA, 25 bp, Artificial
  probe
  misc_feature (1)..(25): SEQ ID NO: 5668; WAN0249HE; Start 40; Stop 64
tctttctgctatatcggaggacaga

SEQ ID NO: 417852 - DNA, 25 bp, Artificial
  probe
  misc_feature (1)..(25): SEQ ID NO: 5668; WAN0249HE; Start 32; Stop 56
ttccagcctctttctgctatatcgg

SEQ ID NO: 417853 - DNA, 25 bp, Artificial
  probe
  misc_feature (1)..(25): SEQ ID NO: 5668; WAN0249HE; Start 34; Stop 58
ccagcctctttctgctatatcggag

SEQ ID NO: 417854 - DNA, 25 bp, Artificial
  probe
  misc_feature (1)..(25): SEQ ID NO: 5668; WAN0249HE; Start 33; Stop 57
tccagcctctttctgctatatcgga

SEQ ID NO: 417855 - DNA, 25 bp, Artificial
  probe
  misc_feature (1)..(25): SEQ ID NO: 5668; WAN0249HE; Start 38; Stop 62
cctctttctgctatatcggaggaca

SEQ ID NO: 417856 - DNA, 25 bp, Artificial
  probe
  misc_feature (1)..(25): SEQ ID NO: 5668; WAN0249HE; Start 37; Stop 61
gcctctttctgctatatcggaggac

SEQ ID NO: 417857 - DNA, 25 bp, Artificial
  probe
  misc_feature (1)..(25): SEQ ID NO: 5668; WAN0249HE; Start 35; Stop 59
cagcctctttctgctatatcggagg

SEQ ID NO: 417858 - DNA, 25 bp, Artificial
  probe
  misc_feature (1)..(25): SEQ ID NO: 5668; WAN0249HE; Start 36; Stop 60
agcctctttctgctatatcggagga

SEQ ID NO: 417859 - DNA, 25 bp, Artificial
  probe
  misc_feature (1)..(25): SEQ ID NO: 5669; WAN024AGJ; Start 97; Stop 121
acaagtcaggctaaagaaagaaatg

SEQ ID NO: 417860 - DNA, 25 bp, Artificial
  probe
  misc_feature (1)..(25): SEQ ID NO: 5669; WAN024AGJ; Start 104; Stop 128
aggctaaagaaagaaatgaggtaga

SEQ ID NO: 417861 - DNA, 25 bp, Artificial
  probe
  misc_feature (1)..(25): SEQ ID NO: 5669; WAN024AGJ; Start 103; Stop 127
caggctaaagaaagaaatgaggtag

SEQ ID NO: 417862 - DNA, 25 bp, Artificial
  probe
  misc_feature (1)..(25): SEQ ID NO: 5669; WAN024AGJ; Start 95; Stop 119
aaacaagtcaggctaaagaaagaaa

SEQ ID NO: 417863 - DNA, 25 bp, Artificial
  probe
  misc_feature (1)..(25): SEQ ID NO: 5669; WAN024AGJ; Start 96; Stop 120
aacaagtcaggctaaagaaagaaat

SEQ ID NO: 417864 - DNA, 25 bp, Artificial
  probe
  misc_feature (1)..(25): SEQ ID NO: 5669; WAN024AGJ; Start 105; Stop 129
ggctaaagaaagaaatgaggtagat

SEQ ID NO: 417865 - DNA, 25 bp, Artificial
  probe
  misc_feature (1)..(25): SEQ ID NO: 5669; WAN024AGJ; Start 94; Stop 118
taaacaagtcaggctaaagaaagaa

SEQ ID NO: 417866 - DNA, 25 bp, Artificial
  probe
  misc_feature (1)..(25): SEQ ID NO: 5669; WAN024AGJ; Start 93; Stop 117
ttaaacaagtcaggctaaagaaaga

SEQ ID NO: 417867 - DNA, 25 bp, Artificial
  probe
  misc_feature (1)..(25): SEQ ID NO: 5669; WAN024AGJ; Start 102; Stop 126
tcaggctaaagaaagaaatgaggta

SEQ ID NO: 417868 - DNA, 25 bp, Artificial
  probe
  misc_feature (1)..(25): SEQ ID NO: 5669; WAN024AGJ; Start 98; Stop 122
caagtcaggctaaagaaagaaatga

SEQ ID NO: 417869 - DNA, 25 bp, Artificial
  probe
  misc_feature (1)..(25): SEQ ID NO: 5669; WAN024AGJ; Start 100; Stop 124
agtcaggctaaagaaagaaatgagg

SEQ ID NO: 417870 - DNA, 25 bp, Artificial
  probe
  misc_feature (1)..(25): SEQ ID NO: 5669; WAN024AGJ; Start 99; Stop 123
aagtcaggctaaagaaagaaatgag

SEQ ID NO: 417871 - DNA, 25 bp, Artificial
  probe
  misc_feature (1)..(25): SEQ ID NO: 5669; WAN024AGJ; Start 101; Stop 125
gtcaggctaaagaaagaaatgaggt

SEQ ID NO: 417872 - DNA, 25 bp, Artificial
  probe
  misc_feature (1)..(25): SEQ ID NO: 5669; WAN024AGJ; Start 106; Stop 130
gctaaagaaagaaatgaggtagatg

SEQ ID NO: 417873 - DNA, 25 bp, Artificial
  probe
  misc_feature (1)..(25): SEQ ID NO: 5669; WAN024AGJ; Start 46; Stop 70
cccaatcctgttataatgagagtat

SEQ ID NO: 417874 - DNA, 25 bp, Artificial
  probe
  misc_feature (1)..(25): SEQ ID NO: 5669; WAN024AGJ; Start 92; Stop 116
tttaaacaagtcaggctaaagaaag

SEQ ID NO: 417875 - DNA, 25 bp, Artificial
  probe
  misc_feature (1)..(25): SEQ ID NO: 5669; WAN024AGJ; Start 107; Stop 131
ctaaagaaagaaatgaggtagatgt

SEQ ID NO: 417876 - DNA, 25 bp, Artificial
  probe
  misc_feature (1)..(25): SEQ ID NO: 5669; WAN024AGJ; Start 45; Stop 69
ccccaatcctgttataatgagagta

SEQ ID NO: 417877 - DNA, 25 bp, Artificial
  probe
  misc_feature (1)..(25): SEQ ID NO: 5669; WAN024AGJ; Start 43; Stop 67
caccccaatcctgttataatgagag

SEQ ID NO: 417878 - DNA, 25 bp, Artificial
  probe
  misc_feature (1)..(25): SEQ ID NO: 5669; WAN024AGJ; Start 29; Stop 53
ttttacttgctttacaccccaatcc

SEQ ID NO: 417879 - DNA, 25 bp, Artificial
  probe
  misc_feature (1)..(25): SEQ ID NO: 5669; WAN024AGJ; Start 44; Stop 68
accccaatcctgttataatgagagt

SEQ ID NO: 417880 - DNA, 25 bp, Artificial
  probe
  misc_feature (1)..(25): SEQ ID NO: 5669; WAN024AGJ; Start 36; Stop 60
tgctttacaccccaatcctgttata

SEQ ID NO: 417881 - DNA, 25 bp, Artificial
  probe
  misc_feature (1)..(25): SEQ ID NO: 5669; WAN024AGJ; Start 47; Stop 71
ccaatcctgttataatgagagtata

SEQ ID NO: 417882 - DNA, 25 bp, Artificial
  probe
  misc_feature (1)..(25): SEQ ID NO: 5669; WAN024AGJ; Start 41; Stop 65
tacaccccaatcctgttataatgag

SEQ ID NO: 417883 - DNA, 25 bp, Artificial
  probe
  misc_feature (1)..(25): SEQ ID NO: 5669; WAN024AGJ; Start 30; Stop 54
tttacttgctttacaccccaatcct

SEQ ID NO: 417884 - DNA, 25 bp, Artificial
  probe
  misc_feature (1)..(25): SEQ ID NO: 5669; WAN024AGJ; Start 40; Stop 64
ttacaccccaatcctgttataatga

SEQ ID NO: 417885 - DNA, 25 bp, Artificial
  probe
  misc_feature (1)..(25): SEQ ID NO: 5669; WAN024AGJ; Start 37; Stop 61
gctttacaccccaatcctgttataa

SEQ ID NO: 417886 - DNA, 25 bp, Artificial
  probe
  misc_feature (1)..(25): SEQ ID NO: 5669; WAN024AGJ; Start 5; Stop 29
aacaacttctcaaagcttcaatctt

SEQ ID NO: 417887 - DNA, 25 bp, Artificial
  probe
  misc_feature (1)..(25): SEQ ID NO: 5669; WAN024AGJ; Start 2; Stop 26
tgtaacaacttctcaaagcttcaat

SEQ ID NO: 417888 - DNA, 25 bp, Artificial
  probe
  misc_feature (1)..(25): SEQ ID NO: 5669; WAN024AGJ; Start 42; Stop 66
acaccccaatcctgttataatgaga

SEQ ID NO: 417889 - DNA, 25 bp, Artificial
  probe
  misc_feature (1)..(25): SEQ ID NO: 5669; WAN024AGJ; Start 39; Stop 63
tttacaccccaatcctgttataatg

SEQ ID NO: 417890 - DNA, 25 bp, Artificial
  probe
  misc_feature (1)..(25): SEQ ID NO: 5669; WAN024AGJ; Start 88; Stop 112
gacctttaaacaagtcaggctaaag

SEQ ID NO: 417891 - DNA, 25 bp, Artificial
  probe
  misc_feature (1)..(25): SEQ ID NO: 5669; WAN024AGJ; Start 89; Stop 113
acctttaaacaagtcaggctaaaga

SEQ ID NO: 417892 - DNA, 25 bp, Artificial
  probe
  misc_feature (1)..(25): SEQ ID NO: 5670; WAN024GEY; Start 282; Stop 306
gttcatcatccaagcagataatcag

SEQ ID NO: 417893 - DNA, 25 bp, Artificial
  probe
  misc_feature (1)..(25): SEQ ID NO: 5670; WAN024GEY; Start 146; Stop 170
aagagttccttatagccaattcctt

SEQ ID NO: 417894 - DNA, 25 bp, Artificial
  probe
  misc_feature (1)..(25): SEQ ID NO: 5670; WAN024GEY; Start 283; Stop 307
ttcatcatccaagcagataatcagc

SEQ ID NO: 417895 - DNA, 25 bp, Artificial
  probe
  misc_feature (1)..(25): SEQ ID NO: 5670; WAN024GEY; Start 281; Stop 305
cgttcatcatccaagcagataatca

SEQ ID NO: 417896 - DNA, 25 bp, Artificial
  probe
  misc_feature (1)..(25): SEQ ID NO: 5670; WAN024GEY; Start 292; Stop 316
caagcagataatcagcggttcatac

SEQ ID NO: 417897 - DNA, 25 bp, Artificial
  probe
  misc_feature (1)..(25): SEQ ID NO: 5670; WAN024GEY; Start 294; Stop 318
agcagataatcagcggttcatacaa

SEQ ID NO: 417898 - DNA, 25 bp, Artificial
  probe
  misc_feature (1)..(25): SEQ ID NO: 5670; WAN024GEY; Start 293; Stop 317
aagcagataatcagcggttcataca

SEQ ID NO: 417899 - DNA, 25 bp, Artificial
  probe
  misc_feature (1)..(25): SEQ ID NO: 5670; WAN024GEY; Start 279; Stop 303
tacgttcatcatccaagcagataat

SEQ ID NO: 417900 - DNA, 25 bp, Artificial
  probe
  misc_feature (1)..(25): SEQ ID NO: 5670; WAN024GEY; Start 278; Stop 302
ctacgttcatcatccaagcagataa

SEQ ID NO: 417901 - DNA, 25 bp, Artificial
  probe
  misc_feature (1)..(25): SEQ ID NO: 5670; WAN024GEY; Start 291; Stop 315
ccaagcagataatcagcggttcata

SEQ ID NO: 417902 - DNA, 25 bp, Artificial
  probe
  misc_feature (1)..(25): SEQ ID NO: 5670; WAN024GEY; Start 151; Stop 175
ttccttatagccaattcctttagca

SEQ ID NO: 417903 - DNA, 25 bp, Artificial
  probe
  misc_feature (1)..(25): SEQ ID NO: 5670; WAN024GEY; Start 150; Stop 174
gttccttatagccaattcctttagc

SEQ ID NO: 417904 - DNA, 25 bp, Artificial
  probe
  misc_feature (1)..(25): SEQ ID NO: 5670; WAN024GEY; Start 152; Stop 176
tccttatagccaattcctttagcag

SEQ ID NO: 417905 - DNA, 25 bp, Artificial
  probe
  misc_feature (1)..(25): SEQ ID NO: 5670; WAN024GEY; Start 147; Stop 171
agagttccttatagccaattccttt

SEQ ID NO: 417906 - DNA, 25 bp, Artificial
  probe
  misc_feature (1)..(25): SEQ ID NO: 5670; WAN024GEY; Start 280; Stop 304
acgttcatcatccaagcagataatc

SEQ ID NO: 417907 - DNA, 25 bp, Artificial
  probe
  misc_feature (1)..(25): SEQ ID NO: 5670; WAN024GEY; Start 284; Stop 308
tcatcatccaagcagataatcagcg

SEQ ID NO: 417908 - DNA, 25 bp, Artificial
  probe
  misc_feature (1)..(25): SEQ ID NO: 5670; WAN024GEY; Start 145; Stop 169
aaagagttccttatagccaattcct

SEQ ID NO: 417909 - DNA, 25 bp, Artificial
  probe
  misc_feature (1)..(25): SEQ ID NO: 5670; WAN024GEY; Start 144; Stop 168
gaaagagttccttatagccaattcc

SEQ ID NO: 417910 - DNA, 25 bp, Artificial
  probe
  misc_feature (1)..(25): SEQ ID NO: 5670; WAN024GEY; Start 277; Stop 301
actacgttcatcatccaagcagata

SEQ ID NO: 417911 - DNA, 25 bp, Artificial
  probe
  misc_feature (1)..(25): SEQ ID NO: 5670; WAN024GEY; Start 271; Stop 295
aagttgactacgttcatcatccaag

SEQ ID NO: 417912 - DNA, 25 bp, Artificial
  probe
  misc_feature (1)..(25): SEQ ID NO: 5670; WAN024GEY; Start 258; Stop 282
tgatacgctcataaagttgactacg

SEQ ID NO: 417913 - DNA, 25 bp, Artificial
  probe
  misc_feature (1)..(25): SEQ ID NO: 5670; WAN024GEY; Start 257; Stop 281
ttgatacgctcataaagttgactac

SEQ ID NO: 417914 - DNA, 25 bp, Artificial
  probe
  misc_feature (1)..(25): SEQ ID NO: 5670; WAN024GEY; Start 256; Stop 280
gttgatacgctcataaagttgacta

SEQ ID NO: 417915 - DNA, 25 bp, Artificial
  probe
  misc_feature (1)..(25): SEQ ID NO: 5670; WAN024GEY; Start 255; Stop 279
ggttgatacgctcataaagttgact

SEQ ID NO: 417916 - DNA, 25 bp, Artificial
  probe
  misc_feature (1)..(25): SEQ ID NO: 5670; WAN024GEY; Start 154; Stop 178
cttatagccaattcctttagcagcc

SEQ ID NO: 417917 - DNA, 25 bp, Artificial
  probe
  misc_feature (1)..(25): SEQ ID NO: 5670; WAN024GEY; Start 153; Stop 177
ccttatagccaattcctttagcagc

SEQ ID NO: 417918 - DNA, 25 bp, Artificial
  probe
  misc_feature (1)..(25): SEQ ID NO: 5670; WAN024GEY; Start 149; Stop 173
agttccttatagccaattcctttag

SEQ ID NO: 417919 - DNA, 25 bp, Artificial
  probe
  misc_feature (1)..(25): SEQ ID NO: 5670; WAN024GEY; Start 148; Stop 172
gagttccttatagccaattccttta

SEQ ID NO: 417920 - DNA, 25 bp, Artificial
  probe
  misc_feature (1)..(25): SEQ ID NO: 5670; WAN024GEY; Start 254; Stop 278
tggttgatacgctcataaagttgac

SEQ ID NO: 417921 - DNA, 25 bp, Artificial
  probe
  misc_feature (1)..(25): SEQ ID NO: 5670; WAN024GEY; Start 253; Stop 277
gtggttgatacgctcataaagttga

SEQ ID NO: 417922 - DNA, 25 bp, Artificial
  probe
  misc_feature (1)..(25): SEQ ID NO: 5670; WAN024GEY; Start 155; Stop 179
ttatagccaattcctttagcagcct

SEQ ID NO: 417923 - DNA, 25 bp, Artificial
  probe
  misc_feature (1)..(25): SEQ ID NO: 5670; WAN024GEY; Start 285; Stop 309
catcatccaagcagataatcagcgg

SEQ ID NO: 417924 - DNA, 25 bp, Artificial
  probe
  misc_feature (1)..(25): SEQ ID NO: 5670; WAN024GEY; Start 252; Stop 276
ggtggttgatacgctcataaagttg

SEQ ID NO: 417925 - DNA, 25 bp, Artificial
  probe
  misc_feature (1)..(25): SEQ ID NO: 5671; WAN024GIW; Start 9; Stop 33
cagccttgatgataacattaacaga

SEQ ID NO: 417926 - DNA, 25 bp, Artificial
  probe
  misc_feature (1)..(25): SEQ ID NO: 5671; WAN024GIW; Start 8; Stop 32
tcagccttgatgataacattaacag

SEQ ID NO: 417927 - DNA, 25 bp, Artificial
  probe
  misc_feature (1)..(25): SEQ ID NO: 5671; WAN024GIW; Start 10; Stop 34
agccttgatgataacattaacagat

SEQ ID NO: 417928 - DNA, 25 bp, Artificial
  probe
  misc_feature (1)..(25): SEQ ID NO: 5671; WAN024GIW; Start 11; Stop 35
gccttgatgataacattaacagatt

SEQ ID NO: 417929 - DNA, 25 bp, Artificial
  probe
  misc_feature (1)..(25): SEQ ID NO: 5671; WAN024GIW; Start 195; Stop 219
cttcgttcaaacctgtgatagagac

SEQ ID NO: 417930 - DNA, 25 bp, Artificial
  probe
  misc_feature (1)..(25): SEQ ID NO: 5671; WAN024GIW; Start 196; Stop 220
ttcgttcaaacctgtgatagagact

SEQ ID NO: 417931 - DNA, 25 bp, Artificial
  probe
  misc_feature (1)..(25): SEQ ID NO: 5671; WAN024GIW; Start 7; Stop 31
atcagccttgatgataacattaaca

SEQ ID NO: 417932 - DNA, 25 bp, Artificial
  probe
  misc_feature (1)..(25): SEQ ID NO: 5671; WAN024GIW; Start 197; Stop 221
tcgttcaaacctgtgatagagactg

SEQ ID NO: 417933 - DNA, 25 bp, Artificial
  probe
  misc_feature (1)..(25): SEQ ID NO: 5671; WAN024GIW; Start 204; Stop 228
aacctgtgatagagactggtgttga

SEQ ID NO: 417934 - DNA, 25 bp, Artificial
  probe
  misc_feature (1)..(25): SEQ ID NO: 5671; WAN024GIW; Start 20; Stop 44
ataacattaacagatttgagttccc

SEQ ID NO: 417935 - DNA, 25 bp, Artificial
  probe
  misc_feature (1)..(25): SEQ ID NO: 5671; WAN024GIW; Start 194; Stop 218
gcttcgttcaaacctgtgatagaga

SEQ ID NO: 417936 - DNA, 25 bp, Artificial
  probe
  misc_feature (1)..(25): SEQ ID NO: 5671; WAN024GIW; Start 193; Stop 217
tgcttcgttcaaacctgtgatagag

SEQ ID NO: 417937 - DNA, 25 bp, Artificial
  probe
  misc_feature (1)..(25): SEQ ID NO: 5671; WAN024GIW; Start 55; Stop 79
ggtatcaaagaggttttcaaggcta

SEQ ID NO: 417938 - DNA, 25 bp, Artificial
  probe
  misc_feature (1)..(25): SEQ ID NO: 5671; WAN024GIW; Start 56; Stop 80
gtatcaaagaggttttcaaggctaa

SEQ ID NO: 417939 - DNA, 25 bp, Artificial
  probe
  misc_feature (1)..(25): SEQ ID NO: 5671; WAN024GIW; Start 200; Stop 224
ttcaaacctgtgatagagactggtg

SEQ ID NO: 417940 - DNA, 25 bp, Artificial
  probe
  misc_feature (1)..(25): SEQ ID NO: 5671; WAN024GIW; Start 199; Stop 223
gttcaaacctgtgatagagactggt

SEQ ID NO: 417941 - DNA, 25 bp, Artificial
  probe
  misc_feature (1)..(25): SEQ ID NO: 5671; WAN024GIW; Start 198; Stop 222
cgttcaaacctgtgatagagactgg

SEQ ID NO: 417942 - DNA, 25 bp, Artificial
  probe
  misc_feature (1)..(25): SEQ ID NO: 5671; WAN024GIW; Start 52; Stop 76
aagggtatcaaagaggttttcaagg

SEQ ID NO: 417943 - DNA, 25 bp, Artificial
  probe
  misc_feature (1)..(25): SEQ ID NO: 5671; WAN024GIW; Start 192; Stop 216
gtgcttcgttcaaacctgtgataga

SEQ ID NO: 417944 - DNA, 25 bp, Artificial
  probe
  misc_feature (1)..(25): SEQ ID NO: 5671; WAN024GIW; Start 203; Stop 227
aaacctgtgatagagactggtgttg

SEQ ID NO: 417945 - DNA, 25 bp, Artificial
  probe
  misc_feature (1)..(25): SEQ ID NO: 5671; WAN024GIW; Start 202; Stop 226
caaacctgtgatagagactggtgtt

SEQ ID NO: 417946 - DNA, 25 bp, Artificial
  probe
  misc_feature (1)..(25): SEQ ID NO: 5671; WAN024GIW; Start 51; Stop 75
taagggtatcaaagaggttttcaag

SEQ ID NO: 417947 - DNA, 25 bp, Artificial
  probe
  misc_feature (1)..(25): SEQ ID NO: 5671; WAN024GIW; Start 22; Stop 46
aacattaacagatttgagttcccca

SEQ ID NO: 417948 - DNA, 25 bp, Artificial
  probe
  misc_feature (1)..(25): SEQ ID NO: 5671; WAN024GIW; Start 58; Stop 82
atcaaagaggttttcaaggctaaca

SEQ ID NO: 417949 - DNA, 25 bp, Artificial
  probe
  misc_feature (1)..(25): SEQ ID NO: 5671; WAN024GIW; Start 57; Stop 81
tatcaaagaggttttcaaggctaac

SEQ ID NO: 417950 - DNA, 25 bp, Artificial
  probe
  misc_feature (1)..(25): SEQ ID NO: 5671; WAN024GIW; Start 46; Stop 70
agctttaagggtatcaaagaggttt

SEQ ID NO: 417951 - DNA, 25 bp, Artificial
  probe
  misc_feature (1)..(25): SEQ ID NO: 5671; WAN024GIW; Start 23; Stop 47
acattaacagatttgagttccccag

SEQ ID NO: 417952 - DNA, 25 bp, Artificial
  probe
  misc_feature (1)..(25): SEQ ID NO: 5671; WAN024GIW; Start 21; Stop 45
taacattaacagatttgagttcccc

SEQ ID NO: 417953 - DNA, 25 bp, Artificial
  probe
  misc_feature (1)..(25): SEQ ID NO: 5671; WAN024GIW; Start 45; Stop 69
cagctttaagggtatcaaagaggtt

SEQ ID NO: 417954 - DNA, 25 bp, Artificial
  probe
  misc_feature (1)..(25): SEQ ID NO: 5671; WAN024GIW; Start 50; Stop 74
ttaagggtatcaaagaggttttcaa

SEQ ID NO: 417955 - DNA, 25 bp, Artificial
  probe
  misc_feature (1)..(25): SEQ ID NO: 5671; WAN024GIW; Start 49; Stop 73
tttaagggtatcaaagaggttttca

SEQ ID NO: 417956 - DNA, 25 bp, Artificial
  probe
  misc_feature (1)..(25): SEQ ID NO: 5671; WAN024GIW; Start 59; Stop 83
tcaaagaggttttcaaggctaacac

SEQ ID NO: 417957 - DNA, 25 bp, Artificial
  probe
  misc_feature (1)..(25): SEQ ID NO: 5671; WAN024GIW; Start 19; Stop 43
gataacattaacagatttgagttcc

SEQ ID NO: 417958 - DNA, 25 bp, Artificial
  probe
  misc_feature (1)..(25): SEQ ID NO: 5672; WAN024CDL; Start 526; Stop 550
gctaagacatcctatggttacgatt

SEQ ID NO: 417959 - DNA, 25 bp, Artificial
  probe
  misc_feature (1)..(25): SEQ ID NO: 5672; WAN024CDL; Start 410; Stop 434
gtaaggctatgattggactcttgag

SEQ ID NO: 417960 - DNA, 25 bp, Artificial
  probe
  misc_feature (1)..(25): SEQ ID NO: 5672; WAN024CDL; Start 1221; Stop 1245
cagacttaacgacctctacatagac

SEQ ID NO: 417961 - DNA, 25 bp, Artificial
  probe
  misc_feature (1)..(25): SEQ ID NO: 5672; WAN024CDL; Start 324; Stop 348
gcttcacttgattgaggatgtattc

SEQ ID NO: 417962 - DNA, 25 bp, Artificial
  probe
  misc_feature (1)..(25): SEQ ID NO: 5672; WAN024CDL; Start 407; Stop 431
ttggtaaggctatgattggactctt

SEQ ID NO: 417963 - DNA, 25 bp, Artificial
  probe
  misc_feature (1)..(25): SEQ ID NO: 5672; WAN024CDL; Start 1109; Stop 1133
aactacaagatgacgctgattacct

SEQ ID NO: 417964 - DNA, 25 bp, Artificial
  probe
  misc_feature (1)..(25): SEQ ID NO: 5672; WAN024CDL; Start 1219; Stop 1243
agcagacttaacgacctctacatag

SEQ ID NO: 417965 - DNA, 25 bp, Artificial
  probe
  misc_feature (1)..(25): SEQ ID NO: 5672; WAN024CDL; Start 1223; Stop 1247
gacttaacgacctctacatagacga

SEQ ID NO: 417966 - DNA, 25 bp, Artificial
  probe
  misc_feature (1)..(25): SEQ ID NO: 5672; WAN024CDL; Start 1222; Stop 1246
agacttaacgacctctacatagacg

SEQ ID NO: 417967 - DNA, 25 bp, Artificial
  probe
  misc_feature (1)..(25): SEQ ID NO: 5672; WAN024CDL; Start 800; Stop 824
aggaatacgataagactcaatctga

SEQ ID NO: 417968 - DNA, 25 bp, Artificial
  probe
  misc_feature (1)..(25): SEQ ID NO: 5672; WAN024CDL; Start 325; Stop 349
cttcacttgattgaggatgtattca

SEQ ID NO: 417969 - DNA, 25 bp, Artificial
  probe
  misc_feature (1)..(25): SEQ ID NO: 5672; WAN024CDL; Start 525; Stop 549
ggctaagacatcctatggttacgat

SEQ ID NO: 417970 - DNA, 25 bp, Artificial
  probe
  misc_feature (1)..(25): SEQ ID NO: 5672; WAN024CDL; Start 1224; Stop 1248
acttaacgacctctacatagacgac

SEQ ID NO: 417971 - DNA, 25 bp, Artificial
  probe
  misc_feature (1)..(25): SEQ ID NO: 5672; WAN024CDL; Start 1220; Stop 1244
gcagacttaacgacctctacataga

SEQ ID NO: 417972 - DNA, 25 bp, Artificial
  probe
  misc_feature (1)..(25): SEQ ID NO: 5672; WAN024CDL; Start 409; Stop 433
ggtaaggctatgattggactcttga

SEQ ID NO: 417973 - DNA, 25 bp, Artificial
  probe
  misc_feature (1)..(25): SEQ ID NO: 5672; WAN024CDL; Start 323; Stop 347
cgcttcacttgattgaggatgtatt

SEQ ID NO: 417974 - DNA, 25 bp, Artificial
  probe
  misc_feature (1)..(25): SEQ ID NO: 5672; WAN024CDL; Start 799; Stop 823
gaggaatacgataagactcaatctg

SEQ ID NO: 417975 - DNA, 25 bp, Artificial
  probe
  misc_feature (1)..(25): SEQ ID NO: 5672; WAN024CDL; Start 1420; Stop 1444
aaggtgcttgttagaaggcttataa

SEQ ID NO: 417976 - DNA, 25 bp, Artificial
  probe
  misc_feature (1)..(25): SEQ ID NO: 5672; WAN024CDL; Start 1218; Stop 1242
gagcagacttaacgacctctacata

SEQ ID NO: 417977 - DNA, 25 bp, Artificial
  probe
  misc_feature (1)..(25): SEQ ID NO: 5672; WAN024CDL; Start 798; Stop 822
agaggaatacgataagactcaatct

SEQ ID NO: 417978 - DNA, 25 bp, Artificial
  probe
  misc_feature (1)..(25): SEQ ID NO: 5672; WAN024CDL; Start 408; Stop 432
tggtaaggctatgattggactcttg

SEQ ID NO: 417979 - DNA, 25 bp, Artificial
  probe
  misc_feature (1)..(25): SEQ ID NO: 5672; WAN024CDL; Start 326; Stop 350
ttcacttgattgaggatgtattcat

SEQ ID NO: 417980 - DNA, 25 bp, Artificial
  probe
  misc_feature (1)..(25): SEQ ID NO: 5672; WAN024CDL; Start 528; Stop 552
taagacatcctatggttacgattac

SEQ ID NO: 417981 - DNA, 25 bp, Artificial
  probe
  misc_feature (1)..(25): SEQ ID NO: 5672; WAN024CDL; Start 1110; Stop 1134
actacaagatgacgctgattacctg

SEQ ID NO: 417982 - DNA, 25 bp, Artificial
  probe
  misc_feature (1)..(25): SEQ ID NO: 5672; WAN024CDL; Start 866; Stop 890
ctagaccattccaagctaagtacat

SEQ ID NO: 417983 - DNA, 25 bp, Artificial
  probe
  misc_feature (1)..(25): SEQ ID NO: 5672; WAN024CDL; Start 863; Stop 887
atcctagaccattccaagctaagta

SEQ ID NO: 417984 - DNA, 25 bp, Artificial
  probe
  misc_feature (1)..(25): SEQ ID NO: 5672; WAN024CDL; Start 1225; Stop 1249
cttaacgacctctacatagacgacc

SEQ ID NO: 417985 - DNA, 25 bp, Artificial
  probe
  misc_feature (1)..(25): SEQ ID NO: 5672; WAN024CDL; Start 867; Stop 891
tagaccattccaagctaagtacatt

SEQ ID NO: 417986 - DNA, 25 bp, Artificial
  probe
  misc_feature (1)..(25): SEQ ID NO: 5672; WAN024CDL; Start 861; Stop 885
caatcctagaccattccaagctaag

SEQ ID NO: 417987 - DNA, 25 bp, Artificial
  probe
  misc_feature (1)..(25): SEQ ID NO: 5672; WAN024CDL; Start 797; Stop 821
aagaggaatacgataagactcaatc

SEQ ID NO: 417988 - DNA, 25 bp, Artificial
  probe
  misc_feature (1)..(25): SEQ ID NO: 5672; WAN024CDL; Start 529; Stop 553
aagacatcctatggttacgattacc

SEQ ID NO: 417989 - DNA, 25 bp, Artificial
  probe
  misc_feature (1)..(25): SEQ ID NO: 5672; WAN024CDL; Start 527; Stop 551
ctaagacatcctatggttacgatta

SEQ ID NO: 417990 - DNA, 25 bp, Artificial
  probe
  misc_feature (1)..(25): SEQ ID NO: 5672; WAN024CDL; Start 862; Stop 886
aatcctagaccattccaagctaagt

SEQ ID NO: 417991 - DNA, 25 bp, Artificial
  probe
  misc_feature (1)..(25): SEQ ID NO: 5673; WAN024CVU; Start 54; Stop 78
gacaattagaacgacacacacatat

SEQ ID NO: 417992 - DNA, 25 bp, Artificial
  probe
  misc_feature (1)..(25): SEQ ID NO: 5673; WAN024CVU; Start 53; Stop 77
tgacaattagaacgacacacacata

SEQ ID NO: 417993 - DNA, 25 bp, Artificial
  probe
  misc_feature (1)..(25): SEQ ID NO: 5673; WAN024CVU; Start 112; Stop 136
ggctatctatggttactcctacatt

SEQ ID NO: 417994 - DNA, 25 bp, Artificial
  probe
  misc_feature (1)..(25): SEQ ID NO: 5673; WAN024CVU; Start 28; Stop 52
atactctctatcatcaagaaggcag

SEQ ID NO: 417995 - DNA, 25 bp, Artificial
  probe
  misc_feature (1)..(25): SEQ ID NO: 5673; WAN024CVU; Start 27; Stop 51
aatactctctatcatcaagaaggca

SEQ ID NO: 417996 - DNA, 25 bp, Artificial
  probe
  misc_feature (1)..(25): SEQ ID NO: 5673; WAN024CVU; Start 29; Stop 53
tactctctatcatcaagaaggcagt

SEQ ID NO: 417997 - DNA, 25 bp, Artificial
  probe
  misc_feature (1)..(25): SEQ ID NO: 5673; WAN024CVU; Start 40; Stop 64
atcaagaaggcagtgacaattagaa

SEQ ID NO: 417998 - DNA, 25 bp, Artificial
  probe
  misc_feature (1)..(25): SEQ ID NO: 5673; WAN024CVU; Start 37; Stop 61
atcatcaagaaggcagtgacaatta

SEQ ID NO: 417999 - DNA, 25 bp, Artificial
  probe
  misc_feature (1)..(25): SEQ ID NO: 5673; WAN024CVU; Start 36; Stop 60
tatcatcaagaaggcagtgacaatt

SEQ ID NO: 418000 - DNA, 25 bp, Artificial
  probe
  misc_feature (1)..(25): SEQ ID NO: 5673; WAN024CVU; Start 35; Stop 59
ctatcatcaagaaggcagtgacaat

SEQ ID NO: 418001 - DNA, 25 bp, Artificial
  probe
  misc_feature (1)..(25): SEQ ID NO: 5673; WAN024CVU; Start 39; Stop 63
catcaagaaggcagtgacaattaga

SEQ ID NO: 418002 - DNA, 25 bp, Artificial
  probe
  misc_feature (1)..(25): SEQ ID NO: 5673; WAN024CVU; Start 38; Stop 62
tcatcaagaaggcagtgacaattag

SEQ ID NO: 418003 - DNA, 25 bp, Artificial
  probe
  misc_feature (1)..(25): SEQ ID NO: 5673; WAN024CVU; Start 674; Stop 698
caggatattgccacggaataactag

SEQ ID NO: 418004 - DNA, 25 bp, Artificial
  probe
  misc_feature (1)..(25): SEQ ID NO: 5673; WAN024CVU; Start 673; Stop 697
acaggatattgccacggaataacta

SEQ ID NO: 418005 - DNA, 25 bp, Artificial
  probe
  misc_feature (1)..(25): SEQ ID NO: 5673; WAN024CVU; Start 41; Stop 65
tcaagaaggcagtgacaattagaac

SEQ ID NO: 418006 - DNA, 25 bp, Artificial
  probe
  misc_feature (1)..(25): SEQ ID NO: 5673; WAN024CVU; Start 31; Stop 55
ctctctatcatcaagaaggcagtga

SEQ ID NO: 418007 - DNA, 25 bp, Artificial
  probe
  misc_feature (1)..(25): SEQ ID NO: 5673; WAN024CVU; Start 111; Stop 135
aggctatctatggttactcctacat

SEQ ID NO: 418008 - DNA, 25 bp, Artificial
  probe
  misc_feature (1)..(25): SEQ ID NO: 5673; WAN024CVU; Start 34; Stop 58
tctatcatcaagaaggcagtgacaa

SEQ ID NO: 418009 - DNA, 25 bp, Artificial
  probe
  misc_feature (1)..(25): SEQ ID NO: 5673; WAN024CVU; Start 763; Stop 787
ttagcatgttctgaacgagatgatc

SEQ ID NO: 418010 - DNA, 25 bp, Artificial
  probe
  misc_feature (1)..(25): SEQ ID NO: 5673; WAN024CVU; Start 110; Stop 134
caggctatctatggttactcctaca

SEQ ID NO: 418011 - DNA, 25 bp, Artificial
  probe
  misc_feature (1)..(25): SEQ ID NO: 5673; WAN024CVU; Start 32; Stop 56
tctctatcatcaagaaggcagtgac

SEQ ID NO: 418012 - DNA, 25 bp, Artificial
  probe
  misc_feature (1)..(25): SEQ ID NO: 5673; WAN024CVU; Start 30; Stop 54
actctctatcatcaagaaggcagtg

SEQ ID NO: 418013 - DNA, 25 bp, Artificial
  probe
  misc_feature (1)..(25): SEQ ID NO: 5673; WAN024CVU; Start 670; Stop 694
atgacaggatattgccacggaataa

SEQ ID NO: 418014 - DNA, 25 bp, Artificial
  probe
  misc_feature (1)..(25): SEQ ID NO: 5673; WAN024CVU; Start 684; Stop 708
ccacggaataactagcttactacaa

SEQ ID NO: 418015 - DNA, 25 bp, Artificial
  probe
  misc_feature (1)..(25): SEQ ID NO: 5673; WAN024CVU; Start 43; Stop 67
aagaaggcagtgacaattagaacga

SEQ ID NO: 418016 - DNA, 25 bp, Artificial
  probe
  misc_feature (1)..(25): SEQ ID NO: 5673; WAN024CVU; Start 42; Stop 66
caagaaggcagtgacaattagaacg

SEQ ID NO: 418017 - DNA, 25 bp, Artificial
  probe
  misc_feature (1)..(25): SEQ ID NO: 5673; WAN024CVU; Start 33; Stop 57
ctctatcatcaagaaggcagtgaca

SEQ ID NO: 418018 - DNA, 25 bp, Artificial
  probe
  misc_feature (1)..(25): SEQ ID NO: 5673; WAN024CVU; Start 678; Stop 702
atattgccacggaataactagctta

SEQ ID NO: 418019 - DNA, 25 bp, Artificial
  probe
  misc_feature (1)..(25): SEQ ID NO: 5673; WAN024CVU; Start 679; Stop 703
tattgccacggaataactagcttac

SEQ ID NO: 418020 - DNA, 25 bp, Artificial
  probe
  misc_feature (1)..(25): SEQ ID NO: 5673; WAN024CVU; Start 669; Stop 693
gatgacaggatattgccacggaata

SEQ ID NO: 418021 - DNA, 25 bp, Artificial
  probe
  misc_feature (1)..(25): SEQ ID NO: 5673; WAN024CVU; Start 677; Stop 701
gatattgccacggaataactagctt

SEQ ID NO: 418022 - DNA, 25 bp, Artificial
  probe
  misc_feature (1)..(25): SEQ ID NO: 5673; WAN024CVU; Start 345; Stop 369
tttcctacaaagagatacagccaaa

SEQ ID NO: 418023 - DNA, 25 bp, Artificial
  probe
  misc_feature (1)..(25): SEQ ID NO: 5673; WAN024CVU; Start 344; Stop 368
atttcctacaaagagatacagccaa

SEQ ID NO: 418024 - DNA, 25 bp, Artificial
  probe
  misc_feature (1)..(25): SEQ ID NO: 5674; WAN024CGB; Start 27; Stop 51
catacaacacttcaacaactgctcc

SEQ ID NO: 418025 - DNA, 25 bp, Artificial
  probe
  misc_feature (1)..(25): SEQ ID NO: 5674; WAN024CGB; Start 28; Stop 52
atacaacacttcaacaactgctcca

SEQ ID NO: 418026 - DNA, 25 bp, Artificial
  probe
  misc_feature (1)..(25): SEQ ID NO: 5674; WAN024CGB; Start 23; Stop 47
ctggcatacaacacttcaacaactg

SEQ ID NO: 418027 - DNA, 25 bp, Artificial
  probe
  misc_feature (1)..(25): SEQ ID NO: 5674; WAN024CGB; Start 22; Stop 46
actggcatacaacacttcaacaact

SEQ ID NO: 418028 - DNA, 25 bp, Artificial
  probe
  misc_feature (1)..(25): SEQ ID NO: 5674; WAN024CGB; Start 21; Stop 45
cactggcatacaacacttcaacaac

SEQ ID NO: 418029 - DNA, 25 bp, Artificial
  probe
  misc_feature (1)..(25): SEQ ID NO: 5674; WAN024CGB; Start 7; Stop 31
cttatcttggtcagcactggcatac

SEQ ID NO: 418030 - DNA, 25 bp, Artificial
  probe
  misc_feature (1)..(25): SEQ ID NO: 5674; WAN024CGB; Start 268; Stop 292
ctgaccgaggacattaagcataacg

SEQ ID NO: 418031 - DNA, 25 bp, Artificial
  probe
  misc_feature (1)..(25): SEQ ID NO: 5674; WAN024CGB; Start 1; Stop 25
ttgtaccttatcttggtcagcactg

SEQ ID NO: 418032 - DNA, 25 bp, Artificial
  probe
  misc_feature (1)..(25): SEQ ID NO: 5674; WAN024CGB; Start 29; Stop 53
tacaacacttcaacaactgctccag

SEQ ID NO: 418033 - DNA, 25 bp, Artificial
  probe
  misc_feature (1)..(25): SEQ ID NO: 5674; WAN024CGB; Start 8; Stop 32
ttatcttggtcagcactggcataca

SEQ ID NO: 418034 - DNA, 25 bp, Artificial
  probe
  misc_feature (1)..(25): SEQ ID NO: 5674; WAN024CGB; Start 9; Stop 33
tatcttggtcagcactggcatacaa

SEQ ID NO: 418035 - DNA, 25 bp, Artificial
  probe
  misc_feature (1)..(25): SEQ ID NO: 5674; WAN024CGB; Start 6; Stop 30
ccttatcttggtcagcactggcata

SEQ ID NO: 418036 - DNA, 25 bp, Artificial
  probe
  misc_feature (1)..(25): SEQ ID NO: 5674; WAN024CGB; Start 20; Stop 44
gcactggcatacaacacttcaacaa

SEQ ID NO: 418037 - DNA, 25 bp, Artificial
  probe
  misc_feature (1)..(25): SEQ ID NO: 5674; WAN024CGB; Start 26; Stop 50
gcatacaacacttcaacaactgctc

SEQ ID NO: 418038 - DNA, 25 bp, Artificial
  probe
  misc_feature (1)..(25): SEQ ID NO: 5674; WAN024CGB; Start 18; Stop 42
cagcactggcatacaacacttcaac

SEQ ID NO: 418039 - DNA, 25 bp, Artificial
  probe
  misc_feature (1)..(25): SEQ ID NO: 5674; WAN024CGB; Start 267; Stop 291
gctgaccgaggacattaagcataac

SEQ ID NO: 418040 - DNA, 25 bp, Artificial
  probe
  misc_feature (1)..(25): SEQ ID NO: 5674; WAN024CGB; Start 17; Stop 41
tcagcactggcatacaacacttcaa

SEQ ID NO: 418041 - DNA, 25 bp, Artificial
  probe
  misc_feature (1)..(25): SEQ ID NO: 5674; WAN024CGB; Start 2; Stop 26
tgtaccttatcttggtcagcactgg

SEQ ID NO: 418042 - DNA, 25 bp, Artificial
  probe
  misc_feature (1)..(25): SEQ ID NO: 5674; WAN024CGB; Start 80; Stop 104
acgataatttgtatcatagacttgt

SEQ ID NO: 418043 - DNA, 25 bp, Artificial
  probe
  misc_feature (1)..(25): SEQ ID NO: 5674; WAN024CGB; Start 35; Stop 59
acttcaacaactgctccagtcttat

SEQ ID NO: 418044 - DNA, 25 bp, Artificial
  probe
  misc_feature (1)..(25): SEQ ID NO: 5674; WAN024CGB; Start 85; Stop 109
aatttgtatcatagacttgtcctaa

SEQ ID NO: 418045 - DNA, 25 bp, Artificial
  probe
  misc_feature (1)..(25): SEQ ID NO: 5674; WAN024CGB; Start 86; Stop 110
atttgtatcatagacttgtcctaaa

SEQ ID NO: 418046 - DNA, 25 bp, Artificial
  probe
  misc_feature (1)..(25): SEQ ID NO: 5674; WAN024CGB; Start 83; Stop 107
ataatttgtatcatagacttgtcct

SEQ ID NO: 418047 - DNA, 25 bp, Artificial
  probe
  misc_feature (1)..(25): SEQ ID NO: 5674; WAN024CGB; Start 81; Stop 105
cgataatttgtatcatagacttgtc

SEQ ID NO: 418048 - DNA, 25 bp, Artificial
  probe
  misc_feature (1)..(25): SEQ ID NO: 5674; WAN024CGB; Start 25; Stop 49
ggcatacaacacttcaacaactgct

SEQ ID NO: 418049 - DNA, 25 bp, Artificial
  probe
  misc_feature (1)..(25): SEQ ID NO: 5674; WAN024CGB; Start 34; Stop 58
cacttcaacaactgctccagtctta

SEQ ID NO: 418050 - DNA, 25 bp, Artificial
  probe
  misc_feature (1)..(25): SEQ ID NO: 5674; WAN024CGB; Start 24; Stop 48
tggcatacaacacttcaacaactgc

SEQ ID NO: 418051 - DNA, 25 bp, Artificial
  probe
  misc_feature (1)..(25): SEQ ID NO: 5674; WAN024CGB; Start 79; Stop 103
aacgataatttgtatcatagacttg

SEQ ID NO: 418052 - DNA, 25 bp, Artificial
  probe
  misc_feature (1)..(25): SEQ ID NO: 5674; WAN024CGB; Start 82; Stop 106
gataatttgtatcatagacttgtcc

SEQ ID NO: 418053 - DNA, 25 bp, Artificial
  probe
  misc_feature (1)..(25): SEQ ID NO: 5674; WAN024CGB; Start 84; Stop 108
taatttgtatcatagacttgtccta

SEQ ID NO: 418054 - DNA, 25 bp, Artificial
  probe
  misc_feature (1)..(25): SEQ ID NO: 5674; WAN024CGB; Start 87; Stop 111
tttgtatcatagacttgtcctaaaa

SEQ ID NO: 418055 - DNA, 25 bp, Artificial
  probe
  misc_feature (1)..(25): SEQ ID NO: 5674; WAN024CGB; Start 269; Stop 293
tgaccgaggacattaagcataacgg

SEQ ID NO: 418056 - DNA, 25 bp, Artificial
  probe
  misc_feature (1)..(25): SEQ ID NO: 5674; WAN024CGB; Start 31; Stop 55
caacacttcaacaactgctccagtc

SEQ ID NO: 418057 - DNA, 25 bp, Artificial
  probe
  misc_feature (1)..(25): SEQ ID NO: 5675; WAN0249T2; Start 129; Stop 153
aaacgtatcatatcaggtgatgaaa

SEQ ID NO: 418058 - DNA, 25 bp, Artificial
  probe
  misc_feature (1)..(25): SEQ ID NO: 5675; WAN0249T2; Start 32; Stop 56
aatgtctagctcatacttttcaaaa

SEQ ID NO: 418059 - DNA, 25 bp, Artificial
  probe
  misc_feature (1)..(25): SEQ ID NO: 5675; WAN0249T2; Start 31; Stop 55
aaatgtctagctcatacttttcaaa

SEQ ID NO: 418060 - DNA, 25 bp, Artificial
  probe
  misc_feature (1)..(25): SEQ ID NO: 5675; WAN0249T2; Start 30; Stop 54
aaaatgtctagctcatacttttcaa

SEQ ID NO: 418061 - DNA, 25 bp, Artificial
  probe
  misc_feature (1)..(25): SEQ ID NO: 5675; WAN0249T2; Start 130; Stop 154
aacgtatcatatcaggtgatgaaaa

SEQ ID NO: 418062 - DNA, 25 bp, Artificial
  probe
  misc_feature (1)..(25): SEQ ID NO: 5675; WAN0249T2; Start 128; Stop 152
aaaacgtatcatatcaggtgatgaa

SEQ ID NO: 418063 - DNA, 25 bp, Artificial
  probe
  misc_feature (1)..(25): SEQ ID NO: 5675; WAN0249T2; Start 78; Stop 102
ttcctcttgtcctaggcatgttgag

SEQ ID NO: 418064 - DNA, 25 bp, Artificial
  probe
  misc_feature (1)..(25): SEQ ID NO: 5675; WAN0249T2; Start 77; Stop 101
cttcctcttgtcctaggcatgttga

SEQ ID NO: 418065 - DNA, 25 bp, Artificial
  probe
  misc_feature (1)..(25): SEQ ID NO: 5675; WAN0249T2; Start 8; Stop 32
ggcaaaggatttgttttatcataaa

SEQ ID NO: 418066 - DNA, 25 bp, Artificial
  probe
  misc_feature (1)..(25): SEQ ID NO: 5675; WAN0249T2; Start 81; Stop 105
ctcttgtcctaggcatgttgaggtt

SEQ ID NO: 418067 - DNA, 25 bp, Artificial
  probe
  misc_feature (1)..(25): SEQ ID NO: 5675; WAN0249T2; Start 26; Stop 50
tcataaaatgtctagctcatacttt

SEQ ID NO: 418068 - DNA, 25 bp, Artificial
  probe
  misc_feature (1)..(25): SEQ ID NO: 5675; WAN0249T2; Start 62; Stop 86
tttaaacgaggtcaccttcctcttg

SEQ ID NO: 418069 - DNA, 25 bp, Artificial
  probe
  misc_feature (1)..(25): SEQ ID NO: 5675; WAN0249T2; Start 82; Stop 106
tcttgtcctaggcatgttgaggttg

SEQ ID NO: 418070 - DNA, 25 bp, Artificial
  probe
  misc_feature (1)..(25): SEQ ID NO: 5675; WAN0249T2; Start 29; Stop 53
taaaatgtctagctcatacttttca

SEQ ID NO: 418071 - DNA, 25 bp, Artificial
  probe
  misc_feature (1)..(25): SEQ ID NO: 5675; WAN0249T2; Start 25; Stop 49
atcataaaatgtctagctcatactt

SEQ ID NO: 418072 - DNA, 25 bp, Artificial
  probe
  misc_feature (1)..(25): SEQ ID NO: 5675; WAN0249T2; Start 76; Stop 100
ccttcctcttgtcctaggcatgttg

SEQ ID NO: 418073 - DNA, 25 bp, Artificial
  probe
  misc_feature (1)..(25): SEQ ID NO: 5675; WAN0249T2; Start 63; Stop 87
ttaaacgaggtcaccttcctcttgt

SEQ ID NO: 418074 - DNA, 25 bp, Artificial
  probe
  misc_feature (1)..(25): SEQ ID NO: 5675; WAN0249T2; Start 27; Stop 51
cataaaatgtctagctcatactttt

SEQ ID NO: 418075 - DNA, 25 bp, Artificial
  probe
  misc_feature (1)..(25): SEQ ID NO: 5675; WAN0249T2; Start 24; Stop 48
tatcataaaatgtctagctcatact

SEQ ID NO: 418076 - DNA, 25 bp, Artificial
  probe
  misc_feature (1)..(25): SEQ ID NO: 5675; WAN0249T2; Start 64; Stop 88
taaacgaggtcaccttcctcttgtc

SEQ ID NO: 418077 - DNA, 25 bp, Artificial
  probe
  misc_feature (1)..(25): SEQ ID NO: 5675; WAN0249T2; Start 28; Stop 52
ataaaatgtctagctcatacttttc

SEQ ID NO: 418078 - DNA, 25 bp, Artificial
  probe
  misc_feature (1)..(25): SEQ ID NO: 5675; WAN0249T2; Start 20; Stop 44
gttttatcataaaatgtctagctca

SEQ ID NO: 418079 - DNA, 25 bp, Artificial
  probe
  misc_feature (1)..(25): SEQ ID NO: 5675; WAN0249T2; Start 19; Stop 43
tgttttatcataaaatgtctagctc

SEQ ID NO: 418080 - DNA, 25 bp, Artificial
  probe
  misc_feature (1)..(25): SEQ ID NO: 5675; WAN0249T2; Start 9; Stop 33
gcaaaggatttgttttatcataaaa

SEQ ID NO: 418081 - DNA, 25 bp, Artificial
  probe
  misc_feature (1)..(25): SEQ ID NO: 5675; WAN0249T2; Start 18; Stop 42
ttgttttatcataaaatgtctagct

SEQ ID NO: 418082 - DNA, 25 bp, Artificial
  probe
  misc_feature (1)..(25): SEQ ID NO: 5675; WAN0249T2; Start 88; Stop 112
cctaggcatgttgaggttgggaaaa

SEQ ID NO: 418083 - DNA, 25 bp, Artificial
  probe
  misc_feature (1)..(25): SEQ ID NO: 5676; WAN024GMS; Start 47; Stop 71
ataaagcagattggtcgtatgatga

SEQ ID NO: 418084 - DNA, 25 bp, Artificial
  probe
  misc_feature (1)..(25): SEQ ID NO: 5676; WAN024GMS; Start 48; Stop 72
taaagcagattggtcgtatgatgaa

SEQ ID NO: 418085 - DNA, 25 bp, Artificial
  probe
  misc_feature (1)..(25): SEQ ID NO: 5676; WAN024GMS; Start 46; Stop 70
aataaagcagattggtcgtatgatg

SEQ ID NO: 418086 - DNA, 25 bp, Artificial
  probe
  misc_feature (1)..(25): SEQ ID NO: 5676; WAN024GMS; Start 49; Stop 73
aaagcagattggtcgtatgatgaaa

SEQ ID NO: 418087 - DNA, 25 bp, Artificial
  probe
  misc_feature (1)..(25): SEQ ID NO: 5676; WAN024GMS; Start 45; Stop 69
aaataaagcagattggtcgtatgat

SEQ ID NO: 418088 - DNA, 25 bp, Artificial
  probe
  misc_feature (1)..(25): SEQ ID NO: 5676; WAN024GMS; Start 140; Stop 164
aattcttcaaattggcacaaatagc

SEQ ID NO: 418089 - DNA, 25 bp, Artificial
  probe
  misc_feature (1)..(25): SEQ ID NO: 5676; WAN024GMS; Start 176; Stop 200
gtcttgaaattcattctccgtttga

SEQ ID NO: 418090 - DNA, 25 bp, Artificial
  probe
  misc_feature (1)..(25): SEQ ID NO: 5676; WAN024GMS; Start 177; Stop 201
tcttgaaattcattctccgtttgag

SEQ ID NO: 418091 - DNA, 25 bp, Artificial
  probe
  misc_feature (1)..(25): SEQ ID NO: 5676; WAN024GMS; Start 175; Stop 199
ggtcttgaaattcattctccgtttg

SEQ ID NO: 418092 - DNA, 25 bp, Artificial
  probe
  misc_feature (1)..(25): SEQ ID NO: 5676; WAN024GMS; Start 174; Stop 198
aggtcttgaaattcattctccgttt

SEQ ID NO: 418093 - DNA, 25 bp, Artificial
  probe
  misc_feature (1)..(25): SEQ ID NO: 5676; WAN024GMS; Start 173; Stop 197
aaggtcttgaaattcattctccgtt

SEQ ID NO: 418094 - DNA, 25 bp, Artificial
  probe
  misc_feature (1)..(25): SEQ ID NO: 5676; WAN024GMS; Start 172; Stop 196
gaaggtcttgaaattcattctccgt

SEQ ID NO: 418095 - DNA, 25 bp, Artificial
  probe
  misc_feature (1)..(25): SEQ ID NO: 5676; WAN024GMS; Start 141; Stop 165
attcttcaaattggcacaaatagct

SEQ ID NO: 418096 - DNA, 25 bp, Artificial
  probe
  misc_feature (1)..(25): SEQ ID NO: 5676; WAN024GMS; Start 210; Stop 234
tgcgactaaatctgctcgttatata

SEQ ID NO: 418097 - DNA, 25 bp, Artificial
  probe
  misc_feature (1)..(25): SEQ ID NO: 5676; WAN024GMS; Start 223; Stop 247
gctcgttatatagcgaaatggattt

SEQ ID NO: 418098 - DNA, 25 bp, Artificial
  probe
  misc_feature (1)..(25): SEQ ID NO: 5676; WAN024GMS; Start 214; Stop 238
actaaatctgctcgttatatagcga

SEQ ID NO: 418099 - DNA, 25 bp, Artificial
  probe
  misc_feature (1)..(25): SEQ ID NO: 5676; WAN024GMS; Start 163; Stop 187
gctagagaagaaggtcttgaaattc

SEQ ID NO: 418100 - DNA, 25 bp, Artificial
  probe
  misc_feature (1)..(25): SEQ ID NO: 5676; WAN024GMS; Start 222; Stop 246
tgctcgttatatagcgaaatggatt

SEQ ID NO: 418101 - DNA, 25 bp, Artificial
  probe
  misc_feature (1)..(25): SEQ ID NO: 5676; WAN024GMS; Start 218; Stop 242
aatctgctcgttatatagcgaaatg

SEQ ID NO: 418102 - DNA, 25 bp, Artificial
  probe
  misc_feature (1)..(25): SEQ ID NO: 5676; WAN024GMS; Start 213; Stop 237
gactaaatctgctcgttatatagcg

SEQ ID NO: 418103 - DNA, 25 bp, Artificial
  probe
  misc_feature (1)..(25): SEQ ID NO: 5676; WAN024GMS; Start 212; Stop 236
cgactaaatctgctcgttatatagc

SEQ ID NO: 418104 - DNA, 25 bp, Artificial
  probe
  misc_feature (1)..(25): SEQ ID NO: 5676; WAN024GMS; Start 211; Stop 235
gcgactaaatctgctcgttatatag

SEQ ID NO: 418105 - DNA, 25 bp, Artificial
  probe
  misc_feature (1)..(25): SEQ ID NO: 5676; WAN024GMS; Start 106; Stop 130
tttgaagatggtaggttgcatatga

SEQ ID NO: 418106 - DNA, 25 bp, Artificial
  probe
  misc_feature (1)..(25): SEQ ID NO: 5676; WAN024GMS; Start 221; Stop 245
ctgctcgttatatagcgaaatggat

SEQ ID NO: 418107 - DNA, 25 bp, Artificial
  probe
  misc_feature (1)..(25): SEQ ID NO: 5676; WAN024GMS; Start 219; Stop 243
atctgctcgttatatagcgaaatgg

SEQ ID NO: 418108 - DNA, 25 bp, Artificial
  probe
  misc_feature (1)..(25): SEQ ID NO: 5676; WAN024GMS; Start 170; Stop 194
aagaaggtcttgaaattcattctcc

SEQ ID NO: 418109 - DNA, 25 bp, Artificial
  probe
  misc_feature (1)..(25): SEQ ID NO: 5676; WAN024GMS; Start 209; Stop 233
gtgcgactaaatctgctcgttatat

SEQ ID NO: 418110 - DNA, 25 bp, Artificial
  probe
  misc_feature (1)..(25): SEQ ID NO: 5676; WAN024GMS; Start 171; Stop 195
agaaggtcttgaaattcattctccg

SEQ ID NO: 418111 - DNA, 25 bp, Artificial
  probe
  misc_feature (1)..(25): SEQ ID NO: 5676; WAN024GMS; Start 51; Stop 75
agcagattggtcgtatgatgaaaat

SEQ ID NO: 418112 - DNA, 25 bp, Artificial
  probe
  misc_feature (1)..(25): SEQ ID NO: 5676; WAN024GMS; Start 217; Stop 241
aaatctgctcgttatatagcgaaat

SEQ ID NO: 418113 - DNA, 25 bp, Artificial
  probe
  misc_feature (1)..(25): SEQ ID NO: 5676; WAN024GMS; Start 44; Stop 68
aaaataaagcagattggtcgtatga

SEQ ID NO: 418114 - DNA, 25 bp, Artificial
  probe
  misc_feature (1)..(25): SEQ ID NO: 5676; WAN024GMS; Start 99; Stop 123
tgctaattttgaagatggtaggttg

SEQ ID NO: 418115 - DNA, 25 bp, Artificial
  probe
  misc_feature (1)..(25): SEQ ID NO: 5676; WAN024GMS; Start 50; Stop 74
aagcagattggtcgtatgatgaaaa

SEQ ID NO: 418116 - DNA, 25 bp, Artificial
  probe
  misc_feature (1)..(25): SEQ ID NO: 5677; WAN024DUT; Start 455; Stop 479
tattgatgcttacttctctgctacc

SEQ ID NO: 418117 - DNA, 25 bp, Artificial
  probe
  misc_feature (1)..(25): SEQ ID NO: 5677; WAN024DUT; Start 343; Stop 367
gacttcctatctacaatgctatcgt

SEQ ID NO: 418118 - DNA, 25 bp, Artificial
  probe
  misc_feature (1)..(25): SEQ ID NO: 5677; WAN024DUT; Start 344; Stop 368
acttcctatctacaatgctatcgtt

SEQ ID NO: 418119 - DNA, 25 bp, Artificial
  probe
  misc_feature (1)..(25): SEQ ID NO: 5677; WAN024DUT; Start 451; Stop 475
tgattattgatgcttacttctctgc

SEQ ID NO: 418120 - DNA, 25 bp, Artificial
  probe
  misc_feature (1)..(25): SEQ ID NO: 5677; WAN024DUT; Start 452; Stop 476
gattattgatgcttacttctctgct

SEQ ID NO: 418121 - DNA, 25 bp, Artificial
  probe
  misc_feature (1)..(25): SEQ ID NO: 5677; WAN024DUT; Start 342; Stop 366
ggacttcctatctacaatgctatcg

SEQ ID NO: 418122 - DNA, 25 bp, Artificial
  probe
  misc_feature (1)..(25): SEQ ID NO: 5677; WAN024DUT; Start 454; Stop 478
ttattgatgcttacttctctgctac

SEQ ID NO: 418123 - DNA, 25 bp, Artificial
  probe
  misc_feature (1)..(25): SEQ ID NO: 5677; WAN024DUT; Start 456; Stop 480
attgatgcttacttctctgctacca

SEQ ID NO: 418124 - DNA, 25 bp, Artificial
  probe
  misc_feature (1)..(25): SEQ ID NO: 5677; WAN024DUT; Start 1207; Stop 1231
aatctattgcttatcaagtgcgtga

SEQ ID NO: 418125 - DNA, 25 bp, Artificial
  probe
  misc_feature (1)..(25): SEQ ID NO: 5677; WAN024DUT; Start 1064; Stop 1088
tgattctcacaacaacgatgaagtt

SEQ ID NO: 418126 - DNA, 25 bp, Artificial
  probe
  misc_feature (1)..(25): SEQ ID NO: 5677; WAN024DUT; Start 1206; Stop 1230
caatctattgcttatcaagtgcgtg

SEQ ID NO: 418127 - DNA, 25 bp, Artificial
  probe
  misc_feature (1)..(25): SEQ ID NO: 5677; WAN024DUT; Start 453; Stop 477
attattgatgcttacttctctgcta

SEQ ID NO: 418128 - DNA, 25 bp, Artificial
  probe
  misc_feature (1)..(25): SEQ ID NO: 5677; WAN024DUT; Start 842; Stop 866
ggttaagaatacttatggaacaggc

SEQ ID NO: 418129 - DNA, 25 bp, Artificial
  probe
  misc_feature (1)..(25): SEQ ID NO: 5677; WAN024DUT; Start 1549; Stop 1573
ttgcggaagtagacgactaactaat

SEQ ID NO: 418130 - DNA, 25 bp, Artificial
  probe
  misc_feature (1)..(25): SEQ ID NO: 5677; WAN024DUT; Start 845; Stop 869
taagaatacttatggaacaggctct

SEQ ID NO: 418131 - DNA, 25 bp, Artificial
  probe
  misc_feature (1)..(25): SEQ ID NO: 5677; WAN024DUT; Start 457; Stop 481
ttgatgcttacttctctgctaccaa

SEQ ID NO: 418132 - DNA, 25 bp, Artificial
  probe
  misc_feature (1)..(25): SEQ ID NO: 5677; WAN024DUT; Start 1489; Stop 1513
aatctcgcaaggaacaactctacaa

SEQ ID NO: 418133 - DNA, 25 bp, Artificial
  probe
  misc_feature (1)..(25): SEQ ID NO: 5677; WAN024DUT; Start 843; Stop 867
gttaagaatacttatggaacaggct

SEQ ID NO: 418134 - DNA, 25 bp, Artificial
  probe
  misc_feature (1)..(25): SEQ ID NO: 5677; WAN024DUT; Start 458; Stop 482
tgatgcttacttctctgctaccaag

SEQ ID NO: 418135 - DNA, 25 bp, Artificial
  probe
  misc_feature (1)..(25): SEQ ID NO: 5677; WAN024DUT; Start 844; Stop 868
ttaagaatacttatggaacaggctc

SEQ ID NO: 418136 - DNA, 25 bp, Artificial
  probe
  misc_feature (1)..(25): SEQ ID NO: 5677; WAN024DUT; Start 831; Stop 855
gagccaggtatggttaagaatactt

SEQ ID NO: 418137 - DNA, 25 bp, Artificial
  probe
  misc_feature (1)..(25): SEQ ID NO: 5677; WAN024DUT; Start 829; Stop 853
ttgagccaggtatggttaagaatac

SEQ ID NO: 418138 - DNA, 25 bp, Artificial
  probe
  misc_feature (1)..(25): SEQ ID NO: 5677; WAN024DUT; Start 841; Stop 865
tggttaagaatacttatggaacagg

SEQ ID NO: 418139 - DNA, 25 bp, Artificial
  probe
  misc_feature (1)..(25): SEQ ID NO: 5677; WAN024DUT; Start 830; Stop 854
tgagccaggtatggttaagaatact

SEQ ID NO: 418140 - DNA, 25 bp, Artificial
  probe
  misc_feature (1)..(25): SEQ ID NO: 5677; WAN024DUT; Start 1490; Stop 1514
atctcgcaaggaacaactctacaag

SEQ ID NO: 418141 - DNA, 25 bp, Artificial
  probe
  misc_feature (1)..(25): SEQ ID NO: 5677; WAN024DUT; Start 1488; Stop 1512
gaatctcgcaaggaacaactctaca

SEQ ID NO: 418142 - DNA, 25 bp, Artificial
  probe
  misc_feature (1)..(25): SEQ ID NO: 5677; WAN024DUT; Start 450; Stop 474
ttgattattgatgcttacttctctg

SEQ ID NO: 418143 - DNA, 25 bp, Artificial
  probe
  misc_feature (1)..(25): SEQ ID NO: 5677; WAN024DUT; Start 832; Stop 856
agccaggtatggttaagaatactta

SEQ ID NO: 418144 - DNA, 25 bp, Artificial
  probe
  misc_feature (1)..(25): SEQ ID NO: 5677; WAN024DUT; Start 958; Stop 982
attatgccttggaaggttctatctt

SEQ ID NO: 418145 - DNA, 25 bp, Artificial
  probe
  misc_feature (1)..(25): SEQ ID NO: 5677; WAN024DUT; Start 559; Stop 583
atacttggttggtttggaaattgac

SEQ ID NO: 418146 - DNA, 25 bp, Artificial
  probe
  misc_feature (1)..(25): SEQ ID NO: 5677; WAN024DUT; Start 558; Stop 582
gatacttggttggtttggaaattga

SEQ ID NO: 418147 - DNA, 25 bp, Artificial
  probe
  misc_feature (1)..(25): SEQ ID NO: 5677; WAN024DUT; Start 440; Stop 464
aaagactggtttgattattgatgct

SEQ ID NO: 418148 - DNA, 25 bp, Artificial
  probe
  misc_feature (1)..(25): SEQ ID NO: 5677; WAN024DUT; Start 339; Stop 363
acaggacttcctatctacaatgcta

SEQ ID NO: 418149 - DNA, 25 bp, Artificial
  probe
  misc_feature (1)..(25): SEQ ID NO: 5678; WAN024D4R; Start 106; Stop 130
ggtattcatctacttagctggagac

SEQ ID NO: 418150 - DNA, 25 bp, Artificial
  probe
  misc_feature (1)..(25): SEQ ID NO: 5678; WAN024D4R; Start 105; Stop 129
aggtattcatctacttagctggaga

SEQ ID NO: 418151 - DNA, 25 bp, Artificial
  probe
  misc_feature (1)..(25): SEQ ID NO: 5678; WAN024D4R; Start 107; Stop 131
gtattcatctacttagctggagaca

SEQ ID NO: 418152 - DNA, 25 bp, Artificial
  probe
  misc_feature (1)..(25): SEQ ID NO: 5678; WAN024D4R; Start 104; Stop 128
taggtattcatctacttagctggag

SEQ ID NO: 418153 - DNA, 25 bp, Artificial
  probe
  misc_feature (1)..(25): SEQ ID NO: 5678; WAN024D4R; Start 103; Stop 127
ctaggtattcatctacttagctgga

SEQ ID NO: 418154 - DNA, 25 bp, Artificial
  probe
  misc_feature (1)..(25): SEQ ID NO: 5678; WAN024D4R; Start 102; Stop 126
tctaggtattcatctacttagctgg

SEQ ID NO: 418155 - DNA, 25 bp, Artificial
  probe
  misc_feature (1)..(25): SEQ ID NO: 5678; WAN024D4R; Start 405; Stop 429
aattcttccttcagacaacatcgct

SEQ ID NO: 418156 - DNA, 25 bp, Artificial
  probe
  misc_feature (1)..(25): SEQ ID NO: 5678; WAN024D4R; Start 108; Stop 132
tattcatctacttagctggagacag

SEQ ID NO: 418157 - DNA, 25 bp, Artificial
  probe
  misc_feature (1)..(25): SEQ ID NO: 5678; WAN024D4R; Start 176; Stop 200
ggacagtggttctatcaactttagt

SEQ ID NO: 418158 - DNA, 25 bp, Artificial
  probe
  misc_feature (1)..(25): SEQ ID NO: 5678; WAN024D4R; Start 307; Stop 331
tttgttagaagtttggtgagtgatc

SEQ ID NO: 418159 - DNA, 25 bp, Artificial
  probe
  misc_feature (1)..(25): SEQ ID NO: 5678; WAN024D4R; Start 175; Stop 199
gggacagtggttctatcaactttag

SEQ ID NO: 418160 - DNA, 25 bp, Artificial
  probe
  misc_feature (1)..(25): SEQ ID NO: 5678; WAN024D4R; Start 427; Stop 451
gctgacagatgccaaataattcaaa

SEQ ID NO: 418161 - DNA, 25 bp, Artificial
  probe
  misc_feature (1)..(25): SEQ ID NO: 5678; WAN024D4R; Start 135; Stop 159
ctccgtagttgaattctatcttgct

SEQ ID NO: 418162 - DNA, 25 bp, Artificial
  probe
  misc_feature (1)..(25): SEQ ID NO: 5678; WAN024D4R; Start 136; Stop 160
tccgtagttgaattctatcttgcta

SEQ ID NO: 418163 - DNA, 25 bp, Artificial
  probe
  misc_feature (1)..(25): SEQ ID NO: 5678; WAN024D4R; Start 137; Stop 161
ccgtagttgaattctatcttgctag

SEQ ID NO: 418164 - DNA, 25 bp, Artificial
  probe
  misc_feature (1)..(25): SEQ ID NO: 5678; WAN024D4R; Start 424; Stop 448
atcgctgacagatgccaaataattc

SEQ ID NO: 418165 - DNA, 25 bp, Artificial
  probe
  misc_feature (1)..(25): SEQ ID NO: 5678; WAN024D4R; Start 99; Stop 123
tgatctaggtattcatctacttagc

SEQ ID NO: 418166 - DNA, 25 bp, Artificial
  probe
  misc_feature (1)..(25): SEQ ID NO: 5678; WAN024D4R; Start 453; Stop 477
tgaaataactaatggattgaagcag

SEQ ID NO: 418167 - DNA, 25 bp, Artificial
  probe
  misc_feature (1)..(25): SEQ ID NO: 5678; WAN024D4R; Start 381; Stop 405
atgtttcgttcatgtagaaggtaaa

SEQ ID NO: 418168 - DNA, 25 bp, Artificial
  probe
  misc_feature (1)..(25): SEQ ID NO: 5678; WAN024D4R; Start 380; Stop 404
aatgtttcgttcatgtagaaggtaa

SEQ ID NO: 418169 - DNA, 25 bp, Artificial
  probe
  misc_feature (1)..(25): SEQ ID NO: 5678; WAN024D4R; Start 379; Stop 403
aaatgtttcgttcatgtagaaggta

SEQ ID NO: 418170 - DNA, 25 bp, Artificial
  probe
  misc_feature (1)..(25): SEQ ID NO: 5678; WAN024D4R; Start 378; Stop 402
taaatgtttcgttcatgtagaaggt

SEQ ID NO: 418171 - DNA, 25 bp, Artificial
  probe
  misc_feature (1)..(25): SEQ ID NO: 5678; WAN024D4R; Start 177; Stop 201
gacagtggttctatcaactttagtt

SEQ ID NO: 418172 - DNA, 25 bp, Artificial
  probe
  misc_feature (1)..(25): SEQ ID NO: 5678; WAN024D4R; Start 404; Stop 428
aaattcttccttcagacaacatcgc

SEQ ID NO: 418173 - DNA, 25 bp, Artificial
  probe
  misc_feature (1)..(25): SEQ ID NO: 5678; WAN024D4R; Start 134; Stop 158
actccgtagttgaattctatcttgc

SEQ ID NO: 418174 - DNA, 25 bp, Artificial
  probe
  misc_feature (1)..(25): SEQ ID NO: 5678; WAN024D4R; Start 178; Stop 202
acagtggttctatcaactttagttt

SEQ ID NO: 418175 - DNA, 25 bp, Artificial
  probe
  misc_feature (1)..(25): SEQ ID NO: 5678; WAN024D4R; Start 101; Stop 125
atctaggtattcatctacttagctg

SEQ ID NO: 418176 - DNA, 25 bp, Artificial
  probe
  misc_feature (1)..(25): SEQ ID NO: 5678; WAN024D4R; Start 406; Stop 430
attcttccttcagacaacatcgctg

SEQ ID NO: 418177 - DNA, 25 bp, Artificial
  probe
  misc_feature (1)..(25): SEQ ID NO: 5678; WAN024D4R; Start 90; Stop 114
tcaagttagtgatctaggtattcat

SEQ ID NO: 418178 - DNA, 25 bp, Artificial
  probe
  misc_feature (1)..(25): SEQ ID NO: 5678; WAN024D4R; Start 454; Stop 478
gaaataactaatggattgaagcagt

SEQ ID NO: 418179 - DNA, 25 bp, Artificial
  probe
  misc_feature (1)..(25): SEQ ID NO: 5678; WAN024D4R; Start 91; Stop 115
caagttagtgatctaggtattcatc

SEQ ID NO: 418180 - DNA, 25 bp, Artificial
  probe
  misc_feature (1)..(25): SEQ ID NO: 5678; WAN024D4R; Start 426; Stop 450
cgctgacagatgccaaataattcaa

SEQ ID NO: 418181 - DNA, 25 bp, Artificial
  probe
  misc_feature (1)..(25): SEQ ID NO: 5678; WAN024D4R; Start 92; Stop 116
aagttagtgatctaggtattcatct

SEQ ID NO: 418182 - DNA, 25 bp, Artificial
  probe
  misc_feature (1)..(25): SEQ ID NO: 5679; WAN024ES9; Start 806; Stop 830
acattaccactagcaatcaacaaga

SEQ ID NO: 418183 - DNA, 25 bp, Artificial
  probe
  misc_feature (1)..(25): SEQ ID NO: 5679; WAN024ES9; Start 805; Stop 829
cacattaccactagcaatcaacaag

SEQ ID NO: 418184 - DNA, 25 bp, Artificial
  probe
  misc_feature (1)..(25): SEQ ID NO: 5679; WAN024ES9; Start 808; Stop 832
attaccactagcaatcaacaagatg

SEQ ID NO: 418185 - DNA, 25 bp, Artificial
  probe
  misc_feature (1)..(25): SEQ ID NO: 5679; WAN024ES9; Start 807; Stop 831
cattaccactagcaatcaacaagat

SEQ ID NO: 418186 - DNA, 25 bp, Artificial
  probe
  misc_feature (1)..(25): SEQ ID NO: 5679; WAN024ES9; Start 1334; Stop 1358
aatatgctccagaacctgctattaa

SEQ ID NO: 418187 - DNA, 25 bp, Artificial
  probe
  misc_feature (1)..(25): SEQ ID NO: 5679; WAN024ES9; Start 802; Stop 826
aagcacattaccactagcaatcaac

SEQ ID NO: 418188 - DNA, 25 bp, Artificial
  probe
  misc_feature (1)..(25): SEQ ID NO: 5679; WAN024ES9; Start 801; Stop 825
caagcacattaccactagcaatcaa

SEQ ID NO: 418189 - DNA, 25 bp, Artificial
  probe
  misc_feature (1)..(25): SEQ ID NO: 5679; WAN024ES9; Start 772; Stop 796
aatggtagtagcagtgtcaaggaag

SEQ ID NO: 418190 - DNA, 25 bp, Artificial
  probe
  misc_feature (1)..(25): SEQ ID NO: 5679; WAN024ES9; Start 804; Stop 828
gcacattaccactagcaatcaacaa

SEQ ID NO: 418191 - DNA, 25 bp, Artificial
  probe
  misc_feature (1)..(25): SEQ ID NO: 5679; WAN024ES9; Start 1389; Stop 1413
cgaacgccataaagagagaaataaa

SEQ ID NO: 418192 - DNA, 25 bp, Artificial
  probe
  misc_feature (1)..(25): SEQ ID NO: 5679; WAN024ES9; Start 1387; Stop 1411
tacgaacgccataaagagagaaata

SEQ ID NO: 418193 - DNA, 25 bp, Artificial
  probe
  misc_feature (1)..(25): SEQ ID NO: 5679; WAN024ES9; Start 1393; Stop 1417
cgccataaagagagaaataaatcgt

SEQ ID NO: 418194 - DNA, 25 bp, Artificial
  probe
  misc_feature (1)..(25): SEQ ID NO: 5679; WAN024ES9; Start 1392; Stop 1416
acgccataaagagagaaataaatcg

SEQ ID NO: 418195 - DNA, 25 bp, Artificial
  probe
  misc_feature (1)..(25): SEQ ID NO: 5679; WAN024ES9; Start 809; Stop 833
ttaccactagcaatcaacaagatgg

SEQ ID NO: 418196 - DNA, 25 bp, Artificial
  probe
  misc_feature (1)..(25): SEQ ID NO: 5679; WAN024ES9; Start 1388; Stop 1412
acgaacgccataaagagagaaataa

SEQ ID NO: 418197 - DNA, 25 bp, Artificial
  probe
  misc_feature (1)..(25): SEQ ID NO: 5679; WAN024ES9; Start 1386; Stop 1410
ttacgaacgccataaagagagaaat

SEQ ID NO: 418198 - DNA, 25 bp, Artificial
  probe
  misc_feature (1)..(25): SEQ ID NO: 5679; WAN024ES9; Start 177; Stop 201
tgttaaggaattgatggacgatttg

SEQ ID NO: 418199 - DNA, 25 bp, Artificial
  probe
  misc_feature (1)..(25): SEQ ID NO: 5679; WAN024ES9; Start 180; Stop 204
taaggaattgatggacgatttggat

SEQ ID NO: 418200 - DNA, 25 bp, Artificial
  probe
  misc_feature (1)..(25): SEQ ID NO: 5679; WAN024ES9; Start 179; Stop 203
ttaaggaattgatggacgatttgga

SEQ ID NO: 418201 - DNA, 25 bp, Artificial
  probe
  misc_feature (1)..(25): SEQ ID NO: 5679; WAN024ES9; Start 178; Stop 202
gttaaggaattgatggacgatttgg

SEQ ID NO: 418202 - DNA, 25 bp, Artificial
  probe
  misc_feature (1)..(25): SEQ ID NO: 5679; WAN024ES9; Start 803; Stop 827
agcacattaccactagcaatcaaca

SEQ ID NO: 418203 - DNA, 25 bp, Artificial
  probe
  misc_feature (1)..(25): SEQ ID NO: 5679; WAN024ES9; Start 176; Stop 200
ttgttaaggaattgatggacgattt

SEQ ID NO: 418204 - DNA, 25 bp, Artificial
  probe
  misc_feature (1)..(25): SEQ ID NO: 5679; WAN024ES9; Start 175; Stop 199
tttgttaaggaattgatggacgatt

SEQ ID NO: 418205 - DNA, 25 bp, Artificial
  probe
  misc_feature (1)..(25): SEQ ID NO: 5679; WAN024ES9; Start 266; Stop 290
cgagccctatttccaagttacattt

SEQ ID NO: 418206 - DNA, 25 bp, Artificial
  probe
  misc_feature (1)..(25): SEQ ID NO: 5679; WAN024ES9; Start 267; Stop 291
gagccctatttccaagttacatttg

SEQ ID NO: 418207 - DNA, 25 bp, Artificial
  probe
  misc_feature (1)..(25): SEQ ID NO: 5679; WAN024ES9; Start 1006; Stop 1030
atagaagaattggtggagtttgttc

SEQ ID NO: 418208 - DNA, 25 bp, Artificial
  probe
  misc_feature (1)..(25): SEQ ID NO: 5679; WAN024ES9; Start 1005; Stop 1029
aatagaagaattggtggagtttgtt

SEQ ID NO: 418209 - DNA, 25 bp, Artificial
  probe
  misc_feature (1)..(25): SEQ ID NO: 5679; WAN024ES9; Start 1004; Stop 1028
aaatagaagaattggtggagtttgt

SEQ ID NO: 418210 - DNA, 25 bp, Artificial
  probe
  misc_feature (1)..(25): SEQ ID NO: 5679; WAN024ES9; Start 535; Stop 559
ttgatgctgatgacaccagaagaat

SEQ ID NO: 418211 - DNA, 25 bp, Artificial
  probe
  misc_feature (1)..(25): SEQ ID NO: 5679; WAN024ES9; Start 888; Stop 912
cagccgtgactatcatttcaataag

SEQ ID NO: 418212 - DNA, 25 bp, Artificial
  probe
  misc_feature (1)..(25): SEQ ID NO: 5679; WAN024ES9; Start 1385; Stop 1409
cttacgaacgccataaagagagaaa

SEQ ID NO: 418213 - DNA, 25 bp, Artificial
  probe
  misc_feature (1)..(25): SEQ ID NO: 5679; WAN024ES9; Start 887; Stop 911
tcagccgtgactatcatttcaataa

SEQ ID NO: 418214 - DNA, 25 bp, Artificial
  probe
  misc_feature (1)..(25): SEQ ID NO: 5679; WAN024ES9; Start 1007; Stop 1031
tagaagaattggtggagtttgttcg

SEQ ID NO: 418215 - DNA, 25 bp, Artificial
  probe
  misc_feature (1)..(25): SEQ ID NO: 5680; WAN024D88; Start 154; Stop 178
aaaactatacaccagagcaacaaaa

SEQ ID NO: 418216 - DNA, 25 bp, Artificial
  probe
  misc_feature (1)..(25): SEQ ID NO: 5680; WAN024D88; Start 191; Stop 215
atttgaagcagaagcaacggaagat

SEQ ID NO: 418217 - DNA, 25 bp, Artificial
  probe
  misc_feature (1)..(25): SEQ ID NO: 5680; WAN024D88; Start 2; Stop 26
tgtatcagaatgaagacttgtataa

SEQ ID NO: 418218 - DNA, 25 bp, Artificial
  probe
  misc_feature (1)..(25): SEQ ID NO: 5680; WAN024D88; Start 1; Stop 25
ttgtatcagaatgaagacttgtata

SEQ ID NO: 418219 - DNA, 25 bp, Artificial
  probe
  misc_feature (1)..(25): SEQ ID NO: 5680; WAN024D88; Start 190; Stop 214
aatttgaagcagaagcaacggaaga

SEQ ID NO: 418220 - DNA, 25 bp, Artificial
  probe
  misc_feature (1)..(25): SEQ ID NO: 5680; WAN024D88; Start 189; Stop 213
caatttgaagcagaagcaacggaag

SEQ ID NO: 418221 - DNA, 25 bp, Artificial
  probe
  misc_feature (1)..(25): SEQ ID NO: 5680; WAN024D88; Start 186; Stop 210
gatcaatttgaagcagaagcaacgg

SEQ ID NO: 418222 - DNA, 25 bp, Artificial
  probe
  misc_feature (1)..(25): SEQ ID NO: 5680; WAN024D88; Start 177; Stop 201
aaactccatgatcaatttgaagcag

SEQ ID NO: 418223 - DNA, 25 bp, Artificial
  probe
  misc_feature (1)..(25): SEQ ID NO: 5680; WAN024D88; Start 180; Stop 204
ctccatgatcaatttgaagcagaag

SEQ ID NO: 418224 - DNA, 25 bp, Artificial
  probe
  misc_feature (1)..(25): SEQ ID NO: 5680; WAN024D88; Start 187; Stop 211
atcaatttgaagcagaagcaacgga

SEQ ID NO: 418225 - DNA, 25 bp, Artificial
  probe
  misc_feature (1)..(25): SEQ ID NO: 5680; WAN024D88; Start 184; Stop 208
atgatcaatttgaagcagaagcaac

SEQ ID NO: 418226 - DNA, 25 bp, Artificial
  probe
  misc_feature (1)..(25): SEQ ID NO: 5680; WAN024D88; Start 183; Stop 207
catgatcaatttgaagcagaagcaa

SEQ ID NO: 418227 - DNA, 25 bp, Artificial
  probe
  misc_feature (1)..(25): SEQ ID NO: 5680; WAN024D88; Start 179; Stop 203
actccatgatcaatttgaagcagaa

SEQ ID NO: 418228 - DNA, 25 bp, Artificial
  probe
  misc_feature (1)..(25): SEQ ID NO: 5680; WAN024D88; Start 178; Stop 202
aactccatgatcaatttgaagcaga

SEQ ID NO: 418229 - DNA, 25 bp, Artificial
  probe
  misc_feature (1)..(25): SEQ ID NO: 5680; WAN024D88; Start 192; Stop 216
tttgaagcagaagcaacggaagatg

SEQ ID NO: 418230 - DNA, 25 bp, Artificial
  probe
  misc_feature (1)..(25): SEQ ID NO: 5680; WAN024D88; Start 188; Stop 212
tcaatttgaagcagaagcaacggaa

SEQ ID NO: 418231 - DNA, 25 bp, Artificial
  probe
  misc_feature (1)..(25): SEQ ID NO: 5680; WAN024D88; Start 181; Stop 205
tccatgatcaatttgaagcagaagc

SEQ ID NO: 418232 - DNA, 25 bp, Artificial
  probe
  misc_feature (1)..(25): SEQ ID NO: 5680; WAN024D88; Start 182; Stop 206
ccatgatcaatttgaagcagaagca

SEQ ID NO: 418233 - DNA, 25 bp, Artificial
  probe
  misc_feature (1)..(25): SEQ ID NO: 5680; WAN024D88; Start 185; Stop 209
tgatcaatttgaagcagaagcaacg

SEQ ID NO: 418234 - DNA, 25 bp, Artificial
  probe
  misc_feature (1)..(25): SEQ ID NO: 5680; WAN024D88; Start 176; Stop 200
aaaactccatgatcaatttgaagca

SEQ ID NO: 418235 - DNA, 25 bp, Artificial
  probe
  misc_feature (1)..(25): SEQ ID NO: 5680; WAN024D88; Start 28; Stop 52
aaaggtttgaatgttgaacttgcgc

SEQ ID NO: 418236 - DNA, 25 bp, Artificial
  probe
  misc_feature (1)..(25): SEQ ID NO: 5680; WAN024D88; Start 49; Stop 73
gcgcaccaacaaattaagggatttt

SEQ ID NO: 418237 - DNA, 25 bp, Artificial
  probe
  misc_feature (1)..(25): SEQ ID NO: 5681; WAN024GBM; Start 14; Stop 38
tatgtctatccatattgctgctcag

SEQ ID NO: 418238 - DNA, 25 bp, Artificial
  probe
  misc_feature (1)..(25): SEQ ID NO: 5681; WAN024GBM; Start 13; Stop 37
ttatgtctatccatattgctgctca

SEQ ID NO: 418239 - DNA, 25 bp, Artificial
  probe
  misc_feature (1)..(25): SEQ ID NO: 5681; WAN024GBM; Start 12; Stop 36
attatgtctatccatattgctgctc

SEQ ID NO: 418240 - DNA, 25 bp, Artificial
  probe
  misc_feature (1)..(25): SEQ ID NO: 5681; WAN024GBM; Start 680; Stop 704
cactgatatgatgaaggttggtttg

SEQ ID NO: 418241 - DNA, 25 bp, Artificial
  probe
  misc_feature (1)..(25): SEQ ID NO: 5681; WAN024GBM; Start 683; Stop 707
tgatatgatgaaggttggtttggaa

SEQ ID NO: 418242 - DNA, 25 bp, Artificial
  probe
  misc_feature (1)..(25): SEQ ID NO: 5681; WAN024GBM; Start 684; Stop 708
gatatgatgaaggttggtttggaaa

SEQ ID NO: 418243 - DNA, 25 bp, Artificial
  probe
  misc_feature (1)..(25): SEQ ID NO: 5681; WAN024GBM; Start 11; Stop 35
aattatgtctatccatattgctgct

SEQ ID NO: 418244 - DNA, 25 bp, Artificial
  probe
  misc_feature (1)..(25): SEQ ID NO: 5681; WAN024GBM; Start 682; Stop 706
ctgatatgatgaaggttggtttgga

SEQ ID NO: 418245 - DNA, 25 bp, Artificial
  probe
  misc_feature (1)..(25): SEQ ID NO: 5681; WAN024GBM; Start 86; Stop 110
tgctaagtttattgcggagaatttc

SEQ ID NO: 418246 - DNA, 25 bp, Artificial
  probe
  misc_feature (1)..(25): SEQ ID NO: 5681; WAN024GBM; Start 247; Stop 271
tagactacggtgtgaagaaattgat

SEQ ID NO: 418247 - DNA, 25 bp, Artificial
  probe
  misc_feature (1)..(25): SEQ ID NO: 5681; WAN024GBM; Start 248; Stop 272
agactacggtgtgaagaaattgatt

SEQ ID NO: 418248 - DNA, 25 bp, Artificial
  probe
  misc_feature (1)..(25): SEQ ID NO: 5681; WAN024GBM; Start 85; Stop 109
gtgctaagtttattgcggagaattt

SEQ ID NO: 418249 - DNA, 25 bp, Artificial
  probe
  misc_feature (1)..(25): SEQ ID NO: 5681; WAN024GBM; Start 681; Stop 705
actgatatgatgaaggttggtttgg

SEQ ID NO: 418250 - DNA, 25 bp, Artificial
  probe
  misc_feature (1)..(25): SEQ ID NO: 5681; WAN024GBM; Start 249; Stop 273
gactacggtgtgaagaaattgattc

SEQ ID NO: 418251 - DNA, 25 bp, Artificial
  probe
  misc_feature (1)..(25): SEQ ID NO: 5681; WAN024GBM; Start 565; Stop 589
ctctttactatcttgctgcccaata

SEQ ID NO: 418252 - DNA, 25 bp, Artificial
  probe
  misc_feature (1)..(25): SEQ ID NO: 5681; WAN024GBM; Start 566; Stop 590
tctttactatcttgctgcccaatac

SEQ ID NO: 418253 - DNA, 25 bp, Artificial
  probe
  misc_feature (1)..(25): SEQ ID NO: 5681; WAN024GBM; Start 679; Stop 703
tcactgatatgatgaaggttggttt

SEQ ID NO: 418254 - DNA, 25 bp, Artificial
  probe
  misc_feature (1)..(25): SEQ ID NO: 5681; WAN024GBM; Start 246; Stop 270
gtagactacggtgtgaagaaattga

SEQ ID NO: 418255 - DNA, 25 bp, Artificial
  probe
  misc_feature (1)..(25): SEQ ID NO: 5681; WAN024GBM; Start 76; Stop 100
atcctcttcgtgctaagtttattgc

SEQ ID NO: 418256 - DNA, 25 bp, Artificial
  probe
  misc_feature (1)..(25): SEQ ID NO: 5681; WAN024GBM; Start 685; Stop 709
atatgatgaaggttggtttggaaac

SEQ ID NO: 418257 - DNA, 25 bp, Artificial
  probe
  misc_feature (1)..(25): SEQ ID NO: 5681; WAN024GBM; Start 348; Stop 372
aactcaaacatcgttcgtaatgact

SEQ ID NO: 418258 - DNA, 25 bp, Artificial
  probe
  misc_feature (1)..(25): SEQ ID NO: 5681; WAN024GBM; Start 347; Stop 371
caactcaaacatcgttcgtaatgac

SEQ ID NO: 418259 - DNA, 25 bp, Artificial
  probe
  misc_feature (1)..(25): SEQ ID NO: 5681; WAN024GBM; Start 75; Stop 99
gatcctcttcgtgctaagtttattg

SEQ ID NO: 418260 - DNA, 25 bp, Artificial
  probe
  misc_feature (1)..(25): SEQ ID NO: 5681; WAN024GBM; Start 344; Stop 368
aaccaactcaaacatcgttcgtaat

SEQ ID NO: 418261 - DNA, 25 bp, Artificial
  probe
  misc_feature (1)..(25): SEQ ID NO: 5681; WAN024GBM; Start 149; Stop 173
gtttggttacactggtacttacaag

SEQ ID NO: 418262 - DNA, 25 bp, Artificial
  probe
  misc_feature (1)..(25): SEQ ID NO: 5681; WAN024GBM; Start 567; Stop 591
ctttactatcttgctgcccaatacc

SEQ ID NO: 418263 - DNA, 25 bp, Artificial
  probe
  misc_feature (1)..(25): SEQ ID NO: 5681; WAN024GBM; Start 250; Stop 274
actacggtgtgaagaaattgattcg

SEQ ID NO: 418264 - DNA, 25 bp, Artificial
  probe
  misc_feature (1)..(25): SEQ ID NO: 5681; WAN024GBM; Start 150; Stop 174
tttggttacactggtacttacaagg

SEQ ID NO: 418265 - DNA, 25 bp, Artificial
  probe
  misc_feature (1)..(25): SEQ ID NO: 5681; WAN024GBM; Start 260; Stop 284
gaagaaattgattcgtgtgggaact

SEQ ID NO: 418266 - DNA, 25 bp, Artificial
  probe
  misc_feature (1)..(25): SEQ ID NO: 5681; WAN024GBM; Start 678; Stop 702
ttcactgatatgatgaaggttggtt

SEQ ID NO: 418267 - DNA, 25 bp, Artificial
  probe
  misc_feature (1)..(25): SEQ ID NO: 5681; WAN024GBM; Start 349; Stop 373
actcaaacatcgttcgtaatgactg

SEQ ID NO: 418268 - DNA, 25 bp, Artificial
  probe
  misc_feature (1)..(25): SEQ ID NO: 5681; WAN024GBM; Start 569; Stop 593
ttactatcttgctgcccaataccat

SEQ ID NO: 418269 - DNA, 25 bp, Artificial
  probe
  misc_feature (1)..(25): SEQ ID NO: 5681; WAN024GBM; Start 148; Stop 172
tgtttggttacactggtacttacaa

SEQ ID NO: 418270 - DNA, 25 bp, Artificial
  probe
  misc_feature (1)..(25): SEQ ID NO: 5682; WAN024BHA; Start 210; Stop 234
gattaccgcaagtatcacgattatg

SEQ ID NO: 418271 - DNA, 25 bp, Artificial
  probe
  misc_feature (1)..(25): SEQ ID NO: 5682; WAN024BHA; Start 211; Stop 235
attaccgcaagtatcacgattatga

SEQ ID NO: 418272 - DNA, 25 bp, Artificial
  probe
  misc_feature (1)..(25): SEQ ID NO: 5682; WAN024BHA; Start 212; Stop 236
ttaccgcaagtatcacgattatgaa

SEQ ID NO: 418273 - DNA, 25 bp, Artificial
  probe
  misc_feature (1)..(25): SEQ ID NO: 5682; WAN024BHA; Start 230; Stop 254
ttatgaacgccttggataataacaa

SEQ ID NO: 418274 - DNA, 25 bp, Artificial
  probe
  misc_feature (1)..(25): SEQ ID NO: 5682; WAN024BHA; Start 213; Stop 237
taccgcaagtatcacgattatgaac

SEQ ID NO: 418275 - DNA, 25 bp, Artificial
  probe
  misc_feature (1)..(25): SEQ ID NO: 5682; WAN024BHA; Start 190; Stop 214
atcgctagtatccttggcttgatta

SEQ ID NO: 418276 - DNA, 25 bp, Artificial
  probe
  misc_feature (1)..(25): SEQ ID NO: 5682; WAN024BHA; Start 219; Stop 243
aagtatcacgattatgaacgccttg

SEQ ID NO: 418277 - DNA, 25 bp, Artificial
  probe
  misc_feature (1)..(25): SEQ ID NO: 5682; WAN024BHA; Start 218; Stop 242
caagtatcacgattatgaacgcctt

SEQ ID NO: 418278 - DNA, 25 bp, Artificial
  probe
  misc_feature (1)..(25): SEQ ID NO: 5682; WAN024BHA; Start 95; Stop 119
ggagagaatgtatgtctaactatcg

SEQ ID NO: 418279 - DNA, 25 bp, Artificial
  probe
  misc_feature (1)..(25): SEQ ID NO: 5682; WAN024BHA; Start 181; Stop 205
gttgctacaatcgctagtatccttg

SEQ ID NO: 418280 - DNA, 25 bp, Artificial
  probe
  misc_feature (1)..(25): SEQ ID NO: 5682; WAN024BHA; Start 191; Stop 215
tcgctagtatccttggcttgattac

SEQ ID NO: 418281 - DNA, 25 bp, Artificial
  probe
  misc_feature (1)..(25): SEQ ID NO: 5682; WAN024BHA; Start 223; Stop 247
atcacgattatgaacgccttggata

SEQ ID NO: 418282 - DNA, 25 bp, Artificial
  probe
  misc_feature (1)..(25): SEQ ID NO: 5682; WAN024BHA; Start 222; Stop 246
tatcacgattatgaacgccttggat

SEQ ID NO: 418283 - DNA, 25 bp, Artificial
  probe
  misc_feature (1)..(25): SEQ ID NO: 5682; WAN024BHA; Start 96; Stop 120
gagagaatgtatgtctaactatcgt

SEQ ID NO: 418284 - DNA, 25 bp, Artificial
  probe
  misc_feature (1)..(25): SEQ ID NO: 5682; WAN024BHA; Start 446; Stop 470
actcttctactcctgcttcaagtaa

SEQ ID NO: 418285 - DNA, 25 bp, Artificial
  probe
  misc_feature (1)..(25): SEQ ID NO: 5682; WAN024BHA; Start 185; Stop 209
ctacaatcgctagtatccttggctt

SEQ ID NO: 418286 - DNA, 25 bp, Artificial
  probe
  misc_feature (1)..(25): SEQ ID NO: 5682; WAN024BHA; Start 226; Stop 250
acgattatgaacgccttggataata

SEQ ID NO: 418287 - DNA, 25 bp, Artificial
  probe
  misc_feature (1)..(25): SEQ ID NO: 5682; WAN024BHA; Start 224; Stop 248
tcacgattatgaacgccttggataa

SEQ ID NO: 418288 - DNA, 25 bp, Artificial
  probe
  misc_feature (1)..(25): SEQ ID NO: 5682; WAN024BHA; Start 227; Stop 251
cgattatgaacgccttggataataa

SEQ ID NO: 418289 - DNA, 25 bp, Artificial
  probe
  misc_feature (1)..(25): SEQ ID NO: 5682; WAN024BHA; Start 445; Stop 469
gactcttctactcctgcttcaagta

SEQ ID NO: 418290 - DNA, 25 bp, Artificial
  probe
  misc_feature (1)..(25): SEQ ID NO: 5682; WAN024BHA; Start 186; Stop 210
tacaatcgctagtatccttggcttg

SEQ ID NO: 418291 - DNA, 25 bp, Artificial
  probe
  misc_feature (1)..(25): SEQ ID NO: 5682; WAN024BHA; Start 182; Stop 206
ttgctacaatcgctagtatccttgg

SEQ ID NO: 418292 - DNA, 25 bp, Artificial
  probe
  misc_feature (1)..(25): SEQ ID NO: 5682; WAN024BHA; Start 432; Stop 456
aacagcaactcaggactcttctact

SEQ ID NO: 418293 - DNA, 25 bp, Artificial
  probe
  misc_feature (1)..(25): SEQ ID NO: 5682; WAN024BHA; Start 229; Stop 253
attatgaacgccttggataataaca

SEQ ID NO: 418294 - DNA, 25 bp, Artificial
  probe
  misc_feature (1)..(25): SEQ ID NO: 5682; WAN024BHA; Start 225; Stop 249
cacgattatgaacgccttggataat

SEQ ID NO: 418295 - DNA, 25 bp, Artificial
  probe
  misc_feature (1)..(25): SEQ ID NO: 5682; WAN024BHA; Start 188; Stop 212
caatcgctagtatccttggcttgat

SEQ ID NO: 418296 - DNA, 25 bp, Artificial
  probe
  misc_feature (1)..(25): SEQ ID NO: 5682; WAN024BHA; Start 180; Stop 204
cgttgctacaatcgctagtatcctt

SEQ ID NO: 418297 - DNA, 25 bp, Artificial
  probe
  misc_feature (1)..(25): SEQ ID NO: 5682; WAN024BHA; Start 194; Stop 218
ctagtatccttggcttgattaccgc

SEQ ID NO: 418298 - DNA, 25 bp, Artificial
  probe
  misc_feature (1)..(25): SEQ ID NO: 5682; WAN024BHA; Start 193; Stop 217
gctagtatccttggcttgattaccg

SEQ ID NO: 418299 - DNA, 25 bp, Artificial
  probe
  misc_feature (1)..(25): SEQ ID NO: 5682; WAN024BHA; Start 192; Stop 216
cgctagtatccttggcttgattacc

SEQ ID NO: 418300 - DNA, 25 bp, Artificial
  probe
  misc_feature (1)..(25): SEQ ID NO: 5682; WAN024BHA; Start 94; Stop 118
aggagagaatgtatgtctaactatc

SEQ ID NO: 418301 - DNA, 25 bp, Artificial
  probe
  misc_feature (1)..(25): SEQ ID NO: 5682; WAN024BHA; Start 231; Stop 255
tatgaacgccttggataataacaaa

SEQ ID NO: 418302 - DNA, 25 bp, Artificial
  probe
  misc_feature (1)..(25): SEQ ID NO: 5682; WAN024BHA; Start 228; Stop 252
gattatgaacgccttggataataac

SEQ ID NO: 418303 - DNA, 25 bp, Artificial
  probe
  misc_feature (1)..(25): SEQ ID NO: 5683; WAN024D8Y; Start 144; Stop 168
gtcaatacctggcagactaactaat

SEQ ID NO: 418304 - DNA, 25 bp, Artificial
  probe
  misc_feature (1)..(25): SEQ ID NO: 5683; WAN024D8Y; Start 136; Stop 160
aatagaatgtcaatacctggcagac

SEQ ID NO: 418305 - DNA, 25 bp, Artificial
  probe
  misc_feature (1)..(25): SEQ ID NO: 5683; WAN024D8Y; Start 138; Stop 162
tagaatgtcaatacctggcagacta

SEQ ID NO: 418306 - DNA, 25 bp, Artificial
  probe
  misc_feature (1)..(25): SEQ ID NO: 5683; WAN024D8Y; Start 142; Stop 166
atgtcaatacctggcagactaacta

SEQ ID NO: 418307 - DNA, 25 bp, Artificial
  probe
  misc_feature (1)..(25): SEQ ID NO: 5683; WAN024D8Y; Start 143; Stop 167
tgtcaatacctggcagactaactaa

SEQ ID NO: 418308 - DNA, 25 bp, Artificial
  probe
  misc_feature (1)..(25): SEQ ID NO: 5683; WAN024D8Y; Start 137; Stop 161
atagaatgtcaatacctggcagact

SEQ ID NO: 418309 - DNA, 25 bp, Artificial
  probe
  misc_feature (1)..(25): SEQ ID NO: 5683; WAN024D8Y; Start 140; Stop 164
gaatgtcaatacctggcagactaac

SEQ ID NO: 418310 - DNA, 25 bp, Artificial
  probe
  misc_feature (1)..(25): SEQ ID NO: 5683; WAN024D8Y; Start 139; Stop 163
agaatgtcaatacctggcagactaa

SEQ ID NO: 418311 - DNA, 25 bp, Artificial
  probe
  misc_feature (1)..(25): SEQ ID NO: 5683; WAN024D8Y; Start 141; Stop 165
aatgtcaatacctggcagactaact

SEQ ID NO: 418312 - DNA, 25 bp, Artificial
  probe
  misc_feature (1)..(25): SEQ ID NO: 5683; WAN024D8Y; Start 96; Stop 120
tacatcttctttatccttggcatct

SEQ ID NO: 418313 - DNA, 25 bp, Artificial
  probe
  misc_feature (1)..(25): SEQ ID NO: 5683; WAN024D8Y; Start 97; Stop 121
acatcttctttatccttggcatctg

SEQ ID NO: 418314 - DNA, 25 bp, Artificial
  probe
  misc_feature (1)..(25): SEQ ID NO: 5683; WAN024D8Y; Start 135; Stop 159
aaatagaatgtcaatacctggcaga

SEQ ID NO: 418315 - DNA, 25 bp, Artificial
  probe
  misc_feature (1)..(25): SEQ ID NO: 5683; WAN024D8Y; Start 134; Stop 158
caaatagaatgtcaatacctggcag

SEQ ID NO: 418316 - DNA, 25 bp, Artificial
  probe
  misc_feature (1)..(25): SEQ ID NO: 5683; WAN024D8Y; Start 95; Stop 119
ttacatcttctttatccttggcatc

SEQ ID NO: 418317 - DNA, 25 bp, Artificial
  probe
  misc_feature (1)..(25): SEQ ID NO: 5683; WAN024D8Y; Start 60; Stop 84
agacttgtttaacccatttcttgaa

SEQ ID NO: 418318 - DNA, 25 bp, Artificial
  probe
  misc_feature (1)..(25): SEQ ID NO: 5683; WAN024D8Y; Start 94; Stop 118
attacatcttctttatccttggcat

SEQ ID NO: 418319 - DNA, 25 bp, Artificial
  probe
  misc_feature (1)..(25): SEQ ID NO: 5683; WAN024D8Y; Start 93; Stop 117
aattacatcttctttatccttggca

SEQ ID NO: 418320 - DNA, 25 bp, Artificial
  probe
  misc_feature (1)..(25): SEQ ID NO: 5683; WAN024D8Y; Start 133; Stop 157
acaaatagaatgtcaatacctggca

SEQ ID NO: 418321 - DNA, 25 bp, Artificial
  probe
  misc_feature (1)..(25): SEQ ID NO: 5683; WAN024D8Y; Start 61; Stop 85
gacttgtttaacccatttcttgaaa

SEQ ID NO: 418322 - DNA, 25 bp, Artificial
  probe
  misc_feature (1)..(25): SEQ ID NO: 5683; WAN024D8Y; Start 101; Stop 125
cttctttatccttggcatctgcttt

SEQ ID NO: 418323 - DNA, 25 bp, Artificial
  probe
  misc_feature (1)..(25): SEQ ID NO: 5683; WAN024D8Y; Start 62; Stop 86
acttgtttaacccatttcttgaaag

SEQ ID NO: 418324 - DNA, 25 bp, Artificial
  probe
  misc_feature (1)..(25): SEQ ID NO: 5683; WAN024D8Y; Start 21; Stop 45
cctccgtggaatagtagatttattt

SEQ ID NO: 418325 - DNA, 25 bp, Artificial
  probe
  misc_feature (1)..(25): SEQ ID NO: 5683; WAN024D8Y; Start 53; Stop 77
tcattcaagacttgtttaacccatt

SEQ ID NO: 418326 - DNA, 25 bp, Artificial
  probe
  misc_feature (1)..(25): SEQ ID NO: 5683; WAN024D8Y; Start 56; Stop 80
ttcaagacttgtttaacccatttct

SEQ ID NO: 418327 - DNA, 25 bp, Artificial
  probe
  misc_feature (1)..(25): SEQ ID NO: 5683; WAN024D8Y; Start 102; Stop 126
ttctttatccttggcatctgctttg

SEQ ID NO: 418328 - DNA, 25 bp, Artificial
  probe
  misc_feature (1)..(25): SEQ ID NO: 5683; WAN024D8Y; Start 52; Stop 76
atcattcaagacttgtttaacccat

SEQ ID NO: 418329 - DNA, 25 bp, Artificial
  probe
  misc_feature (1)..(25): SEQ ID NO: 5683; WAN024D8Y; Start 63; Stop 87
cttgtttaacccatttcttgaaaga

SEQ ID NO: 418330 - DNA, 25 bp, Artificial
  probe
  misc_feature (1)..(25): SEQ ID NO: 5683; WAN024D8Y; Start 15; Stop 39
cgatatcctccgtggaatagtagat

SEQ ID NO: 418331 - DNA, 25 bp, Artificial
  probe
  misc_feature (1)..(25): SEQ ID NO: 5683; WAN024D8Y; Start 16; Stop 40
gatatcctccgtggaatagtagatt

SEQ ID NO: 418332 - DNA, 25 bp, Artificial
  probe
  misc_feature (1)..(25): SEQ ID NO: 5683; WAN024D8Y; Start 99; Stop 123
atcttctttatccttggcatctgct

SEQ ID NO: 418333 - DNA, 25 bp, Artificial
  probe
  misc_feature (1)..(25): SEQ ID NO: 5683; WAN024D8Y; Start 98; Stop 122
catcttctttatccttggcatctgc

SEQ ID NO: 418334 - DNA, 25 bp, Artificial
  probe
  misc_feature (1)..(25): SEQ ID NO: 5683; WAN024D8Y; Start 92; Stop 116
aaattacatcttctttatccttggc

SEQ ID NO: 418335 - DNA, 25 bp, Artificial
  probe
  misc_feature (1)..(25): SEQ ID NO: 5683; WAN024D8Y; Start 100; Stop 124
tcttctttatccttggcatctgctt

SEQ ID NO: 418336 - DNA, 25 bp, Artificial
  probe
  misc_feature (1)..(25): SEQ ID NO: 5684; WAN024FHF; Start 113; Stop 137
tcagcaatcttgtcaaggttgtatt

SEQ ID NO: 418337 - DNA, 25 bp, Artificial
  probe
  misc_feature (1)..(25): SEQ ID NO: 5684; WAN024FHF; Start 112; Stop 136
ttcagcaatcttgtcaaggttgtat

SEQ ID NO: 418338 - DNA, 25 bp, Artificial
  probe
  misc_feature (1)..(25): SEQ ID NO: 5684; WAN024FHF; Start 111; Stop 135
cttcagcaatcttgtcaaggttgta

SEQ ID NO: 418339 - DNA, 25 bp, Artificial
  probe
  misc_feature (1)..(25): SEQ ID NO: 5684; WAN024FHF; Start 170; Stop 194
ccttgttctgcgatagagtcagtaa

SEQ ID NO: 418340 - DNA, 25 bp, Artificial
  probe
  misc_feature (1)..(25): SEQ ID NO: 5684; WAN024FHF; Start 167; Stop 191
ttaccttgttctgcgatagagtcag

SEQ ID NO: 418341 - DNA, 25 bp, Artificial
  probe
  misc_feature (1)..(25): SEQ ID NO: 5684; WAN024FHF; Start 209; Stop 233
attgggatgtttgtgtcttgagaaa

SEQ ID NO: 418342 - DNA, 25 bp, Artificial
  probe
  misc_feature (1)..(25): SEQ ID NO: 5684; WAN024FHF; Start 163; Stop 187
ttctttaccttgttctgcgatagag

SEQ ID NO: 418343 - DNA, 25 bp, Artificial
  probe
  misc_feature (1)..(25): SEQ ID NO: 5684; WAN024FHF; Start 162; Stop 186
cttctttaccttgttctgcgataga

SEQ ID NO: 418344 - DNA, 25 bp, Artificial
  probe
  misc_feature (1)..(25): SEQ ID NO: 5684; WAN024FHF; Start 206; Stop 230
tagattgggatgtttgtgtcttgag

SEQ ID NO: 418345 - DNA, 25 bp, Artificial
  probe
  misc_feature (1)..(25): SEQ ID NO: 5684; WAN024FHF; Start 161; Stop 185
ccttctttaccttgttctgcgatag

SEQ ID NO: 418346 - DNA, 25 bp, Artificial
  probe
  misc_feature (1)..(25): SEQ ID NO: 5684; WAN024FHF; Start 208; Stop 232
gattgggatgtttgtgtcttgagaa

SEQ ID NO: 418347 - DNA, 25 bp, Artificial
  probe
  misc_feature (1)..(25): SEQ ID NO: 5684; WAN024FHF; Start 205; Stop 229
gtagattgggatgtttgtgtcttga

SEQ ID NO: 418348 - DNA, 25 bp, Artificial
  probe
  misc_feature (1)..(25): SEQ ID NO: 5684; WAN024FHF; Start 105; Stop 129
ccaatccttcagcaatcttgtcaag

SEQ ID NO: 418349 - DNA, 25 bp, Artificial
  probe
  misc_feature (1)..(25): SEQ ID NO: 5684; WAN024FHF; Start 165; Stop 189
ctttaccttgttctgcgatagagtc

SEQ ID NO: 418350 - DNA, 25 bp, Artificial
  probe
  misc_feature (1)..(25): SEQ ID NO: 5684; WAN024FHF; Start 128; Stop 152
aggttgtatttcatcatgctgtagt

SEQ ID NO: 418351 - DNA, 25 bp, Artificial
  probe
  misc_feature (1)..(25): SEQ ID NO: 5684; WAN024FHF; Start 122; Stop 146
ttgtcaaggttgtatttcatcatgc

SEQ ID NO: 418352 - DNA, 25 bp, Artificial
  probe
  misc_feature (1)..(25): SEQ ID NO: 5684; WAN024FHF; Start 164; Stop 188
tctttaccttgttctgcgatagagt

SEQ ID NO: 418353 - DNA, 25 bp, Artificial
  probe
  misc_feature (1)..(25): SEQ ID NO: 5684; WAN024FHF; Start 126; Stop 150
caaggttgtatttcatcatgctgta

SEQ ID NO: 418354 - DNA, 25 bp, Artificial
  probe
  misc_feature (1)..(25): SEQ ID NO: 5684; WAN024FHF; Start 127; Stop 151
aaggttgtatttcatcatgctgtag

SEQ ID NO: 418355 - DNA, 25 bp, Artificial
  probe
  misc_feature (1)..(25): SEQ ID NO: 5684; WAN024FHF; Start 124; Stop 148
gtcaaggttgtatttcatcatgctg

SEQ ID NO: 418356 - DNA, 25 bp, Artificial
  probe
  misc_feature (1)..(25): SEQ ID NO: 5684; WAN024FHF; Start 166; Stop 190
tttaccttgttctgcgatagagtca

SEQ ID NO: 418357 - DNA, 25 bp, Artificial
  probe
  misc_feature (1)..(25): SEQ ID NO: 5684; WAN024FHF; Start 174; Stop 198
gttctgcgatagagtcagtaaagat

SEQ ID NO: 418358 - DNA, 25 bp, Artificial
  probe
  misc_feature (1)..(25): SEQ ID NO: 5684; WAN024FHF; Start 177; Stop 201
ctgcgatagagtcagtaaagatttg

SEQ ID NO: 418359 - DNA, 25 bp, Artificial
  probe
  misc_feature (1)..(25): SEQ ID NO: 5684; WAN024FHF; Start 176; Stop 200
tctgcgatagagtcagtaaagattt

SEQ ID NO: 418360 - DNA, 25 bp, Artificial
  probe
  misc_feature (1)..(25): SEQ ID NO: 5684; WAN024FHF; Start 175; Stop 199
ttctgcgatagagtcagtaaagatt

SEQ ID NO: 418361 - DNA, 25 bp, Artificial
  probe
  misc_feature (1)..(25): SEQ ID NO: 5684; WAN024FHF; Start 125; Stop 149
tcaaggttgtatttcatcatgctgt

SEQ ID NO: 418362 - DNA, 25 bp, Artificial
  probe
  misc_feature (1)..(25): SEQ ID NO: 5684; WAN024FHF; Start 123; Stop 147
tgtcaaggttgtatttcatcatgct

SEQ ID NO: 418363 - DNA, 25 bp, Artificial
  probe
  misc_feature (1)..(25): SEQ ID NO: 5684; WAN024FHF; Start 172; Stop 196
ttgttctgcgatagagtcagtaaag

SEQ ID NO: 418364 - DNA, 25 bp, Artificial
  probe
  misc_feature (1)..(25): SEQ ID NO: 5684; WAN024FHF; Start 171; Stop 195
cttgttctgcgatagagtcagtaaa

SEQ ID NO: 418365 - DNA, 25 bp, Artificial
  probe
  misc_feature (1)..(25): SEQ ID NO: 5684; WAN024FHF; Start 129; Stop 153
ggttgtatttcatcatgctgtagta

SEQ ID NO: 418366 - DNA, 25 bp, Artificial
  probe
  misc_feature (1)..(25): SEQ ID NO: 5684; WAN024FHF; Start 115; Stop 139
agcaatcttgtcaaggttgtatttc

SEQ ID NO: 418367 - DNA, 25 bp, Artificial
  probe
  misc_feature (1)..(25): SEQ ID NO: 5684; WAN024FHF; Start 116; Stop 140
gcaatcttgtcaaggttgtatttca

SEQ ID NO: 418368 - DNA, 25 bp, Artificial
  probe
  misc_feature (1)..(25): SEQ ID NO: 5684; WAN024FHF; Start 114; Stop 138
cagcaatcttgtcaaggttgtattt

SEQ ID NO: 418369 - DNA, 25 bp, Artificial
  probe
  misc_feature (1)..(25): SEQ ID NO: 5685; WAN024G7K; Start 151; Stop 175
ataaggagttcaagacttctaccaa

SEQ ID NO: 418370 - DNA, 25 bp, Artificial
  probe
  misc_feature (1)..(25): SEQ ID NO: 5685; WAN024G7K; Start 197; Stop 221
atagttggtgtgctgcttacaatat

SEQ ID NO: 418371 - DNA, 25 bp, Artificial
  probe
  misc_feature (1)..(25): SEQ ID NO: 5685; WAN024G7K; Start 196; Stop 220
aatagttggtgtgctgcttacaata

SEQ ID NO: 418372 - DNA, 25 bp, Artificial
  probe
  misc_feature (1)..(25): SEQ ID NO: 5685; WAN024G7K; Start 198; Stop 222
tagttggtgtgctgcttacaatatc

SEQ ID NO: 418373 - DNA, 25 bp, Artificial
  probe
  misc_feature (1)..(25): SEQ ID NO: 5685; WAN024G7K; Start 150; Stop 174
tataaggagttcaagacttctacca

SEQ ID NO: 418374 - DNA, 25 bp, Artificial
  probe
  misc_feature (1)..(25): SEQ ID NO: 5685; WAN024G7K; Start 110; Stop 134
ttcgtgtcataacagttatagaggc

SEQ ID NO: 418375 - DNA, 25 bp, Artificial
  probe
  misc_feature (1)..(25): SEQ ID NO: 5685; WAN024G7K; Start 112; Stop 136
cgtgtcataacagttatagaggcaa

SEQ ID NO: 418376 - DNA, 25 bp, Artificial
  probe
  misc_feature (1)..(25): SEQ ID NO: 5685; WAN024G7K; Start 192; Stop 216
aataaatagttggtgtgctgcttac

SEQ ID NO: 418377 - DNA, 25 bp, Artificial
  probe
  misc_feature (1)..(25): SEQ ID NO: 5685; WAN024G7K; Start 111; Stop 135
tcgtgtcataacagttatagaggca

SEQ ID NO: 418378 - DNA, 25 bp, Artificial
  probe
  misc_feature (1)..(25): SEQ ID NO: 5685; WAN024G7K; Start 191; Stop 215
aaataaatagttggtgtgctgctta

SEQ ID NO: 418379 - DNA, 25 bp, Artificial
  probe
  misc_feature (1)..(25): SEQ ID NO: 5685; WAN024G7K; Start 75; Stop 99
taaagatatggaggtgcttgaactt

SEQ ID NO: 418380 - DNA, 25 bp, Artificial
  probe
  misc_feature (1)..(25): SEQ ID NO: 5685; WAN024G7K; Start 74; Stop 98
ataaagatatggaggtgcttgaact

SEQ ID NO: 418381 - DNA, 25 bp, Artificial
  probe
  misc_feature (1)..(25): SEQ ID NO: 5685; WAN024G7K; Start 71; Stop 95
tgaataaagatatggaggtgcttga

SEQ ID NO: 418382 - DNA, 25 bp, Artificial
  probe
  misc_feature (1)..(25): SEQ ID NO: 5685; WAN024G7K; Start 73; Stop 97
aataaagatatggaggtgcttgaac

SEQ ID NO: 418383 - DNA, 25 bp, Artificial
  probe
  misc_feature (1)..(25): SEQ ID NO: 5685; WAN024G7K; Start 70; Stop 94
ttgaataaagatatggaggtgcttg

SEQ ID NO: 418384 - DNA, 25 bp, Artificial
  probe
  misc_feature (1)..(25): SEQ ID NO: 5685; WAN024G7K; Start 149; Stop 173
atataaggagttcaagacttctacc

SEQ ID NO: 418385 - DNA, 25 bp, Artificial
  probe
  misc_feature (1)..(25): SEQ ID NO: 5685; WAN024G7K; Start 72; Stop 96
gaataaagatatggaggtgcttgaa

SEQ ID NO: 418386 - DNA, 25 bp, Artificial
  probe
  misc_feature (1)..(25): SEQ ID NO: 5685; WAN024G7K; Start 153; Stop 177
aaggagttcaagacttctaccaaag

SEQ ID NO: 418387 - DNA, 25 bp, Artificial
  probe
  misc_feature (1)..(25): SEQ ID NO: 5685; WAN024G7K; Start 76; Stop 100
aaagatatggaggtgcttgaacttg

SEQ ID NO: 418388 - DNA, 25 bp, Artificial
  probe
  misc_feature (1)..(25): SEQ ID NO: 5685; WAN024G7K; Start 152; Stop 176
taaggagttcaagacttctaccaaa

SEQ ID NO: 418389 - DNA, 25 bp, Artificial
  probe
  misc_feature (1)..(25): SEQ ID NO: 5685; WAN024G7K; Start 68; Stop 92
atttgaataaagatatggaggtgct

SEQ ID NO: 418390 - DNA, 25 bp, Artificial
  probe
  misc_feature (1)..(25): SEQ ID NO: 5685; WAN024G7K; Start 69; Stop 93
tttgaataaagatatggaggtgctt

SEQ ID NO: 418391 - DNA, 25 bp, Artificial
  probe
  misc_feature (1)..(25): SEQ ID NO: 5685; WAN024G7K; Start 79; Stop 103
gatatggaggtgcttgaacttgctt

SEQ ID NO: 418392 - DNA, 25 bp, Artificial
  probe
  misc_feature (1)..(25): SEQ ID NO: 5685; WAN024G7K; Start 67; Stop 91
catttgaataaagatatggaggtgc

SEQ ID NO: 418393 - DNA, 25 bp, Artificial
  probe
  misc_feature (1)..(25): SEQ ID NO: 5685; WAN024G7K; Start 193; Stop 217
ataaatagttggtgtgctgcttaca

SEQ ID NO: 418394 - DNA, 25 bp, Artificial
  probe
  misc_feature (1)..(25): SEQ ID NO: 5685; WAN024G7K; Start 77; Stop 101
aagatatggaggtgcttgaacttgc

SEQ ID NO: 418395 - DNA, 25 bp, Artificial
  probe
  misc_feature (1)..(25): SEQ ID NO: 5685; WAN024G7K; Start 194; Stop 218
taaatagttggtgtgctgcttacaa

SEQ ID NO: 418396 - DNA, 25 bp, Artificial
  probe
  misc_feature (1)..(25): SEQ ID NO: 5685; WAN024G7K; Start 80; Stop 104
atatggaggtgcttgaacttgcttg

SEQ ID NO: 418397 - DNA, 25 bp, Artificial
  probe
  misc_feature (1)..(25): SEQ ID NO: 5685; WAN024G7K; Start 227; Stop 251
ttaataatggatattgtaagcagca

SEQ ID NO: 418398 - DNA, 25 bp, Artificial
  probe
  misc_feature (1)..(25): SEQ ID NO: 5685; WAN024G7K; Start 195; Stop 219
aaatagttggtgtgctgcttacaat

SEQ ID NO: 418399 - DNA, 25 bp, Artificial
  probe
  misc_feature (1)..(25): SEQ ID NO: 5685; WAN024G7K; Start 97; Stop 121
cttgcttgttggtttcgtgtcataa

SEQ ID NO: 418400 - DNA, 25 bp, Artificial
  probe
  misc_feature (1)..(25): SEQ ID NO: 5685; WAN024G7K; Start 202; Stop 226
tggtgtgctgcttacaatatccatt

SEQ ID NO: 418401 - DNA, 25 bp, Artificial
  probe
  misc_feature (1)..(25): SEQ ID NO: 5685; WAN024G7K; Start 201; Stop 225
ttggtgtgctgcttacaatatccat

SEQ ID NO: 418402 - DNA, 25 bp, Artificial
  probe
  misc_feature (1)..(25): SEQ ID NO: 5686; WAN024D73; Start 95; Stop 119
aatgtcagaagcaggtcataagttt

SEQ ID NO: 418403 - DNA, 25 bp, Artificial
  probe
  misc_feature (1)..(25): SEQ ID NO: 5686; WAN024D73; Start 94; Stop 118
aaatgtcagaagcaggtcataagtt

SEQ ID NO: 418404 - DNA, 25 bp, Artificial
  probe
  misc_feature (1)..(25): SEQ ID NO: 5686; WAN024D73; Start 91; Stop 115
ttcaaatgtcagaagcaggtcataa

SEQ ID NO: 418405 - DNA, 25 bp, Artificial
  probe
  misc_feature (1)..(25): SEQ ID NO: 5686; WAN024D73; Start 92; Stop 116
tcaaatgtcagaagcaggtcataag

SEQ ID NO: 418406 - DNA, 25 bp, Artificial
  probe
  misc_feature (1)..(25): SEQ ID NO: 5686; WAN024D73; Start 93; Stop 117
caaatgtcagaagcaggtcataagt

SEQ ID NO: 418407 - DNA, 25 bp, Artificial
  probe
  misc_feature (1)..(25): SEQ ID NO: 5686; WAN024D73; Start 90; Stop 114
gttcaaatgtcagaagcaggtcata

SEQ ID NO: 418408 - DNA, 25 bp, Artificial
  probe
  misc_feature (1)..(25): SEQ ID NO: 5686; WAN024D73; Start 89; Stop 113
tgttcaaatgtcagaagcaggtcat

SEQ ID NO: 418409 - DNA, 25 bp, Artificial
  probe
  misc_feature (1)..(25): SEQ ID NO: 5686; WAN024D73; Start 84; Stop 108
agaggtgttcaaatgtcagaagcag

SEQ ID NO: 418410 - DNA, 25 bp, Artificial
  probe
  misc_feature (1)..(25): SEQ ID NO: 5686; WAN024D73; Start 83; Stop 107
cagaggtgttcaaatgtcagaagca

SEQ ID NO: 418411 - DNA, 25 bp, Artificial
  probe
  misc_feature (1)..(25): SEQ ID NO: 5686; WAN024D73; Start 97; Stop 121
tgtcagaagcaggtcataagttttc

SEQ ID NO: 418412 - DNA, 25 bp, Artificial
  probe
  misc_feature (1)..(25): SEQ ID NO: 5686; WAN024D73; Start 88; Stop 112
gtgttcaaatgtcagaagcaggtca

SEQ ID NO: 418413 - DNA, 25 bp, Artificial
  probe
  misc_feature (1)..(25): SEQ ID NO: 5686; WAN024D73; Start 82; Stop 106
acagaggtgttcaaatgtcagaagc

SEQ ID NO: 418414 - DNA, 25 bp, Artificial
  probe
  misc_feature (1)..(25): SEQ ID NO: 5686; WAN024D73; Start 80; Stop 104
aaacagaggtgttcaaatgtcagaa

SEQ ID NO: 418415 - DNA, 25 bp, Artificial
  probe
  misc_feature (1)..(25): SEQ ID NO: 5686; WAN024D73; Start 85; Stop 109
gaggtgttcaaatgtcagaagcagg

SEQ ID NO: 418416 - DNA, 25 bp, Artificial
  probe
  misc_feature (1)..(25): SEQ ID NO: 5686; WAN024D73; Start 81; Stop 105
aacagaggtgttcaaatgtcagaag

SEQ ID NO: 418417 - DNA, 25 bp, Artificial
  probe
  misc_feature (1)..(25): SEQ ID NO: 5686; WAN024D73; Start 87; Stop 111
ggtgttcaaatgtcagaagcaggtc

SEQ ID NO: 418418 - DNA, 25 bp, Artificial
  probe
  misc_feature (1)..(25): SEQ ID NO: 5686; WAN024D73; Start 99; Stop 123
tcagaagcaggtcataagttttcta

SEQ ID NO: 418419 - DNA, 25 bp, Artificial
  probe
  misc_feature (1)..(25): SEQ ID NO: 5686; WAN024D73; Start 86; Stop 110
aggtgttcaaatgtcagaagcaggt

SEQ ID NO: 418420 - DNA, 25 bp, Artificial
  probe
  misc_feature (1)..(25): SEQ ID NO: 5686; WAN024D73; Start 98; Stop 122
gtcagaagcaggtcataagttttct

SEQ ID NO: 418421 - DNA, 25 bp, Artificial
  probe
  misc_feature (1)..(25): SEQ ID NO: 5686; WAN024D73; Start 79; Stop 103
aaaacagaggtgttcaaatgtcaga

SEQ ID NO: 418422 - DNA, 25 bp, Artificial
  probe
  misc_feature (1)..(25): SEQ ID NO: 5686; WAN024D73; Start 2; Stop 26
tgtatgcttttgattctagtttatc

SEQ ID NO: 418423 - DNA, 25 bp, Artificial
  probe
  misc_feature (1)..(25): SEQ ID NO: 5686; WAN024D73; Start 43; Stop 67
ttgtcagataatatcattttgtgtt

SEQ ID NO: 418424 - DNA, 25 bp, Artificial
  probe
  misc_feature (1)..(25): SEQ ID NO: 5686; WAN024D73; Start 42; Stop 66
attgtcagataatatcattttgtgt

SEQ ID NO: 418425 - DNA, 25 bp, Artificial
  probe
  misc_feature (1)..(25): SEQ ID NO: 5686; WAN024D73; Start 1; Stop 25
ttgtatgcttttgattctagtttat

SEQ ID NO: 418426 - DNA, 25 bp, Artificial
  probe
  misc_feature (1)..(25): SEQ ID NO: 5686; WAN024D73; Start 3; Stop 27
gtatgcttttgattctagtttatca

SEQ ID NO: 418427 - DNA, 25 bp, Artificial
  probe
  misc_feature (1)..(25): SEQ ID NO: 5688; WAN024CKQ; Start 478; Stop 502
tatctatcaggtcaatctctcacag

SEQ ID NO: 418428 - DNA, 25 bp, Artificial
  probe
  misc_feature (1)..(25): SEQ ID NO: 5688; WAN024CKQ; Start 437; Stop 461
ggtatgttgagatagaggttcttcc

SEQ ID NO: 418429 - DNA, 25 bp, Artificial
  probe
  misc_feature (1)..(25): SEQ ID NO: 5688; WAN024CKQ; Start 1154; Stop 1178
tattaacaatggatacgattcagcc

SEQ ID NO: 418430 - DNA, 25 bp, Artificial
  probe
  misc_feature (1)..(25): SEQ ID NO: 5688; WAN024CKQ; Start 898; Stop 922
ttacgacatctcttattaccagacc

SEQ ID NO: 418431 - DNA, 25 bp, Artificial
  probe
  misc_feature (1)..(25): SEQ ID NO: 5688; WAN024CKQ; Start 479; Stop 503
atctatcaggtcaatctctcacaga

SEQ ID NO: 418432 - DNA, 25 bp, Artificial
  probe
  misc_feature (1)..(25): SEQ ID NO: 5688; WAN024CKQ; Start 902; Stop 926
gacatctcttattaccagaccagaa

SEQ ID NO: 418433 - DNA, 25 bp, Artificial
  probe
  misc_feature (1)..(25): SEQ ID NO: 5688; WAN024CKQ; Start 899; Stop 923
tacgacatctcttattaccagacca

SEQ ID NO: 418434 - DNA, 25 bp, Artificial
  probe
  misc_feature (1)..(25): SEQ ID NO: 5688; WAN024CKQ; Start 436; Stop 460
cggtatgttgagatagaggttcttc

SEQ ID NO: 418435 - DNA, 25 bp, Artificial
  probe
  misc_feature (1)..(25): SEQ ID NO: 5688; WAN024CKQ; Start 435; Stop 459
tcggtatgttgagatagaggttctt

SEQ ID NO: 418436 - DNA, 25 bp, Artificial
  probe
  misc_feature (1)..(25): SEQ ID NO: 5688; WAN024CKQ; Start 1053; Stop 1077
ctacgcttattatcaggtcagtgaa

SEQ ID NO: 418437 - DNA, 25 bp, Artificial
  probe
  misc_feature (1)..(25): SEQ ID NO: 5688; WAN024CKQ; Start 1108; Stop 1132
gaacttagaccactagaagccatta

SEQ ID NO: 418438 - DNA, 25 bp, Artificial
  probe
  misc_feature (1)..(25): SEQ ID NO: 5688; WAN024CKQ; Start 1109; Stop 1133
aacttagaccactagaagccattaa

SEQ ID NO: 418439 - DNA, 25 bp, Artificial
  probe
  misc_feature (1)..(25): SEQ ID NO: 5688; WAN024CKQ; Start 477; Stop 501
atatctatcaggtcaatctctcaca

SEQ ID NO: 418440 - DNA, 25 bp, Artificial
  probe
  misc_feature (1)..(25): SEQ ID NO: 5688; WAN024CKQ; Start 901; Stop 925
cgacatctcttattaccagaccaga

SEQ ID NO: 418441 - DNA, 25 bp, Artificial
  probe
  misc_feature (1)..(25): SEQ ID NO: 5688; WAN024CKQ; Start 434; Stop 458
gtcggtatgttgagatagaggttct

SEQ ID NO: 418442 - DNA, 25 bp, Artificial
  probe
  misc_feature (1)..(25): SEQ ID NO: 5688; WAN024CKQ; Start 214; Stop 238
ttgagttactatgatctgcgacatt

SEQ ID NO: 418443 - DNA, 25 bp, Artificial
  probe
  misc_feature (1)..(25): SEQ ID NO: 5688; WAN024CKQ; Start 1107; Stop 1131
agaacttagaccactagaagccatt

SEQ ID NO: 418444 - DNA, 25 bp, Artificial
  probe
  misc_feature (1)..(25): SEQ ID NO: 5688; WAN024CKQ; Start 1052; Stop 1076
actacgcttattatcaggtcagtga

SEQ ID NO: 418445 - DNA, 25 bp, Artificial
  probe
  misc_feature (1)..(25): SEQ ID NO: 5688; WAN024CKQ; Start 900; Stop 924
acgacatctcttattaccagaccag

SEQ ID NO: 418446 - DNA, 25 bp, Artificial
  probe
  misc_feature (1)..(25): SEQ ID NO: 5688; WAN024CKQ; Start 1153; Stop 1177
ctattaacaatggatacgattcagc

SEQ ID NO: 418447 - DNA, 25 bp, Artificial
  probe
  misc_feature (1)..(25): SEQ ID NO: 5688; WAN024CKQ; Start 427; Stop 451
ttgactggtcggtatgttgagatag

SEQ ID NO: 418448 - DNA, 25 bp, Artificial
  probe
  misc_feature (1)..(25): SEQ ID NO: 5688; WAN024CKQ; Start 426; Stop 450
cttgactggtcggtatgttgagata

SEQ ID NO: 418449 - DNA, 25 bp, Artificial
  probe
  misc_feature (1)..(25): SEQ ID NO: 5688; WAN024CKQ; Start 1106; Stop 1130
gagaacttagaccactagaagccat

SEQ ID NO: 418450 - DNA, 25 bp, Artificial
  probe
  misc_feature (1)..(25): SEQ ID NO: 5688; WAN024CKQ; Start 1104; Stop 1128
aagagaacttagaccactagaagcc

SEQ ID NO: 418451 - DNA, 25 bp, Artificial
  probe
  misc_feature (1)..(25): SEQ ID NO: 5688; WAN024CKQ; Start 331; Stop 355
gaactggtagcagatagtctattca

SEQ ID NO: 418452 - DNA, 25 bp, Artificial
  probe
  misc_feature (1)..(25): SEQ ID NO: 5688; WAN024CKQ; Start 330; Stop 354
tgaactggtagcagatagtctattc

SEQ ID NO: 418453 - DNA, 25 bp, Artificial
  probe
  misc_feature (1)..(25): SEQ ID NO: 5688; WAN024CKQ; Start 433; Stop 457
ggtcggtatgttgagatagaggttc

SEQ ID NO: 418454 - DNA, 25 bp, Artificial
  probe
  misc_feature (1)..(25): SEQ ID NO: 5688; WAN024CKQ; Start 429; Stop 453
gactggtcggtatgttgagatagag

SEQ ID NO: 418455 - DNA, 25 bp, Artificial
  probe
  misc_feature (1)..(25): SEQ ID NO: 5688; WAN024CKQ; Start 333; Stop 357
actggtagcagatagtctattcatc

SEQ ID NO: 418456 - DNA, 25 bp, Artificial
  probe
  misc_feature (1)..(25): SEQ ID NO: 5688; WAN024CKQ; Start 329; Stop 353
ttgaactggtagcagatagtctatt

SEQ ID NO: 418457 - DNA, 25 bp, Artificial
  probe
  misc_feature (1)..(25): SEQ ID NO: 5688; WAN024CKQ; Start 438; Stop 462
gtatgttgagatagaggttcttcct

SEQ ID NO: 418458 - DNA, 25 bp, Artificial
  probe
  misc_feature (1)..(25): SEQ ID NO: 5688; WAN024CKQ; Start 332; Stop 356
aactggtagcagatagtctattcat

SEQ ID NO: 418459 - DNA, 25 bp, Artificial
  probe
  misc_feature (1)..(25): SEQ ID NO: 5688; WAN024CKQ; Start 1050; Stop 1074
ccactacgcttattatcaggtcagt

SEQ ID NO: 418460 - DNA, 25 bp, Artificial
  probe
  misc_feature (1)..(25): SEQ ID NO: 5689; WAN024DLA; Start 482; Stop 506
atatcgtcatcaatgttctcttcct

SEQ ID NO: 418461 - DNA, 25 bp, Artificial
  probe
  misc_feature (1)..(25): SEQ ID NO: 5689; WAN024DLA; Start 483; Stop 507
tatcgtcatcaatgttctcttccta

SEQ ID NO: 418462 - DNA, 25 bp, Artificial
  probe
  misc_feature (1)..(25): SEQ ID NO: 5689; WAN024DLA; Start 484; Stop 508
atcgtcatcaatgttctcttcctag

SEQ ID NO: 418463 - DNA, 25 bp, Artificial
  probe
  misc_feature (1)..(25): SEQ ID NO: 5689; WAN024DLA; Start 224; Stop 248
atagagtagcagaagcatctcattc

SEQ ID NO: 418464 - DNA, 25 bp, Artificial
  probe
  misc_feature (1)..(25): SEQ ID NO: 5689; WAN024DLA; Start 481; Stop 505
tatatcgtcatcaatgttctcttcc

SEQ ID NO: 418465 - DNA, 25 bp, Artificial
  probe
  misc_feature (1)..(25): SEQ ID NO: 5689; WAN024DLA; Start 223; Stop 247
tatagagtagcagaagcatctcatt

SEQ ID NO: 418466 - DNA, 25 bp, Artificial
  probe
  misc_feature (1)..(25): SEQ ID NO: 5689; WAN024DLA; Start 516; Stop 540
cttctataagatgtggcgacaacag

SEQ ID NO: 418467 - DNA, 25 bp, Artificial
  probe
  misc_feature (1)..(25): SEQ ID NO: 5689; WAN024DLA; Start 518; Stop 542
tctataagatgtggcgacaacagaa

SEQ ID NO: 418468 - DNA, 25 bp, Artificial
  probe
  misc_feature (1)..(25): SEQ ID NO: 5689; WAN024DLA; Start 517; Stop 541
ttctataagatgtggcgacaacaga

SEQ ID NO: 418469 - DNA, 25 bp, Artificial
  probe
  misc_feature (1)..(25): SEQ ID NO: 5689; WAN024DLA; Start 479; Stop 503
tctatatcgtcatcaatgttctctt

SEQ ID NO: 418470 - DNA, 25 bp, Artificial
  probe
  misc_feature (1)..(25): SEQ ID NO: 5689; WAN024DLA; Start 478; Stop 502
ttctatatcgtcatcaatgttctct

SEQ ID NO: 418471 - DNA, 25 bp, Artificial
  probe
  misc_feature (1)..(25): SEQ ID NO: 5689; WAN024DLA; Start 485; Stop 509
tcgtcatcaatgttctcttcctagc

SEQ ID NO: 418472 - DNA, 25 bp, Artificial
  probe
  misc_feature (1)..(25): SEQ ID NO: 5689; WAN024DLA; Start 480; Stop 504
ctatatcgtcatcaatgttctcttc

SEQ ID NO: 418473 - DNA, 25 bp, Artificial
  probe
  misc_feature (1)..(25): SEQ ID NO: 5689; WAN024DLA; Start 257; Stop 281
atgttgctttgattgtgctatctac

SEQ ID NO: 418474 - DNA, 25 bp, Artificial
  probe
  misc_feature (1)..(25): SEQ ID NO: 5689; WAN024DLA; Start 219; Stop 243
tacctatagagtagcagaagcatct

SEQ ID NO: 418475 - DNA, 25 bp, Artificial
  probe
  misc_feature (1)..(25): SEQ ID NO: 5689; WAN024DLA; Start 218; Stop 242
atacctatagagtagcagaagcatc

SEQ ID NO: 418476 - DNA, 25 bp, Artificial
  probe
  misc_feature (1)..(25): SEQ ID NO: 5689; WAN024DLA; Start 79; Stop 103
ttgctaatcttgtctgcccttattt

SEQ ID NO: 418477 - DNA, 25 bp, Artificial
  probe
  misc_feature (1)..(25): SEQ ID NO: 5689; WAN024DLA; Start 258; Stop 282
tgttgctttgattgtgctatctact

SEQ ID NO: 418478 - DNA, 25 bp, Artificial
  probe
  misc_feature (1)..(25): SEQ ID NO: 5689; WAN024DLA; Start 256; Stop 280
aatgttgctttgattgtgctatcta

SEQ ID NO: 418479 - DNA, 25 bp, Artificial
  probe
  misc_feature (1)..(25): SEQ ID NO: 5689; WAN024DLA; Start 255; Stop 279
taatgttgctttgattgtgctatct

SEQ ID NO: 418480 - DNA, 25 bp, Artificial
  probe
  misc_feature (1)..(25): SEQ ID NO: 5689; WAN024DLA; Start 259; Stop 283
gttgctttgattgtgctatctacta

SEQ ID NO: 418481 - DNA, 25 bp, Artificial
  probe
  misc_feature (1)..(25): SEQ ID NO: 5689; WAN024DLA; Start 81; Stop 105
gctaatcttgtctgcccttatttca

SEQ ID NO: 418482 - DNA, 25 bp, Artificial
  probe
  misc_feature (1)..(25): SEQ ID NO: 5689; WAN024DLA; Start 80; Stop 104
tgctaatcttgtctgcccttatttc

SEQ ID NO: 418483 - DNA, 25 bp, Artificial
  probe
  misc_feature (1)..(25): SEQ ID NO: 5689; WAN024DLA; Start 500; Stop 524
tcttcctagcccttgtcttctataa

SEQ ID NO: 418484 - DNA, 25 bp, Artificial
  probe
  misc_feature (1)..(25): SEQ ID NO: 5689; WAN024DLA; Start 499; Stop 523
ctcttcctagcccttgtcttctata

SEQ ID NO: 418485 - DNA, 25 bp, Artificial
  probe
  misc_feature (1)..(25): SEQ ID NO: 5689; WAN024DLA; Start 222; Stop 246
ctatagagtagcagaagcatctcat

SEQ ID NO: 418486 - DNA, 25 bp, Artificial
  probe
  misc_feature (1)..(25): SEQ ID NO: 5689; WAN024DLA; Start 227; Stop 251
gagtagcagaagcatctcattctat

SEQ ID NO: 418487 - DNA, 25 bp, Artificial
  probe
  misc_feature (1)..(25): SEQ ID NO: 5689; WAN024DLA; Start 501; Stop 525
cttcctagcccttgtcttctataag

SEQ ID NO: 418488 - DNA, 25 bp, Artificial
  probe
  misc_feature (1)..(25): SEQ ID NO: 5689; WAN024DLA; Start 254; Stop 278
ttaatgttgctttgattgtgctatc

SEQ ID NO: 418489 - DNA, 25 bp, Artificial
  probe
  misc_feature (1)..(25): SEQ ID NO: 5689; WAN024DLA; Start 228; Stop 252
agtagcagaagcatctcattctatt

SEQ ID NO: 418490 - DNA, 25 bp, Artificial
  probe
  misc_feature (1)..(25): SEQ ID NO: 5689; WAN024DLA; Start 221; Stop 245
cctatagagtagcagaagcatctca

SEQ ID NO: 418491 - DNA, 25 bp, Artificial
  probe
  misc_feature (1)..(25): SEQ ID NO: 5689; WAN024DLA; Start 220; Stop 244
acctatagagtagcagaagcatctc

SEQ ID NO: 418492 - DNA, 25 bp, Artificial
  probe
  misc_feature (1)..(25): SEQ ID NO: 5689; WAN024DLA; Start 226; Stop 250
agagtagcagaagcatctcattcta

SEQ ID NO: 418493 - DNA, 25 bp, Artificial
  probe
  misc_feature (1)..(25): SEQ ID NO: 5690; WAN0249VT; Start 9; Stop 33
tcctatgtaataagcgtatccaact

SEQ ID NO: 418494 - DNA, 25 bp, Artificial
  probe
  misc_feature (1)..(25): SEQ ID NO: 5690; WAN0249VT; Start 72; Stop 96
ttcatcctactcatccatcactctc

SEQ ID NO: 418495 - DNA, 25 bp, Artificial
  probe
  misc_feature (1)..(25): SEQ ID NO: 5690; WAN0249VT; Start 8; Stop 32
ctcctatgtaataagcgtatccaac

SEQ ID NO: 418496 - DNA, 25 bp, Artificial
  probe
  misc_feature (1)..(25): SEQ ID NO: 5690; WAN0249VT; Start 7; Stop 31
tctcctatgtaataagcgtatccaa

SEQ ID NO: 418497 - DNA, 25 bp, Artificial
  probe
  misc_feature (1)..(25): SEQ ID NO: 5690; WAN0249VT; Start 6; Stop 30
ttctcctatgtaataagcgtatcca

SEQ ID NO: 418498 - DNA, 25 bp, Artificial
  probe
  misc_feature (1)..(25): SEQ ID NO: 5690; WAN0249VT; Start 10; Stop 34
cctatgtaataagcgtatccaactt

SEQ ID NO: 418499 - DNA, 25 bp, Artificial
  probe
  misc_feature (1)..(25): SEQ ID NO: 5690; WAN0249VT; Start 79; Stop 103
tactcatccatcactctcctctgtt

SEQ ID NO: 418500 - DNA, 25 bp, Artificial
  probe
  misc_feature (1)..(25): SEQ ID NO: 5690; WAN0249VT; Start 5; Stop 29
attctcctatgtaataagcgtatcc

SEQ ID NO: 418501 - DNA, 25 bp, Artificial
  probe
  misc_feature (1)..(25): SEQ ID NO: 5690; WAN0249VT; Start 75; Stop 99
atcctactcatccatcactctcctc

SEQ ID NO: 418502 - DNA, 25 bp, Artificial
  probe
  misc_feature (1)..(25): SEQ ID NO: 5690; WAN0249VT; Start 11; Stop 35
ctatgtaataagcgtatccaacttg

SEQ ID NO: 418503 - DNA, 25 bp, Artificial
  probe
  misc_feature (1)..(25): SEQ ID NO: 5690; WAN0249VT; Start 78; Stop 102
ctactcatccatcactctcctctgt

SEQ ID NO: 418504 - DNA, 25 bp, Artificial
  probe
  misc_feature (1)..(25): SEQ ID NO: 5690; WAN0249VT; Start 74; Stop 98
catcctactcatccatcactctcct

SEQ ID NO: 418505 - DNA, 25 bp, Artificial
  probe
  misc_feature (1)..(25): SEQ ID NO: 5690; WAN0249VT; Start 73; Stop 97
tcatcctactcatccatcactctcc

SEQ ID NO: 418506 - DNA, 25 bp, Artificial
  probe
  misc_feature (1)..(25): SEQ ID NO: 5690; WAN0249VT; Start 1; Stop 25
ttgtattctcctatgtaataagcgt

SEQ ID NO: 418507 - DNA, 25 bp, Artificial
  probe
  misc_feature (1)..(25): SEQ ID NO: 5690; WAN0249VT; Start 70; Stop 94
atttcatcctactcatccatcactc

SEQ ID NO: 418508 - DNA, 25 bp, Artificial
  probe
  misc_feature (1)..(25): SEQ ID NO: 5690; WAN0249VT; Start 69; Stop 93
catttcatcctactcatccatcact

SEQ ID NO: 418509 - DNA, 25 bp, Artificial
  probe
  misc_feature (1)..(25): SEQ ID NO: 5690; WAN0249VT; Start 68; Stop 92
tcatttcatcctactcatccatcac

SEQ ID NO: 418510 - DNA, 25 bp, Artificial
  probe
  misc_feature (1)..(25): SEQ ID NO: 5690; WAN0249VT; Start 67; Stop 91
ttcatttcatcctactcatccatca

SEQ ID NO: 418511 - DNA, 25 bp, Artificial
  probe
  misc_feature (1)..(25): SEQ ID NO: 5690; WAN0249VT; Start 62; Stop 86
gcgatttcatttcatcctactcatc

SEQ ID NO: 418512 - DNA, 25 bp, Artificial
  probe
  misc_feature (1)..(25): SEQ ID NO: 5690; WAN0249VT; Start 71; Stop 95
tttcatcctactcatccatcactct

SEQ ID NO: 418513 - DNA, 25 bp, Artificial
  probe
  misc_feature (1)..(25): SEQ ID NO: 5690; WAN0249VT; Start 63; Stop 87
cgatttcatttcatcctactcatcc

SEQ ID NO: 418514 - DNA, 25 bp, Artificial
  probe
  misc_feature (1)..(25): SEQ ID NO: 5690; WAN0249VT; Start 61; Stop 85
tgcgatttcatttcatcctactcat

SEQ ID NO: 418515 - DNA, 25 bp, Artificial
  probe
  misc_feature (1)..(25): SEQ ID NO: 5690; WAN0249VT; Start 55; Stop 79
cttgtatgcgatttcatttcatcct

SEQ ID NO: 418516 - DNA, 25 bp, Artificial
  probe
  misc_feature (1)..(25): SEQ ID NO: 5690; WAN0249VT; Start 54; Stop 78
tcttgtatgcgatttcatttcatcc

SEQ ID NO: 418517 - DNA, 25 bp, Artificial
  probe
  misc_feature (1)..(25): SEQ ID NO: 5690; WAN0249VT; Start 57; Stop 81
tgtatgcgatttcatttcatcctac

SEQ ID NO: 418518 - DNA, 25 bp, Artificial
  probe
  misc_feature (1)..(25): SEQ ID NO: 5690; WAN0249VT; Start 60; Stop 84
atgcgatttcatttcatcctactca

SEQ ID NO: 418519 - DNA, 25 bp, Artificial
  probe
  misc_feature (1)..(25): SEQ ID NO: 5690; WAN0249VT; Start 58; Stop 82
gtatgcgatttcatttcatcctact

SEQ ID NO: 418520 - DNA, 25 bp, Artificial
  probe
  misc_feature (1)..(25): SEQ ID NO: 5690; WAN0249VT; Start 41; Stop 65
tgagttctttatttcttgtatgcga

SEQ ID NO: 418521 - DNA, 25 bp, Artificial
  probe
  misc_feature (1)..(25): SEQ ID NO: 5690; WAN0249VT; Start 59; Stop 83
tatgcgatttcatttcatcctactc

SEQ ID NO: 418522 - DNA, 25 bp, Artificial
  probe
  misc_feature (1)..(25): SEQ ID NO: 5690; WAN0249VT; Start 66; Stop 90
tttcatttcatcctactcatccatc

SEQ ID NO: 418523 - DNA, 25 bp, Artificial
  probe
  misc_feature (1)..(25): SEQ ID NO: 5690; WAN0249VT; Start 56; Stop 80
ttgtatgcgatttcatttcatccta

SEQ ID NO: 418524 - DNA, 25 bp, Artificial
  probe
  misc_feature (1)..(25): SEQ ID NO: 5690; WAN0249VT; Start 64; Stop 88
gatttcatttcatcctactcatcca

SEQ ID NO: 418525 - DNA, 25 bp, Artificial
  probe
  misc_feature (1)..(25): SEQ ID NO: 5690; WAN0249VT; Start 77; Stop 101
cctactcatccatcactctcctctg

SEQ ID NO: 418526 - DNA, 25 bp, Artificial
  probe
  misc_feature (1)..(25): SEQ ID NO: 5691; WAN024FXX; Start 255; Stop 279
cttctctcactgtctaggagtctat

SEQ ID NO: 418527 - DNA, 25 bp, Artificial
  probe
  misc_feature (1)..(25): SEQ ID NO: 5691; WAN024FXX; Start 258; Stop 282
ctctcactgtctaggagtctatgaa

SEQ ID NO: 418528 - DNA, 25 bp, Artificial
  probe
  misc_feature (1)..(25): SEQ ID NO: 5691; WAN024FXX; Start 256; Stop 280
ttctctcactgtctaggagtctatg

SEQ ID NO: 418529 - DNA, 25 bp, Artificial
  probe
  misc_feature (1)..(25): SEQ ID NO: 5691; WAN024FXX; Start 257; Stop 281
tctctcactgtctaggagtctatga

SEQ ID NO: 418530 - DNA, 25 bp, Artificial
  probe
  misc_feature (1)..(25): SEQ ID NO: 5691; WAN024FXX; Start 124; Stop 148
gttcacaactacatccatgtcaata

SEQ ID NO: 418531 - DNA, 25 bp, Artificial
  probe
  misc_feature (1)..(25): SEQ ID NO: 5691; WAN024FXX; Start 34; Stop 58
ctctttcttgtctcttgtcctacta

SEQ ID NO: 418532 - DNA, 25 bp, Artificial
  probe
  misc_feature (1)..(25): SEQ ID NO: 5691; WAN024FXX; Start 125; Stop 149
ttcacaactacatccatgtcaataa

SEQ ID NO: 418533 - DNA, 25 bp, Artificial
  probe
  misc_feature (1)..(25): SEQ ID NO: 5691; WAN024FXX; Start 128; Stop 152
acaactacatccatgtcaataatca

SEQ ID NO: 418534 - DNA, 25 bp, Artificial
  probe
  misc_feature (1)..(25): SEQ ID NO: 5691; WAN024FXX; Start 126; Stop 150
tcacaactacatccatgtcaataat

SEQ ID NO: 418535 - DNA, 25 bp, Artificial
  probe
  misc_feature (1)..(25): SEQ ID NO: 5691; WAN024FXX; Start 254; Stop 278
gcttctctcactgtctaggagtcta

SEQ ID NO: 418536 - DNA, 25 bp, Artificial
  probe
  misc_feature (1)..(25): SEQ ID NO: 5691; WAN024FXX; Start 1139; Stop 1163
agaactttgacctcccttatgatat

SEQ ID NO: 418537 - DNA, 25 bp, Artificial
  probe
  misc_feature (1)..(25): SEQ ID NO: 5691; WAN024FXX; Start 1138; Stop 1162
aagaactttgacctcccttatgata

SEQ ID NO: 418538 - DNA, 25 bp, Artificial
  probe
  misc_feature (1)..(25): SEQ ID NO: 5691; WAN024FXX; Start 127; Stop 151
cacaactacatccatgtcaataatc

SEQ ID NO: 418539 - DNA, 25 bp, Artificial
  probe
  misc_feature (1)..(25): SEQ ID NO: 5691; WAN024FXX; Start 35; Stop 59
tctttcttgtctcttgtcctactat

SEQ ID NO: 418540 - DNA, 25 bp, Artificial
  probe
  misc_feature (1)..(25): SEQ ID NO: 5691; WAN024FXX; Start 33; Stop 57
cctctttcttgtctcttgtcctact

SEQ ID NO: 418541 - DNA, 25 bp, Artificial
  probe
  misc_feature (1)..(25): SEQ ID NO: 5691; WAN024FXX; Start 1132; Stop 1156
attcataagaactttgacctccctt

SEQ ID NO: 418542 - DNA, 25 bp, Artificial
  probe
  misc_feature (1)..(25): SEQ ID NO: 5691; WAN024FXX; Start 1131; Stop 1155
cattcataagaactttgacctccct

SEQ ID NO: 418543 - DNA, 25 bp, Artificial
  probe
  misc_feature (1)..(25): SEQ ID NO: 5691; WAN024FXX; Start 803; Stop 827
aagttctcctacagaatcttctcaa

SEQ ID NO: 418544 - DNA, 25 bp, Artificial
  probe
  misc_feature (1)..(25): SEQ ID NO: 5691; WAN024FXX; Start 263; Stop 287
actgtctaggagtctatgaaattgc

SEQ ID NO: 418545 - DNA, 25 bp, Artificial
  probe
  misc_feature (1)..(25): SEQ ID NO: 5691; WAN024FXX; Start 259; Stop 283
tctcactgtctaggagtctatgaaa

SEQ ID NO: 418546 - DNA, 25 bp, Artificial
  probe
  misc_feature (1)..(25): SEQ ID NO: 5691; WAN024FXX; Start 1130; Stop 1154
ccattcataagaactttgacctccc

SEQ ID NO: 418547 - DNA, 25 bp, Artificial
  probe
  misc_feature (1)..(25): SEQ ID NO: 5691; WAN024FXX; Start 1128; Stop 1152
tgccattcataagaactttgacctc

SEQ ID NO: 418548 - DNA, 25 bp, Artificial
  probe
  misc_feature (1)..(25): SEQ ID NO: 5691; WAN024FXX; Start 1127; Stop 1151
ctgccattcataagaactttgacct

SEQ ID NO: 418549 - DNA, 25 bp, Artificial
  probe
  misc_feature (1)..(25): SEQ ID NO: 5691; WAN024FXX; Start 36; Stop 60
ctttcttgtctcttgtcctactatt

SEQ ID NO: 418550 - DNA, 25 bp, Artificial
  probe
  misc_feature (1)..(25): SEQ ID NO: 5691; WAN024FXX; Start 1126; Stop 1150
actgccattcataagaactttgacc

SEQ ID NO: 418551 - DNA, 25 bp, Artificial
  probe
  misc_feature (1)..(25): SEQ ID NO: 5691; WAN024FXX; Start 260; Stop 284
ctcactgtctaggagtctatgaaat

SEQ ID NO: 418552 - DNA, 25 bp, Artificial
  probe
  misc_feature (1)..(25): SEQ ID NO: 5691; WAN024FXX; Start 1133; Stop 1157
ttcataagaactttgacctccctta

SEQ ID NO: 418553 - DNA, 25 bp, Artificial
  probe
  misc_feature (1)..(25): SEQ ID NO: 5691; WAN024FXX; Start 416; Stop 440
atctctttgatacagaccatgaagc

SEQ ID NO: 418554 - DNA, 25 bp, Artificial
  probe
  misc_feature (1)..(25): SEQ ID NO: 5691; WAN024FXX; Start 32; Stop 56
ccctctttcttgtctcttgtcctac

SEQ ID NO: 418555 - DNA, 25 bp, Artificial
  probe
  misc_feature (1)..(25): SEQ ID NO: 5691; WAN024FXX; Start 1137; Stop 1161
taagaactttgacctcccttatgat

SEQ ID NO: 418556 - DNA, 25 bp, Artificial
  probe
  misc_feature (1)..(25): SEQ ID NO: 5691; WAN024FXX; Start 262; Stop 286
cactgtctaggagtctatgaaattg

SEQ ID NO: 418557 - DNA, 25 bp, Artificial
  probe
  misc_feature (1)..(25): SEQ ID NO: 5691; WAN024FXX; Start 261; Stop 285
tcactgtctaggagtctatgaaatt

SEQ ID NO: 418558 - DNA, 25 bp, Artificial
  probe
  misc_feature (1)..(25): SEQ ID NO: 5691; WAN024FXX; Start 129; Stop 153
caactacatccatgtcaataatcaa

SEQ ID NO: 418559 - DNA, 25 bp, Artificial
  probe
  misc_feature (1)..(25): SEQ ID NO: 5692; WAN024FEC; Start 63; Stop 87
accgagtacaaagagtaagttaaat

SEQ ID NO: 418560 - DNA, 25 bp, Artificial
  probe
  misc_feature (1)..(25): SEQ ID NO: 5692; WAN024FEC; Start 62; Stop 86
aaccgagtacaaagagtaagttaaa

SEQ ID NO: 418561 - DNA, 25 bp, Artificial
  probe
  misc_feature (1)..(25): SEQ ID NO: 5692; WAN024FEC; Start 61; Stop 85
aaaccgagtacaaagagtaagttaa

SEQ ID NO: 418562 - DNA, 25 bp, Artificial
  probe
  misc_feature (1)..(25): SEQ ID NO: 5692; WAN024FEC; Start 70; Stop 94
acaaagagtaagttaaataaggctt

SEQ ID NO: 418563 - DNA, 25 bp, Artificial
  probe
  misc_feature (1)..(25): SEQ ID NO: 5692; WAN024FEC; Start 58; Stop 82
agaaaaccgagtacaaagagtaagt

SEQ ID NO: 418564 - DNA, 25 bp, Artificial
  probe
  misc_feature (1)..(25): SEQ ID NO: 5692; WAN024FEC; Start 55; Stop 79
cctagaaaaccgagtacaaagagta

SEQ ID NO: 418565 - DNA, 25 bp, Artificial
  probe
  misc_feature (1)..(25): SEQ ID NO: 5692; WAN024FEC; Start 54; Stop 78
tcctagaaaaccgagtacaaagagt

SEQ ID NO: 418566 - DNA, 25 bp, Artificial
  probe
  misc_feature (1)..(25): SEQ ID NO: 5692; WAN024FEC; Start 59; Stop 83
gaaaaccgagtacaaagagtaagtt

SEQ ID NO: 418567 - DNA, 25 bp, Artificial
  probe
  misc_feature (1)..(25): SEQ ID NO: 5692; WAN024FEC; Start 64; Stop 88
ccgagtacaaagagtaagttaaata

SEQ ID NO: 418568 - DNA, 25 bp, Artificial
  probe
  misc_feature (1)..(25): SEQ ID NO: 5692; WAN024FEC; Start 53; Stop 77
ctcctagaaaaccgagtacaaagag

SEQ ID NO: 418569 - DNA, 25 bp, Artificial
  probe
  misc_feature (1)..(25): SEQ ID NO: 5692; WAN024FEC; Start 46; Stop 70
aacattcctcctagaaaaccgagta

SEQ ID NO: 418570 - DNA, 25 bp, Artificial
  probe
  misc_feature (1)..(25): SEQ ID NO: 5692; WAN024FEC; Start 57; Stop 81
tagaaaaccgagtacaaagagtaag

SEQ ID NO: 418571 - DNA, 25 bp, Artificial
  probe
  misc_feature (1)..(25): SEQ ID NO: 5692; WAN024FEC; Start 56; Stop 80
ctagaaaaccgagtacaaagagtaa

SEQ ID NO: 418572 - DNA, 25 bp, Artificial
  probe
  misc_feature (1)..(25): SEQ ID NO: 5692; WAN024FEC; Start 150; Stop 174
tttggtacttgaacctttcttgcca

SEQ ID NO: 418573 - DNA, 25 bp, Artificial
  probe
  misc_feature (1)..(25): SEQ ID NO: 5692; WAN024FEC; Start 49; Stop 73
attcctcctagaaaaccgagtacaa

SEQ ID NO: 418574 - DNA, 25 bp, Artificial
  probe
  misc_feature (1)..(25): SEQ ID NO: 5692; WAN024FEC; Start 69; Stop 93
tacaaagagtaagttaaataaggct

SEQ ID NO: 418575 - DNA, 25 bp, Artificial
  probe
  misc_feature (1)..(25): SEQ ID NO: 5692; WAN024FEC; Start 50; Stop 74
ttcctcctagaaaaccgagtacaaa

SEQ ID NO: 418576 - DNA, 25 bp, Artificial
  probe
  misc_feature (1)..(25): SEQ ID NO: 5692; WAN024FEC; Start 60; Stop 84
aaaaccgagtacaaagagtaagtta

SEQ ID NO: 418577 - DNA, 25 bp, Artificial
  probe
  misc_feature (1)..(25): SEQ ID NO: 5692; WAN024FEC; Start 164; Stop 188
ctttcttgccaggtctagctgattt

SEQ ID NO: 418578 - DNA, 25 bp, Artificial
  probe
  misc_feature (1)..(25): SEQ ID NO: 5692; WAN024FEC; Start 68; Stop 92
gtacaaagagtaagttaaataaggc

SEQ ID NO: 418579 - DNA, 25 bp, Artificial
  probe
  misc_feature (1)..(25): SEQ ID NO: 5692; WAN024FEC; Start 52; Stop 76
cctcctagaaaaccgagtacaaaga

SEQ ID NO: 418580 - DNA, 25 bp, Artificial
  probe
  misc_feature (1)..(25): SEQ ID NO: 5692; WAN024FEC; Start 51; Stop 75
tcctcctagaaaaccgagtacaaag

SEQ ID NO: 418581 - DNA, 25 bp, Artificial
  probe
  misc_feature (1)..(25): SEQ ID NO: 5692; WAN024FEC; Start 151; Stop 175
ttggtacttgaacctttcttgccag

SEQ ID NO: 418582 - DNA, 25 bp, Artificial
  probe
  misc_feature (1)..(25): SEQ ID NO: 5692; WAN024FEC; Start 48; Stop 72
cattcctcctagaaaaccgagtaca

SEQ ID NO: 418583 - DNA, 25 bp, Artificial
  probe
  misc_feature (1)..(25): SEQ ID NO: 5692; WAN024FEC; Start 47; Stop 71
acattcctcctagaaaaccgagtac

SEQ ID NO: 418584 - DNA, 25 bp, Artificial
  probe
  misc_feature (1)..(25): SEQ ID NO: 5692; WAN024FEC; Start 41; Stop 65
ctcccaacattcctcctagaaaacc

SEQ ID NO: 418585 - DNA, 25 bp, Artificial
  probe
  misc_feature (1)..(25): SEQ ID NO: 5692; WAN024FEC; Start 99; Stop 123
actcagtaaaatagctgggaaaatg

SEQ ID NO: 418586 - DNA, 25 bp, Artificial
  probe
  misc_feature (1)..(25): SEQ ID NO: 5692; WAN024FEC; Start 45; Stop 69
caacattcctcctagaaaaccgagt

SEQ ID NO: 418587 - DNA, 25 bp, Artificial
  probe
  misc_feature (1)..(25): SEQ ID NO: 5692; WAN024FEC; Start 38; Stop 62
cagctcccaacattcctcctagaaa

SEQ ID NO: 418588 - DNA, 25 bp, Artificial
  probe
  misc_feature (1)..(25): SEQ ID NO: 5692; WAN024FEC; Start 149; Stop 173
ttttggtacttgaacctttcttgcc

SEQ ID NO: 418589 - DNA, 25 bp, Artificial
  probe
  misc_feature (1)..(25): SEQ ID NO: 5692; WAN024FEC; Start 40; Stop 64
gctcccaacattcctcctagaaaac

SEQ ID NO: 418590 - DNA, 25 bp, Artificial
  probe
  misc_feature (1)..(25): SEQ ID NO: 5692; WAN024FEC; Start 44; Stop 68
ccaacattcctcctagaaaaccgag

SEQ ID NO: 418591 - DNA, 25 bp, Artificial
  probe
  misc_feature (1)..(25): SEQ ID NO: 5692; WAN024FEC; Start 98; Stop 122
tactcagtaaaatagctgggaaaat

SEQ ID NO: 418592 - DNA, 25 bp, Artificial
  probe
  misc_feature (1)..(25): SEQ ID NO: 5693; WAN024EX3; Start 127; Stop 151
aactgttctctctcaatctcatcaa

SEQ ID NO: 418593 - DNA, 25 bp, Artificial
  probe
  misc_feature (1)..(25): SEQ ID NO: 5693; WAN024EX3; Start 71; Stop 95
gagagattaggtctgtcatggatac

SEQ ID NO: 418594 - DNA, 25 bp, Artificial
  probe
  misc_feature (1)..(25): SEQ ID NO: 5693; WAN024EX3; Start 70; Stop 94
tgagagattaggtctgtcatggata

SEQ ID NO: 418595 - DNA, 25 bp, Artificial
  probe
  misc_feature (1)..(25): SEQ ID NO: 5693; WAN024EX3; Start 69; Stop 93
ctgagagattaggtctgtcatggat

SEQ ID NO: 418596 - DNA, 25 bp, Artificial
  probe
  misc_feature (1)..(25): SEQ ID NO: 5693; WAN024EX3; Start 128; Stop 152
actgttctctctcaatctcatcaaa

SEQ ID NO: 418597 - DNA, 25 bp, Artificial
  probe
  misc_feature (1)..(25): SEQ ID NO: 5693; WAN024EX3; Start 126; Stop 150
aaactgttctctctcaatctcatca

SEQ ID NO: 418598 - DNA, 25 bp, Artificial
  probe
  misc_feature (1)..(25): SEQ ID NO: 5693; WAN024EX3; Start 124; Stop 148
tcaaactgttctctctcaatctcat

SEQ ID NO: 418599 - DNA, 25 bp, Artificial
  probe
  misc_feature (1)..(25): SEQ ID NO: 5693; WAN024EX3; Start 123; Stop 147
atcaaactgttctctctcaatctca

SEQ ID NO: 418600 - DNA, 25 bp, Artificial
  probe
  misc_feature (1)..(25): SEQ ID NO: 5693; WAN024EX3; Start 121; Stop 145
tcatcaaactgttctctctcaatct

SEQ ID NO: 418601 - DNA, 25 bp, Artificial
  probe
  misc_feature (1)..(25): SEQ ID NO: 5693; WAN024EX3; Start 125; Stop 149
caaactgttctctctcaatctcatc

SEQ ID NO: 418602 - DNA, 25 bp, Artificial
  probe
  misc_feature (1)..(25): SEQ ID NO: 5693; WAN024EX3; Start 122; Stop 146
catcaaactgttctctctcaatctc

SEQ ID NO: 418603 - DNA, 25 bp, Artificial
  probe
  misc_feature (1)..(25): SEQ ID NO: 5693; WAN024EX3; Start 68; Stop 92
tctgagagattaggtctgtcatgga

SEQ ID NO: 418604 - DNA, 25 bp, Artificial
  probe
  misc_feature (1)..(25): SEQ ID NO: 5693; WAN024EX3; Start 119; Stop 143
catcatcaaactgttctctctcaat

SEQ ID NO: 418605 - DNA, 25 bp, Artificial
  probe
  misc_feature (1)..(25): SEQ ID NO: 5693; WAN024EX3; Start 120; Stop 144
atcatcaaactgttctctctcaatc

SEQ ID NO: 418606 - DNA, 25 bp, Artificial
  probe
  misc_feature (1)..(25): SEQ ID NO: 5693; WAN024EX3; Start 72; Stop 96
agagattaggtctgtcatggatacc

SEQ ID NO: 418607 - DNA, 25 bp, Artificial
  probe
  misc_feature (1)..(25): SEQ ID NO: 5693; WAN024EX3; Start 118; Stop 142
gcatcatcaaactgttctctctcaa

SEQ ID NO: 418608 - DNA, 25 bp, Artificial
  probe
  misc_feature (1)..(25): SEQ ID NO: 5693; WAN024EX3; Start 74; Stop 98
agattaggtctgtcatggataccag

SEQ ID NO: 418609 - DNA, 25 bp, Artificial
  probe
  misc_feature (1)..(25): SEQ ID NO: 5693; WAN024EX3; Start 73; Stop 97
gagattaggtctgtcatggatacca

SEQ ID NO: 418610 - DNA, 25 bp, Artificial
  probe
  misc_feature (1)..(25): SEQ ID NO: 5693; WAN024EX3; Start 67; Stop 91
atctgagagattaggtctgtcatgg

SEQ ID NO: 418611 - DNA, 25 bp, Artificial
  probe
  misc_feature (1)..(25): SEQ ID NO: 5693; WAN024EX3; Start 111; Stop 135
aatcatggcatcatcaaactgttct

SEQ ID NO: 418612 - DNA, 25 bp, Artificial
  probe
  misc_feature (1)..(25): SEQ ID NO: 5693; WAN024EX3; Start 110; Stop 134
caatcatggcatcatcaaactgttc

SEQ ID NO: 418613 - DNA, 25 bp, Artificial
  probe
  misc_feature (1)..(25): SEQ ID NO: 5693; WAN024EX3; Start 115; Stop 139
atggcatcatcaaactgttctctct

SEQ ID NO: 418614 - DNA, 25 bp, Artificial
  probe
  misc_feature (1)..(25): SEQ ID NO: 5693; WAN024EX3; Start 109; Stop 133
tcaatcatggcatcatcaaactgtt

SEQ ID NO: 418615 - DNA, 25 bp, Artificial
  probe
  misc_feature (1)..(25): SEQ ID NO: 5693; WAN024EX3; Start 112; Stop 136
atcatggcatcatcaaactgttctc

SEQ ID NO: 418616 - DNA, 25 bp, Artificial
  probe
  misc_feature (1)..(25): SEQ ID NO: 5693; WAN024EX3; Start 75; Stop 99
gattaggtctgtcatggataccagc

SEQ ID NO: 418617 - DNA, 25 bp, Artificial
  probe
  misc_feature (1)..(25): SEQ ID NO: 5693; WAN024EX3; Start 31; Stop 55
agaatattgttgtaagaggctgaaa

SEQ ID NO: 418618 - DNA, 25 bp, Artificial
  probe
  misc_feature (1)..(25): SEQ ID NO: 5693; WAN024EX3; Start 108; Stop 132
ctcaatcatggcatcatcaaactgt

SEQ ID NO: 418619 - DNA, 25 bp, Artificial
  probe
  misc_feature (1)..(25): SEQ ID NO: 5693; WAN024EX3; Start 32; Stop 56
gaatattgttgtaagaggctgaaag

SEQ ID NO: 418620 - DNA, 25 bp, Artificial
  probe
  misc_feature (1)..(25): SEQ ID NO: 5693; WAN024EX3; Start 117; Stop 141
ggcatcatcaaactgttctctctca

SEQ ID NO: 418621 - DNA, 25 bp, Artificial
  probe
  misc_feature (1)..(25): SEQ ID NO: 5693; WAN024EX3; Start 116; Stop 140
tggcatcatcaaactgttctctctc

SEQ ID NO: 418622 - DNA, 25 bp, Artificial
  probe
  misc_feature (1)..(25): SEQ ID NO: 5693; WAN024EX3; Start 114; Stop 138
catggcatcatcaaactgttctctc

SEQ ID NO: 418623 - DNA, 25 bp, Artificial
  probe
  misc_feature (1)..(25): SEQ ID NO: 5693; WAN024EX3; Start 113; Stop 137
tcatggcatcatcaaactgttctct

SEQ ID NO: 418624 - DNA, 25 bp, Artificial
  probe
  misc_feature (1)..(25): SEQ ID NO: 5693; WAN024EX3; Start 107; Stop 131
cctcaatcatggcatcatcaaactg

SEQ ID NO: 418625 - DNA, 25 bp, Artificial
  probe
  misc_feature (1)..(25): SEQ ID NO: 5694; WAN024FWP; Start 167; Stop 191
aagtaggaatatcagaaggaacacc

SEQ ID NO: 418626 - DNA, 25 bp, Artificial
  probe
  misc_feature (1)..(25): SEQ ID NO: 5694; WAN024FWP; Start 165; Stop 189
ccaagtaggaatatcagaaggaaca

SEQ ID NO: 418627 - DNA, 25 bp, Artificial
  probe
  misc_feature (1)..(25): SEQ ID NO: 5694; WAN024FWP; Start 248; Stop 272
acaacgatacaattactggtgagat

SEQ ID NO: 418628 - DNA, 25 bp, Artificial
  probe
  misc_feature (1)..(25): SEQ ID NO: 5694; WAN024FWP; Start 245; Stop 269
aagacaacgatacaattactggtga

SEQ ID NO: 418629 - DNA, 25 bp, Artificial
  probe
  misc_feature (1)..(25): SEQ ID NO: 5694; WAN024FWP; Start 252; Stop 276
cgatacaattactggtgagatagca

SEQ ID NO: 418630 - DNA, 25 bp, Artificial
  probe
  misc_feature (1)..(25): SEQ ID NO: 5694; WAN024FWP; Start 251; Stop 275
acgatacaattactggtgagatagc

SEQ ID NO: 418631 - DNA, 25 bp, Artificial
  probe
  misc_feature (1)..(25): SEQ ID NO: 5694; WAN024FWP; Start 247; Stop 271
gacaacgatacaattactggtgaga

SEQ ID NO: 418632 - DNA, 25 bp, Artificial
  probe
  misc_feature (1)..(25): SEQ ID NO: 5694; WAN024FWP; Start 246; Stop 270
agacaacgatacaattactggtgag

SEQ ID NO: 418633 - DNA, 25 bp, Artificial
  probe
  misc_feature (1)..(25): SEQ ID NO: 5694; WAN024FWP; Start 166; Stop 190
caagtaggaatatcagaaggaacac

SEQ ID NO: 418634 - DNA, 25 bp, Artificial
  probe
  misc_feature (1)..(25): SEQ ID NO: 5694; WAN024FWP; Start 507; Stop 531
tagacgaactagaagagcatcaatt

SEQ ID NO: 418635 - DNA, 25 bp, Artificial
  probe
  misc_feature (1)..(25): SEQ ID NO: 5694; WAN024FWP; Start 554; Stop 578
taccaccaagtacagtaccaataac

SEQ ID NO: 418636 - DNA, 25 bp, Artificial
  probe
  misc_feature (1)..(25): SEQ ID NO: 5694; WAN024FWP; Start 551; Stop 575
caataccaccaagtacagtaccaat

SEQ ID NO: 418637 - DNA, 25 bp, Artificial
  probe
  misc_feature (1)..(25): SEQ ID NO: 5694; WAN024FWP; Start 542; Stop 566
aatatccagcaataccaccaagtac

SEQ ID NO: 418638 - DNA, 25 bp, Artificial
  probe
  misc_feature (1)..(25): SEQ ID NO: 5694; WAN024FWP; Start 249; Stop 273
caacgatacaattactggtgagata

SEQ ID NO: 418639 - DNA, 25 bp, Artificial
  probe
  misc_feature (1)..(25): SEQ ID NO: 5694; WAN024FWP; Start 29; Stop 53
ccattatatctcgtaatccatcacc

SEQ ID NO: 418640 - DNA, 25 bp, Artificial
  probe
  misc_feature (1)..(25): SEQ ID NO: 5694; WAN024FWP; Start 553; Stop 577
ataccaccaagtacagtaccaataa

SEQ ID NO: 418641 - DNA, 25 bp, Artificial
  probe
  misc_feature (1)..(25): SEQ ID NO: 5694; WAN024FWP; Start 552; Stop 576
aataccaccaagtacagtaccaata

SEQ ID NO: 418642 - DNA, 25 bp, Artificial
  probe
  misc_feature (1)..(25): SEQ ID NO: 5694; WAN024FWP; Start 253; Stop 277
gatacaattactggtgagatagcat

SEQ ID NO: 418643 - DNA, 25 bp, Artificial
  probe
  misc_feature (1)..(25): SEQ ID NO: 5694; WAN024FWP; Start 250; Stop 274
aacgatacaattactggtgagatag

SEQ ID NO: 418644 - DNA, 25 bp, Artificial
  probe
  misc_feature (1)..(25): SEQ ID NO: 5694; WAN024FWP; Start 361; Stop 385
gacatgaactcattacgaaccattc

SEQ ID NO: 418645 - DNA, 25 bp, Artificial
  probe
  misc_feature (1)..(25): SEQ ID NO: 5694; WAN024FWP; Start 360; Stop 384
agacatgaactcattacgaaccatt

SEQ ID NO: 418646 - DNA, 25 bp, Artificial
  probe
  misc_feature (1)..(25): SEQ ID NO: 5694; WAN024FWP; Start 359; Stop 383
aagacatgaactcattacgaaccat

SEQ ID NO: 418647 - DNA, 25 bp, Artificial
  probe
  misc_feature (1)..(25): SEQ ID NO: 5694; WAN024FWP; Start 543; Stop 567
atatccagcaataccaccaagtaca

SEQ ID NO: 418648 - DNA, 25 bp, Artificial
  probe
  misc_feature (1)..(25): SEQ ID NO: 5694; WAN024FWP; Start 418; Stop 442
acgaagataagattgaatacacctt

SEQ ID NO: 418649 - DNA, 25 bp, Artificial
  probe
  misc_feature (1)..(25): SEQ ID NO: 5694; WAN024FWP; Start 30; Stop 54
cattatatctcgtaatccatcacca

SEQ ID NO: 418650 - DNA, 25 bp, Artificial
  probe
  misc_feature (1)..(25): SEQ ID NO: 5694; WAN024FWP; Start 172; Stop 196
ggaatatcagaaggaacacctactc

SEQ ID NO: 418651 - DNA, 25 bp, Artificial
  probe
  misc_feature (1)..(25): SEQ ID NO: 5694; WAN024FWP; Start 171; Stop 195
aggaatatcagaaggaacacctact

SEQ ID NO: 418652 - DNA, 25 bp, Artificial
  probe
  misc_feature (1)..(25): SEQ ID NO: 5694; WAN024FWP; Start 168; Stop 192
agtaggaatatcagaaggaacacct

SEQ ID NO: 418653 - DNA, 25 bp, Artificial
  probe
  misc_feature (1)..(25): SEQ ID NO: 5694; WAN024FWP; Start 419; Stop 443
cgaagataagattgaatacaccttg

SEQ ID NO: 418654 - DNA, 25 bp, Artificial
  probe
  misc_feature (1)..(25): SEQ ID NO: 5694; WAN024FWP; Start 423; Stop 447
gataagattgaatacaccttgtcca

SEQ ID NO: 418655 - DNA, 25 bp, Artificial
  probe
  misc_feature (1)..(25): SEQ ID NO: 5694; WAN024FWP; Start 254; Stop 278
atacaattactggtgagatagcatt

SEQ ID NO: 418656 - DNA, 25 bp, Artificial
  probe
  misc_feature (1)..(25): SEQ ID NO: 5694; WAN024FWP; Start 28; Stop 52
tccattatatctcgtaatccatcac

SEQ ID NO: 418657 - DNA, 25 bp, Artificial
  probe
  misc_feature (1)..(25): SEQ ID NO: 5694; WAN024FWP; Start 173; Stop 197
gaatatcagaaggaacacctactcc

SEQ ID NO: 418658 - DNA, 25 bp, Artificial
  probe
  misc_feature (1)..(25): SEQ ID NO: 5695; WAN024DQM; Start 231; Stop 255
taagtctggtgccaattacatagag

SEQ ID NO: 418659 - DNA, 25 bp, Artificial
  probe
  misc_feature (1)..(25): SEQ ID NO: 5695; WAN024DQM; Start 224; Stop 248
atgagaataagtctggtgccaatta

SEQ ID NO: 418660 - DNA, 25 bp, Artificial
  probe
  misc_feature (1)..(25): SEQ ID NO: 5695; WAN024DQM; Start 222; Stop 246
taatgagaataagtctggtgccaat

SEQ ID NO: 418661 - DNA, 25 bp, Artificial
  probe
  misc_feature (1)..(25): SEQ ID NO: 5695; WAN024DQM; Start 227; Stop 251
agaataagtctggtgccaattacat

SEQ ID NO: 418662 - DNA, 25 bp, Artificial
  probe
  misc_feature (1)..(25): SEQ ID NO: 5695; WAN024DQM; Start 230; Stop 254
ataagtctggtgccaattacataga

SEQ ID NO: 418663 - DNA, 25 bp, Artificial
  probe
  misc_feature (1)..(25): SEQ ID NO: 5695; WAN024DQM; Start 229; Stop 253
aataagtctggtgccaattacatag

SEQ ID NO: 418664 - DNA, 25 bp, Artificial
  probe
  misc_feature (1)..(25): SEQ ID NO: 5695; WAN024DQM; Start 228; Stop 252
gaataagtctggtgccaattacata

SEQ ID NO: 418665 - DNA, 25 bp, Artificial
  probe
  misc_feature (1)..(25): SEQ ID NO: 5695; WAN024DQM; Start 221; Stop 245
ctaatgagaataagtctggtgccaa

SEQ ID NO: 418666 - DNA, 25 bp, Artificial
  probe
  misc_feature (1)..(25): SEQ ID NO: 5695; WAN024DQM; Start 223; Stop 247
aatgagaataagtctggtgccaatt

SEQ ID NO: 418667 - DNA, 25 bp, Artificial
  probe
  misc_feature (1)..(25): SEQ ID NO: 5695; WAN024DQM; Start 226; Stop 250
gagaataagtctggtgccaattaca

SEQ ID NO: 418668 - DNA, 25 bp, Artificial
  probe
  misc_feature (1)..(25): SEQ ID NO: 5695; WAN024DQM; Start 225; Stop 249
tgagaataagtctggtgccaattac

SEQ ID NO: 418669 - DNA, 25 bp, Artificial
  probe
  misc_feature (1)..(25): SEQ ID NO: 5695; WAN024DQM; Start 232; Stop 256
aagtctggtgccaattacatagagt

SEQ ID NO: 418670 - DNA, 25 bp, Artificial
  probe
  misc_feature (1)..(25): SEQ ID NO: 5695; WAN024DQM; Start 127; Stop 151
acttggagaggtactgtcaatattc

SEQ ID NO: 418671 - DNA, 25 bp, Artificial
  probe
  misc_feature (1)..(25): SEQ ID NO: 5695; WAN024DQM; Start 126; Stop 150
aacttggagaggtactgtcaatatt

SEQ ID NO: 418672 - DNA, 25 bp, Artificial
  probe
  misc_feature (1)..(25): SEQ ID NO: 5695; WAN024DQM; Start 233; Stop 257
agtctggtgccaattacatagagtg

SEQ ID NO: 418673 - DNA, 25 bp, Artificial
  probe
  misc_feature (1)..(25): SEQ ID NO: 5695; WAN024DQM; Start 513; Stop 537
cgcttgggtaggtaactattatctt

SEQ ID NO: 418674 - DNA, 25 bp, Artificial
  probe
  misc_feature (1)..(25): SEQ ID NO: 5695; WAN024DQM; Start 246; Stop 270
ttacatagagtggaagggaacagta

SEQ ID NO: 418675 - DNA, 25 bp, Artificial
  probe
  misc_feature (1)..(25): SEQ ID NO: 5695; WAN024DQM; Start 244; Stop 268
aattacatagagtggaagggaacag

SEQ ID NO: 418676 - DNA, 25 bp, Artificial
  probe
  misc_feature (1)..(25): SEQ ID NO: 5695; WAN024DQM; Start 243; Stop 267
caattacatagagtggaagggaaca

SEQ ID NO: 418677 - DNA, 25 bp, Artificial
  probe
  misc_feature (1)..(25): SEQ ID NO: 5695; WAN024DQM; Start 247; Stop 271
tacatagagtggaagggaacagtag

SEQ ID NO: 418678 - DNA, 25 bp, Artificial
  probe
  misc_feature (1)..(25): SEQ ID NO: 5695; WAN024DQM; Start 245; Stop 269
attacatagagtggaagggaacagt

SEQ ID NO: 418679 - DNA, 25 bp, Artificial
  probe
  misc_feature (1)..(25): SEQ ID NO: 5695; WAN024DQM; Start 250; Stop 274
atagagtggaagggaacagtagaag

SEQ ID NO: 418680 - DNA, 25 bp, Artificial
  probe
  misc_feature (1)..(25): SEQ ID NO: 5695; WAN024DQM; Start 257; Stop 281
ggaagggaacagtagaagagtttaa

SEQ ID NO: 418681 - DNA, 25 bp, Artificial
  probe
  misc_feature (1)..(25): SEQ ID NO: 5695; WAN024DQM; Start 220; Stop 244
gctaatgagaataagtctggtgcca

SEQ ID NO: 418682 - DNA, 25 bp, Artificial
  probe
  misc_feature (1)..(25): SEQ ID NO: 5695; WAN024DQM; Start 249; Stop 273
catagagtggaagggaacagtagaa

SEQ ID NO: 418683 - DNA, 25 bp, Artificial
  probe
  misc_feature (1)..(25): SEQ ID NO: 5695; WAN024DQM; Start 557; Stop 581
ctaaaggtgaatgggtttatgatgc

SEQ ID NO: 418684 - DNA, 25 bp, Artificial
  probe
  misc_feature (1)..(25): SEQ ID NO: 5695; WAN024DQM; Start 556; Stop 580
gctaaaggtgaatgggtttatgatg

SEQ ID NO: 418685 - DNA, 25 bp, Artificial
  probe
  misc_feature (1)..(25): SEQ ID NO: 5695; WAN024DQM; Start 128; Stop 152
cttggagaggtactgtcaatattcc

SEQ ID NO: 418686 - DNA, 25 bp, Artificial
  probe
  misc_feature (1)..(25): SEQ ID NO: 5695; WAN024DQM; Start 256; Stop 280
tggaagggaacagtagaagagttta

SEQ ID NO: 418687 - DNA, 25 bp, Artificial
  probe
  misc_feature (1)..(25): SEQ ID NO: 5695; WAN024DQM; Start 555; Stop 579
ggctaaaggtgaatgggtttatgat

SEQ ID NO: 418688 - DNA, 25 bp, Artificial
  probe
  misc_feature (1)..(25): SEQ ID NO: 5695; WAN024DQM; Start 251; Stop 275
tagagtggaagggaacagtagaaga

SEQ ID NO: 418689 - DNA, 25 bp, Artificial
  probe
  misc_feature (1)..(25): SEQ ID NO: 5695; WAN024DQM; Start 558; Stop 582
taaaggtgaatgggtttatgatgcc

SEQ ID NO: 418690 - DNA, 25 bp, Artificial
  probe
  misc_feature (1)..(25): SEQ ID NO: 5695; WAN024DQM; Start 192; Stop 216
tttcaaagaagatcatcgcaactat

SEQ ID NO: 418691 - DNA, 25 bp, Artificial
  probe
  misc_feature (1)..(25): SEQ ID NO: 5696; WAN024G7Q; Start 42; Stop 66
tggtataatggatggtaaccgtaac

SEQ ID NO: 418692 - DNA, 25 bp, Artificial
  probe
  misc_feature (1)..(25): SEQ ID NO: 5696; WAN024G7Q; Start 41; Stop 65
atggtataatggatggtaaccgtaa

SEQ ID NO: 418693 - DNA, 25 bp, Artificial
  probe
  misc_feature (1)..(25): SEQ ID NO: 5696; WAN024G7Q; Start 44; Stop 68
gtataatggatggtaaccgtaacgt

SEQ ID NO: 418694 - DNA, 25 bp, Artificial
  probe
  misc_feature (1)..(25): SEQ ID NO: 5696; WAN024G7Q; Start 40; Stop 64
catggtataatggatggtaaccgta

SEQ ID NO: 418695 - DNA, 25 bp, Artificial
  probe
  misc_feature (1)..(25): SEQ ID NO: 5696; WAN024G7Q; Start 38; Stop 62
ttcatggtataatggatggtaaccg

SEQ ID NO: 418696 - DNA, 25 bp, Artificial
  probe
  misc_feature (1)..(25): SEQ ID NO: 5696; WAN024G7Q; Start 43; Stop 67
ggtataatggatggtaaccgtaacg

SEQ ID NO: 418697 - DNA, 25 bp, Artificial
  probe
  misc_feature (1)..(25): SEQ ID NO: 5696; WAN024G7Q; Start 39; Stop 63
tcatggtataatggatggtaaccgt

SEQ ID NO: 418698 - DNA, 25 bp, Artificial
  probe
  misc_feature (1)..(25): SEQ ID NO: 5696; WAN024G7Q; Start 37; Stop 61
tttcatggtataatggatggtaacc

SEQ ID NO: 418699 - DNA, 25 bp, Artificial
  probe
  misc_feature (1)..(25): SEQ ID NO: 5696; WAN024G7Q; Start 36; Stop 60
atttcatggtataatggatggtaac

SEQ ID NO: 418700 - DNA, 25 bp, Artificial
  probe
  misc_feature (1)..(25): SEQ ID NO: 5696; WAN024G7Q; Start 45; Stop 69
tataatggatggtaaccgtaacgtt

SEQ ID NO: 418701 - DNA, 25 bp, Artificial
  probe
  misc_feature (1)..(25): SEQ ID NO: 5696; WAN024G7Q; Start 46; Stop 70
ataatggatggtaaccgtaacgttg

SEQ ID NO: 418702 - DNA, 25 bp, Artificial
  probe
  misc_feature (1)..(25): SEQ ID NO: 5696; WAN024G7Q; Start 35; Stop 59
aatttcatggtataatggatggtaa

SEQ ID NO: 418703 - DNA, 25 bp, Artificial
  probe
  misc_feature (1)..(25): SEQ ID NO: 5696; WAN024G7Q; Start 34; Stop 58
aaatttcatggtataatggatggta

SEQ ID NO: 418704 - DNA, 25 bp, Artificial
  probe
  misc_feature (1)..(25): SEQ ID NO: 5696; WAN024G7Q; Start 47; Stop 71
taatggatggtaaccgtaacgttgc

SEQ ID NO: 418705 - DNA, 25 bp, Artificial
  probe
  misc_feature (1)..(25): SEQ ID NO: 5696; WAN024G7Q; Start 9; Stop 33
ttcttcaagagttttggttcttaag

SEQ ID NO: 418706 - DNA, 25 bp, Artificial
  probe
  misc_feature (1)..(25): SEQ ID NO: 5697; WAN024DT4; Start 50; Stop 74
aaataggtcgcaagtcggatgtttt

SEQ ID NO: 418707 - DNA, 25 bp, Artificial
  probe
  misc_feature (1)..(25): SEQ ID NO: 5697; WAN024DT4; Start 49; Stop 73
aaaataggtcgcaagtcggatgttt

SEQ ID NO: 418708 - DNA, 25 bp, Artificial
  probe
  misc_feature (1)..(25): SEQ ID NO: 5698; WAN024DLW; Start 18; Stop 42
atttgtcattgaactttcctccttt

SEQ ID NO: 418709 - DNA, 25 bp, Artificial
  probe
  misc_feature (1)..(25): SEQ ID NO: 5698; WAN024DLW; Start 17; Stop 41
aatttgtcattgaactttcctcctt

SEQ ID NO: 418710 - DNA, 25 bp, Artificial
  probe
  misc_feature (1)..(25): SEQ ID NO: 5698; WAN024DLW; Start 16; Stop 40
aaatttgtcattgaactttcctcct

SEQ ID NO: 418711 - DNA, 25 bp, Artificial
  probe
  misc_feature (1)..(25): SEQ ID NO: 5698; WAN024DLW; Start 65; Stop 89
ggaaaagaaaaggaaaagtgagcat

SEQ ID NO: 418712 - DNA, 25 bp, Artificial
  probe
  misc_feature (1)..(25): SEQ ID NO: 5698; WAN024DLW; Start 19; Stop 43
tttgtcattgaactttcctcctttt

SEQ ID NO: 418713 - DNA, 25 bp, Artificial
  probe
  misc_feature (1)..(25): SEQ ID NO: 5698; WAN024DLW; Start 62; Stop 86
ttcggaaaagaaaaggaaaagtgag

SEQ ID NO: 418714 - DNA, 25 bp, Artificial
  probe
  misc_feature (1)..(25): SEQ ID NO: 5698; WAN024DLW; Start 61; Stop 85
attcggaaaagaaaaggaaaagtga

SEQ ID NO: 418715 - DNA, 25 bp, Artificial
  probe
  misc_feature (1)..(25): SEQ ID NO: 5698; WAN024DLW; Start 66; Stop 90
gaaaagaaaaggaaaagtgagcatt

SEQ ID NO: 418716 - DNA, 25 bp, Artificial
  probe
  misc_feature (1)..(25): SEQ ID NO: 5698; WAN024DLW; Start 67; Stop 91
aaaagaaaaggaaaagtgagcattt

SEQ ID NO: 418717 - DNA, 25 bp, Artificial
  probe
  misc_feature (1)..(25): SEQ ID NO: 5698; WAN024DLW; Start 60; Stop 84
tattcggaaaagaaaaggaaaagtg

SEQ ID NO: 418718 - DNA, 25 bp, Artificial
  probe
  misc_feature (1)..(25): SEQ ID NO: 5698; WAN024DLW; Start 63; Stop 87
tcggaaaagaaaaggaaaagtgagc

SEQ ID NO: 418719 - DNA, 25 bp, Artificial
  probe
  misc_feature (1)..(25): SEQ ID NO: 5698; WAN024DLW; Start 64; Stop 88
cggaaaagaaaaggaaaagtgagca

SEQ ID NO: 418720 - DNA, 25 bp, Artificial
  probe
  misc_feature (1)..(25): SEQ ID NO: 5698; WAN024DLW; Start 68; Stop 92
aaagaaaaggaaaagtgagcatttt

SEQ ID NO: 418721 - DNA, 25 bp, Artificial
  probe
  misc_feature (1)..(25): SEQ ID NO: 5698; WAN024DLW; Start 59; Stop 83
atattcggaaaagaaaaggaaaagt

SEQ ID NO: 418722 - DNA, 25 bp, Artificial
  probe
  misc_feature (1)..(25): SEQ ID NO: 5698; WAN024DLW; Start 15; Stop 39
aaaatttgtcattgaactttcctcc

SEQ ID NO: 418723 - DNA, 25 bp, Artificial
  probe
  misc_feature (1)..(25): SEQ ID NO: 5698; WAN024DLW; Start 43; Stop 67
tttcttgttcacttttatattcgga

SEQ ID NO: 418724 - DNA, 25 bp, Artificial
  probe
  misc_feature (1)..(25): SEQ ID NO: 5698; WAN024DLW; Start 45; Stop 69
tcttgttcacttttatattcggaaa

SEQ ID NO: 418725 - DNA, 25 bp, Artificial
  probe
  misc_feature (1)..(25): SEQ ID NO: 5698; WAN024DLW; Start 44; Stop 68
ttcttgttcacttttatattcggaa

SEQ ID NO: 418726 - DNA, 25 bp, Artificial
  probe
  misc_feature (1)..(25): SEQ ID NO: 5698; WAN024DLW; Start 1; Stop 25
ttgtcaagaatgtcaaaatttgtca

SEQ ID NO: 418727 - DNA, 25 bp, Artificial
  probe
  misc_feature (1)..(25): SEQ ID NO: 5698; WAN024DLW; Start 2; Stop 26
tgtcaagaatgtcaaaatttgtcat

SEQ ID NO: 418728 - DNA, 25 bp, Artificial
  probe
  misc_feature (1)..(25): SEQ ID NO: 5698; WAN024DLW; Start 14; Stop 38
caaaatttgtcattgaactttcctc

SEQ ID NO: 418729 - DNA, 25 bp, Artificial
  probe
  misc_feature (1)..(25): SEQ ID NO: 5698; WAN024DLW; Start 42; Stop 66
ttttcttgttcacttttatattcgg

SEQ ID NO: 418730 - DNA, 25 bp, Artificial
  probe
  misc_feature (1)..(25): SEQ ID NO: 5698; WAN024DLW; Start 58; Stop 82
tatattcggaaaagaaaaggaaaag

SEQ ID NO: 418731 - DNA, 25 bp, Artificial
  probe
  misc_feature (1)..(25): SEQ ID NO: 5698; WAN024DLW; Start 46; Stop 70
cttgttcacttttatattcggaaaa

SEQ ID NO: 418732 - DNA, 25 bp, Artificial
  probe
  misc_feature (1)..(25): SEQ ID NO: 5698; WAN024DLW; Start 13; Stop 37
tcaaaatttgtcattgaactttcct

SEQ ID NO: 418733 - DNA, 25 bp, Artificial
  probe
  misc_feature (1)..(25): SEQ ID NO: 5698; WAN024DLW; Start 12; Stop 36
gtcaaaatttgtcattgaactttcc

SEQ ID NO: 418734 - DNA, 25 bp, Artificial
  probe
  misc_feature (1)..(25): SEQ ID NO: 5698; WAN024DLW; Start 4; Stop 28
tcaagaatgtcaaaatttgtcattg

SEQ ID NO: 418735 - DNA, 25 bp, Artificial
  probe
  misc_feature (1)..(25): SEQ ID NO: 5698; WAN024DLW; Start 3; Stop 27
gtcaagaatgtcaaaatttgtcatt

SEQ ID NO: 418736 - DNA, 25 bp, Artificial
  probe
  misc_feature (1)..(25): SEQ ID NO: 5698; WAN024DLW; Start 57; Stop 81
ttatattcggaaaagaaaaggaaaa

SEQ ID NO: 418737 - DNA, 25 bp, Artificial
  probe
  misc_feature (1)..(25): SEQ ID NO: 5698; WAN024DLW; Start 56; Stop 80
tttatattcggaaaagaaaaggaaa

SEQ ID NO: 418738 - DNA, 25 bp, Artificial
  probe
  misc_feature (1)..(25): SEQ ID NO: 5698; WAN024DLW; Start 11; Stop 35
tgtcaaaatttgtcattgaactttc

SEQ ID NO: 418739 - DNA, 25 bp, Artificial
  probe
  misc_feature (1)..(25): SEQ ID NO: 5698; WAN024DLW; Start 8; Stop 32
gaatgtcaaaatttgtcattgaact

SEQ ID NO: 418740 - DNA, 25 bp, Artificial
  probe
  misc_feature (1)..(25): SEQ ID NO: 5698; WAN024DLW; Start 7; Stop 31
agaatgtcaaaatttgtcattgaac

SEQ ID NO: 418741 - DNA, 25 bp, Artificial
  probe
  misc_feature (1)..(25): SEQ ID NO: 5699; WAN024FVZ; Start 77; Stop 101
taacaacttcatcgccaacaattaa

SEQ ID NO: 418742 - DNA, 25 bp, Artificial
  probe
  misc_feature (1)..(25): SEQ ID NO: 5699; WAN024FVZ; Start 76; Stop 100
ttaacaacttcatcgccaacaatta

SEQ ID NO: 418743 - DNA, 25 bp, Artificial
  probe
  misc_feature (1)..(25): SEQ ID NO: 5699; WAN024FVZ; Start 156; Stop 180
cctcagatatattggtgcttcatcc

SEQ ID NO: 418744 - DNA, 25 bp, Artificial
  probe
  misc_feature (1)..(25): SEQ ID NO: 5699; WAN024FVZ; Start 78; Stop 102
aacaacttcatcgccaacaattaat

SEQ ID NO: 418745 - DNA, 25 bp, Artificial
  probe
  misc_feature (1)..(25): SEQ ID NO: 5699; WAN024FVZ; Start 145; Stop 169
aacacaccatacctcagatatattg

SEQ ID NO: 418746 - DNA, 25 bp, Artificial
  probe
  misc_feature (1)..(25): SEQ ID NO: 5699; WAN024FVZ; Start 141; Stop 165
cctaaacacaccatacctcagatat

SEQ ID NO: 418747 - DNA, 25 bp, Artificial
  probe
  misc_feature (1)..(25): SEQ ID NO: 5699; WAN024FVZ; Start 151; Stop 175
ccatacctcagatatattggtgctt

SEQ ID NO: 418748 - DNA, 25 bp, Artificial
  probe
  misc_feature (1)..(25): SEQ ID NO: 5699; WAN024FVZ; Start 155; Stop 179
acctcagatatattggtgcttcatc

SEQ ID NO: 418749 - DNA, 25 bp, Artificial
  probe
  misc_feature (1)..(25): SEQ ID NO: 5699; WAN024FVZ; Start 146; Stop 170
acacaccatacctcagatatattgg

SEQ ID NO: 418750 - DNA, 25 bp, Artificial
  probe
  misc_feature (1)..(25): SEQ ID NO: 5699; WAN024FVZ; Start 75; Stop 99
tttaacaacttcatcgccaacaatt

SEQ ID NO: 418751 - DNA, 25 bp, Artificial
  probe
  misc_feature (1)..(25): SEQ ID NO: 5699; WAN024FVZ; Start 74; Stop 98
ctttaacaacttcatcgccaacaat

SEQ ID NO: 418752 - DNA, 25 bp, Artificial
  probe
  misc_feature (1)..(25): SEQ ID NO: 5699; WAN024FVZ; Start 154; Stop 178
tacctcagatatattggtgcttcat

SEQ ID NO: 418753 - DNA, 25 bp, Artificial
  probe
  misc_feature (1)..(25): SEQ ID NO: 5699; WAN024FVZ; Start 153; Stop 177
atacctcagatatattggtgcttca

SEQ ID NO: 418754 - DNA, 25 bp, Artificial
  probe
  misc_feature (1)..(25): SEQ ID NO: 5699; WAN024FVZ; Start 152; Stop 176
catacctcagatatattggtgcttc

SEQ ID NO: 418755 - DNA, 25 bp, Artificial
  probe
  misc_feature (1)..(25): SEQ ID NO: 5699; WAN024FVZ; Start 71; Stop 95
catctttaacaacttcatcgccaac

SEQ ID NO: 418756 - DNA, 25 bp, Artificial
  probe
  misc_feature (1)..(25): SEQ ID NO: 5699; WAN024FVZ; Start 70; Stop 94
tcatctttaacaacttcatcgccaa

SEQ ID NO: 418757 - DNA, 25 bp, Artificial
  probe
  misc_feature (1)..(25): SEQ ID NO: 5699; WAN024FVZ; Start 69; Stop 93
ttcatctttaacaacttcatcgcca

SEQ ID NO: 418758 - DNA, 25 bp, Artificial
  probe
  misc_feature (1)..(25): SEQ ID NO: 5699; WAN024FVZ; Start 98; Stop 122
ttaattcatcaatagcaaccttctt

SEQ ID NO: 418759 - DNA, 25 bp, Artificial
  probe
  misc_feature (1)..(25): SEQ ID NO: 5699; WAN024FVZ; Start 72; Stop 96
atctttaacaacttcatcgccaaca

SEQ ID NO: 418760 - DNA, 25 bp, Artificial
  probe
  misc_feature (1)..(25): SEQ ID NO: 5699; WAN024FVZ; Start 68; Stop 92
gttcatctttaacaacttcatcgcc

SEQ ID NO: 418761 - DNA, 25 bp, Artificial
  probe
  misc_feature (1)..(25): SEQ ID NO: 5699; WAN024FVZ; Start 73; Stop 97
tctttaacaacttcatcgccaacaa

SEQ ID NO: 418762 - DNA, 25 bp, Artificial
  probe
  misc_feature (1)..(25): SEQ ID NO: 5699; WAN024FVZ; Start 67; Stop 91
cgttcatctttaacaacttcatcgc

SEQ ID NO: 418763 - DNA, 25 bp, Artificial
  probe
  misc_feature (1)..(25): SEQ ID NO: 5699; WAN024FVZ; Start 140; Stop 164
gcctaaacacaccatacctcagata

SEQ ID NO: 418764 - DNA, 25 bp, Artificial
  probe
  misc_feature (1)..(25): SEQ ID NO: 5699; WAN024FVZ; Start 157; Stop 181
ctcagatatattggtgcttcatccc

SEQ ID NO: 418765 - DNA, 25 bp, Artificial
  probe
  misc_feature (1)..(25): SEQ ID NO: 5699; WAN024FVZ; Start 142; Stop 166
ctaaacacaccatacctcagatata

SEQ ID NO: 418766 - DNA, 25 bp, Artificial
  probe
  misc_feature (1)..(25): SEQ ID NO: 5699; WAN024FVZ; Start 97; Stop 121
attaattcatcaatagcaaccttct

SEQ ID NO: 418767 - DNA, 25 bp, Artificial
  probe
  misc_feature (1)..(25): SEQ ID NO: 5699; WAN024FVZ; Start 81; Stop 105
aacttcatcgccaacaattaattca

SEQ ID NO: 418768 - DNA, 25 bp, Artificial
  probe
  misc_feature (1)..(25): SEQ ID NO: 5699; WAN024FVZ; Start 89; Stop 113
cgccaacaattaattcatcaatagc

SEQ ID NO: 418769 - DNA, 25 bp, Artificial
  probe
  misc_feature (1)..(25): SEQ ID NO: 5699; WAN024FVZ; Start 85; Stop 109
tcatcgccaacaattaattcatcaa

SEQ ID NO: 418770 - DNA, 25 bp, Artificial
  probe
  misc_feature (1)..(25): SEQ ID NO: 5699; WAN024FVZ; Start 84; Stop 108
ttcatcgccaacaattaattcatca

SEQ ID NO: 418771 - DNA, 25 bp, Artificial
  probe
  misc_feature (1)..(25): SEQ ID NO: 5699; WAN024FVZ; Start 82; Stop 106
acttcatcgccaacaattaattcat

SEQ ID NO: 418772 - DNA, 25 bp, Artificial
  probe
  misc_feature (1)..(25): SEQ ID NO: 5699; WAN024FVZ; Start 80; Stop 104
caacttcatcgccaacaattaattc

SEQ ID NO: 418773 - DNA, 25 bp, Artificial
  probe
  misc_feature (1)..(25): SEQ ID NO: 5699; WAN024FVZ; Start 79; Stop 103
acaacttcatcgccaacaattaatt

SEQ ID NO: 418774 - DNA, 25 bp, Artificial
  probe
  misc_feature (1)..(25): SEQ ID NO: 5700; WAN024FF7; Start 93; Stop 117
gattggagttgttgttggaaattgt

SEQ ID NO: 418775 - DNA, 25 bp, Artificial
  probe
  misc_feature (1)..(25): SEQ ID NO: 5700; WAN024FF7; Start 94; Stop 118
attggagttgttgttggaaattgtg

SEQ ID NO: 418776 - DNA, 25 bp, Artificial
  probe
  misc_feature (1)..(25): SEQ ID NO: 5700; WAN024FF7; Start 97; Stop 121
ggagttgttgttggaaattgtgttt

SEQ ID NO: 418777 - DNA, 25 bp, Artificial
  probe
  misc_feature (1)..(25): SEQ ID NO: 5700; WAN024FF7; Start 92; Stop 116
cgattggagttgttgttggaaattg

SEQ ID NO: 418778 - DNA, 25 bp, Artificial
  probe
  misc_feature (1)..(25): SEQ ID NO: 5700; WAN024FF7; Start 96; Stop 120
tggagttgttgttggaaattgtgtt

SEQ ID NO: 418779 - DNA, 25 bp, Artificial
  probe
  misc_feature (1)..(25): SEQ ID NO: 5700; WAN024FF7; Start 95; Stop 119
ttggagttgttgttggaaattgtgt

SEQ ID NO: 418780 - DNA, 25 bp, Artificial
  probe
  misc_feature (1)..(25): SEQ ID NO: 5700; WAN024FF7; Start 84; Stop 108
gattgtttcgattggagttgttgtt

SEQ ID NO: 418781 - DNA, 25 bp, Artificial
  probe
  misc_feature (1)..(25): SEQ ID NO: 5700; WAN024FF7; Start 85; Stop 109
attgtttcgattggagttgttgttg

SEQ ID NO: 418782 - DNA, 25 bp, Artificial
  probe
  misc_feature (1)..(25): SEQ ID NO: 5700; WAN024FF7; Start 91; Stop 115
tcgattggagttgttgttggaaatt

SEQ ID NO: 418783 - DNA, 25 bp, Artificial
  probe
  misc_feature (1)..(25): SEQ ID NO: 5700; WAN024FF7; Start 90; Stop 114
ttcgattggagttgttgttggaaat

SEQ ID NO: 418784 - DNA, 25 bp, Artificial
  probe
  misc_feature (1)..(25): SEQ ID NO: 5700; WAN024FF7; Start 98; Stop 122
gagttgttgttggaaattgtgtttt

SEQ ID NO: 418785 - DNA, 25 bp, Artificial
  probe
  misc_feature (1)..(25): SEQ ID NO: 5700; WAN024FF7; Start 88; Stop 112
gtttcgattggagttgttgttggaa

SEQ ID NO: 418786 - DNA, 25 bp, Artificial
  probe
  misc_feature (1)..(25): SEQ ID NO: 5700; WAN024FF7; Start 86; Stop 110
ttgtttcgattggagttgttgttgg

SEQ ID NO: 418787 - DNA, 25 bp, Artificial
  probe
  misc_feature (1)..(25): SEQ ID NO: 5700; WAN024FF7; Start 35; Stop 59
caagaccagcaaggttatcgaattt

SEQ ID NO: 418788 - DNA, 25 bp, Artificial
  probe
  misc_feature (1)..(25): SEQ ID NO: 5700; WAN024FF7; Start 133; Stop 157
ttaaagttttcatcaccgacagcac

SEQ ID NO: 418789 - DNA, 25 bp, Artificial
  probe
  misc_feature (1)..(25): SEQ ID NO: 5700; WAN024FF7; Start 132; Stop 156
gttaaagttttcatcaccgacagca

SEQ ID NO: 418790 - DNA, 25 bp, Artificial
  probe
  misc_feature (1)..(25): SEQ ID NO: 5700; WAN024FF7; Start 89; Stop 113
tttcgattggagttgttgttggaaa

SEQ ID NO: 418791 - DNA, 25 bp, Artificial
  probe
  misc_feature (1)..(25): SEQ ID NO: 5700; WAN024FF7; Start 87; Stop 111
tgtttcgattggagttgttgttgga

SEQ ID NO: 418792 - DNA, 25 bp, Artificial
  probe
  misc_feature (1)..(25): SEQ ID NO: 5700; WAN024FF7; Start 4; Stop 28
tcaatatcaatcggcccaaatgaac

SEQ ID NO: 418793 - DNA, 25 bp, Artificial
  probe
  misc_feature (1)..(25): SEQ ID NO: 5700; WAN024FF7; Start 3; Stop 27
gtcaatatcaatcggcccaaatgaa

SEQ ID NO: 418794 - DNA, 25 bp, Artificial
  probe
  misc_feature (1)..(25): SEQ ID NO: 5700; WAN024FF7; Start 34; Stop 58
gcaagaccagcaaggttatcgaatt

SEQ ID NO: 418795 - DNA, 25 bp, Artificial
  probe
  misc_feature (1)..(25): SEQ ID NO: 5700; WAN024FF7; Start 43; Stop 67
gcaaggttatcgaattttgagaaga

SEQ ID NO: 418796 - DNA, 25 bp, Artificial
  probe
  misc_feature (1)..(25): SEQ ID NO: 5700; WAN024FF7; Start 42; Stop 66
agcaaggttatcgaattttgagaag

SEQ ID NO: 418797 - DNA, 25 bp, Artificial
  probe
  misc_feature (1)..(25): SEQ ID NO: 5700; WAN024FF7; Start 41; Stop 65
cagcaaggttatcgaattttgagaa

SEQ ID NO: 418798 - DNA, 25 bp, Artificial
  probe
  misc_feature (1)..(25): SEQ ID NO: 5700; WAN024FF7; Start 1; Stop 25
ttgtcaatatcaatcggcccaaatg

SEQ ID NO: 418799 - DNA, 25 bp, Artificial
  probe
  misc_feature (1)..(25): SEQ ID NO: 5700; WAN024FF7; Start 61; Stop 85
gagaagaactcaatggttttatcga

SEQ ID NO: 418800 - DNA, 25 bp, Artificial
  probe
  misc_feature (1)..(25): SEQ ID NO: 5700; WAN024FF7; Start 46; Stop 70
aggttatcgaattttgagaagaact

SEQ ID NO: 418801 - DNA, 25 bp, Artificial
  probe
  misc_feature (1)..(25): SEQ ID NO: 5700; WAN024FF7; Start 134; Stop 158
taaagttttcatcaccgacagcaca

SEQ ID NO: 418802 - DNA, 25 bp, Artificial
  probe
  misc_feature (1)..(25): SEQ ID NO: 5700; WAN024FF7; Start 83; Stop 107
cgattgtttcgattggagttgttgt

SEQ ID NO: 418803 - DNA, 25 bp, Artificial
  probe
  misc_feature (1)..(25): SEQ ID NO: 5700; WAN024FF7; Start 131; Stop 155
cgttaaagttttcatcaccgacagc

SEQ ID NO: 418804 - DNA, 25 bp, Artificial
  probe
  misc_feature (1)..(25): SEQ ID NO: 5700; WAN024FF7; Start 40; Stop 64
ccagcaaggttatcgaattttgaga

SEQ ID NO: 418805 - DNA, 25 bp, Artificial
  probe
  misc_feature (1)..(25): SEQ ID NO: 5700; WAN024FF7; Start 5; Stop 29
caatatcaatcggcccaaatgaacc

SEQ ID NO: 418806 - DNA, 25 bp, Artificial
  probe
  misc_feature (1)..(25): SEQ ID NO: 5700; WAN024FF7; Start 47; Stop 71
ggttatcgaattttgagaagaactc

SEQ ID NO: 418807 - DNA, 25 bp, Artificial
  probe
  misc_feature (1)..(25): SEQ ID NO: 5701; WAN024BEC; Start 64; Stop 88
ataaaacgcatcatatcaggtgtac

SEQ ID NO: 418808 - DNA, 25 bp, Artificial
  probe
  misc_feature (1)..(25): SEQ ID NO: 5701; WAN024BEC; Start 63; Stop 87
tataaaacgcatcatatcaggtgta

SEQ ID NO: 418809 - DNA, 25 bp, Artificial
  probe
  misc_feature (1)..(25): SEQ ID NO: 5701; WAN024BEC; Start 62; Stop 86
ttataaaacgcatcatatcaggtgt

SEQ ID NO: 418810 - DNA, 25 bp, Artificial
  probe
  misc_feature (1)..(25): SEQ ID NO: 5701; WAN024BEC; Start 71; Stop 95
gcatcatatcaggtgtacatgaact

SEQ ID NO: 418811 - DNA, 25 bp, Artificial
  probe
  misc_feature (1)..(25): SEQ ID NO: 5701; WAN024BEC; Start 74; Stop 98
tcatatcaggtgtacatgaactaca

SEQ ID NO: 418812 - DNA, 25 bp, Artificial
  probe
  misc_feature (1)..(25): SEQ ID NO: 5701; WAN024BEC; Start 67; Stop 91
aaacgcatcatatcaggtgtacatg

SEQ ID NO: 418813 - DNA, 25 bp, Artificial
  probe
  misc_feature (1)..(25): SEQ ID NO: 5701; WAN024BEC; Start 70; Stop 94
cgcatcatatcaggtgtacatgaac

SEQ ID NO: 418814 - DNA, 25 bp, Artificial
  probe
  misc_feature (1)..(25): SEQ ID NO: 5701; WAN024BEC; Start 73; Stop 97
atcatatcaggtgtacatgaactac

SEQ ID NO: 418815 - DNA, 25 bp, Artificial
  probe
  misc_feature (1)..(25): SEQ ID NO: 5701; WAN024BEC; Start 72; Stop 96
catcatatcaggtgtacatgaacta

SEQ ID NO: 418816 - DNA, 25 bp, Artificial
  probe
  misc_feature (1)..(25): SEQ ID NO: 5701; WAN024BEC; Start 61; Stop 85
attataaaacgcatcatatcaggtg

SEQ ID NO: 418817 - DNA, 25 bp, Artificial
  probe
  misc_feature (1)..(25): SEQ ID NO: 5701; WAN024BEC; Start 69; Stop 93
acgcatcatatcaggtgtacatgaa

SEQ ID NO: 418818 - DNA, 25 bp, Artificial
  probe
  misc_feature (1)..(25): SEQ ID NO: 5701; WAN024BEC; Start 68; Stop 92
aacgcatcatatcaggtgtacatga

SEQ ID NO: 418819 - DNA, 25 bp, Artificial
  probe
  misc_feature (1)..(25): SEQ ID NO: 5701; WAN024BEC; Start 60; Stop 84
aattataaaacgcatcatatcaggt

SEQ ID NO: 418820 - DNA, 25 bp, Artificial
  probe
  misc_feature (1)..(25): SEQ ID NO: 5701; WAN024BEC; Start 65; Stop 89
taaaacgcatcatatcaggtgtaca

SEQ ID NO: 418821 - DNA, 25 bp, Artificial
  probe
  misc_feature (1)..(25): SEQ ID NO: 5701; WAN024BEC; Start 66; Stop 90
aaaacgcatcatatcaggtgtacat

SEQ ID NO: 418822 - DNA, 25 bp, Artificial
  probe
  misc_feature (1)..(25): SEQ ID NO: 5701; WAN024BEC; Start 59; Stop 83
aaattataaaacgcatcatatcagg

SEQ ID NO: 418823 - DNA, 25 bp, Artificial
  probe
  misc_feature (1)..(25): SEQ ID NO: 5701; WAN024BEC; Start 84; Stop 108
tgtacatgaactacaccccaaaagt

SEQ ID NO: 418824 - DNA, 25 bp, Artificial
  probe
  misc_feature (1)..(25): SEQ ID NO: 5701; WAN024BEC; Start 2; Stop 26
tgtcacagattttgtgtcaaaacat

SEQ ID NO: 418825 - DNA, 25 bp, Artificial
  probe
  misc_feature (1)..(25): SEQ ID NO: 5701; WAN024BEC; Start 1; Stop 25
ttgtcacagattttgtgtcaaaaca

SEQ ID NO: 418826 - DNA, 25 bp, Artificial
  probe
  misc_feature (1)..(25): SEQ ID NO: 5701; WAN024BEC; Start 3; Stop 27
gtcacagattttgtgtcaaaacatt

SEQ ID NO: 418827 - DNA, 25 bp, Artificial
  probe
  misc_feature (1)..(25): SEQ ID NO: 5701; WAN024BEC; Start 6; Stop 30
acagattttgtgtcaaaacattact

SEQ ID NO: 418828 - DNA, 25 bp, Artificial
  probe
  misc_feature (1)..(25): SEQ ID NO: 5701; WAN024BEC; Start 5; Stop 29
cacagattttgtgtcaaaacattac

SEQ ID NO: 418829 - DNA, 25 bp, Artificial
  probe
  misc_feature (1)..(25): SEQ ID NO: 5701; WAN024BEC; Start 4; Stop 28
tcacagattttgtgtcaaaacatta

SEQ ID NO: 418830 - DNA, 25 bp, Artificial
  probe
  misc_feature (1)..(25): SEQ ID NO: 5701; WAN024BEC; Start 7; Stop 31
cagattttgtgtcaaaacattactt

SEQ ID NO: 418831 - DNA, 25 bp, Artificial
  probe
  misc_feature (1)..(25): SEQ ID NO: 5701; WAN024BEC; Start 8; Stop 32
agattttgtgtcaaaacattacttt

SEQ ID NO: 418832 - DNA, 25 bp, Artificial
  probe
  misc_feature (1)..(25): SEQ ID NO: 5701; WAN024BEC; Start 10; Stop 34
attttgtgtcaaaacattacttttg

SEQ ID NO: 418833 - DNA, 25 bp, Artificial
  probe
  misc_feature (1)..(25): SEQ ID NO: 5701; WAN024BEC; Start 9; Stop 33
gattttgtgtcaaaacattactttt

SEQ ID NO: 418834 - DNA, 25 bp, Artificial
  probe
  misc_feature (1)..(25): SEQ ID NO: 5702; WAN024CL7; Start 50; Stop 74
ctccctacttgccttctttatctta

SEQ ID NO: 418835 - DNA, 25 bp, Artificial
  probe
  misc_feature (1)..(25): SEQ ID NO: 5702; WAN024CL7; Start 21; Stop 45
tagtgaagaaagtaagggagatacg

SEQ ID NO: 418836 - DNA, 25 bp, Artificial
  probe
  misc_feature (1)..(25): SEQ ID NO: 5702; WAN024CL7; Start 25; Stop 49
gaagaaagtaagggagatacgacac

SEQ ID NO: 418837 - DNA, 25 bp, Artificial
  probe
  misc_feature (1)..(25): SEQ ID NO: 5702; WAN024CL7; Start 23; Stop 47
gtgaagaaagtaagggagatacgac

SEQ ID NO: 418838 - DNA, 25 bp, Artificial
  probe
  misc_feature (1)..(25): SEQ ID NO: 5702; WAN024CL7; Start 22; Stop 46
agtgaagaaagtaagggagatacga

SEQ ID NO: 418839 - DNA, 25 bp, Artificial
  probe
  misc_feature (1)..(25): SEQ ID NO: 5702; WAN024CL7; Start 24; Stop 48
tgaagaaagtaagggagatacgaca

SEQ ID NO: 418840 - DNA, 25 bp, Artificial
  probe
  misc_feature (1)..(25): SEQ ID NO: 5702; WAN024CL7; Start 51; Stop 75
tccctacttgccttctttatcttat

SEQ ID NO: 418841 - DNA, 25 bp, Artificial
  probe
  misc_feature (1)..(25): SEQ ID NO: 5702; WAN024CL7; Start 52; Stop 76
ccctacttgccttctttatcttatt

SEQ ID NO: 418842 - DNA, 25 bp, Artificial
  probe
  misc_feature (1)..(25): SEQ ID NO: 5702; WAN024CL7; Start 49; Stop 73
cctccctacttgccttctttatctt

SEQ ID NO: 418843 - DNA, 25 bp, Artificial
  probe
  misc_feature (1)..(25): SEQ ID NO: 5702; WAN024CL7; Start 26; Stop 50
aagaaagtaagggagatacgacacc

SEQ ID NO: 418844 - DNA, 25 bp, Artificial
  probe
  misc_feature (1)..(25): SEQ ID NO: 5702; WAN024CL7; Start 98; Stop 122
tctttagagatttatggagcaaaca

SEQ ID NO: 418845 - DNA, 25 bp, Artificial
  probe
  misc_feature (1)..(25): SEQ ID NO: 5702; WAN024CL7; Start 58; Stop 82
ttgccttctttatcttattgtacga

SEQ ID NO: 418846 - DNA, 25 bp, Artificial
  probe
  misc_feature (1)..(25): SEQ ID NO: 5702; WAN024CL7; Start 20; Stop 44
ctagtgaagaaagtaagggagatac

SEQ ID NO: 418847 - DNA, 25 bp, Artificial
  probe
  misc_feature (1)..(25): SEQ ID NO: 5702; WAN024CL7; Start 1; Stop 25
ttgtcacatcttgtcctttctagtg

SEQ ID NO: 418848 - DNA, 25 bp, Artificial
  probe
  misc_feature (1)..(25): SEQ ID NO: 5702; WAN024CL7; Start 57; Stop 81
cttgccttctttatcttattgtacg

SEQ ID NO: 418849 - DNA, 25 bp, Artificial
  probe
  misc_feature (1)..(25): SEQ ID NO: 5702; WAN024CL7; Start 53; Stop 77
cctacttgccttctttatcttattg

SEQ ID NO: 418850 - DNA, 25 bp, Artificial
  probe
  misc_feature (1)..(25): SEQ ID NO: 5702; WAN024CL7; Start 59; Stop 83
tgccttctttatcttattgtacgat

SEQ ID NO: 418851 - DNA, 25 bp, Artificial
  probe
  misc_feature (1)..(25): SEQ ID NO: 5702; WAN024CL7; Start 48; Stop 72
acctccctacttgccttctttatct

SEQ ID NO: 418852 - DNA, 25 bp, Artificial
  probe
  misc_feature (1)..(25): SEQ ID NO: 5702; WAN024CL7; Start 47; Stop 71
cacctccctacttgccttctttatc

SEQ ID NO: 418853 - DNA, 25 bp, Artificial
  probe
  misc_feature (1)..(25): SEQ ID NO: 5702; WAN024CL7; Start 19; Stop 43
tctagtgaagaaagtaagggagata

SEQ ID NO: 418854 - DNA, 25 bp, Artificial
  probe
  misc_feature (1)..(25): SEQ ID NO: 5702; WAN024CL7; Start 60; Stop 84
gccttctttatcttattgtacgatg

SEQ ID NO: 418855 - DNA, 25 bp, Artificial
  probe
  misc_feature (1)..(25): SEQ ID NO: 5702; WAN024CL7; Start 99; Stop 123
ctttagagatttatggagcaaacat

SEQ ID NO: 418856 - DNA, 25 bp, Artificial
  probe
  misc_feature (1)..(25): SEQ ID NO: 5702; WAN024CL7; Start 54; Stop 78
ctacttgccttctttatcttattgt

SEQ ID NO: 418857 - DNA, 25 bp, Artificial
  probe
  misc_feature (1)..(25): SEQ ID NO: 5702; WAN024CL7; Start 46; Stop 70
acacctccctacttgccttctttat

SEQ ID NO: 418858 - DNA, 25 bp, Artificial
  probe
  misc_feature (1)..(25): SEQ ID NO: 5702; WAN024CL7; Start 28; Stop 52
gaaagtaagggagatacgacacctc

SEQ ID NO: 418859 - DNA, 25 bp, Artificial
  probe
  misc_feature (1)..(25): SEQ ID NO: 5702; WAN024CL7; Start 101; Stop 125
ttagagatttatggagcaaacattt

SEQ ID NO: 418860 - DNA, 25 bp, Artificial
  probe
  misc_feature (1)..(25): SEQ ID NO: 5702; WAN024CL7; Start 100; Stop 124
tttagagatttatggagcaaacatt

SEQ ID NO: 418861 - DNA, 25 bp, Artificial
  probe
  misc_feature (1)..(25): SEQ ID NO: 5702; WAN024CL7; Start 5; Stop 29
cacatcttgtcctttctagtgaaga

SEQ ID NO: 418862 - DNA, 25 bp, Artificial
  probe
  misc_feature (1)..(25): SEQ ID NO: 5702; WAN024CL7; Start 97; Stop 121
ctctttagagatttatggagcaaac

SEQ ID NO: 418863 - DNA, 25 bp, Artificial
  probe
  misc_feature (1)..(25): SEQ ID NO: 5702; WAN024CL7; Start 6; Stop 30
acatcttgtcctttctagtgaagaa

SEQ ID NO: 418864 - DNA, 25 bp, Artificial
  probe
  misc_feature (1)..(25): SEQ ID NO: 5702; WAN024CL7; Start 82; Stop 106
atgaaacgtctgcatctctttagag

SEQ ID NO: 418865 - DNA, 25 bp, Artificial
  probe
  misc_feature (1)..(25): SEQ ID NO: 5702; WAN024CL7; Start 27; Stop 51
agaaagtaagggagatacgacacct

SEQ ID NO: 418866 - DNA, 25 bp, Artificial
  probe
  misc_feature (1)..(25): SEQ ID NO: 5702; WAN024CL7; Start 56; Stop 80
acttgccttctttatcttattgtac

SEQ ID NO: 418867 - DNA, 25 bp, Artificial
  probe
  misc_feature (1)..(25): SEQ ID NO: 5703; WAN024G5Y; Start 47; Stop 71
gtgataataaggcgtatatagcgga

SEQ ID NO: 418868 - DNA, 25 bp, Artificial
  probe
  misc_feature (1)..(25): SEQ ID NO: 5703; WAN024G5Y; Start 53; Stop 77
ataaggcgtatatagcggataagag

SEQ ID NO: 418869 - DNA, 25 bp, Artificial
  probe
  misc_feature (1)..(25): SEQ ID NO: 5703; WAN024G5Y; Start 48; Stop 72
tgataataaggcgtatatagcggat

SEQ ID NO: 418870 - DNA, 25 bp, Artificial
  probe
  misc_feature (1)..(25): SEQ ID NO: 5703; WAN024G5Y; Start 52; Stop 76
aataaggcgtatatagcggataaga

SEQ ID NO: 418871 - DNA, 25 bp, Artificial
  probe
  misc_feature (1)..(25): SEQ ID NO: 5703; WAN024G5Y; Start 54; Stop 78
taaggcgtatatagcggataagagg

SEQ ID NO: 418872 - DNA, 25 bp, Artificial
  probe
  misc_feature (1)..(25): SEQ ID NO: 5703; WAN024G5Y; Start 46; Stop 70
cgtgataataaggcgtatatagcgg

SEQ ID NO: 418873 - DNA, 25 bp, Artificial
  probe
  misc_feature (1)..(25): SEQ ID NO: 5703; WAN024G5Y; Start 51; Stop 75
taataaggcgtatatagcggataag

SEQ ID NO: 418874 - DNA, 25 bp, Artificial
  probe
  misc_feature (1)..(25): SEQ ID NO: 5703; WAN024G5Y; Start 49; Stop 73
gataataaggcgtatatagcggata

SEQ ID NO: 418875 - DNA, 25 bp, Artificial
  probe
  misc_feature (1)..(25): SEQ ID NO: 5703; WAN024G5Y; Start 62; Stop 86
atatagcggataagagggcatcaaa

SEQ ID NO: 418876 - DNA, 25 bp, Artificial
  probe
  misc_feature (1)..(25): SEQ ID NO: 5703; WAN024G5Y; Start 50; Stop 74
ataataaggcgtatatagcggataa

SEQ ID NO: 418877 - DNA, 25 bp, Artificial
  probe
  misc_feature (1)..(25): SEQ ID NO: 5703; WAN024G5Y; Start 61; Stop 85
tatatagcggataagagggcatcaa

SEQ ID NO: 418878 - DNA, 25 bp, Artificial
  probe
  misc_feature (1)..(25): SEQ ID NO: 5703; WAN024G5Y; Start 1; Stop 25
ttgtcagaagaagggatagcgaaat

SEQ ID NO: 418879 - DNA, 25 bp, Artificial
  probe
  misc_feature (1)..(25): SEQ ID NO: 5703; WAN024G5Y; Start 60; Stop 84
gtatatagcggataagagggcatca

SEQ ID NO: 418880 - DNA, 25 bp, Artificial
  probe
  misc_feature (1)..(25): SEQ ID NO: 5703; WAN024G5Y; Start 63; Stop 87
tatagcggataagagggcatcaaac

SEQ ID NO: 418881 - DNA, 25 bp, Artificial
  probe
  misc_feature (1)..(25): SEQ ID NO: 5703; WAN024G5Y; Start 2; Stop 26
tgtcagaagaagggatagcgaaatc

SEQ ID NO: 418882 - DNA, 25 bp, Artificial
  probe
  misc_feature (1)..(25): SEQ ID NO: 5703; WAN024G5Y; Start 76; Stop 100
agggcatcaaactctaaagtccaaa

SEQ ID NO: 418883 - DNA, 25 bp, Artificial
  probe
  misc_feature (1)..(25): SEQ ID NO: 5703; WAN024G5Y; Start 59; Stop 83
cgtatatagcggataagagggcatc

SEQ ID NO: 418884 - DNA, 25 bp, Artificial
  probe
  misc_feature (1)..(25): SEQ ID NO: 5703; WAN024G5Y; Start 31; Stop 55
ctctacgaacaggaacgtgataata

SEQ ID NO: 418885 - DNA, 25 bp, Artificial
  probe
  misc_feature (1)..(25): SEQ ID NO: 5703; WAN024G5Y; Start 40; Stop 64
caggaacgtgataataaggcgtata

SEQ ID NO: 418886 - DNA, 25 bp, Artificial
  probe
  misc_feature (1)..(25): SEQ ID NO: 5703; WAN024G5Y; Start 32; Stop 56
tctacgaacaggaacgtgataataa

SEQ ID NO: 418887 - DNA, 25 bp, Artificial
  probe
  misc_feature (1)..(25): SEQ ID NO: 5703; WAN024G5Y; Start 41; Stop 65
aggaacgtgataataaggcgtatat

SEQ ID NO: 418888 - DNA, 25 bp, Artificial
  probe
  misc_feature (1)..(25): SEQ ID NO: 5703; WAN024G5Y; Start 34; Stop 58
tacgaacaggaacgtgataataagg

SEQ ID NO: 418889 - DNA, 25 bp, Artificial
  probe
  misc_feature (1)..(25): SEQ ID NO: 5703; WAN024G5Y; Start 75; Stop 99
gagggcatcaaactctaaagtccaa

SEQ ID NO: 418890 - DNA, 25 bp, Artificial
  probe
  misc_feature (1)..(25): SEQ ID NO: 5703; WAN024G5Y; Start 45; Stop 69
acgtgataataaggcgtatatagcg

SEQ ID NO: 418891 - DNA, 25 bp, Artificial
  probe
  misc_feature (1)..(25): SEQ ID NO: 5703; WAN024G5Y; Start 33; Stop 57
ctacgaacaggaacgtgataataag

SEQ ID NO: 418892 - DNA, 25 bp, Artificial
  probe
  misc_feature (1)..(25): SEQ ID NO: 5703; WAN024G5Y; Start 44; Stop 68
aacgtgataataaggcgtatatagc

SEQ ID NO: 418893 - DNA, 25 bp, Artificial
  probe
  misc_feature (1)..(25): SEQ ID NO: 5703; WAN024G5Y; Start 42; Stop 66
ggaacgtgataataaggcgtatata

SEQ ID NO: 418894 - DNA, 25 bp, Artificial
  probe
  misc_feature (1)..(25): SEQ ID NO: 5703; WAN024G5Y; Start 55; Stop 79
aaggcgtatatagcggataagaggg

SEQ ID NO: 418895 - DNA, 25 bp, Artificial
  probe
  misc_feature (1)..(25): SEQ ID NO: 5703; WAN024G5Y; Start 3; Stop 27
gtcagaagaagggatagcgaaatcg

SEQ ID NO: 418896 - DNA, 25 bp, Artificial
  probe
  misc_feature (1)..(25): SEQ ID NO: 5703; WAN024G5Y; Start 64; Stop 88
atagcggataagagggcatcaaact

SEQ ID NO: 418897 - DNA, 25 bp, Artificial
  probe
  misc_feature (1)..(25): SEQ ID NO: 5703; WAN024G5Y; Start 39; Stop 63
acaggaacgtgataataaggcgtat

SEQ ID NO: 418898 - DNA, 25 bp, Artificial
  probe
  misc_feature (1)..(25): SEQ ID NO: 5703; WAN024G5Y; Start 38; Stop 62
aacaggaacgtgataataaggcgta

SEQ ID NO: 418899 - DNA, 25 bp, Artificial
  probe
  misc_feature (1)..(25): SEQ ID NO: 5703; WAN024G5Y; Start 5; Stop 29
cagaagaagggatagcgaaatcgtg

SEQ ID NO: 418900 - DNA, 25 bp, Artificial
  probe
  misc_feature (1)..(25): SEQ ID NO: 5704; WAN024FQZ; Start 135; Stop 159
ttcaaactcgttatctgggtcaata

SEQ ID NO: 418901 - DNA, 25 bp, Artificial
  probe
  misc_feature (1)..(25): SEQ ID NO: 5704; WAN024FQZ; Start 136; Stop 160
tcaaactcgttatctgggtcaatag

SEQ ID NO: 418902 - DNA, 25 bp, Artificial
  probe
  misc_feature (1)..(25): SEQ ID NO: 5704; WAN024FQZ; Start 134; Stop 158
attcaaactcgttatctgggtcaat

SEQ ID NO: 418903 - DNA, 25 bp, Artificial
  probe
  misc_feature (1)..(25): SEQ ID NO: 5704; WAN024FQZ; Start 59; Stop 83
ctttaattgtagatagcctgtgtgc

SEQ ID NO: 418904 - DNA, 25 bp, Artificial
  probe
  misc_feature (1)..(25): SEQ ID NO: 5704; WAN024FQZ; Start 133; Stop 157
aattcaaactcgttatctgggtcaa

SEQ ID NO: 418905 - DNA, 25 bp, Artificial
  probe
  misc_feature (1)..(25): SEQ ID NO: 5704; WAN024FQZ; Start 61; Stop 85
ttaattgtagatagcctgtgtgcaa

SEQ ID NO: 418906 - DNA, 25 bp, Artificial
  probe
  misc_feature (1)..(25): SEQ ID NO: 5704; WAN024FQZ; Start 137; Stop 161
caaactcgttatctgggtcaataga

SEQ ID NO: 418907 - DNA, 25 bp, Artificial
  probe
  misc_feature (1)..(25): SEQ ID NO: 5704; WAN024FQZ; Start 132; Stop 156
caattcaaactcgttatctgggtca

SEQ ID NO: 418908 - DNA, 25 bp, Artificial
  probe
  misc_feature (1)..(25): SEQ ID NO: 5704; WAN024FQZ; Start 56; Stop 80
ggtctttaattgtagatagcctgtg

SEQ ID NO: 418909 - DNA, 25 bp, Artificial
  probe
  misc_feature (1)..(25): SEQ ID NO: 5704; WAN024FQZ; Start 58; Stop 82
tctttaattgtagatagcctgtgtg

SEQ ID NO: 418910 - DNA, 25 bp, Artificial
  probe
  misc_feature (1)..(25): SEQ ID NO: 5704; WAN024FQZ; Start 57; Stop 81
gtctttaattgtagatagcctgtgt

SEQ ID NO: 418911 - DNA, 25 bp, Artificial
  probe
  misc_feature (1)..(25): SEQ ID NO: 5704; WAN024FQZ; Start 52; Stop 76
tcaaggtctttaattgtagatagcc

SEQ ID NO: 418912 - DNA, 25 bp, Artificial
  probe
  misc_feature (1)..(25): SEQ ID NO: 5704; WAN024FQZ; Start 55; Stop 79
aggtctttaattgtagatagcctgt

SEQ ID NO: 418913 - DNA, 25 bp, Artificial
  probe
  misc_feature (1)..(25): SEQ ID NO: 5704; WAN024FQZ; Start 159; Stop 183
agatgctgatgcttcatccataata

SEQ ID NO: 418914 - DNA, 25 bp, Artificial
  probe
  misc_feature (1)..(25): SEQ ID NO: 5704; WAN024FQZ; Start 158; Stop 182
tagatgctgatgcttcatccataat

SEQ ID NO: 418915 - DNA, 25 bp, Artificial
  probe
  misc_feature (1)..(25): SEQ ID NO: 5704; WAN024FQZ; Start 157; Stop 181
atagatgctgatgcttcatccataa

SEQ ID NO: 418916 - DNA, 25 bp, Artificial
  probe
  misc_feature (1)..(25): SEQ ID NO: 5704; WAN024FQZ; Start 156; Stop 180
aatagatgctgatgcttcatccata

SEQ ID NO: 418917 - DNA, 25 bp, Artificial
  probe
  misc_feature (1)..(25): SEQ ID NO: 5704; WAN024FQZ; Start 65; Stop 89
ttgtagatagcctgtgtgcaatcat

SEQ ID NO: 418918 - DNA, 25 bp, Artificial
  probe
  misc_feature (1)..(25): SEQ ID NO: 5704; WAN024FQZ; Start 131; Stop 155
gcaattcaaactcgttatctgggtc

SEQ ID NO: 418919 - DNA, 25 bp, Artificial
  probe
  misc_feature (1)..(25): SEQ ID NO: 5704; WAN024FQZ; Start 160; Stop 184
gatgctgatgcttcatccataataa

SEQ ID NO: 418920 - DNA, 25 bp, Artificial
  probe
  misc_feature (1)..(25): SEQ ID NO: 5704; WAN024FQZ; Start 62; Stop 86
taattgtagatagcctgtgtgcaat

SEQ ID NO: 418921 - DNA, 25 bp, Artificial
  probe
  misc_feature (1)..(25): SEQ ID NO: 5704; WAN024FQZ; Start 1; Stop 25
ttgtcagaccctctttctataattt

SEQ ID NO: 418922 - DNA, 25 bp, Artificial
  probe
  misc_feature (1)..(25): SEQ ID NO: 5704; WAN024FQZ; Start 161; Stop 185
atgctgatgcttcatccataataat

SEQ ID NO: 418923 - DNA, 25 bp, Artificial
  probe
  misc_feature (1)..(25): SEQ ID NO: 5704; WAN024FQZ; Start 155; Stop 179
caatagatgctgatgcttcatccat

SEQ ID NO: 418924 - DNA, 25 bp, Artificial
  probe
  misc_feature (1)..(25): SEQ ID NO: 5704; WAN024FQZ; Start 60; Stop 84
tttaattgtagatagcctgtgtgca

SEQ ID NO: 418925 - DNA, 25 bp, Artificial
  probe
  misc_feature (1)..(25): SEQ ID NO: 5704; WAN024FQZ; Start 54; Stop 78
aaggtctttaattgtagatagcctg

SEQ ID NO: 418926 - DNA, 25 bp, Artificial
  probe
  misc_feature (1)..(25): SEQ ID NO: 5704; WAN024FQZ; Start 53; Stop 77
caaggtctttaattgtagatagcct

SEQ ID NO: 418927 - DNA, 25 bp, Artificial
  probe
  misc_feature (1)..(25): SEQ ID NO: 5704; WAN024FQZ; Start 66; Stop 90
tgtagatagcctgtgtgcaatcatg

SEQ ID NO: 418928 - DNA, 25 bp, Artificial
  probe
  misc_feature (1)..(25): SEQ ID NO: 5704; WAN024FQZ; Start 63; Stop 87
aattgtagatagcctgtgtgcaatc

SEQ ID NO: 418929 - DNA, 25 bp, Artificial
  probe
  misc_feature (1)..(25): SEQ ID NO: 5704; WAN024FQZ; Start 145; Stop 169
ttatctgggtcaatagatgctgatg

SEQ ID NO: 418930 - DNA, 25 bp, Artificial
  probe
  misc_feature (1)..(25): SEQ ID NO: 5704; WAN024FQZ; Start 144; Stop 168
gttatctgggtcaatagatgctgat

SEQ ID NO: 418931 - DNA, 25 bp, Artificial
  probe
  misc_feature (1)..(25): SEQ ID NO: 5704; WAN024FQZ; Start 139; Stop 163
aactcgttatctgggtcaatagatg

SEQ ID NO: 418932 - DNA, 25 bp, Artificial
  probe
  misc_feature (1)..(25): SEQ ID NO: 5704; WAN024FQZ; Start 138; Stop 162
aaactcgttatctgggtcaatagat

SEQ ID NO: 418933 - DNA, 25 bp, Artificial
  probe
  misc_feature (1)..(25): SEQ ID NO: 5705; WAN024ESY; Start 24; Stop 48
cttcaaaagtagagattacaaggct

SEQ ID NO: 418934 - DNA, 25 bp, Artificial
  probe
  misc_feature (1)..(25): SEQ ID NO: 5705; WAN024ESY; Start 23; Stop 47
tcttcaaaagtagagattacaaggc

SEQ ID NO: 418935 - DNA, 25 bp, Artificial
  probe
  misc_feature (1)..(25): SEQ ID NO: 5705; WAN024ESY; Start 25; Stop 49
ttcaaaagtagagattacaaggctt

SEQ ID NO: 418936 - DNA, 25 bp, Artificial
  probe
  misc_feature (1)..(25): SEQ ID NO: 5705; WAN024ESY; Start 42; Stop 66
caaggcttgtttaagaaagaattca

SEQ ID NO: 418937 - DNA, 25 bp, Artificial
  probe
  misc_feature (1)..(25): SEQ ID NO: 5705; WAN024ESY; Start 26; Stop 50
tcaaaagtagagattacaaggcttg

SEQ ID NO: 418938 - DNA, 25 bp, Artificial
  probe
  misc_feature (1)..(25): SEQ ID NO: 5705; WAN024ESY; Start 44; Stop 68
aggcttgtttaagaaagaattcaaa

SEQ ID NO: 418939 - DNA, 25 bp, Artificial
  probe
  misc_feature (1)..(25): SEQ ID NO: 5705; WAN024ESY; Start 43; Stop 67
aaggcttgtttaagaaagaattcaa

SEQ ID NO: 418940 - DNA, 25 bp, Artificial
  probe
  misc_feature (1)..(25): SEQ ID NO: 5705; WAN024ESY; Start 45; Stop 69
ggcttgtttaagaaagaattcaaag

SEQ ID NO: 418941 - DNA, 25 bp, Artificial
  probe
  misc_feature (1)..(25): SEQ ID NO: 5705; WAN024ESY; Start 49; Stop 73
tgtttaagaaagaattcaaagacct

SEQ ID NO: 418942 - DNA, 25 bp, Artificial
  probe
  misc_feature (1)..(25): SEQ ID NO: 5705; WAN024ESY; Start 22; Stop 46
ttcttcaaaagtagagattacaagg

SEQ ID NO: 418943 - DNA, 25 bp, Artificial
  probe
  misc_feature (1)..(25): SEQ ID NO: 5705; WAN024ESY; Start 55; Stop 79
agaaagaattcaaagaccttgacaa

SEQ ID NO: 418944 - DNA, 25 bp, Artificial
  probe
  misc_feature (1)..(25): SEQ ID NO: 5705; WAN024ESY; Start 54; Stop 78
aagaaagaattcaaagaccttgaca

SEQ ID NO: 418945 - DNA, 25 bp, Artificial
  probe
  misc_feature (1)..(25): SEQ ID NO: 5705; WAN024ESY; Start 46; Stop 70
gcttgtttaagaaagaattcaaaga

SEQ ID NO: 418946 - DNA, 25 bp, Artificial
  probe
  misc_feature (1)..(25): SEQ ID NO: 5705; WAN024ESY; Start 29; Stop 53
aaagtagagattacaaggcttgttt

SEQ ID NO: 418947 - DNA, 25 bp, Artificial
  probe
  misc_feature (1)..(25): SEQ ID NO: 5705; WAN024ESY; Start 34; Stop 58
agagattacaaggcttgtttaagaa

SEQ ID NO: 418948 - DNA, 25 bp, Artificial
  probe
  misc_feature (1)..(25): SEQ ID NO: 5705; WAN024ESY; Start 56; Stop 80
gaaagaattcaaagaccttgacaaa

SEQ ID NO: 418949 - DNA, 25 bp, Artificial
  probe
  misc_feature (1)..(25): SEQ ID NO: 5705; WAN024ESY; Start 48; Stop 72
ttgtttaagaaagaattcaaagacc

SEQ ID NO: 418950 - DNA, 25 bp, Artificial
  probe
  misc_feature (1)..(25): SEQ ID NO: 5705; WAN024ESY; Start 31; Stop 55
agtagagattacaaggcttgtttaa

SEQ ID NO: 418951 - DNA, 25 bp, Artificial
  probe
  misc_feature (1)..(25): SEQ ID NO: 5705; WAN024ESY; Start 30; Stop 54
aagtagagattacaaggcttgttta

SEQ ID NO: 418952 - DNA, 25 bp, Artificial
  probe
  misc_feature (1)..(25): SEQ ID NO: 5705; WAN024ESY; Start 37; Stop 61
gattacaaggcttgtttaagaaaga

SEQ ID NO: 418953 - DNA, 25 bp, Artificial
  probe
  misc_feature (1)..(25): SEQ ID NO: 5705; WAN024ESY; Start 36; Stop 60
agattacaaggcttgtttaagaaag

SEQ ID NO: 418954 - DNA, 25 bp, Artificial
  probe
  misc_feature (1)..(25): SEQ ID NO: 5705; WAN024ESY; Start 35; Stop 59
gagattacaaggcttgtttaagaaa

SEQ ID NO: 418955 - DNA, 25 bp, Artificial
  probe
  misc_feature (1)..(25): SEQ ID NO: 5705; WAN024ESY; Start 41; Stop 65
acaaggcttgtttaagaaagaattc

SEQ ID NO: 418956 - DNA, 25 bp, Artificial
  probe
  misc_feature (1)..(25): SEQ ID NO: 5705; WAN024ESY; Start 57; Stop 81
aaagaattcaaagaccttgacaaat

SEQ ID NO: 418957 - DNA, 25 bp, Artificial
  probe
  misc_feature (1)..(25): SEQ ID NO: 5705; WAN024ESY; Start 33; Stop 57
tagagattacaaggcttgtttaaga

SEQ ID NO: 418958 - DNA, 25 bp, Artificial
  probe
  misc_feature (1)..(25): SEQ ID NO: 5705; WAN024ESY; Start 32; Stop 56
gtagagattacaaggcttgtttaag

SEQ ID NO: 418959 - DNA, 25 bp, Artificial
  probe
  misc_feature (1)..(25): SEQ ID NO: 5705; WAN024ESY; Start 50; Stop 74
gtttaagaaagaattcaaagacctt

SEQ ID NO: 418960 - DNA, 25 bp, Artificial
  probe
  misc_feature (1)..(25): SEQ ID NO: 5705; WAN024ESY; Start 51; Stop 75
tttaagaaagaattcaaagaccttg

SEQ ID NO: 418961 - DNA, 25 bp, Artificial
  probe
  misc_feature (1)..(25): SEQ ID NO: 5705; WAN024ESY; Start 53; Stop 77
taagaaagaattcaaagaccttgac

SEQ ID NO: 418962 - DNA, 25 bp, Artificial
  probe
  misc_feature (1)..(25): SEQ ID NO: 5705; WAN024ESY; Start 40; Stop 64
tacaaggcttgtttaagaaagaatt

SEQ ID NO: 418963 - DNA, 25 bp, Artificial
  probe
  misc_feature (1)..(25): SEQ ID NO: 5705; WAN024ESY; Start 39; Stop 63
ttacaaggcttgtttaagaaagaat

SEQ ID NO: 418964 - DNA, 25 bp, Artificial
  probe
  misc_feature (1)..(25): SEQ ID NO: 5705; WAN024ESY; Start 38; Stop 62
attacaaggcttgtttaagaaagaa

SEQ ID NO: 418965 - DNA, 25 bp, Artificial
  probe
  misc_feature (1)..(25): SEQ ID NO: 5705; WAN024ESY; Start 59; Stop 83
agaattcaaagaccttgacaaataa

SEQ ID NO: 418966 - DNA, 25 bp, Artificial
  probe
  misc_feature (1)..(25): SEQ ID NO: 5706; WAN024C6B; Start 21; Stop 45
atatctaaggacatatgctacctcc

SEQ ID NO: 418967 - DNA, 25 bp, Artificial
  probe
  misc_feature (1)..(25): SEQ ID NO: 5706; WAN024C6B; Start 54; Stop 78
cattataccatgtttctctgtagct

SEQ ID NO: 418968 - DNA, 25 bp, Artificial
  probe
  misc_feature (1)..(25): SEQ ID NO: 5706; WAN024C6B; Start 56; Stop 80
ttataccatgtttctctgtagcttt

SEQ ID NO: 418969 - DNA, 25 bp, Artificial
  probe
  misc_feature (1)..(25): SEQ ID NO: 5706; WAN024C6B; Start 55; Stop 79
attataccatgtttctctgtagctt

SEQ ID NO: 418970 - DNA, 25 bp, Artificial
  probe
  misc_feature (1)..(25): SEQ ID NO: 5706; WAN024C6B; Start 35; Stop 59
atgctacctcctttagatacattat

SEQ ID NO: 418971 - DNA, 25 bp, Artificial
  probe
  misc_feature (1)..(25): SEQ ID NO: 5706; WAN024C6B; Start 33; Stop 57
atatgctacctcctttagatacatt

SEQ ID NO: 418972 - DNA, 25 bp, Artificial
  probe
  misc_feature (1)..(25): SEQ ID NO: 5706; WAN024C6B; Start 141; Stop 165
cctcaaacccaaatataaaacgcat

SEQ ID NO: 418973 - DNA, 25 bp, Artificial
  probe
  misc_feature (1)..(25): SEQ ID NO: 5706; WAN024C6B; Start 98; Stop 122
ttgtcatatctaagttttcagcacg

SEQ ID NO: 418974 - DNA, 25 bp, Artificial
  probe
  misc_feature (1)..(25): SEQ ID NO: 5706; WAN024C6B; Start 144; Stop 168
caaacccaaatataaaacgcattct

SEQ ID NO: 418975 - DNA, 25 bp, Artificial
  probe
  misc_feature (1)..(25): SEQ ID NO: 5706; WAN024C6B; Start 143; Stop 167
tcaaacccaaatataaaacgcattc

SEQ ID NO: 418976 - DNA, 25 bp, Artificial
  probe
  misc_feature (1)..(25): SEQ ID NO: 5706; WAN024C6B; Start 142; Stop 166
ctcaaacccaaatataaaacgcatt

SEQ ID NO: 418977 - DNA, 25 bp, Artificial
  probe
  misc_feature (1)..(25): SEQ ID NO: 5706; WAN024C6B; Start 40; Stop 64
acctcctttagatacattataccat

SEQ ID NO: 418978 - DNA, 25 bp, Artificial
  probe
  misc_feature (1)..(25): SEQ ID NO: 5706; WAN024C6B; Start 31; Stop 55
acatatgctacctcctttagataca

SEQ ID NO: 418979 - DNA, 25 bp, Artificial
  probe
  misc_feature (1)..(25): SEQ ID NO: 5706; WAN024C6B; Start 111; Stop 135
gttttcagcacgcttatcctatttt

SEQ ID NO: 418980 - DNA, 25 bp, Artificial
  probe
  misc_feature (1)..(25): SEQ ID NO: 5706; WAN024C6B; Start 36; Stop 60
tgctacctcctttagatacattata

SEQ ID NO: 418981 - DNA, 25 bp, Artificial
  probe
  misc_feature (1)..(25): SEQ ID NO: 5706; WAN024C6B; Start 30; Stop 54
gacatatgctacctcctttagatac

SEQ ID NO: 418982 - DNA, 25 bp, Artificial
  probe
  misc_feature (1)..(25): SEQ ID NO: 5706; WAN024C6B; Start 112; Stop 136
ttttcagcacgcttatcctatttta

SEQ ID NO: 418983 - DNA, 25 bp, Artificial
  probe
  misc_feature (1)..(25): SEQ ID NO: 5706; WAN024C6B; Start 110; Stop 134
agttttcagcacgcttatcctattt

SEQ ID NO: 418984 - DNA, 25 bp, Artificial
  probe
  misc_feature (1)..(25): SEQ ID NO: 5706; WAN024C6B; Start 99; Stop 123
tgtcatatctaagttttcagcacgc

SEQ ID NO: 418985 - DNA, 25 bp, Artificial
  probe
  misc_feature (1)..(25): SEQ ID NO: 5706; WAN024C6B; Start 113; Stop 137
tttcagcacgcttatcctattttat

SEQ ID NO: 418986 - DNA, 25 bp, Artificial
  probe
  misc_feature (1)..(25): SEQ ID NO: 5706; WAN024C6B; Start 146; Stop 170
aacccaaatataaaacgcattcttt

SEQ ID NO: 418987 - DNA, 25 bp, Artificial
  probe
  misc_feature (1)..(25): SEQ ID NO: 5706; WAN024C6B; Start 145; Stop 169
aaacccaaatataaaacgcattctt

SEQ ID NO: 418988 - DNA, 25 bp, Artificial
  probe
  misc_feature (1)..(25): SEQ ID NO: 5706; WAN024C6B; Start 101; Stop 125
tcatatctaagttttcagcacgctt

SEQ ID NO: 418989 - DNA, 25 bp, Artificial
  probe
  misc_feature (1)..(25): SEQ ID NO: 5706; WAN024C6B; Start 34; Stop 58
tatgctacctcctttagatacatta

SEQ ID NO: 418990 - DNA, 25 bp, Artificial
  probe
  misc_feature (1)..(25): SEQ ID NO: 5706; WAN024C6B; Start 109; Stop 133
aagttttcagcacgcttatcctatt

SEQ ID NO: 418991 - DNA, 25 bp, Artificial
  probe
  misc_feature (1)..(25): SEQ ID NO: 5706; WAN024C6B; Start 100; Stop 124
gtcatatctaagttttcagcacgct

SEQ ID NO: 418992 - DNA, 25 bp, Artificial
  probe
  misc_feature (1)..(25): SEQ ID NO: 5706; WAN024C6B; Start 18; Stop 42
tctatatctaaggacatatgctacc

SEQ ID NO: 418993 - DNA, 25 bp, Artificial
  probe
  misc_feature (1)..(25): SEQ ID NO: 5706; WAN024C6B; Start 53; Stop 77
acattataccatgtttctctgtagc

SEQ ID NO: 418994 - DNA, 25 bp, Artificial
  probe
  misc_feature (1)..(25): SEQ ID NO: 5706; WAN024C6B; Start 37; Stop 61
gctacctcctttagatacattatac

SEQ ID NO: 418995 - DNA, 25 bp, Artificial
  probe
  misc_feature (1)..(25): SEQ ID NO: 5706; WAN024C6B; Start 97; Stop 121
tttgtcatatctaagttttcagcac

SEQ ID NO: 418996 - DNA, 25 bp, Artificial
  probe
  misc_feature (1)..(25): SEQ ID NO: 5706; WAN024C6B; Start 96; Stop 120
gtttgtcatatctaagttttcagca

SEQ ID NO: 418997 - DNA, 25 bp, Artificial
  probe
  misc_feature (1)..(25): SEQ ID NO: 5706; WAN024C6B; Start 95; Stop 119
tgtttgtcatatctaagttttcagc

SEQ ID NO: 418998 - DNA, 25 bp, Artificial
  probe
  misc_feature (1)..(25): SEQ ID NO: 5706; WAN024C6B; Start 29; Stop 53
ggacatatgctacctcctttagata

SEQ ID NO: 418999 - DNA, 25 bp, Artificial
  probe
  misc_feature (1)..(25): SEQ ID NO: 5707; WAN024C98; Start 47; Stop 71
atctcaatcacacttcctattcaag

SEQ ID NO: 419000 - DNA, 25 bp, Artificial
  probe
  misc_feature (1)..(25): SEQ ID NO: 5707; WAN024C98; Start 46; Stop 70
gatctcaatcacacttcctattcaa

SEQ ID NO: 419001 - DNA, 25 bp, Artificial
  probe
  misc_feature (1)..(25): SEQ ID NO: 5707; WAN024C98; Start 45; Stop 69
tgatctcaatcacacttcctattca

SEQ ID NO: 419002 - DNA, 25 bp, Artificial
  probe
  misc_feature (1)..(25): SEQ ID NO: 5707; WAN024C98; Start 42; Stop 66
tgatgatctcaatcacacttcctat

SEQ ID NO: 419003 - DNA, 25 bp, Artificial
  probe
  misc_feature (1)..(25): SEQ ID NO: 5707; WAN024C98; Start 48; Stop 72
tctcaatcacacttcctattcaagt

SEQ ID NO: 419004 - DNA, 25 bp, Artificial
  probe
  misc_feature (1)..(25): SEQ ID NO: 5707; WAN024C98; Start 41; Stop 65
ttgatgatctcaatcacacttccta

SEQ ID NO: 419005 - DNA, 25 bp, Artificial
  probe
  misc_feature (1)..(25): SEQ ID NO: 5707; WAN024C98; Start 44; Stop 68
atgatctcaatcacacttcctattc

SEQ ID NO: 419006 - DNA, 25 bp, Artificial
  probe
  misc_feature (1)..(25): SEQ ID NO: 5707; WAN024C98; Start 43; Stop 67
gatgatctcaatcacacttcctatt

SEQ ID NO: 419007 - DNA, 25 bp, Artificial
  probe
  misc_feature (1)..(25): SEQ ID NO: 5707; WAN024C98; Start 51; Stop 75
caatcacacttcctattcaagtagt

SEQ ID NO: 419008 - DNA, 25 bp, Artificial
  probe
  misc_feature (1)..(25): SEQ ID NO: 5707; WAN024C98; Start 50; Stop 74
tcaatcacacttcctattcaagtag

SEQ ID NO: 419009 - DNA, 25 bp, Artificial
  probe
  misc_feature (1)..(25): SEQ ID NO: 5707; WAN024C98; Start 49; Stop 73
ctcaatcacacttcctattcaagta

SEQ ID NO: 419010 - DNA, 25 bp, Artificial
  probe
  misc_feature (1)..(25): SEQ ID NO: 5707; WAN024C98; Start 39; Stop 63
ctttgatgatctcaatcacacttcc

SEQ ID NO: 419011 - DNA, 25 bp, Artificial
  probe
  misc_feature (1)..(25): SEQ ID NO: 5707; WAN024C98; Start 40; Stop 64
tttgatgatctcaatcacacttcct

SEQ ID NO: 419012 - DNA, 25 bp, Artificial
  probe
  misc_feature (1)..(25): SEQ ID NO: 5707; WAN024C98; Start 36; Stop 60
tcactttgatgatctcaatcacact

SEQ ID NO: 419013 - DNA, 25 bp, Artificial
  probe
  misc_feature (1)..(25): SEQ ID NO: 5707; WAN024C98; Start 37; Stop 61
cactttgatgatctcaatcacactt

SEQ ID NO: 419014 - DNA, 25 bp, Artificial
  probe
  misc_feature (1)..(25): SEQ ID NO: 5707; WAN024C98; Start 35; Stop 59
atcactttgatgatctcaatcacac

SEQ ID NO: 419015 - DNA, 25 bp, Artificial
  probe
  misc_feature (1)..(25): SEQ ID NO: 5707; WAN024C98; Start 38; Stop 62
actttgatgatctcaatcacacttc

SEQ ID NO: 419016 - DNA, 25 bp, Artificial
  probe
  misc_feature (1)..(25): SEQ ID NO: 5707; WAN024C98; Start 34; Stop 58
aatcactttgatgatctcaatcaca

SEQ ID NO: 419017 - DNA, 25 bp, Artificial
  probe
  misc_feature (1)..(25): SEQ ID NO: 5707; WAN024C98; Start 33; Stop 57
gaatcactttgatgatctcaatcac

SEQ ID NO: 419018 - DNA, 25 bp, Artificial
  probe
  misc_feature (1)..(25): SEQ ID NO: 5707; WAN024C98; Start 32; Stop 56
agaatcactttgatgatctcaatca

SEQ ID NO: 419019 - DNA, 25 bp, Artificial
  probe
  misc_feature (1)..(25): SEQ ID NO: 5707; WAN024C98; Start 26; Stop 50
tgatagagaatcactttgatgatct

SEQ ID NO: 419020 - DNA, 25 bp, Artificial
  probe
  misc_feature (1)..(25): SEQ ID NO: 5707; WAN024C98; Start 30; Stop 54
agagaatcactttgatgatctcaat

SEQ ID NO: 419021 - DNA, 25 bp, Artificial
  probe
  misc_feature (1)..(25): SEQ ID NO: 5707; WAN024C98; Start 31; Stop 55
gagaatcactttgatgatctcaatc

SEQ ID NO: 419022 - DNA, 25 bp, Artificial
  probe
  misc_feature (1)..(25): SEQ ID NO: 5707; WAN024C98; Start 29; Stop 53
tagagaatcactttgatgatctcaa

SEQ ID NO: 419023 - DNA, 25 bp, Artificial
  probe
  misc_feature (1)..(25): SEQ ID NO: 5707; WAN024C98; Start 28; Stop 52
atagagaatcactttgatgatctca

SEQ ID NO: 419024 - DNA, 25 bp, Artificial
  probe
  misc_feature (1)..(25): SEQ ID NO: 5707; WAN024C98; Start 27; Stop 51
gatagagaatcactttgatgatctc

SEQ ID NO: 419025 - DNA, 25 bp, Artificial
  probe
  misc_feature (1)..(25): SEQ ID NO: 5707; WAN024C98; Start 14; Stop 38
aaatagaagatgtgatagagaatca

SEQ ID NO: 419026 - DNA, 25 bp, Artificial
  probe
  misc_feature (1)..(25): SEQ ID NO: 5708; WAN024F5J; Start 205; Stop 229
atttgtcactctctttattctgcgt

SEQ ID NO: 419027 - DNA, 25 bp, Artificial
  probe
  misc_feature (1)..(25): SEQ ID NO: 5708; WAN024F5J; Start 204; Stop 228
aatttgtcactctctttattctgcg

SEQ ID NO: 419028 - DNA, 25 bp, Artificial
  probe
  misc_feature (1)..(25): SEQ ID NO: 5708; WAN024F5J; Start 206; Stop 230
tttgtcactctctttattctgcgtc

SEQ ID NO: 419029 - DNA, 25 bp, Artificial
  probe
  misc_feature (1)..(25): SEQ ID NO: 5708; WAN024F5J; Start 211; Stop 235
cactctctttattctgcgtcttctg

SEQ ID NO: 419030 - DNA, 25 bp, Artificial
  probe
  misc_feature (1)..(25): SEQ ID NO: 5708; WAN024F5J; Start 210; Stop 234
tcactctctttattctgcgtcttct

SEQ ID NO: 419031 - DNA, 25 bp, Artificial
  probe
  misc_feature (1)..(25): SEQ ID NO: 5708; WAN024F5J; Start 209; Stop 233
gtcactctctttattctgcgtcttc

SEQ ID NO: 419032 - DNA, 25 bp, Artificial
  probe
  misc_feature (1)..(25): SEQ ID NO: 5708; WAN024F5J; Start 214; Stop 238
tctctttattctgcgtcttctgcta

SEQ ID NO: 419033 - DNA, 25 bp, Artificial
  probe
  misc_feature (1)..(25): SEQ ID NO: 5708; WAN024F5J; Start 215; Stop 239
ctctttattctgcgtcttctgctag

SEQ ID NO: 419034 - DNA, 25 bp, Artificial
  probe
  misc_feature (1)..(25): SEQ ID NO: 5708; WAN024F5J; Start 119; Stop 143
tttgcctagtatccttagtttcact

SEQ ID NO: 419035 - DNA, 25 bp, Artificial
  probe
  misc_feature (1)..(25): SEQ ID NO: 5708; WAN024F5J; Start 208; Stop 232
tgtcactctctttattctgcgtctt

SEQ ID NO: 419036 - DNA, 25 bp, Artificial
  probe
  misc_feature (1)..(25): SEQ ID NO: 5708; WAN024F5J; Start 207; Stop 231
ttgtcactctctttattctgcgtct

SEQ ID NO: 419037 - DNA, 25 bp, Artificial
  probe
  misc_feature (1)..(25): SEQ ID NO: 5708; WAN024F5J; Start 220; Stop 244
tattctgcgtcttctgctaggagtt

SEQ ID NO: 419038 - DNA, 25 bp, Artificial
  probe
  misc_feature (1)..(25): SEQ ID NO: 5708; WAN024F5J; Start 219; Stop 243
ttattctgcgtcttctgctaggagt

SEQ ID NO: 419039 - DNA, 25 bp, Artificial
  probe
  misc_feature (1)..(25): SEQ ID NO: 5708; WAN024F5J; Start 241; Stop 265
agtttagctcttgtttcttcatcca

SEQ ID NO: 419040 - DNA, 25 bp, Artificial
  probe
  misc_feature (1)..(25): SEQ ID NO: 5708; WAN024F5J; Start 213; Stop 237
ctctctttattctgcgtcttctgct

SEQ ID NO: 419041 - DNA, 25 bp, Artificial
  probe
  misc_feature (1)..(25): SEQ ID NO: 5708; WAN024F5J; Start 242; Stop 266
gtttagctcttgtttcttcatccaa

SEQ ID NO: 419042 - DNA, 25 bp, Artificial
  probe
  misc_feature (1)..(25): SEQ ID NO: 5708; WAN024F5J; Start 218; Stop 242
tttattctgcgtcttctgctaggag

SEQ ID NO: 419043 - DNA, 25 bp, Artificial
  probe
  misc_feature (1)..(25): SEQ ID NO: 5708; WAN024F5J; Start 217; Stop 241
ctttattctgcgtcttctgctagga

SEQ ID NO: 419044 - DNA, 25 bp, Artificial
  probe
  misc_feature (1)..(25): SEQ ID NO: 5708; WAN024F5J; Start 216; Stop 240
tctttattctgcgtcttctgctagg

SEQ ID NO: 419045 - DNA, 25 bp, Artificial
  probe
  misc_feature (1)..(25): SEQ ID NO: 5708; WAN024F5J; Start 203; Stop 227
taatttgtcactctctttattctgc

SEQ ID NO: 419046 - DNA, 25 bp, Artificial
  probe
  misc_feature (1)..(25): SEQ ID NO: 5708; WAN024F5J; Start 243; Stop 267
tttagctcttgtttcttcatccaaa

SEQ ID NO: 419047 - DNA, 25 bp, Artificial
  probe
  misc_feature (1)..(25): SEQ ID NO: 5708; WAN024F5J; Start 240; Stop 264
gagtttagctcttgtttcttcatcc

SEQ ID NO: 419048 - DNA, 25 bp, Artificial
  probe
  misc_feature (1)..(25): SEQ ID NO: 5708; WAN024F5J; Start 239; Stop 263
ggagtttagctcttgtttcttcatc

SEQ ID NO: 419049 - DNA, 25 bp, Artificial
  probe
  misc_feature (1)..(25): SEQ ID NO: 5708; WAN024F5J; Start 238; Stop 262
aggagtttagctcttgtttcttcat

SEQ ID NO: 419050 - DNA, 25 bp, Artificial
  probe
  misc_feature (1)..(25): SEQ ID NO: 5708; WAN024F5J; Start 237; Stop 261
taggagtttagctcttgtttcttca

SEQ ID NO: 419051 - DNA, 25 bp, Artificial
  probe
  misc_feature (1)..(25): SEQ ID NO: 5708; WAN024F5J; Start 212; Stop 236
actctctttattctgcgtcttctgc

SEQ ID NO: 419052 - DNA, 25 bp, Artificial
  probe
  misc_feature (1)..(25): SEQ ID NO: 5708; WAN024F5J; Start 201; Stop 225
cgtaatttgtcactctctttattct

SEQ ID NO: 419053 - DNA, 25 bp, Artificial
  probe
  misc_feature (1)..(25): SEQ ID NO: 5708; WAN024F5J; Start 200; Stop 224
tcgtaatttgtcactctctttattc

SEQ ID NO: 419054 - DNA, 25 bp, Artificial
  probe
  misc_feature (1)..(25): SEQ ID NO: 5708; WAN024F5J; Start 120; Stop 144
ttgcctagtatccttagtttcacta

SEQ ID NO: 419055 - DNA, 25 bp, Artificial
  probe
  misc_feature (1)..(25): SEQ ID NO: 5708; WAN024F5J; Start 236; Stop 260
ctaggagtttagctcttgtttcttc

SEQ ID NO: 419056 - DNA, 25 bp, Artificial
  probe
  misc_feature (1)..(25): SEQ ID NO: 5708; WAN024F5J; Start 36; Stop 60
tttccagtttgccttatgtgattgg

SEQ ID NO: 419057 - DNA, 25 bp, Artificial
  probe
  misc_feature (1)..(25): SEQ ID NO: 5708; WAN024F5J; Start 199; Stop 223
ttcgtaatttgtcactctctttatt

SEQ ID NO: 419058 - DNA, 25 bp, Artificial
  probe
  misc_feature (1)..(25): SEQ ID NO: 5708; WAN024F5J; Start 198; Stop 222
tttcgtaatttgtcactctctttat

SEQ ID NO: 419059 - DNA, 25 bp, Artificial
  probe
  misc_feature (1)..(25): SEQ ID NO: 5709; WAN024DAY; Start 445; Stop 469
tacagatatgttggttacttggagc

SEQ ID NO: 419060 - DNA, 25 bp, Artificial
  probe
  misc_feature (1)..(25): SEQ ID NO: 5709; WAN024DAY; Start 442; Stop 466
ggttacagatatgttggttacttgg

SEQ ID NO: 419061 - DNA, 25 bp, Artificial
  probe
  misc_feature (1)..(25): SEQ ID NO: 5709; WAN024DAY; Start 441; Stop 465
tggttacagatatgttggttacttg

SEQ ID NO: 419062 - DNA, 25 bp, Artificial
  probe
  misc_feature (1)..(25): SEQ ID NO: 5709; WAN024DAY; Start 391; Stop 415
ttgaatgctaacatccatgagtctg

SEQ ID NO: 419063 - DNA, 25 bp, Artificial
  probe
  misc_feature (1)..(25): SEQ ID NO: 5709; WAN024DAY; Start 443; Stop 467
gttacagatatgttggttacttgga

SEQ ID NO: 419064 - DNA, 25 bp, Artificial
  probe
  misc_feature (1)..(25): SEQ ID NO: 5709; WAN024DAY; Start 455; Stop 479
ttggttacttggagcttgatgataa

SEQ ID NO: 419065 - DNA, 25 bp, Artificial
  probe
  misc_feature (1)..(25): SEQ ID NO: 5709; WAN024DAY; Start 450; Stop 474
atatgttggttacttggagcttgat

SEQ ID NO: 419066 - DNA, 25 bp, Artificial
  probe
  misc_feature (1)..(25): SEQ ID NO: 5709; WAN024DAY; Start 444; Stop 468
ttacagatatgttggttacttggag

SEQ ID NO: 419067 - DNA, 25 bp, Artificial
  probe
  misc_feature (1)..(25): SEQ ID NO: 5709; WAN024DAY; Start 454; Stop 478
gttggttacttggagcttgatgata

SEQ ID NO: 419068 - DNA, 25 bp, Artificial
  probe
  misc_feature (1)..(25): SEQ ID NO: 5709; WAN024DAY; Start 449; Stop 473
gatatgttggttacttggagcttga

SEQ ID NO: 419069 - DNA, 25 bp, Artificial
  probe
  misc_feature (1)..(25): SEQ ID NO: 5709; WAN024DAY; Start 448; Stop 472
agatatgttggttacttggagcttg

SEQ ID NO: 419070 - DNA, 25 bp, Artificial
  probe
  misc_feature (1)..(25): SEQ ID NO: 5709; WAN024DAY; Start 447; Stop 471
cagatatgttggttacttggagctt

SEQ ID NO: 419071 - DNA, 25 bp, Artificial
  probe
  misc_feature (1)..(25): SEQ ID NO: 5709; WAN024DAY; Start 440; Stop 464
ctggttacagatatgttggttactt

SEQ ID NO: 419072 - DNA, 25 bp, Artificial
  probe
  misc_feature (1)..(25): SEQ ID NO: 5709; WAN024DAY; Start 230; Stop 254
acacaggaagttctcaatctattat

SEQ ID NO: 419073 - DNA, 25 bp, Artificial
  probe
  misc_feature (1)..(25): SEQ ID NO: 5709; WAN024DAY; Start 451; Stop 475
tatgttggttacttggagcttgatg

SEQ ID NO: 419074 - DNA, 25 bp, Artificial
  probe
  misc_feature (1)..(25): SEQ ID NO: 5709; WAN024DAY; Start 229; Stop 253
aacacaggaagttctcaatctatta

SEQ ID NO: 419075 - DNA, 25 bp, Artificial
  probe
  misc_feature (1)..(25): SEQ ID NO: 5709; WAN024DAY; Start 570; Stop 594
gaagcctgactatacgcaaccaata

SEQ ID NO: 419076 - DNA, 25 bp, Artificial
  probe
  misc_feature (1)..(25): SEQ ID NO: 5709; WAN024DAY; Start 231; Stop 255
cacaggaagttctcaatctattatg

SEQ ID NO: 419077 - DNA, 25 bp, Artificial
  probe
  misc_feature (1)..(25): SEQ ID NO: 5709; WAN024DAY; Start 274; Stop 298
gctatcgggagtcttattgtgatta

SEQ ID NO: 419078 - DNA, 25 bp, Artificial
  probe
  misc_feature (1)..(25): SEQ ID NO: 5709; WAN024DAY; Start 226; Stop 250
ccaaacacaggaagttctcaatcta

SEQ ID NO: 419079 - DNA, 25 bp, Artificial
  probe
  misc_feature (1)..(25): SEQ ID NO: 5709; WAN024DAY; Start 224; Stop 248
taccaaacacaggaagttctcaatc

SEQ ID NO: 419080 - DNA, 25 bp, Artificial
  probe
  misc_feature (1)..(25): SEQ ID NO: 5709; WAN024DAY; Start 232; Stop 256
acaggaagttctcaatctattatga

SEQ ID NO: 419081 - DNA, 25 bp, Artificial
  probe
  misc_feature (1)..(25): SEQ ID NO: 5709; WAN024DAY; Start 227; Stop 251
caaacacaggaagttctcaatctat

SEQ ID NO: 419082 - DNA, 25 bp, Artificial
  probe
  misc_feature (1)..(25): SEQ ID NO: 5709; WAN024DAY; Start 235; Stop 259
ggaagttctcaatctattatgactg

SEQ ID NO: 419083 - DNA, 25 bp, Artificial
  probe
  misc_feature (1)..(25): SEQ ID NO: 5709; WAN024DAY; Start 233; Stop 257
caggaagttctcaatctattatgac

SEQ ID NO: 419084 - DNA, 25 bp, Artificial
  probe
  misc_feature (1)..(25): SEQ ID NO: 5709; WAN024DAY; Start 571; Stop 595
aagcctgactatacgcaaccaatag

SEQ ID NO: 419085 - DNA, 25 bp, Artificial
  probe
  misc_feature (1)..(25): SEQ ID NO: 5709; WAN024DAY; Start 527; Stop 551
aacccaaagttgtaacagagaaagg

SEQ ID NO: 419086 - DNA, 25 bp, Artificial
  probe
  misc_feature (1)..(25): SEQ ID NO: 5709; WAN024DAY; Start 234; Stop 258
aggaagttctcaatctattatgact

SEQ ID NO: 419087 - DNA, 25 bp, Artificial
  probe
  misc_feature (1)..(25): SEQ ID NO: 5709; WAN024DAY; Start 446; Stop 470
acagatatgttggttacttggagct

SEQ ID NO: 419088 - DNA, 25 bp, Artificial
  probe
  misc_feature (1)..(25): SEQ ID NO: 5709; WAN024DAY; Start 453; Stop 477
tgttggttacttggagcttgatgat

SEQ ID NO: 419089 - DNA, 25 bp, Artificial
  probe
  misc_feature (1)..(25): SEQ ID NO: 5709; WAN024DAY; Start 452; Stop 476
atgttggttacttggagcttgatga

SEQ ID NO: 419090 - DNA, 25 bp, Artificial
  probe
  misc_feature (1)..(25): SEQ ID NO: 5709; WAN024DAY; Start 228; Stop 252
aaacacaggaagttctcaatctatt

SEQ ID NO: 419091 - DNA, 25 bp, Artificial
  probe
  misc_feature (1)..(25): SEQ ID NO: 5709; WAN024DAY; Start 389; Stop 413
atttgaatgctaacatccatgagtc

SEQ ID NO: 419092 - DNA, 25 bp, Artificial
  probe
  misc_feature (1)..(25): SEQ ID NO: 5710; WAN024CFR; Start 37; Stop 61
atcatcgaattgtctttctttacca

SEQ ID NO: 419093 - DNA, 25 bp, Artificial
  probe
  misc_feature (1)..(25): SEQ ID NO: 5710; WAN024CFR; Start 38; Stop 62
tcatcgaattgtctttctttaccaa

SEQ ID NO: 419094 - DNA, 25 bp, Artificial
  probe
  misc_feature (1)..(25): SEQ ID NO: 5710; WAN024CFR; Start 43; Stop 67
gaattgtctttctttaccaaaggca

SEQ ID NO: 419095 - DNA, 25 bp, Artificial
  probe
  misc_feature (1)..(25): SEQ ID NO: 5710; WAN024CFR; Start 44; Stop 68
aattgtctttctttaccaaaggcat

SEQ ID NO: 419096 - DNA, 25 bp, Artificial
  probe
  misc_feature (1)..(25): SEQ ID NO: 5710; WAN024CFR; Start 42; Stop 66
cgaattgtctttctttaccaaaggc

SEQ ID NO: 419097 - DNA, 25 bp, Artificial
  probe
  misc_feature (1)..(25): SEQ ID NO: 5710; WAN024CFR; Start 39; Stop 63
catcgaattgtctttctttaccaaa

SEQ ID NO: 419098 - DNA, 25 bp, Artificial
  probe
  misc_feature (1)..(25): SEQ ID NO: 5710; WAN024CFR; Start 45; Stop 69
attgtctttctttaccaaaggcatg

SEQ ID NO: 419099 - DNA, 25 bp, Artificial
  probe
  misc_feature (1)..(25): SEQ ID NO: 5710; WAN024CFR; Start 36; Stop 60
aatcatcgaattgtctttctttacc

SEQ ID NO: 419100 - DNA, 25 bp, Artificial
  probe
  misc_feature (1)..(25): SEQ ID NO: 5710; WAN024CFR; Start 41; Stop 65
tcgaattgtctttctttaccaaagg

SEQ ID NO: 419101 - DNA, 25 bp, Artificial
  probe
  misc_feature (1)..(25): SEQ ID NO: 5710; WAN024CFR; Start 191; Stop 215
ctttcttgcctagtgaccttttctt

SEQ ID NO: 419102 - DNA, 25 bp, Artificial
  probe
  misc_feature (1)..(25): SEQ ID NO: 5710; WAN024CFR; Start 192; Stop 216
tttcttgcctagtgaccttttcttc

SEQ ID NO: 419103 - DNA, 25 bp, Artificial
  probe
  misc_feature (1)..(25): SEQ ID NO: 5710; WAN024CFR; Start 46; Stop 70
ttgtctttctttaccaaaggcatgg

SEQ ID NO: 419104 - DNA, 25 bp, Artificial
  probe
  misc_feature (1)..(25): SEQ ID NO: 5710; WAN024CFR; Start 32; Stop 56
tcagaatcatcgaattgtctttctt

SEQ ID NO: 419105 - DNA, 25 bp, Artificial
  probe
  misc_feature (1)..(25): SEQ ID NO: 5710; WAN024CFR; Start 31; Stop 55
ttcagaatcatcgaattgtctttct

SEQ ID NO: 419106 - DNA, 25 bp, Artificial
  probe
  misc_feature (1)..(25): SEQ ID NO: 5710; WAN024CFR; Start 30; Stop 54
attcagaatcatcgaattgtctttc

SEQ ID NO: 419107 - DNA, 25 bp, Artificial
  probe
  misc_feature (1)..(25): SEQ ID NO: 5710; WAN024CFR; Start 35; Stop 59
gaatcatcgaattgtctttctttac

SEQ ID NO: 419108 - DNA, 25 bp, Artificial
  probe
  misc_feature (1)..(25): SEQ ID NO: 5710; WAN024CFR; Start 40; Stop 64
atcgaattgtctttctttaccaaag

SEQ ID NO: 419109 - DNA, 25 bp, Artificial
  probe
  misc_feature (1)..(25): SEQ ID NO: 5710; WAN024CFR; Start 19; Stop 43
atcctttctaaattcagaatcatcg

SEQ ID NO: 419110 - DNA, 25 bp, Artificial
  probe
  misc_feature (1)..(25): SEQ ID NO: 5710; WAN024CFR; Start 33; Stop 57
cagaatcatcgaattgtctttcttt

SEQ ID NO: 419111 - DNA, 25 bp, Artificial
  probe
  misc_feature (1)..(25): SEQ ID NO: 5710; WAN024CFR; Start 20; Stop 44
tcctttctaaattcagaatcatcga

SEQ ID NO: 419112 - DNA, 25 bp, Artificial
  probe
  misc_feature (1)..(25): SEQ ID NO: 5710; WAN024CFR; Start 21; Stop 45
cctttctaaattcagaatcatcgaa

SEQ ID NO: 419113 - DNA, 25 bp, Artificial
  probe
  misc_feature (1)..(25): SEQ ID NO: 5710; WAN024CFR; Start 16; Stop 40
ttcatcctttctaaattcagaatca

SEQ ID NO: 419114 - DNA, 25 bp, Artificial
  probe
  misc_feature (1)..(25): SEQ ID NO: 5710; WAN024CFR; Start 17; Stop 41
tcatcctttctaaattcagaatcat

SEQ ID NO: 419115 - DNA, 25 bp, Artificial
  probe
  misc_feature (1)..(25): SEQ ID NO: 5710; WAN024CFR; Start 34; Stop 58
agaatcatcgaattgtctttcttta

SEQ ID NO: 419116 - DNA, 25 bp, Artificial
  probe
  misc_feature (1)..(25): SEQ ID NO: 5710; WAN024CFR; Start 18; Stop 42
catcctttctaaattcagaatcatc

SEQ ID NO: 419117 - DNA, 25 bp, Artificial
  probe
  misc_feature (1)..(25): SEQ ID NO: 5710; WAN024CFR; Start 15; Stop 39
tttcatcctttctaaattcagaatc

SEQ ID NO: 419118 - DNA, 25 bp, Artificial
  probe
  misc_feature (1)..(25): SEQ ID NO: 5710; WAN024CFR; Start 51; Stop 75
tttctttaccaaaggcatggtcaag

SEQ ID NO: 419119 - DNA, 25 bp, Artificial
  probe
  misc_feature (1)..(25): SEQ ID NO: 5710; WAN024CFR; Start 50; Stop 74
ctttctttaccaaaggcatggtcaa

SEQ ID NO: 419120 - DNA, 25 bp, Artificial
  probe
  misc_feature (1)..(25): SEQ ID NO: 5710; WAN024CFR; Start 29; Stop 53
aattcagaatcatcgaattgtcttt

SEQ ID NO: 419121 - DNA, 25 bp, Artificial
  probe
  misc_feature (1)..(25): SEQ ID NO: 5710; WAN024CFR; Start 28; Stop 52
aaattcagaatcatcgaattgtctt

SEQ ID NO: 419122 - DNA, 25 bp, Artificial
  probe
  misc_feature (1)..(25): SEQ ID NO: 5710; WAN024CFR; Start 22; Stop 46
ctttctaaattcagaatcatcgaat

SEQ ID NO: 419123 - DNA, 25 bp, Artificial
  probe
  misc_feature (1)..(25): SEQ ID NO: 5710; WAN024CFR; Start 60; Stop 84
caaaggcatggtcaagagcttcttc

SEQ ID NO: 419124 - DNA, 25 bp, Artificial
  probe
  misc_feature (1)..(25): SEQ ID NO: 5710; WAN024CFR; Start 48; Stop 72
gtctttctttaccaaaggcatggtc

SEQ ID NO: 419125 - DNA, 25 bp, Artificial
  probe
  misc_feature (1)..(25): SEQ ID NO: 5711; WAN024FC3; Start 297; Stop 321
aatcgcaataattcctaaccagaga

SEQ ID NO: 419126 - DNA, 25 bp, Artificial
  probe
  misc_feature (1)..(25): SEQ ID NO: 5711; WAN024FC3; Start 298; Stop 322
atcgcaataattcctaaccagagaa

SEQ ID NO: 419127 - DNA, 25 bp, Artificial
  probe
  misc_feature (1)..(25): SEQ ID NO: 5711; WAN024FC3; Start 295; Stop 319
gtaatcgcaataattcctaaccaga

SEQ ID NO: 419128 - DNA, 25 bp, Artificial
  probe
  misc_feature (1)..(25): SEQ ID NO: 5711; WAN024FC3; Start 294; Stop 318
agtaatcgcaataattcctaaccag

SEQ ID NO: 419129 - DNA, 25 bp, Artificial
  probe
  misc_feature (1)..(25): SEQ ID NO: 5711; WAN024FC3; Start 273; Stop 297
cagactcgctaacagattgatagta

SEQ ID NO: 419130 - DNA, 25 bp, Artificial
  probe
  misc_feature (1)..(25): SEQ ID NO: 5711; WAN024FC3; Start 296; Stop 320
taatcgcaataattcctaaccagag

SEQ ID NO: 419131 - DNA, 25 bp, Artificial
  probe
  misc_feature (1)..(25): SEQ ID NO: 5711; WAN024FC3; Start 274; Stop 298
agactcgctaacagattgatagtaa

SEQ ID NO: 419132 - DNA, 25 bp, Artificial
  probe
  misc_feature (1)..(25): SEQ ID NO: 5711; WAN024FC3; Start 271; Stop 295
accagactcgctaacagattgatag

SEQ ID NO: 419133 - DNA, 25 bp, Artificial
  probe
  misc_feature (1)..(25): SEQ ID NO: 5711; WAN024FC3; Start 170; Stop 194
gaagaacaatcgccatcaggataac

SEQ ID NO: 419134 - DNA, 25 bp, Artificial
  probe
  misc_feature (1)..(25): SEQ ID NO: 5711; WAN024FC3; Start 270; Stop 294
caccagactcgctaacagattgata

SEQ ID NO: 419135 - DNA, 25 bp, Artificial
  probe
  misc_feature (1)..(25): SEQ ID NO: 5711; WAN024FC3; Start 293; Stop 317
tagtaatcgcaataattcctaacca

SEQ ID NO: 419136 - DNA, 25 bp, Artificial
  probe
  misc_feature (1)..(25): SEQ ID NO: 5711; WAN024FC3; Start 275; Stop 299
gactcgctaacagattgatagtaat

SEQ ID NO: 419137 - DNA, 25 bp, Artificial
  probe
  misc_feature (1)..(25): SEQ ID NO: 5711; WAN024FC3; Start 272; Stop 296
ccagactcgctaacagattgatagt

SEQ ID NO: 419138 - DNA, 25 bp, Artificial
  probe
  misc_feature (1)..(25): SEQ ID NO: 5711; WAN024FC3; Start 171; Stop 195
aagaacaatcgccatcaggataaca

SEQ ID NO: 419139 - DNA, 25 bp, Artificial
  probe
  misc_feature (1)..(25): SEQ ID NO: 5711; WAN024FC3; Start 299; Stop 323
tcgcaataattcctaaccagagaat

SEQ ID NO: 419140 - DNA, 25 bp, Artificial
  probe
  misc_feature (1)..(25): SEQ ID NO: 5711; WAN024FC3; Start 300; Stop 324
cgcaataattcctaaccagagaatc

SEQ ID NO: 419141 - DNA, 25 bp, Artificial
  probe
  misc_feature (1)..(25): SEQ ID NO: 5711; WAN024FC3; Start 301; Stop 325
gcaataattcctaaccagagaatcc

SEQ ID NO: 419142 - DNA, 25 bp, Artificial
  probe
  misc_feature (1)..(25): SEQ ID NO: 5711; WAN024FC3; Start 142; Stop 166
ggatctaggatataccagtccgtaa

SEQ ID NO: 419143 - DNA, 25 bp, Artificial
  probe
  misc_feature (1)..(25): SEQ ID NO: 5711; WAN024FC3; Start 138; Stop 162
aagaggatctaggatataccagtcc

SEQ ID NO: 419144 - DNA, 25 bp, Artificial
  probe
  misc_feature (1)..(25): SEQ ID NO: 5711; WAN024FC3; Start 280; Stop 304
gctaacagattgatagtaatcgcaa

SEQ ID NO: 419145 - DNA, 25 bp, Artificial
  probe
  misc_feature (1)..(25): SEQ ID NO: 5711; WAN024FC3; Start 277; Stop 301
ctcgctaacagattgatagtaatcg

SEQ ID NO: 419146 - DNA, 25 bp, Artificial
  probe
  misc_feature (1)..(25): SEQ ID NO: 5711; WAN024FC3; Start 278; Stop 302
tcgctaacagattgatagtaatcgc

SEQ ID NO: 419147 - DNA, 25 bp, Artificial
  probe
  misc_feature (1)..(25): SEQ ID NO: 5711; WAN024FC3; Start 279; Stop 303
cgctaacagattgatagtaatcgca

SEQ ID NO: 419148 - DNA, 25 bp, Artificial
  probe
  misc_feature (1)..(25): SEQ ID NO: 5711; WAN024FC3; Start 141; Stop 165
aggatctaggatataccagtccgta

SEQ ID NO: 419149 - DNA, 25 bp, Artificial
  probe
  misc_feature (1)..(25): SEQ ID NO: 5711; WAN024FC3; Start 114; Stop 138
aaagaaagaaatgacaagggacaaa

SEQ ID NO: 419150 - DNA, 25 bp, Artificial
  probe
  misc_feature (1)..(25): SEQ ID NO: 5711; WAN024FC3; Start 243; Stop 267
ctcattctttgtctttcccttacca

SEQ ID NO: 419151 - DNA, 25 bp, Artificial
  probe
  misc_feature (1)..(25): SEQ ID NO: 5711; WAN024FC3; Start 242; Stop 266
actcattctttgtctttcccttacc

SEQ ID NO: 419152 - DNA, 25 bp, Artificial
  probe
  misc_feature (1)..(25): SEQ ID NO: 5711; WAN024FC3; Start 172; Stop 196
agaacaatcgccatcaggataacag

SEQ ID NO: 419153 - DNA, 25 bp, Artificial
  probe
  misc_feature (1)..(25): SEQ ID NO: 5711; WAN024FC3; Start 113; Stop 137
taaagaaagaaatgacaagggacaa

SEQ ID NO: 419154 - DNA, 25 bp, Artificial
  probe
  misc_feature (1)..(25): SEQ ID NO: 5711; WAN024FC3; Start 245; Stop 269
cattctttgtctttcccttaccaac

SEQ ID NO: 419155 - DNA, 25 bp, Artificial
  probe
  misc_feature (1)..(25): SEQ ID NO: 5711; WAN024FC3; Start 244; Stop 268
tcattctttgtctttcccttaccaa

SEQ ID NO: 419156 - DNA, 25 bp, Artificial
  probe
  misc_feature (1)..(25): SEQ ID NO: 5711; WAN024FC3; Start 276; Stop 300
actcgctaacagattgatagtaatc

SEQ ID NO: 419157 - DNA, 25 bp, Artificial
  probe
  misc_feature (1)..(25): SEQ ID NO: 5711; WAN024FC3; Start 112; Stop 136
ataaagaaagaaatgacaagggaca

SEQ ID NO: 419158 - DNA, 25 bp, Artificial
  probe
  misc_feature (1)..(25): SEQ ID NO: 5712; WAN024GCR; Start 274; Stop 298
ctcaatgtagtattcaatagcagca

SEQ ID NO: 419159 - DNA, 25 bp, Artificial
  probe
  misc_feature (1)..(25): SEQ ID NO: 5712; WAN024GCR; Start 273; Stop 297
tctcaatgtagtattcaatagcagc

SEQ ID NO: 419160 - DNA, 25 bp, Artificial
  probe
  misc_feature (1)..(25): SEQ ID NO: 5712; WAN024GCR; Start 275; Stop 299
tcaatgtagtattcaatagcagcaa

SEQ ID NO: 419161 - DNA, 25 bp, Artificial
  probe
  misc_feature (1)..(25): SEQ ID NO: 5712; WAN024GCR; Start 170; Stop 194
ttcttgatgttcttgagcaattcag

SEQ ID NO: 419162 - DNA, 25 bp, Artificial
  probe
  misc_feature (1)..(25): SEQ ID NO: 5712; WAN024GCR; Start 114; Stop 138
tatattggtcatgctcactaactgg

SEQ ID NO: 419163 - DNA, 25 bp, Artificial
  probe
  misc_feature (1)..(25): SEQ ID NO: 5712; WAN024GCR; Start 112; Stop 136
gctatattggtcatgctcactaact

SEQ ID NO: 419164 - DNA, 25 bp, Artificial
  probe
  misc_feature (1)..(25): SEQ ID NO: 5712; WAN024GCR; Start 113; Stop 137
ctatattggtcatgctcactaactg

SEQ ID NO: 419165 - DNA, 25 bp, Artificial
  probe
  misc_feature (1)..(25): SEQ ID NO: 5712; WAN024GCR; Start 271; Stop 295
tgtctcaatgtagtattcaatagca

SEQ ID NO: 419166 - DNA, 25 bp, Artificial
  probe
  misc_feature (1)..(25): SEQ ID NO: 5712; WAN024GCR; Start 111; Stop 135
ggctatattggtcatgctcactaac

SEQ ID NO: 419167 - DNA, 25 bp, Artificial
  probe
  misc_feature (1)..(25): SEQ ID NO: 5712; WAN024GCR; Start 272; Stop 296
gtctcaatgtagtattcaatagcag

SEQ ID NO: 419168 - DNA, 25 bp, Artificial
  probe
  misc_feature (1)..(25): SEQ ID NO: 5712; WAN024GCR; Start 243; Stop 267
tatattcaaaggttacacgacggtt

SEQ ID NO: 419169 - DNA, 25 bp, Artificial
  probe
  misc_feature (1)..(25): SEQ ID NO: 5712; WAN024GCR; Start 68; Stop 92
ttaagcgtatcatagaaagccaaca

SEQ ID NO: 419170 - DNA, 25 bp, Artificial
  probe
  misc_feature (1)..(25): SEQ ID NO: 5712; WAN024GCR; Start 244; Stop 268
atattcaaaggttacacgacggttt

SEQ ID NO: 419171 - DNA, 25 bp, Artificial
  probe
  misc_feature (1)..(25): SEQ ID NO: 5712; WAN024GCR; Start 282; Stop 306
agtattcaatagcagcaaagagttt

SEQ ID NO: 419172 - DNA, 25 bp, Artificial
  probe
  misc_feature (1)..(25): SEQ ID NO: 5712; WAN024GCR; Start 69; Stop 93
taagcgtatcatagaaagccaacac

SEQ ID NO: 419173 - DNA, 25 bp, Artificial
  probe
  misc_feature (1)..(25): SEQ ID NO: 5712; WAN024GCR; Start 280; Stop 304
gtagtattcaatagcagcaaagagt

SEQ ID NO: 419174 - DNA, 25 bp, Artificial
  probe
  misc_feature (1)..(25): SEQ ID NO: 5712; WAN024GCR; Start 279; Stop 303
tgtagtattcaatagcagcaaagag

SEQ ID NO: 419175 - DNA, 25 bp, Artificial
  probe
  misc_feature (1)..(25): SEQ ID NO: 5712; WAN024GCR; Start 110; Stop 134
cggctatattggtcatgctcactaa

SEQ ID NO: 419176 - DNA, 25 bp, Artificial
  probe
  misc_feature (1)..(25): SEQ ID NO: 5712; WAN024GCR; Start 263; Stop 287
cggtttgttgtctcaatgtagtatt

SEQ ID NO: 419177 - DNA, 25 bp, Artificial
  probe
  misc_feature (1)..(25): SEQ ID NO: 5712; WAN024GCR; Start 262; Stop 286
acggtttgttgtctcaatgtagtat

SEQ ID NO: 419178 - DNA, 25 bp, Artificial
  probe
  misc_feature (1)..(25): SEQ ID NO: 5712; WAN024GCR; Start 169; Stop 193
tttcttgatgttcttgagcaattca

SEQ ID NO: 419179 - DNA, 25 bp, Artificial
  probe
  misc_feature (1)..(25): SEQ ID NO: 5712; WAN024GCR; Start 242; Stop 266
atatattcaaaggttacacgacggt

SEQ ID NO: 419180 - DNA, 25 bp, Artificial
  probe
  misc_feature (1)..(25): SEQ ID NO: 5712; WAN024GCR; Start 270; Stop 294
ttgtctcaatgtagtattcaatagc

SEQ ID NO: 419181 - DNA, 25 bp, Artificial
  probe
  misc_feature (1)..(25): SEQ ID NO: 5712; WAN024GCR; Start 241; Stop 265
gatatattcaaaggttacacgacgg

SEQ ID NO: 419182 - DNA, 25 bp, Artificial
  probe
  misc_feature (1)..(25): SEQ ID NO: 5712; WAN024GCR; Start 281; Stop 305
tagtattcaatagcagcaaagagtt

SEQ ID NO: 419183 - DNA, 25 bp, Artificial
  probe
  misc_feature (1)..(25): SEQ ID NO: 5712; WAN024GCR; Start 278; Stop 302
atgtagtattcaatagcagcaaaga

SEQ ID NO: 419184 - DNA, 25 bp, Artificial
  probe
  misc_feature (1)..(25): SEQ ID NO: 5712; WAN024GCR; Start 165; Stop 189
acaatttcttgatgttcttgagcaa

SEQ ID NO: 419185 - DNA, 25 bp, Artificial
  probe
  misc_feature (1)..(25): SEQ ID NO: 5712; WAN024GCR; Start 163; Stop 187
agacaatttcttgatgttcttgagc

SEQ ID NO: 419186 - DNA, 25 bp, Artificial
  probe
  misc_feature (1)..(25): SEQ ID NO: 5712; WAN024GCR; Start 166; Stop 190
caatttcttgatgttcttgagcaat

SEQ ID NO: 419187 - DNA, 25 bp, Artificial
  probe
  misc_feature (1)..(25): SEQ ID NO: 5712; WAN024GCR; Start 164; Stop 188
gacaatttcttgatgttcttgagca

SEQ ID NO: 419188 - DNA, 25 bp, Artificial
  probe
  misc_feature (1)..(25): SEQ ID NO: 5712; WAN024GCR; Start 168; Stop 192
atttcttgatgttcttgagcaattc

SEQ ID NO: 419189 - DNA, 25 bp, Artificial
  probe
  misc_feature (1)..(25): SEQ ID NO: 5712; WAN024GCR; Start 276; Stop 300
caatgtagtattcaatagcagcaaa

SEQ ID NO: 419190 - DNA, 25 bp, Artificial
  probe
  misc_feature (1)..(25): SEQ ID NO: 5712; WAN024GCR; Start 267; Stop 291
ttgttgtctcaatgtagtattcaat

SEQ ID NO: 419191 - DNA, 25 bp, Artificial
  probe
  misc_feature (1)..(25): SEQ ID NO: 5713; WAN024C46; Start 93; Stop 117
attcttcattacgacggatggtatc

SEQ ID NO: 419192 - DNA, 25 bp, Artificial
  probe
  misc_feature (1)..(25): SEQ ID NO: 5713; WAN024C46; Start 92; Stop 116
aattcttcattacgacggatggtat

SEQ ID NO: 419193 - DNA, 25 bp, Artificial
  probe
  misc_feature (1)..(25): SEQ ID NO: 5713; WAN024C46; Start 91; Stop 115
caattcttcattacgacggatggta

SEQ ID NO: 419194 - DNA, 25 bp, Artificial
  probe
  misc_feature (1)..(25): SEQ ID NO: 5713; WAN024C46; Start 95; Stop 119
tcttcattacgacggatggtatctt

SEQ ID NO: 419195 - DNA, 25 bp, Artificial
  probe
  misc_feature (1)..(25): SEQ ID NO: 5713; WAN024C46; Start 94; Stop 118
ttcttcattacgacggatggtatct

SEQ ID NO: 419196 - DNA, 25 bp, Artificial
  probe
  misc_feature (1)..(25): SEQ ID NO: 5713; WAN024C46; Start 67; Stop 91
gataaagttgataccagagtttgcc

SEQ ID NO: 419197 - DNA, 25 bp, Artificial
  probe
  misc_feature (1)..(25): SEQ ID NO: 5713; WAN024C46; Start 64; Stop 88
accgataaagttgataccagagttt

SEQ ID NO: 419198 - DNA, 25 bp, Artificial
  probe
  misc_feature (1)..(25): SEQ ID NO: 5713; WAN024C46; Start 66; Stop 90
cgataaagttgataccagagtttgc

SEQ ID NO: 419199 - DNA, 25 bp, Artificial
  probe
  misc_feature (1)..(25): SEQ ID NO: 5713; WAN024C46; Start 65; Stop 89
ccgataaagttgataccagagtttg

SEQ ID NO: 419200 - DNA, 25 bp, Artificial
  probe
  misc_feature (1)..(25): SEQ ID NO: 5713; WAN024C46; Start 68; Stop 92
ataaagttgataccagagtttgcca

SEQ ID NO: 419201 - DNA, 25 bp, Artificial
  probe
  misc_feature (1)..(25): SEQ ID NO: 5713; WAN024C46; Start 100; Stop 124
attacgacggatggtatctttgtag

SEQ ID NO: 419202 - DNA, 25 bp, Artificial
  probe
  misc_feature (1)..(25): SEQ ID NO: 5713; WAN024C46; Start 63; Stop 87
taccgataaagttgataccagagtt

SEQ ID NO: 419203 - DNA, 25 bp, Artificial
  probe
  misc_feature (1)..(25): SEQ ID NO: 5713; WAN024C46; Start 99; Stop 123
cattacgacggatggtatctttgta

SEQ ID NO: 419204 - DNA, 25 bp, Artificial
  probe
  misc_feature (1)..(25): SEQ ID NO: 5713; WAN024C46; Start 96; Stop 120
cttcattacgacggatggtatcttt

SEQ ID NO: 419205 - DNA, 25 bp, Artificial
  probe
  misc_feature (1)..(25): SEQ ID NO: 5713; WAN024C46; Start 83; Stop 107
gagtttgccaattcttcattacgac

SEQ ID NO: 419206 - DNA, 25 bp, Artificial
  probe
  misc_feature (1)..(25): SEQ ID NO: 5713; WAN024C46; Start 97; Stop 121
ttcattacgacggatggtatctttg

SEQ ID NO: 419207 - DNA, 25 bp, Artificial
  probe
  misc_feature (1)..(25): SEQ ID NO: 5713; WAN024C46; Start 80; Stop 104
ccagagtttgccaattcttcattac

SEQ ID NO: 419208 - DNA, 25 bp, Artificial
  probe
  misc_feature (1)..(25): SEQ ID NO: 5713; WAN024C46; Start 69; Stop 93
taaagttgataccagagtttgccaa

SEQ ID NO: 419209 - DNA, 25 bp, Artificial
  probe
  misc_feature (1)..(25): SEQ ID NO: 5713; WAN024C46; Start 77; Stop 101
ataccagagtttgccaattcttcat

SEQ ID NO: 419210 - DNA, 25 bp, Artificial
  probe
  misc_feature (1)..(25): SEQ ID NO: 5713; WAN024C46; Start 102; Stop 126
tacgacggatggtatctttgtagaa

SEQ ID NO: 419211 - DNA, 25 bp, Artificial
  probe
  misc_feature (1)..(25): SEQ ID NO: 5713; WAN024C46; Start 101; Stop 125
ttacgacggatggtatctttgtaga

SEQ ID NO: 419212 - DNA, 25 bp, Artificial
  probe
  misc_feature (1)..(25): SEQ ID NO: 5713; WAN024C46; Start 87; Stop 111
ttgccaattcttcattacgacggat

SEQ ID NO: 419213 - DNA, 25 bp, Artificial
  probe
  misc_feature (1)..(25): SEQ ID NO: 5713; WAN024C46; Start 79; Stop 103
accagagtttgccaattcttcatta

SEQ ID NO: 419214 - DNA, 25 bp, Artificial
  probe
  misc_feature (1)..(25): SEQ ID NO: 5713; WAN024C46; Start 78; Stop 102
taccagagtttgccaattcttcatt

SEQ ID NO: 419215 - DNA, 25 bp, Artificial
  probe
  misc_feature (1)..(25): SEQ ID NO: 5713; WAN024C46; Start 62; Stop 86
gtaccgataaagttgataccagagt

SEQ ID NO: 419216 - DNA, 25 bp, Artificial
  probe
  misc_feature (1)..(25): SEQ ID NO: 5713; WAN024C46; Start 60; Stop 84
cagtaccgataaagttgataccaga

SEQ ID NO: 419217 - DNA, 25 bp, Artificial
  probe
  misc_feature (1)..(25): SEQ ID NO: 5713; WAN024C46; Start 82; Stop 106
agagtttgccaattcttcattacga

SEQ ID NO: 419218 - DNA, 25 bp, Artificial
  probe
  misc_feature (1)..(25): SEQ ID NO: 5713; WAN024C46; Start 81; Stop 105
cagagtttgccaattcttcattacg

SEQ ID NO: 419219 - DNA, 25 bp, Artificial
  probe
  misc_feature (1)..(25): SEQ ID NO: 5713; WAN024C46; Start 61; Stop 85
agtaccgataaagttgataccagag

SEQ ID NO: 419220 - DNA, 25 bp, Artificial
  probe
  misc_feature (1)..(25): SEQ ID NO: 5713; WAN024C46; Start 74; Stop 98
ttgataccagagtttgccaattctt

SEQ ID NO: 419221 - DNA, 25 bp, Artificial
  probe
  misc_feature (1)..(25): SEQ ID NO: 5713; WAN024C46; Start 70; Stop 94
aaagttgataccagagtttgccaat

SEQ ID NO: 419222 - DNA, 25 bp, Artificial
  probe
  misc_feature (1)..(25): SEQ ID NO: 5713; WAN024C46; Start 59; Stop 83
ccagtaccgataaagttgataccag

SEQ ID NO: 419223 - DNA, 25 bp, Artificial
  probe
  misc_feature (1)..(25): SEQ ID NO: 5713; WAN024C46; Start 71; Stop 95
aagttgataccagagtttgccaatt

SEQ ID NO: 419224 - DNA, 25 bp, Artificial
  probe
  misc_feature (1)..(25): SEQ ID NO: 5714; WAN024F3F; Start 229; Stop 253
aatcttcttgatattagcaccacca

SEQ ID NO: 419225 - DNA, 25 bp, Artificial
  probe
  misc_feature (1)..(25): SEQ ID NO: 5714; WAN024F3F; Start 230; Stop 254
atcttcttgatattagcaccaccac

SEQ ID NO: 419226 - DNA, 25 bp, Artificial
  probe
  misc_feature (1)..(25): SEQ ID NO: 5714; WAN024F3F; Start 228; Stop 252
taatcttcttgatattagcaccacc

SEQ ID NO: 419227 - DNA, 25 bp, Artificial
  probe
  misc_feature (1)..(25): SEQ ID NO: 5714; WAN024F3F; Start 231; Stop 255
tcttcttgatattagcaccaccacg

SEQ ID NO: 419228 - DNA, 25 bp, Artificial
  probe
  misc_feature (1)..(25): SEQ ID NO: 5714; WAN024F3F; Start 227; Stop 251
gtaatcttcttgatattagcaccac

SEQ ID NO: 419229 - DNA, 25 bp, Artificial
  probe
  misc_feature (1)..(25): SEQ ID NO: 5714; WAN024F3F; Start 226; Stop 250
agtaatcttcttgatattagcacca

SEQ ID NO: 419230 - DNA, 25 bp, Artificial
  probe
  misc_feature (1)..(25): SEQ ID NO: 5714; WAN024F3F; Start 105; Stop 129
gagcgatggcattgtagataaattc

SEQ ID NO: 419231 - DNA, 25 bp, Artificial
  probe
  misc_feature (1)..(25): SEQ ID NO: 5714; WAN024F3F; Start 108; Stop 132
cgatggcattgtagataaattcagc

SEQ ID NO: 419232 - DNA, 25 bp, Artificial
  probe
  misc_feature (1)..(25): SEQ ID NO: 5714; WAN024F3F; Start 107; Stop 131
gcgatggcattgtagataaattcag

SEQ ID NO: 419233 - DNA, 25 bp, Artificial
  probe
  misc_feature (1)..(25): SEQ ID NO: 5714; WAN024F3F; Start 106; Stop 130
agcgatggcattgtagataaattca

SEQ ID NO: 419234 - DNA, 25 bp, Artificial
  probe
  misc_feature (1)..(25): SEQ ID NO: 5714; WAN024F3F; Start 80; Stop 104
aagataacttggtcaacctcagcag

SEQ ID NO: 419235 - DNA, 25 bp, Artificial
  probe
  misc_feature (1)..(25): SEQ ID NO: 5714; WAN024F3F; Start 362; Stop 386
tcataaacttctggaatttcttgct

SEQ ID NO: 419236 - DNA, 25 bp, Artificial
  probe
  misc_feature (1)..(25): SEQ ID NO: 5714; WAN024F3F; Start 210; Stop 234
ctgggtggaatttgctagtaatctt

SEQ ID NO: 419237 - DNA, 25 bp, Artificial
  probe
  misc_feature (1)..(25): SEQ ID NO: 5714; WAN024F3F; Start 363; Stop 387
cataaacttctggaatttcttgctc

SEQ ID NO: 419238 - DNA, 25 bp, Artificial
  probe
  misc_feature (1)..(25): SEQ ID NO: 5714; WAN024F3F; Start 212; Stop 236
gggtggaatttgctagtaatcttct

SEQ ID NO: 419239 - DNA, 25 bp, Artificial
  probe
  misc_feature (1)..(25): SEQ ID NO: 5714; WAN024F3F; Start 76; Stop 100
atcaaagataacttggtcaacctca

SEQ ID NO: 419240 - DNA, 25 bp, Artificial
  probe
  misc_feature (1)..(25): SEQ ID NO: 5714; WAN024F3F; Start 75; Stop 99
catcaaagataacttggtcaacctc

SEQ ID NO: 419241 - DNA, 25 bp, Artificial
  probe
  misc_feature (1)..(25): SEQ ID NO: 5714; WAN024F3F; Start 74; Stop 98
tcatcaaagataacttggtcaacct

SEQ ID NO: 419242 - DNA, 25 bp, Artificial
  probe
  misc_feature (1)..(25): SEQ ID NO: 5714; WAN024F3F; Start 211; Stop 235
tgggtggaatttgctagtaatcttc

SEQ ID NO: 419243 - DNA, 25 bp, Artificial
  probe
  misc_feature (1)..(25): SEQ ID NO: 5714; WAN024F3F; Start 104; Stop 128
ggagcgatggcattgtagataaatt

SEQ ID NO: 419244 - DNA, 25 bp, Artificial
  probe
  misc_feature (1)..(25): SEQ ID NO: 5714; WAN024F3F; Start 73; Stop 97
ttcatcaaagataacttggtcaacc

SEQ ID NO: 419245 - DNA, 25 bp, Artificial
  probe
  misc_feature (1)..(25): SEQ ID NO: 5714; WAN024F3F; Start 213; Stop 237
ggtggaatttgctagtaatcttctt

SEQ ID NO: 419246 - DNA, 25 bp, Artificial
  probe
  misc_feature (1)..(25): SEQ ID NO: 5714; WAN024F3F; Start 77; Stop 101
tcaaagataacttggtcaacctcag

SEQ ID NO: 419247 - DNA, 25 bp, Artificial
  probe
  misc_feature (1)..(25): SEQ ID NO: 5714; WAN024F3F; Start 454; Stop 478
ttcaaccttgtaaacataaacttcg

SEQ ID NO: 419248 - DNA, 25 bp, Artificial
  probe
  misc_feature (1)..(25): SEQ ID NO: 5714; WAN024F3F; Start 361; Stop 385
atcataaacttctggaatttcttgc

SEQ ID NO: 419249 - DNA, 25 bp, Artificial
  probe
  misc_feature (1)..(25): SEQ ID NO: 5714; WAN024F3F; Start 103; Stop 127
aggagcgatggcattgtagataaat

SEQ ID NO: 419250 - DNA, 25 bp, Artificial
  probe
  misc_feature (1)..(25): SEQ ID NO: 5714; WAN024F3F; Start 215; Stop 239
tggaatttgctagtaatcttcttga

SEQ ID NO: 419251 - DNA, 25 bp, Artificial
  probe
  misc_feature (1)..(25): SEQ ID NO: 5714; WAN024F3F; Start 214; Stop 238
gtggaatttgctagtaatcttcttg

SEQ ID NO: 419252 - DNA, 25 bp, Artificial
  probe
  misc_feature (1)..(25): SEQ ID NO: 5714; WAN024F3F; Start 72; Stop 96
tttcatcaaagataacttggtcaac

SEQ ID NO: 419253 - DNA, 25 bp, Artificial
  probe
  misc_feature (1)..(25): SEQ ID NO: 5714; WAN024F3F; Start 451; Stop 475
gtcttcaaccttgtaaacataaact

SEQ ID NO: 419254 - DNA, 25 bp, Artificial
  probe
  misc_feature (1)..(25): SEQ ID NO: 5714; WAN024F3F; Start 109; Stop 133
gatggcattgtagataaattcagct

SEQ ID NO: 419255 - DNA, 25 bp, Artificial
  probe
  misc_feature (1)..(25): SEQ ID NO: 5714; WAN024F3F; Start 364; Stop 388
ataaacttctggaatttcttgctcc

SEQ ID NO: 419256 - DNA, 25 bp, Artificial
  probe
  misc_feature (1)..(25): SEQ ID NO: 5714; WAN024F3F; Start 78; Stop 102
caaagataacttggtcaacctcagc

SEQ ID NO: 419257 - DNA, 25 bp, Artificial
  probe
  misc_feature (1)..(25): SEQ ID NO: 5715; WAN024DNT; Start 4; Stop 28
tccactcgaaacaagtattgtaaga

SEQ ID NO: 419258 - DNA, 25 bp, Artificial
  probe
  misc_feature (1)..(25): SEQ ID NO: 5715; WAN024DNT; Start 3; Stop 27
gtccactcgaaacaagtattgtaag

SEQ ID NO: 419259 - DNA, 25 bp, Artificial
  probe
  misc_feature (1)..(25): SEQ ID NO: 5715; WAN024DNT; Start 2; Stop 26
tgtccactcgaaacaagtattgtaa

SEQ ID NO: 419260 - DNA, 25 bp, Artificial
  probe
  misc_feature (1)..(25): SEQ ID NO: 5715; WAN024DNT; Start 1; Stop 25
ttgtccactcgaaacaagtattgta

SEQ ID NO: 419261 - DNA, 25 bp, Artificial
  probe
  misc_feature (1)..(25): SEQ ID NO: 5715; WAN024DNT; Start 5; Stop 29
ccactcgaaacaagtattgtaagaa

SEQ ID NO: 419262 - DNA, 25 bp, Artificial
  probe
  misc_feature (1)..(25): SEQ ID NO: 5715; WAN024DNT; Start 6; Stop 30
cactcgaaacaagtattgtaagaat

SEQ ID NO: 419263 - DNA, 25 bp, Artificial
  probe
  misc_feature (1)..(25): SEQ ID NO: 5715; WAN024DNT; Start 7; Stop 31
actcgaaacaagtattgtaagaatt

SEQ ID NO: 419264 - DNA, 25 bp, Artificial
  probe
  misc_feature (1)..(25): SEQ ID NO: 5715; WAN024DNT; Start 10; Stop 34
cgaaacaagtattgtaagaatttga

SEQ ID NO: 419265 - DNA, 25 bp, Artificial
  probe
  misc_feature (1)..(25): SEQ ID NO: 5715; WAN024DNT; Start 9; Stop 33
tcgaaacaagtattgtaagaatttg

SEQ ID NO: 419266 - DNA, 25 bp, Artificial
  probe
  misc_feature (1)..(25): SEQ ID NO: 5715; WAN024DNT; Start 8; Stop 32
ctcgaaacaagtattgtaagaattt

SEQ ID NO: 419267 - DNA, 25 bp, Artificial
  probe
  misc_feature (1)..(25): SEQ ID NO: 5716; WAN024FFF; Start 181; Stop 205
cttctcttgacttcgtaccacaatc

SEQ ID NO: 419268 - DNA, 25 bp, Artificial
  probe
  misc_feature (1)..(25): SEQ ID NO: 5716; WAN024FFF; Start 180; Stop 204
tcttctcttgacttcgtaccacaat

SEQ ID NO: 419269 - DNA, 25 bp, Artificial
  probe
  misc_feature (1)..(25): SEQ ID NO: 5716; WAN024FFF; Start 179; Stop 203
ttcttctcttgacttcgtaccacaa

SEQ ID NO: 419270 - DNA, 25 bp, Artificial
  probe
  misc_feature (1)..(25): SEQ ID NO: 5716; WAN024FFF; Start 182; Stop 206
ttctcttgacttcgtaccacaatca

SEQ ID NO: 419271 - DNA, 25 bp, Artificial
  probe
  misc_feature (1)..(25): SEQ ID NO: 5716; WAN024FFF; Start 190; Stop 214
acttcgtaccacaatcacagagtag

SEQ ID NO: 419272 - DNA, 25 bp, Artificial
  probe
  misc_feature (1)..(25): SEQ ID NO: 5716; WAN024FFF; Start 189; Stop 213
gacttcgtaccacaatcacagagta

SEQ ID NO: 419273 - DNA, 25 bp, Artificial
  probe
  misc_feature (1)..(25): SEQ ID NO: 5716; WAN024FFF; Start 173; Stop 197
gcatctttcttctcttgacttcgta

SEQ ID NO: 419274 - DNA, 25 bp, Artificial
  probe
  misc_feature (1)..(25): SEQ ID NO: 5716; WAN024FFF; Start 164; Stop 188
tcatacaaggcatctttcttctctt

SEQ ID NO: 419275 - DNA, 25 bp, Artificial
  probe
  misc_feature (1)..(25): SEQ ID NO: 5716; WAN024FFF; Start 163; Stop 187
ttcatacaaggcatctttcttctct

SEQ ID NO: 419276 - DNA, 25 bp, Artificial
  probe
  misc_feature (1)..(25): SEQ ID NO: 5716; WAN024FFF; Start 159; Stop 183
ccaattcatacaaggcatctttctt

SEQ ID NO: 419277 - DNA, 25 bp, Artificial
  probe
  misc_feature (1)..(25): SEQ ID NO: 5716; WAN024FFF; Start 191; Stop 215
cttcgtaccacaatcacagagtagg

SEQ ID NO: 419278 - DNA, 25 bp, Artificial
  probe
  misc_feature (1)..(25): SEQ ID NO: 5716; WAN024FFF; Start 162; Stop 186
attcatacaaggcatctttcttctc

SEQ ID NO: 419279 - DNA, 25 bp, Artificial
  probe
  misc_feature (1)..(25): SEQ ID NO: 5716; WAN024FFF; Start 157; Stop 181
taccaattcatacaaggcatctttc

SEQ ID NO: 419280 - DNA, 25 bp, Artificial
  probe
  misc_feature (1)..(25): SEQ ID NO: 5716; WAN024FFF; Start 204; Stop 228
tcacagagtaggattggaaattctt

SEQ ID NO: 419281 - DNA, 25 bp, Artificial
  probe
  misc_feature (1)..(25): SEQ ID NO: 5716; WAN024FFF; Start 170; Stop 194
aaggcatctttcttctcttgacttc

SEQ ID NO: 419282 - DNA, 25 bp, Artificial
  probe
  misc_feature (1)..(25): SEQ ID NO: 5716; WAN024FFF; Start 158; Stop 182
accaattcatacaaggcatctttct

SEQ ID NO: 419283 - DNA, 25 bp, Artificial
  probe
  misc_feature (1)..(25): SEQ ID NO: 5716; WAN024FFF; Start 205; Stop 229
cacagagtaggattggaaattcttc

SEQ ID NO: 419284 - DNA, 25 bp, Artificial
  probe
  misc_feature (1)..(25): SEQ ID NO: 5716; WAN024FFF; Start 203; Stop 227
atcacagagtaggattggaaattct

SEQ ID NO: 419285 - DNA, 25 bp, Artificial
  probe
  misc_feature (1)..(25): SEQ ID NO: 5716; WAN024FFF; Start 193; Stop 217
tcgtaccacaatcacagagtaggat

SEQ ID NO: 419286 - DNA, 25 bp, Artificial
  probe
  misc_feature (1)..(25): SEQ ID NO: 5716; WAN024FFF; Start 175; Stop 199
atctttcttctcttgacttcgtacc

SEQ ID NO: 419287 - DNA, 25 bp, Artificial
  probe
  misc_feature (1)..(25): SEQ ID NO: 5716; WAN024FFF; Start 183; Stop 207
tctcttgacttcgtaccacaatcac

SEQ ID NO: 419288 - DNA, 25 bp, Artificial
  probe
  misc_feature (1)..(25): SEQ ID NO: 5716; WAN024FFF; Start 174; Stop 198
catctttcttctcttgacttcgtac

SEQ ID NO: 419289 - DNA, 25 bp, Artificial
  probe
  misc_feature (1)..(25): SEQ ID NO: 5716; WAN024FFF; Start 160; Stop 184
caattcatacaaggcatctttcttc

SEQ ID NO: 419290 - DNA, 25 bp, Artificial
  probe
  misc_feature (1)..(25): SEQ ID NO: 5716; WAN024FFF; Start 161; Stop 185
aattcatacaaggcatctttcttct

SEQ ID NO: 419291 - DNA, 25 bp, Artificial
  probe
  misc_feature (1)..(25): SEQ ID NO: 5716; WAN024FFF; Start 192; Stop 216
ttcgtaccacaatcacagagtagga

SEQ ID NO: 419292 - DNA, 25 bp, Artificial
  probe
  misc_feature (1)..(25): SEQ ID NO: 5716; WAN024FFF; Start 156; Stop 180
gtaccaattcatacaaggcatcttt

SEQ ID NO: 419293 - DNA, 25 bp, Artificial
  probe
  misc_feature (1)..(25): SEQ ID NO: 5716; WAN024FFF; Start 187; Stop 211
ttgacttcgtaccacaatcacagag

SEQ ID NO: 419294 - DNA, 25 bp, Artificial
  probe
  misc_feature (1)..(25): SEQ ID NO: 5716; WAN024FFF; Start 186; Stop 210
cttgacttcgtaccacaatcacaga

SEQ ID NO: 419295 - DNA, 25 bp, Artificial
  probe
  misc_feature (1)..(25): SEQ ID NO: 5716; WAN024FFF; Start 185; Stop 209
tcttgacttcgtaccacaatcacag

SEQ ID NO: 419296 - DNA, 25 bp, Artificial
  probe
  misc_feature (1)..(25): SEQ ID NO: 5716; WAN024FFF; Start 184; Stop 208
ctcttgacttcgtaccacaatcaca

SEQ ID NO: 419297 - DNA, 25 bp, Artificial
  probe
  misc_feature (1)..(25): SEQ ID NO: 5716; WAN024FFF; Start 177; Stop 201
ctttcttctcttgacttcgtaccac

SEQ ID NO: 419298 - DNA, 25 bp, Artificial
  probe
  misc_feature (1)..(25): SEQ ID NO: 5716; WAN024FFF; Start 176; Stop 200
tctttcttctcttgacttcgtacca

SEQ ID NO: 419299 - DNA, 25 bp, Artificial
  probe
  misc_feature (1)..(25): SEQ ID NO: 5716; WAN024FFF; Start 194; Stop 218
cgtaccacaatcacagagtaggatt

SEQ ID NO: 419300 - DNA, 25 bp, Artificial
  probe
  misc_feature (1)..(25): SEQ ID NO: 5717; WAN024FAL; Start 99; Stop 123
aatcagaaccgatcctagaatcaat

SEQ ID NO: 419301 - DNA, 25 bp, Artificial
  probe
  misc_feature (1)..(25): SEQ ID NO: 5717; WAN024FAL; Start 102; Stop 126
cagaaccgatcctagaatcaataga

SEQ ID NO: 419302 - DNA, 25 bp, Artificial
  probe
  misc_feature (1)..(25): SEQ ID NO: 5717; WAN024FAL; Start 101; Stop 125
tcagaaccgatcctagaatcaatag

SEQ ID NO: 419303 - DNA, 25 bp, Artificial
  probe
  misc_feature (1)..(25): SEQ ID NO: 5717; WAN024FAL; Start 106; Stop 130
accgatcctagaatcaatagaatgt

SEQ ID NO: 419304 - DNA, 25 bp, Artificial
  probe
  misc_feature (1)..(25): SEQ ID NO: 5717; WAN024FAL; Start 100; Stop 124
atcagaaccgatcctagaatcaata

SEQ ID NO: 419305 - DNA, 25 bp, Artificial
  probe
  misc_feature (1)..(25): SEQ ID NO: 5717; WAN024FAL; Start 103; Stop 127
agaaccgatcctagaatcaatagaa

SEQ ID NO: 419306 - DNA, 25 bp, Artificial
  probe
  misc_feature (1)..(25): SEQ ID NO: 5717; WAN024FAL; Start 105; Stop 129
aaccgatcctagaatcaatagaatg

SEQ ID NO: 419307 - DNA, 25 bp, Artificial
  probe
  misc_feature (1)..(25): SEQ ID NO: 5717; WAN024FAL; Start 104; Stop 128
gaaccgatcctagaatcaatagaat

SEQ ID NO: 419308 - DNA, 25 bp, Artificial
  probe
  misc_feature (1)..(25): SEQ ID NO: 5717; WAN024FAL; Start 107; Stop 131
ccgatcctagaatcaatagaatgta

SEQ ID NO: 419309 - DNA, 25 bp, Artificial
  probe
  misc_feature (1)..(25): SEQ ID NO: 5717; WAN024FAL; Start 121; Stop 145
aatagaatgtatttgccaatcaggg

SEQ ID NO: 419310 - DNA, 25 bp, Artificial
  probe
  misc_feature (1)..(25): SEQ ID NO: 5717; WAN024FAL; Start 58; Stop 82
ggtttgaaggaactaaagagggtag

SEQ ID NO: 419311 - DNA, 25 bp, Artificial
  probe
  misc_feature (1)..(25): SEQ ID NO: 5717; WAN024FAL; Start 60; Stop 84
tttgaaggaactaaagagggtagca

SEQ ID NO: 419312 - DNA, 25 bp, Artificial
  probe
  misc_feature (1)..(25): SEQ ID NO: 5717; WAN024FAL; Start 98; Stop 122
aaatcagaaccgatcctagaatcaa

SEQ ID NO: 419313 - DNA, 25 bp, Artificial
  probe
  misc_feature (1)..(25): SEQ ID NO: 5717; WAN024FAL; Start 59; Stop 83
gtttgaaggaactaaagagggtagc

SEQ ID NO: 419314 - DNA, 25 bp, Artificial
  probe
  misc_feature (1)..(25): SEQ ID NO: 5717; WAN024FAL; Start 40; Stop 64
tctacaatatccttagtgggtttga

SEQ ID NO: 419315 - DNA, 25 bp, Artificial
  probe
  misc_feature (1)..(25): SEQ ID NO: 5717; WAN024FAL; Start 160; Stop 184
tgtttcatcatgcttctcctcttaa

SEQ ID NO: 419316 - DNA, 25 bp, Artificial
  probe
  misc_feature (1)..(25): SEQ ID NO: 5717; WAN024FAL; Start 159; Stop 183
ttgtttcatcatgcttctcctctta

SEQ ID NO: 419317 - DNA, 25 bp, Artificial
  probe
  misc_feature (1)..(25): SEQ ID NO: 5717; WAN024FAL; Start 62; Stop 86
tgaaggaactaaagagggtagcaag

SEQ ID NO: 419318 - DNA, 25 bp, Artificial
  probe
  misc_feature (1)..(25): SEQ ID NO: 5717; WAN024FAL; Start 120; Stop 144
caatagaatgtatttgccaatcagg

SEQ ID NO: 419319 - DNA, 25 bp, Artificial
  probe
  misc_feature (1)..(25): SEQ ID NO: 5717; WAN024FAL; Start 161; Stop 185
gtttcatcatgcttctcctcttaaa

SEQ ID NO: 419320 - DNA, 25 bp, Artificial
  probe
  misc_feature (1)..(25): SEQ ID NO: 5717; WAN024FAL; Start 61; Stop 85
ttgaaggaactaaagagggtagcaa

SEQ ID NO: 419321 - DNA, 25 bp, Artificial
  probe
  misc_feature (1)..(25): SEQ ID NO: 5717; WAN024FAL; Start 153; Stop 177
ttcatcttgtttcatcatgcttctc

SEQ ID NO: 419322 - DNA, 25 bp, Artificial
  probe
  misc_feature (1)..(25): SEQ ID NO: 5717; WAN024FAL; Start 152; Stop 176
tttcatcttgtttcatcatgcttct

SEQ ID NO: 419323 - DNA, 25 bp, Artificial
  probe
  misc_feature (1)..(25): SEQ ID NO: 5717; WAN024FAL; Start 150; Stop 174
tctttcatcttgtttcatcatgctt

SEQ ID NO: 419324 - DNA, 25 bp, Artificial
  probe
  misc_feature (1)..(25): SEQ ID NO: 5717; WAN024FAL; Start 149; Stop 173
ttctttcatcttgtttcatcatgct

SEQ ID NO: 419325 - DNA, 25 bp, Artificial
  probe
  misc_feature (1)..(25): SEQ ID NO: 5717; WAN024FAL; Start 57; Stop 81
gggtttgaaggaactaaagagggta

SEQ ID NO: 419326 - DNA, 25 bp, Artificial
  probe
  misc_feature (1)..(25): SEQ ID NO: 5717; WAN024FAL; Start 156; Stop 180
atcttgtttcatcatgcttctcctc

SEQ ID NO: 419327 - DNA, 25 bp, Artificial
  probe
  misc_feature (1)..(25): SEQ ID NO: 5717; WAN024FAL; Start 151; Stop 175
ctttcatcttgtttcatcatgcttc

SEQ ID NO: 419328 - DNA, 25 bp, Artificial
  probe
  misc_feature (1)..(25): SEQ ID NO: 5717; WAN024FAL; Start 42; Stop 66
tacaatatccttagtgggtttgaag

SEQ ID NO: 419329 - DNA, 25 bp, Artificial
  probe
  misc_feature (1)..(25): SEQ ID NO: 5717; WAN024FAL; Start 41; Stop 65
ctacaatatccttagtgggtttgaa

SEQ ID NO: 419330 - DNA, 25 bp, Artificial
  probe
  misc_feature (1)..(25): SEQ ID NO: 5717; WAN024FAL; Start 158; Stop 182
cttgtttcatcatgcttctcctctt

SEQ ID NO: 419331 - DNA, 25 bp, Artificial
  probe
  misc_feature (1)..(25): SEQ ID NO: 5717; WAN024FAL; Start 148; Stop 172
tttctttcatcttgtttcatcatgc

SEQ ID NO: 419332 - DNA, 25 bp, Artificial
  probe
  misc_feature (1)..(25): SEQ ID NO: 5717; WAN024FAL; Start 39; Stop 63
atctacaatatccttagtgggtttg

SEQ ID NO: 419333 - DNA, 25 bp, Artificial
  probe
  misc_feature (1)..(25): SEQ ID NO: 5718; WAN024B7K; Start 274; Stop 298
atcatccagtttaccttccatttca

SEQ ID NO: 419334 - DNA, 25 bp, Artificial
  probe
  misc_feature (1)..(25): SEQ ID NO: 5718; WAN024B7K; Start 273; Stop 297
catcatccagtttaccttccatttc

SEQ ID NO: 419335 - DNA, 25 bp, Artificial
  probe
  misc_feature (1)..(25): SEQ ID NO: 5718; WAN024B7K; Start 272; Stop 296
acatcatccagtttaccttccattt

SEQ ID NO: 419336 - DNA, 25 bp, Artificial
  probe
  misc_feature (1)..(25): SEQ ID NO: 5718; WAN024B7K; Start 275; Stop 299
tcatccagtttaccttccatttcag

SEQ ID NO: 419337 - DNA, 25 bp, Artificial
  probe
  misc_feature (1)..(25): SEQ ID NO: 5718; WAN024B7K; Start 271; Stop 295
gacatcatccagtttaccttccatt

SEQ ID NO: 419338 - DNA, 25 bp, Artificial
  probe
  misc_feature (1)..(25): SEQ ID NO: 5718; WAN024B7K; Start 345; Stop 369
gcttattgacaatttctcccaactc

SEQ ID NO: 419339 - DNA, 25 bp, Artificial
  probe
  misc_feature (1)..(25): SEQ ID NO: 5718; WAN024B7K; Start 347; Stop 371
ttattgacaatttctcccaactctg

SEQ ID NO: 419340 - DNA, 25 bp, Artificial
  probe
  misc_feature (1)..(25): SEQ ID NO: 5718; WAN024B7K; Start 21; Stop 45
gacactcaacaccaatctctttcac

SEQ ID NO: 419341 - DNA, 25 bp, Artificial
  probe
  misc_feature (1)..(25): SEQ ID NO: 5718; WAN024B7K; Start 346; Stop 370
cttattgacaatttctcccaactct

SEQ ID NO: 419342 - DNA, 25 bp, Artificial
  probe
  misc_feature (1)..(25): SEQ ID NO: 5718; WAN024B7K; Start 276; Stop 300
catccagtttaccttccatttcagc

SEQ ID NO: 419343 - DNA, 25 bp, Artificial
  probe
  misc_feature (1)..(25): SEQ ID NO: 5718; WAN024B7K; Start 348; Stop 372
tattgacaatttctcccaactctgt

SEQ ID NO: 419344 - DNA, 25 bp, Artificial
  probe
  misc_feature (1)..(25): SEQ ID NO: 5718; WAN024B7K; Start 35; Stop 59
atctctttcacgattgcttgggtat

SEQ ID NO: 419345 - DNA, 25 bp, Artificial
  probe
  misc_feature (1)..(25): SEQ ID NO: 5718; WAN024B7K; Start 24; Stop 48
actcaacaccaatctctttcacgat

SEQ ID NO: 419346 - DNA, 25 bp, Artificial
  probe
  misc_feature (1)..(25): SEQ ID NO: 5718; WAN024B7K; Start 337; Stop 361
aacgatgagcttattgacaatttct

SEQ ID NO: 419347 - DNA, 25 bp, Artificial
  probe
  misc_feature (1)..(25): SEQ ID NO: 5718; WAN024B7K; Start 270; Stop 294
cgacatcatccagtttaccttccat

SEQ ID NO: 419348 - DNA, 25 bp, Artificial
  probe
  misc_feature (1)..(25): SEQ ID NO: 5718; WAN024B7K; Start 344; Stop 368
agcttattgacaatttctcccaact

SEQ ID NO: 419349 - DNA, 25 bp, Artificial
  probe
  misc_feature (1)..(25): SEQ ID NO: 5718; WAN024B7K; Start 336; Stop 360
caacgatgagcttattgacaatttc

SEQ ID NO: 419350 - DNA, 25 bp, Artificial
  probe
  misc_feature (1)..(25): SEQ ID NO: 5718; WAN024B7K; Start 325; Stop 349
tgggaaatattcaacgatgagctta

SEQ ID NO: 419351 - DNA, 25 bp, Artificial
  probe
  misc_feature (1)..(25): SEQ ID NO: 5718; WAN024B7K; Start 322; Stop 346
atctgggaaatattcaacgatgagc

SEQ ID NO: 419352 - DNA, 25 bp, Artificial
  probe
  misc_feature (1)..(25): SEQ ID NO: 5718; WAN024B7K; Start 340; Stop 364
gatgagcttattgacaatttctccc

SEQ ID NO: 419353 - DNA, 25 bp, Artificial
  probe
  misc_feature (1)..(25): SEQ ID NO: 5718; WAN024B7K; Start 326; Stop 350
gggaaatattcaacgatgagcttat

SEQ ID NO: 419354 - DNA, 25 bp, Artificial
  probe
  misc_feature (1)..(25): SEQ ID NO: 5718; WAN024B7K; Start 339; Stop 363
cgatgagcttattgacaatttctcc

SEQ ID NO: 419355 - DNA, 25 bp, Artificial
  probe
  misc_feature (1)..(25): SEQ ID NO: 5718; WAN024B7K; Start 338; Stop 362
acgatgagcttattgacaatttctc

SEQ ID NO: 419356 - DNA, 25 bp, Artificial
  probe
  misc_feature (1)..(25): SEQ ID NO: 5718; WAN024B7K; Start 267; Stop 291
cttcgacatcatccagtttaccttc

SEQ ID NO: 419357 - DNA, 25 bp, Artificial
  probe
  misc_feature (1)..(25): SEQ ID NO: 5718; WAN024B7K; Start 343; Stop 367
gagcttattgacaatttctcccaac

SEQ ID NO: 419358 - DNA, 25 bp, Artificial
  probe
  misc_feature (1)..(25): SEQ ID NO: 5718; WAN024B7K; Start 341; Stop 365
atgagcttattgacaatttctccca

SEQ ID NO: 419359 - DNA, 25 bp, Artificial
  probe
  misc_feature (1)..(25): SEQ ID NO: 5718; WAN024B7K; Start 334; Stop 358
ttcaacgatgagcttattgacaatt

SEQ ID NO: 419360 - DNA, 25 bp, Artificial
  probe
  misc_feature (1)..(25): SEQ ID NO: 5718; WAN024B7K; Start 342; Stop 366
tgagcttattgacaatttctcccaa

SEQ ID NO: 419361 - DNA, 25 bp, Artificial
  probe
  misc_feature (1)..(25): SEQ ID NO: 5718; WAN024B7K; Start 333; Stop 357
attcaacgatgagcttattgacaat

SEQ ID NO: 419362 - DNA, 25 bp, Artificial
  probe
  misc_feature (1)..(25): SEQ ID NO: 5718; WAN024B7K; Start 20; Stop 44
ggacactcaacaccaatctctttca

SEQ ID NO: 419363 - DNA, 25 bp, Artificial
  probe
  misc_feature (1)..(25): SEQ ID NO: 5718; WAN024B7K; Start 309; Stop 333
tcacgtttacgatatctgggaaata

SEQ ID NO: 419364 - DNA, 25 bp, Artificial
  probe
  misc_feature (1)..(25): SEQ ID NO: 5718; WAN024B7K; Start 321; Stop 345
tatctgggaaatattcaacgatgag

SEQ ID NO: 419365 - DNA, 25 bp, Artificial
  probe
  misc_feature (1)..(25): SEQ ID NO: 5718; WAN024B7K; Start 25; Stop 49
ctcaacaccaatctctttcacgatt

SEQ ID NO: 419366 - DNA, 25 bp, Artificial
  probe
  misc_feature (1)..(25): SEQ ID NO: 5719; WAN024FFO; Start 495; Stop 519
actactgtcttatctgatagcactg

SEQ ID NO: 419367 - DNA, 25 bp, Artificial
  probe
  misc_feature (1)..(25): SEQ ID NO: 5719; WAN024FFO; Start 496; Stop 520
ctactgtcttatctgatagcactga

SEQ ID NO: 419368 - DNA, 25 bp, Artificial
  probe
  misc_feature (1)..(25): SEQ ID NO: 5719; WAN024FFO; Start 193; Stop 217
tcctataatgactattctgaagcga

SEQ ID NO: 419369 - DNA, 25 bp, Artificial
  probe
  misc_feature (1)..(25): SEQ ID NO: 5719; WAN024FFO; Start 498; Stop 522
actgtcttatctgatagcactgatt

SEQ ID NO: 419370 - DNA, 25 bp, Artificial
  probe
  misc_feature (1)..(25): SEQ ID NO: 5719; WAN024FFO; Start 307; Stop 331
cattaccatcacttgattcgctatc

SEQ ID NO: 419371 - DNA, 25 bp, Artificial
  probe
  misc_feature (1)..(25): SEQ ID NO: 5719; WAN024FFO; Start 497; Stop 521
tactgtcttatctgatagcactgat

SEQ ID NO: 419372 - DNA, 25 bp, Artificial
  probe
  misc_feature (1)..(25): SEQ ID NO: 5719; WAN024FFO; Start 466; Stop 490
ttacttgctcagttaatgatgttgt

SEQ ID NO: 419373 - DNA, 25 bp, Artificial
  probe
  misc_feature (1)..(25): SEQ ID NO: 5719; WAN024FFO; Start 306; Stop 330
ccattaccatcacttgattcgctat

SEQ ID NO: 419374 - DNA, 25 bp, Artificial
  probe
  misc_feature (1)..(25): SEQ ID NO: 5719; WAN024FFO; Start 194; Stop 218
cctataatgactattctgaagcgaa

SEQ ID NO: 419375 - DNA, 25 bp, Artificial
  probe
  misc_feature (1)..(25): SEQ ID NO: 5719; WAN024FFO; Start 192; Stop 216
ttcctataatgactattctgaagcg

SEQ ID NO: 419376 - DNA, 25 bp, Artificial
  probe
  misc_feature (1)..(25): SEQ ID NO: 5719; WAN024FFO; Start 494; Stop 518
tactactgtcttatctgatagcact

SEQ ID NO: 419377 - DNA, 25 bp, Artificial
  probe
  misc_feature (1)..(25): SEQ ID NO: 5719; WAN024FFO; Start 468; Stop 492
acttgctcagttaatgatgttgtac

SEQ ID NO: 419378 - DNA, 25 bp, Artificial
  probe
  misc_feature (1)..(25): SEQ ID NO: 5719; WAN024FFO; Start 469; Stop 493
cttgctcagttaatgatgttgtact

SEQ ID NO: 419379 - DNA, 25 bp, Artificial
  probe
  misc_feature (1)..(25): SEQ ID NO: 5719; WAN024FFO; Start 302; Stop 326
cagaccattaccatcacttgattcg

SEQ ID NO: 419380 - DNA, 25 bp, Artificial
  probe
  misc_feature (1)..(25): SEQ ID NO: 5719; WAN024FFO; Start 470; Stop 494
ttgctcagttaatgatgttgtactt

SEQ ID NO: 419381 - DNA, 25 bp, Artificial
  probe
  misc_feature (1)..(25): SEQ ID NO: 5719; WAN024FFO; Start 467; Stop 491
tacttgctcagttaatgatgttgta

SEQ ID NO: 419382 - DNA, 25 bp, Artificial
  probe
  misc_feature (1)..(25): SEQ ID NO: 5719; WAN024FFO; Start 500; Stop 524
tgtcttatctgatagcactgattag

SEQ ID NO: 419383 - DNA, 25 bp, Artificial
  probe
  misc_feature (1)..(25): SEQ ID NO: 5719; WAN024FFO; Start 499; Stop 523
ctgtcttatctgatagcactgatta

SEQ ID NO: 419384 - DNA, 25 bp, Artificial
  probe
  misc_feature (1)..(25): SEQ ID NO: 5719; WAN024FFO; Start 301; Stop 325
gcagaccattaccatcacttgattc

SEQ ID NO: 419385 - DNA, 25 bp, Artificial
  probe
  misc_feature (1)..(25): SEQ ID NO: 5719; WAN024FFO; Start 305; Stop 329
accattaccatcacttgattcgcta

SEQ ID NO: 419386 - DNA, 25 bp, Artificial
  probe
  misc_feature (1)..(25): SEQ ID NO: 5719; WAN024FFO; Start 493; Stop 517
ttactactgtcttatctgatagcac

SEQ ID NO: 419387 - DNA, 25 bp, Artificial
  probe
  misc_feature (1)..(25): SEQ ID NO: 5719; WAN024FFO; Start 471; Stop 495
tgctcagttaatgatgttgtactta

SEQ ID NO: 419388 - DNA, 25 bp, Artificial
  probe
  misc_feature (1)..(25): SEQ ID NO: 5719; WAN024FFO; Start 87; Stop 111
acttcgtatagttctgatgatgatt

SEQ ID NO: 419389 - DNA, 25 bp, Artificial
  probe
  misc_feature (1)..(25): SEQ ID NO: 5719; WAN024FFO; Start 501; Stop 525
gtcttatctgatagcactgattagt

SEQ ID NO: 419390 - DNA, 25 bp, Artificial
  probe
  misc_feature (1)..(25): SEQ ID NO: 5719; WAN024FFO; Start 472; Stop 496
gctcagttaatgatgttgtacttac

SEQ ID NO: 419391 - DNA, 25 bp, Artificial
  probe
  misc_feature (1)..(25): SEQ ID NO: 5719; WAN024FFO; Start 85; Stop 109
ctacttcgtatagttctgatgatga

SEQ ID NO: 419392 - DNA, 25 bp, Artificial
  probe
  misc_feature (1)..(25): SEQ ID NO: 5719; WAN024FFO; Start 492; Stop 516
cttactactgtcttatctgatagca

SEQ ID NO: 419393 - DNA, 25 bp, Artificial
  probe
  misc_feature (1)..(25): SEQ ID NO: 5719; WAN024FFO; Start 491; Stop 515
acttactactgtcttatctgatagc

SEQ ID NO: 419394 - DNA, 25 bp, Artificial
  probe
  misc_feature (1)..(25): SEQ ID NO: 5719; WAN024FFO; Start 481; Stop 505
atgatgttgtacttactactgtctt

SEQ ID NO: 419395 - DNA, 25 bp, Artificial
  probe
  misc_feature (1)..(25): SEQ ID NO: 5719; WAN024FFO; Start 480; Stop 504
aatgatgttgtacttactactgtct

SEQ ID NO: 419396 - DNA, 25 bp, Artificial
  probe
  misc_feature (1)..(25): SEQ ID NO: 5719; WAN024FFO; Start 348; Stop 372
cgattatacaaggaaacgattggtt

SEQ ID NO: 419397 - DNA, 25 bp, Artificial
  probe
  misc_feature (1)..(25): SEQ ID NO: 5719; WAN024FFO; Start 584; Stop 608
tgatggatcatattgtaacagtgta

SEQ ID NO: 419398 - DNA, 25 bp, Artificial
  probe
  misc_feature (1)..(25): SEQ ID NO: 5719; WAN024FFO; Start 308; Stop 332
attaccatcacttgattcgctatca

SEQ ID NO: 419399 - DNA, 25 bp, Artificial
  probe
  misc_feature (1)..(25): SEQ ID NO: 5720; WAN024CRA; Start 11; Stop 35
gtcttgttgagtcattcttgtcctt

SEQ ID NO: 419400 - DNA, 25 bp, Artificial
  probe
  misc_feature (1)..(25): SEQ ID NO: 5720; WAN024CRA; Start 9; Stop 33
aagtcttgttgagtcattcttgtcc

SEQ ID NO: 419401 - DNA, 25 bp, Artificial
  probe
  misc_feature (1)..(25): SEQ ID NO: 5720; WAN024CRA; Start 10; Stop 34
agtcttgttgagtcattcttgtcct

SEQ ID NO: 419402 - DNA, 25 bp, Artificial
  probe
  misc_feature (1)..(25): SEQ ID NO: 5720; WAN024CRA; Start 21; Stop 45
gtcattcttgtcctttcccttaaac

SEQ ID NO: 419403 - DNA, 25 bp, Artificial
  probe
  misc_feature (1)..(25): SEQ ID NO: 5720; WAN024CRA; Start 20; Stop 44
agtcattcttgtcctttcccttaaa

SEQ ID NO: 419404 - DNA, 25 bp, Artificial
  probe
  misc_feature (1)..(25): SEQ ID NO: 5720; WAN024CRA; Start 19; Stop 43
gagtcattcttgtcctttcccttaa

SEQ ID NO: 419405 - DNA, 25 bp, Artificial
  probe
  misc_feature (1)..(25): SEQ ID NO: 5720; WAN024CRA; Start 13; Stop 37
cttgttgagtcattcttgtcctttc

SEQ ID NO: 419406 - DNA, 25 bp, Artificial
  probe
  misc_feature (1)..(25): SEQ ID NO: 5720; WAN024CRA; Start 12; Stop 36
tcttgttgagtcattcttgtccttt

SEQ ID NO: 419407 - DNA, 25 bp, Artificial
  probe
  misc_feature (1)..(25): SEQ ID NO: 5720; WAN024CRA; Start 8; Stop 32
aaagtcttgttgagtcattcttgtc

SEQ ID NO: 419408 - DNA, 25 bp, Artificial
  probe
  misc_feature (1)..(25): SEQ ID NO: 5720; WAN024CRA; Start 7; Stop 31
gaaagtcttgttgagtcattcttgt

SEQ ID NO: 419409 - DNA, 25 bp, Artificial
  probe
  misc_feature (1)..(25): SEQ ID NO: 5720; WAN024CRA; Start 6; Stop 30
cgaaagtcttgttgagtcattcttg

SEQ ID NO: 419410 - DNA, 25 bp, Artificial
  probe
  misc_feature (1)..(25): SEQ ID NO: 5720; WAN024CRA; Start 23; Stop 47
cattcttgtcctttcccttaaacga

SEQ ID NO: 419411 - DNA, 25 bp, Artificial
  probe
  misc_feature (1)..(25): SEQ ID NO: 5720; WAN024CRA; Start 22; Stop 46
tcattcttgtcctttcccttaaacg

SEQ ID NO: 419412 - DNA, 25 bp, Artificial
  probe
  misc_feature (1)..(25): SEQ ID NO: 5720; WAN024CRA; Start 18; Stop 42
tgagtcattcttgtcctttccctta

SEQ ID NO: 419413 - DNA, 25 bp, Artificial
  probe
  misc_feature (1)..(25): SEQ ID NO: 5720; WAN024CRA; Start 108; Stop 132
ctttgaccatcatttctattgctgt

SEQ ID NO: 419414 - DNA, 25 bp, Artificial
  probe
  misc_feature (1)..(25): SEQ ID NO: 5720; WAN024CRA; Start 14; Stop 38
ttgttgagtcattcttgtcctttcc

SEQ ID NO: 419415 - DNA, 25 bp, Artificial
  probe
  misc_feature (1)..(25): SEQ ID NO: 5720; WAN024CRA; Start 109; Stop 133
tttgaccatcatttctattgctgtt

SEQ ID NO: 419416 - DNA, 25 bp, Artificial
  probe
  misc_feature (1)..(25): SEQ ID NO: 5720; WAN024CRA; Start 107; Stop 131
gctttgaccatcatttctattgctg

SEQ ID NO: 419417 - DNA, 25 bp, Artificial
  probe
  misc_feature (1)..(25): SEQ ID NO: 5720; WAN024CRA; Start 5; Stop 29
ccgaaagtcttgttgagtcattctt

SEQ ID NO: 419418 - DNA, 25 bp, Artificial
  probe
  misc_feature (1)..(25): SEQ ID NO: 5720; WAN024CRA; Start 110; Stop 134
ttgaccatcatttctattgctgtta

SEQ ID NO: 419419 - DNA, 25 bp, Artificial
  probe
  misc_feature (1)..(25): SEQ ID NO: 5720; WAN024CRA; Start 111; Stop 135
tgaccatcatttctattgctgttat

SEQ ID NO: 419420 - DNA, 25 bp, Artificial
  probe
  misc_feature (1)..(25): SEQ ID NO: 5720; WAN024CRA; Start 17; Stop 41
ttgagtcattcttgtcctttccctt

SEQ ID NO: 419421 - DNA, 25 bp, Artificial
  probe
  misc_feature (1)..(25): SEQ ID NO: 5720; WAN024CRA; Start 112; Stop 136
gaccatcatttctattgctgttatt

SEQ ID NO: 419422 - DNA, 25 bp, Artificial
  probe
  misc_feature (1)..(25): SEQ ID NO: 5720; WAN024CRA; Start 4; Stop 28
tccgaaagtcttgttgagtcattct

SEQ ID NO: 419423 - DNA, 25 bp, Artificial
  probe
  misc_feature (1)..(25): SEQ ID NO: 5720; WAN024CRA; Start 3; Stop 27
gtccgaaagtcttgttgagtcattc

SEQ ID NO: 419424 - DNA, 25 bp, Artificial
  probe
  misc_feature (1)..(25): SEQ ID NO: 5720; WAN024CRA; Start 24; Stop 48
attcttgtcctttcccttaaacgac

SEQ ID NO: 419425 - DNA, 25 bp, Artificial
  probe
  misc_feature (1)..(25): SEQ ID NO: 5720; WAN024CRA; Start 16; Stop 40
gttgagtcattcttgtcctttccct

SEQ ID NO: 419426 - DNA, 25 bp, Artificial
  probe
  misc_feature (1)..(25): SEQ ID NO: 5720; WAN024CRA; Start 2; Stop 26
tgtccgaaagtcttgttgagtcatt

SEQ ID NO: 419427 - DNA, 25 bp, Artificial
  probe
  misc_feature (1)..(25): SEQ ID NO: 5720; WAN024CRA; Start 1; Stop 25
ttgtccgaaagtcttgttgagtcat

SEQ ID NO: 419428 - DNA, 25 bp, Artificial
  probe
  misc_feature (1)..(25): SEQ ID NO: 5720; WAN024CRA; Start 104; Stop 128
tgagctttgaccatcatttctattg

SEQ ID NO: 419429 - DNA, 25 bp, Artificial
  probe
  misc_feature (1)..(25): SEQ ID NO: 5720; WAN024CRA; Start 105; Stop 129
gagctttgaccatcatttctattgc

SEQ ID NO: 419430 - DNA, 25 bp, Artificial
  probe
  misc_feature (1)..(25): SEQ ID NO: 5720; WAN024CRA; Start 15; Stop 39
tgttgagtcattcttgtcctttccc

SEQ ID NO: 419431 - DNA, 25 bp, Artificial
  probe
  misc_feature (1)..(25): SEQ ID NO: 5720; WAN024CRA; Start 62; Stop 86
aaactacaaagaagtgcaggacaaa

SEQ ID NO: 419432 - DNA, 25 bp, Artificial
  probe
  misc_feature (1)..(25): SEQ ID NO: 5721; WAN024EVG; Start 19; Stop 43
atttcaccaacaatttcctctaaga

SEQ ID NO: 419433 - DNA, 25 bp, Artificial
  probe
  misc_feature (1)..(25): SEQ ID NO: 5721; WAN024EVG; Start 100; Stop 124
atttgtctttgggtatttcgcagtt

SEQ ID NO: 419434 - DNA, 25 bp, Artificial
  probe
  misc_feature (1)..(25): SEQ ID NO: 5721; WAN024EVG; Start 104; Stop 128
gtctttgggtatttcgcagttcttt

SEQ ID NO: 419435 - DNA, 25 bp, Artificial
  probe
  misc_feature (1)..(25): SEQ ID NO: 5721; WAN024EVG; Start 71; Stop 95
taccaccgtattcatccagcaagat

SEQ ID NO: 419436 - DNA, 25 bp, Artificial
  probe
  misc_feature (1)..(25): SEQ ID NO: 5721; WAN024EVG; Start 101; Stop 125
tttgtctttgggtatttcgcagttc

SEQ ID NO: 419437 - DNA, 25 bp, Artificial
  probe
  misc_feature (1)..(25): SEQ ID NO: 5721; WAN024EVG; Start 99; Stop 123
catttgtctttgggtatttcgcagt

SEQ ID NO: 419438 - DNA, 25 bp, Artificial
  probe
  misc_feature (1)..(25): SEQ ID NO: 5721; WAN024EVG; Start 20; Stop 44
tttcaccaacaatttcctctaagag

SEQ ID NO: 419439 - DNA, 25 bp, Artificial
  probe
  misc_feature (1)..(25): SEQ ID NO: 5721; WAN024EVG; Start 94; Stop 118
attgccatttgtctttgggtatttc

SEQ ID NO: 419440 - DNA, 25 bp, Artificial
  probe
  misc_feature (1)..(25): SEQ ID NO: 5721; WAN024EVG; Start 93; Stop 117
gattgccatttgtctttgggtattt

SEQ ID NO: 419441 - DNA, 25 bp, Artificial
  probe
  misc_feature (1)..(25): SEQ ID NO: 5721; WAN024EVG; Start 18; Stop 42
aatttcaccaacaatttcctctaag

SEQ ID NO: 419442 - DNA, 25 bp, Artificial
  probe
  misc_feature (1)..(25): SEQ ID NO: 5721; WAN024EVG; Start 92; Stop 116
agattgccatttgtctttgggtatt

SEQ ID NO: 419443 - DNA, 25 bp, Artificial
  probe
  misc_feature (1)..(25): SEQ ID NO: 5721; WAN024EVG; Start 73; Stop 97
ccaccgtattcatccagcaagattg

SEQ ID NO: 419444 - DNA, 25 bp, Artificial
  probe
  misc_feature (1)..(25): SEQ ID NO: 5721; WAN024EVG; Start 103; Stop 127
tgtctttgggtatttcgcagttctt

SEQ ID NO: 419445 - DNA, 25 bp, Artificial
  probe
  misc_feature (1)..(25): SEQ ID NO: 5721; WAN024EVG; Start 102; Stop 126
ttgtctttgggtatttcgcagttct

SEQ ID NO: 419446 - DNA, 25 bp, Artificial
  probe
  misc_feature (1)..(25): SEQ ID NO: 5721; WAN024EVG; Start 70; Stop 94
ataccaccgtattcatccagcaaga

SEQ ID NO: 419447 - DNA, 25 bp, Artificial
  probe
  misc_feature (1)..(25): SEQ ID NO: 5721; WAN024EVG; Start 69; Stop 93
cataccaccgtattcatccagcaag

SEQ ID NO: 419448 - DNA, 25 bp, Artificial
  probe
  misc_feature (1)..(25): SEQ ID NO: 5721; WAN024EVG; Start 72; Stop 96
accaccgtattcatccagcaagatt

SEQ ID NO: 419449 - DNA, 25 bp, Artificial
  probe
  misc_feature (1)..(25): SEQ ID NO: 5721; WAN024EVG; Start 39; Stop 63
taagaggtcttccaaagtcaccaaa

SEQ ID NO: 419450 - DNA, 25 bp, Artificial
  probe
  misc_feature (1)..(25): SEQ ID NO: 5721; WAN024EVG; Start 107; Stop 131
tttgggtatttcgcagttcttttag

SEQ ID NO: 419451 - DNA, 25 bp, Artificial
  probe
  misc_feature (1)..(25): SEQ ID NO: 5721; WAN024EVG; Start 106; Stop 130
ctttgggtatttcgcagttctttta

SEQ ID NO: 419452 - DNA, 25 bp, Artificial
  probe
  misc_feature (1)..(25): SEQ ID NO: 5721; WAN024EVG; Start 91; Stop 115
aagattgccatttgtctttgggtat

SEQ ID NO: 419453 - DNA, 25 bp, Artificial
  probe
  misc_feature (1)..(25): SEQ ID NO: 5721; WAN024EVG; Start 122; Stop 146
gttcttttagcaagtcatccacaaa

SEQ ID NO: 419454 - DNA, 25 bp, Artificial
  probe
  misc_feature (1)..(25): SEQ ID NO: 5721; WAN024EVG; Start 113; Stop 137
tatttcgcagttcttttagcaagtc

SEQ ID NO: 419455 - DNA, 25 bp, Artificial
  probe
  misc_feature (1)..(25): SEQ ID NO: 5721; WAN024EVG; Start 38; Stop 62
ctaagaggtcttccaaagtcaccaa

SEQ ID NO: 419456 - DNA, 25 bp, Artificial
  probe
  misc_feature (1)..(25): SEQ ID NO: 5721; WAN024EVG; Start 112; Stop 136
gtatttcgcagttcttttagcaagt

SEQ ID NO: 419457 - DNA, 25 bp, Artificial
  probe
  misc_feature (1)..(25): SEQ ID NO: 5721; WAN024EVG; Start 78; Stop 102
gtattcatccagcaagattgccatt

SEQ ID NO: 419458 - DNA, 25 bp, Artificial
  probe
  misc_feature (1)..(25): SEQ ID NO: 5721; WAN024EVG; Start 121; Stop 145
agttcttttagcaagtcatccacaa

SEQ ID NO: 419459 - DNA, 25 bp, Artificial
  probe
  misc_feature (1)..(25): SEQ ID NO: 5721; WAN024EVG; Start 111; Stop 135
ggtatttcgcagttcttttagcaag

SEQ ID NO: 419460 - DNA, 25 bp, Artificial
  probe
  misc_feature (1)..(25): SEQ ID NO: 5721; WAN024EVG; Start 105; Stop 129
tctttgggtatttcgcagttctttt

SEQ ID NO: 419461 - DNA, 25 bp, Artificial
  probe
  misc_feature (1)..(25): SEQ ID NO: 5721; WAN024EVG; Start 95; Stop 119
ttgccatttgtctttgggtatttcg

SEQ ID NO: 419462 - DNA, 25 bp, Artificial
  probe
  misc_feature (1)..(25): SEQ ID NO: 5721; WAN024EVG; Start 36; Stop 60
ctctaagaggtcttccaaagtcacc

SEQ ID NO: 419463 - DNA, 25 bp, Artificial
  probe
  misc_feature (1)..(25): SEQ ID NO: 5721; WAN024EVG; Start 120; Stop 144
cagttcttttagcaagtcatccaca

SEQ ID NO: 419464 - DNA, 25 bp, Artificial
  probe
  misc_feature (1)..(25): SEQ ID NO: 5721; WAN024EVG; Start 90; Stop 114
caagattgccatttgtctttgggta

SEQ ID NO: 419465 - DNA, 25 bp, Artificial
  probe
  misc_feature (1)..(25): SEQ ID NO: 5722; WAN024C5H; Start 155; Stop 179
agttgctctcttacataggattctt

SEQ ID NO: 419466 - DNA, 25 bp, Artificial
  probe
  misc_feature (1)..(25): SEQ ID NO: 5722; WAN024C5H; Start 83; Stop 107
gacatcatattggcataggtaatcc

SEQ ID NO: 419467 - DNA, 25 bp, Artificial
  probe
  misc_feature (1)..(25): SEQ ID NO: 5722; WAN024C5H; Start 156; Stop 180
gttgctctcttacataggattcttc

SEQ ID NO: 419468 - DNA, 25 bp, Artificial
  probe
  misc_feature (1)..(25): SEQ ID NO: 5722; WAN024C5H; Start 154; Stop 178
gagttgctctcttacataggattct

SEQ ID NO: 419469 - DNA, 25 bp, Artificial
  probe
  misc_feature (1)..(25): SEQ ID NO: 5722; WAN024C5H; Start 82; Stop 106
agacatcatattggcataggtaatc

SEQ ID NO: 419470 - DNA, 25 bp, Artificial
  probe
  misc_feature (1)..(25): SEQ ID NO: 5722; WAN024C5H; Start 176; Stop 200
tcttccatgtccagatacttatgaa

SEQ ID NO: 419471 - DNA, 25 bp, Artificial
  probe
  misc_feature (1)..(25): SEQ ID NO: 5722; WAN024C5H; Start 175; Stop 199
ttcttccatgtccagatacttatga

SEQ ID NO: 419472 - DNA, 25 bp, Artificial
  probe
  misc_feature (1)..(25): SEQ ID NO: 5722; WAN024C5H; Start 157; Stop 181
ttgctctcttacataggattcttcc

SEQ ID NO: 419473 - DNA, 25 bp, Artificial
  probe
  misc_feature (1)..(25): SEQ ID NO: 5722; WAN024C5H; Start 159; Stop 183
gctctcttacataggattcttccat

SEQ ID NO: 419474 - DNA, 25 bp, Artificial
  probe
  misc_feature (1)..(25): SEQ ID NO: 5722; WAN024C5H; Start 79; Stop 103
gatagacatcatattggcataggta

SEQ ID NO: 419475 - DNA, 25 bp, Artificial
  probe
  misc_feature (1)..(25): SEQ ID NO: 5722; WAN024C5H; Start 158; Stop 182
tgctctcttacataggattcttcca

SEQ ID NO: 419476 - DNA, 25 bp, Artificial
  probe
  misc_feature (1)..(25): SEQ ID NO: 5722; WAN024C5H; Start 174; Stop 198
attcttccatgtccagatacttatg

SEQ ID NO: 419477 - DNA, 25 bp, Artificial
  probe
  misc_feature (1)..(25): SEQ ID NO: 5722; WAN024C5H; Start 84; Stop 108
acatcatattggcataggtaatccc

SEQ ID NO: 419478 - DNA, 25 bp, Artificial
  probe
  misc_feature (1)..(25): SEQ ID NO: 5722; WAN024C5H; Start 170; Stop 194
taggattcttccatgtccagatact

SEQ ID NO: 419479 - DNA, 25 bp, Artificial
  probe
  misc_feature (1)..(25): SEQ ID NO: 5722; WAN024C5H; Start 172; Stop 196
ggattcttccatgtccagatactta

SEQ ID NO: 419480 - DNA, 25 bp, Artificial
  probe
  misc_feature (1)..(25): SEQ ID NO: 5722; WAN024C5H; Start 169; Stop 193
ataggattcttccatgtccagatac

SEQ ID NO: 419481 - DNA, 25 bp, Artificial
  probe
  misc_feature (1)..(25): SEQ ID NO: 5722; WAN024C5H; Start 168; Stop 192
cataggattcttccatgtccagata

SEQ ID NO: 419482 - DNA, 25 bp, Artificial
  probe
  misc_feature (1)..(25): SEQ ID NO: 5722; WAN024C5H; Start 81; Stop 105
tagacatcatattggcataggtaat

SEQ ID NO: 419483 - DNA, 25 bp, Artificial
  probe
  misc_feature (1)..(25): SEQ ID NO: 5722; WAN024C5H; Start 80; Stop 104
atagacatcatattggcataggtaa

SEQ ID NO: 419484 - DNA, 25 bp, Artificial
  probe
  misc_feature (1)..(25): SEQ ID NO: 5722; WAN024C5H; Start 173; Stop 197
gattcttccatgtccagatacttat

SEQ ID NO: 419485 - DNA, 25 bp, Artificial
  probe
  misc_feature (1)..(25): SEQ ID NO: 5722; WAN024C5H; Start 171; Stop 195
aggattcttccatgtccagatactt

SEQ ID NO: 419486 - DNA, 25 bp, Artificial
  probe
  misc_feature (1)..(25): SEQ ID NO: 5722; WAN024C5H; Start 124; Stop 148
aaaggaaacttgcttgagattaggt

SEQ ID NO: 419487 - DNA, 25 bp, Artificial
  probe
  misc_feature (1)..(25): SEQ ID NO: 5722; WAN024C5H; Start 125; Stop 149
aaggaaacttgcttgagattaggtt

SEQ ID NO: 419488 - DNA, 25 bp, Artificial
  probe
  misc_feature (1)..(25): SEQ ID NO: 5722; WAN024C5H; Start 123; Stop 147
caaaggaaacttgcttgagattagg

SEQ ID NO: 419489 - DNA, 25 bp, Artificial
  probe
  misc_feature (1)..(25): SEQ ID NO: 5722; WAN024C5H; Start 122; Stop 146
ccaaaggaaacttgcttgagattag

SEQ ID NO: 419490 - DNA, 25 bp, Artificial
  probe
  misc_feature (1)..(25): SEQ ID NO: 5722; WAN024C5H; Start 126; Stop 150
aggaaacttgcttgagattaggttg

SEQ ID NO: 419491 - DNA, 25 bp, Artificial
  probe
  misc_feature (1)..(25): SEQ ID NO: 5722; WAN024C5H; Start 160; Stop 184
ctctcttacataggattcttccatg

SEQ ID NO: 419492 - DNA, 25 bp, Artificial
  probe
  misc_feature (1)..(25): SEQ ID NO: 5722; WAN024C5H; Start 14; Stop 38
taactacgattgggactggttgtaa

SEQ ID NO: 419493 - DNA, 25 bp, Artificial
  probe
  misc_feature (1)..(25): SEQ ID NO: 5722; WAN024C5H; Start 78; Stop 102
tgatagacatcatattggcataggt

SEQ ID NO: 419494 - DNA, 25 bp, Artificial
  probe
  misc_feature (1)..(25): SEQ ID NO: 5722; WAN024C5H; Start 183; Stop 207
tgtccagatacttatgaaagacctc

SEQ ID NO: 419495 - DNA, 25 bp, Artificial
  probe
  misc_feature (1)..(25): SEQ ID NO: 5722; WAN024C5H; Start 184; Stop 208
gtccagatacttatgaaagacctct

SEQ ID NO: 419496 - DNA, 25 bp, Artificial
  probe
  misc_feature (1)..(25): SEQ ID NO: 5722; WAN024C5H; Start 179; Stop 203
tccatgtccagatacttatgaaaga

SEQ ID NO: 419497 - DNA, 25 bp, Artificial
  probe
  misc_feature (1)..(25): SEQ ID NO: 5722; WAN024C5H; Start 13; Stop 37
gtaactacgattgggactggttgta

SEQ ID NO: 419498 - DNA, 25 bp, Artificial
  probe
  misc_feature (1)..(25): SEQ ID NO: 5723; WAN024F3M; Start 148; Stop 172
gatcacttcagttccgtagaattgg

SEQ ID NO: 419499 - DNA, 25 bp, Artificial
  probe
  misc_feature (1)..(25): SEQ ID NO: 5723; WAN024F3M; Start 147; Stop 171
cgatcacttcagttccgtagaattg

SEQ ID NO: 419500 - DNA, 25 bp, Artificial
  probe
  misc_feature (1)..(25): SEQ ID NO: 5723; WAN024F3M; Start 151; Stop 175
cacttcagttccgtagaattggatt

SEQ ID NO: 419501 - DNA, 25 bp, Artificial
  probe
  misc_feature (1)..(25): SEQ ID NO: 5723; WAN024F3M; Start 229; Stop 253
agggatttcgtattggtcataagtt

SEQ ID NO: 419502 - DNA, 25 bp, Artificial
  probe
  misc_feature (1)..(25): SEQ ID NO: 5723; WAN024F3M; Start 75; Stop 99
taacagtagcacctttgatagatgg

SEQ ID NO: 419503 - DNA, 25 bp, Artificial
  probe
  misc_feature (1)..(25): SEQ ID NO: 5723; WAN024F3M; Start 218; Stop 242
acattgactacagggatttcgtatt

SEQ ID NO: 419504 - DNA, 25 bp, Artificial
  probe
  misc_feature (1)..(25): SEQ ID NO: 5723; WAN024F3M; Start 217; Stop 241
aacattgactacagggatttcgtat

SEQ ID NO: 419505 - DNA, 25 bp, Artificial
  probe
  misc_feature (1)..(25): SEQ ID NO: 5723; WAN024F3M; Start 225; Stop 249
ctacagggatttcgtattggtcata

SEQ ID NO: 419506 - DNA, 25 bp, Artificial
  probe
  misc_feature (1)..(25): SEQ ID NO: 5723; WAN024F3M; Start 219; Stop 243
cattgactacagggatttcgtattg

SEQ ID NO: 419507 - DNA, 25 bp, Artificial
  probe
  misc_feature (1)..(25): SEQ ID NO: 5723; WAN024F3M; Start 230; Stop 254
gggatttcgtattggtcataagttt

SEQ ID NO: 419508 - DNA, 25 bp, Artificial
  probe
  misc_feature (1)..(25): SEQ ID NO: 5723; WAN024F3M; Start 228; Stop 252
cagggatttcgtattggtcataagt

SEQ ID NO: 419509 - DNA, 25 bp, Artificial
  probe
  misc_feature (1)..(25): SEQ ID NO: 5723; WAN024F3M; Start 227; Stop 251
acagggatttcgtattggtcataag

SEQ ID NO: 419510 - DNA, 25 bp, Artificial
  probe
  misc_feature (1)..(25): SEQ ID NO: 5723; WAN024F3M; Start 226; Stop 250
tacagggatttcgtattggtcataa

SEQ ID NO: 419511 - DNA, 25 bp, Artificial
  probe
  misc_feature (1)..(25): SEQ ID NO: 5723; WAN024F3M; Start 220; Stop 244
attgactacagggatttcgtattgg

SEQ ID NO: 419512 - DNA, 25 bp, Artificial
  probe
  misc_feature (1)..(25): SEQ ID NO: 5723; WAN024F3M; Start 115; Stop 139
tgtcaactcaacagtagtaggaacg

SEQ ID NO: 419513 - DNA, 25 bp, Artificial
  probe
  misc_feature (1)..(25): SEQ ID NO: 5723; WAN024F3M; Start 74; Stop 98
gtaacagtagcacctttgatagatg

SEQ ID NO: 419514 - DNA, 25 bp, Artificial
  probe
  misc_feature (1)..(25): SEQ ID NO: 5723; WAN024F3M; Start 190; Stop 214
ttcaaggatgtaaagcaattcgttt

SEQ ID NO: 419515 - DNA, 25 bp, Artificial
  probe
  misc_feature (1)..(25): SEQ ID NO: 5723; WAN024F3M; Start 189; Stop 213
tttcaaggatgtaaagcaattcgtt

SEQ ID NO: 419516 - DNA, 25 bp, Artificial
  probe
  misc_feature (1)..(25): SEQ ID NO: 5723; WAN024F3M; Start 150; Stop 174
tcacttcagttccgtagaattggat

SEQ ID NO: 419517 - DNA, 25 bp, Artificial
  probe
  misc_feature (1)..(25): SEQ ID NO: 5723; WAN024F3M; Start 149; Stop 173
atcacttcagttccgtagaattgga

SEQ ID NO: 419518 - DNA, 25 bp, Artificial
  probe
  misc_feature (1)..(25): SEQ ID NO: 5723; WAN024F3M; Start 73; Stop 97
tgtaacagtagcacctttgatagat

SEQ ID NO: 419519 - DNA, 25 bp, Artificial
  probe
  misc_feature (1)..(25): SEQ ID NO: 5723; WAN024F3M; Start 216; Stop 240
caacattgactacagggatttcgta

SEQ ID NO: 419520 - DNA, 25 bp, Artificial
  probe
  misc_feature (1)..(25): SEQ ID NO: 5723; WAN024F3M; Start 308; Stop 332
acagtctcgataatagcttgttcaa

SEQ ID NO: 419521 - DNA, 25 bp, Artificial
  probe
  misc_feature (1)..(25): SEQ ID NO: 5723; WAN024F3M; Start 307; Stop 331
gacagtctcgataatagcttgttca

SEQ ID NO: 419522 - DNA, 25 bp, Artificial
  probe
  misc_feature (1)..(25): SEQ ID NO: 5723; WAN024F3M; Start 234; Stop 258
tttcgtattggtcataagtttctgt

SEQ ID NO: 419523 - DNA, 25 bp, Artificial
  probe
  misc_feature (1)..(25): SEQ ID NO: 5723; WAN024F3M; Start 146; Stop 170
ccgatcacttcagttccgtagaatt

SEQ ID NO: 419524 - DNA, 25 bp, Artificial
  probe
  misc_feature (1)..(25): SEQ ID NO: 5723; WAN024F3M; Start 116; Stop 140
gtcaactcaacagtagtaggaacgg

SEQ ID NO: 419525 - DNA, 25 bp, Artificial
  probe
  misc_feature (1)..(25): SEQ ID NO: 5723; WAN024F3M; Start 87; Stop 111
ctttgatagatggttgagtttcagc

SEQ ID NO: 419526 - DNA, 25 bp, Artificial
  probe
  misc_feature (1)..(25): SEQ ID NO: 5723; WAN024F3M; Start 224; Stop 248
actacagggatttcgtattggtcat

SEQ ID NO: 419527 - DNA, 25 bp, Artificial
  probe
  misc_feature (1)..(25): SEQ ID NO: 5723; WAN024F3M; Start 86; Stop 110
cctttgatagatggttgagtttcag

SEQ ID NO: 419528 - DNA, 25 bp, Artificial
  probe
  misc_feature (1)..(25): SEQ ID NO: 5723; WAN024F3M; Start 306; Stop 330
ggacagtctcgataatagcttgttc

SEQ ID NO: 419529 - DNA, 25 bp, Artificial
  probe
  misc_feature (1)..(25): SEQ ID NO: 5723; WAN024F3M; Start 89; Stop 113
ttgatagatggttgagtttcagcaa

SEQ ID NO: 419530 - DNA, 25 bp, Artificial
  probe
  misc_feature (1)..(25): SEQ ID NO: 5723; WAN024F3M; Start 88; Stop 112
tttgatagatggttgagtttcagca

SEQ ID NO: 419531 - DNA, 25 bp, Artificial
  probe
  misc_feature (1)..(25): SEQ ID NO: 5724; WAN024F4X; Start 40; Stop 64
ttcatcacgctcatacttacggatt

SEQ ID NO: 419532 - DNA, 25 bp, Artificial
  probe
  misc_feature (1)..(25): SEQ ID NO: 5724; WAN024F4X; Start 242; Stop 266
gtaaatcccattctaacaccctctt

SEQ ID NO: 419533 - DNA, 25 bp, Artificial
  probe
  misc_feature (1)..(25): SEQ ID NO: 5724; WAN024F4X; Start 243; Stop 267
taaatcccattctaacaccctcttt

SEQ ID NO: 419534 - DNA, 25 bp, Artificial
  probe
  misc_feature (1)..(25): SEQ ID NO: 5724; WAN024F4X; Start 238; Stop 262
ttcagtaaatcccattctaacaccc

SEQ ID NO: 419535 - DNA, 25 bp, Artificial
  probe
  misc_feature (1)..(25): SEQ ID NO: 5724; WAN024F4X; Start 237; Stop 261
cttcagtaaatcccattctaacacc

SEQ ID NO: 419536 - DNA, 25 bp, Artificial
  probe
  misc_feature (1)..(25): SEQ ID NO: 5724; WAN024F4X; Start 244; Stop 268
aaatcccattctaacaccctctttc

SEQ ID NO: 419537 - DNA, 25 bp, Artificial
  probe
  misc_feature (1)..(25): SEQ ID NO: 5724; WAN024F4X; Start 241; Stop 265
agtaaatcccattctaacaccctct

SEQ ID NO: 419538 - DNA, 25 bp, Artificial
  probe
  misc_feature (1)..(25): SEQ ID NO: 5724; WAN024F4X; Start 240; Stop 264
cagtaaatcccattctaacaccctc

SEQ ID NO: 419539 - DNA, 25 bp, Artificial
  probe
  misc_feature (1)..(25): SEQ ID NO: 5724; WAN024F4X; Start 173; Stop 197
acatctgtcaaagtttcgctaattt

SEQ ID NO: 419540 - DNA, 25 bp, Artificial
  probe
  misc_feature (1)..(25): SEQ ID NO: 5724; WAN024F4X; Start 34; Stop 58
aacgatttcatcacgctcatactta

SEQ ID NO: 419541 - DNA, 25 bp, Artificial
  probe
  misc_feature (1)..(25): SEQ ID NO: 5724; WAN024F4X; Start 161; Stop 185
aacgaagcataaacatctgtcaaag

SEQ ID NO: 419542 - DNA, 25 bp, Artificial
  probe
  misc_feature (1)..(25): SEQ ID NO: 5724; WAN024F4X; Start 160; Stop 184
caacgaagcataaacatctgtcaaa

SEQ ID NO: 419543 - DNA, 25 bp, Artificial
  probe
  misc_feature (1)..(25): SEQ ID NO: 5724; WAN024F4X; Start 239; Stop 263
tcagtaaatcccattctaacaccct

SEQ ID NO: 419544 - DNA, 25 bp, Artificial
  probe
  misc_feature (1)..(25): SEQ ID NO: 5724; WAN024F4X; Start 175; Stop 199
atctgtcaaagtttcgctaatttct

SEQ ID NO: 419545 - DNA, 25 bp, Artificial
  probe
  misc_feature (1)..(25): SEQ ID NO: 5724; WAN024F4X; Start 174; Stop 198
catctgtcaaagtttcgctaatttc

SEQ ID NO: 419546 - DNA, 25 bp, Artificial
  probe
  misc_feature (1)..(25): SEQ ID NO: 5724; WAN024F4X; Start 123; Stop 147
ctacgatttggttaattgggttgta

SEQ ID NO: 419547 - DNA, 25 bp, Artificial
  probe
  misc_feature (1)..(25): SEQ ID NO: 5724; WAN024F4X; Start 176; Stop 200
tctgtcaaagtttcgctaatttctt

SEQ ID NO: 419548 - DNA, 25 bp, Artificial
  probe
  misc_feature (1)..(25): SEQ ID NO: 5724; WAN024F4X; Start 172; Stop 196
aacatctgtcaaagtttcgctaatt

SEQ ID NO: 419549 - DNA, 25 bp, Artificial
  probe
  misc_feature (1)..(25): SEQ ID NO: 5724; WAN024F4X; Start 163; Stop 187
cgaagcataaacatctgtcaaagtt

SEQ ID NO: 419550 - DNA, 25 bp, Artificial
  probe
  misc_feature (1)..(25): SEQ ID NO: 5724; WAN024F4X; Start 21; Stop 45
gaaccaattcctcaacgatttcatc

SEQ ID NO: 419551 - DNA, 25 bp, Artificial
  probe
  misc_feature (1)..(25): SEQ ID NO: 5724; WAN024F4X; Start 35; Stop 59
acgatttcatcacgctcatacttac

SEQ ID NO: 419552 - DNA, 25 bp, Artificial
  probe
  misc_feature (1)..(25): SEQ ID NO: 5724; WAN024F4X; Start 124; Stop 148
tacgatttggttaattgggttgtaa

SEQ ID NO: 419553 - DNA, 25 bp, Artificial
  probe
  misc_feature (1)..(25): SEQ ID NO: 5724; WAN024F4X; Start 162; Stop 186
acgaagcataaacatctgtcaaagt

SEQ ID NO: 419554 - DNA, 25 bp, Artificial
  probe
  misc_feature (1)..(25): SEQ ID NO: 5724; WAN024F4X; Start 159; Stop 183
tcaacgaagcataaacatctgtcaa

SEQ ID NO: 419555 - DNA, 25 bp, Artificial
  probe
  misc_feature (1)..(25): SEQ ID NO: 5724; WAN024F4X; Start 236; Stop 260
tcttcagtaaatcccattctaacac

SEQ ID NO: 419556 - DNA, 25 bp, Artificial
  probe
  misc_feature (1)..(25): SEQ ID NO: 5724; WAN024F4X; Start 48; Stop 72
gctcatacttacggatttgatttcg

SEQ ID NO: 419557 - DNA, 25 bp, Artificial
  probe
  misc_feature (1)..(25): SEQ ID NO: 5724; WAN024F4X; Start 47; Stop 71
cgctcatacttacggatttgatttc

SEQ ID NO: 419558 - DNA, 25 bp, Artificial
  probe
  misc_feature (1)..(25): SEQ ID NO: 5724; WAN024F4X; Start 22; Stop 46
aaccaattcctcaacgatttcatca

SEQ ID NO: 419559 - DNA, 25 bp, Artificial
  probe
  misc_feature (1)..(25): SEQ ID NO: 5724; WAN024F4X; Start 157; Stop 181
gttcaacgaagcataaacatctgtc

SEQ ID NO: 419560 - DNA, 25 bp, Artificial
  probe
  misc_feature (1)..(25): SEQ ID NO: 5724; WAN024F4X; Start 248; Stop 272
cccattctaacaccctctttcctta

SEQ ID NO: 419561 - DNA, 25 bp, Artificial
  probe
  misc_feature (1)..(25): SEQ ID NO: 5724; WAN024F4X; Start 158; Stop 182
ttcaacgaagcataaacatctgtca

SEQ ID NO: 419562 - DNA, 25 bp, Artificial
  probe
  misc_feature (1)..(25): SEQ ID NO: 5724; WAN024F4X; Start 122; Stop 146
cctacgatttggttaattgggttgt

SEQ ID NO: 419563 - DNA, 25 bp, Artificial
  probe
  misc_feature (1)..(25): SEQ ID NO: 5724; WAN024F4X; Start 46; Stop 70
acgctcatacttacggatttgattt

SEQ ID NO: 419564 - DNA, 25 bp, Artificial
  probe
  misc_feature (1)..(25): SEQ ID NO: 5725; WAN024CLR; Start 50; Stop 74
atagaacagaacctcactatgccaa

SEQ ID NO: 419565 - DNA, 25 bp, Artificial
  probe
  misc_feature (1)..(25): SEQ ID NO: 5725; WAN024CLR; Start 49; Stop 73
aatagaacagaacctcactatgcca

SEQ ID NO: 419566 - DNA, 25 bp, Artificial
  probe
  misc_feature (1)..(25): SEQ ID NO: 5725; WAN024CLR; Start 51; Stop 75
tagaacagaacctcactatgccaaa

SEQ ID NO: 419567 - DNA, 25 bp, Artificial
  probe
  misc_feature (1)..(25): SEQ ID NO: 5725; WAN024CLR; Start 47; Stop 71
caaatagaacagaacctcactatgc

SEQ ID NO: 419568 - DNA, 25 bp, Artificial
  probe
  misc_feature (1)..(25): SEQ ID NO: 5725; WAN024CLR; Start 48; Stop 72
aaatagaacagaacctcactatgcc

SEQ ID NO: 419569 - DNA, 25 bp, Artificial
  probe
  misc_feature (1)..(25): SEQ ID NO: 5725; WAN024CLR; Start 46; Stop 70
tcaaatagaacagaacctcactatg

SEQ ID NO: 419570 - DNA, 25 bp, Artificial
  probe
  misc_feature (1)..(25): SEQ ID NO: 5725; WAN024CLR; Start 43; Stop 67
atatcaaatagaacagaacctcact

SEQ ID NO: 419571 - DNA, 25 bp, Artificial
  probe
  misc_feature (1)..(25): SEQ ID NO: 5725; WAN024CLR; Start 44; Stop 68
tatcaaatagaacagaacctcacta

SEQ ID NO: 419572 - DNA, 25 bp, Artificial
  probe
  misc_feature (1)..(25): SEQ ID NO: 5725; WAN024CLR; Start 45; Stop 69
atcaaatagaacagaacctcactat

SEQ ID NO: 419573 - DNA, 25 bp, Artificial
  probe
  misc_feature (1)..(25): SEQ ID NO: 5725; WAN024CLR; Start 58; Stop 82
gaacctcactatgccaaaatcattt

SEQ ID NO: 419574 - DNA, 25 bp, Artificial
  probe
  misc_feature (1)..(25): SEQ ID NO: 5725; WAN024CLR; Start 57; Stop 81
agaacctcactatgccaaaatcatt

SEQ ID NO: 419575 - DNA, 25 bp, Artificial
  probe
  misc_feature (1)..(25): SEQ ID NO: 5725; WAN024CLR; Start 54; Stop 78
aacagaacctcactatgccaaaatc

SEQ ID NO: 419576 - DNA, 25 bp, Artificial
  probe
  misc_feature (1)..(25): SEQ ID NO: 5725; WAN024CLR; Start 53; Stop 77
gaacagaacctcactatgccaaaat

SEQ ID NO: 419577 - DNA, 25 bp, Artificial
  probe
  misc_feature (1)..(25): SEQ ID NO: 5725; WAN024CLR; Start 56; Stop 80
cagaacctcactatgccaaaatcat

SEQ ID NO: 419578 - DNA, 25 bp, Artificial
  probe
  misc_feature (1)..(25): SEQ ID NO: 5725; WAN024CLR; Start 42; Stop 66
gatatcaaatagaacagaacctcac

SEQ ID NO: 419579 - DNA, 25 bp, Artificial
  probe
  misc_feature (1)..(25): SEQ ID NO: 5725; WAN024CLR; Start 52; Stop 76
agaacagaacctcactatgccaaaa

SEQ ID NO: 419580 - DNA, 25 bp, Artificial
  probe
  misc_feature (1)..(25): SEQ ID NO: 5725; WAN024CLR; Start 55; Stop 79
acagaacctcactatgccaaaatca

SEQ ID NO: 419581 - DNA, 25 bp, Artificial
  probe
  misc_feature (1)..(25): SEQ ID NO: 5725; WAN024CLR; Start 59; Stop 83
aacctcactatgccaaaatcatttt

SEQ ID NO: 419582 - DNA, 25 bp, Artificial
  probe
  misc_feature (1)..(25): SEQ ID NO: 5725; WAN024CLR; Start 63; Stop 87
tcactatgccaaaatcattttacct

SEQ ID NO: 419583 - DNA, 25 bp, Artificial
  probe
  misc_feature (1)..(25): SEQ ID NO: 5725; WAN024CLR; Start 60; Stop 84
acctcactatgccaaaatcatttta

SEQ ID NO: 419584 - DNA, 25 bp, Artificial
  probe
  misc_feature (1)..(25): SEQ ID NO: 5725; WAN024CLR; Start 62; Stop 86
ctcactatgccaaaatcattttacc

SEQ ID NO: 419585 - DNA, 25 bp, Artificial
  probe
  misc_feature (1)..(25): SEQ ID NO: 5725; WAN024CLR; Start 61; Stop 85
cctcactatgccaaaatcattttac

SEQ ID NO: 419586 - DNA, 25 bp, Artificial
  probe
  misc_feature (1)..(25): SEQ ID NO: 5725; WAN024CLR; Start 64; Stop 88
cactatgccaaaatcattttacctt

SEQ ID NO: 419587 - DNA, 25 bp, Artificial
  probe
  misc_feature (1)..(25): SEQ ID NO: 5725; WAN024CLR; Start 65; Stop 89
actatgccaaaatcattttaccttt

SEQ ID NO: 419588 - DNA, 25 bp, Artificial
  probe
  misc_feature (1)..(25): SEQ ID NO: 5725; WAN024CLR; Start 67; Stop 91
tatgccaaaatcattttaccttttc

SEQ ID NO: 419589 - DNA, 25 bp, Artificial
  probe
  misc_feature (1)..(25): SEQ ID NO: 5725; WAN024CLR; Start 66; Stop 90
ctatgccaaaatcattttacctttt

SEQ ID NO: 419590 - DNA, 25 bp, Artificial
  probe
  misc_feature (1)..(25): SEQ ID NO: 5726; WAN024G78; Start 204; Stop 228
agttctaaatagtgtggatgctgag

SEQ ID NO: 419591 - DNA, 25 bp, Artificial
  probe
  misc_feature (1)..(25): SEQ ID NO: 5726; WAN024G78; Start 207; Stop 231
tctaaatagtgtggatgctgagaac

SEQ ID NO: 419592 - DNA, 25 bp, Artificial
  probe
  misc_feature (1)..(25): SEQ ID NO: 5726; WAN024G78; Start 205; Stop 229
gttctaaatagtgtggatgctgaga

SEQ ID NO: 419593 - DNA, 25 bp, Artificial
  probe
  misc_feature (1)..(25): SEQ ID NO: 5726; WAN024G78; Start 208; Stop 232
ctaaatagtgtggatgctgagaacg

SEQ ID NO: 419594 - DNA, 25 bp, Artificial
  probe
  misc_feature (1)..(25): SEQ ID NO: 5726; WAN024G78; Start 209; Stop 233
taaatagtgtggatgctgagaacga

SEQ ID NO: 419595 - DNA, 25 bp, Artificial
  probe
  misc_feature (1)..(25): SEQ ID NO: 5726; WAN024G78; Start 203; Stop 227
cagttctaaatagtgtggatgctga

SEQ ID NO: 419596 - DNA, 25 bp, Artificial
  probe
  misc_feature (1)..(25): SEQ ID NO: 5726; WAN024G78; Start 211; Stop 235
aatagtgtggatgctgagaacgaaa

SEQ ID NO: 419597 - DNA, 25 bp, Artificial
  probe
  misc_feature (1)..(25): SEQ ID NO: 5726; WAN024G78; Start 210; Stop 234
aaatagtgtggatgctgagaacgaa

SEQ ID NO: 419598 - DNA, 25 bp, Artificial
  probe
  misc_feature (1)..(25): SEQ ID NO: 5726; WAN024G78; Start 10; Stop 34
ttaaggccaattgtacttcatatcc

SEQ ID NO: 419599 - DNA, 25 bp, Artificial
  probe
  misc_feature (1)..(25): SEQ ID NO: 5726; WAN024G78; Start 206; Stop 230
ttctaaatagtgtggatgctgagaa

SEQ ID NO: 419600 - DNA, 25 bp, Artificial
  probe
  misc_feature (1)..(25): SEQ ID NO: 5726; WAN024G78; Start 14; Stop 38
ggccaattgtacttcatatccctta

SEQ ID NO: 419601 - DNA, 25 bp, Artificial
  probe
  misc_feature (1)..(25): SEQ ID NO: 5726; WAN024G78; Start 11; Stop 35
taaggccaattgtacttcatatccc

SEQ ID NO: 419602 - DNA, 25 bp, Artificial
  probe
  misc_feature (1)..(25): SEQ ID NO: 5726; WAN024G78; Start 9; Stop 33
attaaggccaattgtacttcatatc

SEQ ID NO: 419603 - DNA, 25 bp, Artificial
  probe
  misc_feature (1)..(25): SEQ ID NO: 5726; WAN024G78; Start 15; Stop 39
gccaattgtacttcatatcccttat

SEQ ID NO: 419604 - DNA, 25 bp, Artificial
  probe
  misc_feature (1)..(25): SEQ ID NO: 5726; WAN024G78; Start 217; Stop 241
gtggatgctgagaacgaaaactatc

SEQ ID NO: 419605 - DNA, 25 bp, Artificial
  probe
  misc_feature (1)..(25): SEQ ID NO: 5726; WAN024G78; Start 126; Stop 150
tttgttactaaagactctaccattt

SEQ ID NO: 419606 - DNA, 25 bp, Artificial
  probe
  misc_feature (1)..(25): SEQ ID NO: 5726; WAN024G78; Start 202; Stop 226
gcagttctaaatagtgtggatgctg

SEQ ID NO: 419607 - DNA, 25 bp, Artificial
  probe
  misc_feature (1)..(25): SEQ ID NO: 5726; WAN024G78; Start 216; Stop 240
tgtggatgctgagaacgaaaactat

SEQ ID NO: 419608 - DNA, 25 bp, Artificial
  probe
  misc_feature (1)..(25): SEQ ID NO: 5726; WAN024G78; Start 212; Stop 236
atagtgtggatgctgagaacgaaaa

SEQ ID NO: 419609 - DNA, 25 bp, Artificial
  probe
  misc_feature (1)..(25): SEQ ID NO: 5726; WAN024G78; Start 8; Stop 32
aattaaggccaattgtacttcatat

SEQ ID NO: 419610 - DNA, 25 bp, Artificial
  probe
  misc_feature (1)..(25): SEQ ID NO: 5726; WAN024G78; Start 13; Stop 37
aggccaattgtacttcatatccctt

SEQ ID NO: 419611 - DNA, 25 bp, Artificial
  probe
  misc_feature (1)..(25): SEQ ID NO: 5726; WAN024G78; Start 12; Stop 36
aaggccaattgtacttcatatccct

SEQ ID NO: 419612 - DNA, 25 bp, Artificial
  probe
  misc_feature (1)..(25): SEQ ID NO: 5726; WAN024G78; Start 215; Stop 239
gtgtggatgctgagaacgaaaacta

SEQ ID NO: 419613 - DNA, 25 bp, Artificial
  probe
  misc_feature (1)..(25): SEQ ID NO: 5726; WAN024G78; Start 213; Stop 237
tagtgtggatgctgagaacgaaaac

SEQ ID NO: 419614 - DNA, 25 bp, Artificial
  probe
  misc_feature (1)..(25): SEQ ID NO: 5726; WAN024G78; Start 201; Stop 225
tgcagttctaaatagtgtggatgct

SEQ ID NO: 419615 - DNA, 25 bp, Artificial
  probe
  misc_feature (1)..(25): SEQ ID NO: 5726; WAN024G78; Start 16; Stop 40
ccaattgtacttcatatcccttatt

SEQ ID NO: 419616 - DNA, 25 bp, Artificial
  probe
  misc_feature (1)..(25): SEQ ID NO: 5726; WAN024G78; Start 119; Stop 143
actcaattttgttactaaagactct

SEQ ID NO: 419617 - DNA, 25 bp, Artificial
  probe
  misc_feature (1)..(25): SEQ ID NO: 5726; WAN024G78; Start 6; Stop 30
gcaattaaggccaattgtacttcat

SEQ ID NO: 419618 - DNA, 25 bp, Artificial
  probe
  misc_feature (1)..(25): SEQ ID NO: 5726; WAN024G78; Start 127; Stop 151
ttgttactaaagactctaccatttt

SEQ ID NO: 419619 - DNA, 25 bp, Artificial
  probe
  misc_feature (1)..(25): SEQ ID NO: 5726; WAN024G78; Start 125; Stop 149
ttttgttactaaagactctaccatt

SEQ ID NO: 419620 - DNA, 25 bp, Artificial
  probe
  misc_feature (1)..(25): SEQ ID NO: 5726; WAN024G78; Start 123; Stop 147
aattttgttactaaagactctacca

SEQ ID NO: 419621 - DNA, 25 bp, Artificial
  probe
  misc_feature (1)..(25): SEQ ID NO: 5726; WAN024G78; Start 122; Stop 146
caattttgttactaaagactctacc

SEQ ID NO: 419622 - DNA, 25 bp, Artificial
  probe
  misc_feature (1)..(25): SEQ ID NO: 5726; WAN024G78; Start 124; Stop 148
attttgttactaaagactctaccat

SEQ ID NO: 419623 - DNA, 25 bp, Artificial
  probe
  misc_feature (1)..(25): SEQ ID NO: 5727; WAN024DZP; Start 16; Stop 40
catcaggttaagcaagaagtaaaga

SEQ ID NO: 419624 - DNA, 25 bp, Artificial
  probe
  misc_feature (1)..(25): SEQ ID NO: 5727; WAN024DZP; Start 15; Stop 39
tcatcaggttaagcaagaagtaaag

SEQ ID NO: 419625 - DNA, 25 bp, Artificial
  probe
  misc_feature (1)..(25): SEQ ID NO: 5727; WAN024DZP; Start 25; Stop 49
aagcaagaagtaaagattgtggtag

SEQ ID NO: 419626 - DNA, 25 bp, Artificial
  probe
  misc_feature (1)..(25): SEQ ID NO: 5727; WAN024DZP; Start 18; Stop 42
tcaggttaagcaagaagtaaagatt

SEQ ID NO: 419627 - DNA, 25 bp, Artificial
  probe
  misc_feature (1)..(25): SEQ ID NO: 5727; WAN024DZP; Start 23; Stop 47
ttaagcaagaagtaaagattgtggt

SEQ ID NO: 419628 - DNA, 25 bp, Artificial
  probe
  misc_feature (1)..(25): SEQ ID NO: 5727; WAN024DZP; Start 14; Stop 38
ttcatcaggttaagcaagaagtaaa

SEQ ID NO: 419629 - DNA, 25 bp, Artificial
  probe
  misc_feature (1)..(25): SEQ ID NO: 5727; WAN024DZP; Start 26; Stop 50
agcaagaagtaaagattgtggtagc

SEQ ID NO: 419630 - DNA, 25 bp, Artificial
  probe
  misc_feature (1)..(25): SEQ ID NO: 5727; WAN024DZP; Start 22; Stop 46
gttaagcaagaagtaaagattgtgg

SEQ ID NO: 419631 - DNA, 25 bp, Artificial
  probe
  misc_feature (1)..(25): SEQ ID NO: 5727; WAN024DZP; Start 21; Stop 45
ggttaagcaagaagtaaagattgtg

SEQ ID NO: 419632 - DNA, 25 bp, Artificial
  probe
  misc_feature (1)..(25): SEQ ID NO: 5727; WAN024DZP; Start 20; Stop 44
aggttaagcaagaagtaaagattgt

SEQ ID NO: 419633 - DNA, 25 bp, Artificial
  probe
  misc_feature (1)..(25): SEQ ID NO: 5727; WAN024DZP; Start 17; Stop 41
atcaggttaagcaagaagtaaagat

SEQ ID NO: 419634 - DNA, 25 bp, Artificial
  probe
  misc_feature (1)..(25): SEQ ID NO: 5727; WAN024DZP; Start 19; Stop 43
caggttaagcaagaagtaaagattg

SEQ ID NO: 419635 - DNA, 25 bp, Artificial
  probe
  misc_feature (1)..(25): SEQ ID NO: 5727; WAN024DZP; Start 24; Stop 48
taagcaagaagtaaagattgtggta

SEQ ID NO: 419636 - DNA, 25 bp, Artificial
  probe
  misc_feature (1)..(25): SEQ ID NO: 5727; WAN024DZP; Start 13; Stop 37
cttcatcaggttaagcaagaagtaa

SEQ ID NO: 419637 - DNA, 25 bp, Artificial
  probe
  misc_feature (1)..(25): SEQ ID NO: 5727; WAN024DZP; Start 27; Stop 51
gcaagaagtaaagattgtggtagct

SEQ ID NO: 419638 - DNA, 25 bp, Artificial
  probe
  misc_feature (1)..(25): SEQ ID NO: 5727; WAN024DZP; Start 97; Stop 121
aaggtaagcgcgtgtatagttatta

SEQ ID NO: 419639 - DNA, 25 bp, Artificial
  probe
  misc_feature (1)..(25): SEQ ID NO: 5727; WAN024DZP; Start 96; Stop 120
gaaggtaagcgcgtgtatagttatt

SEQ ID NO: 419640 - DNA, 25 bp, Artificial
  probe
  misc_feature (1)..(25): SEQ ID NO: 5727; WAN024DZP; Start 209; Stop 233
atacaagtcccgttacgagcaattc

SEQ ID NO: 419641 - DNA, 25 bp, Artificial
  probe
  misc_feature (1)..(25): SEQ ID NO: 5727; WAN024DZP; Start 32; Stop 56
aagtaaagattgtggtagctagtca

SEQ ID NO: 419642 - DNA, 25 bp, Artificial
  probe
  misc_feature (1)..(25): SEQ ID NO: 5727; WAN024DZP; Start 30; Stop 54
agaagtaaagattgtggtagctagt

SEQ ID NO: 419643 - DNA, 25 bp, Artificial
  probe
  misc_feature (1)..(25): SEQ ID NO: 5727; WAN024DZP; Start 31; Stop 55
gaagtaaagattgtggtagctagtc

SEQ ID NO: 419644 - DNA, 25 bp, Artificial
  probe
  misc_feature (1)..(25): SEQ ID NO: 5727; WAN024DZP; Start 3; Stop 27
gtcgcacttgcttcatcaggttaag

SEQ ID NO: 419645 - DNA, 25 bp, Artificial
  probe
  misc_feature (1)..(25): SEQ ID NO: 5727; WAN024DZP; Start 208; Stop 232
catacaagtcccgttacgagcaatt

SEQ ID NO: 419646 - DNA, 25 bp, Artificial
  probe
  misc_feature (1)..(25): SEQ ID NO: 5727; WAN024DZP; Start 33; Stop 57
agtaaagattgtggtagctagtcaa

SEQ ID NO: 419647 - DNA, 25 bp, Artificial
  probe
  misc_feature (1)..(25): SEQ ID NO: 5727; WAN024DZP; Start 51; Stop 75
tagtcaagcggataccaaaggtttc

SEQ ID NO: 419648 - DNA, 25 bp, Artificial
  probe
  misc_feature (1)..(25): SEQ ID NO: 5727; WAN024DZP; Start 50; Stop 74
ctagtcaagcggataccaaaggttt

SEQ ID NO: 419649 - DNA, 25 bp, Artificial
  probe
  misc_feature (1)..(25): SEQ ID NO: 5727; WAN024DZP; Start 34; Stop 58
gtaaagattgtggtagctagtcaag

SEQ ID NO: 419650 - DNA, 25 bp, Artificial
  probe
  misc_feature (1)..(25): SEQ ID NO: 5727; WAN024DZP; Start 98; Stop 122
aggtaagcgcgtgtatagttattac

SEQ ID NO: 419651 - DNA, 25 bp, Artificial
  probe
  misc_feature (1)..(25): SEQ ID NO: 5727; WAN024DZP; Start 29; Stop 53
aagaagtaaagattgtggtagctag

SEQ ID NO: 419652 - DNA, 25 bp, Artificial
  probe
  misc_feature (1)..(25): SEQ ID NO: 5727; WAN024DZP; Start 28; Stop 52
caagaagtaaagattgtggtagcta

SEQ ID NO: 419653 - DNA, 25 bp, Artificial
  probe
  misc_feature (1)..(25): SEQ ID NO: 5727; WAN024DZP; Start 56; Stop 80
aagcggataccaaaggtttcatcag

SEQ ID NO: 419654 - DNA, 25 bp, Artificial
  probe
  misc_feature (1)..(25): SEQ ID NO: 5727; WAN024DZP; Start 54; Stop 78
tcaagcggataccaaaggtttcatc

SEQ ID NO: 419655 - DNA, 25 bp, Artificial
  probe
  misc_feature (1)..(25): SEQ ID NO: 5727; WAN024DZP; Start 102; Stop 126
aagcgcgtgtatagttattacatgt

SEQ ID NO: 419656 - DNA, 25 bp, Artificial
  probe
  misc_feature (1)..(25): SEQ ID NO: 5728; WAN024C9N; Start 105; Stop 129
aaggataacaagaactttagaatcg

SEQ ID NO: 419657 - DNA, 25 bp, Artificial
  probe
  misc_feature (1)..(25): SEQ ID NO: 5728; WAN024C9N; Start 6; Stop 30
gctatttgcgatgtcaagaacactt

SEQ ID NO: 419658 - DNA, 25 bp, Artificial
  probe
  misc_feature (1)..(25): SEQ ID NO: 5728; WAN024C9N; Start 101; Stop 125
cttcaaggataacaagaactttaga

SEQ ID NO: 419659 - DNA, 25 bp, Artificial
  probe
  misc_feature (1)..(25): SEQ ID NO: 5728; WAN024C9N; Start 106; Stop 130
aggataacaagaactttagaatcga

SEQ ID NO: 419660 - DNA, 25 bp, Artificial
  probe
  misc_feature (1)..(25): SEQ ID NO: 5728; WAN024C9N; Start 83; Stop 107
ctgcgaattcatttccttcttcaag

SEQ ID NO: 419661 - DNA, 25 bp, Artificial
  probe
  misc_feature (1)..(25): SEQ ID NO: 5728; WAN024C9N; Start 200; Stop 224
ctacgaatttgttttcagcaacttt

SEQ ID NO: 419662 - DNA, 25 bp, Artificial
  probe
  misc_feature (1)..(25): SEQ ID NO: 5728; WAN024C9N; Start 201; Stop 225
tacgaatttgttttcagcaactttt

SEQ ID NO: 419663 - DNA, 25 bp, Artificial
  probe
  misc_feature (1)..(25): SEQ ID NO: 5728; WAN024C9N; Start 58; Stop 82
tttggaaggttacgagctgaaagag

SEQ ID NO: 419664 - DNA, 25 bp, Artificial
  probe
  misc_feature (1)..(25): SEQ ID NO: 5728; WAN024C9N; Start 179; Stop 203
taaatgaaagagcgtctacagctac

SEQ ID NO: 419665 - DNA, 25 bp, Artificial
  probe
  misc_feature (1)..(25): SEQ ID NO: 5728; WAN024C9N; Start 178; Stop 202
gtaaatgaaagagcgtctacagcta

SEQ ID NO: 419666 - DNA, 25 bp, Artificial
  probe
  misc_feature (1)..(25): SEQ ID NO: 5728; WAN024C9N; Start 102; Stop 126
ttcaaggataacaagaactttagaa

SEQ ID NO: 419667 - DNA, 25 bp, Artificial
  probe
  misc_feature (1)..(25): SEQ ID NO: 5728; WAN024C9N; Start 103; Stop 127
tcaaggataacaagaactttagaat

SEQ ID NO: 419668 - DNA, 25 bp, Artificial
  probe
  misc_feature (1)..(25): SEQ ID NO: 5728; WAN024C9N; Start 57; Stop 81
gtttggaaggttacgagctgaaaga

SEQ ID NO: 419669 - DNA, 25 bp, Artificial
  probe
  misc_feature (1)..(25): SEQ ID NO: 5728; WAN024C9N; Start 16; Stop 40
atgtcaagaacacttgcagttgtag

SEQ ID NO: 419670 - DNA, 25 bp, Artificial
  probe
  misc_feature (1)..(25): SEQ ID NO: 5728; WAN024C9N; Start 15; Stop 39
gatgtcaagaacacttgcagttgta

SEQ ID NO: 419671 - DNA, 25 bp, Artificial
  probe
  misc_feature (1)..(25): SEQ ID NO: 5728; WAN024C9N; Start 113; Stop 137
caagaactttagaatcgatgctcaa

SEQ ID NO: 419672 - DNA, 25 bp, Artificial
  probe
  misc_feature (1)..(25): SEQ ID NO: 5728; WAN024C9N; Start 111; Stop 135
aacaagaactttagaatcgatgctc

SEQ ID NO: 419673 - DNA, 25 bp, Artificial
  probe
  misc_feature (1)..(25): SEQ ID NO: 5728; WAN024C9N; Start 115; Stop 139
agaactttagaatcgatgctcaatg

SEQ ID NO: 419674 - DNA, 25 bp, Artificial
  probe
  misc_feature (1)..(25): SEQ ID NO: 5728; WAN024C9N; Start 112; Stop 136
acaagaactttagaatcgatgctca

SEQ ID NO: 419675 - DNA, 25 bp, Artificial
  probe
  misc_feature (1)..(25): SEQ ID NO: 5728; WAN024C9N; Start 104; Stop 128
caaggataacaagaactttagaatc

SEQ ID NO: 419676 - DNA, 25 bp, Artificial
  probe
  misc_feature (1)..(25): SEQ ID NO: 5728; WAN024C9N; Start 173; Stop 197
gagctgtaaatgaaagagcgtctac

SEQ ID NO: 419677 - DNA, 25 bp, Artificial
  probe
  misc_feature (1)..(25): SEQ ID NO: 5728; WAN024C9N; Start 116; Stop 140
gaactttagaatcgatgctcaatgc

SEQ ID NO: 419678 - DNA, 25 bp, Artificial
  probe
  misc_feature (1)..(25): SEQ ID NO: 5728; WAN024C9N; Start 77; Stop 101
aaagagctgcgaattcatttccttc

SEQ ID NO: 419679 - DNA, 25 bp, Artificial
  probe
  misc_feature (1)..(25): SEQ ID NO: 5728; WAN024C9N; Start 7; Stop 31
ctatttgcgatgtcaagaacacttg

SEQ ID NO: 419680 - DNA, 25 bp, Artificial
  probe
  misc_feature (1)..(25): SEQ ID NO: 5728; WAN024C9N; Start 117; Stop 141
aactttagaatcgatgctcaatgct

SEQ ID NO: 419681 - DNA, 25 bp, Artificial
  probe
  misc_feature (1)..(25): SEQ ID NO: 5728; WAN024C9N; Start 114; Stop 138
aagaactttagaatcgatgctcaat

SEQ ID NO: 419682 - DNA, 25 bp, Artificial
  probe
  misc_feature (1)..(25): SEQ ID NO: 5728; WAN024C9N; Start 110; Stop 134
taacaagaactttagaatcgatgct

SEQ ID NO: 419683 - DNA, 25 bp, Artificial
  probe
  misc_feature (1)..(25): SEQ ID NO: 5728; WAN024C9N; Start 177; Stop 201
tgtaaatgaaagagcgtctacagct

SEQ ID NO: 419684 - DNA, 25 bp, Artificial
  probe
  misc_feature (1)..(25): SEQ ID NO: 5728; WAN024C9N; Start 174; Stop 198
agctgtaaatgaaagagcgtctaca

SEQ ID NO: 419685 - DNA, 25 bp, Artificial
  probe
  misc_feature (1)..(25): SEQ ID NO: 5728; WAN024C9N; Start 82; Stop 106
gctgcgaattcatttccttcttcaa

SEQ ID NO: 419686 - DNA, 25 bp, Artificial
  probe
  misc_feature (1)..(25): SEQ ID NO: 5728; WAN024C9N; Start 46; Stop 70
gcaactttcacgtttggaaggttac

SEQ ID NO: 419687 - DNA, 25 bp, Artificial
  probe
  misc_feature (1)..(25): SEQ ID NO: 5728; WAN024C9N; Start 192; Stop 216
gtctacagctacgaatttgttttca

SEQ ID NO: 419688 - DNA, 25 bp, Artificial
  probe
  misc_feature (1)..(25): SEQ ID NO: 5728; WAN024C9N; Start 118; Stop 142
actttagaatcgatgctcaatgctg

SEQ ID NO: 419689 - DNA, 25 bp, Artificial
  probe
  misc_feature (1)..(25): SEQ ID NO: 5729; WAN024GMK; Start 1576; Stop 1600
gacgacaaccattattattgctcaa

SEQ ID NO: 419690 - DNA, 25 bp, Artificial
  probe
  misc_feature (1)..(25): SEQ ID NO: 5729; WAN024GMK; Start 1575; Stop 1599
ggacgacaaccattattattgctca

SEQ ID NO: 419691 - DNA, 25 bp, Artificial
  probe
  misc_feature (1)..(25): SEQ ID NO: 5729; WAN024GMK; Start 501; Stop 525
tgattgttctcatggtagtcttgat

SEQ ID NO: 419692 - DNA, 25 bp, Artificial
  probe
  misc_feature (1)..(25): SEQ ID NO: 5729; WAN024GMK; Start 500; Stop 524
gtgattgttctcatggtagtcttga

SEQ ID NO: 419693 - DNA, 25 bp, Artificial
  probe
  misc_feature (1)..(25): SEQ ID NO: 5729; WAN024GMK; Start 502; Stop 526
gattgttctcatggtagtcttgatt

SEQ ID NO: 419694 - DNA, 25 bp, Artificial
  probe
  misc_feature (1)..(25): SEQ ID NO: 5729; WAN024GMK; Start 1208; Stop 1232
gatattcgagaagtgagtgaaggaa

SEQ ID NO: 419695 - DNA, 25 bp, Artificial
  probe
  misc_feature (1)..(25): SEQ ID NO: 5729; WAN024GMK; Start 1205; Stop 1229
aaggatattcgagaagtgagtgaag

SEQ ID NO: 419696 - DNA, 25 bp, Artificial
  probe
  misc_feature (1)..(25): SEQ ID NO: 5729; WAN024GMK; Start 1209; Stop 1233
atattcgagaagtgagtgaaggaac

SEQ ID NO: 419697 - DNA, 25 bp, Artificial
  probe
  misc_feature (1)..(25): SEQ ID NO: 5729; WAN024GMK; Start 499; Stop 523
ggtgattgttctcatggtagtcttg

SEQ ID NO: 419698 - DNA, 25 bp, Artificial
  probe
  misc_feature (1)..(25): SEQ ID NO: 5729; WAN024GMK; Start 1027; Stop 1051
aaatgtgacctttacctatccaatg

SEQ ID NO: 419699 - DNA, 25 bp, Artificial
  probe
  misc_feature (1)..(25): SEQ ID NO: 5729; WAN024GMK; Start 739; Stop 763
agtagtggaaccctttatgatgttg

SEQ ID NO: 419700 - DNA, 25 bp, Artificial
  probe
  misc_feature (1)..(25): SEQ ID NO: 5729; WAN024GMK; Start 738; Stop 762
cagtagtggaaccctttatgatgtt

SEQ ID NO: 419701 - DNA, 25 bp, Artificial
  probe
  misc_feature (1)..(25): SEQ ID NO: 5729; WAN024GMK; Start 1028; Stop 1052
aatgtgacctttacctatccaatgg

SEQ ID NO: 419702 - DNA, 25 bp, Artificial
  probe
  misc_feature (1)..(25): SEQ ID NO: 5729; WAN024GMK; Start 1285; Stop 1309
aacgattgcagataacttgagacag

SEQ ID NO: 419703 - DNA, 25 bp, Artificial
  probe
  misc_feature (1)..(25): SEQ ID NO: 5729; WAN024GMK; Start 1284; Stop 1308
gaacgattgcagataacttgagaca

SEQ ID NO: 419704 - DNA, 25 bp, Artificial
  probe
  misc_feature (1)..(25): SEQ ID NO: 5729; WAN024GMK; Start 1207; Stop 1231
ggatattcgagaagtgagtgaagga

SEQ ID NO: 419705 - DNA, 25 bp, Artificial
  probe
  misc_feature (1)..(25): SEQ ID NO: 5729; WAN024GMK; Start 1206; Stop 1230
aggatattcgagaagtgagtgaagg

SEQ ID NO: 419706 - DNA, 25 bp, Artificial
  probe
  misc_feature (1)..(25): SEQ ID NO: 5729; WAN024GMK; Start 1278; Stop 1302
ttagtggaacgattgcagataactt

SEQ ID NO: 419707 - DNA, 25 bp, Artificial
  probe
  misc_feature (1)..(25): SEQ ID NO: 5729; WAN024GMK; Start 1577; Stop 1601
acgacaaccattattattgctcaaa

SEQ ID NO: 419708 - DNA, 25 bp, Artificial
  probe
  misc_feature (1)..(25): SEQ ID NO: 5729; WAN024GMK; Start 736; Stop 760
ttcagtagtggaaccctttatgatg

SEQ ID NO: 419709 - DNA, 25 bp, Artificial
  probe
  misc_feature (1)..(25): SEQ ID NO: 5729; WAN024GMK; Start 735; Stop 759
tttcagtagtggaaccctttatgat

SEQ ID NO: 419710 - DNA, 25 bp, Artificial
  probe
  misc_feature (1)..(25): SEQ ID NO: 5729; WAN024GMK; Start 245; Stop 269
aatgttgtcctcgcagcctatattg

SEQ ID NO: 419711 - DNA, 25 bp, Artificial
  probe
  misc_feature (1)..(25): SEQ ID NO: 5729; WAN024GMK; Start 1279; Stop 1303
tagtggaacgattgcagataacttg

SEQ ID NO: 419712 - DNA, 25 bp, Artificial
  probe
  misc_feature (1)..(25): SEQ ID NO: 5729; WAN024GMK; Start 244; Stop 268
caatgttgtcctcgcagcctatatt

SEQ ID NO: 419713 - DNA, 25 bp, Artificial
  probe
  misc_feature (1)..(25): SEQ ID NO: 5729; WAN024GMK; Start 740; Stop 764
gtagtggaaccctttatgatgttgg

SEQ ID NO: 419714 - DNA, 25 bp, Artificial
  probe
  misc_feature (1)..(25): SEQ ID NO: 5729; WAN024GMK; Start 1210; Stop 1234
tattcgagaagtgagtgaaggaacc

SEQ ID NO: 419715 - DNA, 25 bp, Artificial
  probe
  misc_feature (1)..(25): SEQ ID NO: 5729; WAN024GMK; Start 861; Stop 885
acctaagccagattatctttaccat

SEQ ID NO: 419716 - DNA, 25 bp, Artificial
  probe
  misc_feature (1)..(25): SEQ ID NO: 5729; WAN024GMK; Start 737; Stop 761
tcagtagtggaaccctttatgatgt

SEQ ID NO: 419717 - DNA, 25 bp, Artificial
  probe
  misc_feature (1)..(25): SEQ ID NO: 5729; WAN024GMK; Start 1697; Stop 1721
gccgtttaccgtgaaatctatgaaa

SEQ ID NO: 419718 - DNA, 25 bp, Artificial
  probe
  misc_feature (1)..(25): SEQ ID NO: 5729; WAN024GMK; Start 1694; Stop 1718
aatgccgtttaccgtgaaatctatg

SEQ ID NO: 419719 - DNA, 25 bp, Artificial
  probe
  misc_feature (1)..(25): SEQ ID NO: 5729; WAN024GMK; Start 1693; Stop 1717
caatgccgtttaccgtgaaatctat

SEQ ID NO: 419720 - DNA, 25 bp, Artificial
  probe
  misc_feature (1)..(25): SEQ ID NO: 5729; WAN024GMK; Start 1283; Stop 1307
ggaacgattgcagataacttgagac

SEQ ID NO: 419721 - DNA, 25 bp, Artificial
  probe
  misc_feature (1)..(25): SEQ ID NO: 5729; WAN024GMK; Start 751; Stop 775
ctttatgatgttggttggttacggg

SEQ ID NO: 419722 - DNA, 25 bp, Artificial
  probe
  misc_feature (1)..(25): SEQ ID NO: 5730; WAN024FUL; Start 384; Stop 408
tgttacagatagattcattgtccaa

SEQ ID NO: 419723 - DNA, 25 bp, Artificial
  probe
  misc_feature (1)..(25): SEQ ID NO: 5730; WAN024FUL; Start 153; Stop 177
atgtcattattgctattatccgact

SEQ ID NO: 419724 - DNA, 25 bp, Artificial
  probe
  misc_feature (1)..(25): SEQ ID NO: 5730; WAN024FUL; Start 82; Stop 106
tggcaggataaagatagactatgga

SEQ ID NO: 419725 - DNA, 25 bp, Artificial
  probe
  misc_feature (1)..(25): SEQ ID NO: 5730; WAN024FUL; Start 382; Stop 406
cctgttacagatagattcattgtcc

SEQ ID NO: 419726 - DNA, 25 bp, Artificial
  probe
  misc_feature (1)..(25): SEQ ID NO: 5730; WAN024FUL; Start 81; Stop 105
ttggcaggataaagatagactatgg

SEQ ID NO: 419727 - DNA, 25 bp, Artificial
  probe
  misc_feature (1)..(25): SEQ ID NO: 5730; WAN024FUL; Start 83; Stop 107
ggcaggataaagatagactatggat

SEQ ID NO: 419728 - DNA, 25 bp, Artificial
  probe
  misc_feature (1)..(25): SEQ ID NO: 5730; WAN024FUL; Start 426; Stop 450
aatctatcccaaggcaatcaatttg

SEQ ID NO: 419729 - DNA, 25 bp, Artificial
  probe
  misc_feature (1)..(25): SEQ ID NO: 5730; WAN024FUL; Start 383; Stop 407
ctgttacagatagattcattgtcca

SEQ ID NO: 419730 - DNA, 25 bp, Artificial
  probe
  misc_feature (1)..(25): SEQ ID NO: 5730; WAN024FUL; Start 154; Stop 178
tgtcattattgctattatccgacta

SEQ ID NO: 419731 - DNA, 25 bp, Artificial
  probe
  misc_feature (1)..(25): SEQ ID NO: 5730; WAN024FUL; Start 80; Stop 104
tttggcaggataaagatagactatg

SEQ ID NO: 419732 - DNA, 25 bp, Artificial
  probe
  misc_feature (1)..(25): SEQ ID NO: 5730; WAN024FUL; Start 425; Stop 449
aaatctatcccaaggcaatcaattt

SEQ ID NO: 419733 - DNA, 25 bp, Artificial
  probe
  misc_feature (1)..(25): SEQ ID NO: 5730; WAN024FUL; Start 152; Stop 176
aatgtcattattgctattatccgac

SEQ ID NO: 419734 - DNA, 25 bp, Artificial
  probe
  misc_feature (1)..(25): SEQ ID NO: 5730; WAN024FUL; Start 84; Stop 108
gcaggataaagatagactatggatt

SEQ ID NO: 419735 - DNA, 25 bp, Artificial
  probe
  misc_feature (1)..(25): SEQ ID NO: 5730; WAN024FUL; Start 436; Stop 460
aaggcaatcaatttgggaggaattt

SEQ ID NO: 419736 - DNA, 25 bp, Artificial
  probe
  misc_feature (1)..(25): SEQ ID NO: 5730; WAN024FUL; Start 385; Stop 409
gttacagatagattcattgtccaat

SEQ ID NO: 419737 - DNA, 25 bp, Artificial
  probe
  misc_feature (1)..(25): SEQ ID NO: 5730; WAN024FUL; Start 162; Stop 186
ttgctattatccgactaatcgtaat

SEQ ID NO: 419738 - DNA, 25 bp, Artificial
  probe
  misc_feature (1)..(25): SEQ ID NO: 5730; WAN024FUL; Start 161; Stop 185
attgctattatccgactaatcgtaa

SEQ ID NO: 419739 - DNA, 25 bp, Artificial
  probe
  misc_feature (1)..(25): SEQ ID NO: 5730; WAN024FUL; Start 159; Stop 183
ttattgctattatccgactaatcgt

SEQ ID NO: 419740 - DNA, 25 bp, Artificial
  probe
  misc_feature (1)..(25): SEQ ID NO: 5730; WAN024FUL; Start 155; Stop 179
gtcattattgctattatccgactaa

SEQ ID NO: 419741 - DNA, 25 bp, Artificial
  probe
  misc_feature (1)..(25): SEQ ID NO: 5730; WAN024FUL; Start 380; Stop 404
accctgttacagatagattcattgt

SEQ ID NO: 419742 - DNA, 25 bp, Artificial
  probe
  misc_feature (1)..(25): SEQ ID NO: 5730; WAN024FUL; Start 435; Stop 459
caaggcaatcaatttgggaggaatt

SEQ ID NO: 419743 - DNA, 25 bp, Artificial
  probe
  misc_feature (1)..(25): SEQ ID NO: 5730; WAN024FUL; Start 381; Stop 405
ccctgttacagatagattcattgtc

SEQ ID NO: 419744 - DNA, 25 bp, Artificial
  probe
  misc_feature (1)..(25): SEQ ID NO: 5730; WAN024FUL; Start 19; Stop 43
aaactttgtctagtaggatctagcg

SEQ ID NO: 419745 - DNA, 25 bp, Artificial
  probe
  misc_feature (1)..(25): SEQ ID NO: 5730; WAN024FUL; Start 112; Stop 136
tttgataaagaagatgctcgaagta

SEQ ID NO: 419746 - DNA, 25 bp, Artificial
  probe
  misc_feature (1)..(25): SEQ ID NO: 5730; WAN024FUL; Start 387; Stop 411
tacagatagattcattgtccaatgg

SEQ ID NO: 419747 - DNA, 25 bp, Artificial
  probe
  misc_feature (1)..(25): SEQ ID NO: 5730; WAN024FUL; Start 114; Stop 138
tgataaagaagatgctcgaagtatt

SEQ ID NO: 419748 - DNA, 25 bp, Artificial
  probe
  misc_feature (1)..(25): SEQ ID NO: 5730; WAN024FUL; Start 113; Stop 137
ttgataaagaagatgctcgaagtat

SEQ ID NO: 419749 - DNA, 25 bp, Artificial
  probe
  misc_feature (1)..(25): SEQ ID NO: 5730; WAN024FUL; Start 163; Stop 187
tgctattatccgactaatcgtaata

SEQ ID NO: 419750 - DNA, 25 bp, Artificial
  probe
  misc_feature (1)..(25): SEQ ID NO: 5730; WAN024FUL; Start 160; Stop 184
tattgctattatccgactaatcgta

SEQ ID NO: 419751 - DNA, 25 bp, Artificial
  probe
  misc_feature (1)..(25): SEQ ID NO: 5730; WAN024FUL; Start 20; Stop 44
aactttgtctagtaggatctagcgg

SEQ ID NO: 419752 - DNA, 25 bp, Artificial
  probe
  misc_feature (1)..(25): SEQ ID NO: 5730; WAN024FUL; Start 156; Stop 180
tcattattgctattatccgactaat

SEQ ID NO: 419753 - DNA, 25 bp, Artificial
  probe
  misc_feature (1)..(25): SEQ ID NO: 5730; WAN024FUL; Start 379; Stop 403
taccctgttacagatagattcattg

SEQ ID NO: 419754 - DNA, 25 bp, Artificial
  probe
  misc_feature (1)..(25): SEQ ID NO: 5730; WAN024FUL; Start 77; Stop 101
cattttggcaggataaagatagact

SEQ ID NO: 419755 - DNA, 25 bp, Artificial
  probe
  misc_feature (1)..(25): SEQ ID NO: 5731; WAN024CL5; Start 16; Stop 40
gaaatcctagatacagtgaaggctt

SEQ ID NO: 419756 - DNA, 25 bp, Artificial
  probe
  misc_feature (1)..(25): SEQ ID NO: 5731; WAN024CL5; Start 17; Stop 41
aaatcctagatacagtgaaggcttt

SEQ ID NO: 419757 - DNA, 25 bp, Artificial
  probe
  misc_feature (1)..(25): SEQ ID NO: 5731; WAN024CL5; Start 24; Stop 48
agatacagtgaaggctttaaatgct

SEQ ID NO: 419758 - DNA, 25 bp, Artificial
  probe
  misc_feature (1)..(25): SEQ ID NO: 5731; WAN024CL5; Start 23; Stop 47
tagatacagtgaaggctttaaatgc

SEQ ID NO: 419759 - DNA, 25 bp, Artificial
  probe
  misc_feature (1)..(25): SEQ ID NO: 5731; WAN024CL5; Start 19; Stop 43
atcctagatacagtgaaggctttaa

SEQ ID NO: 419760 - DNA, 25 bp, Artificial
  probe
  misc_feature (1)..(25): SEQ ID NO: 5731; WAN024CL5; Start 18; Stop 42
aatcctagatacagtgaaggcttta

SEQ ID NO: 419761 - DNA, 25 bp, Artificial
  probe
  misc_feature (1)..(25): SEQ ID NO: 5731; WAN024CL5; Start 13; Stop 37
agggaaatcctagatacagtgaagg

SEQ ID NO: 419762 - DNA, 25 bp, Artificial
  probe
  misc_feature (1)..(25): SEQ ID NO: 5731; WAN024CL5; Start 15; Stop 39
ggaaatcctagatacagtgaaggct

SEQ ID NO: 419763 - DNA, 25 bp, Artificial
  probe
  misc_feature (1)..(25): SEQ ID NO: 5731; WAN024CL5; Start 25; Stop 49
gatacagtgaaggctttaaatgctg

SEQ ID NO: 419764 - DNA, 25 bp, Artificial
  probe
  misc_feature (1)..(25): SEQ ID NO: 5731; WAN024CL5; Start 20; Stop 44
tcctagatacagtgaaggctttaaa

SEQ ID NO: 419765 - DNA, 25 bp, Artificial
  probe
  misc_feature (1)..(25): SEQ ID NO: 5731; WAN024CL5; Start 14; Stop 38
gggaaatcctagatacagtgaaggc

SEQ ID NO: 419766 - DNA, 25 bp, Artificial
  probe
  misc_feature (1)..(25): SEQ ID NO: 5731; WAN024CL5; Start 26; Stop 50
atacagtgaaggctttaaatgctgg

SEQ ID NO: 419767 - DNA, 25 bp, Artificial
  probe
  misc_feature (1)..(25): SEQ ID NO: 5731; WAN024CL5; Start 22; Stop 46
ctagatacagtgaaggctttaaatg

SEQ ID NO: 419768 - DNA, 25 bp, Artificial
  probe
  misc_feature (1)..(25): SEQ ID NO: 5731; WAN024CL5; Start 21; Stop 45
cctagatacagtgaaggctttaaat

SEQ ID NO: 419769 - DNA, 25 bp, Artificial
  probe
  misc_feature (1)..(25): SEQ ID NO: 5731; WAN024CL5; Start 12; Stop 36
tagggaaatcctagatacagtgaag

SEQ ID NO: 419770 - DNA, 25 bp, Artificial
  probe
  misc_feature (1)..(25): SEQ ID NO: 5731; WAN024CL5; Start 29; Stop 53
cagtgaaggctttaaatgctggttt

SEQ ID NO: 419771 - DNA, 25 bp, Artificial
  probe
  misc_feature (1)..(25): SEQ ID NO: 5731; WAN024CL5; Start 11; Stop 35
atagggaaatcctagatacagtgaa

SEQ ID NO: 419772 - DNA, 25 bp, Artificial
  probe
  misc_feature (1)..(25): SEQ ID NO: 5731; WAN024CL5; Start 10; Stop 34
aatagggaaatcctagatacagtga

SEQ ID NO: 419773 - DNA, 25 bp, Artificial
  probe
  misc_feature (1)..(25): SEQ ID NO: 5731; WAN024CL5; Start 27; Stop 51
tacagtgaaggctttaaatgctggt

SEQ ID NO: 419774 - DNA, 25 bp, Artificial
  probe
  misc_feature (1)..(25): SEQ ID NO: 5731; WAN024CL5; Start 9; Stop 33
aaatagggaaatcctagatacagtg

SEQ ID NO: 419775 - DNA, 25 bp, Artificial
  probe
  misc_feature (1)..(25): SEQ ID NO: 5731; WAN024CL5; Start 53; Stop 77
tttactgtcctcagccttatatttt

SEQ ID NO: 419776 - DNA, 25 bp, Artificial
  probe
  misc_feature (1)..(25): SEQ ID NO: 5731; WAN024CL5; Start 52; Stop 76
ttttactgtcctcagccttatattt

SEQ ID NO: 419777 - DNA, 25 bp, Artificial
  probe
  misc_feature (1)..(25): SEQ ID NO: 5731; WAN024CL5; Start 30; Stop 54
agtgaaggctttaaatgctggtttt

SEQ ID NO: 419778 - DNA, 25 bp, Artificial
  probe
  misc_feature (1)..(25): SEQ ID NO: 5731; WAN024CL5; Start 28; Stop 52
acagtgaaggctttaaatgctggtt

SEQ ID NO: 419779 - DNA, 25 bp, Artificial
  probe
  misc_feature (1)..(25): SEQ ID NO: 5731; WAN024CL5; Start 8; Stop 32
aaaatagggaaatcctagatacagt

SEQ ID NO: 419780 - DNA, 25 bp, Artificial
  probe
  misc_feature (1)..(25): SEQ ID NO: 5732; WAN024GJA; Start 975; Stop 999
taacaagaacaaccgtaatcagact

SEQ ID NO: 419781 - DNA, 25 bp, Artificial
  probe
  misc_feature (1)..(25): SEQ ID NO: 5732; WAN024GJA; Start 2431; Stop 2455
cacagcattatctacaaggttatcg

SEQ ID NO: 419782 - DNA, 25 bp, Artificial
  probe
  misc_feature (1)..(25): SEQ ID NO: 5732; WAN024GJA; Start 971; Stop 995
gcaataacaagaacaaccgtaatca

SEQ ID NO: 419783 - DNA, 25 bp, Artificial
  probe
  misc_feature (1)..(25): SEQ ID NO: 5732; WAN024GJA; Start 2724; Stop 2748
cgacggctacaatgatattaagatg

SEQ ID NO: 419784 - DNA, 25 bp, Artificial
  probe
  misc_feature (1)..(25): SEQ ID NO: 5732; WAN024GJA; Start 974; Stop 998
ataacaagaacaaccgtaatcagac

SEQ ID NO: 419785 - DNA, 25 bp, Artificial
  probe
  misc_feature (1)..(25): SEQ ID NO: 5732; WAN024GJA; Start 2726; Stop 2750
acggctacaatgatattaagatgga

SEQ ID NO: 419786 - DNA, 25 bp, Artificial
  probe
  misc_feature (1)..(25): SEQ ID NO: 5732; WAN024GJA; Start 2421; Stop 2445
aatccgtcttcacagcattatctac

SEQ ID NO: 419787 - DNA, 25 bp, Artificial
  probe
  misc_feature (1)..(25): SEQ ID NO: 5732; WAN024GJA; Start 2725; Stop 2749
gacggctacaatgatattaagatgg

SEQ ID NO: 419788 - DNA, 25 bp, Artificial
  probe
  misc_feature (1)..(25): SEQ ID NO: 5732; WAN024GJA; Start 1502; Stop 1526
gtgcttctgttaccgatattacgat

SEQ ID NO: 419789 - DNA, 25 bp, Artificial
  probe
  misc_feature (1)..(25): SEQ ID NO: 5732; WAN024GJA; Start 2427; Stop 2451
tcttcacagcattatctacaaggtt

SEQ ID NO: 419790 - DNA, 25 bp, Artificial
  probe
  misc_feature (1)..(25): SEQ ID NO: 5732; WAN024GJA; Start 1444; Stop 1468
aagattaccttccttgatacaccag

SEQ ID NO: 419791 - DNA, 25 bp, Artificial
  probe
  misc_feature (1)..(25): SEQ ID NO: 5732; WAN024GJA; Start 970; Stop 994
ggcaataacaagaacaaccgtaatc

SEQ ID NO: 419792 - DNA, 25 bp, Artificial
  probe
  misc_feature (1)..(25): SEQ ID NO: 5732; WAN024GJA; Start 2741; Stop 2765
ttaagatggatgatgtgattgaggc

SEQ ID NO: 419793 - DNA, 25 bp, Artificial
  probe
  misc_feature (1)..(25): SEQ ID NO: 5732; WAN024GJA; Start 2426; Stop 2450
gtcttcacagcattatctacaaggt

SEQ ID NO: 419794 - DNA, 25 bp, Artificial
  probe
  misc_feature (1)..(25): SEQ ID NO: 5732; WAN024GJA; Start 2619; Stop 2643
tatccgtgatggtgtcgttatctat

SEQ ID NO: 419795 - DNA, 25 bp, Artificial
  probe
  misc_feature (1)..(25): SEQ ID NO: 5732; WAN024GJA; Start 972; Stop 996
caataacaagaacaaccgtaatcag

SEQ ID NO: 419796 - DNA, 25 bp, Artificial
  probe
  misc_feature (1)..(25): SEQ ID NO: 5732; WAN024GJA; Start 969; Stop 993
aggcaataacaagaacaaccgtaat

SEQ ID NO: 419797 - DNA, 25 bp, Artificial
  probe
  misc_feature (1)..(25): SEQ ID NO: 5732; WAN024GJA; Start 2624; Stop 2648
gtgatggtgtcgttatctatgatgg

SEQ ID NO: 419798 - DNA, 25 bp, Artificial
  probe
  misc_feature (1)..(25): SEQ ID NO: 5732; WAN024GJA; Start 2618; Stop 2642
ttatccgtgatggtgtcgttatcta

SEQ ID NO: 419799 - DNA, 25 bp, Artificial
  probe
  misc_feature (1)..(25): SEQ ID NO: 5732; WAN024GJA; Start 976; Stop 1000
aacaagaacaaccgtaatcagactc

SEQ ID NO: 419800 - DNA, 25 bp, Artificial
  probe
  misc_feature (1)..(25): SEQ ID NO: 5732; WAN024GJA; Start 973; Stop 997
aataacaagaacaaccgtaatcaga

SEQ ID NO: 419801 - DNA, 25 bp, Artificial
  probe
  misc_feature (1)..(25): SEQ ID NO: 5732; WAN024GJA; Start 968; Stop 992
aaggcaataacaagaacaaccgtaa

SEQ ID NO: 419802 - DNA, 25 bp, Artificial
  probe
  misc_feature (1)..(25): SEQ ID NO: 5732; WAN024GJA; Start 2740; Stop 2764
attaagatggatgatgtgattgagg

SEQ ID NO: 419803 - DNA, 25 bp, Artificial
  probe
  misc_feature (1)..(25): SEQ ID NO: 5732; WAN024GJA; Start 2727; Stop 2751
cggctacaatgatattaagatggat

SEQ ID NO: 419804 - DNA, 25 bp, Artificial
  probe
  misc_feature (1)..(25): SEQ ID NO: 5732; WAN024GJA; Start 2623; Stop 2647
cgtgatggtgtcgttatctatgatg

SEQ ID NO: 419805 - DNA, 25 bp, Artificial
  probe
  misc_feature (1)..(25): SEQ ID NO: 5732; WAN024GJA; Start 2430; Stop 2454
tcacagcattatctacaaggttatc

SEQ ID NO: 419806 - DNA, 25 bp, Artificial
  probe
  misc_feature (1)..(25): SEQ ID NO: 5732; WAN024GJA; Start 2422; Stop 2446
atccgtcttcacagcattatctaca

SEQ ID NO: 419807 - DNA, 25 bp, Artificial
  probe
  misc_feature (1)..(25): SEQ ID NO: 5732; WAN024GJA; Start 1388; Stop 1412
aagcaggtggtattactcagcatat

SEQ ID NO: 419808 - DNA, 25 bp, Artificial
  probe
  misc_feature (1)..(25): SEQ ID NO: 5732; WAN024GJA; Start 1507; Stop 1531
tctgttaccgatattacgatcttgg

SEQ ID NO: 419809 - DNA, 25 bp, Artificial
  probe
  misc_feature (1)..(25): SEQ ID NO: 5732; WAN024GJA; Start 2428; Stop 2452
cttcacagcattatctacaaggtta

SEQ ID NO: 419810 - DNA, 25 bp, Artificial
  probe
  misc_feature (1)..(25): SEQ ID NO: 5732; WAN024GJA; Start 1504; Stop 1528
gcttctgttaccgatattacgatct

SEQ ID NO: 419811 - DNA, 25 bp, Artificial
  probe
  misc_feature (1)..(25): SEQ ID NO: 5732; WAN024GJA; Start 2425; Stop 2449
cgtcttcacagcattatctacaagg

SEQ ID NO: 419812 - DNA, 25 bp, Artificial
  probe
  misc_feature (1)..(25): SEQ ID NO: 5732; WAN024GJA; Start 2424; Stop 2448
ccgtcttcacagcattatctacaag

SEQ ID NO: 419813 - DNA, 25 bp, Artificial
  probe
  misc_feature (1)..(25): SEQ ID NO: 5733; WAN024G7H; Start 217; Stop 241
attactacactaagacttgctcctg

SEQ ID NO: 419814 - DNA, 25 bp, Artificial
  probe
  misc_feature (1)..(25): SEQ ID NO: 5733; WAN024G7H; Start 216; Stop 240
aattactacactaagacttgctcct

SEQ ID NO: 419815 - DNA, 25 bp, Artificial
  probe
  misc_feature (1)..(25): SEQ ID NO: 5733; WAN024G7H; Start 213; Stop 237
accaattactacactaagacttgct

SEQ ID NO: 419816 - DNA, 25 bp, Artificial
  probe
  misc_feature (1)..(25): SEQ ID NO: 5733; WAN024G7H; Start 212; Stop 236
gaccaattactacactaagacttgc

SEQ ID NO: 419817 - DNA, 25 bp, Artificial
  probe
  misc_feature (1)..(25): SEQ ID NO: 5733; WAN024G7H; Start 55; Stop 79
gccatactaacacaagttcctgata

SEQ ID NO: 419818 - DNA, 25 bp, Artificial
  probe
  misc_feature (1)..(25): SEQ ID NO: 5733; WAN024G7H; Start 171; Stop 195
acttatatggcttatgcttgatgaa

SEQ ID NO: 419819 - DNA, 25 bp, Artificial
  probe
  misc_feature (1)..(25): SEQ ID NO: 5733; WAN024G7H; Start 170; Stop 194
aacttatatggcttatgcttgatga

SEQ ID NO: 419820 - DNA, 25 bp, Artificial
  probe
  misc_feature (1)..(25): SEQ ID NO: 5733; WAN024G7H; Start 215; Stop 239
caattactacactaagacttgctcc

SEQ ID NO: 419821 - DNA, 25 bp, Artificial
  probe
  misc_feature (1)..(25): SEQ ID NO: 5733; WAN024G7H; Start 214; Stop 238
ccaattactacactaagacttgctc

SEQ ID NO: 419822 - DNA, 25 bp, Artificial
  probe
  misc_feature (1)..(25): SEQ ID NO: 5733; WAN024G7H; Start 218; Stop 242
ttactacactaagacttgctcctgt

SEQ ID NO: 419823 - DNA, 25 bp, Artificial
  probe
  misc_feature (1)..(25): SEQ ID NO: 5733; WAN024G7H; Start 59; Stop 83
tactaacacaagttcctgataaggc

SEQ ID NO: 419824 - DNA, 25 bp, Artificial
  probe
  misc_feature (1)..(25): SEQ ID NO: 5733; WAN024G7H; Start 56; Stop 80
ccatactaacacaagttcctgataa

SEQ ID NO: 419825 - DNA, 25 bp, Artificial
  probe
  misc_feature (1)..(25): SEQ ID NO: 5733; WAN024G7H; Start 54; Stop 78
agccatactaacacaagttcctgat

SEQ ID NO: 419826 - DNA, 25 bp, Artificial
  probe
  misc_feature (1)..(25): SEQ ID NO: 5733; WAN024G7H; Start 53; Stop 77
aagccatactaacacaagttcctga

SEQ ID NO: 419827 - DNA, 25 bp, Artificial
  probe
  misc_feature (1)..(25): SEQ ID NO: 5733; WAN024G7H; Start 211; Stop 235
agaccaattactacactaagacttg

SEQ ID NO: 419828 - DNA, 25 bp, Artificial
  probe
  misc_feature (1)..(25): SEQ ID NO: 5733; WAN024G7H; Start 62; Stop 86
taacacaagttcctgataaggcaag

SEQ ID NO: 419829 - DNA, 25 bp, Artificial
  probe
  misc_feature (1)..(25): SEQ ID NO: 5733; WAN024G7H; Start 61; Stop 85
ctaacacaagttcctgataaggcaa

SEQ ID NO: 419830 - DNA, 25 bp, Artificial
  probe
  misc_feature (1)..(25): SEQ ID NO: 5733; WAN024G7H; Start 219; Stop 243
tactacactaagacttgctcctgtg

SEQ ID NO: 419831 - DNA, 25 bp, Artificial
  probe
  misc_feature (1)..(25): SEQ ID NO: 5733; WAN024G7H; Start 227; Stop 251
taagacttgctcctgtgtttatacc

SEQ ID NO: 419832 - DNA, 25 bp, Artificial
  probe
  misc_feature (1)..(25): SEQ ID NO: 5733; WAN024G7H; Start 210; Stop 234
aagaccaattactacactaagactt

SEQ ID NO: 419833 - DNA, 25 bp, Artificial
  probe
  misc_feature (1)..(25): SEQ ID NO: 5733; WAN024G7H; Start 225; Stop 249
actaagacttgctcctgtgtttata

SEQ ID NO: 419834 - DNA, 25 bp, Artificial
  probe
  misc_feature (1)..(25): SEQ ID NO: 5733; WAN024G7H; Start 226; Stop 250
ctaagacttgctcctgtgtttatac

SEQ ID NO: 419835 - DNA, 25 bp, Artificial
  probe
  misc_feature (1)..(25): SEQ ID NO: 5733; WAN024G7H; Start 176; Stop 200
tatggcttatgcttgatgaaattcc

SEQ ID NO: 419836 - DNA, 25 bp, Artificial
  probe
  misc_feature (1)..(25): SEQ ID NO: 5733; WAN024G7H; Start 60; Stop 84
actaacacaagttcctgataaggca

SEQ ID NO: 419837 - DNA, 25 bp, Artificial
  probe
  misc_feature (1)..(25): SEQ ID NO: 5733; WAN024G7H; Start 179; Stop 203
ggcttatgcttgatgaaattcctaa

SEQ ID NO: 419838 - DNA, 25 bp, Artificial
  probe
  misc_feature (1)..(25): SEQ ID NO: 5733; WAN024G7H; Start 178; Stop 202
tggcttatgcttgatgaaattccta

SEQ ID NO: 419839 - DNA, 25 bp, Artificial
  probe
  misc_feature (1)..(25): SEQ ID NO: 5733; WAN024G7H; Start 143; Stop 167
cacttactaagccaccaatgattgc

SEQ ID NO: 419840 - DNA, 25 bp, Artificial
  probe
  misc_feature (1)..(25): SEQ ID NO: 5733; WAN024G7H; Start 142; Stop 166
gcacttactaagccaccaatgattg

SEQ ID NO: 419841 - DNA, 25 bp, Artificial
  probe
  misc_feature (1)..(25): SEQ ID NO: 5733; WAN024G7H; Start 58; Stop 82
atactaacacaagttcctgataagg

SEQ ID NO: 419842 - DNA, 25 bp, Artificial
  probe
  misc_feature (1)..(25): SEQ ID NO: 5733; WAN024G7H; Start 297; Stop 321
caatacaccgcttatggcaagacta

SEQ ID NO: 419843 - DNA, 25 bp, Artificial
  probe
  misc_feature (1)..(25): SEQ ID NO: 5733; WAN024G7H; Start 298; Stop 322
aatacaccgcttatggcaagactag

SEQ ID NO: 419844 - DNA, 25 bp, Artificial
  probe
  misc_feature (1)..(25): SEQ ID NO: 5733; WAN024G7H; Start 177; Stop 201
atggcttatgcttgatgaaattcct

SEQ ID NO: 419845 - DNA, 25 bp, Artificial
  probe
  misc_feature (1)..(25): SEQ ID NO: 5733; WAN024G7H; Start 57; Stop 81
catactaacacaagttcctgataag

SEQ ID NO: 419846 - DNA, 25 bp, Artificial
  probe
  misc_feature (1)..(25): SEQ ID NO: 5734; WAN024GLO; Start 124; Stop 148
ttgagcggatattcgttggatatag

SEQ ID NO: 419847 - DNA, 25 bp, Artificial
  probe
  misc_feature (1)..(25): SEQ ID NO: 5734; WAN024GLO; Start 123; Stop 147
gttgagcggatattcgttggatata

SEQ ID NO: 419848 - DNA, 25 bp, Artificial
  probe
  misc_feature (1)..(25): SEQ ID NO: 5734; WAN024GLO; Start 127; Stop 151
agcggatattcgttggatataggag

SEQ ID NO: 419849 - DNA, 25 bp, Artificial
  probe
  misc_feature (1)..(25): SEQ ID NO: 5734; WAN024GLO; Start 126; Stop 150
gagcggatattcgttggatatagga

SEQ ID NO: 419850 - DNA, 25 bp, Artificial
  probe
  misc_feature (1)..(25): SEQ ID NO: 5734; WAN024GLO; Start 125; Stop 149
tgagcggatattcgttggatatagg

SEQ ID NO: 419851 - DNA, 25 bp, Artificial
  probe
  misc_feature (1)..(25): SEQ ID NO: 5734; WAN024GLO; Start 122; Stop 146
agttgagcggatattcgttggatat

SEQ ID NO: 419852 - DNA, 25 bp, Artificial
  probe
  misc_feature (1)..(25): SEQ ID NO: 5734; WAN024GLO; Start 116; Stop 140
ataggaagttgagcggatattcgtt

SEQ ID NO: 419853 - DNA, 25 bp, Artificial
  probe
  misc_feature (1)..(25): SEQ ID NO: 5734; WAN024GLO; Start 121; Stop 145
aagttgagcggatattcgttggata

SEQ ID NO: 419854 - DNA, 25 bp, Artificial
  probe
  misc_feature (1)..(25): SEQ ID NO: 5734; WAN024GLO; Start 128; Stop 152
gcggatattcgttggatataggagg

SEQ ID NO: 419855 - DNA, 25 bp, Artificial
  probe
  misc_feature (1)..(25): SEQ ID NO: 5734; WAN024GLO; Start 112; Stop 136
gagcataggaagttgagcggatatt

SEQ ID NO: 419856 - DNA, 25 bp, Artificial
  probe
  misc_feature (1)..(25): SEQ ID NO: 5734; WAN024GLO; Start 115; Stop 139
cataggaagttgagcggatattcgt

SEQ ID NO: 419857 - DNA, 25 bp, Artificial
  probe
  misc_feature (1)..(25): SEQ ID NO: 5734; WAN024GLO; Start 113; Stop 137
agcataggaagttgagcggatattc

SEQ ID NO: 419858 - DNA, 25 bp, Artificial
  probe
  misc_feature (1)..(25): SEQ ID NO: 5734; WAN024GLO; Start 102; Stop 126
cgataaagaagagcataggaagttg

SEQ ID NO: 419859 - DNA, 25 bp, Artificial
  probe
  misc_feature (1)..(25): SEQ ID NO: 5734; WAN024GLO; Start 117; Stop 141
taggaagttgagcggatattcgttg

SEQ ID NO: 419860 - DNA, 25 bp, Artificial
  probe
  misc_feature (1)..(25): SEQ ID NO: 5734; WAN024GLO; Start 105; Stop 129
taaagaagagcataggaagttgagc

SEQ ID NO: 419861 - DNA, 25 bp, Artificial
  probe
  misc_feature (1)..(25): SEQ ID NO: 5734; WAN024GLO; Start 132; Stop 156
atattcgttggatataggagggttg

SEQ ID NO: 419862 - DNA, 25 bp, Artificial
  probe
  misc_feature (1)..(25): SEQ ID NO: 5734; WAN024GLO; Start 131; Stop 155
gatattcgttggatataggagggtt

SEQ ID NO: 419863 - DNA, 25 bp, Artificial
  probe
  misc_feature (1)..(25): SEQ ID NO: 5734; WAN024GLO; Start 130; Stop 154
ggatattcgttggatataggagggt

SEQ ID NO: 419864 - DNA, 25 bp, Artificial
  probe
  misc_feature (1)..(25): SEQ ID NO: 5734; WAN024GLO; Start 111; Stop 135
agagcataggaagttgagcggatat

SEQ ID NO: 419865 - DNA, 25 bp, Artificial
  probe
  misc_feature (1)..(25): SEQ ID NO: 5734; WAN024GLO; Start 133; Stop 157
tattcgttggatataggagggttgg

SEQ ID NO: 419866 - DNA, 25 bp, Artificial
  probe
  misc_feature (1)..(25): SEQ ID NO: 5734; WAN024GLO; Start 104; Stop 128
ataaagaagagcataggaagttgag

SEQ ID NO: 419867 - DNA, 25 bp, Artificial
  probe
  misc_feature (1)..(25): SEQ ID NO: 5734; WAN024GLO; Start 103; Stop 127
gataaagaagagcataggaagttga

SEQ ID NO: 419868 - DNA, 25 bp, Artificial
  probe
  misc_feature (1)..(25): SEQ ID NO: 5734; WAN024GLO; Start 110; Stop 134
aagagcataggaagttgagcggata

SEQ ID NO: 419869 - DNA, 25 bp, Artificial
  probe
  misc_feature (1)..(25): SEQ ID NO: 5734; WAN024GLO; Start 120; Stop 144
gaagttgagcggatattcgttggat

SEQ ID NO: 419870 - DNA, 25 bp, Artificial
  probe
  misc_feature (1)..(25): SEQ ID NO: 5734; WAN024GLO; Start 129; Stop 153
cggatattcgttggatataggaggg

SEQ ID NO: 419871 - DNA, 25 bp, Artificial
  probe
  misc_feature (1)..(25): SEQ ID NO: 5734; WAN024GLO; Start 202; Stop 226
tttattgggaacacttgtaaagagt

SEQ ID NO: 419872 - DNA, 25 bp, Artificial
  probe
  misc_feature (1)..(25): SEQ ID NO: 5734; WAN024GLO; Start 114; Stop 138
gcataggaagttgagcggatattcg

SEQ ID NO: 419873 - DNA, 25 bp, Artificial
  probe
  misc_feature (1)..(25): SEQ ID NO: 5734; WAN024GLO; Start 101; Stop 125
tcgataaagaagagcataggaagtt

SEQ ID NO: 419874 - DNA, 25 bp, Artificial
  probe
  misc_feature (1)..(25): SEQ ID NO: 5734; WAN024GLO; Start 204; Stop 228
tattgggaacacttgtaaagagtac

SEQ ID NO: 419875 - DNA, 25 bp, Artificial
  probe
  misc_feature (1)..(25): SEQ ID NO: 5734; WAN024GLO; Start 203; Stop 227
ttattgggaacacttgtaaagagta

SEQ ID NO: 419876 - DNA, 25 bp, Artificial
  probe
  misc_feature (1)..(25): SEQ ID NO: 5734; WAN024GLO; Start 205; Stop 229
attgggaacacttgtaaagagtaca

SEQ ID NO: 419877 - DNA, 25 bp, Artificial
  probe
  misc_feature (1)..(25): SEQ ID NO: 5734; WAN024GLO; Start 106; Stop 130
aaagaagagcataggaagttgagcg

SEQ ID NO: 419878 - DNA, 25 bp, Artificial
  probe
  misc_feature (1)..(25): SEQ ID NO: 5734; WAN024GLO; Start 109; Stop 133
gaagagcataggaagttgagcggat

SEQ ID NO: 419879 - DNA, 25 bp, Artificial
  probe
  misc_feature (1)..(25): SEQ ID NO: 5735; WAN024DXX; Start 412; Stop 436
tattatgaccgctatctggaacatt

SEQ ID NO: 419880 - DNA, 25 bp, Artificial
  probe
  misc_feature (1)..(25): SEQ ID NO: 5735; WAN024DXX; Start 514; Stop 538
caggaggtattaattgatgaaggaa

SEQ ID NO: 419881 - DNA, 25 bp, Artificial
  probe
  misc_feature (1)..(25): SEQ ID NO: 5735; WAN024DXX; Start 513; Stop 537
tcaggaggtattaattgatgaagga

SEQ ID NO: 419882 - DNA, 25 bp, Artificial
  probe
  misc_feature (1)..(25): SEQ ID NO: 5735; WAN024DXX; Start 3; Stop 27
gtctatgaaatcggaattacgcaag

SEQ ID NO: 419883 - DNA, 25 bp, Artificial
  probe
  misc_feature (1)..(25): SEQ ID NO: 5735; WAN024DXX; Start 413; Stop 437
attatgaccgctatctggaacattt

SEQ ID NO: 419884 - DNA, 25 bp, Artificial
  probe
  misc_feature (1)..(25): SEQ ID NO: 5735; WAN024DXX; Start 2; Stop 26
tgtctatgaaatcggaattacgcaa

SEQ ID NO: 419885 - DNA, 25 bp, Artificial
  probe
  misc_feature (1)..(25): SEQ ID NO: 5735; WAN024DXX; Start 1; Stop 25
ttgtctatgaaatcggaattacgca

SEQ ID NO: 419886 - DNA, 25 bp, Artificial
  probe
  misc_feature (1)..(25): SEQ ID NO: 5735; WAN024DXX; Start 509; Stop 533
ctgttcaggaggtattaattgatga

SEQ ID NO: 419887 - DNA, 25 bp, Artificial
  probe
  misc_feature (1)..(25): SEQ ID NO: 5735; WAN024DXX; Start 508; Stop 532
cctgttcaggaggtattaattgatg

SEQ ID NO: 419888 - DNA, 25 bp, Artificial
  probe
  misc_feature (1)..(25): SEQ ID NO: 5735; WAN024DXX; Start 6; Stop 30
tatgaaatcggaattacgcaagcaa

SEQ ID NO: 419889 - DNA, 25 bp, Artificial
  probe
  misc_feature (1)..(25): SEQ ID NO: 5735; WAN024DXX; Start 4; Stop 28
tctatgaaatcggaattacgcaagc

SEQ ID NO: 419890 - DNA, 25 bp, Artificial
  probe
  misc_feature (1)..(25): SEQ ID NO: 5735; WAN024DXX; Start 5; Stop 29
ctatgaaatcggaattacgcaagca

SEQ ID NO: 419891 - DNA, 25 bp, Artificial
  probe
  misc_feature (1)..(25): SEQ ID NO: 5735; WAN024DXX; Start 341; Stop 365
agattgatttgattcatgttcctgg

SEQ ID NO: 419892 - DNA, 25 bp, Artificial
  probe
  misc_feature (1)..(25): SEQ ID NO: 5735; WAN024DXX; Start 11; Stop 35
aatcggaattacgcaagcaagtctt

SEQ ID NO: 419893 - DNA, 25 bp, Artificial
  probe
  misc_feature (1)..(25): SEQ ID NO: 5735; WAN024DXX; Start 339; Stop 363
tcagattgatttgattcatgttcct

SEQ ID NO: 419894 - DNA, 25 bp, Artificial
  probe
  misc_feature (1)..(25): SEQ ID NO: 5735; WAN024DXX; Start 338; Stop 362
ctcagattgatttgattcatgttcc

SEQ ID NO: 419895 - DNA, 25 bp, Artificial
  probe
  misc_feature (1)..(25): SEQ ID NO: 5735; WAN024DXX; Start 7; Stop 31
atgaaatcggaattacgcaagcaag

SEQ ID NO: 419896 - DNA, 25 bp, Artificial
  probe
  misc_feature (1)..(25): SEQ ID NO: 5735; WAN024DXX; Start 340; Stop 364
cagattgatttgattcatgttcctg

SEQ ID NO: 419897 - DNA, 25 bp, Artificial
  probe
  misc_feature (1)..(25): SEQ ID NO: 5735; WAN024DXX; Start 468; Stop 492
ttgtcaaattcaggactttatacct

SEQ ID NO: 419898 - DNA, 25 bp, Artificial
  probe
  misc_feature (1)..(25): SEQ ID NO: 5735; WAN024DXX; Start 467; Stop 491
cttgtcaaattcaggactttatacc

SEQ ID NO: 419899 - DNA, 25 bp, Artificial
  probe
  misc_feature (1)..(25): SEQ ID NO: 5735; WAN024DXX; Start 466; Stop 490
ccttgtcaaattcaggactttatac

SEQ ID NO: 419900 - DNA, 25 bp, Artificial
  probe
  misc_feature (1)..(25): SEQ ID NO: 5735; WAN024DXX; Start 512; Stop 536
ttcaggaggtattaattgatgaagg

SEQ ID NO: 419901 - DNA, 25 bp, Artificial
  probe
  misc_feature (1)..(25): SEQ ID NO: 5735; WAN024DXX; Start 337; Stop 361
tctcagattgatttgattcatgttc

SEQ ID NO: 419902 - DNA, 25 bp, Artificial
  probe
  misc_feature (1)..(25): SEQ ID NO: 5735; WAN024DXX; Start 515; Stop 539
aggaggtattaattgatgaaggaaa

SEQ ID NO: 419903 - DNA, 25 bp, Artificial
  probe
  misc_feature (1)..(25): SEQ ID NO: 5735; WAN024DXX; Start 9; Stop 33
gaaatcggaattacgcaagcaagtc

SEQ ID NO: 419904 - DNA, 25 bp, Artificial
  probe
  misc_feature (1)..(25): SEQ ID NO: 5735; WAN024DXX; Start 510; Stop 534
tgttcaggaggtattaattgatgaa

SEQ ID NO: 419905 - DNA, 25 bp, Artificial
  probe
  misc_feature (1)..(25): SEQ ID NO: 5735; WAN024DXX; Start 414; Stop 438
ttatgaccgctatctggaacatttt

SEQ ID NO: 419906 - DNA, 25 bp, Artificial
  probe
  misc_feature (1)..(25): SEQ ID NO: 5735; WAN024DXX; Start 198; Stop 222
gaaggacggcaagaaggttttaata

SEQ ID NO: 419907 - DNA, 25 bp, Artificial
  probe
  misc_feature (1)..(25): SEQ ID NO: 5735; WAN024DXX; Start 10; Stop 34
aaatcggaattacgcaagcaagtct

SEQ ID NO: 419908 - DNA, 25 bp, Artificial
  probe
  misc_feature (1)..(25): SEQ ID NO: 5735; WAN024DXX; Start 511; Stop 535
gttcaggaggtattaattgatgaag

SEQ ID NO: 419909 - DNA, 25 bp, Artificial
  probe
  misc_feature (1)..(25): SEQ ID NO: 5735; WAN024DXX; Start 199; Stop 223
aaggacggcaagaaggttttaatac

SEQ ID NO: 419910 - DNA, 25 bp, Artificial
  probe
  misc_feature (1)..(25): SEQ ID NO: 5735; WAN024DXX; Start 217; Stop 241
ttaatacccaaaacttatcccaagg

SEQ ID NO: 419911 - DNA, 25 bp, Artificial
  probe
  misc_feature (1)..(25): SEQ ID NO: 5735; WAN024DXX; Start 336; Stop 360
atctcagattgatttgattcatgtt

SEQ ID NO: 419912 - DNA, 25 bp, Artificial
  probe
  misc_feature (1)..(25): SEQ ID NO: 5736; WAN024EU8; Start 512; Stop 536
atacagaagaattggtagaacgcta

SEQ ID NO: 419913 - DNA, 25 bp, Artificial
  probe
  misc_feature (1)..(25): SEQ ID NO: 5736; WAN024EU8; Start 511; Stop 535
catacagaagaattggtagaacgct

SEQ ID NO: 419914 - DNA, 25 bp, Artificial
  probe
  misc_feature (1)..(25): SEQ ID NO: 5736; WAN024EU8; Start 78; Stop 102
agataagctagaagttgtcgaagtt

SEQ ID NO: 419915 - DNA, 25 bp, Artificial
  probe
  misc_feature (1)..(25): SEQ ID NO: 5736; WAN024EU8; Start 77; Stop 101
aagataagctagaagttgtcgaagt

SEQ ID NO: 419916 - DNA, 25 bp, Artificial
  probe
  misc_feature (1)..(25): SEQ ID NO: 5736; WAN024EU8; Start 706; Stop 730
ggtgatattcttgtctggaatgagt

SEQ ID NO: 419917 - DNA, 25 bp, Artificial
  probe
  misc_feature (1)..(25): SEQ ID NO: 5736; WAN024EU8; Start 705; Stop 729
tggtgatattcttgtctggaatgag

SEQ ID NO: 419918 - DNA, 25 bp, Artificial
  probe
  misc_feature (1)..(25): SEQ ID NO: 5736; WAN024EU8; Start 704; Stop 728
atggtgatattcttgtctggaatga

SEQ ID NO: 419919 - DNA, 25 bp, Artificial
  probe
  misc_feature (1)..(25): SEQ ID NO: 5736; WAN024EU8; Start 509; Stop 533
tccatacagaagaattggtagaacg

SEQ ID NO: 419920 - DNA, 25 bp, Artificial
  probe
  misc_feature (1)..(25): SEQ ID NO: 5736; WAN024EU8; Start 80; Stop 104
ataagctagaagttgtcgaagttca

SEQ ID NO: 419921 - DNA, 25 bp, Artificial
  probe
  misc_feature (1)..(25): SEQ ID NO: 5736; WAN024EU8; Start 79; Stop 103
gataagctagaagttgtcgaagttc

SEQ ID NO: 419922 - DNA, 25 bp, Artificial
  probe
  misc_feature (1)..(25): SEQ ID NO: 5736; WAN024EU8; Start 707; Stop 731
gtgatattcttgtctggaatgagtc

SEQ ID NO: 419923 - DNA, 25 bp, Artificial
  probe
  misc_feature (1)..(25): SEQ ID NO: 5736; WAN024EU8; Start 708; Stop 732
tgatattcttgtctggaatgagtct

SEQ ID NO: 419924 - DNA, 25 bp, Artificial
  probe
  misc_feature (1)..(25): SEQ ID NO: 5736; WAN024EU8; Start 703; Stop 727
aatggtgatattcttgtctggaatg

SEQ ID NO: 419925 - DNA, 25 bp, Artificial
  probe
  misc_feature (1)..(25): SEQ ID NO: 5736; WAN024EU8; Start 81; Stop 105
taagctagaagttgtcgaagttcaa

SEQ ID NO: 419926 - DNA, 25 bp, Artificial
  probe
  misc_feature (1)..(25): SEQ ID NO: 5736; WAN024EU8; Start 689; Stop 713
gctacaagggtctaaatggtgatat

SEQ ID NO: 419927 - DNA, 25 bp, Artificial
  probe
  misc_feature (1)..(25): SEQ ID NO: 5736; WAN024EU8; Start 695; Stop 719
agggtctaaatggtgatattcttgt

SEQ ID NO: 419928 - DNA, 25 bp, Artificial
  probe
  misc_feature (1)..(25): SEQ ID NO: 5736; WAN024EU8; Start 692; Stop 716
acaagggtctaaatggtgatattct

SEQ ID NO: 419929 - DNA, 25 bp, Artificial
  probe
  misc_feature (1)..(25): SEQ ID NO: 5736; WAN024EU8; Start 186; Stop 210
ccaaatccctgatgctacttatgaa

SEQ ID NO: 419930 - DNA, 25 bp, Artificial
  probe
  misc_feature (1)..(25): SEQ ID NO: 5736; WAN024EU8; Start 696; Stop 720
gggtctaaatggtgatattcttgtc

SEQ ID NO: 419931 - DNA, 25 bp, Artificial
  probe
  misc_feature (1)..(25): SEQ ID NO: 5736; WAN024EU8; Start 713; Stop 737
ttcttgtctggaatgagtctttagg

SEQ ID NO: 419932 - DNA, 25 bp, Artificial
  probe
  misc_feature (1)..(25): SEQ ID NO: 5736; WAN024EU8; Start 743; Stop 767
cctttgagttgtcttctatgggaat

SEQ ID NO: 419933 - DNA, 25 bp, Artificial
  probe
  misc_feature (1)..(25): SEQ ID NO: 5736; WAN024EU8; Start 187; Stop 211
caaatccctgatgctacttatgaag

SEQ ID NO: 419934 - DNA, 25 bp, Artificial
  probe
  misc_feature (1)..(25): SEQ ID NO: 5736; WAN024EU8; Start 715; Stop 739
cttgtctggaatgagtctttaggtg

SEQ ID NO: 419935 - DNA, 25 bp, Artificial
  probe
  misc_feature (1)..(25): SEQ ID NO: 5736; WAN024EU8; Start 714; Stop 738
tcttgtctggaatgagtctttaggt

SEQ ID NO: 419936 - DNA, 25 bp, Artificial
  probe
  misc_feature (1)..(25): SEQ ID NO: 5736; WAN024EU8; Start 381; Stop 405
tggtaagcgtaacatcgtttatcta

SEQ ID NO: 419937 - DNA, 25 bp, Artificial
  probe
  misc_feature (1)..(25): SEQ ID NO: 5736; WAN024EU8; Start 379; Stop 403
aatggtaagcgtaacatcgtttatc

SEQ ID NO: 419938 - DNA, 25 bp, Artificial
  probe
  misc_feature (1)..(25): SEQ ID NO: 5736; WAN024EU8; Start 377; Stop 401
caaatggtaagcgtaacatcgttta

SEQ ID NO: 419939 - DNA, 25 bp, Artificial
  probe
  misc_feature (1)..(25): SEQ ID NO: 5736; WAN024EU8; Start 184; Stop 208
ctccaaatccctgatgctacttatg

SEQ ID NO: 419940 - DNA, 25 bp, Artificial
  probe
  misc_feature (1)..(25): SEQ ID NO: 5736; WAN024EU8; Start 183; Stop 207
tctccaaatccctgatgctacttat

SEQ ID NO: 419941 - DNA, 25 bp, Artificial
  probe
  misc_feature (1)..(25): SEQ ID NO: 5736; WAN024EU8; Start 380; Stop 404
atggtaagcgtaacatcgtttatct

SEQ ID NO: 419942 - DNA, 25 bp, Artificial
  probe
  misc_feature (1)..(25): SEQ ID NO: 5736; WAN024EU8; Start 85; Stop 109
ctagaagttgtcgaagttcaaggtc

SEQ ID NO: 419943 - DNA, 25 bp, Artificial
  probe
  misc_feature (1)..(25): SEQ ID NO: 5736; WAN024EU8; Start 82; Stop 106
aagctagaagttgtcgaagttcaag

SEQ ID NO: 419944 - DNA, 25 bp, Artificial
  probe
  misc_feature (1)..(25): SEQ ID NO: 5736; WAN024EU8; Start 709; Stop 733
gatattcttgtctggaatgagtctt

SEQ ID NO: 419945 - DNA, 25 bp, Artificial
  probe
  misc_feature (1)..(25): SEQ ID NO: 5737; WAN024FBI; Start 174; Stop 198
ctcatctttcctctctatcaagtct

SEQ ID NO: 419946 - DNA, 25 bp, Artificial
  probe
  misc_feature (1)..(25): SEQ ID NO: 5737; WAN024FBI; Start 173; Stop 197
actcatctttcctctctatcaagtc

SEQ ID NO: 419947 - DNA, 25 bp, Artificial
  probe
  misc_feature (1)..(25): SEQ ID NO: 5737; WAN024FBI; Start 177; Stop 201
atctttcctctctatcaagtctagc

SEQ ID NO: 419948 - DNA, 25 bp, Artificial
  probe
  misc_feature (1)..(25): SEQ ID NO: 5737; WAN024FBI; Start 175; Stop 199
tcatctttcctctctatcaagtcta

SEQ ID NO: 419949 - DNA, 25 bp, Artificial
  probe
  misc_feature (1)..(25): SEQ ID NO: 5737; WAN024FBI; Start 172; Stop 196
tactcatctttcctctctatcaagt

SEQ ID NO: 419950 - DNA, 25 bp, Artificial
  probe
  misc_feature (1)..(25): SEQ ID NO: 5737; WAN024FBI; Start 178; Stop 202
tctttcctctctatcaagtctagct

SEQ ID NO: 419951 - DNA, 25 bp, Artificial
  probe
  misc_feature (1)..(25): SEQ ID NO: 5737; WAN024FBI; Start 179; Stop 203
ctttcctctctatcaagtctagctt

SEQ ID NO: 419952 - DNA, 25 bp, Artificial
  probe
  misc_feature (1)..(25): SEQ ID NO: 5737; WAN024FBI; Start 176; Stop 200
catctttcctctctatcaagtctag

SEQ ID NO: 419953 - DNA, 25 bp, Artificial
  probe
  misc_feature (1)..(25): SEQ ID NO: 5737; WAN024FBI; Start 171; Stop 195
gtactcatctttcctctctatcaag

SEQ ID NO: 419954 - DNA, 25 bp, Artificial
  probe
  misc_feature (1)..(25): SEQ ID NO: 5737; WAN024FBI; Start 181; Stop 205
ttcctctctatcaagtctagctttg

SEQ ID NO: 419955 - DNA, 25 bp, Artificial
  probe
  misc_feature (1)..(25): SEQ ID NO: 5737; WAN024FBI; Start 180; Stop 204
tttcctctctatcaagtctagcttt

SEQ ID NO: 419956 - DNA, 25 bp, Artificial
  probe
  misc_feature (1)..(25): SEQ ID NO: 5737; WAN024FBI; Start 209; Stop 233
cacttgactttcttccttcttttcc

SEQ ID NO: 419957 - DNA, 25 bp, Artificial
  probe
  misc_feature (1)..(25): SEQ ID NO: 5737; WAN024FBI; Start 210; Stop 234
acttgactttcttccttcttttcca

SEQ ID NO: 419958 - DNA, 25 bp, Artificial
  probe
  misc_feature (1)..(25): SEQ ID NO: 5737; WAN024FBI; Start 32; Stop 56
gtccttttcatacttctgggctaat

SEQ ID NO: 419959 - DNA, 25 bp, Artificial
  probe
  misc_feature (1)..(25): SEQ ID NO: 5737; WAN024FBI; Start 211; Stop 235
cttgactttcttccttcttttccat

SEQ ID NO: 419960 - DNA, 25 bp, Artificial
  probe
  misc_feature (1)..(25): SEQ ID NO: 5737; WAN024FBI; Start 206; Stop 230
aggcacttgactttcttccttcttt

SEQ ID NO: 419961 - DNA, 25 bp, Artificial
  probe
  misc_feature (1)..(25): SEQ ID NO: 5737; WAN024FBI; Start 208; Stop 232
gcacttgactttcttccttcttttc

SEQ ID NO: 419962 - DNA, 25 bp, Artificial
  probe
  misc_feature (1)..(25): SEQ ID NO: 5737; WAN024FBI; Start 38; Stop 62
ttcatacttctgggctaattttcct

SEQ ID NO: 419963 - DNA, 25 bp, Artificial
  probe
  misc_feature (1)..(25): SEQ ID NO: 5737; WAN024FBI; Start 33; Stop 57
tccttttcatacttctgggctaatt

SEQ ID NO: 419964 - DNA, 25 bp, Artificial
  probe
  misc_feature (1)..(25): SEQ ID NO: 5737; WAN024FBI; Start 43; Stop 67
acttctgggctaattttcctaaact

SEQ ID NO: 419965 - DNA, 25 bp, Artificial
  probe
  misc_feature (1)..(25): SEQ ID NO: 5737; WAN024FBI; Start 37; Stop 61
tttcatacttctgggctaattttcc

SEQ ID NO: 419966 - DNA, 25 bp, Artificial
  probe
  misc_feature (1)..(25): SEQ ID NO: 5737; WAN024FBI; Start 34; Stop 58
ccttttcatacttctgggctaattt

SEQ ID NO: 419967 - DNA, 25 bp, Artificial
  probe
  misc_feature (1)..(25): SEQ ID NO: 5737; WAN024FBI; Start 202; Stop 226
tttgaggcacttgactttcttcctt

SEQ ID NO: 419968 - DNA, 25 bp, Artificial
  probe
  misc_feature (1)..(25): SEQ ID NO: 5737; WAN024FBI; Start 39; Stop 63
tcatacttctgggctaattttccta

SEQ ID NO: 419969 - DNA, 25 bp, Artificial
  probe
  misc_feature (1)..(25): SEQ ID NO: 5737; WAN024FBI; Start 198; Stop 222
tagctttgaggcacttgactttctt

SEQ ID NO: 419970 - DNA, 25 bp, Artificial
  probe
  misc_feature (1)..(25): SEQ ID NO: 5737; WAN024FBI; Start 42; Stop 66
tacttctgggctaattttcctaaac

SEQ ID NO: 419971 - DNA, 25 bp, Artificial
  probe
  misc_feature (1)..(25): SEQ ID NO: 5737; WAN024FBI; Start 205; Stop 229
gaggcacttgactttcttccttctt

SEQ ID NO: 419972 - DNA, 25 bp, Artificial
  probe
  misc_feature (1)..(25): SEQ ID NO: 5737; WAN024FBI; Start 40; Stop 64
catacttctgggctaattttcctaa

SEQ ID NO: 419973 - DNA, 25 bp, Artificial
  probe
  misc_feature (1)..(25): SEQ ID NO: 5737; WAN024FBI; Start 207; Stop 231
ggcacttgactttcttccttctttt

SEQ ID NO: 419974 - DNA, 25 bp, Artificial
  probe
  misc_feature (1)..(25): SEQ ID NO: 5737; WAN024FBI; Start 197; Stop 221
ctagctttgaggcacttgactttct

SEQ ID NO: 419975 - DNA, 25 bp, Artificial
  probe
  misc_feature (1)..(25): SEQ ID NO: 5737; WAN024FBI; Start 196; Stop 220
tctagctttgaggcacttgactttc

SEQ ID NO: 419976 - DNA, 25 bp, Artificial
  probe
  misc_feature (1)..(25): SEQ ID NO: 5737; WAN024FBI; Start 213; Stop 237
tgactttcttccttcttttccatga

SEQ ID NO: 419977 - DNA, 25 bp, Artificial
  probe
  misc_feature (1)..(25): SEQ ID NO: 5737; WAN024FBI; Start 212; Stop 236
ttgactttcttccttcttttccatg

SEQ ID NO: 419978 - DNA, 25 bp, Artificial
  probe
  misc_feature (1)..(25): SEQ ID NO: 5738; WAN024ADJ; Start 23; Stop 47
acctttagcctatacaactggattt

SEQ ID NO: 419979 - DNA, 25 bp, Artificial
  probe
  misc_feature (1)..(25): SEQ ID NO: 5738; WAN024ADJ; Start 22; Stop 46
aacctttagcctatacaactggatt

SEQ ID NO: 419980 - DNA, 25 bp, Artificial
  probe
  misc_feature (1)..(25): SEQ ID NO: 5738; WAN024ADJ; Start 21; Stop 45
aaacctttagcctatacaactggat

SEQ ID NO: 419981 - DNA, 25 bp, Artificial
  probe
  misc_feature (1)..(25): SEQ ID NO: 5738; WAN024ADJ; Start 20; Stop 44
aaaacctttagcctatacaactgga

SEQ ID NO: 419982 - DNA, 25 bp, Artificial
  probe
  misc_feature (1)..(25): SEQ ID NO: 5738; WAN024ADJ; Start 4; Stop 28
tctcagacctttggataaaaccttt

SEQ ID NO: 419983 - DNA, 25 bp, Artificial
  probe
  misc_feature (1)..(25): SEQ ID NO: 5738; WAN024ADJ; Start 24; Stop 48
cctttagcctatacaactggatttt

SEQ ID NO: 419984 - DNA, 25 bp, Artificial
  probe
  misc_feature (1)..(25): SEQ ID NO: 5738; WAN024ADJ; Start 7; Stop 31
cagacctttggataaaacctttagc

SEQ ID NO: 419985 - DNA, 25 bp, Artificial
  probe
  misc_feature (1)..(25): SEQ ID NO: 5738; WAN024ADJ; Start 10; Stop 34
acctttggataaaacctttagccta

SEQ ID NO: 419986 - DNA, 25 bp, Artificial
  probe
  misc_feature (1)..(25): SEQ ID NO: 5738; WAN024ADJ; Start 9; Stop 33
gacctttggataaaacctttagcct

SEQ ID NO: 419987 - DNA, 25 bp, Artificial
  probe
  misc_feature (1)..(25): SEQ ID NO: 5738; WAN024ADJ; Start 8; Stop 32
agacctttggataaaacctttagcc

SEQ ID NO: 419988 - DNA, 25 bp, Artificial
  probe
  misc_feature (1)..(25): SEQ ID NO: 5738; WAN024ADJ; Start 11; Stop 35
cctttggataaaacctttagcctat

SEQ ID NO: 419989 - DNA, 25 bp, Artificial
  probe
  misc_feature (1)..(25): SEQ ID NO: 5738; WAN024ADJ; Start 6; Stop 30
tcagacctttggataaaacctttag

SEQ ID NO: 419990 - DNA, 25 bp, Artificial
  probe
  misc_feature (1)..(25): SEQ ID NO: 5738; WAN024ADJ; Start 5; Stop 29
ctcagacctttggataaaaccttta

SEQ ID NO: 419991 - DNA, 25 bp, Artificial
  probe
  misc_feature (1)..(25): SEQ ID NO: 5738; WAN024ADJ; Start 19; Stop 43
taaaacctttagcctatacaactgg

SEQ ID NO: 419992 - DNA, 25 bp, Artificial
  probe
  misc_feature (1)..(25): SEQ ID NO: 5738; WAN024ADJ; Start 25; Stop 49
ctttagcctatacaactggattttc

SEQ ID NO: 419993 - DNA, 25 bp, Artificial
  probe
  misc_feature (1)..(25): SEQ ID NO: 5738; WAN024ADJ; Start 37; Stop 61
caactggattttcctctctcaaaag

SEQ ID NO: 419994 - DNA, 25 bp, Artificial
  probe
  misc_feature (1)..(25): SEQ ID NO: 5738; WAN024ADJ; Start 35; Stop 59
tacaactggattttcctctctcaaa

SEQ ID NO: 419995 - DNA, 25 bp, Artificial
  probe
  misc_feature (1)..(25): SEQ ID NO: 5738; WAN024ADJ; Start 28; Stop 52
tagcctatacaactggattttcctc

SEQ ID NO: 419996 - DNA, 25 bp, Artificial
  probe
  misc_feature (1)..(25): SEQ ID NO: 5738; WAN024ADJ; Start 39; Stop 63
actggattttcctctctcaaaagta

SEQ ID NO: 419997 - DNA, 25 bp, Artificial
  probe
  misc_feature (1)..(25): SEQ ID NO: 5738; WAN024ADJ; Start 38; Stop 62
aactggattttcctctctcaaaagt

SEQ ID NO: 419998 - DNA, 25 bp, Artificial
  probe
  misc_feature (1)..(25): SEQ ID NO: 5738; WAN024ADJ; Start 34; Stop 58
atacaactggattttcctctctcaa

SEQ ID NO: 419999 - DNA, 25 bp, Artificial
  probe
  misc_feature (1)..(25): SEQ ID NO: 5738; WAN024ADJ; Start 36; Stop 60
acaactggattttcctctctcaaaa

SEQ ID NO: 420000 - DNA, 25 bp, Artificial
  probe
  misc_feature (1)..(25): SEQ ID NO: 5738; WAN024ADJ; Start 31; Stop 55
cctatacaactggattttcctctct

SEQ ID NO: 420001 - DNA, 25 bp, Artificial
  probe
  misc_feature (1)..(25): SEQ ID NO: 5738; WAN024ADJ; Start 27; Stop 51
ttagcctatacaactggattttcct

SEQ ID NO: 420002 - DNA, 25 bp, Artificial
  probe
  misc_feature (1)..(25): SEQ ID NO: 5738; WAN024ADJ; Start 30; Stop 54
gcctatacaactggattttcctctc

SEQ ID NO: 420003 - DNA, 25 bp, Artificial
  probe
  misc_feature (1)..(25): SEQ ID NO: 5738; WAN024ADJ; Start 15; Stop 39
tggataaaacctttagcctatacaa

SEQ ID NO: 420004 - DNA, 25 bp, Artificial
  probe
  misc_feature (1)..(25): SEQ ID NO: 5738; WAN024ADJ; Start 14; Stop 38
ttggataaaacctttagcctataca

SEQ ID NO: 420005 - DNA, 25 bp, Artificial
  probe
  misc_feature (1)..(25): SEQ ID NO: 5738; WAN024ADJ; Start 33; Stop 57
tatacaactggattttcctctctca

SEQ ID NO: 420006 - DNA, 25 bp, Artificial
  probe
  misc_feature (1)..(25): SEQ ID NO: 5738; WAN024ADJ; Start 29; Stop 53
agcctatacaactggattttcctct

SEQ ID NO: 420007 - DNA, 25 bp, Artificial
  probe
  misc_feature (1)..(25): SEQ ID NO: 5738; WAN024ADJ; Start 26; Stop 50
tttagcctatacaactggattttcc

SEQ ID NO: 420008 - DNA, 25 bp, Artificial
  probe
  misc_feature (1)..(25): SEQ ID NO: 5738; WAN024ADJ; Start 3; Stop 27
gtctcagacctttggataaaacctt

SEQ ID NO: 420009 - DNA, 25 bp, Artificial
  probe
  misc_feature (1)..(25): SEQ ID NO: 5738; WAN024ADJ; Start 16; Stop 40
ggataaaacctttagcctatacaac

SEQ ID NO: 420010 - DNA, 25 bp, Artificial
  probe
  misc_feature (1)..(25): SEQ ID NO: 5738; WAN024ADJ; Start 1; Stop 25
ttgtctcagacctttggataaaacc

SEQ ID NO: 420011 - DNA, 25 bp, Artificial
  probe
  misc_feature (1)..(25): SEQ ID NO: 5739; WAN024FGD; Start 43; Stop 67
acatctttaacaaattcatctgtga

SEQ ID NO: 420012 - DNA, 25 bp, Artificial
  probe
  misc_feature (1)..(25): SEQ ID NO: 5739; WAN024FGD; Start 41; Stop 65
tgacatctttaacaaattcatctgt

SEQ ID NO: 420013 - DNA, 25 bp, Artificial
  probe
  misc_feature (1)..(25): SEQ ID NO: 5739; WAN024FGD; Start 215; Stop 239
tcacttttatatctgggtttgcttt

SEQ ID NO: 420014 - DNA, 25 bp, Artificial
  probe
  misc_feature (1)..(25): SEQ ID NO: 5739; WAN024FGD; Start 214; Stop 238
ttcacttttatatctgggtttgctt

SEQ ID NO: 420015 - DNA, 25 bp, Artificial
  probe
  misc_feature (1)..(25): SEQ ID NO: 5739; WAN024FGD; Start 213; Stop 237
tttcacttttatatctgggtttgct

SEQ ID NO: 420016 - DNA, 25 bp, Artificial
  probe
  misc_feature (1)..(25): SEQ ID NO: 5739; WAN024FGD; Start 42; Stop 66
gacatctttaacaaattcatctgtg

SEQ ID NO: 420017 - DNA, 25 bp, Artificial
  probe
  misc_feature (1)..(25): SEQ ID NO: 5739; WAN024FGD; Start 50; Stop 74
taacaaattcatctgtgaagaggtc

SEQ ID NO: 420018 - DNA, 25 bp, Artificial
  probe
  misc_feature (1)..(25): SEQ ID NO: 5739; WAN024FGD; Start 12; Stop 36
tttacttgcttgtacgatgttttca

SEQ ID NO: 420019 - DNA, 25 bp, Artificial
  probe
  misc_feature (1)..(25): SEQ ID NO: 5739; WAN024FGD; Start 216; Stop 240
cacttttatatctgggtttgctttt

SEQ ID NO: 420020 - DNA, 25 bp, Artificial
  probe
  misc_feature (1)..(25): SEQ ID NO: 5739; WAN024FGD; Start 11; Stop 35
ctttacttgcttgtacgatgttttc

SEQ ID NO: 420021 - DNA, 25 bp, Artificial
  probe
  misc_feature (1)..(25): SEQ ID NO: 5739; WAN024FGD; Start 10; Stop 34
gctttacttgcttgtacgatgtttt

SEQ ID NO: 420022 - DNA, 25 bp, Artificial
  probe
  misc_feature (1)..(25): SEQ ID NO: 5739; WAN024FGD; Start 17; Stop 41
ttgcttgtacgatgttttcattgtt

SEQ ID NO: 420023 - DNA, 25 bp, Artificial
  probe
  misc_feature (1)..(25): SEQ ID NO: 5739; WAN024FGD; Start 14; Stop 38
tacttgcttgtacgatgttttcatt

SEQ ID NO: 420024 - DNA, 25 bp, Artificial
  probe
  misc_feature (1)..(25): SEQ ID NO: 5739; WAN024FGD; Start 13; Stop 37
ttacttgcttgtacgatgttttcat

SEQ ID NO: 420025 - DNA, 25 bp, Artificial
  probe
  misc_feature (1)..(25): SEQ ID NO: 5739; WAN024FGD; Start 49; Stop 73
ttaacaaattcatctgtgaagaggt

SEQ ID NO: 420026 - DNA, 25 bp, Artificial
  probe
  misc_feature (1)..(25): SEQ ID NO: 5739; WAN024FGD; Start 212; Stop 236
atttcacttttatatctgggtttgc

SEQ ID NO: 420027 - DNA, 25 bp, Artificial
  probe
  misc_feature (1)..(25): SEQ ID NO: 5739; WAN024FGD; Start 16; Stop 40
cttgcttgtacgatgttttcattgt

SEQ ID NO: 420028 - DNA, 25 bp, Artificial
  probe
  misc_feature (1)..(25): SEQ ID NO: 5739; WAN024FGD; Start 15; Stop 39
acttgcttgtacgatgttttcattg

SEQ ID NO: 420029 - DNA, 25 bp, Artificial
  probe
  misc_feature (1)..(25): SEQ ID NO: 5739; WAN024FGD; Start 18; Stop 42
tgcttgtacgatgttttcattgttg

SEQ ID NO: 420030 - DNA, 25 bp, Artificial
  probe
  misc_feature (1)..(25): SEQ ID NO: 5739; WAN024FGD; Start 40; Stop 64
ttgacatctttaacaaattcatctg

SEQ ID NO: 420031 - DNA, 25 bp, Artificial
  probe
  misc_feature (1)..(25): SEQ ID NO: 5739; WAN024FGD; Start 39; Stop 63
gttgacatctttaacaaattcatct

SEQ ID NO: 420032 - DNA, 25 bp, Artificial
  probe
  misc_feature (1)..(25): SEQ ID NO: 5739; WAN024FGD; Start 20; Stop 44
cttgtacgatgttttcattgttgac

SEQ ID NO: 420033 - DNA, 25 bp, Artificial
  probe
  misc_feature (1)..(25): SEQ ID NO: 5739; WAN024FGD; Start 19; Stop 43
gcttgtacgatgttttcattgttga

SEQ ID NO: 420034 - DNA, 25 bp, Artificial
  probe
  misc_feature (1)..(25): SEQ ID NO: 5739; WAN024FGD; Start 76; Stop 100
ttcaactcagccaatttaccgtttt

SEQ ID NO: 420035 - DNA, 25 bp, Artificial
  probe
  misc_feature (1)..(25): SEQ ID NO: 5739; WAN024FGD; Start 9; Stop 33
agctttacttgcttgtacgatgttt

SEQ ID NO: 420036 - DNA, 25 bp, Artificial
  probe
  misc_feature (1)..(25): SEQ ID NO: 5739; WAN024FGD; Start 21; Stop 45
ttgtacgatgttttcattgttgaca

SEQ ID NO: 420037 - DNA, 25 bp, Artificial
  probe
  misc_feature (1)..(25): SEQ ID NO: 5739; WAN024FGD; Start 239; Stop 263
tttcaaacgcttcgatgattgattt

SEQ ID NO: 420038 - DNA, 25 bp, Artificial
  probe
  misc_feature (1)..(25): SEQ ID NO: 5739; WAN024FGD; Start 106; Stop 130
tattggatgatacgtcctggtgcat

SEQ ID NO: 420039 - DNA, 25 bp, Artificial
  probe
  misc_feature (1)..(25): SEQ ID NO: 5739; WAN024FGD; Start 48; Stop 72
tttaacaaattcatctgtgaagagg

SEQ ID NO: 420040 - DNA, 25 bp, Artificial
  probe
  misc_feature (1)..(25): SEQ ID NO: 5739; WAN024FGD; Start 8; Stop 32
cagctttacttgcttgtacgatgtt

SEQ ID NO: 420041 - DNA, 25 bp, Artificial
  probe
  misc_feature (1)..(25): SEQ ID NO: 5739; WAN024FGD; Start 1; Stop 25
ttgtctccagctttacttgcttgta

SEQ ID NO: 420042 - DNA, 25 bp, Artificial
  probe
  misc_feature (1)..(25): SEQ ID NO: 5739; WAN024FGD; Start 115; Stop 139
atacgtcctggtgcatcaaagagta

SEQ ID NO: 420043 - DNA, 25 bp, Artificial
  probe
  misc_feature (1)..(25): SEQ ID NO: 5739; WAN024FGD; Start 46; Stop 70
tctttaacaaattcatctgtgaaga

SEQ ID NO: 420044 - DNA, 25 bp, Artificial
  probe
  misc_feature (1)..(25): SEQ ID NO: 5740; WAN024B8B; Start 154; Stop 178
atgagaatgtccataactgctgctt

SEQ ID NO: 420045 - DNA, 25 bp, Artificial
  probe
  misc_feature (1)..(25): SEQ ID NO: 5740; WAN024B8B; Start 155; Stop 179
tgagaatgtccataactgctgcttg

SEQ ID NO: 420046 - DNA, 25 bp, Artificial
  probe
  misc_feature (1)..(25): SEQ ID NO: 5740; WAN024B8B; Start 153; Stop 177
catgagaatgtccataactgctgct

SEQ ID NO: 420047 - DNA, 25 bp, Artificial
  probe
  misc_feature (1)..(25): SEQ ID NO: 5740; WAN024B8B; Start 116; Stop 140
taacaggatatttctccaaagcctt

SEQ ID NO: 420048 - DNA, 25 bp, Artificial
  probe
  misc_feature (1)..(25): SEQ ID NO: 5740; WAN024B8B; Start 115; Stop 139
ttaacaggatatttctccaaagcct

SEQ ID NO: 420049 - DNA, 25 bp, Artificial
  probe
  misc_feature (1)..(25): SEQ ID NO: 5740; WAN024B8B; Start 114; Stop 138
tttaacaggatatttctccaaagcc

SEQ ID NO: 420050 - DNA, 25 bp, Artificial
  probe
  misc_feature (1)..(25): SEQ ID NO: 5740; WAN024B8B; Start 120; Stop 144
aggatatttctccaaagccttcttg

SEQ ID NO: 420051 - DNA, 25 bp, Artificial
  probe
  misc_feature (1)..(25): SEQ ID NO: 5740; WAN024B8B; Start 119; Stop 143
caggatatttctccaaagccttctt

SEQ ID NO: 420052 - DNA, 25 bp, Artificial
  probe
  misc_feature (1)..(25): SEQ ID NO: 5740; WAN024B8B; Start 148; Stop 172
tttgccatgagaatgtccataactg

SEQ ID NO: 420053 - DNA, 25 bp, Artificial
  probe
  misc_feature (1)..(25): SEQ ID NO: 5740; WAN024B8B; Start 117; Stop 141
aacaggatatttctccaaagccttc

SEQ ID NO: 420054 - DNA, 25 bp, Artificial
  probe
  misc_feature (1)..(25): SEQ ID NO: 5740; WAN024B8B; Start 193; Stop 217
aaatcttctgtagacaggctttctc

SEQ ID NO: 420055 - DNA, 25 bp, Artificial
  probe
  misc_feature (1)..(25): SEQ ID NO: 5740; WAN024B8B; Start 192; Stop 216
caaatcttctgtagacaggctttct

SEQ ID NO: 420056 - DNA, 25 bp, Artificial
  probe
  misc_feature (1)..(25): SEQ ID NO: 5740; WAN024B8B; Start 118; Stop 142
acaggatatttctccaaagccttct

SEQ ID NO: 420057 - DNA, 25 bp, Artificial
  probe
  misc_feature (1)..(25): SEQ ID NO: 5740; WAN024B8B; Start 191; Stop 215
acaaatcttctgtagacaggctttc

SEQ ID NO: 420058 - DNA, 25 bp, Artificial
  probe
  misc_feature (1)..(25): SEQ ID NO: 5740; WAN024B8B; Start 190; Stop 214
cacaaatcttctgtagacaggcttt

SEQ ID NO: 420059 - DNA, 25 bp, Artificial
  probe
  misc_feature (1)..(25): SEQ ID NO: 5740; WAN024B8B; Start 185; Stop 209
aagcacacaaatcttctgtagacag

SEQ ID NO: 420060 - DNA, 25 bp, Artificial
  probe
  misc_feature (1)..(25): SEQ ID NO: 5740; WAN024B8B; Start 149; Stop 173
ttgccatgagaatgtccataactgc

SEQ ID NO: 420061 - DNA, 25 bp, Artificial
  probe
  misc_feature (1)..(25): SEQ ID NO: 5740; WAN024B8B; Start 59; Stop 83
ctaggcgttctctgagacctttatt

SEQ ID NO: 420062 - DNA, 25 bp, Artificial
  probe
  misc_feature (1)..(25): SEQ ID NO: 5740; WAN024B8B; Start 152; Stop 176
ccatgagaatgtccataactgctgc

SEQ ID NO: 420063 - DNA, 25 bp, Artificial
  probe
  misc_feature (1)..(25): SEQ ID NO: 5740; WAN024B8B; Start 151; Stop 175
gccatgagaatgtccataactgctg

SEQ ID NO: 420064 - DNA, 25 bp, Artificial
  probe
  misc_feature (1)..(25): SEQ ID NO: 5740; WAN024B8B; Start 194; Stop 218
aatcttctgtagacaggctttctcc

SEQ ID NO: 420065 - DNA, 25 bp, Artificial
  probe
  misc_feature (1)..(25): SEQ ID NO: 5740; WAN024B8B; Start 60; Stop 84
taggcgttctctgagacctttattg

SEQ ID NO: 420066 - DNA, 25 bp, Artificial
  probe
  misc_feature (1)..(25): SEQ ID NO: 5740; WAN024B8B; Start 189; Stop 213
acacaaatcttctgtagacaggctt

SEQ ID NO: 420067 - DNA, 25 bp, Artificial
  probe
  misc_feature (1)..(25): SEQ ID NO: 5740; WAN024B8B; Start 150; Stop 174
tgccatgagaatgtccataactgct

SEQ ID NO: 420068 - DNA, 25 bp, Artificial
  probe
  misc_feature (1)..(25): SEQ ID NO: 5740; WAN024B8B; Start 156; Stop 180
gagaatgtccataactgctgcttgg

SEQ ID NO: 420069 - DNA, 25 bp, Artificial
  probe
  misc_feature (1)..(25): SEQ ID NO: 5740; WAN024B8B; Start 188; Stop 212
cacacaaatcttctgtagacaggct

SEQ ID NO: 420070 - DNA, 25 bp, Artificial
  probe
  misc_feature (1)..(25): SEQ ID NO: 5740; WAN024B8B; Start 186; Stop 210
agcacacaaatcttctgtagacagg

SEQ ID NO: 420071 - DNA, 25 bp, Artificial
  probe
  misc_feature (1)..(25): SEQ ID NO: 5740; WAN024B8B; Start 181; Stop 205
aaggaagcacacaaatcttctgtag

SEQ ID NO: 420072 - DNA, 25 bp, Artificial
  probe
  misc_feature (1)..(25): SEQ ID NO: 5740; WAN024B8B; Start 180; Stop 204
gaaggaagcacacaaatcttctgta

SEQ ID NO: 420073 - DNA, 25 bp, Artificial
  probe
  misc_feature (1)..(25): SEQ ID NO: 5740; WAN024B8B; Start 184; Stop 208
gaagcacacaaatcttctgtagaca

SEQ ID NO: 420074 - DNA, 25 bp, Artificial
  probe
  misc_feature (1)..(25): SEQ ID NO: 5740; WAN024B8B; Start 147; Stop 171
ttttgccatgagaatgtccataact

SEQ ID NO: 420075 - DNA, 25 bp, Artificial
  probe
  misc_feature (1)..(25): SEQ ID NO: 5740; WAN024B8B; Start 64; Stop 88
cgttctctgagacctttattggctg

SEQ ID NO: 420076 - DNA, 25 bp, Artificial
  probe
  misc_feature (1)..(25): SEQ ID NO: 5740; WAN024B8B; Start 183; Stop 207
ggaagcacacaaatcttctgtagac

SEQ ID NO: 420077 - DNA, 25 bp, Artificial
  probe
  misc_feature (1)..(25): SEQ ID NO: 5741; WAN024CA3; Start 40; Stop 64
ttgagaatgctgttgattagagtcg

SEQ ID NO: 420078 - DNA, 25 bp, Artificial
  probe
  misc_feature (1)..(25): SEQ ID NO: 5741; WAN024CA3; Start 43; Stop 67
agaatgctgttgattagagtcgatt

SEQ ID NO: 420079 - DNA, 25 bp, Artificial
  probe
  misc_feature (1)..(25): SEQ ID NO: 5741; WAN024CA3; Start 42; Stop 66
gagaatgctgttgattagagtcgat

SEQ ID NO: 420080 - DNA, 25 bp, Artificial
  probe
  misc_feature (1)..(25): SEQ ID NO: 5741; WAN024CA3; Start 39; Stop 63
tttgagaatgctgttgattagagtc

SEQ ID NO: 420081 - DNA, 25 bp, Artificial
  probe
  misc_feature (1)..(25): SEQ ID NO: 5741; WAN024CA3; Start 41; Stop 65
tgagaatgctgttgattagagtcga

SEQ ID NO: 420082 - DNA, 25 bp, Artificial
  probe
  misc_feature (1)..(25): SEQ ID NO: 5741; WAN024CA3; Start 1; Stop 25
ttgtctgaattacggttgagcttct

SEQ ID NO: 420083 - DNA, 25 bp, Artificial
  probe
  misc_feature (1)..(25): SEQ ID NO: 5741; WAN024CA3; Start 45; Stop 69
aatgctgttgattagagtcgatttc

SEQ ID NO: 420084 - DNA, 25 bp, Artificial
  probe
  misc_feature (1)..(25): SEQ ID NO: 5741; WAN024CA3; Start 44; Stop 68
gaatgctgttgattagagtcgattt

SEQ ID NO: 420085 - DNA, 25 bp, Artificial
  probe
  misc_feature (1)..(25): SEQ ID NO: 5741; WAN024CA3; Start 52; Stop 76
ttgattagagtcgatttccctgaac

SEQ ID NO: 420086 - DNA, 25 bp, Artificial
  probe
  misc_feature (1)..(25): SEQ ID NO: 5741; WAN024CA3; Start 51; Stop 75
gttgattagagtcgatttccctgaa

SEQ ID NO: 420087 - DNA, 25 bp, Artificial
  probe
  misc_feature (1)..(25): SEQ ID NO: 5741; WAN024CA3; Start 49; Stop 73
ctgttgattagagtcgatttccctg

SEQ ID NO: 420088 - DNA, 25 bp, Artificial
  probe
  misc_feature (1)..(25): SEQ ID NO: 5741; WAN024CA3; Start 46; Stop 70
atgctgttgattagagtcgatttcc

SEQ ID NO: 420089 - DNA, 25 bp, Artificial
  probe
  misc_feature (1)..(25): SEQ ID NO: 5741; WAN024CA3; Start 2; Stop 26
tgtctgaattacggttgagcttctg

SEQ ID NO: 420090 - DNA, 25 bp, Artificial
  probe
  misc_feature (1)..(25): SEQ ID NO: 5741; WAN024CA3; Start 50; Stop 74
tgttgattagagtcgatttccctga

SEQ ID NO: 420091 - DNA, 25 bp, Artificial
  probe
  misc_feature (1)..(25): SEQ ID NO: 5741; WAN024CA3; Start 158; Stop 182
tcacttcaataaaacgaccatttcc

SEQ ID NO: 420092 - DNA, 25 bp, Artificial
  probe
  misc_feature (1)..(25): SEQ ID NO: 5741; WAN024CA3; Start 153; Stop 177
tcctatcacttcaataaaacgacca

SEQ ID NO: 420093 - DNA, 25 bp, Artificial
  probe
  misc_feature (1)..(25): SEQ ID NO: 5741; WAN024CA3; Start 151; Stop 175
gctcctatcacttcaataaaacgac

SEQ ID NO: 420094 - DNA, 25 bp, Artificial
  probe
  misc_feature (1)..(25): SEQ ID NO: 5741; WAN024CA3; Start 152; Stop 176
ctcctatcacttcaataaaacgacc

SEQ ID NO: 420095 - DNA, 25 bp, Artificial
  probe
  misc_feature (1)..(25): SEQ ID NO: 5741; WAN024CA3; Start 53; Stop 77
tgattagagtcgatttccctgaacc

SEQ ID NO: 420096 - DNA, 25 bp, Artificial
  probe
  misc_feature (1)..(25): SEQ ID NO: 5741; WAN024CA3; Start 154; Stop 178
cctatcacttcaataaaacgaccat

SEQ ID NO: 420097 - DNA, 25 bp, Artificial
  probe
  misc_feature (1)..(25): SEQ ID NO: 5741; WAN024CA3; Start 3; Stop 27
gtctgaattacggttgagcttctgg

SEQ ID NO: 420098 - DNA, 25 bp, Artificial
  probe
  misc_feature (1)..(25): SEQ ID NO: 5741; WAN024CA3; Start 161; Stop 185
cttcaataaaacgaccatttccgac

SEQ ID NO: 420099 - DNA, 25 bp, Artificial
  probe
  misc_feature (1)..(25): SEQ ID NO: 5741; WAN024CA3; Start 38; Stop 62
ttttgagaatgctgttgattagagt

SEQ ID NO: 420100 - DNA, 25 bp, Artificial
  probe
  misc_feature (1)..(25): SEQ ID NO: 5741; WAN024CA3; Start 160; Stop 184
acttcaataaaacgaccatttccga

SEQ ID NO: 420101 - DNA, 25 bp, Artificial
  probe
  misc_feature (1)..(25): SEQ ID NO: 5741; WAN024CA3; Start 159; Stop 183
cacttcaataaaacgaccatttccg

SEQ ID NO: 420102 - DNA, 25 bp, Artificial
  probe
  misc_feature (1)..(25): SEQ ID NO: 5741; WAN024CA3; Start 150; Stop 174
cgctcctatcacttcaataaaacga

SEQ ID NO: 420103 - DNA, 25 bp, Artificial
  probe
  misc_feature (1)..(25): SEQ ID NO: 5741; WAN024CA3; Start 48; Stop 72
gctgttgattagagtcgatttccct

SEQ ID NO: 420104 - DNA, 25 bp, Artificial
  probe
  misc_feature (1)..(25): SEQ ID NO: 5741; WAN024CA3; Start 162; Stop 186
ttcaataaaacgaccatttccgaca

SEQ ID NO: 420105 - DNA, 25 bp, Artificial
  probe
  misc_feature (1)..(25): SEQ ID NO: 5741; WAN024CA3; Start 157; Stop 181
atcacttcaataaaacgaccatttc

SEQ ID NO: 420106 - DNA, 25 bp, Artificial
  probe
  misc_feature (1)..(25): SEQ ID NO: 5741; WAN024CA3; Start 47; Stop 71
tgctgttgattagagtcgatttccc

SEQ ID NO: 420107 - DNA, 25 bp, Artificial
  probe
  misc_feature (1)..(25): SEQ ID NO: 5741; WAN024CA3; Start 54; Stop 78
gattagagtcgatttccctgaaccc

SEQ ID NO: 420108 - DNA, 25 bp, Artificial
  probe
  misc_feature (1)..(25): SEQ ID NO: 5741; WAN024CA3; Start 163; Stop 187
tcaataaaacgaccatttccgacac

SEQ ID NO: 420109 - DNA, 25 bp, Artificial
  probe
  misc_feature (1)..(25): SEQ ID NO: 5741; WAN024CA3; Start 155; Stop 179
ctatcacttcaataaaacgaccatt

SEQ ID NO: 420110 - DNA, 25 bp, Artificial
  probe
  misc_feature (1)..(25): SEQ ID NO: 5742; WAN024EXF; Start 186; Stop 210
gaatcagagccttggttggtctatg

SEQ ID NO: 420111 - DNA, 25 bp, Artificial
  probe
  misc_feature (1)..(25): SEQ ID NO: 5742; WAN024EXF; Start 46; Stop 70
atcaacatcatcttgaattgccttg

SEQ ID NO: 420112 - DNA, 25 bp, Artificial
  probe
  misc_feature (1)..(25): SEQ ID NO: 5742; WAN024EXF; Start 45; Stop 69
catcaacatcatcttgaattgcctt

SEQ ID NO: 420113 - DNA, 25 bp, Artificial
  probe
  misc_feature (1)..(25): SEQ ID NO: 5742; WAN024EXF; Start 41; Stop 65
aagccatcaacatcatcttgaattg

SEQ ID NO: 420114 - DNA, 25 bp, Artificial
  probe
  misc_feature (1)..(25): SEQ ID NO: 5742; WAN024EXF; Start 185; Stop 209
tgaatcagagccttggttggtctat

SEQ ID NO: 420115 - DNA, 25 bp, Artificial
  probe
  misc_feature (1)..(25): SEQ ID NO: 5742; WAN024EXF; Start 184; Stop 208
atgaatcagagccttggttggtcta

SEQ ID NO: 420116 - DNA, 25 bp, Artificial
  probe
  misc_feature (1)..(25): SEQ ID NO: 5742; WAN024EXF; Start 187; Stop 211
aatcagagccttggttggtctatgt

SEQ ID NO: 420117 - DNA, 25 bp, Artificial
  probe
  misc_feature (1)..(25): SEQ ID NO: 5742; WAN024EXF; Start 1; Stop 25
ttgtctgagttcaatggcttcatcg

SEQ ID NO: 420118 - DNA, 25 bp, Artificial
  probe
  misc_feature (1)..(25): SEQ ID NO: 5742; WAN024EXF; Start 44; Stop 68
ccatcaacatcatcttgaattgcct

SEQ ID NO: 420119 - DNA, 25 bp, Artificial
  probe
  misc_feature (1)..(25): SEQ ID NO: 5742; WAN024EXF; Start 47; Stop 71
tcaacatcatcttgaattgccttgg

SEQ ID NO: 420120 - DNA, 25 bp, Artificial
  probe
  misc_feature (1)..(25): SEQ ID NO: 5742; WAN024EXF; Start 48; Stop 72
caacatcatcttgaattgccttggc

SEQ ID NO: 420121 - DNA, 25 bp, Artificial
  probe
  misc_feature (1)..(25): SEQ ID NO: 5742; WAN024EXF; Start 165; Stop 189
tttgtcgaatagctcccagatgaat

SEQ ID NO: 420122 - DNA, 25 bp, Artificial
  probe
  misc_feature (1)..(25): SEQ ID NO: 5742; WAN024EXF; Start 42; Stop 66
agccatcaacatcatcttgaattgc

SEQ ID NO: 420123 - DNA, 25 bp, Artificial
  probe
  misc_feature (1)..(25): SEQ ID NO: 5742; WAN024EXF; Start 6; Stop 30
tgagttcaatggcttcatcgatatt

SEQ ID NO: 420124 - DNA, 25 bp, Artificial
  probe
  misc_feature (1)..(25): SEQ ID NO: 5742; WAN024EXF; Start 188; Stop 212
atcagagccttggttggtctatgtg

SEQ ID NO: 420125 - DNA, 25 bp, Artificial
  probe
  misc_feature (1)..(25): SEQ ID NO: 5742; WAN024EXF; Start 201; Stop 225
ttggtctatgtggactagctttcat

SEQ ID NO: 420126 - DNA, 25 bp, Artificial
  probe
  misc_feature (1)..(25): SEQ ID NO: 5742; WAN024EXF; Start 5; Stop 29
ctgagttcaatggcttcatcgatat

SEQ ID NO: 420127 - DNA, 25 bp, Artificial
  probe
  misc_feature (1)..(25): SEQ ID NO: 5742; WAN024EXF; Start 166; Stop 190
ttgtcgaatagctcccagatgaatc

SEQ ID NO: 420128 - DNA, 25 bp, Artificial
  probe
  misc_feature (1)..(25): SEQ ID NO: 5742; WAN024EXF; Start 40; Stop 64
aaagccatcaacatcatcttgaatt

SEQ ID NO: 420129 - DNA, 25 bp, Artificial
  probe
  misc_feature (1)..(25): SEQ ID NO: 5742; WAN024EXF; Start 197; Stop 221
ttggttggtctatgtggactagctt

SEQ ID NO: 420130 - DNA, 25 bp, Artificial
  probe
  misc_feature (1)..(25): SEQ ID NO: 5742; WAN024EXF; Start 182; Stop 206
agatgaatcagagccttggttggtc

SEQ ID NO: 420131 - DNA, 25 bp, Artificial
  probe
  misc_feature (1)..(25): SEQ ID NO: 5742; WAN024EXF; Start 202; Stop 226
tggtctatgtggactagctttcatg

SEQ ID NO: 420132 - DNA, 25 bp, Artificial
  probe
  misc_feature (1)..(25): SEQ ID NO: 5742; WAN024EXF; Start 183; Stop 207
gatgaatcagagccttggttggtct

SEQ ID NO: 420133 - DNA, 25 bp, Artificial
  probe
  misc_feature (1)..(25): SEQ ID NO: 5742; WAN024EXF; Start 4; Stop 28
tctgagttcaatggcttcatcgata

SEQ ID NO: 420134 - DNA, 25 bp, Artificial
  probe
  misc_feature (1)..(25): SEQ ID NO: 5742; WAN024EXF; Start 200; Stop 224
gttggtctatgtggactagctttca

SEQ ID NO: 420135 - DNA, 25 bp, Artificial
  probe
  misc_feature (1)..(25): SEQ ID NO: 5742; WAN024EXF; Start 169; Stop 193
tcgaatagctcccagatgaatcaga

SEQ ID NO: 420136 - DNA, 25 bp, Artificial
  probe
  misc_feature (1)..(25): SEQ ID NO: 5742; WAN024EXF; Start 168; Stop 192
gtcgaatagctcccagatgaatcag

SEQ ID NO: 420137 - DNA, 25 bp, Artificial
  probe
  misc_feature (1)..(25): SEQ ID NO: 5742; WAN024EXF; Start 181; Stop 205
cagatgaatcagagccttggttggt

SEQ ID NO: 420138 - DNA, 25 bp, Artificial
  probe
  misc_feature (1)..(25): SEQ ID NO: 5742; WAN024EXF; Start 170; Stop 194
cgaatagctcccagatgaatcagag

SEQ ID NO: 420139 - DNA, 25 bp, Artificial
  probe
  misc_feature (1)..(25): SEQ ID NO: 5742; WAN024EXF; Start 43; Stop 67
gccatcaacatcatcttgaattgcc

SEQ ID NO: 420140 - DNA, 25 bp, Artificial
  probe
  misc_feature (1)..(25): SEQ ID NO: 5742; WAN024EXF; Start 196; Stop 220
cttggttggtctatgtggactagct

SEQ ID NO: 420141 - DNA, 25 bp, Artificial
  probe
  misc_feature (1)..(25): SEQ ID NO: 5742; WAN024EXF; Start 7; Stop 31
gagttcaatggcttcatcgatattg

SEQ ID NO: 420142 - DNA, 25 bp, Artificial
  probe
  misc_feature (1)..(25): SEQ ID NO: 5742; WAN024EXF; Start 205; Stop 229
tctatgtggactagctttcatgatt

SEQ ID NO: 420143 - DNA, 25 bp, Artificial
  probe
  misc_feature (1)..(25): SEQ ID NO: 5743; WAN024DCE; Start 61; Stop 85
ttctacttcttccttgctatctgtc

SEQ ID NO: 420144 - DNA, 25 bp, Artificial
  probe
  misc_feature (1)..(25): SEQ ID NO: 5743; WAN024DCE; Start 62; Stop 86
tctacttcttccttgctatctgtcg

SEQ ID NO: 420145 - DNA, 25 bp, Artificial
  probe
  misc_feature (1)..(25): SEQ ID NO: 5743; WAN024DCE; Start 1; Stop 25
ttgtctgattccttcttcatggatt

SEQ ID NO: 420146 - DNA, 25 bp, Artificial
  probe
  misc_feature (1)..(25): SEQ ID NO: 5743; WAN024DCE; Start 60; Stop 84
tttctacttcttccttgctatctgt

SEQ ID NO: 420147 - DNA, 25 bp, Artificial
  probe
  misc_feature (1)..(25): SEQ ID NO: 5743; WAN024DCE; Start 58; Stop 82
actttctacttcttccttgctatct

SEQ ID NO: 420148 - DNA, 25 bp, Artificial
  probe
  misc_feature (1)..(25): SEQ ID NO: 5743; WAN024DCE; Start 59; Stop 83
ctttctacttcttccttgctatctg

SEQ ID NO: 420149 - DNA, 25 bp, Artificial
  probe
  misc_feature (1)..(25): SEQ ID NO: 5743; WAN024DCE; Start 57; Stop 81
gactttctacttcttccttgctatc

SEQ ID NO: 420150 - DNA, 25 bp, Artificial
  probe
  misc_feature (1)..(25): SEQ ID NO: 5743; WAN024DCE; Start 63; Stop 87
ctacttcttccttgctatctgtcgc

SEQ ID NO: 420151 - DNA, 25 bp, Artificial
  probe
  misc_feature (1)..(25): SEQ ID NO: 5743; WAN024DCE; Start 56; Stop 80
agactttctacttcttccttgctat

SEQ ID NO: 420152 - DNA, 25 bp, Artificial
  probe
  misc_feature (1)..(25): SEQ ID NO: 5743; WAN024DCE; Start 7; Stop 31
gattccttcttcatggatttgttcc

SEQ ID NO: 420153 - DNA, 25 bp, Artificial
  probe
  misc_feature (1)..(25): SEQ ID NO: 5743; WAN024DCE; Start 4; Stop 28
tctgattccttcttcatggatttgt

SEQ ID NO: 420154 - DNA, 25 bp, Artificial
  probe
  misc_feature (1)..(25): SEQ ID NO: 5743; WAN024DCE; Start 3; Stop 27
gtctgattccttcttcatggatttg

SEQ ID NO: 420155 - DNA, 25 bp, Artificial
  probe
  misc_feature (1)..(25): SEQ ID NO: 5743; WAN024DCE; Start 2; Stop 26
tgtctgattccttcttcatggattt

SEQ ID NO: 420156 - DNA, 25 bp, Artificial
  probe
  misc_feature (1)..(25): SEQ ID NO: 5743; WAN024DCE; Start 6; Stop 30
tgattccttcttcatggatttgttc

SEQ ID NO: 420157 - DNA, 25 bp, Artificial
  probe
  misc_feature (1)..(25): SEQ ID NO: 5743; WAN024DCE; Start 5; Stop 29
ctgattccttcttcatggatttgtt

SEQ ID NO: 420158 - DNA, 25 bp, Artificial
  probe
  misc_feature (1)..(25): SEQ ID NO: 5743; WAN024DCE; Start 54; Stop 78
aaagactttctacttcttccttgct

SEQ ID NO: 420159 - DNA, 25 bp, Artificial
  probe
  misc_feature (1)..(25): SEQ ID NO: 5743; WAN024DCE; Start 55; Stop 79
aagactttctacttcttccttgcta

SEQ ID NO: 420160 - DNA, 25 bp, Artificial
  probe
  misc_feature (1)..(25): SEQ ID NO: 5743; WAN024DCE; Start 64; Stop 88
tacttcttccttgctatctgtcgca

SEQ ID NO: 420161 - DNA, 25 bp, Artificial
  probe
  misc_feature (1)..(25): SEQ ID NO: 5743; WAN024DCE; Start 53; Stop 77
aaaagactttctacttcttccttgc

SEQ ID NO: 420162 - DNA, 25 bp, Artificial
  probe
  misc_feature (1)..(25): SEQ ID NO: 5743; WAN024DCE; Start 52; Stop 76
caaaagactttctacttcttccttg

SEQ ID NO: 420163 - DNA, 25 bp, Artificial
  probe
  misc_feature (1)..(25): SEQ ID NO: 5743; WAN024DCE; Start 65; Stop 89
acttcttccttgctatctgtcgcag

SEQ ID NO: 420164 - DNA, 25 bp, Artificial
  probe
  misc_feature (1)..(25): SEQ ID NO: 5743; WAN024DCE; Start 51; Stop 75
tcaaaagactttctacttcttcctt

SEQ ID NO: 420165 - DNA, 25 bp, Artificial
  probe
  misc_feature (1)..(25): SEQ ID NO: 5743; WAN024DCE; Start 18; Stop 42
catggatttgttccaagagttgatt

SEQ ID NO: 420166 - DNA, 25 bp, Artificial
  probe
  misc_feature (1)..(25): SEQ ID NO: 5743; WAN024DCE; Start 12; Stop 36
cttcttcatggatttgttccaagag

SEQ ID NO: 420167 - DNA, 25 bp, Artificial
  probe
  misc_feature (1)..(25): SEQ ID NO: 5743; WAN024DCE; Start 17; Stop 41
tcatggatttgttccaagagttgat

SEQ ID NO: 420168 - DNA, 25 bp, Artificial
  probe
  misc_feature (1)..(25): SEQ ID NO: 5743; WAN024DCE; Start 15; Stop 39
cttcatggatttgttccaagagttg

SEQ ID NO: 420169 - DNA, 25 bp, Artificial
  probe
  misc_feature (1)..(25): SEQ ID NO: 5743; WAN024DCE; Start 14; Stop 38
tcttcatggatttgttccaagagtt

SEQ ID NO: 420170 - DNA, 25 bp, Artificial
  probe
  misc_feature (1)..(25): SEQ ID NO: 5743; WAN024DCE; Start 13; Stop 37
ttcttcatggatttgttccaagagt

SEQ ID NO: 420171 - DNA, 25 bp, Artificial
  probe
  misc_feature (1)..(25): SEQ ID NO: 5743; WAN024DCE; Start 8; Stop 32
attccttcttcatggatttgttcca

SEQ ID NO: 420172 - DNA, 25 bp, Artificial
  probe
  misc_feature (1)..(25): SEQ ID NO: 5743; WAN024DCE; Start 19; Stop 43
atggatttgttccaagagttgattt

SEQ ID NO: 420173 - DNA, 25 bp, Artificial
  probe
  misc_feature (1)..(25): SEQ ID NO: 5743; WAN024DCE; Start 16; Stop 40
ttcatggatttgttccaagagttga

SEQ ID NO: 420174 - DNA, 25 bp, Artificial
  probe
  misc_feature (1)..(25): SEQ ID NO: 5743; WAN024DCE; Start 9; Stop 33
ttccttcttcatggatttgttccaa

SEQ ID NO: 420175 - DNA, 25 bp, Artificial
  probe
  misc_feature (1)..(25): SEQ ID NO: 5743; WAN024DCE; Start 11; Stop 35
ccttcttcatggatttgttccaaga

SEQ ID NO: 420176 - DNA, 25 bp, Artificial
  probe
  misc_feature (1)..(25): SEQ ID NO: 5744; WAN024DT9; Start 14; Stop 38
attatactacaaaagctggcacatg

SEQ ID NO: 420177 - DNA, 25 bp, Artificial
  probe
  misc_feature (1)..(25): SEQ ID NO: 5744; WAN024DT9; Start 12; Stop 36
ctattatactacaaaagctggcaca

SEQ ID NO: 420178 - DNA, 25 bp, Artificial
  probe
  misc_feature (1)..(25): SEQ ID NO: 5744; WAN024DT9; Start 11; Stop 35
actattatactacaaaagctggcac

SEQ ID NO: 420179 - DNA, 25 bp, Artificial
  probe
  misc_feature (1)..(25): SEQ ID NO: 5744; WAN024DT9; Start 15; Stop 39
ttatactacaaaagctggcacatgg

SEQ ID NO: 420180 - DNA, 25 bp, Artificial
  probe
  misc_feature (1)..(25): SEQ ID NO: 5744; WAN024DT9; Start 13; Stop 37
tattatactacaaaagctggcacat

SEQ ID NO: 420181 - DNA, 25 bp, Artificial
  probe
  misc_feature (1)..(25): SEQ ID NO: 5744; WAN024DT9; Start 10; Stop 34
tactattatactacaaaagctggca

SEQ ID NO: 420182 - DNA, 25 bp, Artificial
  probe
  misc_feature (1)..(25): SEQ ID NO: 5744; WAN024DT9; Start 16; Stop 40
tatactacaaaagctggcacatggg

SEQ ID NO: 420183 - DNA, 25 bp, Artificial
  probe
  misc_feature (1)..(25): SEQ ID NO: 5744; WAN024DT9; Start 2; Stop 26
tgtctgcttactattatactacaaa

SEQ ID NO: 420184 - DNA, 25 bp, Artificial
  probe
  misc_feature (1)..(25): SEQ ID NO: 5744; WAN024DT9; Start 9; Stop 33
ttactattatactacaaaagctggc

SEQ ID NO: 420185 - DNA, 25 bp, Artificial
  probe
  misc_feature (1)..(25): SEQ ID NO: 5744; WAN024DT9; Start 1; Stop 25
ttgtctgcttactattatactacaa

SEQ ID NO: 420186 - DNA, 25 bp, Artificial
  probe
  misc_feature (1)..(25): SEQ ID NO: 5744; WAN024DT9; Start 21; Stop 45
tacaaaagctggcacatgggaattt

SEQ ID NO: 420187 - DNA, 25 bp, Artificial
  probe
  misc_feature (1)..(25): SEQ ID NO: 5744; WAN024DT9; Start 26; Stop 50
aagctggcacatgggaattttcttt

SEQ ID NO: 420188 - DNA, 25 bp, Artificial
  probe
  misc_feature (1)..(25): SEQ ID NO: 5744; WAN024DT9; Start 25; Stop 49
aaagctggcacatgggaattttctt

SEQ ID NO: 420189 - DNA, 25 bp, Artificial
  probe
  misc_feature (1)..(25): SEQ ID NO: 5744; WAN024DT9; Start 20; Stop 44
ctacaaaagctggcacatgggaatt

SEQ ID NO: 420190 - DNA, 25 bp, Artificial
  probe
  misc_feature (1)..(25): SEQ ID NO: 5744; WAN024DT9; Start 17; Stop 41
atactacaaaagctggcacatggga

SEQ ID NO: 420191 - DNA, 25 bp, Artificial
  probe
  misc_feature (1)..(25): SEQ ID NO: 5744; WAN024DT9; Start 24; Stop 48
aaaagctggcacatgggaattttct

SEQ ID NO: 420192 - DNA, 25 bp, Artificial
  probe
  misc_feature (1)..(25): SEQ ID NO: 5744; WAN024DT9; Start 23; Stop 47
caaaagctggcacatgggaattttc

SEQ ID NO: 420193 - DNA, 25 bp, Artificial
  probe
  misc_feature (1)..(25): SEQ ID NO: 5744; WAN024DT9; Start 27; Stop 51
agctggcacatgggaattttctttg

SEQ ID NO: 420194 - DNA, 25 bp, Artificial
  probe
  misc_feature (1)..(25): SEQ ID NO: 5744; WAN024DT9; Start 18; Stop 42
tactacaaaagctggcacatgggaa

SEQ ID NO: 420195 - DNA, 25 bp, Artificial
  probe
  misc_feature (1)..(25): SEQ ID NO: 5744; WAN024DT9; Start 22; Stop 46
acaaaagctggcacatgggaatttt

SEQ ID NO: 420196 - DNA, 25 bp, Artificial
  probe
  misc_feature (1)..(25): SEQ ID NO: 5744; WAN024DT9; Start 19; Stop 43
actacaaaagctggcacatgggaat

SEQ ID NO: 420197 - DNA, 25 bp, Artificial
  probe
  misc_feature (1)..(25): SEQ ID NO: 5744; WAN024DT9; Start 8; Stop 32
cttactattatactacaaaagctgg

SEQ ID NO: 420198 - DNA, 25 bp, Artificial
  probe
  misc_feature (1)..(25): SEQ ID NO: 5744; WAN024DT9; Start 6; Stop 30
tgcttactattatactacaaaagct

SEQ ID NO: 420199 - DNA, 25 bp, Artificial
  probe
  misc_feature (1)..(25): SEQ ID NO: 5744; WAN024DT9; Start 5; Stop 29
ctgcttactattatactacaaaagc

SEQ ID NO: 420200 - DNA, 25 bp, Artificial
  probe
  misc_feature (1)..(25): SEQ ID NO: 5744; WAN024DT9; Start 7; Stop 31
gcttactattatactacaaaagctg

SEQ ID NO: 420201 - DNA, 25 bp, Artificial
  probe
  misc_feature (1)..(25): SEQ ID NO: 5745; WAN024DA4; Start 145; Stop 169
attgtcattccacctgcttcctata

SEQ ID NO: 420202 - DNA, 25 bp, Artificial
  probe
  misc_feature (1)..(25): SEQ ID NO: 5745; WAN024DA4; Start 527; Stop 551
tggtagactatacattagcactagc

SEQ ID NO: 420203 - DNA, 25 bp, Artificial
  probe
  misc_feature (1)..(25): SEQ ID NO: 5745; WAN024DA4; Start 148; Stop 172
gtcattccacctgcttcctatactt

SEQ ID NO: 420204 - DNA, 25 bp, Artificial
  probe
  misc_feature (1)..(25): SEQ ID NO: 5745; WAN024DA4; Start 146; Stop 170
ttgtcattccacctgcttcctatac

SEQ ID NO: 420205 - DNA, 25 bp, Artificial
  probe
  misc_feature (1)..(25): SEQ ID NO: 5745; WAN024DA4; Start 144; Stop 168
gattgtcattccacctgcttcctat

SEQ ID NO: 420206 - DNA, 25 bp, Artificial
  probe
  misc_feature (1)..(25): SEQ ID NO: 5745; WAN024DA4; Start 147; Stop 171
tgtcattccacctgcttcctatact

SEQ ID NO: 420207 - DNA, 25 bp, Artificial
  probe
  misc_feature (1)..(25): SEQ ID NO: 5745; WAN024DA4; Start 71; Stop 95
agacacaatttatgacaatgacagc

SEQ ID NO: 420208 - DNA, 25 bp, Artificial
  probe
  misc_feature (1)..(25): SEQ ID NO: 5745; WAN024DA4; Start 76; Stop 100
caatttatgacaatgacagcccttt

SEQ ID NO: 420209 - DNA, 25 bp, Artificial
  probe
  misc_feature (1)..(25): SEQ ID NO: 5745; WAN024DA4; Start 139; Stop 163
ttcaagattgtcattccacctgctt

SEQ ID NO: 420210 - DNA, 25 bp, Artificial
  probe
  misc_feature (1)..(25): SEQ ID NO: 5745; WAN024DA4; Start 131; Stop 155
ttatgcctttcaagattgtcattcc

SEQ ID NO: 420211 - DNA, 25 bp, Artificial
  probe
  misc_feature (1)..(25): SEQ ID NO: 5745; WAN024DA4; Start 129; Stop 153
tgttatgcctttcaagattgtcatt

SEQ ID NO: 420212 - DNA, 25 bp, Artificial
  probe
  misc_feature (1)..(25): SEQ ID NO: 5745; WAN024DA4; Start 132; Stop 156
tatgcctttcaagattgtcattcca

SEQ ID NO: 420213 - DNA, 25 bp, Artificial
  probe
  misc_feature (1)..(25): SEQ ID NO: 5745; WAN024DA4; Start 72; Stop 96
gacacaatttatgacaatgacagcc

SEQ ID NO: 420214 - DNA, 25 bp, Artificial
  probe
  misc_feature (1)..(25): SEQ ID NO: 5745; WAN024DA4; Start 44; Stop 68
aggagattcttgtgaatacacggaa

SEQ ID NO: 420215 - DNA, 25 bp, Artificial
  probe
  misc_feature (1)..(25): SEQ ID NO: 5745; WAN024DA4; Start 43; Stop 67
aaggagattcttgtgaatacacgga

SEQ ID NO: 420216 - DNA, 25 bp, Artificial
  probe
  misc_feature (1)..(25): SEQ ID NO: 5745; WAN024DA4; Start 150; Stop 174
cattccacctgcttcctatactttg

SEQ ID NO: 420217 - DNA, 25 bp, Artificial
  probe
  misc_feature (1)..(25): SEQ ID NO: 5745; WAN024DA4; Start 149; Stop 173
tcattccacctgcttcctatacttt

SEQ ID NO: 420218 - DNA, 25 bp, Artificial
  probe
  misc_feature (1)..(25): SEQ ID NO: 5745; WAN024DA4; Start 130; Stop 154
gttatgcctttcaagattgtcattc

SEQ ID NO: 420219 - DNA, 25 bp, Artificial
  probe
  misc_feature (1)..(25): SEQ ID NO: 5745; WAN024DA4; Start 128; Stop 152
ttgttatgcctttcaagattgtcat

SEQ ID NO: 420220 - DNA, 25 bp, Artificial
  probe
  misc_feature (1)..(25): SEQ ID NO: 5745; WAN024DA4; Start 127; Stop 151
attgttatgcctttcaagattgtca

SEQ ID NO: 420221 - DNA, 25 bp, Artificial
  probe
  misc_feature (1)..(25): SEQ ID NO: 5745; WAN024DA4; Start 75; Stop 99
acaatttatgacaatgacagccctt

SEQ ID NO: 420222 - DNA, 25 bp, Artificial
  probe
  misc_feature (1)..(25): SEQ ID NO: 5745; WAN024DA4; Start 526; Stop 550
atggtagactatacattagcactag

SEQ ID NO: 420223 - DNA, 25 bp, Artificial
  probe
  misc_feature (1)..(25): SEQ ID NO: 5745; WAN024DA4; Start 140; Stop 164
tcaagattgtcattccacctgcttc

SEQ ID NO: 420224 - DNA, 25 bp, Artificial
  probe
  misc_feature (1)..(25): SEQ ID NO: 5745; WAN024DA4; Start 143; Stop 167
agattgtcattccacctgcttccta

SEQ ID NO: 420225 - DNA, 25 bp, Artificial
  probe
  misc_feature (1)..(25): SEQ ID NO: 5745; WAN024DA4; Start 74; Stop 98
cacaatttatgacaatgacagccct

SEQ ID NO: 420226 - DNA, 25 bp, Artificial
  probe
  misc_feature (1)..(25): SEQ ID NO: 5745; WAN024DA4; Start 126; Stop 150
aattgttatgcctttcaagattgtc

SEQ ID NO: 420227 - DNA, 25 bp, Artificial
  probe
  misc_feature (1)..(25): SEQ ID NO: 5745; WAN024DA4; Start 70; Stop 94
aagacacaatttatgacaatgacag

SEQ ID NO: 420228 - DNA, 25 bp, Artificial
  probe
  misc_feature (1)..(25): SEQ ID NO: 5745; WAN024DA4; Start 136; Stop 160
cctttcaagattgtcattccacctg

SEQ ID NO: 420229 - DNA, 25 bp, Artificial
  probe
  misc_feature (1)..(25): SEQ ID NO: 5745; WAN024DA4; Start 524; Stop 548
gtatggtagactatacattagcact

SEQ ID NO: 420230 - DNA, 25 bp, Artificial
  probe
  misc_feature (1)..(25): SEQ ID NO: 5745; WAN024DA4; Start 523; Stop 547
agtatggtagactatacattagcac

SEQ ID NO: 420231 - DNA, 25 bp, Artificial
  probe
  misc_feature (1)..(25): SEQ ID NO: 5745; WAN024DA4; Start 73; Stop 97
acacaatttatgacaatgacagccc

SEQ ID NO: 420232 - DNA, 25 bp, Artificial
  probe
  misc_feature (1)..(25): SEQ ID NO: 5745; WAN024DA4; Start 133; Stop 157
atgcctttcaagattgtcattccac

SEQ ID NO: 420233 - DNA, 25 bp, Artificial
  probe
  misc_feature (1)..(25): SEQ ID NO: 5745; WAN024DA4; Start 69; Stop 93
aaagacacaatttatgacaatgaca

SEQ ID NO: 420234 - DNA, 25 bp, Artificial
  probe
  misc_feature (1)..(25): SEQ ID NO: 5746; WAN024CUE; Start 256; Stop 280
gctacttatatcggtgaactctcta

SEQ ID NO: 420235 - DNA, 25 bp, Artificial
  probe
  misc_feature (1)..(25): SEQ ID NO: 5746; WAN024CUE; Start 261; Stop 285
ttatatcggtgaactctctagcaac

SEQ ID NO: 420236 - DNA, 25 bp, Artificial
  probe
  misc_feature (1)..(25): SEQ ID NO: 5746; WAN024CUE; Start 268; Stop 292
ggtgaactctctagcaactaactaa

SEQ ID NO: 420237 - DNA, 25 bp, Artificial
  probe
  misc_feature (1)..(25): SEQ ID NO: 5746; WAN024CUE; Start 260; Stop 284
cttatatcggtgaactctctagcaa

SEQ ID NO: 420238 - DNA, 25 bp, Artificial
  probe
  misc_feature (1)..(25): SEQ ID NO: 5746; WAN024CUE; Start 263; Stop 287
atatcggtgaactctctagcaacta

SEQ ID NO: 420239 - DNA, 25 bp, Artificial
  probe
  misc_feature (1)..(25): SEQ ID NO: 5746; WAN024CUE; Start 262; Stop 286
tatatcggtgaactctctagcaact

SEQ ID NO: 420240 - DNA, 25 bp, Artificial
  probe
  misc_feature (1)..(25): SEQ ID NO: 5746; WAN024CUE; Start 259; Stop 283
acttatatcggtgaactctctagca

SEQ ID NO: 420241 - DNA, 25 bp, Artificial
  probe
  misc_feature (1)..(25): SEQ ID NO: 5746; WAN024CUE; Start 264; Stop 288
tatcggtgaactctctagcaactaa

SEQ ID NO: 420242 - DNA, 25 bp, Artificial
  probe
  misc_feature (1)..(25): SEQ ID NO: 5746; WAN024CUE; Start 258; Stop 282
tacttatatcggtgaactctctagc

SEQ ID NO: 420243 - DNA, 25 bp, Artificial
  probe
  misc_feature (1)..(25): SEQ ID NO: 5746; WAN024CUE; Start 89; Stop 113
aattgattgctgagaaggttagtaa

SEQ ID NO: 420244 - DNA, 25 bp, Artificial
  probe
  misc_feature (1)..(25): SEQ ID NO: 5746; WAN024CUE; Start 267; Stop 291
cggtgaactctctagcaactaacta

SEQ ID NO: 420245 - DNA, 25 bp, Artificial
  probe
  misc_feature (1)..(25): SEQ ID NO: 5746; WAN024CUE; Start 269; Stop 293
gtgaactctctagcaactaactaat

SEQ ID NO: 420246 - DNA, 25 bp, Artificial
  probe
  misc_feature (1)..(25): SEQ ID NO: 5746; WAN024CUE; Start 265; Stop 289
atcggtgaactctctagcaactaac

SEQ ID NO: 420247 - DNA, 25 bp, Artificial
  probe
  misc_feature (1)..(25): SEQ ID NO: 5746; WAN024CUE; Start 255; Stop 279
agctacttatatcggtgaactctct

SEQ ID NO: 420248 - DNA, 25 bp, Artificial
  probe
  misc_feature (1)..(25): SEQ ID NO: 5746; WAN024CUE; Start 254; Stop 278
aagctacttatatcggtgaactctc

SEQ ID NO: 420249 - DNA, 25 bp, Artificial
  probe
  misc_feature (1)..(25): SEQ ID NO: 5746; WAN024CUE; Start 257; Stop 281
ctacttatatcggtgaactctctag

SEQ ID NO: 420250 - DNA, 25 bp, Artificial
  probe
  misc_feature (1)..(25): SEQ ID NO: 5746; WAN024CUE; Start 12; Stop 36
tctactgaccttgttgtttatccca

SEQ ID NO: 420251 - DNA, 25 bp, Artificial
  probe
  misc_feature (1)..(25): SEQ ID NO: 5746; WAN024CUE; Start 266; Stop 290
tcggtgaactctctagcaactaact

SEQ ID NO: 420252 - DNA, 25 bp, Artificial
  probe
  misc_feature (1)..(25): SEQ ID NO: 5746; WAN024CUE; Start 90; Stop 114
attgattgctgagaaggttagtaaa

SEQ ID NO: 420253 - DNA, 25 bp, Artificial
  probe
  misc_feature (1)..(25): SEQ ID NO: 5746; WAN024CUE; Start 13; Stop 37
ctactgaccttgttgtttatcccag

SEQ ID NO: 420254 - DNA, 25 bp, Artificial
  probe
  misc_feature (1)..(25): SEQ ID NO: 5746; WAN024CUE; Start 253; Stop 277
aaagctacttatatcggtgaactct

SEQ ID NO: 420255 - DNA, 25 bp, Artificial
  probe
  misc_feature (1)..(25): SEQ ID NO: 5746; WAN024CUE; Start 88; Stop 112
caattgattgctgagaaggttagta

SEQ ID NO: 420256 - DNA, 25 bp, Artificial
  probe
  misc_feature (1)..(25): SEQ ID NO: 5746; WAN024CUE; Start 29; Stop 53
ttatcccagtcatggtttctagttc

SEQ ID NO: 420257 - DNA, 25 bp, Artificial
  probe
  misc_feature (1)..(25): SEQ ID NO: 5746; WAN024CUE; Start 27; Stop 51
gtttatcccagtcatggtttctagt

SEQ ID NO: 420258 - DNA, 25 bp, Artificial
  probe
  misc_feature (1)..(25): SEQ ID NO: 5746; WAN024CUE; Start 26; Stop 50
tgtttatcccagtcatggtttctag

SEQ ID NO: 420259 - DNA, 25 bp, Artificial
  probe
  misc_feature (1)..(25): SEQ ID NO: 5746; WAN024CUE; Start 25; Stop 49
ttgtttatcccagtcatggtttcta

SEQ ID NO: 420260 - DNA, 25 bp, Artificial
  probe
  misc_feature (1)..(25): SEQ ID NO: 5746; WAN024CUE; Start 28; Stop 52
tttatcccagtcatggtttctagtt

SEQ ID NO: 420261 - DNA, 25 bp, Artificial
  probe
  misc_feature (1)..(25): SEQ ID NO: 5746; WAN024CUE; Start 220; Stop 244
ctccaggagctgataactgtgaatg

SEQ ID NO: 420262 - DNA, 25 bp, Artificial
  probe
  misc_feature (1)..(25): SEQ ID NO: 5746; WAN024CUE; Start 22; Stop 46
ttgttgtttatcccagtcatggttt

SEQ ID NO: 420263 - DNA, 25 bp, Artificial
  probe
  misc_feature (1)..(25): SEQ ID NO: 5746; WAN024CUE; Start 18; Stop 42
gaccttgttgtttatcccagtcatg

SEQ ID NO: 420264 - DNA, 25 bp, Artificial
  probe
  misc_feature (1)..(25): SEQ ID NO: 5746; WAN024CUE; Start 60; Stop 84
agagtttcaaagtggatggcaagag

SEQ ID NO: 420265 - DNA, 25 bp, Artificial
  probe
  misc_feature (1)..(25): SEQ ID NO: 5746; WAN024CUE; Start 24; Stop 48
gttgtttatcccagtcatggtttct

SEQ ID NO: 420266 - DNA, 25 bp, Artificial
  probe
  misc_feature (1)..(25): SEQ ID NO: 5746; WAN024CUE; Start 252; Stop 276
taaagctacttatatcggtgaactc

SEQ ID NO: 420267 - DNA, 25 bp, Artificial
  probe
  misc_feature (1)..(25): SEQ ID NO: 5747; WAN024F8R; Start 191; Stop 215
cagacatatccattcctcccatatt

SEQ ID NO: 420268 - DNA, 25 bp, Artificial
  probe
  misc_feature (1)..(25): SEQ ID NO: 5747; WAN024F8R; Start 106; Stop 130
aacatctggctcatatctggcattc

SEQ ID NO: 420269 - DNA, 25 bp, Artificial
  probe
  misc_feature (1)..(25): SEQ ID NO: 5747; WAN024F8R; Start 13; Stop 37
cgtttcttcttcgctttcttcattt

SEQ ID NO: 420270 - DNA, 25 bp, Artificial
  probe
  misc_feature (1)..(25): SEQ ID NO: 5747; WAN024F8R; Start 311; Stop 335
cctggttaaagtccttgatgaattt

SEQ ID NO: 420271 - DNA, 25 bp, Artificial
  probe
  misc_feature (1)..(25): SEQ ID NO: 5747; WAN024F8R; Start 193; Stop 217
gacatatccattcctcccatatttg

SEQ ID NO: 420272 - DNA, 25 bp, Artificial
  probe
  misc_feature (1)..(25): SEQ ID NO: 5747; WAN024F8R; Start 192; Stop 216
agacatatccattcctcccatattt

SEQ ID NO: 420273 - DNA, 25 bp, Artificial
  probe
  misc_feature (1)..(25): SEQ ID NO: 5747; WAN024F8R; Start 306; Stop 330
tttagcctggttaaagtccttgatg

SEQ ID NO: 420274 - DNA, 25 bp, Artificial
  probe
  misc_feature (1)..(25): SEQ ID NO: 5747; WAN024F8R; Start 305; Stop 329
gtttagcctggttaaagtccttgat

SEQ ID NO: 420275 - DNA, 25 bp, Artificial
  probe
  misc_feature (1)..(25): SEQ ID NO: 5747; WAN024F8R; Start 308; Stop 332
tagcctggttaaagtccttgatgaa

SEQ ID NO: 420276 - DNA, 25 bp, Artificial
  probe
  misc_feature (1)..(25): SEQ ID NO: 5747; WAN024F8R; Start 307; Stop 331
ttagcctggttaaagtccttgatga

SEQ ID NO: 420277 - DNA, 25 bp, Artificial
  probe
  misc_feature (1)..(25): SEQ ID NO: 5747; WAN024F8R; Start 310; Stop 334
gcctggttaaagtccttgatgaatt

SEQ ID NO: 420278 - DNA, 25 bp, Artificial
  probe
  misc_feature (1)..(25): SEQ ID NO: 5747; WAN024F8R; Start 190; Stop 214
gcagacatatccattcctcccatat

SEQ ID NO: 420279 - DNA, 25 bp, Artificial
  probe
  misc_feature (1)..(25): SEQ ID NO: 5747; WAN024F8R; Start 1; Stop 25
ttgtcttacttgcgtttcttcttcg

SEQ ID NO: 420280 - DNA, 25 bp, Artificial
  probe
  misc_feature (1)..(25): SEQ ID NO: 5747; WAN024F8R; Start 309; Stop 333
agcctggttaaagtccttgatgaat

SEQ ID NO: 420281 - DNA, 25 bp, Artificial
  probe
  misc_feature (1)..(25): SEQ ID NO: 5747; WAN024F8R; Start 303; Stop 327
ctgtttagcctggttaaagtccttg

SEQ ID NO: 420282 - DNA, 25 bp, Artificial
  probe
  misc_feature (1)..(25): SEQ ID NO: 5747; WAN024F8R; Start 304; Stop 328
tgtttagcctggttaaagtccttga

SEQ ID NO: 420283 - DNA, 25 bp, Artificial
  probe
  misc_feature (1)..(25): SEQ ID NO: 5747; WAN024F8R; Start 321; Stop 345
gtccttgatgaatttattgacttcg

SEQ ID NO: 420284 - DNA, 25 bp, Artificial
  probe
  misc_feature (1)..(25): SEQ ID NO: 5747; WAN024F8R; Start 105; Stop 129
aaacatctggctcatatctggcatt

SEQ ID NO: 420285 - DNA, 25 bp, Artificial
  probe
  misc_feature (1)..(25): SEQ ID NO: 5747; WAN024F8R; Start 194; Stop 218
acatatccattcctcccatatttgg

SEQ ID NO: 420286 - DNA, 25 bp, Artificial
  probe
  misc_feature (1)..(25): SEQ ID NO: 5747; WAN024F8R; Start 351; Stop 375
tgtatttccagaaccagcagcaata

SEQ ID NO: 420287 - DNA, 25 bp, Artificial
  probe
  misc_feature (1)..(25): SEQ ID NO: 5747; WAN024F8R; Start 201; Stop 225
cattcctcccatatttggcatattt

SEQ ID NO: 420288 - DNA, 25 bp, Artificial
  probe
  misc_feature (1)..(25): SEQ ID NO: 5747; WAN024F8R; Start 329; Stop 353
tgaatttattgacttcgacgaatgt

SEQ ID NO: 420289 - DNA, 25 bp, Artificial
  probe
  misc_feature (1)..(25): SEQ ID NO: 5747; WAN024F8R; Start 335; Stop 359
tattgacttcgacgaatgtatttcc

SEQ ID NO: 420290 - DNA, 25 bp, Artificial
  probe
  misc_feature (1)..(25): SEQ ID NO: 5747; WAN024F8R; Start 336; Stop 360
attgacttcgacgaatgtatttcca

SEQ ID NO: 420291 - DNA, 25 bp, Artificial
  probe
  misc_feature (1)..(25): SEQ ID NO: 5747; WAN024F8R; Start 200; Stop 224
ccattcctcccatatttggcatatt

SEQ ID NO: 420292 - DNA, 25 bp, Artificial
  probe
  misc_feature (1)..(25): SEQ ID NO: 5747; WAN024F8R; Start 326; Stop 350
tgatgaatttattgacttcgacgaa

SEQ ID NO: 420293 - DNA, 25 bp, Artificial
  probe
  misc_feature (1)..(25): SEQ ID NO: 5747; WAN024F8R; Start 325; Stop 349
ttgatgaatttattgacttcgacga

SEQ ID NO: 420294 - DNA, 25 bp, Artificial
  probe
  misc_feature (1)..(25): SEQ ID NO: 5747; WAN024F8R; Start 324; Stop 348
cttgatgaatttattgacttcgacg

SEQ ID NO: 420295 - DNA, 25 bp, Artificial
  probe
  misc_feature (1)..(25): SEQ ID NO: 5747; WAN024F8R; Start 339; Stop 363
gacttcgacgaatgtatttccagaa

SEQ ID NO: 420296 - DNA, 25 bp, Artificial
  probe
  misc_feature (1)..(25): SEQ ID NO: 5747; WAN024F8R; Start 195; Stop 219
catatccattcctcccatatttggc

SEQ ID NO: 420297 - DNA, 25 bp, Artificial
  probe
  misc_feature (1)..(25): SEQ ID NO: 5747; WAN024F8R; Start 340; Stop 364
acttcgacgaatgtatttccagaac

SEQ ID NO: 420298 - DNA, 25 bp, Artificial
  probe
  misc_feature (1)..(25): SEQ ID NO: 5747; WAN024F8R; Start 337; Stop 361
ttgacttcgacgaatgtatttccag

SEQ ID NO: 420299 - DNA, 25 bp, Artificial
  probe
  misc_feature (1)..(25): SEQ ID NO: 5747; WAN024F8R; Start 323; Stop 347
ccttgatgaatttattgacttcgac

SEQ ID NO: 420300 - DNA, 25 bp, Artificial
  probe
  misc_feature (1)..(25): SEQ ID NO: 5748; WAN024GHJ; Start 623; Stop 647
aatctcttcttgaattgacagtagc

SEQ ID NO: 420301 - DNA, 25 bp, Artificial
  probe
  misc_feature (1)..(25): SEQ ID NO: 5748; WAN024GHJ; Start 1813; Stop 1837
aagattaagattgtcatcggtaagg

SEQ ID NO: 420302 - DNA, 25 bp, Artificial
  probe
  misc_feature (1)..(25): SEQ ID NO: 5748; WAN024GHJ; Start 1920; Stop 1944
tagtgaccaagatgctattaaccgt

SEQ ID NO: 420303 - DNA, 25 bp, Artificial
  probe
  misc_feature (1)..(25): SEQ ID NO: 5748; WAN024GHJ; Start 1919; Stop 1943
ctagtgaccaagatgctattaaccg

SEQ ID NO: 420304 - DNA, 25 bp, Artificial
  probe
  misc_feature (1)..(25): SEQ ID NO: 5748; WAN024GHJ; Start 1918; Stop 1942
tctagtgaccaagatgctattaacc

SEQ ID NO: 420305 - DNA, 25 bp, Artificial
  probe
  misc_feature (1)..(25): SEQ ID NO: 5748; WAN024GHJ; Start 1913; Stop 1937
tctactctagtgaccaagatgctat

SEQ ID NO: 420306 - DNA, 25 bp, Artificial
  probe
  misc_feature (1)..(25): SEQ ID NO: 5748; WAN024GHJ; Start 435; Stop 459
tgaagtccaagtcatcaatacagtg

SEQ ID NO: 420307 - DNA, 25 bp, Artificial
  probe
  misc_feature (1)..(25): SEQ ID NO: 5748; WAN024GHJ; Start 1914; Stop 1938
ctactctagtgaccaagatgctatt

SEQ ID NO: 420308 - DNA, 25 bp, Artificial
  probe
  misc_feature (1)..(25): SEQ ID NO: 5748; WAN024GHJ; Start 1723; Stop 1747
cttgatgtcattgaagcaaccattc

SEQ ID NO: 420309 - DNA, 25 bp, Artificial
  probe
  misc_feature (1)..(25): SEQ ID NO: 5748; WAN024GHJ; Start 1916; Stop 1940
actctagtgaccaagatgctattaa

SEQ ID NO: 420310 - DNA, 25 bp, Artificial
  probe
  misc_feature (1)..(25): SEQ ID NO: 5748; WAN024GHJ; Start 436; Stop 460
gaagtccaagtcatcaatacagtgc

SEQ ID NO: 420311 - DNA, 25 bp, Artificial
  probe
  misc_feature (1)..(25): SEQ ID NO: 5748; WAN024GHJ; Start 1870; Stop 1894
acaggtgttaagattgatatagacg

SEQ ID NO: 420312 - DNA, 25 bp, Artificial
  probe
  misc_feature (1)..(25): SEQ ID NO: 5748; WAN024GHJ; Start 1917; Stop 1941
ctctagtgaccaagatgctattaac

SEQ ID NO: 420313 - DNA, 25 bp, Artificial
  probe
  misc_feature (1)..(25): SEQ ID NO: 5748; WAN024GHJ; Start 1871; Stop 1895
caggtgttaagattgatatagacga

SEQ ID NO: 420314 - DNA, 25 bp, Artificial
  probe
  misc_feature (1)..(25): SEQ ID NO: 5748; WAN024GHJ; Start 437; Stop 461
aagtccaagtcatcaatacagtgct

SEQ ID NO: 420315 - DNA, 25 bp, Artificial
  probe
  misc_feature (1)..(25): SEQ ID NO: 5748; WAN024GHJ; Start 1905; Stop 1929
tgtgtctatctactctagtgaccaa

SEQ ID NO: 420316 - DNA, 25 bp, Artificial
  probe
  misc_feature (1)..(25): SEQ ID NO: 5748; WAN024GHJ; Start 1904; Stop 1928
atgtgtctatctactctagtgacca

SEQ ID NO: 420317 - DNA, 25 bp, Artificial
  probe
  misc_feature (1)..(25): SEQ ID NO: 5748; WAN024GHJ; Start 1906; Stop 1930
gtgtctatctactctagtgaccaag

SEQ ID NO: 420318 - DNA, 25 bp, Artificial
  probe
  misc_feature (1)..(25): SEQ ID NO: 5748; WAN024GHJ; Start 1907; Stop 1931
tgtctatctactctagtgaccaaga

SEQ ID NO: 420319 - DNA, 25 bp, Artificial
  probe
  misc_feature (1)..(25): SEQ ID NO: 5748; WAN024GHJ; Start 1915; Stop 1939
tactctagtgaccaagatgctatta

SEQ ID NO: 420320 - DNA, 25 bp, Artificial
  probe
  misc_feature (1)..(25): SEQ ID NO: 5748; WAN024GHJ; Start 1732; Stop 1756
attgaagcaaccattccagaagttc

SEQ ID NO: 420321 - DNA, 25 bp, Artificial
  probe
  misc_feature (1)..(25): SEQ ID NO: 5748; WAN024GHJ; Start 438; Stop 462
agtccaagtcatcaatacagtgctt

SEQ ID NO: 420322 - DNA, 25 bp, Artificial
  probe
  misc_feature (1)..(25): SEQ ID NO: 5748; WAN024GHJ; Start 1719; Stop 1743
aatccttgatgtcattgaagcaacc

SEQ ID NO: 420323 - DNA, 25 bp, Artificial
  probe
  misc_feature (1)..(25): SEQ ID NO: 5748; WAN024GHJ; Start 2130; Stop 2154
ggatgaagttgatgttaaggttatc

SEQ ID NO: 420324 - DNA, 25 bp, Artificial
  probe
  misc_feature (1)..(25): SEQ ID NO: 5748; WAN024GHJ; Start 624; Stop 648
atctcttcttgaattgacagtagct

SEQ ID NO: 420325 - DNA, 25 bp, Artificial
  probe
  misc_feature (1)..(25): SEQ ID NO: 5748; WAN024GHJ; Start 1812; Stop 1836
caagattaagattgtcatcggtaag

SEQ ID NO: 420326 - DNA, 25 bp, Artificial
  probe
  misc_feature (1)..(25): SEQ ID NO: 5748; WAN024GHJ; Start 1903; Stop 1927
aatgtgtctatctactctagtgacc

SEQ ID NO: 420327 - DNA, 25 bp, Artificial
  probe
  misc_feature (1)..(25): SEQ ID NO: 5748; WAN024GHJ; Start 1731; Stop 1755
cattgaagcaaccattccagaagtt

SEQ ID NO: 420328 - DNA, 25 bp, Artificial
  probe
  misc_feature (1)..(25): SEQ ID NO: 5748; WAN024GHJ; Start 1722; Stop 1746
ccttgatgtcattgaagcaaccatt

SEQ ID NO: 420329 - DNA, 25 bp, Artificial
  probe
  misc_feature (1)..(25): SEQ ID NO: 5748; WAN024GHJ; Start 1724; Stop 1748
ttgatgtcattgaagcaaccattcc

SEQ ID NO: 420330 - DNA, 25 bp, Artificial
  probe
  misc_feature (1)..(25): SEQ ID NO: 5748; WAN024GHJ; Start 1879; Stop 1903
aagattgatatagacgaagaaggaa

SEQ ID NO: 420331 - DNA, 25 bp, Artificial
  probe
  misc_feature (1)..(25): SEQ ID NO: 5748; WAN024GHJ; Start 1872; Stop 1896
aggtgttaagattgatatagacgaa

SEQ ID NO: 420332 - DNA, 25 bp, Artificial
  probe
  misc_feature (1)..(25): SEQ ID NO: 5748; WAN024GHJ; Start 602; Stop 626
caagtcaagaacaagcagagcaatc

SEQ ID NO: 420333 - DNA, 25 bp, Artificial
  probe
  misc_feature (1)..(25): SEQ ID NO: 5749; WAN024DOJ; Start 30; Stop 54
acaagtaaagagtcaagacaaggat

SEQ ID NO: 420334 - DNA, 25 bp, Artificial
  probe
  misc_feature (1)..(25): SEQ ID NO: 5749; WAN024DOJ; Start 29; Stop 53
aacaagtaaagagtcaagacaagga

SEQ ID NO: 420335 - DNA, 25 bp, Artificial
  probe
  misc_feature (1)..(25): SEQ ID NO: 5749; WAN024DOJ; Start 28; Stop 52
gaacaagtaaagagtcaagacaagg

SEQ ID NO: 420336 - DNA, 25 bp, Artificial
  probe
  misc_feature (1)..(25): SEQ ID NO: 5749; WAN024DOJ; Start 27; Stop 51
agaacaagtaaagagtcaagacaag

SEQ ID NO: 420337 - DNA, 25 bp, Artificial
  probe
  misc_feature (1)..(25): SEQ ID NO: 5749; WAN024DOJ; Start 110; Stop 134
caaataagaaagaccatagcaaagg

SEQ ID NO: 420338 - DNA, 25 bp, Artificial
  probe
  misc_feature (1)..(25): SEQ ID NO: 5749; WAN024DOJ; Start 26; Stop 50
aagaacaagtaaagagtcaagacaa

SEQ ID NO: 420339 - DNA, 25 bp, Artificial
  probe
  misc_feature (1)..(25): SEQ ID NO: 5749; WAN024DOJ; Start 25; Stop 49
aaagaacaagtaaagagtcaagaca

SEQ ID NO: 420340 - DNA, 25 bp, Artificial
  probe
  misc_feature (1)..(25): SEQ ID NO: 5749; WAN024DOJ; Start 31; Stop 55
caagtaaagagtcaagacaaggata

SEQ ID NO: 420341 - DNA, 25 bp, Artificial
  probe
  misc_feature (1)..(25): SEQ ID NO: 5749; WAN024DOJ; Start 109; Stop 133
tcaaataagaaagaccatagcaaag

SEQ ID NO: 420342 - DNA, 25 bp, Artificial
  probe
  misc_feature (1)..(25): SEQ ID NO: 5749; WAN024DOJ; Start 33; Stop 57
agtaaagagtcaagacaaggataaa

SEQ ID NO: 420343 - DNA, 25 bp, Artificial
  probe
  misc_feature (1)..(25): SEQ ID NO: 5749; WAN024DOJ; Start 32; Stop 56
aagtaaagagtcaagacaaggataa

SEQ ID NO: 420344 - DNA, 25 bp, Artificial
  probe
  misc_feature (1)..(25): SEQ ID NO: 5749; WAN024DOJ; Start 107; Stop 131
agtcaaataagaaagaccatagcaa

SEQ ID NO: 420345 - DNA, 25 bp, Artificial
  probe
  misc_feature (1)..(25): SEQ ID NO: 5749; WAN024DOJ; Start 106; Stop 130
aagtcaaataagaaagaccatagca

SEQ ID NO: 420346 - DNA, 25 bp, Artificial
  probe
  misc_feature (1)..(25): SEQ ID NO: 5749; WAN024DOJ; Start 112; Stop 136
aataagaaagaccatagcaaaggtg

SEQ ID NO: 420347 - DNA, 25 bp, Artificial
  probe
  misc_feature (1)..(25): SEQ ID NO: 5749; WAN024DOJ; Start 129; Stop 153
caaaggtgcagagagactaactaat

SEQ ID NO: 420348 - DNA, 25 bp, Artificial
  probe
  misc_feature (1)..(25): SEQ ID NO: 5749; WAN024DOJ; Start 111; Stop 135
aaataagaaagaccatagcaaaggt

SEQ ID NO: 420349 - DNA, 25 bp, Artificial
  probe
  misc_feature (1)..(25): SEQ ID NO: 5749; WAN024DOJ; Start 108; Stop 132
gtcaaataagaaagaccatagcaaa

SEQ ID NO: 420350 - DNA, 25 bp, Artificial
  probe
  misc_feature (1)..(25): SEQ ID NO: 5749; WAN024DOJ; Start 21; Stop 45
agcaaaagaacaagtaaagagtcaa

SEQ ID NO: 420351 - DNA, 25 bp, Artificial
  probe
  misc_feature (1)..(25): SEQ ID NO: 5749; WAN024DOJ; Start 20; Stop 44
aagcaaaagaacaagtaaagagtca

SEQ ID NO: 420352 - DNA, 25 bp, Artificial
  probe
  misc_feature (1)..(25): SEQ ID NO: 5749; WAN024DOJ; Start 22; Stop 46
gcaaaagaacaagtaaagagtcaag

SEQ ID NO: 420353 - DNA, 25 bp, Artificial
  probe
  misc_feature (1)..(25): SEQ ID NO: 5749; WAN024DOJ; Start 19; Stop 43
aaagcaaaagaacaagtaaagagtc

SEQ ID NO: 420354 - DNA, 25 bp, Artificial
  probe
  misc_feature (1)..(25): SEQ ID NO: 5749; WAN024DOJ; Start 105; Stop 129
taagtcaaataagaaagaccatagc

SEQ ID NO: 420355 - DNA, 25 bp, Artificial
  probe
  misc_feature (1)..(25): SEQ ID NO: 5749; WAN024DOJ; Start 113; Stop 137
ataagaaagaccatagcaaaggtgc

SEQ ID NO: 420356 - DNA, 25 bp, Artificial
  probe
  misc_feature (1)..(25): SEQ ID NO: 5749; WAN024DOJ; Start 18; Stop 42
aaaagcaaaagaacaagtaaagagt

SEQ ID NO: 420357 - DNA, 25 bp, Artificial
  probe
  misc_feature (1)..(25): SEQ ID NO: 5749; WAN024DOJ; Start 83; Stop 107
gctttaagacagatgacaaatctaa

SEQ ID NO: 420358 - DNA, 25 bp, Artificial
  probe
  misc_feature (1)..(25): SEQ ID NO: 5749; WAN024DOJ; Start 23; Stop 47
caaaagaacaagtaaagagtcaaga

SEQ ID NO: 420359 - DNA, 25 bp, Artificial
  probe
  misc_feature (1)..(25): SEQ ID NO: 5749; WAN024DOJ; Start 82; Stop 106
agctttaagacagatgacaaatcta

SEQ ID NO: 420360 - DNA, 25 bp, Artificial
  probe
  misc_feature (1)..(25): SEQ ID NO: 5749; WAN024DOJ; Start 24; Stop 48
aaaagaacaagtaaagagtcaagac

SEQ ID NO: 420361 - DNA, 25 bp, Artificial
  probe
  misc_feature (1)..(25): SEQ ID NO: 5749; WAN024DOJ; Start 101; Stop 125
aatctaagtcaaataagaaagacca

SEQ ID NO: 420362 - DNA, 25 bp, Artificial
  probe
  misc_feature (1)..(25): SEQ ID NO: 5749; WAN024DOJ; Start 86; Stop 110
ttaagacagatgacaaatctaagtc

SEQ ID NO: 420363 - DNA, 25 bp, Artificial
  probe
  misc_feature (1)..(25): SEQ ID NO: 5749; WAN024DOJ; Start 34; Stop 58
gtaaagagtcaagacaaggataaaa

SEQ ID NO: 420364 - DNA, 25 bp, Artificial
  probe
  misc_feature (1)..(25): SEQ ID NO: 5749; WAN024DOJ; Start 102; Stop 126
atctaagtcaaataagaaagaccat

SEQ ID NO: 420365 - DNA, 25 bp, Artificial
  probe
  misc_feature (1)..(25): SEQ ID NO: 5749; WAN024DOJ; Start 57; Stop 81
aaagtccatattagggcaaataaaa

SEQ ID NO: 420366 - DNA, 25 bp, Artificial
  probe
  misc_feature (1)..(25): SEQ ID NO: 5750; WAN024G8L; Start 236; Stop 260
ggttggttggtatagtagttgtcta

SEQ ID NO: 420367 - DNA, 25 bp, Artificial
  probe
  misc_feature (1)..(25): SEQ ID NO: 5750; WAN024G8L; Start 234; Stop 258
taggttggttggtatagtagttgtc

SEQ ID NO: 420368 - DNA, 25 bp, Artificial
  probe
  misc_feature (1)..(25): SEQ ID NO: 5750; WAN024G8L; Start 235; Stop 259
aggttggttggtatagtagttgtct

SEQ ID NO: 420369 - DNA, 25 bp, Artificial
  probe
  misc_feature (1)..(25): SEQ ID NO: 5750; WAN024G8L; Start 233; Stop 257
ataggttggttggtatagtagttgt

SEQ ID NO: 420370 - DNA, 25 bp, Artificial
  probe
  misc_feature (1)..(25): SEQ ID NO: 5750; WAN024G8L; Start 231; Stop 255
tgataggttggttggtatagtagtt

SEQ ID NO: 420371 - DNA, 25 bp, Artificial
  probe
  misc_feature (1)..(25): SEQ ID NO: 5750; WAN024G8L; Start 232; Stop 256
gataggttggttggtatagtagttg

SEQ ID NO: 420372 - DNA, 25 bp, Artificial
  probe
  misc_feature (1)..(25): SEQ ID NO: 5750; WAN024G8L; Start 230; Stop 254
atgataggttggttggtatagtagt

SEQ ID NO: 420373 - DNA, 25 bp, Artificial
  probe
  misc_feature (1)..(25): SEQ ID NO: 5750; WAN024G8L; Start 237; Stop 261
gttggttggtatagtagttgtctag

SEQ ID NO: 420374 - DNA, 25 bp, Artificial
  probe
  misc_feature (1)..(25): SEQ ID NO: 5750; WAN024G8L; Start 229; Stop 253
catgataggttggttggtatagtag

SEQ ID NO: 420375 - DNA, 25 bp, Artificial
  probe
  misc_feature (1)..(25): SEQ ID NO: 5750; WAN024G8L; Start 98; Stop 122
agatagagaatagtggctttggttt

SEQ ID NO: 420376 - DNA, 25 bp, Artificial
  probe
  misc_feature (1)..(25): SEQ ID NO: 5750; WAN024G8L; Start 97; Stop 121
cagatagagaatagtggctttggtt

SEQ ID NO: 420377 - DNA, 25 bp, Artificial
  probe
  misc_feature (1)..(25): SEQ ID NO: 5750; WAN024G8L; Start 153; Stop 177
cttctttgagtttctgataccgttt

SEQ ID NO: 420378 - DNA, 25 bp, Artificial
  probe
  misc_feature (1)..(25): SEQ ID NO: 5750; WAN024G8L; Start 117; Stop 141
tggtttcttcaatcaaatcagtcaa

SEQ ID NO: 420379 - DNA, 25 bp, Artificial
  probe
  misc_feature (1)..(25): SEQ ID NO: 5750; WAN024G8L; Start 99; Stop 123
gatagagaatagtggctttggtttc

SEQ ID NO: 420380 - DNA, 25 bp, Artificial
  probe
  misc_feature (1)..(25): SEQ ID NO: 5750; WAN024G8L; Start 106; Stop 130
aatagtggctttggtttcttcaatc

SEQ ID NO: 420381 - DNA, 25 bp, Artificial
  probe
  misc_feature (1)..(25): SEQ ID NO: 5750; WAN024G8L; Start 105; Stop 129
gaatagtggctttggtttcttcaat

SEQ ID NO: 420382 - DNA, 25 bp, Artificial
  probe
  misc_feature (1)..(25): SEQ ID NO: 5750; WAN024G8L; Start 118; Stop 142
ggtttcttcaatcaaatcagtcaag

SEQ ID NO: 420383 - DNA, 25 bp, Artificial
  probe
  misc_feature (1)..(25): SEQ ID NO: 5750; WAN024G8L; Start 79; Stop 103
gacggtttctacactttccagatag

SEQ ID NO: 420384 - DNA, 25 bp, Artificial
  probe
  misc_feature (1)..(25): SEQ ID NO: 5750; WAN024G8L; Start 152; Stop 176
gcttctttgagtttctgataccgtt

SEQ ID NO: 420385 - DNA, 25 bp, Artificial
  probe
  misc_feature (1)..(25): SEQ ID NO: 5750; WAN024G8L; Start 116; Stop 140
ttggtttcttcaatcaaatcagtca

SEQ ID NO: 420386 - DNA, 25 bp, Artificial
  probe
  misc_feature (1)..(25): SEQ ID NO: 5750; WAN024G8L; Start 154; Stop 178
ttctttgagtttctgataccgttta

SEQ ID NO: 420387 - DNA, 25 bp, Artificial
  probe
  misc_feature (1)..(25): SEQ ID NO: 5750; WAN024G8L; Start 107; Stop 131
atagtggctttggtttcttcaatca

SEQ ID NO: 420388 - DNA, 25 bp, Artificial
  probe
  misc_feature (1)..(25): SEQ ID NO: 5750; WAN024G8L; Start 155; Stop 179
tctttgagtttctgataccgtttaa

SEQ ID NO: 420389 - DNA, 25 bp, Artificial
  probe
  misc_feature (1)..(25): SEQ ID NO: 5750; WAN024G8L; Start 108; Stop 132
tagtggctttggtttcttcaatcaa

SEQ ID NO: 420390 - DNA, 25 bp, Artificial
  probe
  misc_feature (1)..(25): SEQ ID NO: 5750; WAN024G8L; Start 119; Stop 143
gtttcttcaatcaaatcagtcaagt

SEQ ID NO: 420391 - DNA, 25 bp, Artificial
  probe
  misc_feature (1)..(25): SEQ ID NO: 5750; WAN024G8L; Start 32; Stop 56
aattcttcacggatttcagcgattt

SEQ ID NO: 420392 - DNA, 25 bp, Artificial
  probe
  misc_feature (1)..(25): SEQ ID NO: 5750; WAN024G8L; Start 33; Stop 57
attcttcacggatttcagcgatttc

SEQ ID NO: 420393 - DNA, 25 bp, Artificial
  probe
  misc_feature (1)..(25): SEQ ID NO: 5750; WAN024G8L; Start 82; Stop 106
ggtttctacactttccagatagaga

SEQ ID NO: 420394 - DNA, 25 bp, Artificial
  probe
  misc_feature (1)..(25): SEQ ID NO: 5750; WAN024G8L; Start 81; Stop 105
cggtttctacactttccagatagag

SEQ ID NO: 420395 - DNA, 25 bp, Artificial
  probe
  misc_feature (1)..(25): SEQ ID NO: 5750; WAN024G8L; Start 31; Stop 55
caattcttcacggatttcagcgatt

SEQ ID NO: 420396 - DNA, 25 bp, Artificial
  probe
  misc_feature (1)..(25): SEQ ID NO: 5750; WAN024G8L; Start 141; Stop 165
agtatttgacagcttctttgagttt

SEQ ID NO: 420397 - DNA, 25 bp, Artificial
  probe
  misc_feature (1)..(25): SEQ ID NO: 5750; WAN024G8L; Start 94; Stop 118
ttccagatagagaatagtggctttg

SEQ ID NO: 420398 - DNA, 25 bp, Artificial
  probe
  misc_feature (1)..(25): SEQ ID NO: 5750; WAN024G8L; Start 92; Stop 116
ctttccagatagagaatagtggctt

SEQ ID NO: 420399 - DNA, 25 bp, Artificial
  probe
  misc_feature (1)..(25): SEQ ID NO: 5751; WAN024DVP; Start 259; Stop 283
tcttctgagatgcgatcattaacaa

SEQ ID NO: 420400 - DNA, 25 bp, Artificial
  probe
  misc_feature (1)..(25): SEQ ID NO: 5751; WAN024DVP; Start 260; Stop 284
cttctgagatgcgatcattaacaat

SEQ ID NO: 420401 - DNA, 25 bp, Artificial
  probe
  misc_feature (1)..(25): SEQ ID NO: 5751; WAN024DVP; Start 59; Stop 83
tcatctgtcctacattgaggtactc

SEQ ID NO: 420402 - DNA, 25 bp, Artificial
  probe
  misc_feature (1)..(25): SEQ ID NO: 5751; WAN024DVP; Start 96; Stop 120
tccttcaatagaatcatacacatct

SEQ ID NO: 420403 - DNA, 25 bp, Artificial
  probe
  misc_feature (1)..(25): SEQ ID NO: 5751; WAN024DVP; Start 261; Stop 285
ttctgagatgcgatcattaacaatg

SEQ ID NO: 420404 - DNA, 25 bp, Artificial
  probe
  misc_feature (1)..(25): SEQ ID NO: 5751; WAN024DVP; Start 258; Stop 282
atcttctgagatgcgatcattaaca

SEQ ID NO: 420405 - DNA, 25 bp, Artificial
  probe
  misc_feature (1)..(25): SEQ ID NO: 5751; WAN024DVP; Start 60; Stop 84
catctgtcctacattgaggtactcc

SEQ ID NO: 420406 - DNA, 25 bp, Artificial
  probe
  misc_feature (1)..(25): SEQ ID NO: 5751; WAN024DVP; Start 64; Stop 88
tgtcctacattgaggtactccaatt

SEQ ID NO: 420407 - DNA, 25 bp, Artificial
  probe
  misc_feature (1)..(25): SEQ ID NO: 5751; WAN024DVP; Start 61; Stop 85
atctgtcctacattgaggtactcca

SEQ ID NO: 420408 - DNA, 25 bp, Artificial
  probe
  misc_feature (1)..(25): SEQ ID NO: 5751; WAN024DVP; Start 1; Stop 25
ttgtcttcttcacctagagctacac

SEQ ID NO: 420409 - DNA, 25 bp, Artificial
  probe
  misc_feature (1)..(25): SEQ ID NO: 5751; WAN024DVP; Start 257; Stop 281
tatcttctgagatgcgatcattaac

SEQ ID NO: 420410 - DNA, 25 bp, Artificial
  probe
  misc_feature (1)..(25): SEQ ID NO: 5751; WAN024DVP; Start 95; Stop 119
ttccttcaatagaatcatacacatc

SEQ ID NO: 420411 - DNA, 25 bp, Artificial
  probe
  misc_feature (1)..(25): SEQ ID NO: 5751; WAN024DVP; Start 63; Stop 87
ctgtcctacattgaggtactccaat

SEQ ID NO: 420412 - DNA, 25 bp, Artificial
  probe
  misc_feature (1)..(25): SEQ ID NO: 5751; WAN024DVP; Start 97; Stop 121
ccttcaatagaatcatacacatctt

SEQ ID NO: 420413 - DNA, 25 bp, Artificial
  probe
  misc_feature (1)..(25): SEQ ID NO: 5751; WAN024DVP; Start 62; Stop 86
tctgtcctacattgaggtactccaa

SEQ ID NO: 420414 - DNA, 25 bp, Artificial
  probe
  misc_feature (1)..(25): SEQ ID NO: 5751; WAN024DVP; Start 256; Stop 280
ttatcttctgagatgcgatcattaa

SEQ ID NO: 420415 - DNA, 25 bp, Artificial
  probe
  misc_feature (1)..(25): SEQ ID NO: 5751; WAN024DVP; Start 4; Stop 28
tcttcttcacctagagctacacctc

SEQ ID NO: 420416 - DNA, 25 bp, Artificial
  probe
  misc_feature (1)..(25): SEQ ID NO: 5751; WAN024DVP; Start 3; Stop 27
gtcttcttcacctagagctacacct

SEQ ID NO: 420417 - DNA, 25 bp, Artificial
  probe
  misc_feature (1)..(25): SEQ ID NO: 5751; WAN024DVP; Start 65; Stop 89
gtcctacattgaggtactccaattt

SEQ ID NO: 420418 - DNA, 25 bp, Artificial
  probe
  misc_feature (1)..(25): SEQ ID NO: 5751; WAN024DVP; Start 128; Stop 152
ttgtatatatcagcattgttctctt

SEQ ID NO: 420419 - DNA, 25 bp, Artificial
  probe
  misc_feature (1)..(25): SEQ ID NO: 5751; WAN024DVP; Start 56; Stop 80
tactcatctgtcctacattgaggta

SEQ ID NO: 420420 - DNA, 25 bp, Artificial
  probe
  misc_feature (1)..(25): SEQ ID NO: 5751; WAN024DVP; Start 41; Stop 65
cattttcctccgttttactcatctg

SEQ ID NO: 420421 - DNA, 25 bp, Artificial
  probe
  misc_feature (1)..(25): SEQ ID NO: 5751; WAN024DVP; Start 40; Stop 64
tcattttcctccgttttactcatct

SEQ ID NO: 420422 - DNA, 25 bp, Artificial
  probe
  misc_feature (1)..(25): SEQ ID NO: 5751; WAN024DVP; Start 35; Stop 59
ccttttcattttcctccgttttact

SEQ ID NO: 420423 - DNA, 25 bp, Artificial
  probe
  misc_feature (1)..(25): SEQ ID NO: 5751; WAN024DVP; Start 34; Stop 58
accttttcattttcctccgttttac

SEQ ID NO: 420424 - DNA, 25 bp, Artificial
  probe
  misc_feature (1)..(25): SEQ ID NO: 5751; WAN024DVP; Start 31; Stop 55
gttaccttttcattttcctccgttt

SEQ ID NO: 420425 - DNA, 25 bp, Artificial
  probe
  misc_feature (1)..(25): SEQ ID NO: 5751; WAN024DVP; Start 55; Stop 79
ttactcatctgtcctacattgaggt

SEQ ID NO: 420426 - DNA, 25 bp, Artificial
  probe
  misc_feature (1)..(25): SEQ ID NO: 5751; WAN024DVP; Start 42; Stop 66
attttcctccgttttactcatctgt

SEQ ID NO: 420427 - DNA, 25 bp, Artificial
  probe
  misc_feature (1)..(25): SEQ ID NO: 5751; WAN024DVP; Start 39; Stop 63
ttcattttcctccgttttactcatc

SEQ ID NO: 420428 - DNA, 25 bp, Artificial
  probe
  misc_feature (1)..(25): SEQ ID NO: 5751; WAN024DVP; Start 32; Stop 56
ttaccttttcattttcctccgtttt

SEQ ID NO: 420429 - DNA, 25 bp, Artificial
  probe
  misc_feature (1)..(25): SEQ ID NO: 5751; WAN024DVP; Start 2; Stop 26
tgtcttcttcacctagagctacacc

SEQ ID NO: 420430 - DNA, 25 bp, Artificial
  probe
  misc_feature (1)..(25): SEQ ID NO: 5751; WAN024DVP; Start 37; Stop 61
ttttcattttcctccgttttactca

SEQ ID NO: 420431 - DNA, 25 bp, Artificial
  probe
  misc_feature (1)..(25): SEQ ID NO: 5751; WAN024DVP; Start 38; Stop 62
tttcattttcctccgttttactcat

SEQ ID NO: 420432 - DNA, 25 bp, Artificial
  probe
  misc_feature (1)..(25): SEQ ID NO: 5752; WAN024CUY; Start 18; Stop 42
tgacaagtttagtataacagtatct

SEQ ID NO: 420433 - DNA, 25 bp, Artificial
  probe
  misc_feature (1)..(25): SEQ ID NO: 5752; WAN024CUY; Start 15; Stop 39
acttgacaagtttagtataacagta

SEQ ID NO: 420434 - DNA, 25 bp, Artificial
  probe
  misc_feature (1)..(25): SEQ ID NO: 5752; WAN024CUY; Start 14; Stop 38
aacttgacaagtttagtataacagt

SEQ ID NO: 420435 - DNA, 25 bp, Artificial
  probe
  misc_feature (1)..(25): SEQ ID NO: 5753; WAN024GN3; Start 134; Stop 158
gcaattcaaccatgtcaacaatctt

SEQ ID NO: 420436 - DNA, 25 bp, Artificial
  probe
  misc_feature (1)..(25): SEQ ID NO: 5753; WAN024GN3; Start 137; Stop 161
attcaaccatgtcaacaatcttaga

SEQ ID NO: 420437 - DNA, 25 bp, Artificial
  probe
  misc_feature (1)..(25): SEQ ID NO: 5753; WAN024GN3; Start 133; Stop 157
agcaattcaaccatgtcaacaatct

SEQ ID NO: 420438 - DNA, 25 bp, Artificial
  probe
  misc_feature (1)..(25): SEQ ID NO: 5753; WAN024GN3; Start 132; Stop 156
cagcaattcaaccatgtcaacaatc

SEQ ID NO: 420439 - DNA, 25 bp, Artificial
  probe
  misc_feature (1)..(25): SEQ ID NO: 5753; WAN024GN3; Start 135; Stop 159
caattcaaccatgtcaacaatctta

SEQ ID NO: 420440 - DNA, 25 bp, Artificial
  probe
  misc_feature (1)..(25): SEQ ID NO: 5753; WAN024GN3; Start 147; Stop 171
gtcaacaatcttagacaaggtggtc

SEQ ID NO: 420441 - DNA, 25 bp, Artificial
  probe
  misc_feature (1)..(25): SEQ ID NO: 5753; WAN024GN3; Start 138; Stop 162
ttcaaccatgtcaacaatcttagac

SEQ ID NO: 420442 - DNA, 25 bp, Artificial
  probe
  misc_feature (1)..(25): SEQ ID NO: 5753; WAN024GN3; Start 136; Stop 160
aattcaaccatgtcaacaatcttag

SEQ ID NO: 420443 - DNA, 25 bp, Artificial
  probe
  misc_feature (1)..(25): SEQ ID NO: 5753; WAN024GN3; Start 225; Stop 249
gtgtgttacctcttcttgcgtaatt

SEQ ID NO: 420444 - DNA, 25 bp, Artificial
  probe
  misc_feature (1)..(25): SEQ ID NO: 5753; WAN024GN3; Start 131; Stop 155
ccagcaattcaaccatgtcaacaat

SEQ ID NO: 420445 - DNA, 25 bp, Artificial
  probe
  misc_feature (1)..(25): SEQ ID NO: 5753; WAN024GN3; Start 148; Stop 172
tcaacaatcttagacaaggtggtcg

SEQ ID NO: 420446 - DNA, 25 bp, Artificial
  probe
  misc_feature (1)..(25): SEQ ID NO: 5753; WAN024GN3; Start 226; Stop 250
tgtgttacctcttcttgcgtaattt

SEQ ID NO: 420447 - DNA, 25 bp, Artificial
  probe
  misc_feature (1)..(25): SEQ ID NO: 5753; WAN024GN3; Start 224; Stop 248
cgtgtgttacctcttcttgcgtaat

SEQ ID NO: 420448 - DNA, 25 bp, Artificial
  probe
  misc_feature (1)..(25): SEQ ID NO: 5753; WAN024GN3; Start 180; Stop 204
agcagtttcttcttcagagaatctt

SEQ ID NO: 420449 - DNA, 25 bp, Artificial
  probe
  misc_feature (1)..(25): SEQ ID NO: 5753; WAN024GN3; Start 179; Stop 203
cagcagtttcttcttcagagaatct

SEQ ID NO: 420450 - DNA, 25 bp, Artificial
  probe
  misc_feature (1)..(25): SEQ ID NO: 5753; WAN024GN3; Start 181; Stop 205
gcagtttcttcttcagagaatctta

SEQ ID NO: 420451 - DNA, 25 bp, Artificial
  probe
  misc_feature (1)..(25): SEQ ID NO: 5753; WAN024GN3; Start 233; Stop 257
cctcttcttgcgtaattttcatctt

SEQ ID NO: 420452 - DNA, 25 bp, Artificial
  probe
  misc_feature (1)..(25): SEQ ID NO: 5753; WAN024GN3; Start 235; Stop 259
tcttcttgcgtaattttcatcttgc

SEQ ID NO: 420453 - DNA, 25 bp, Artificial
  probe
  misc_feature (1)..(25): SEQ ID NO: 5753; WAN024GN3; Start 232; Stop 256
acctcttcttgcgtaattttcatct

SEQ ID NO: 420454 - DNA, 25 bp, Artificial
  probe
  misc_feature (1)..(25): SEQ ID NO: 5753; WAN024GN3; Start 231; Stop 255
tacctcttcttgcgtaattttcatc

SEQ ID NO: 420455 - DNA, 25 bp, Artificial
  probe
  misc_feature (1)..(25): SEQ ID NO: 5753; WAN024GN3; Start 234; Stop 258
ctcttcttgcgtaattttcatcttg

SEQ ID NO: 420456 - DNA, 25 bp, Artificial
  probe
  misc_feature (1)..(25): SEQ ID NO: 5753; WAN024GN3; Start 149; Stop 173
caacaatcttagacaaggtggtcgc

SEQ ID NO: 420457 - DNA, 25 bp, Artificial
  probe
  misc_feature (1)..(25): SEQ ID NO: 5753; WAN024GN3; Start 252; Stop 276
catcttgcatcctttcgtgaaatga

SEQ ID NO: 420458 - DNA, 25 bp, Artificial
  probe
  misc_feature (1)..(25): SEQ ID NO: 5753; WAN024GN3; Start 174; Stop 198
aaaggcagcagtttcttcttcagag

SEQ ID NO: 420459 - DNA, 25 bp, Artificial
  probe
  misc_feature (1)..(25): SEQ ID NO: 5753; WAN024GN3; Start 208; Stop 232
tttgaaagattggcaacgtgtgtta

SEQ ID NO: 420460 - DNA, 25 bp, Artificial
  probe
  misc_feature (1)..(25): SEQ ID NO: 5753; WAN024GN3; Start 251; Stop 275
tcatcttgcatcctttcgtgaaatg

SEQ ID NO: 420461 - DNA, 25 bp, Artificial
  probe
  misc_feature (1)..(25): SEQ ID NO: 5753; WAN024GN3; Start 144; Stop 168
catgtcaacaatcttagacaaggtg

SEQ ID NO: 420462 - DNA, 25 bp, Artificial
  probe
  misc_feature (1)..(25): SEQ ID NO: 5753; WAN024GN3; Start 140; Stop 164
caaccatgtcaacaatcttagacaa

SEQ ID NO: 420463 - DNA, 25 bp, Artificial
  probe
  misc_feature (1)..(25): SEQ ID NO: 5753; WAN024GN3; Start 139; Stop 163
tcaaccatgtcaacaatcttagaca

SEQ ID NO: 420464 - DNA, 25 bp, Artificial
  probe
  misc_feature (1)..(25): SEQ ID NO: 5753; WAN024GN3; Start 173; Stop 197
caaaggcagcagtttcttcttcaga

SEQ ID NO: 420465 - DNA, 25 bp, Artificial
  probe
  misc_feature (1)..(25): SEQ ID NO: 5753; WAN024GN3; Start 141; Stop 165
aaccatgtcaacaatcttagacaag

SEQ ID NO: 420466 - DNA, 25 bp, Artificial
  probe
  misc_feature (1)..(25): SEQ ID NO: 5753; WAN024GN3; Start 178; Stop 202
gcagcagtttcttcttcagagaatc

SEQ ID NO: 420467 - DNA, 25 bp, Artificial
  probe
  misc_feature (1)..(25): SEQ ID NO: 5753; WAN024GN3; Start 153; Stop 177
aatcttagacaaggtggtcgcaaag

SEQ ID NO: 420468 - DNA, 25 bp, Artificial
  probe
  misc_feature (1)..(25): SEQ ID NO: 5754; WAN024DIY; Start 103; Stop 127
ggatgtcctttattatggaaagcct

SEQ ID NO: 420469 - DNA, 25 bp, Artificial
  probe
  misc_feature (1)..(25): SEQ ID NO: 5754; WAN024DIY; Start 104; Stop 128
gatgtcctttattatggaaagcctt

SEQ ID NO: 420470 - DNA, 25 bp, Artificial
  probe
  misc_feature (1)..(25): SEQ ID NO: 5754; WAN024DIY; Start 102; Stop 126
aggatgtcctttattatggaaagcc

SEQ ID NO: 420471 - DNA, 25 bp, Artificial
  probe
  misc_feature (1)..(25): SEQ ID NO: 5754; WAN024DIY; Start 113; Stop 137
tattatggaaagccttattggattt

SEQ ID NO: 420472 - DNA, 25 bp, Artificial
  probe
  misc_feature (1)..(25): SEQ ID NO: 5754; WAN024DIY; Start 112; Stop 136
ttattatggaaagccttattggatt

SEQ ID NO: 420473 - DNA, 25 bp, Artificial
  probe
  misc_feature (1)..(25): SEQ ID NO: 5754; WAN024DIY; Start 111; Stop 135
tttattatggaaagccttattggat

SEQ ID NO: 420474 - DNA, 25 bp, Artificial
  probe
  misc_feature (1)..(25): SEQ ID NO: 5754; WAN024DIY; Start 109; Stop 133
cctttattatggaaagccttattgg

SEQ ID NO: 420475 - DNA, 25 bp, Artificial
  probe
  misc_feature (1)..(25): SEQ ID NO: 5754; WAN024DIY; Start 106; Stop 130
tgtcctttattatggaaagccttat

SEQ ID NO: 420476 - DNA, 25 bp, Artificial
  probe
  misc_feature (1)..(25): SEQ ID NO: 5754; WAN024DIY; Start 105; Stop 129
atgtcctttattatggaaagcctta

SEQ ID NO: 420477 - DNA, 25 bp, Artificial
  probe
  misc_feature (1)..(25): SEQ ID NO: 5754; WAN024DIY; Start 101; Stop 125
taggatgtcctttattatggaaagc

SEQ ID NO: 420478 - DNA, 25 bp, Artificial
  probe
  misc_feature (1)..(25): SEQ ID NO: 5754; WAN024DIY; Start 121; Stop 145
aaagccttattggattttctcctca

SEQ ID NO: 420479 - DNA, 25 bp, Artificial
  probe
  misc_feature (1)..(25): SEQ ID NO: 5754; WAN024DIY; Start 124; Stop 148
gccttattggattttctcctcagat

SEQ ID NO: 420480 - DNA, 25 bp, Artificial
  probe
  misc_feature (1)..(25): SEQ ID NO: 5754; WAN024DIY; Start 110; Stop 134
ctttattatggaaagccttattgga

SEQ ID NO: 420481 - DNA, 25 bp, Artificial
  probe
  misc_feature (1)..(25): SEQ ID NO: 5754; WAN024DIY; Start 108; Stop 132
tcctttattatggaaagccttattg

SEQ ID NO: 420482 - DNA, 25 bp, Artificial
  probe
  misc_feature (1)..(25): SEQ ID NO: 5754; WAN024DIY; Start 107; Stop 131
gtcctttattatggaaagccttatt

SEQ ID NO: 420483 - DNA, 25 bp, Artificial
  probe
  misc_feature (1)..(25): SEQ ID NO: 5754; WAN024DIY; Start 122; Stop 146
aagccttattggattttctcctcag

SEQ ID NO: 420484 - DNA, 25 bp, Artificial
  probe
  misc_feature (1)..(25): SEQ ID NO: 5754; WAN024DIY; Start 98; Stop 122
tgataggatgtcctttattatggaa

SEQ ID NO: 420485 - DNA, 25 bp, Artificial
  probe
  misc_feature (1)..(25): SEQ ID NO: 5754; WAN024DIY; Start 97; Stop 121
ttgataggatgtcctttattatgga

SEQ ID NO: 420486 - DNA, 25 bp, Artificial
  probe
  misc_feature (1)..(25): SEQ ID NO: 5754; WAN024DIY; Start 26; Stop 50
ataaggtaaaagaagctggacaaaa

SEQ ID NO: 420487 - DNA, 25 bp, Artificial
  probe
  misc_feature (1)..(25): SEQ ID NO: 5754; WAN024DIY; Start 96; Stop 120
cttgataggatgtcctttattatgg

SEQ ID NO: 420488 - DNA, 25 bp, Artificial
  probe
  misc_feature (1)..(25): SEQ ID NO: 5754; WAN024DIY; Start 123; Stop 147
agccttattggattttctcctcaga

SEQ ID NO: 420489 - DNA, 25 bp, Artificial
  probe
  misc_feature (1)..(25): SEQ ID NO: 5754; WAN024DIY; Start 114; Stop 138
attatggaaagccttattggatttt

SEQ ID NO: 420490 - DNA, 25 bp, Artificial
  probe
  misc_feature (1)..(25): SEQ ID NO: 5754; WAN024DIY; Start 125; Stop 149
ccttattggattttctcctcagatt

SEQ ID NO: 420491 - DNA, 25 bp, Artificial
  probe
  misc_feature (1)..(25): SEQ ID NO: 5754; WAN024DIY; Start 120; Stop 144
gaaagccttattggattttctcctc

SEQ ID NO: 420492 - DNA, 25 bp, Artificial
  probe
  misc_feature (1)..(25): SEQ ID NO: 5754; WAN024DIY; Start 117; Stop 141
atggaaagccttattggattttctc

SEQ ID NO: 420493 - DNA, 25 bp, Artificial
  probe
  misc_feature (1)..(25): SEQ ID NO: 5754; WAN024DIY; Start 25; Stop 49
tataaggtaaaagaagctggacaaa

SEQ ID NO: 420494 - DNA, 25 bp, Artificial
  probe
  misc_feature (1)..(25): SEQ ID NO: 5754; WAN024DIY; Start 24; Stop 48
ttataaggtaaaagaagctggacaa

SEQ ID NO: 420495 - DNA, 25 bp, Artificial
  probe
  misc_feature (1)..(25): SEQ ID NO: 5754; WAN024DIY; Start 119; Stop 143
ggaaagccttattggattttctcct

SEQ ID NO: 420496 - DNA, 25 bp, Artificial
  probe
  misc_feature (1)..(25): SEQ ID NO: 5754; WAN024DIY; Start 127; Stop 151
ttattggattttctcctcagattga

SEQ ID NO: 420497 - DNA, 25 bp, Artificial
  probe
  misc_feature (1)..(25): SEQ ID NO: 5754; WAN024DIY; Start 118; Stop 142
tggaaagccttattggattttctcc

SEQ ID NO: 420498 - DNA, 25 bp, Artificial
  probe
  misc_feature (1)..(25): SEQ ID NO: 5754; WAN024DIY; Start 23; Stop 47
tttataaggtaaaagaagctggaca

SEQ ID NO: 420499 - DNA, 25 bp, Artificial
  probe
  misc_feature (1)..(25): SEQ ID NO: 5754; WAN024DIY; Start 126; Stop 150
cttattggattttctcctcagattg

SEQ ID NO: 420500 - DNA, 25 bp, Artificial
  probe
  misc_feature (1)..(25): SEQ ID NO: 5754; WAN024DIY; Start 116; Stop 140
tatggaaagccttattggattttct

SEQ ID NO: 420501 - DNA, 25 bp, Artificial
  probe
  misc_feature (1)..(25): SEQ ID NO: 5755; WAN024FFV; Start 333; Stop 357
tatgatctgtccacttgttatccac

SEQ ID NO: 420502 - DNA, 25 bp, Artificial
  probe
  misc_feature (1)..(25): SEQ ID NO: 5755; WAN024FFV; Start 332; Stop 356
atatgatctgtccacttgttatcca

SEQ ID NO: 420503 - DNA, 25 bp, Artificial
  probe
  misc_feature (1)..(25): SEQ ID NO: 5755; WAN024FFV; Start 330; Stop 354
cgatatgatctgtccacttgttatc

SEQ ID NO: 420504 - DNA, 25 bp, Artificial
  probe
  misc_feature (1)..(25): SEQ ID NO: 5755; WAN024FFV; Start 331; Stop 355
gatatgatctgtccacttgttatcc

SEQ ID NO: 420505 - DNA, 25 bp, Artificial
  probe
  misc_feature (1)..(25): SEQ ID NO: 5755; WAN024FFV; Start 329; Stop 353
tcgatatgatctgtccacttgttat

SEQ ID NO: 420506 - DNA, 25 bp, Artificial
  probe
  misc_feature (1)..(25): SEQ ID NO: 5755; WAN024FFV; Start 334; Stop 358
atgatctgtccacttgttatccacc

SEQ ID NO: 420507 - DNA, 25 bp, Artificial
  probe
  misc_feature (1)..(25): SEQ ID NO: 5755; WAN024FFV; Start 210; Stop 234
actcaatcgaaccaatcatatcatt

SEQ ID NO: 420508 - DNA, 25 bp, Artificial
  probe
  misc_feature (1)..(25): SEQ ID NO: 5755; WAN024FFV; Start 209; Stop 233
aactcaatcgaaccaatcatatcat

SEQ ID NO: 420509 - DNA, 25 bp, Artificial
  probe
  misc_feature (1)..(25): SEQ ID NO: 5755; WAN024FFV; Start 231; Stop 255
cattaaacatacggaaaccttctgc

SEQ ID NO: 420510 - DNA, 25 bp, Artificial
  probe
  misc_feature (1)..(25): SEQ ID NO: 5755; WAN024FFV; Start 230; Stop 254
tcattaaacatacggaaaccttctg

SEQ ID NO: 420511 - DNA, 25 bp, Artificial
  probe
  misc_feature (1)..(25): SEQ ID NO: 5755; WAN024FFV; Start 246; Stop 270
aaccttctgcctgatactcaacaac

SEQ ID NO: 420512 - DNA, 25 bp, Artificial
  probe
  misc_feature (1)..(25): SEQ ID NO: 5755; WAN024FFV; Start 129; Stop 153
ctgttgtactgatatgacgttctgc

SEQ ID NO: 420513 - DNA, 25 bp, Artificial
  probe
  misc_feature (1)..(25): SEQ ID NO: 5755; WAN024FFV; Start 128; Stop 152
gctgttgtactgatatgacgttctg

SEQ ID NO: 420514 - DNA, 25 bp, Artificial
  probe
  misc_feature (1)..(25): SEQ ID NO: 5755; WAN024FFV; Start 229; Stop 253
atcattaaacatacggaaaccttct

SEQ ID NO: 420515 - DNA, 25 bp, Artificial
  probe
  misc_feature (1)..(25): SEQ ID NO: 5755; WAN024FFV; Start 185; Stop 209
ttcatcatcaagcgtgtcacatcaa

SEQ ID NO: 420516 - DNA, 25 bp, Artificial
  probe
  misc_feature (1)..(25): SEQ ID NO: 5755; WAN024FFV; Start 232; Stop 256
attaaacatacggaaaccttctgcc

SEQ ID NO: 420517 - DNA, 25 bp, Artificial
  probe
  misc_feature (1)..(25): SEQ ID NO: 5755; WAN024FFV; Start 337; Stop 361
atctgtccacttgttatccaccact

SEQ ID NO: 420518 - DNA, 25 bp, Artificial
  probe
  misc_feature (1)..(25): SEQ ID NO: 5755; WAN024FFV; Start 336; Stop 360
gatctgtccacttgttatccaccac

SEQ ID NO: 420519 - DNA, 25 bp, Artificial
  probe
  misc_feature (1)..(25): SEQ ID NO: 5755; WAN024FFV; Start 342; Stop 366
tccacttgttatccaccactcgtag

SEQ ID NO: 420520 - DNA, 25 bp, Artificial
  probe
  misc_feature (1)..(25): SEQ ID NO: 5755; WAN024FFV; Start 204; Stop 228
catcaaactcaatcgaaccaatcat

SEQ ID NO: 420521 - DNA, 25 bp, Artificial
  probe
  misc_feature (1)..(25): SEQ ID NO: 5755; WAN024FFV; Start 335; Stop 359
tgatctgtccacttgttatccacca

SEQ ID NO: 420522 - DNA, 25 bp, Artificial
  probe
  misc_feature (1)..(25): SEQ ID NO: 5755; WAN024FFV; Start 132; Stop 156
ttgtactgatatgacgttctgcctg

SEQ ID NO: 420523 - DNA, 25 bp, Artificial
  probe
  misc_feature (1)..(25): SEQ ID NO: 5755; WAN024FFV; Start 131; Stop 155
gttgtactgatatgacgttctgcct

SEQ ID NO: 420524 - DNA, 25 bp, Artificial
  probe
  misc_feature (1)..(25): SEQ ID NO: 5755; WAN024FFV; Start 233; Stop 257
ttaaacatacggaaaccttctgcct

SEQ ID NO: 420525 - DNA, 25 bp, Artificial
  probe
  misc_feature (1)..(25): SEQ ID NO: 5755; WAN024FFV; Start 211; Stop 235
ctcaatcgaaccaatcatatcatta

SEQ ID NO: 420526 - DNA, 25 bp, Artificial
  probe
  misc_feature (1)..(25): SEQ ID NO: 5755; WAN024FFV; Start 77; Stop 101
aaatccaaatcttctggcatacttg

SEQ ID NO: 420527 - DNA, 25 bp, Artificial
  probe
  misc_feature (1)..(25): SEQ ID NO: 5755; WAN024FFV; Start 76; Stop 100
caaatccaaatcttctggcatactt

SEQ ID NO: 420528 - DNA, 25 bp, Artificial
  probe
  misc_feature (1)..(25): SEQ ID NO: 5755; WAN024FFV; Start 75; Stop 99
tcaaatccaaatcttctggcatact

SEQ ID NO: 420529 - DNA, 25 bp, Artificial
  probe
  misc_feature (1)..(25): SEQ ID NO: 5755; WAN024FFV; Start 202; Stop 226
cacatcaaactcaatcgaaccaatc

SEQ ID NO: 420530 - DNA, 25 bp, Artificial
  probe
  misc_feature (1)..(25): SEQ ID NO: 5755; WAN024FFV; Start 248; Stop 272
ccttctgcctgatactcaacaacag

SEQ ID NO: 420531 - DNA, 25 bp, Artificial
  probe
  misc_feature (1)..(25): SEQ ID NO: 5755; WAN024FFV; Start 338; Stop 362
tctgtccacttgttatccaccactc

SEQ ID NO: 420532 - DNA, 25 bp, Artificial
  probe
  misc_feature (1)..(25): SEQ ID NO: 5755; WAN024FFV; Start 245; Stop 269
aaaccttctgcctgatactcaacaa

SEQ ID NO: 420533 - DNA, 25 bp, Artificial
  probe
  misc_feature (1)..(25): SEQ ID NO: 5755; WAN024FFV; Start 225; Stop 249
tcatatcattaaacatacggaaacc

SEQ ID NO: 420534 - DNA, 25 bp, Artificial
  probe
  misc_feature (1)..(25): SEQ ID NO: 5756; WAN024C7Y; Start 1459; Stop 1483
ccagtcgtattatcagtagttgtgt

SEQ ID NO: 420535 - DNA, 25 bp, Artificial
  probe
  misc_feature (1)..(25): SEQ ID NO: 5756; WAN024C7Y; Start 1458; Stop 1482
accagtcgtattatcagtagttgtg

SEQ ID NO: 420536 - DNA, 25 bp, Artificial
  probe
  misc_feature (1)..(25): SEQ ID NO: 5756; WAN024C7Y; Start 884; Stop 908
tatggaatactcttgctcacattgt

SEQ ID NO: 420537 - DNA, 25 bp, Artificial
  probe
  misc_feature (1)..(25): SEQ ID NO: 5756; WAN024C7Y; Start 390; Stop 414
gctctcaagtataattccaggtctt

SEQ ID NO: 420538 - DNA, 25 bp, Artificial
  probe
  misc_feature (1)..(25): SEQ ID NO: 5756; WAN024C7Y; Start 1457; Stop 1481
taccagtcgtattatcagtagttgt

SEQ ID NO: 420539 - DNA, 25 bp, Artificial
  probe
  misc_feature (1)..(25): SEQ ID NO: 5756; WAN024C7Y; Start 1460; Stop 1484
cagtcgtattatcagtagttgtgtt

SEQ ID NO: 420540 - DNA, 25 bp, Artificial
  probe
  misc_feature (1)..(25): SEQ ID NO: 5756; WAN024C7Y; Start 883; Stop 907
ttatggaatactcttgctcacattg

SEQ ID NO: 420541 - DNA, 25 bp, Artificial
  probe
  misc_feature (1)..(25): SEQ ID NO: 5756; WAN024C7Y; Start 885; Stop 909
atggaatactcttgctcacattgtt

SEQ ID NO: 420542 - DNA, 25 bp, Artificial
  probe
  misc_feature (1)..(25): SEQ ID NO: 5756; WAN024C7Y; Start 881; Stop 905
cattatggaatactcttgctcacat

SEQ ID NO: 420543 - DNA, 25 bp, Artificial
  probe
  misc_feature (1)..(25): SEQ ID NO: 5756; WAN024C7Y; Start 1518; Stop 1542
atctgtattcttgtaccatccactt

SEQ ID NO: 420544 - DNA, 25 bp, Artificial
  probe
  misc_feature (1)..(25): SEQ ID NO: 5756; WAN024C7Y; Start 886; Stop 910
tggaatactcttgctcacattgttg

SEQ ID NO: 420545 - DNA, 25 bp, Artificial
  probe
  misc_feature (1)..(25): SEQ ID NO: 5756; WAN024C7Y; Start 326; Stop 350
gaggaattgtattagcgacaggata

SEQ ID NO: 420546 - DNA, 25 bp, Artificial
  probe
  misc_feature (1)..(25): SEQ ID NO: 5756; WAN024C7Y; Start 322; Stop 346
tatggaggaattgtattagcgacag

SEQ ID NO: 420547 - DNA, 25 bp, Artificial
  probe
  misc_feature (1)..(25): SEQ ID NO: 5756; WAN024C7Y; Start 321; Stop 345
atatggaggaattgtattagcgaca

SEQ ID NO: 420548 - DNA, 25 bp, Artificial
  probe
  misc_feature (1)..(25): SEQ ID NO: 5756; WAN024C7Y; Start 240; Stop 264
gacattgattgttctactcacagag

SEQ ID NO: 420549 - DNA, 25 bp, Artificial
  probe
  misc_feature (1)..(25): SEQ ID NO: 5756; WAN024C7Y; Start 239; Stop 263
ggacattgattgttctactcacaga

SEQ ID NO: 420550 - DNA, 25 bp, Artificial
  probe
  misc_feature (1)..(25): SEQ ID NO: 5756; WAN024C7Y; Start 882; Stop 906
attatggaatactcttgctcacatt

SEQ ID NO: 420551 - DNA, 25 bp, Artificial
  probe
  misc_feature (1)..(25): SEQ ID NO: 5756; WAN024C7Y; Start 327; Stop 351
aggaattgtattagcgacaggatat

SEQ ID NO: 420552 - DNA, 25 bp, Artificial
  probe
  misc_feature (1)..(25): SEQ ID NO: 5756; WAN024C7Y; Start 387; Stop 411
aacgctctcaagtataattccaggt

SEQ ID NO: 420553 - DNA, 25 bp, Artificial
  probe
  misc_feature (1)..(25): SEQ ID NO: 5756; WAN024C7Y; Start 1456; Stop 1480
ttaccagtcgtattatcagtagttg

SEQ ID NO: 420554 - DNA, 25 bp, Artificial
  probe
  misc_feature (1)..(25): SEQ ID NO: 5756; WAN024C7Y; Start 1517; Stop 1541
tatctgtattcttgtaccatccact

SEQ ID NO: 420555 - DNA, 25 bp, Artificial
  probe
  misc_feature (1)..(25): SEQ ID NO: 5756; WAN024C7Y; Start 389; Stop 413
cgctctcaagtataattccaggtct

SEQ ID NO: 420556 - DNA, 25 bp, Artificial
  probe
  misc_feature (1)..(25): SEQ ID NO: 5756; WAN024C7Y; Start 320; Stop 344
tatatggaggaattgtattagcgac

SEQ ID NO: 420557 - DNA, 25 bp, Artificial
  probe
  misc_feature (1)..(25): SEQ ID NO: 5756; WAN024C7Y; Start 319; Stop 343
gtatatggaggaattgtattagcga

SEQ ID NO: 420558 - DNA, 25 bp, Artificial
  probe
  misc_feature (1)..(25): SEQ ID NO: 5756; WAN024C7Y; Start 318; Stop 342
agtatatggaggaattgtattagcg

SEQ ID NO: 420559 - DNA, 25 bp, Artificial
  probe
  misc_feature (1)..(25): SEQ ID NO: 5756; WAN024C7Y; Start 311; Stop 335
gctctctagtatatggaggaattgt

SEQ ID NO: 420560 - DNA, 25 bp, Artificial
  probe
  misc_feature (1)..(25): SEQ ID NO: 5756; WAN024C7Y; Start 502; Stop 526
gcagttcgtagtgttgattatcata

SEQ ID NO: 420561 - DNA, 25 bp, Artificial
  probe
  misc_feature (1)..(25): SEQ ID NO: 5756; WAN024C7Y; Start 388; Stop 412
acgctctcaagtataattccaggtc

SEQ ID NO: 420562 - DNA, 25 bp, Artificial
  probe
  misc_feature (1)..(25): SEQ ID NO: 5756; WAN024C7Y; Start 1420; Stop 1444
ttctacactatggtgcgagttatta

SEQ ID NO: 420563 - DNA, 25 bp, Artificial
  probe
  misc_feature (1)..(25): SEQ ID NO: 5756; WAN024C7Y; Start 1421; Stop 1445
tctacactatggtgcgagttattat

SEQ ID NO: 420564 - DNA, 25 bp, Artificial
  probe
  misc_feature (1)..(25): SEQ ID NO: 5756; WAN024C7Y; Start 1516; Stop 1540
ttatctgtattcttgtaccatccac

SEQ ID NO: 420565 - DNA, 25 bp, Artificial
  probe
  misc_feature (1)..(25): SEQ ID NO: 5756; WAN024C7Y; Start 1427; Stop 1451
ctatggtgcgagttattataccgta

SEQ ID NO: 420566 - DNA, 25 bp, Artificial
  probe
  misc_feature (1)..(25): SEQ ID NO: 5756; WAN024C7Y; Start 1424; Stop 1448
acactatggtgcgagttattatacc

SEQ ID NO: 420567 - DNA, 25 bp, Artificial
  probe
  misc_feature (1)..(25): SEQ ID NO: 5757; WAN024GJZ; Start 232; Stop 256
gattgcttggtctacttcattacga

SEQ ID NO: 420568 - DNA, 25 bp, Artificial
  probe
  misc_feature (1)..(25): SEQ ID NO: 5757; WAN024GJZ; Start 233; Stop 257
attgcttggtctacttcattacgaa

SEQ ID NO: 420569 - DNA, 25 bp, Artificial
  probe
  misc_feature (1)..(25): SEQ ID NO: 5757; WAN024GJZ; Start 231; Stop 255
agattgcttggtctacttcattacg

SEQ ID NO: 420570 - DNA, 25 bp, Artificial
  probe
  misc_feature (1)..(25): SEQ ID NO: 5757; WAN024GJZ; Start 230; Stop 254
aagattgcttggtctacttcattac

SEQ ID NO: 420571 - DNA, 25 bp, Artificial
  probe
  misc_feature (1)..(25): SEQ ID NO: 5757; WAN024GJZ; Start 228; Stop 252
caaagattgcttggtctacttcatt

SEQ ID NO: 420572 - DNA, 25 bp, Artificial
  probe
  misc_feature (1)..(25): SEQ ID NO: 5757; WAN024GJZ; Start 110; Stop 134
atgtcgtccaagttgttgtcttctt

SEQ ID NO: 420573 - DNA, 25 bp, Artificial
  probe
  misc_feature (1)..(25): SEQ ID NO: 5757; WAN024GJZ; Start 195; Stop 219
taccttcagtttccttgattgtctt

SEQ ID NO: 420574 - DNA, 25 bp, Artificial
  probe
  misc_feature (1)..(25): SEQ ID NO: 5757; WAN024GJZ; Start 194; Stop 218
ttaccttcagtttccttgattgtct

SEQ ID NO: 420575 - DNA, 25 bp, Artificial
  probe
  misc_feature (1)..(25): SEQ ID NO: 5757; WAN024GJZ; Start 191; Stop 215
cctttaccttcagtttccttgattg

SEQ ID NO: 420576 - DNA, 25 bp, Artificial
  probe
  misc_feature (1)..(25): SEQ ID NO: 5757; WAN024GJZ; Start 193; Stop 217
tttaccttcagtttccttgattgtc

SEQ ID NO: 420577 - DNA, 25 bp, Artificial
  probe
  misc_feature (1)..(25): SEQ ID NO: 5757; WAN024GJZ; Start 192; Stop 216
ctttaccttcagtttccttgattgt

SEQ ID NO: 420578 - DNA, 25 bp, Artificial
  probe
  misc_feature (1)..(25): SEQ ID NO: 5757; WAN024GJZ; Start 196; Stop 220
accttcagtttccttgattgtcttt

SEQ ID NO: 420579 - DNA, 25 bp, Artificial
  probe
  misc_feature (1)..(25): SEQ ID NO: 5757; WAN024GJZ; Start 229; Stop 253
aaagattgcttggtctacttcatta

SEQ ID NO: 420580 - DNA, 25 bp, Artificial
  probe
  misc_feature (1)..(25): SEQ ID NO: 5757; WAN024GJZ; Start 50; Stop 74
tcgtagagtttaacagcaagtcctt

SEQ ID NO: 420581 - DNA, 25 bp, Artificial
  probe
  misc_feature (1)..(25): SEQ ID NO: 5757; WAN024GJZ; Start 49; Stop 73
ttcgtagagtttaacagcaagtcct

SEQ ID NO: 420582 - DNA, 25 bp, Artificial
  probe
  misc_feature (1)..(25): SEQ ID NO: 5757; WAN024GJZ; Start 190; Stop 214
gcctttaccttcagtttccttgatt

SEQ ID NO: 420583 - DNA, 25 bp, Artificial
  probe
  misc_feature (1)..(25): SEQ ID NO: 5757; WAN024GJZ; Start 53; Stop 77
tagagtttaacagcaagtccttgag

SEQ ID NO: 420584 - DNA, 25 bp, Artificial
  probe
  misc_feature (1)..(25): SEQ ID NO: 5757; WAN024GJZ; Start 48; Stop 72
gttcgtagagtttaacagcaagtcc

SEQ ID NO: 420585 - DNA, 25 bp, Artificial
  probe
  misc_feature (1)..(25): SEQ ID NO: 5757; WAN024GJZ; Start 52; Stop 76
gtagagtttaacagcaagtccttga

SEQ ID NO: 420586 - DNA, 25 bp, Artificial
  probe
  misc_feature (1)..(25): SEQ ID NO: 5757; WAN024GJZ; Start 121; Stop 145
gttgttgtcttcttgagctttctta

SEQ ID NO: 420587 - DNA, 25 bp, Artificial
  probe
  misc_feature (1)..(25): SEQ ID NO: 5757; WAN024GJZ; Start 240; Stop 264
ggtctacttcattacgaaggtctac

SEQ ID NO: 420588 - DNA, 25 bp, Artificial
  probe
  misc_feature (1)..(25): SEQ ID NO: 5757; WAN024GJZ; Start 239; Stop 263
tggtctacttcattacgaaggtcta

SEQ ID NO: 420589 - DNA, 25 bp, Artificial
  probe
  misc_feature (1)..(25): SEQ ID NO: 5757; WAN024GJZ; Start 245; Stop 269
acttcattacgaaggtctacttctt

SEQ ID NO: 420590 - DNA, 25 bp, Artificial
  probe
  misc_feature (1)..(25): SEQ ID NO: 5757; WAN024GJZ; Start 241; Stop 265
gtctacttcattacgaaggtctact

SEQ ID NO: 420591 - DNA, 25 bp, Artificial
  probe
  misc_feature (1)..(25): SEQ ID NO: 5757; WAN024GJZ; Start 107; Stop 131
ttcatgtcgtccaagttgttgtctt

SEQ ID NO: 420592 - DNA, 25 bp, Artificial
  probe
  misc_feature (1)..(25): SEQ ID NO: 5757; WAN024GJZ; Start 189; Stop 213
agcctttaccttcagtttccttgat

SEQ ID NO: 420593 - DNA, 25 bp, Artificial
  probe
  misc_feature (1)..(25): SEQ ID NO: 5757; WAN024GJZ; Start 248; Stop 272
tcattacgaaggtctacttcttctt

SEQ ID NO: 420594 - DNA, 25 bp, Artificial
  probe
  misc_feature (1)..(25): SEQ ID NO: 5757; WAN024GJZ; Start 247; Stop 271
ttcattacgaaggtctacttcttct

SEQ ID NO: 420595 - DNA, 25 bp, Artificial
  probe
  misc_feature (1)..(25): SEQ ID NO: 5757; WAN024GJZ; Start 122; Stop 146
ttgttgtcttcttgagctttcttaa

SEQ ID NO: 420596 - DNA, 25 bp, Artificial
  probe
  misc_feature (1)..(25): SEQ ID NO: 5757; WAN024GJZ; Start 237; Stop 261
cttggtctacttcattacgaaggtc

SEQ ID NO: 420597 - DNA, 25 bp, Artificial
  probe
  misc_feature (1)..(25): SEQ ID NO: 5757; WAN024GJZ; Start 120; Stop 144
agttgttgtcttcttgagctttctt

SEQ ID NO: 420598 - DNA, 25 bp, Artificial
  probe
  misc_feature (1)..(25): SEQ ID NO: 5757; WAN024GJZ; Start 246; Stop 270
cttcattacgaaggtctacttcttc

SEQ ID NO: 420599 - DNA, 25 bp, Artificial
  probe
  misc_feature (1)..(25): SEQ ID NO: 5757; WAN024GJZ; Start 234; Stop 258
ttgcttggtctacttcattacgaag

SEQ ID NO: 420600 - DNA, 25 bp, Artificial
  probe
  misc_feature (1)..(25): SEQ ID NO: 5758; WAN024F8F; Start 18; Stop 42
catagcgaatcttgaccttgagttc

SEQ ID NO: 420601 - DNA, 25 bp, Artificial
  probe
  misc_feature (1)..(25): SEQ ID NO: 5758; WAN024F8F; Start 17; Stop 41
acatagcgaatcttgaccttgagtt

SEQ ID NO: 420602 - DNA, 25 bp, Artificial
  probe
  misc_feature (1)..(25): SEQ ID NO: 5758; WAN024F8F; Start 23; Stop 47
cgaatcttgaccttgagttcatcag

SEQ ID NO: 420603 - DNA, 25 bp, Artificial
  probe
  misc_feature (1)..(25): SEQ ID NO: 5758; WAN024F8F; Start 24; Stop 48
gaatcttgaccttgagttcatcagc

SEQ ID NO: 420604 - DNA, 25 bp, Artificial
  probe
  misc_feature (1)..(25): SEQ ID NO: 5758; WAN024F8F; Start 20; Stop 44
tagcgaatcttgaccttgagttcat

SEQ ID NO: 420605 - DNA, 25 bp, Artificial
  probe
  misc_feature (1)..(25): SEQ ID NO: 5758; WAN024F8F; Start 19; Stop 43
atagcgaatcttgaccttgagttca

SEQ ID NO: 420606 - DNA, 25 bp, Artificial
  probe
  misc_feature (1)..(25): SEQ ID NO: 5758; WAN024F8F; Start 16; Stop 40
cacatagcgaatcttgaccttgagt

SEQ ID NO: 420607 - DNA, 25 bp, Artificial
  probe
  misc_feature (1)..(25): SEQ ID NO: 5758; WAN024F8F; Start 34; Stop 58
cttgagttcatcagctaccatcttg

SEQ ID NO: 420608 - DNA, 25 bp, Artificial
  probe
  misc_feature (1)..(25): SEQ ID NO: 5758; WAN024F8F; Start 26; Stop 50
atcttgaccttgagttcatcagcta

SEQ ID NO: 420609 - DNA, 25 bp, Artificial
  probe
  misc_feature (1)..(25): SEQ ID NO: 5758; WAN024F8F; Start 21; Stop 45
agcgaatcttgaccttgagttcatc

SEQ ID NO: 420610 - DNA, 25 bp, Artificial
  probe
  misc_feature (1)..(25): SEQ ID NO: 5758; WAN024F8F; Start 25; Stop 49
aatcttgaccttgagttcatcagct

SEQ ID NO: 420611 - DNA, 25 bp, Artificial
  probe
  misc_feature (1)..(25): SEQ ID NO: 5758; WAN024F8F; Start 33; Stop 57
ccttgagttcatcagctaccatctt

SEQ ID NO: 420612 - DNA, 25 bp, Artificial
  probe
  misc_feature (1)..(25): SEQ ID NO: 5758; WAN024F8F; Start 27; Stop 51
tcttgaccttgagttcatcagctac

SEQ ID NO: 420613 - DNA, 25 bp, Artificial
  probe
  misc_feature (1)..(25): SEQ ID NO: 5758; WAN024F8F; Start 22; Stop 46
gcgaatcttgaccttgagttcatca

SEQ ID NO: 420614 - DNA, 25 bp, Artificial
  probe
  misc_feature (1)..(25): SEQ ID NO: 5758; WAN024F8F; Start 15; Stop 39
gcacatagcgaatcttgaccttgag

SEQ ID NO: 420615 - DNA, 25 bp, Artificial
  probe
  misc_feature (1)..(25): SEQ ID NO: 5758; WAN024F8F; Start 31; Stop 55
gaccttgagttcatcagctaccatc

SEQ ID NO: 420616 - DNA, 25 bp, Artificial
  probe
  misc_feature (1)..(25): SEQ ID NO: 5758; WAN024F8F; Start 28; Stop 52
cttgaccttgagttcatcagctacc

SEQ ID NO: 420617 - DNA, 25 bp, Artificial
  probe
  misc_feature (1)..(25): SEQ ID NO: 5758; WAN024F8F; Start 35; Stop 59
ttgagttcatcagctaccatcttgg

SEQ ID NO: 420618 - DNA, 25 bp, Artificial
  probe
  misc_feature (1)..(25): SEQ ID NO: 5758; WAN024F8F; Start 32; Stop 56
accttgagttcatcagctaccatct

SEQ ID NO: 420619 - DNA, 25 bp, Artificial
  probe
  misc_feature (1)..(25): SEQ ID NO: 5758; WAN024F8F; Start 30; Stop 54
tgaccttgagttcatcagctaccat

SEQ ID NO: 420620 - DNA, 25 bp, Artificial
  probe
  misc_feature (1)..(25): SEQ ID NO: 5758; WAN024F8F; Start 29; Stop 53
ttgaccttgagttcatcagctacca

SEQ ID NO: 420621 - DNA, 25 bp, Artificial
  probe
  misc_feature (1)..(25): SEQ ID NO: 5758; WAN024F8F; Start 67; Stop 91
ggtttcgataccagaataagtaccg

SEQ ID NO: 420622 - DNA, 25 bp, Artificial
  probe
  misc_feature (1)..(25): SEQ ID NO: 5758; WAN024F8F; Start 66; Stop 90
cggtttcgataccagaataagtacc

SEQ ID NO: 420623 - DNA, 25 bp, Artificial
  probe
  misc_feature (1)..(25): SEQ ID NO: 5758; WAN024F8F; Start 68; Stop 92
gtttcgataccagaataagtaccgg

SEQ ID NO: 420624 - DNA, 25 bp, Artificial
  probe
  misc_feature (1)..(25): SEQ ID NO: 5758; WAN024F8F; Start 65; Stop 89
tcggtttcgataccagaataagtac

SEQ ID NO: 420625 - DNA, 25 bp, Artificial
  probe
  misc_feature (1)..(25): SEQ ID NO: 5758; WAN024F8F; Start 64; Stop 88
gtcggtttcgataccagaataagta

SEQ ID NO: 420626 - DNA, 25 bp, Artificial
  probe
  misc_feature (1)..(25): SEQ ID NO: 5758; WAN024F8F; Start 62; Stop 86
aagtcggtttcgataccagaataag

SEQ ID NO: 420627 - DNA, 25 bp, Artificial
  probe
  misc_feature (1)..(25): SEQ ID NO: 5758; WAN024F8F; Start 61; Stop 85
caagtcggtttcgataccagaataa

SEQ ID NO: 420628 - DNA, 25 bp, Artificial
  probe
  misc_feature (1)..(25): SEQ ID NO: 5758; WAN024F8F; Start 63; Stop 87
agtcggtttcgataccagaataagt

SEQ ID NO: 420629 - DNA, 25 bp, Artificial
  probe
  misc_feature (1)..(25): SEQ ID NO: 5758; WAN024F8F; Start 113; Stop 137
aaattgggaacgtcttgtttgacac

SEQ ID NO: 420630 - DNA, 25 bp, Artificial
  probe
  misc_feature (1)..(25): SEQ ID NO: 5758; WAN024F8F; Start 60; Stop 84
ccaagtcggtttcgataccagaata

SEQ ID NO: 420631 - DNA, 25 bp, Artificial
  probe
  misc_feature (1)..(25): SEQ ID NO: 5758; WAN024F8F; Start 36; Stop 60
tgagttcatcagctaccatcttggc

SEQ ID NO: 420632 - DNA, 25 bp, Artificial
  probe
  misc_feature (1)..(25): SEQ ID NO: 5758; WAN024F8F; Start 98; Stop 122
ggatctttgtaaccaaaattgggaa

SEQ ID NO: 420633 - DNA, 25 bp, Artificial
  probe
  misc_feature (1)..(25): SEQ ID NO: 5759; WAN024DLO; Start 88; Stop 112
cgtagacaacaacagaaaccttatc

SEQ ID NO: 420634 - DNA, 25 bp, Artificial
  probe
  misc_feature (1)..(25): SEQ ID NO: 5759; WAN024DLO; Start 87; Stop 111
tcgtagacaacaacagaaaccttat

SEQ ID NO: 420635 - DNA, 25 bp, Artificial
  probe
  misc_feature (1)..(25): SEQ ID NO: 5759; WAN024DLO; Start 62; Stop 86
aactactttgtcagggtcattcttg

SEQ ID NO: 420636 - DNA, 25 bp, Artificial
  probe
  misc_feature (1)..(25): SEQ ID NO: 5759; WAN024DLO; Start 89; Stop 113
gtagacaacaacagaaaccttatca

SEQ ID NO: 420637 - DNA, 25 bp, Artificial
  probe
  misc_feature (1)..(25): SEQ ID NO: 5759; WAN024DLO; Start 95; Stop 119
aacaacagaaaccttatcagcactt

SEQ ID NO: 420638 - DNA, 25 bp, Artificial
  probe
  misc_feature (1)..(25): SEQ ID NO: 5759; WAN024DLO; Start 90; Stop 114
tagacaacaacagaaaccttatcag

SEQ ID NO: 420639 - DNA, 25 bp, Artificial
  probe
  misc_feature (1)..(25): SEQ ID NO: 5759; WAN024DLO; Start 64; Stop 88
ctactttgtcagggtcattcttgtc

SEQ ID NO: 420640 - DNA, 25 bp, Artificial
  probe
  misc_feature (1)..(25): SEQ ID NO: 5759; WAN024DLO; Start 180; Stop 204
ccatcatagctgtatgtctcatctt

SEQ ID NO: 420641 - DNA, 25 bp, Artificial
  probe
  misc_feature (1)..(25): SEQ ID NO: 5759; WAN024DLO; Start 91; Stop 115
agacaacaacagaaaccttatcagc

SEQ ID NO: 420642 - DNA, 25 bp, Artificial
  probe
  misc_feature (1)..(25): SEQ ID NO: 5759; WAN024DLO; Start 61; Stop 85
caactactttgtcagggtcattctt

SEQ ID NO: 420643 - DNA, 25 bp, Artificial
  probe
  misc_feature (1)..(25): SEQ ID NO: 5759; WAN024DLO; Start 94; Stop 118
caacaacagaaaccttatcagcact

SEQ ID NO: 420644 - DNA, 25 bp, Artificial
  probe
  misc_feature (1)..(25): SEQ ID NO: 5759; WAN024DLO; Start 92; Stop 116
gacaacaacagaaaccttatcagca

SEQ ID NO: 420645 - DNA, 25 bp, Artificial
  probe
  misc_feature (1)..(25): SEQ ID NO: 5759; WAN024DLO; Start 13; Stop 37
gagtttgtttccaagttcctctttc

SEQ ID NO: 420646 - DNA, 25 bp, Artificial
  probe
  misc_feature (1)..(25): SEQ ID NO: 5759; WAN024DLO; Start 63; Stop 87
actactttgtcagggtcattcttgt

SEQ ID NO: 420647 - DNA, 25 bp, Artificial
  probe
  misc_feature (1)..(25): SEQ ID NO: 5759; WAN024DLO; Start 93; Stop 117
acaacaacagaaaccttatcagcac

SEQ ID NO: 420648 - DNA, 25 bp, Artificial
  probe
  misc_feature (1)..(25): SEQ ID NO: 5759; WAN024DLO; Start 14; Stop 38
agtttgtttccaagttcctctttcc

SEQ ID NO: 420649 - DNA, 25 bp, Artificial
  probe
  misc_feature (1)..(25): SEQ ID NO: 5759; WAN024DLO; Start 96; Stop 120
acaacagaaaccttatcagcacttg

SEQ ID NO: 420650 - DNA, 25 bp, Artificial
  probe
  misc_feature (1)..(25): SEQ ID NO: 5759; WAN024DLO; Start 86; Stop 110
gtcgtagacaacaacagaaacctta

SEQ ID NO: 420651 - DNA, 25 bp, Artificial
  probe
  misc_feature (1)..(25): SEQ ID NO: 5759; WAN024DLO; Start 177; Stop 201
ttgccatcatagctgtatgtctcat

SEQ ID NO: 420652 - DNA, 25 bp, Artificial
  probe
  misc_feature (1)..(25): SEQ ID NO: 5759; WAN024DLO; Start 58; Stop 82
ttccaactactttgtcagggtcatt

SEQ ID NO: 420653 - DNA, 25 bp, Artificial
  probe
  misc_feature (1)..(25): SEQ ID NO: 5759; WAN024DLO; Start 179; Stop 203
gccatcatagctgtatgtctcatct

SEQ ID NO: 420654 - DNA, 25 bp, Artificial
  probe
  misc_feature (1)..(25): SEQ ID NO: 5759; WAN024DLO; Start 178; Stop 202
tgccatcatagctgtatgtctcatc

SEQ ID NO: 420655 - DNA, 25 bp, Artificial
  probe
  misc_feature (1)..(25): SEQ ID NO: 5759; WAN024DLO; Start 97; Stop 121
caacagaaaccttatcagcacttgg

SEQ ID NO: 420656 - DNA, 25 bp, Artificial
  probe
  misc_feature (1)..(25): SEQ ID NO: 5759; WAN024DLO; Start 68; Stop 92
tttgtcagggtcattcttgtcgtag

SEQ ID NO: 420657 - DNA, 25 bp, Artificial
  probe
  misc_feature (1)..(25): SEQ ID NO: 5759; WAN024DLO; Start 67; Stop 91
ctttgtcagggtcattcttgtcgta

SEQ ID NO: 420658 - DNA, 25 bp, Artificial
  probe
  misc_feature (1)..(25): SEQ ID NO: 5759; WAN024DLO; Start 65; Stop 89
tactttgtcagggtcattcttgtcg

SEQ ID NO: 420659 - DNA, 25 bp, Artificial
  probe
  misc_feature (1)..(25): SEQ ID NO: 5759; WAN024DLO; Start 60; Stop 84
ccaactactttgtcagggtcattct

SEQ ID NO: 420660 - DNA, 25 bp, Artificial
  probe
  misc_feature (1)..(25): SEQ ID NO: 5759; WAN024DLO; Start 59; Stop 83
tccaactactttgtcagggtcattc

SEQ ID NO: 420661 - DNA, 25 bp, Artificial
  probe
  misc_feature (1)..(25): SEQ ID NO: 5759; WAN024DLO; Start 15; Stop 39
gtttgtttccaagttcctctttccc

SEQ ID NO: 420662 - DNA, 25 bp, Artificial
  probe
  misc_feature (1)..(25): SEQ ID NO: 5759; WAN024DLO; Start 57; Stop 81
gttccaactactttgtcagggtcat

SEQ ID NO: 420663 - DNA, 25 bp, Artificial
  probe
  misc_feature (1)..(25): SEQ ID NO: 5759; WAN024DLO; Start 185; Stop 209
atagctgtatgtctcatctttcagg

SEQ ID NO: 420664 - DNA, 25 bp, Artificial
  probe
  misc_feature (1)..(25): SEQ ID NO: 5759; WAN024DLO; Start 124; Stop 148
accaaagggtcaaatcaacttgttt

SEQ ID NO: 420665 - DNA, 25 bp, Artificial
  probe
  misc_feature (1)..(25): SEQ ID NO: 5759; WAN024DLO; Start 183; Stop 207
tcatagctgtatgtctcatctttca

SEQ ID NO: 420666 - DNA, 25 bp, Artificial
  probe
  misc_feature (1)..(25): SEQ ID NO: 5760; WAN024BGJ; Start 285; Stop 309
ttcttgaaatcgtaacaccactttg

SEQ ID NO: 420667 - DNA, 25 bp, Artificial
  probe
  misc_feature (1)..(25): SEQ ID NO: 5760; WAN024BGJ; Start 31; Stop 55
ttgataaccactgtcagccaagatt

SEQ ID NO: 420668 - DNA, 25 bp, Artificial
  probe
  misc_feature (1)..(25): SEQ ID NO: 5760; WAN024BGJ; Start 286; Stop 310
tcttgaaatcgtaacaccactttga

SEQ ID NO: 420669 - DNA, 25 bp, Artificial
  probe
  misc_feature (1)..(25): SEQ ID NO: 5760; WAN024BGJ; Start 284; Stop 308
gttcttgaaatcgtaacaccacttt

SEQ ID NO: 420670 - DNA, 25 bp, Artificial
  probe
  misc_feature (1)..(25): SEQ ID NO: 5760; WAN024BGJ; Start 283; Stop 307
agttcttgaaatcgtaacaccactt

SEQ ID NO: 420671 - DNA, 25 bp, Artificial
  probe
  misc_feature (1)..(25): SEQ ID NO: 5760; WAN024BGJ; Start 282; Stop 306
gagttcttgaaatcgtaacaccact

SEQ ID NO: 420672 - DNA, 25 bp, Artificial
  probe
  misc_feature (1)..(25): SEQ ID NO: 5760; WAN024BGJ; Start 32; Stop 56
tgataaccactgtcagccaagattt

SEQ ID NO: 420673 - DNA, 25 bp, Artificial
  probe
  misc_feature (1)..(25): SEQ ID NO: 5760; WAN024BGJ; Start 155; Stop 179
gtgacaatcgcttgagccttcatag

SEQ ID NO: 420674 - DNA, 25 bp, Artificial
  probe
  misc_feature (1)..(25): SEQ ID NO: 5760; WAN024BGJ; Start 34; Stop 58
ataaccactgtcagccaagatttta

SEQ ID NO: 420675 - DNA, 25 bp, Artificial
  probe
  misc_feature (1)..(25): SEQ ID NO: 5760; WAN024BGJ; Start 35; Stop 59
taaccactgtcagccaagattttac

SEQ ID NO: 420676 - DNA, 25 bp, Artificial
  probe
  misc_feature (1)..(25): SEQ ID NO: 5760; WAN024BGJ; Start 33; Stop 57
gataaccactgtcagccaagatttt

SEQ ID NO: 420677 - DNA, 25 bp, Artificial
  probe
  misc_feature (1)..(25): SEQ ID NO: 5760; WAN024BGJ; Start 154; Stop 178
tgtgacaatcgcttgagccttcata

SEQ ID NO: 420678 - DNA, 25 bp, Artificial
  probe
  misc_feature (1)..(25): SEQ ID NO: 5760; WAN024BGJ; Start 30; Stop 54
cttgataaccactgtcagccaagat

SEQ ID NO: 420679 - DNA, 25 bp, Artificial
  probe
  misc_feature (1)..(25): SEQ ID NO: 5760; WAN024BGJ; Start 147; Stop 171
cttgacttgtgacaatcgcttgagc

SEQ ID NO: 420680 - DNA, 25 bp, Artificial
  probe
  misc_feature (1)..(25): SEQ ID NO: 5760; WAN024BGJ; Start 23; Stop 47
atgagcccttgataaccactgtcag

SEQ ID NO: 420681 - DNA, 25 bp, Artificial
  probe
  misc_feature (1)..(25): SEQ ID NO: 5760; WAN024BGJ; Start 36; Stop 60
aaccactgtcagccaagattttacc

SEQ ID NO: 420682 - DNA, 25 bp, Artificial
  probe
  misc_feature (1)..(25): SEQ ID NO: 5760; WAN024BGJ; Start 29; Stop 53
ccttgataaccactgtcagccaaga

SEQ ID NO: 420683 - DNA, 25 bp, Artificial
  probe
  misc_feature (1)..(25): SEQ ID NO: 5760; WAN024BGJ; Start 38; Stop 62
ccactgtcagccaagattttaccag

SEQ ID NO: 420684 - DNA, 25 bp, Artificial
  probe
  misc_feature (1)..(25): SEQ ID NO: 5760; WAN024BGJ; Start 37; Stop 61
accactgtcagccaagattttacca

SEQ ID NO: 420685 - DNA, 25 bp, Artificial
  probe
  misc_feature (1)..(25): SEQ ID NO: 5760; WAN024BGJ; Start 39; Stop 63
cactgtcagccaagattttaccagc

SEQ ID NO: 420686 - DNA, 25 bp, Artificial
  probe
  misc_feature (1)..(25): SEQ ID NO: 5760; WAN024BGJ; Start 41; Stop 65
ctgtcagccaagattttaccagctt

SEQ ID NO: 420687 - DNA, 25 bp, Artificial
  probe
  misc_feature (1)..(25): SEQ ID NO: 5760; WAN024BGJ; Start 44; Stop 68
tcagccaagattttaccagcttgtc

SEQ ID NO: 420688 - DNA, 25 bp, Artificial
  probe
  misc_feature (1)..(25): SEQ ID NO: 5760; WAN024BGJ; Start 43; Stop 67
gtcagccaagattttaccagcttgt

SEQ ID NO: 420689 - DNA, 25 bp, Artificial
  probe
  misc_feature (1)..(25): SEQ ID NO: 5760; WAN024BGJ; Start 42; Stop 66
tgtcagccaagattttaccagcttg

SEQ ID NO: 420690 - DNA, 25 bp, Artificial
  probe
  misc_feature (1)..(25): SEQ ID NO: 5760; WAN024BGJ; Start 40; Stop 64
actgtcagccaagattttaccagct

SEQ ID NO: 420691 - DNA, 25 bp, Artificial
  probe
  misc_feature (1)..(25): SEQ ID NO: 5760; WAN024BGJ; Start 45; Stop 69
cagccaagattttaccagcttgtcc

SEQ ID NO: 420692 - DNA, 25 bp, Artificial
  probe
  misc_feature (1)..(25): SEQ ID NO: 5761; WAN024FKO; Start 118; Stop 142
gtagtcgttattgacagccttgtag

SEQ ID NO: 420693 - DNA, 25 bp, Artificial
  probe
  misc_feature (1)..(25): SEQ ID NO: 5761; WAN024FKO; Start 119; Stop 143
tagtcgttattgacagccttgtaga

SEQ ID NO: 420694 - DNA, 25 bp, Artificial
  probe
  misc_feature (1)..(25): SEQ ID NO: 5761; WAN024FKO; Start 117; Stop 141
tgtagtcgttattgacagccttgta

SEQ ID NO: 420695 - DNA, 25 bp, Artificial
  probe
  misc_feature (1)..(25): SEQ ID NO: 5761; WAN024FKO; Start 122; Stop 146
tcgttattgacagccttgtagagac

SEQ ID NO: 420696 - DNA, 25 bp, Artificial
  probe
  misc_feature (1)..(25): SEQ ID NO: 5761; WAN024FKO; Start 276; Stop 300
tctttgtaatcttaccctccttgtc

SEQ ID NO: 420697 - DNA, 25 bp, Artificial
  probe
  misc_feature (1)..(25): SEQ ID NO: 5761; WAN024FKO; Start 121; Stop 145
gtcgttattgacagccttgtagaga

SEQ ID NO: 420698 - DNA, 25 bp, Artificial
  probe
  misc_feature (1)..(25): SEQ ID NO: 5761; WAN024FKO; Start 120; Stop 144
agtcgttattgacagccttgtagag

SEQ ID NO: 420699 - DNA, 25 bp, Artificial
  probe
  misc_feature (1)..(25): SEQ ID NO: 5761; WAN024FKO; Start 275; Stop 299
atctttgtaatcttaccctccttgt

SEQ ID NO: 420700 - DNA, 25 bp, Artificial
  probe
  misc_feature (1)..(25): SEQ ID NO: 5761; WAN024FKO; Start 277; Stop 301
ctttgtaatcttaccctccttgtcc

SEQ ID NO: 420701 - DNA, 25 bp, Artificial
  probe
  misc_feature (1)..(25): SEQ ID NO: 5761; WAN024FKO; Start 114; Stop 138
ttgtgtagtcgttattgacagcctt

SEQ ID NO: 420702 - DNA, 25 bp, Artificial
  probe
  misc_feature (1)..(25): SEQ ID NO: 5761; WAN024FKO; Start 279; Stop 303
ttgtaatcttaccctccttgtccat

SEQ ID NO: 420703 - DNA, 25 bp, Artificial
  probe
  misc_feature (1)..(25): SEQ ID NO: 5761; WAN024FKO; Start 282; Stop 306
taatcttaccctccttgtccatcaa

SEQ ID NO: 420704 - DNA, 25 bp, Artificial
  probe
  misc_feature (1)..(25): SEQ ID NO: 5761; WAN024FKO; Start 278; Stop 302
tttgtaatcttaccctccttgtcca

SEQ ID NO: 420705 - DNA, 25 bp, Artificial
  probe
  misc_feature (1)..(25): SEQ ID NO: 5761; WAN024FKO; Start 271; Stop 295
gtcaatctttgtaatcttaccctcc

SEQ ID NO: 420706 - DNA, 25 bp, Artificial
  probe
  misc_feature (1)..(25): SEQ ID NO: 5761; WAN024FKO; Start 105; Stop 129
cttgccagtttgtgtagtcgttatt

SEQ ID NO: 420707 - DNA, 25 bp, Artificial
  probe
  misc_feature (1)..(25): SEQ ID NO: 5761; WAN024FKO; Start 272; Stop 296
tcaatctttgtaatcttaccctcct

SEQ ID NO: 420708 - DNA, 25 bp, Artificial
  probe
  misc_feature (1)..(25): SEQ ID NO: 5761; WAN024FKO; Start 281; Stop 305
gtaatcttaccctccttgtccatca

SEQ ID NO: 420709 - DNA, 25 bp, Artificial
  probe
  misc_feature (1)..(25): SEQ ID NO: 5761; WAN024FKO; Start 280; Stop 304
tgtaatcttaccctccttgtccatc

SEQ ID NO: 420710 - DNA, 25 bp, Artificial
  probe
  misc_feature (1)..(25): SEQ ID NO: 5761; WAN024FKO; Start 274; Stop 298
aatctttgtaatcttaccctccttg

SEQ ID NO: 420711 - DNA, 25 bp, Artificial
  probe
  misc_feature (1)..(25): SEQ ID NO: 5761; WAN024FKO; Start 106; Stop 130
ttgccagtttgtgtagtcgttattg

SEQ ID NO: 420712 - DNA, 25 bp, Artificial
  probe
  misc_feature (1)..(25): SEQ ID NO: 5761; WAN024FKO; Start 110; Stop 134
cagtttgtgtagtcgttattgacag

SEQ ID NO: 420713 - DNA, 25 bp, Artificial
  probe
  misc_feature (1)..(25): SEQ ID NO: 5761; WAN024FKO; Start 283; Stop 307
aatcttaccctccttgtccatcaaa

SEQ ID NO: 420714 - DNA, 25 bp, Artificial
  probe
  misc_feature (1)..(25): SEQ ID NO: 5761; WAN024FKO; Start 273; Stop 297
caatctttgtaatcttaccctcctt

SEQ ID NO: 420715 - DNA, 25 bp, Artificial
  probe
  misc_feature (1)..(25): SEQ ID NO: 5761; WAN024FKO; Start 270; Stop 294
tgtcaatctttgtaatcttaccctc

SEQ ID NO: 420716 - DNA, 25 bp, Artificial
  probe
  misc_feature (1)..(25): SEQ ID NO: 5761; WAN024FKO; Start 116; Stop 140
gtgtagtcgttattgacagccttgt

SEQ ID NO: 420717 - DNA, 25 bp, Artificial
  probe
  misc_feature (1)..(25): SEQ ID NO: 5761; WAN024FKO; Start 115; Stop 139
tgtgtagtcgttattgacagccttg

SEQ ID NO: 420718 - DNA, 25 bp, Artificial
  probe
  misc_feature (1)..(25): SEQ ID NO: 5761; WAN024FKO; Start 284; Stop 308
atcttaccctccttgtccatcaaag

SEQ ID NO: 420719 - DNA, 25 bp, Artificial
  probe
  misc_feature (1)..(25): SEQ ID NO: 5761; WAN024FKO; Start 109; Stop 133
ccagtttgtgtagtcgttattgaca

SEQ ID NO: 420720 - DNA, 25 bp, Artificial
  probe
  misc_feature (1)..(25): SEQ ID NO: 5761; WAN024FKO; Start 269; Stop 293
ttgtcaatctttgtaatcttaccct

SEQ ID NO: 420721 - DNA, 25 bp, Artificial
  probe
  misc_feature (1)..(25): SEQ ID NO: 5761; WAN024FKO; Start 111; Stop 135
agtttgtgtagtcgttattgacagc

SEQ ID NO: 420722 - DNA, 25 bp, Artificial
  probe
  misc_feature (1)..(25): SEQ ID NO: 5761; WAN024FKO; Start 268; Stop 292
cttgtcaatctttgtaatcttaccc

SEQ ID NO: 420723 - DNA, 25 bp, Artificial
  probe
  misc_feature (1)..(25): SEQ ID NO: 5761; WAN024FKO; Start 107; Stop 131
tgccagtttgtgtagtcgttattga

SEQ ID NO: 420724 - DNA, 25 bp, Artificial
  probe
  misc_feature (1)..(25): SEQ ID NO: 5761; WAN024FKO; Start 46; Stop 70
attaggacattccatcatgtaggca

SEQ ID NO: 420725 - DNA, 25 bp, Artificial
  probe
  misc_feature (1)..(25): SEQ ID NO: 5762; WAN024D7H; Start 701; Stop 725
tttgtttaccgagaagatttgtcac

SEQ ID NO: 420726 - DNA, 25 bp, Artificial
  probe
  misc_feature (1)..(25): SEQ ID NO: 5762; WAN024D7H; Start 698; Stop 722
ggatttgtttaccgagaagatttgt

SEQ ID NO: 420727 - DNA, 25 bp, Artificial
  probe
  misc_feature (1)..(25): SEQ ID NO: 5762; WAN024D7H; Start 697; Stop 721
tggatttgtttaccgagaagatttg

SEQ ID NO: 420728 - DNA, 25 bp, Artificial
  probe
  misc_feature (1)..(25): SEQ ID NO: 5762; WAN024D7H; Start 696; Stop 720
ctggatttgtttaccgagaagattt

SEQ ID NO: 420729 - DNA, 25 bp, Artificial
  probe
  misc_feature (1)..(25): SEQ ID NO: 5762; WAN024D7H; Start 700; Stop 724
atttgtttaccgagaagatttgtca

SEQ ID NO: 420730 - DNA, 25 bp, Artificial
  probe
  misc_feature (1)..(25): SEQ ID NO: 5762; WAN024D7H; Start 531; Stop 555
ctaaggaaatcagagcaaagatggt

SEQ ID NO: 420731 - DNA, 25 bp, Artificial
  probe
  misc_feature (1)..(25): SEQ ID NO: 5762; WAN024D7H; Start 532; Stop 556
taaggaaatcagagcaaagatggtg

SEQ ID NO: 420732 - DNA, 25 bp, Artificial
  probe
  misc_feature (1)..(25): SEQ ID NO: 5762; WAN024D7H; Start 699; Stop 723
gatttgtttaccgagaagatttgtc

SEQ ID NO: 420733 - DNA, 25 bp, Artificial
  probe
  misc_feature (1)..(25): SEQ ID NO: 5762; WAN024D7H; Start 685; Stop 709
cttgaactttgctggatttgtttac

SEQ ID NO: 420734 - DNA, 25 bp, Artificial
  probe
  misc_feature (1)..(25): SEQ ID NO: 5762; WAN024D7H; Start 530; Stop 554
tctaaggaaatcagagcaaagatgg

SEQ ID NO: 420735 - DNA, 25 bp, Artificial
  probe
  misc_feature (1)..(25): SEQ ID NO: 5762; WAN024D7H; Start 686; Stop 710
ttgaactttgctggatttgtttacc

SEQ ID NO: 420736 - DNA, 25 bp, Artificial
  probe
  misc_feature (1)..(25): SEQ ID NO: 5762; WAN024D7H; Start 594; Stop 618
agattcactcaactatctccaagaa

SEQ ID NO: 420737 - DNA, 25 bp, Artificial
  probe
  misc_feature (1)..(25): SEQ ID NO: 5762; WAN024D7H; Start 593; Stop 617
aagattcactcaactatctccaaga

SEQ ID NO: 420738 - DNA, 25 bp, Artificial
  probe
  misc_feature (1)..(25): SEQ ID NO: 5762; WAN024D7H; Start 590; Stop 614
ctgaagattcactcaactatctcca

SEQ ID NO: 420739 - DNA, 25 bp, Artificial
  probe
  misc_feature (1)..(25): SEQ ID NO: 5762; WAN024D7H; Start 597; Stop 621
ttcactcaactatctccaagaaagc

SEQ ID NO: 420740 - DNA, 25 bp, Artificial
  probe
  misc_feature (1)..(25): SEQ ID NO: 5762; WAN024D7H; Start 592; Stop 616
gaagattcactcaactatctccaag

SEQ ID NO: 420741 - DNA, 25 bp, Artificial
  probe
  misc_feature (1)..(25): SEQ ID NO: 5762; WAN024D7H; Start 529; Stop 553
ttctaaggaaatcagagcaaagatg

SEQ ID NO: 420742 - DNA, 25 bp, Artificial
  probe
  misc_feature (1)..(25): SEQ ID NO: 5762; WAN024D7H; Start 591; Stop 615
tgaagattcactcaactatctccaa

SEQ ID NO: 420743 - DNA, 25 bp, Artificial
  probe
  misc_feature (1)..(25): SEQ ID NO: 5762; WAN024D7H; Start 684; Stop 708
gcttgaactttgctggatttgttta

SEQ ID NO: 420744 - DNA, 25 bp, Artificial
  probe
  misc_feature (1)..(25): SEQ ID NO: 5762; WAN024D7H; Start 695; Stop 719
gctggatttgtttaccgagaagatt

SEQ ID NO: 420745 - DNA, 25 bp, Artificial
  probe
  misc_feature (1)..(25): SEQ ID NO: 5762; WAN024D7H; Start 589; Stop 613
gctgaagattcactcaactatctcc

SEQ ID NO: 420746 - DNA, 25 bp, Artificial
  probe
  misc_feature (1)..(25): SEQ ID NO: 5762; WAN024D7H; Start 429; Stop 453
gtaagactttgaagagccattggaa

SEQ ID NO: 420747 - DNA, 25 bp, Artificial
  probe
  misc_feature (1)..(25): SEQ ID NO: 5762; WAN024D7H; Start 430; Stop 454
taagactttgaagagccattggaag

SEQ ID NO: 420748 - DNA, 25 bp, Artificial
  probe
  misc_feature (1)..(25): SEQ ID NO: 5762; WAN024D7H; Start 546; Stop 570
caaagatggtgaccttcaaattcat

SEQ ID NO: 420749 - DNA, 25 bp, Artificial
  probe
  misc_feature (1)..(25): SEQ ID NO: 5762; WAN024D7H; Start 595; Stop 619
gattcactcaactatctccaagaaa

SEQ ID NO: 420750 - DNA, 25 bp, Artificial
  probe
  misc_feature (1)..(25): SEQ ID NO: 5762; WAN024D7H; Start 596; Stop 620
attcactcaactatctccaagaaag

SEQ ID NO: 420751 - DNA, 25 bp, Artificial
  probe
  misc_feature (1)..(25): SEQ ID NO: 5762; WAN024D7H; Start 692; Stop 716
tttgctggatttgtttaccgagaag

SEQ ID NO: 420752 - DNA, 25 bp, Artificial
  probe
  misc_feature (1)..(25): SEQ ID NO: 5762; WAN024D7H; Start 691; Stop 715
ctttgctggatttgtttaccgagaa

SEQ ID NO: 420753 - DNA, 25 bp, Artificial
  probe
  misc_feature (1)..(25): SEQ ID NO: 5762; WAN024D7H; Start 702; Stop 726
ttgtttaccgagaagatttgtcaca

SEQ ID NO: 420754 - DNA, 25 bp, Artificial
  probe
  misc_feature (1)..(25): SEQ ID NO: 5762; WAN024D7H; Start 504; Stop 528
tgtcatcagagtttgagactgtatt

SEQ ID NO: 420755 - DNA, 25 bp, Artificial
  probe
  misc_feature (1)..(25): SEQ ID NO: 5762; WAN024D7H; Start 503; Stop 527
ttgtcatcagagtttgagactgtat

SEQ ID NO: 420756 - DNA, 25 bp, Artificial
  probe
  misc_feature (1)..(25): SEQ ID NO: 5762; WAN024D7H; Start 502; Stop 526
cttgtcatcagagtttgagactgta

SEQ ID NO: 420757 - DNA, 25 bp, Artificial
  probe
  misc_feature (1)..(25): SEQ ID NO: 5762; WAN024D7H; Start 704; Stop 728
gtttaccgagaagatttgtcacaac

SEQ ID NO: 420758 - DNA, 25 bp, Artificial
  probe
  misc_feature (1)..(25): SEQ ID NO: 5763; WAN024CRY; Start 138; Stop 162
aaagggacaagatagcaatatgaaa

SEQ ID NO: 420759 - DNA, 25 bp, Artificial
  probe
  misc_feature (1)..(25): SEQ ID NO: 5763; WAN024CRY; Start 83; Stop 107
ctgttgctcctatcctagtctttgc

SEQ ID NO: 420760 - DNA, 25 bp, Artificial
  probe
  misc_feature (1)..(25): SEQ ID NO: 5763; WAN024CRY; Start 82; Stop 106
gctgttgctcctatcctagtctttg

SEQ ID NO: 420761 - DNA, 25 bp, Artificial
  probe
  misc_feature (1)..(25): SEQ ID NO: 5763; WAN024CRY; Start 132; Stop 156
acatcaaaagggacaagatagcaat

SEQ ID NO: 420762 - DNA, 25 bp, Artificial
  probe
  misc_feature (1)..(25): SEQ ID NO: 5763; WAN024CRY; Start 141; Stop 165
gggacaagatagcaatatgaaaact

SEQ ID NO: 420763 - DNA, 25 bp, Artificial
  probe
  misc_feature (1)..(25): SEQ ID NO: 5763; WAN024CRY; Start 140; Stop 164
agggacaagatagcaatatgaaaac

SEQ ID NO: 420764 - DNA, 25 bp, Artificial
  probe
  misc_feature (1)..(25): SEQ ID NO: 5763; WAN024CRY; Start 136; Stop 160
caaaagggacaagatagcaatatga

SEQ ID NO: 420765 - DNA, 25 bp, Artificial
  probe
  misc_feature (1)..(25): SEQ ID NO: 5763; WAN024CRY; Start 135; Stop 159
tcaaaagggacaagatagcaatatg

SEQ ID NO: 420766 - DNA, 25 bp, Artificial
  probe
  misc_feature (1)..(25): SEQ ID NO: 5763; WAN024CRY; Start 133; Stop 157
catcaaaagggacaagatagcaata

SEQ ID NO: 420767 - DNA, 25 bp, Artificial
  probe
  misc_feature (1)..(25): SEQ ID NO: 5763; WAN024CRY; Start 131; Stop 155
aacatcaaaagggacaagatagcaa

SEQ ID NO: 420768 - DNA, 25 bp, Artificial
  probe
  misc_feature (1)..(25): SEQ ID NO: 5763; WAN024CRY; Start 59; Stop 83
atttattcgttggaggtctaaaagc

SEQ ID NO: 420769 - DNA, 25 bp, Artificial
  probe
  misc_feature (1)..(25): SEQ ID NO: 5763; WAN024CRY; Start 139; Stop 163
aagggacaagatagcaatatgaaaa

SEQ ID NO: 420770 - DNA, 25 bp, Artificial
  probe
  misc_feature (1)..(25): SEQ ID NO: 5763; WAN024CRY; Start 137; Stop 161
aaaagggacaagatagcaatatgaa

SEQ ID NO: 420771 - DNA, 25 bp, Artificial
  probe
  misc_feature (1)..(25): SEQ ID NO: 5763; WAN024CRY; Start 130; Stop 154
caacatcaaaagggacaagatagca

SEQ ID NO: 420772 - DNA, 25 bp, Artificial
  probe
  misc_feature (1)..(25): SEQ ID NO: 5763; WAN024CRY; Start 57; Stop 81
ggatttattcgttggaggtctaaaa

SEQ ID NO: 420773 - DNA, 25 bp, Artificial
  probe
  misc_feature (1)..(25): SEQ ID NO: 5763; WAN024CRY; Start 142; Stop 166
ggacaagatagcaatatgaaaactg

SEQ ID NO: 420774 - DNA, 25 bp, Artificial
  probe
  misc_feature (1)..(25): SEQ ID NO: 5763; WAN024CRY; Start 134; Stop 158
atcaaaagggacaagatagcaatat

SEQ ID NO: 420775 - DNA, 25 bp, Artificial
  probe
  misc_feature (1)..(25): SEQ ID NO: 5763; WAN024CRY; Start 80; Stop 104
aagctgttgctcctatcctagtctt

SEQ ID NO: 420776 - DNA, 25 bp, Artificial
  probe
  misc_feature (1)..(25): SEQ ID NO: 5763; WAN024CRY; Start 30; Stop 54
taatctctcagggattgggctactc

SEQ ID NO: 420777 - DNA, 25 bp, Artificial
  probe
  misc_feature (1)..(25): SEQ ID NO: 5763; WAN024CRY; Start 29; Stop 53
ctaatctctcagggattgggctact

SEQ ID NO: 420778 - DNA, 25 bp, Artificial
  probe
  misc_feature (1)..(25): SEQ ID NO: 5763; WAN024CRY; Start 129; Stop 153
ccaacatcaaaagggacaagatagc

SEQ ID NO: 420779 - DNA, 25 bp, Artificial
  probe
  misc_feature (1)..(25): SEQ ID NO: 5763; WAN024CRY; Start 58; Stop 82
gatttattcgttggaggtctaaaag

SEQ ID NO: 420780 - DNA, 25 bp, Artificial
  probe
  misc_feature (1)..(25): SEQ ID NO: 5763; WAN024CRY; Start 61; Stop 85
ttattcgttggaggtctaaaagctg

SEQ ID NO: 420781 - DNA, 25 bp, Artificial
  probe
  misc_feature (1)..(25): SEQ ID NO: 5763; WAN024CRY; Start 60; Stop 84
tttattcgttggaggtctaaaagct

SEQ ID NO: 420782 - DNA, 25 bp, Artificial
  probe
  misc_feature (1)..(25): SEQ ID NO: 5763; WAN024CRY; Start 143; Stop 167
gacaagatagcaatatgaaaactgt

SEQ ID NO: 420783 - DNA, 25 bp, Artificial
  probe
  misc_feature (1)..(25): SEQ ID NO: 5763; WAN024CRY; Start 24; Stop 48
ccttcctaatctctcagggattggg

SEQ ID NO: 420784 - DNA, 25 bp, Artificial
  probe
  misc_feature (1)..(25): SEQ ID NO: 5763; WAN024CRY; Start 62; Stop 86
tattcgttggaggtctaaaagctgt

SEQ ID NO: 420785 - DNA, 25 bp, Artificial
  probe
  misc_feature (1)..(25): SEQ ID NO: 5763; WAN024CRY; Start 147; Stop 171
agatagcaatatgaaaactgttgtt

SEQ ID NO: 420786 - DNA, 25 bp, Artificial
  probe
  misc_feature (1)..(25): SEQ ID NO: 5763; WAN024CRY; Start 146; Stop 170
aagatagcaatatgaaaactgttgt

SEQ ID NO: 420787 - DNA, 25 bp, Artificial
  probe
  misc_feature (1)..(25): SEQ ID NO: 5763; WAN024CRY; Start 28; Stop 52
cctaatctctcagggattgggctac

SEQ ID NO: 420788 - DNA, 25 bp, Artificial
  probe
  misc_feature (1)..(25): SEQ ID NO: 5763; WAN024CRY; Start 27; Stop 51
tcctaatctctcagggattgggcta

SEQ ID NO: 420789 - DNA, 25 bp, Artificial
  probe
  misc_feature (1)..(25): SEQ ID NO: 5763; WAN024CRY; Start 145; Stop 169
caagatagcaatatgaaaactgttg

SEQ ID NO: 420790 - DNA, 25 bp, Artificial
  probe
  misc_feature (1)..(25): SEQ ID NO: 5763; WAN024CRY; Start 163; Stop 187
actgttgttttcttgtatatcctac

SEQ ID NO: 420791 - DNA, 25 bp, Artificial
  probe
  misc_feature (1)..(25): SEQ ID NO: 5764; WAN024BDX; Start 108; Stop 132
ttacgataatcatggtcatgccttg

SEQ ID NO: 420792 - DNA, 25 bp, Artificial
  probe
  misc_feature (1)..(25): SEQ ID NO: 5764; WAN024BDX; Start 107; Stop 131
gttacgataatcatggtcatgcctt

SEQ ID NO: 420793 - DNA, 25 bp, Artificial
  probe
  misc_feature (1)..(25): SEQ ID NO: 5764; WAN024BDX; Start 129; Stop 153
cttgctcagccaattccttcataac

SEQ ID NO: 420794 - DNA, 25 bp, Artificial
  probe
  misc_feature (1)..(25): SEQ ID NO: 5764; WAN024BDX; Start 155; Stop 179
ttaagtacgtctccaaccatctcag

SEQ ID NO: 420795 - DNA, 25 bp, Artificial
  probe
  misc_feature (1)..(25): SEQ ID NO: 5764; WAN024BDX; Start 106; Stop 130
ggttacgataatcatggtcatgcct

SEQ ID NO: 420796 - DNA, 25 bp, Artificial
  probe
  misc_feature (1)..(25): SEQ ID NO: 5764; WAN024BDX; Start 7; Stop 31
gttatcaaagatttggtcaggtgtt

SEQ ID NO: 420797 - DNA, 25 bp, Artificial
  probe
  misc_feature (1)..(25): SEQ ID NO: 5764; WAN024BDX; Start 8; Stop 32
ttatcaaagatttggtcaggtgttc

SEQ ID NO: 420798 - DNA, 25 bp, Artificial
  probe
  misc_feature (1)..(25): SEQ ID NO: 5764; WAN024BDX; Start 1; Stop 25
ttgtgggttatcaaagatttggtca

SEQ ID NO: 420799 - DNA, 25 bp, Artificial
  probe
  misc_feature (1)..(25): SEQ ID NO: 5764; WAN024BDX; Start 103; Stop 127
atgggttacgataatcatggtcatg

SEQ ID NO: 420800 - DNA, 25 bp, Artificial
  probe
  misc_feature (1)..(25): SEQ ID NO: 5764; WAN024BDX; Start 9; Stop 33
tatcaaagatttggtcaggtgttcc

SEQ ID NO: 420801 - DNA, 25 bp, Artificial
  probe
  misc_feature (1)..(25): SEQ ID NO: 5764; WAN024BDX; Start 154; Stop 178
gttaagtacgtctccaaccatctca

SEQ ID NO: 420802 - DNA, 25 bp, Artificial
  probe
  misc_feature (1)..(25): SEQ ID NO: 5764; WAN024BDX; Start 6; Stop 30
ggttatcaaagatttggtcaggtgt

SEQ ID NO: 420803 - DNA, 25 bp, Artificial
  probe
  misc_feature (1)..(25): SEQ ID NO: 5764; WAN024BDX; Start 2; Stop 26
tgtgggttatcaaagatttggtcag

SEQ ID NO: 420804 - DNA, 25 bp, Artificial
  probe
  misc_feature (1)..(25): SEQ ID NO: 5764; WAN024BDX; Start 205; Stop 229
gaagagcatgatgtctggattcatt

SEQ ID NO: 420805 - DNA, 25 bp, Artificial
  probe
  misc_feature (1)..(25): SEQ ID NO: 5764; WAN024BDX; Start 128; Stop 152
ccttgctcagccaattccttcataa

SEQ ID NO: 420806 - DNA, 25 bp, Artificial
  probe
  misc_feature (1)..(25): SEQ ID NO: 5764; WAN024BDX; Start 206; Stop 230
aagagcatgatgtctggattcattg

SEQ ID NO: 420807 - DNA, 25 bp, Artificial
  probe
  misc_feature (1)..(25): SEQ ID NO: 5764; WAN024BDX; Start 113; Stop 137
ataatcatggtcatgccttgctcag

SEQ ID NO: 420808 - DNA, 25 bp, Artificial
  probe
  misc_feature (1)..(25): SEQ ID NO: 5764; WAN024BDX; Start 112; Stop 136
gataatcatggtcatgccttgctca

SEQ ID NO: 420809 - DNA, 25 bp, Artificial
  probe
  misc_feature (1)..(25): SEQ ID NO: 5764; WAN024BDX; Start 109; Stop 133
tacgataatcatggtcatgccttgc

SEQ ID NO: 420810 - DNA, 25 bp, Artificial
  probe
  misc_feature (1)..(25): SEQ ID NO: 5764; WAN024BDX; Start 202; Stop 226
atcgaagagcatgatgtctggattc

SEQ ID NO: 420811 - DNA, 25 bp, Artificial
  probe
  misc_feature (1)..(25): SEQ ID NO: 5764; WAN024BDX; Start 5; Stop 29
gggttatcaaagatttggtcaggtg

SEQ ID NO: 420812 - DNA, 25 bp, Artificial
  probe
  misc_feature (1)..(25): SEQ ID NO: 5764; WAN024BDX; Start 3; Stop 27
gtgggttatcaaagatttggtcagg

SEQ ID NO: 420813 - DNA, 25 bp, Artificial
  probe
  misc_feature (1)..(25): SEQ ID NO: 5764; WAN024BDX; Start 4; Stop 28
tgggttatcaaagatttggtcaggt

SEQ ID NO: 420814 - DNA, 25 bp, Artificial
  probe
  misc_feature (1)..(25): SEQ ID NO: 5764; WAN024BDX; Start 210; Stop 234
gcatgatgtctggattcattgctag

SEQ ID NO: 420815 - DNA, 25 bp, Artificial
  probe
  misc_feature (1)..(25): SEQ ID NO: 5764; WAN024BDX; Start 190; Stop 214
agaagttggttcatcgaagagcatg

SEQ ID NO: 420816 - DNA, 25 bp, Artificial
  probe
  misc_feature (1)..(25): SEQ ID NO: 5764; WAN024BDX; Start 189; Stop 213
cagaagttggttcatcgaagagcat

SEQ ID NO: 420817 - DNA, 25 bp, Artificial
  probe
  misc_feature (1)..(25): SEQ ID NO: 5764; WAN024BDX; Start 130; Stop 154
ttgctcagccaattccttcataacg

SEQ ID NO: 420818 - DNA, 25 bp, Artificial
  probe
  misc_feature (1)..(25): SEQ ID NO: 5764; WAN024BDX; Start 156; Stop 180
taagtacgtctccaaccatctcagg

SEQ ID NO: 420819 - DNA, 25 bp, Artificial
  probe
  misc_feature (1)..(25): SEQ ID NO: 5764; WAN024BDX; Start 111; Stop 135
cgataatcatggtcatgccttgctc

SEQ ID NO: 420820 - DNA, 25 bp, Artificial
  probe
  misc_feature (1)..(25): SEQ ID NO: 5764; WAN024BDX; Start 104; Stop 128
tgggttacgataatcatggtcatgc

SEQ ID NO: 420821 - DNA, 25 bp, Artificial
  probe
  misc_feature (1)..(25): SEQ ID NO: 5764; WAN024BDX; Start 204; Stop 228
cgaagagcatgatgtctggattcat

SEQ ID NO: 420822 - DNA, 25 bp, Artificial
  probe
  misc_feature (1)..(25): SEQ ID NO: 5764; WAN024BDX; Start 203; Stop 227
tcgaagagcatgatgtctggattca

SEQ ID NO: 420823 - DNA, 25 bp, Artificial
  probe
  misc_feature (1)..(25): SEQ ID NO: 5764; WAN024BDX; Start 192; Stop 216
aagttggttcatcgaagagcatgat

SEQ ID NO: 420824 - DNA, 25 bp, Artificial
  probe
  misc_feature (1)..(25): SEQ ID NO: 5765; WAN024F2D; Start 669; Stop 693
ttatggtaagcatgtcatcactcat

SEQ ID NO: 420825 - DNA, 25 bp, Artificial
  probe
  misc_feature (1)..(25): SEQ ID NO: 5765; WAN024F2D; Start 663; Stop 687
cctaagttatggtaagcatgtcatc

SEQ ID NO: 420826 - DNA, 25 bp, Artificial
  probe
  misc_feature (1)..(25): SEQ ID NO: 5765; WAN024F2D; Start 668; Stop 692
gttatggtaagcatgtcatcactca

SEQ ID NO: 420827 - DNA, 25 bp, Artificial
  probe
  misc_feature (1)..(25): SEQ ID NO: 5765; WAN024F2D; Start 666; Stop 690
aagttatggtaagcatgtcatcact

SEQ ID NO: 420828 - DNA, 25 bp, Artificial
  probe
  misc_feature (1)..(25): SEQ ID NO: 5765; WAN024F2D; Start 665; Stop 689
taagttatggtaagcatgtcatcac

SEQ ID NO: 420829 - DNA, 25 bp, Artificial
  probe
  misc_feature (1)..(25): SEQ ID NO: 5765; WAN024F2D; Start 667; Stop 691
agttatggtaagcatgtcatcactc

SEQ ID NO: 420830 - DNA, 25 bp, Artificial
  probe
  misc_feature (1)..(25): SEQ ID NO: 5765; WAN024F2D; Start 500; Stop 524
caacaggtggtaagtcttatccttc

SEQ ID NO: 420831 - DNA, 25 bp, Artificial
  probe
  misc_feature (1)..(25): SEQ ID NO: 5765; WAN024F2D; Start 664; Stop 688
ctaagttatggtaagcatgtcatca

SEQ ID NO: 420832 - DNA, 25 bp, Artificial
  probe
  misc_feature (1)..(25): SEQ ID NO: 5765; WAN024F2D; Start 496; Stop 520
gtcacaacaggtggtaagtcttatc

SEQ ID NO: 420833 - DNA, 25 bp, Artificial
  probe
  misc_feature (1)..(25): SEQ ID NO: 5765; WAN024F2D; Start 499; Stop 523
acaacaggtggtaagtcttatcctt

SEQ ID NO: 420834 - DNA, 25 bp, Artificial
  probe
  misc_feature (1)..(25): SEQ ID NO: 5765; WAN024F2D; Start 566; Stop 590
ttaagcataccatcaccgatcttga

SEQ ID NO: 420835 - DNA, 25 bp, Artificial
  probe
  misc_feature (1)..(25): SEQ ID NO: 5765; WAN024F2D; Start 495; Stop 519
tgtcacaacaggtggtaagtcttat

SEQ ID NO: 420836 - DNA, 25 bp, Artificial
  probe
  misc_feature (1)..(25): SEQ ID NO: 5765; WAN024F2D; Start 498; Stop 522
cacaacaggtggtaagtcttatcct

SEQ ID NO: 420837 - DNA, 25 bp, Artificial
  probe
  misc_feature (1)..(25): SEQ ID NO: 5765; WAN024F2D; Start 497; Stop 521
tcacaacaggtggtaagtcttatcc

SEQ ID NO: 420838 - DNA, 25 bp, Artificial
  probe
  misc_feature (1)..(25): SEQ ID NO: 5765; WAN024F2D; Start 799; Stop 823
tctgagaaggacttggttacatttc

SEQ ID NO: 420839 - DNA, 25 bp, Artificial
  probe
  misc_feature (1)..(25): SEQ ID NO: 5765; WAN024F2D; Start 501; Stop 525
aacaggtggtaagtcttatccttcg

SEQ ID NO: 420840 - DNA, 25 bp, Artificial
  probe
  misc_feature (1)..(25): SEQ ID NO: 5765; WAN024F2D; Start 567; Stop 591
taagcataccatcaccgatcttgag

SEQ ID NO: 420841 - DNA, 25 bp, Artificial
  probe
  misc_feature (1)..(25): SEQ ID NO: 5765; WAN024F2D; Start 393; Stop 417
tggtcaagttgctactcaaatagaa

SEQ ID NO: 420842 - DNA, 25 bp, Artificial
  probe
  misc_feature (1)..(25): SEQ ID NO: 5765; WAN024F2D; Start 494; Stop 518
ttgtcacaacaggtggtaagtctta

SEQ ID NO: 420843 - DNA, 25 bp, Artificial
  probe
  misc_feature (1)..(25): SEQ ID NO: 5765; WAN024F2D; Start 798; Stop 822
ttctgagaaggacttggttacattt

SEQ ID NO: 420844 - DNA, 25 bp, Artificial
  probe
  misc_feature (1)..(25): SEQ ID NO: 5765; WAN024F2D; Start 797; Stop 821
tttctgagaaggacttggttacatt

SEQ ID NO: 420845 - DNA, 25 bp, Artificial
  probe
  misc_feature (1)..(25): SEQ ID NO: 5765; WAN024F2D; Start 394; Stop 418
ggtcaagttgctactcaaatagaaa

SEQ ID NO: 420846 - DNA, 25 bp, Artificial
  probe
  misc_feature (1)..(25): SEQ ID NO: 5765; WAN024F2D; Start 796; Stop 820
ctttctgagaaggacttggttacat

SEQ ID NO: 420847 - DNA, 25 bp, Artificial
  probe
  misc_feature (1)..(25): SEQ ID NO: 5765; WAN024F2D; Start 392; Stop 416
gtggtcaagttgctactcaaataga

SEQ ID NO: 420848 - DNA, 25 bp, Artificial
  probe
  misc_feature (1)..(25): SEQ ID NO: 5765; WAN024F2D; Start 794; Stop 818
aactttctgagaaggacttggttac

SEQ ID NO: 420849 - DNA, 25 bp, Artificial
  probe
  misc_feature (1)..(25): SEQ ID NO: 5765; WAN024F2D; Start 793; Stop 817
caactttctgagaaggacttggtta

SEQ ID NO: 420850 - DNA, 25 bp, Artificial
  probe
  misc_feature (1)..(25): SEQ ID NO: 5765; WAN024F2D; Start 399; Stop 423
agttgctactcaaatagaaatcgtt

SEQ ID NO: 420851 - DNA, 25 bp, Artificial
  probe
  misc_feature (1)..(25): SEQ ID NO: 5765; WAN024F2D; Start 398; Stop 422
aagttgctactcaaatagaaatcgt

SEQ ID NO: 420852 - DNA, 25 bp, Artificial
  probe
  misc_feature (1)..(25): SEQ ID NO: 5765; WAN024F2D; Start 952; Stop 976
cttgtccagtccattaaagaactta

SEQ ID NO: 420853 - DNA, 25 bp, Artificial
  probe
  misc_feature (1)..(25): SEQ ID NO: 5765; WAN024F2D; Start 1030; Stop 1054
ggagtcagtctcaaggaaatcaatc

SEQ ID NO: 420854 - DNA, 25 bp, Artificial
  probe
  misc_feature (1)..(25): SEQ ID NO: 5765; WAN024F2D; Start 591; Stop 615
ggctgctgaaagtcctttattaaca

SEQ ID NO: 420855 - DNA, 25 bp, Artificial
  probe
  misc_feature (1)..(25): SEQ ID NO: 5765; WAN024F2D; Start 662; Stop 686
ccctaagttatggtaagcatgtcat

SEQ ID NO: 420856 - DNA, 25 bp, Artificial
  probe
  misc_feature (1)..(25): SEQ ID NO: 5765; WAN024F2D; Start 397; Stop 421
caagttgctactcaaatagaaatcg

SEQ ID NO: 420857 - DNA, 25 bp, Artificial
  probe
  misc_feature (1)..(25): SEQ ID NO: 5766; WAN024F22; Start 1104; Stop 1128
atacggtgtagagattattgccatt

SEQ ID NO: 420858 - DNA, 25 bp, Artificial
  probe
  misc_feature (1)..(25): SEQ ID NO: 5766; WAN024F22; Start 163; Stop 187
gtggcgattaaggctattattgatt

SEQ ID NO: 420859 - DNA, 25 bp, Artificial
  probe
  misc_feature (1)..(25): SEQ ID NO: 5766; WAN024F22; Start 1105; Stop 1129
tacggtgtagagattattgccattg

SEQ ID NO: 420860 - DNA, 25 bp, Artificial
  probe
  misc_feature (1)..(25): SEQ ID NO: 5766; WAN024F22; Start 1097; Stop 1121
ttggtcaatacggtgtagagattat

SEQ ID NO: 420861 - DNA, 25 bp, Artificial
  probe
  misc_feature (1)..(25): SEQ ID NO: 5766; WAN024F22; Start 235; Stop 259
gctaagattcaagaacaaggtaagt

SEQ ID NO: 420862 - DNA, 25 bp, Artificial
  probe
  misc_feature (1)..(25): SEQ ID NO: 5766; WAN024F22; Start 1103; Stop 1127
aatacggtgtagagattattgccat

SEQ ID NO: 420863 - DNA, 25 bp, Artificial
  probe
  misc_feature (1)..(25): SEQ ID NO: 5766; WAN024F22; Start 162; Stop 186
ggtggcgattaaggctattattgat

SEQ ID NO: 420864 - DNA, 25 bp, Artificial
  probe
  misc_feature (1)..(25): SEQ ID NO: 5766; WAN024F22; Start 1098; Stop 1122
tggtcaatacggtgtagagattatt

SEQ ID NO: 420865 - DNA, 25 bp, Artificial
  probe
  misc_feature (1)..(25): SEQ ID NO: 5766; WAN024F22; Start 1095; Stop 1119
aattggtcaatacggtgtagagatt

SEQ ID NO: 420866 - DNA, 25 bp, Artificial
  probe
  misc_feature (1)..(25): SEQ ID NO: 5766; WAN024F22; Start 1108; Stop 1132
ggtgtagagattattgccattggaa

SEQ ID NO: 420867 - DNA, 25 bp, Artificial
  probe
  misc_feature (1)..(25): SEQ ID NO: 5766; WAN024F22; Start 1093; Stop 1117
ttaattggtcaatacggtgtagaga

SEQ ID NO: 420868 - DNA, 25 bp, Artificial
  probe
  misc_feature (1)..(25): SEQ ID NO: 5766; WAN024F22; Start 523; Stop 547
gtgaccttgcgttctatgacttatc

SEQ ID NO: 420869 - DNA, 25 bp, Artificial
  probe
  misc_feature (1)..(25): SEQ ID NO: 5766; WAN024F22; Start 1096; Stop 1120
attggtcaatacggtgtagagatta

SEQ ID NO: 420870 - DNA, 25 bp, Artificial
  probe
  misc_feature (1)..(25): SEQ ID NO: 5766; WAN024F22; Start 1094; Stop 1118
taattggtcaatacggtgtagagat

SEQ ID NO: 420871 - DNA, 25 bp, Artificial
  probe
  misc_feature (1)..(25): SEQ ID NO: 5766; WAN024F22; Start 529; Stop 553
ttgcgttctatgacttatcaggaag

SEQ ID NO: 420872 - DNA, 25 bp, Artificial
  probe
  misc_feature (1)..(25): SEQ ID NO: 5766; WAN024F22; Start 528; Stop 552
cttgcgttctatgacttatcaggaa

SEQ ID NO: 420873 - DNA, 25 bp, Artificial
  probe
  misc_feature (1)..(25): SEQ ID NO: 5766; WAN024F22; Start 160; Stop 184
gaggtggcgattaaggctattattg

SEQ ID NO: 420874 - DNA, 25 bp, Artificial
  probe
  misc_feature (1)..(25): SEQ ID NO: 5766; WAN024F22; Start 158; Stop 182
atgaggtggcgattaaggctattat

SEQ ID NO: 420875 - DNA, 25 bp, Artificial
  probe
  misc_feature (1)..(25): SEQ ID NO: 5766; WAN024F22; Start 791; Stop 815
aagttgttcagcaatccgttaagaa

SEQ ID NO: 420876 - DNA, 25 bp, Artificial
  probe
  misc_feature (1)..(25): SEQ ID NO: 5766; WAN024F22; Start 1444; Stop 1468
caagttggtgtcaatgtcaatacag

SEQ ID NO: 420877 - DNA, 25 bp, Artificial
  probe
  misc_feature (1)..(25): SEQ ID NO: 5766; WAN024F22; Start 525; Stop 549
gaccttgcgttctatgacttatcag

SEQ ID NO: 420878 - DNA, 25 bp, Artificial
  probe
  misc_feature (1)..(25): SEQ ID NO: 5766; WAN024F22; Start 161; Stop 185
aggtggcgattaaggctattattga

SEQ ID NO: 420879 - DNA, 25 bp, Artificial
  probe
  misc_feature (1)..(25): SEQ ID NO: 5766; WAN024F22; Start 159; Stop 183
tgaggtggcgattaaggctattatt

SEQ ID NO: 420880 - DNA, 25 bp, Artificial
  probe
  misc_feature (1)..(25): SEQ ID NO: 5766; WAN024F22; Start 522; Stop 546
tgtgaccttgcgttctatgacttat

SEQ ID NO: 420881 - DNA, 25 bp, Artificial
  probe
  misc_feature (1)..(25): SEQ ID NO: 5766; WAN024F22; Start 521; Stop 545
atgtgaccttgcgttctatgactta

SEQ ID NO: 420882 - DNA, 25 bp, Artificial
  probe
  misc_feature (1)..(25): SEQ ID NO: 5766; WAN024F22; Start 790; Stop 814
gaagttgttcagcaatccgttaaga

SEQ ID NO: 420883 - DNA, 25 bp, Artificial
  probe
  misc_feature (1)..(25): SEQ ID NO: 5766; WAN024F22; Start 157; Stop 181
gatgaggtggcgattaaggctatta

SEQ ID NO: 420884 - DNA, 25 bp, Artificial
  probe
  misc_feature (1)..(25): SEQ ID NO: 5766; WAN024F22; Start 524; Stop 548
tgaccttgcgttctatgacttatca

SEQ ID NO: 420885 - DNA, 25 bp, Artificial
  probe
  misc_feature (1)..(25): SEQ ID NO: 5766; WAN024F22; Start 841; Stop 865
cgtattcggacagaattaactgaga

SEQ ID NO: 420886 - DNA, 25 bp, Artificial
  probe
  misc_feature (1)..(25): SEQ ID NO: 5766; WAN024F22; Start 840; Stop 864
tcgtattcggacagaattaactgag

SEQ ID NO: 420887 - DNA, 25 bp, Artificial
  probe
  misc_feature (1)..(25): SEQ ID NO: 5766; WAN024F22; Start 234; Stop 258
agctaagattcaagaacaaggtaag

SEQ ID NO: 420888 - DNA, 25 bp, Artificial
  probe
  misc_feature (1)..(25): SEQ ID NO: 5766; WAN024F22; Start 839; Stop 863
gtcgtattcggacagaattaactga

SEQ ID NO: 420889 - DNA, 25 bp, Artificial
  probe
  misc_feature (1)..(25): SEQ ID NO: 5766; WAN024F22; Start 248; Stop 272
aacaaggtaagttgaccaaggaatt

SEQ ID NO: 420890 - DNA, 25 bp, Artificial
  probe
  misc_feature (1)..(25): SEQ ID NO: 5767; WAN024FDB; Start 389; Stop 413
atatcagttcatcttcgctctatcg

SEQ ID NO: 420891 - DNA, 25 bp, Artificial
  probe
  misc_feature (1)..(25): SEQ ID NO: 5767; WAN024FDB; Start 393; Stop 417
cagttcatcttcgctctatcgtatt

SEQ ID NO: 420892 - DNA, 25 bp, Artificial
  probe
  misc_feature (1)..(25): SEQ ID NO: 5767; WAN024FDB; Start 394; Stop 418
agttcatcttcgctctatcgtatta

SEQ ID NO: 420893 - DNA, 25 bp, Artificial
  probe
  misc_feature (1)..(25): SEQ ID NO: 5767; WAN024FDB; Start 392; Stop 416
tcagttcatcttcgctctatcgtat

SEQ ID NO: 420894 - DNA, 25 bp, Artificial
  probe
  misc_feature (1)..(25): SEQ ID NO: 5767; WAN024FDB; Start 391; Stop 415
atcagttcatcttcgctctatcgta

SEQ ID NO: 420895 - DNA, 25 bp, Artificial
  probe
  misc_feature (1)..(25): SEQ ID NO: 5767; WAN024FDB; Start 390; Stop 414
tatcagttcatcttcgctctatcgt

SEQ ID NO: 420896 - DNA, 25 bp, Artificial
  probe
  misc_feature (1)..(25): SEQ ID NO: 5767; WAN024FDB; Start 1201; Stop 1225
tcttataccttcatcactcatacca

SEQ ID NO: 420897 - DNA, 25 bp, Artificial
  probe
  misc_feature (1)..(25): SEQ ID NO: 5767; WAN024FDB; Start 395; Stop 419
gttcatcttcgctctatcgtattat

SEQ ID NO: 420898 - DNA, 25 bp, Artificial
  probe
  misc_feature (1)..(25): SEQ ID NO: 5767; WAN024FDB; Start 660; Stop 684
gttgctcctagttacgaacctatat

SEQ ID NO: 420899 - DNA, 25 bp, Artificial
  probe
  misc_feature (1)..(25): SEQ ID NO: 5767; WAN024FDB; Start 659; Stop 683
agttgctcctagttacgaacctata

SEQ ID NO: 420900 - DNA, 25 bp, Artificial
  probe
  misc_feature (1)..(25): SEQ ID NO: 5767; WAN024FDB; Start 658; Stop 682
aagttgctcctagttacgaacctat

SEQ ID NO: 420901 - DNA, 25 bp, Artificial
  probe
  misc_feature (1)..(25): SEQ ID NO: 5767; WAN024FDB; Start 1202; Stop 1226
cttataccttcatcactcataccaa

SEQ ID NO: 420902 - DNA, 25 bp, Artificial
  probe
  misc_feature (1)..(25): SEQ ID NO: 5767; WAN024FDB; Start 1025; Stop 1049
cacatctgtatcgtcaagagttgtt

SEQ ID NO: 420903 - DNA, 25 bp, Artificial
  probe
  misc_feature (1)..(25): SEQ ID NO: 5767; WAN024FDB; Start 763; Stop 787
gaaggaatagaaggtgttgctcaga

SEQ ID NO: 420904 - DNA, 25 bp, Artificial
  probe
  misc_feature (1)..(25): SEQ ID NO: 5767; WAN024FDB; Start 762; Stop 786
agaaggaatagaaggtgttgctcag

SEQ ID NO: 420905 - DNA, 25 bp, Artificial
  probe
  misc_feature (1)..(25): SEQ ID NO: 5767; WAN024FDB; Start 396; Stop 420
ttcatcttcgctctatcgtattatt

SEQ ID NO: 420906 - DNA, 25 bp, Artificial
  probe
  misc_feature (1)..(25): SEQ ID NO: 5767; WAN024FDB; Start 764; Stop 788
aaggaatagaaggtgttgctcagag

SEQ ID NO: 420907 - DNA, 25 bp, Artificial
  probe
  misc_feature (1)..(25): SEQ ID NO: 5767; WAN024FDB; Start 388; Stop 412
tatatcagttcatcttcgctctatc

SEQ ID NO: 420908 - DNA, 25 bp, Artificial
  probe
  misc_feature (1)..(25): SEQ ID NO: 5767; WAN024FDB; Start 661; Stop 685
ttgctcctagttacgaacctatata

SEQ ID NO: 420909 - DNA, 25 bp, Artificial
  probe
  misc_feature (1)..(25): SEQ ID NO: 5767; WAN024FDB; Start 761; Stop 785
cagaaggaatagaaggtgttgctca

SEQ ID NO: 420910 - DNA, 25 bp, Artificial
  probe
  misc_feature (1)..(25): SEQ ID NO: 5767; WAN024FDB; Start 1200; Stop 1224
atcttataccttcatcactcatacc

SEQ ID NO: 420911 - DNA, 25 bp, Artificial
  probe
  misc_feature (1)..(25): SEQ ID NO: 5767; WAN024FDB; Start 766; Stop 790
ggaatagaaggtgttgctcagagtt

SEQ ID NO: 420912 - DNA, 25 bp, Artificial
  probe
  misc_feature (1)..(25): SEQ ID NO: 5767; WAN024FDB; Start 1206; Stop 1230
taccttcatcactcataccaaacat

SEQ ID NO: 420913 - DNA, 25 bp, Artificial
  probe
  misc_feature (1)..(25): SEQ ID NO: 5767; WAN024FDB; Start 1205; Stop 1229
ataccttcatcactcataccaaaca

SEQ ID NO: 420914 - DNA, 25 bp, Artificial
  probe
  misc_feature (1)..(25): SEQ ID NO: 5767; WAN024FDB; Start 387; Stop 411
ttatatcagttcatcttcgctctat

SEQ ID NO: 420915 - DNA, 25 bp, Artificial
  probe
  misc_feature (1)..(25): SEQ ID NO: 5767; WAN024FDB; Start 1207; Stop 1231
accttcatcactcataccaaacatt

SEQ ID NO: 420916 - DNA, 25 bp, Artificial
  probe
  misc_feature (1)..(25): SEQ ID NO: 5767; WAN024FDB; Start 1208; Stop 1232
ccttcatcactcataccaaacattt

SEQ ID NO: 420917 - DNA, 25 bp, Artificial
  probe
  misc_feature (1)..(25): SEQ ID NO: 5767; WAN024FDB; Start 751; Stop 775
ttaatgcaggcagaaggaatagaag

SEQ ID NO: 420918 - DNA, 25 bp, Artificial
  probe
  misc_feature (1)..(25): SEQ ID NO: 5767; WAN024FDB; Start 397; Stop 421
tcatcttcgctctatcgtattatta

SEQ ID NO: 420919 - DNA, 25 bp, Artificial
  probe
  misc_feature (1)..(25): SEQ ID NO: 5767; WAN024FDB; Start 347; Stop 371
ttaatgaaggttgtcaagctgagag

SEQ ID NO: 420920 - DNA, 25 bp, Artificial
  probe
  misc_feature (1)..(25): SEQ ID NO: 5767; WAN024FDB; Start 1077; Stop 1101
agggaatacaatcaggaactttcaa

SEQ ID NO: 420921 - DNA, 25 bp, Artificial
  probe
  misc_feature (1)..(25): SEQ ID NO: 5767; WAN024FDB; Start 1076; Stop 1100
aagggaatacaatcaggaactttca

SEQ ID NO: 420922 - DNA, 25 bp, Artificial
  probe
  misc_feature (1)..(25): SEQ ID NO: 5767; WAN024FDB; Start 812; Stop 836
ctttagatgaagaagttgtttgcca

SEQ ID NO: 420923 - DNA, 25 bp, Artificial
  probe
  misc_feature (1)..(25): SEQ ID NO: 5768; WAN024G6P; Start 184; Stop 208
ttactcattgtcgcaaccttacttt

SEQ ID NO: 420924 - DNA, 25 bp, Artificial
  probe
  misc_feature (1)..(25): SEQ ID NO: 5768; WAN024G6P; Start 183; Stop 207
tttactcattgtcgcaaccttactt

SEQ ID NO: 420925 - DNA, 25 bp, Artificial
  probe
  misc_feature (1)..(25): SEQ ID NO: 5768; WAN024G6P; Start 180; Stop 204
ttgtttactcattgtcgcaacctta

SEQ ID NO: 420926 - DNA, 25 bp, Artificial
  probe
  misc_feature (1)..(25): SEQ ID NO: 5768; WAN024G6P; Start 206; Stop 230
tttggtcaccttctgagttcataaa

SEQ ID NO: 420927 - DNA, 25 bp, Artificial
  probe
  misc_feature (1)..(25): SEQ ID NO: 5768; WAN024G6P; Start 205; Stop 229
ctttggtcaccttctgagttcataa

SEQ ID NO: 420928 - DNA, 25 bp, Artificial
  probe
  misc_feature (1)..(25): SEQ ID NO: 5768; WAN024G6P; Start 185; Stop 209
tactcattgtcgcaaccttactttg

SEQ ID NO: 420929 - DNA, 25 bp, Artificial
  probe
  misc_feature (1)..(25): SEQ ID NO: 5768; WAN024G6P; Start 182; Stop 206
gtttactcattgtcgcaaccttact

SEQ ID NO: 420930 - DNA, 25 bp, Artificial
  probe
  misc_feature (1)..(25): SEQ ID NO: 5768; WAN024G6P; Start 201; Stop 225
cttactttggtcaccttctgagttc

SEQ ID NO: 420931 - DNA, 25 bp, Artificial
  probe
  misc_feature (1)..(25): SEQ ID NO: 5768; WAN024G6P; Start 179; Stop 203
attgtttactcattgtcgcaacctt

SEQ ID NO: 420932 - DNA, 25 bp, Artificial
  probe
  misc_feature (1)..(25): SEQ ID NO: 5768; WAN024G6P; Start 181; Stop 205
tgtttactcattgtcgcaaccttac

SEQ ID NO: 420933 - DNA, 25 bp, Artificial
  probe
  misc_feature (1)..(25): SEQ ID NO: 5768; WAN024G6P; Start 178; Stop 202
aattgtttactcattgtcgcaacct

SEQ ID NO: 420934 - DNA, 25 bp, Artificial
  probe
  misc_feature (1)..(25): SEQ ID NO: 5768; WAN024G6P; Start 204; Stop 228
actttggtcaccttctgagttcata

SEQ ID NO: 420935 - DNA, 25 bp, Artificial
  probe
  misc_feature (1)..(25): SEQ ID NO: 5768; WAN024G6P; Start 203; Stop 227
tactttggtcaccttctgagttcat

SEQ ID NO: 420936 - DNA, 25 bp, Artificial
  probe
  misc_feature (1)..(25): SEQ ID NO: 5768; WAN024G6P; Start 42; Stop 66
caaatctttaaccaagttagcacca

SEQ ID NO: 420937 - DNA, 25 bp, Artificial
  probe
  misc_feature (1)..(25): SEQ ID NO: 5768; WAN024G6P; Start 41; Stop 65
tcaaatctttaaccaagttagcacc

SEQ ID NO: 420938 - DNA, 25 bp, Artificial
  probe
  misc_feature (1)..(25): SEQ ID NO: 5768; WAN024G6P; Start 202; Stop 226
ttactttggtcaccttctgagttca

SEQ ID NO: 420939 - DNA, 25 bp, Artificial
  probe
  misc_feature (1)..(25): SEQ ID NO: 5768; WAN024G6P; Start 43; Stop 67
aaatctttaaccaagttagcaccaa

SEQ ID NO: 420940 - DNA, 25 bp, Artificial
  probe
  misc_feature (1)..(25): SEQ ID NO: 5768; WAN024G6P; Start 45; Stop 69
atctttaaccaagttagcaccaatt

SEQ ID NO: 420941 - DNA, 25 bp, Artificial
  probe
  misc_feature (1)..(25): SEQ ID NO: 5768; WAN024G6P; Start 44; Stop 68
aatctttaaccaagttagcaccaat

SEQ ID NO: 420942 - DNA, 25 bp, Artificial
  probe
  misc_feature (1)..(25): SEQ ID NO: 5768; WAN024G6P; Start 200; Stop 224
ccttactttggtcaccttctgagtt

SEQ ID NO: 420943 - DNA, 25 bp, Artificial
  probe
  misc_feature (1)..(25): SEQ ID NO: 5768; WAN024G6P; Start 40; Stop 64
ttcaaatctttaaccaagttagcac

SEQ ID NO: 420944 - DNA, 25 bp, Artificial
  probe
  misc_feature (1)..(25): SEQ ID NO: 5768; WAN024G6P; Start 39; Stop 63
tttcaaatctttaaccaagttagca

SEQ ID NO: 420945 - DNA, 25 bp, Artificial
  probe
  misc_feature (1)..(25): SEQ ID NO: 5768; WAN024G6P; Start 198; Stop 222
aaccttactttggtcaccttctgag

SEQ ID NO: 420946 - DNA, 25 bp, Artificial
  probe
  misc_feature (1)..(25): SEQ ID NO: 5768; WAN024G6P; Start 197; Stop 221
caaccttactttggtcaccttctga

SEQ ID NO: 420947 - DNA, 25 bp, Artificial
  probe
  misc_feature (1)..(25): SEQ ID NO: 5768; WAN024G6P; Start 208; Stop 232
tggtcaccttctgagttcataaaat

SEQ ID NO: 420948 - DNA, 25 bp, Artificial
  probe
  misc_feature (1)..(25): SEQ ID NO: 5768; WAN024G6P; Start 210; Stop 234
gtcaccttctgagttcataaaatca

SEQ ID NO: 420949 - DNA, 25 bp, Artificial
  probe
  misc_feature (1)..(25): SEQ ID NO: 5768; WAN024G6P; Start 209; Stop 233
ggtcaccttctgagttcataaaatc

SEQ ID NO: 420950 - DNA, 25 bp, Artificial
  probe
  misc_feature (1)..(25): SEQ ID NO: 5768; WAN024G6P; Start 207; Stop 231
ttggtcaccttctgagttcataaaa

SEQ ID NO: 420951 - DNA, 25 bp, Artificial
  probe
  misc_feature (1)..(25): SEQ ID NO: 5768; WAN024G6P; Start 186; Stop 210
actcattgtcgcaaccttactttgg

SEQ ID NO: 420952 - DNA, 25 bp, Artificial
  probe
  misc_feature (1)..(25): SEQ ID NO: 5768; WAN024G6P; Start 211; Stop 235
tcaccttctgagttcataaaatcaa

SEQ ID NO: 420953 - DNA, 25 bp, Artificial
  probe
  misc_feature (1)..(25): SEQ ID NO: 5768; WAN024G6P; Start 72; Stop 96
gtctgtaatagcggccatgataacc

SEQ ID NO: 420954 - DNA, 25 bp, Artificial
  probe
  misc_feature (1)..(25): SEQ ID NO: 5768; WAN024G6P; Start 71; Stop 95
ggtctgtaatagcggccatgataac

SEQ ID NO: 420955 - DNA, 25 bp, Artificial
  probe
  misc_feature (1)..(25): SEQ ID NO: 5768; WAN024G6P; Start 199; Stop 223
accttactttggtcaccttctgagt

SEQ ID NO: 420956 - DNA, 25 bp, Artificial
  probe
  misc_feature (1)..(25): SEQ ID NO: 5769; WAN024DYS; Start 64; Stop 88
attattagtcctgtgcgaaagattg

SEQ ID NO: 420957 - DNA, 25 bp, Artificial
  probe
  misc_feature (1)..(25): SEQ ID NO: 5769; WAN024DYS; Start 65; Stop 89
ttattagtcctgtgcgaaagattgg

SEQ ID NO: 420958 - DNA, 25 bp, Artificial
  probe
  misc_feature (1)..(25): SEQ ID NO: 5769; WAN024DYS; Start 63; Stop 87
aattattagtcctgtgcgaaagatt

SEQ ID NO: 420959 - DNA, 25 bp, Artificial
  probe
  misc_feature (1)..(25): SEQ ID NO: 5769; WAN024DYS; Start 62; Stop 86
aaattattagtcctgtgcgaaagat

SEQ ID NO: 420960 - DNA, 25 bp, Artificial
  probe
  misc_feature (1)..(25): SEQ ID NO: 5769; WAN024DYS; Start 66; Stop 90
tattagtcctgtgcgaaagattggt

SEQ ID NO: 420961 - DNA, 25 bp, Artificial
  probe
  misc_feature (1)..(25): SEQ ID NO: 5769; WAN024DYS; Start 61; Stop 85
aaaattattagtcctgtgcgaaaga

SEQ ID NO: 420962 - DNA, 25 bp, Artificial
  probe
  misc_feature (1)..(25): SEQ ID NO: 5770; WAN024FLA; Start 19; Stop 43
tctggcacggttatactgaattgtc

SEQ ID NO: 420963 - DNA, 25 bp, Artificial
  probe
  misc_feature (1)..(25): SEQ ID NO: 5770; WAN024FLA; Start 16; Stop 40
ctgtctggcacggttatactgaatt

SEQ ID NO: 420964 - DNA, 25 bp, Artificial
  probe
  misc_feature (1)..(25): SEQ ID NO: 5770; WAN024FLA; Start 129; Stop 153
taatggcaccgtaaatcatactttc

SEQ ID NO: 420965 - DNA, 25 bp, Artificial
  probe
  misc_feature (1)..(25): SEQ ID NO: 5770; WAN024FLA; Start 127; Stop 151
gataatggcaccgtaaatcatactt

SEQ ID NO: 420966 - DNA, 25 bp, Artificial
  probe
  misc_feature (1)..(25): SEQ ID NO: 5770; WAN024FLA; Start 130; Stop 154
aatggcaccgtaaatcatactttct

SEQ ID NO: 420967 - DNA, 25 bp, Artificial
  probe
  misc_feature (1)..(25): SEQ ID NO: 5770; WAN024FLA; Start 21; Stop 45
tggcacggttatactgaattgtcaa

SEQ ID NO: 420968 - DNA, 25 bp, Artificial
  probe
  misc_feature (1)..(25): SEQ ID NO: 5770; WAN024FLA; Start 128; Stop 152
ataatggcaccgtaaatcatacttt

SEQ ID NO: 420969 - DNA, 25 bp, Artificial
  probe
  misc_feature (1)..(25): SEQ ID NO: 5770; WAN024FLA; Start 126; Stop 150
cgataatggcaccgtaaatcatact

SEQ ID NO: 420970 - DNA, 25 bp, Artificial
  probe
  misc_feature (1)..(25): SEQ ID NO: 5770; WAN024FLA; Start 18; Stop 42
gtctggcacggttatactgaattgt

SEQ ID NO: 420971 - DNA, 25 bp, Artificial
  probe
  misc_feature (1)..(25): SEQ ID NO: 5770; WAN024FLA; Start 17; Stop 41
tgtctggcacggttatactgaattg

SEQ ID NO: 420972 - DNA, 25 bp, Artificial
  probe
  misc_feature (1)..(25): SEQ ID NO: 5770; WAN024FLA; Start 23; Stop 47
gcacggttatactgaattgtcaaat

SEQ ID NO: 420973 - DNA, 25 bp, Artificial
  probe
  misc_feature (1)..(25): SEQ ID NO: 5770; WAN024FLA; Start 131; Stop 155
atggcaccgtaaatcatactttctg

SEQ ID NO: 420974 - DNA, 25 bp, Artificial
  probe
  misc_feature (1)..(25): SEQ ID NO: 5770; WAN024FLA; Start 25; Stop 49
acggttatactgaattgtcaaatca

SEQ ID NO: 420975 - DNA, 25 bp, Artificial
  probe
  misc_feature (1)..(25): SEQ ID NO: 5770; WAN024FLA; Start 20; Stop 44
ctggcacggttatactgaattgtca

SEQ ID NO: 420976 - DNA, 25 bp, Artificial
  probe
  misc_feature (1)..(25): SEQ ID NO: 5770; WAN024FLA; Start 24; Stop 48
cacggttatactgaattgtcaaatc

SEQ ID NO: 420977 - DNA, 25 bp, Artificial
  probe
  misc_feature (1)..(25): SEQ ID NO: 5770; WAN024FLA; Start 51; Stop 75
tgatgactttcttagcattatctgt

SEQ ID NO: 420978 - DNA, 25 bp, Artificial
  probe
  misc_feature (1)..(25): SEQ ID NO: 5770; WAN024FLA; Start 53; Stop 77
atgactttcttagcattatctgtcg

SEQ ID NO: 420979 - DNA, 25 bp, Artificial
  probe
  misc_feature (1)..(25): SEQ ID NO: 5770; WAN024FLA; Start 54; Stop 78
tgactttcttagcattatctgtcgc

SEQ ID NO: 420980 - DNA, 25 bp, Artificial
  probe
  misc_feature (1)..(25): SEQ ID NO: 5770; WAN024FLA; Start 22; Stop 46
ggcacggttatactgaattgtcaaa

SEQ ID NO: 420981 - DNA, 25 bp, Artificial
  probe
  misc_feature (1)..(25): SEQ ID NO: 5770; WAN024FLA; Start 218; Stop 242
ctgtactcttcatccgcttcatttg

SEQ ID NO: 420982 - DNA, 25 bp, Artificial
  probe
  misc_feature (1)..(25): SEQ ID NO: 5770; WAN024FLA; Start 26; Stop 50
cggttatactgaattgtcaaatcat

SEQ ID NO: 420983 - DNA, 25 bp, Artificial
  probe
  misc_feature (1)..(25): SEQ ID NO: 5770; WAN024FLA; Start 43; Stop 67
caaatcattgatgactttcttagca

SEQ ID NO: 420984 - DNA, 25 bp, Artificial
  probe
  misc_feature (1)..(25): SEQ ID NO: 5770; WAN024FLA; Start 137; Stop 161
ccgtaaatcatactttctgcaaact

SEQ ID NO: 420985 - DNA, 25 bp, Artificial
  probe
  misc_feature (1)..(25): SEQ ID NO: 5770; WAN024FLA; Start 136; Stop 160
accgtaaatcatactttctgcaaac

SEQ ID NO: 420986 - DNA, 25 bp, Artificial
  probe
  misc_feature (1)..(25): SEQ ID NO: 5770; WAN024FLA; Start 135; Stop 159
caccgtaaatcatactttctgcaaa

SEQ ID NO: 420987 - DNA, 25 bp, Artificial
  probe
  misc_feature (1)..(25): SEQ ID NO: 5770; WAN024FLA; Start 125; Stop 149
tcgataatggcaccgtaaatcatac

SEQ ID NO: 420988 - DNA, 25 bp, Artificial
  probe
  misc_feature (1)..(25): SEQ ID NO: 5770; WAN024FLA; Start 244; Stop 268
atccaagtcaacaatcggaagcatt

SEQ ID NO: 420989 - DNA, 25 bp, Artificial
  probe
  misc_feature (1)..(25): SEQ ID NO: 5770; WAN024FLA; Start 138; Stop 162
cgtaaatcatactttctgcaaactg

SEQ ID NO: 420990 - DNA, 25 bp, Artificial
  probe
  misc_feature (1)..(25): SEQ ID NO: 5770; WAN024FLA; Start 50; Stop 74
ttgatgactttcttagcattatctg

SEQ ID NO: 420991 - DNA, 25 bp, Artificial
  probe
  misc_feature (1)..(25): SEQ ID NO: 5770; WAN024FLA; Start 141; Stop 165
aaatcatactttctgcaaactgagg

SEQ ID NO: 420992 - DNA, 25 bp, Artificial
  probe
  misc_feature (1)..(25): SEQ ID NO: 5770; WAN024FLA; Start 52; Stop 76
gatgactttcttagcattatctgtc

SEQ ID NO: 420993 - DNA, 25 bp, Artificial
  probe
  misc_feature (1)..(25): SEQ ID NO: 5770; WAN024FLA; Start 59; Stop 83
ttcttagcattatctgtcgctgttt

SEQ ID NO: 420994 - DNA, 25 bp, Artificial
  probe
  misc_feature (1)..(25): SEQ ID NO: 5770; WAN024FLA; Start 58; Stop 82
tttcttagcattatctgtcgctgtt

SEQ ID NO: 420995 - DNA, 25 bp, Artificial
  probe
  misc_feature (1)..(25): SEQ ID NO: 5771; WAN0249SV; Start 48; Stop 72
cggtctagttatgtctcaacgatta

SEQ ID NO: 420996 - DNA, 25 bp, Artificial
  probe
  misc_feature (1)..(25): SEQ ID NO: 5771; WAN0249SV; Start 44; Stop 68
atatcggtctagttatgtctcaacg

SEQ ID NO: 420997 - DNA, 25 bp, Artificial
  probe
  misc_feature (1)..(25): SEQ ID NO: 5771; WAN0249SV; Start 49; Stop 73
ggtctagttatgtctcaacgattat

SEQ ID NO: 420998 - DNA, 25 bp, Artificial
  probe
  misc_feature (1)..(25): SEQ ID NO: 5771; WAN0249SV; Start 38; Stop 62
tggactatatcggtctagttatgtc

SEQ ID NO: 420999 - DNA, 25 bp, Artificial
  probe
  misc_feature (1)..(25): SEQ ID NO: 5771; WAN0249SV; Start 39; Stop 63
ggactatatcggtctagttatgtct

SEQ ID NO: 421000 - DNA, 25 bp, Artificial
  probe
  misc_feature (1)..(25): SEQ ID NO: 5771; WAN0249SV; Start 43; Stop 67
tatatcggtctagttatgtctcaac

SEQ ID NO: 421001 - DNA, 25 bp, Artificial
  probe
  misc_feature (1)..(25): SEQ ID NO: 5771; WAN0249SV; Start 37; Stop 61
ttggactatatcggtctagttatgt

SEQ ID NO: 421002 - DNA, 25 bp, Artificial
  probe
  misc_feature (1)..(25): SEQ ID NO: 5771; WAN0249SV; Start 42; Stop 66
ctatatcggtctagttatgtctcaa

SEQ ID NO: 421003 - DNA, 25 bp, Artificial
  probe
  misc_feature (1)..(25): SEQ ID NO: 5771; WAN0249SV; Start 45; Stop 69
tatcggtctagttatgtctcaacga

SEQ ID NO: 421004 - DNA, 25 bp, Artificial
  probe
  misc_feature (1)..(25): SEQ ID NO: 5771; WAN0249SV; Start 41; Stop 65
actatatcggtctagttatgtctca

SEQ ID NO: 421005 - DNA, 25 bp, Artificial
  probe
  misc_feature (1)..(25): SEQ ID NO: 5771; WAN0249SV; Start 47; Stop 71
tcggtctagttatgtctcaacgatt

SEQ ID NO: 421006 - DNA, 25 bp, Artificial
  probe
  misc_feature (1)..(25): SEQ ID NO: 5771; WAN0249SV; Start 40; Stop 64
gactatatcggtctagttatgtctc

SEQ ID NO: 421007 - DNA, 25 bp, Artificial
  probe
  misc_feature (1)..(25): SEQ ID NO: 5771; WAN0249SV; Start 31; Stop 55
atcactttggactatatcggtctag

SEQ ID NO: 421008 - DNA, 25 bp, Artificial
  probe
  misc_feature (1)..(25): SEQ ID NO: 5771; WAN0249SV; Start 29; Stop 53
atatcactttggactatatcggtct

SEQ ID NO: 421009 - DNA, 25 bp, Artificial
  probe
  misc_feature (1)..(25): SEQ ID NO: 5771; WAN0249SV; Start 33; Stop 57
cactttggactatatcggtctagtt

SEQ ID NO: 421010 - DNA, 25 bp, Artificial
  probe
  misc_feature (1)..(25): SEQ ID NO: 5771; WAN0249SV; Start 32; Stop 56
tcactttggactatatcggtctagt

SEQ ID NO: 421011 - DNA, 25 bp, Artificial
  probe
  misc_feature (1)..(25): SEQ ID NO: 5771; WAN0249SV; Start 30; Stop 54
tatcactttggactatatcggtcta

SEQ ID NO: 421012 - DNA, 25 bp, Artificial
  probe
  misc_feature (1)..(25): SEQ ID NO: 5771; WAN0249SV; Start 27; Stop 51
ctatatcactttggactatatcggt

SEQ ID NO: 421013 - DNA, 25 bp, Artificial
  probe
  misc_feature (1)..(25): SEQ ID NO: 5771; WAN0249SV; Start 26; Stop 50
actatatcactttggactatatcgg

SEQ ID NO: 421014 - DNA, 25 bp, Artificial
  probe
  misc_feature (1)..(25): SEQ ID NO: 5771; WAN0249SV; Start 34; Stop 58
actttggactatatcggtctagtta

SEQ ID NO: 421015 - DNA, 25 bp, Artificial
  probe
  misc_feature (1)..(25): SEQ ID NO: 5771; WAN0249SV; Start 28; Stop 52
tatatcactttggactatatcggtc

SEQ ID NO: 421016 - DNA, 25 bp, Artificial
  probe
  misc_feature (1)..(25): SEQ ID NO: 5771; WAN0249SV; Start 50; Stop 74
gtctagttatgtctcaacgattata

SEQ ID NO: 421017 - DNA, 25 bp, Artificial
  probe
  misc_feature (1)..(25): SEQ ID NO: 5771; WAN0249SV; Start 36; Stop 60
tttggactatatcggtctagttatg

SEQ ID NO: 421018 - DNA, 25 bp, Artificial
  probe
  misc_feature (1)..(25): SEQ ID NO: 5771; WAN0249SV; Start 51; Stop 75
tctagttatgtctcaacgattatag

SEQ ID NO: 421019 - DNA, 25 bp, Artificial
  probe
  misc_feature (1)..(25): SEQ ID NO: 5771; WAN0249SV; Start 35; Stop 59
ctttggactatatcggtctagttat

SEQ ID NO: 421020 - DNA, 25 bp, Artificial
  probe
  misc_feature (1)..(25): SEQ ID NO: 5771; WAN0249SV; Start 46; Stop 70
atcggtctagttatgtctcaacgat

SEQ ID NO: 421021 - DNA, 25 bp, Artificial
  probe
  misc_feature (1)..(25): SEQ ID NO: 5771; WAN0249SV; Start 25; Stop 49
tactatatcactttggactatatcg

SEQ ID NO: 421022 - DNA, 25 bp, Artificial
  probe
  misc_feature (1)..(25): SEQ ID NO: 5771; WAN0249SV; Start 16; Stop 40
ggttcattttactatatcactttgg

SEQ ID NO: 421023 - DNA, 25 bp, Artificial
  probe
  misc_feature (1)..(25): SEQ ID NO: 5771; WAN0249SV; Start 19; Stop 43
tcattttactatatcactttggact

SEQ ID NO: 421024 - DNA, 25 bp, Artificial
  probe
  misc_feature (1)..(25): SEQ ID NO: 5771; WAN0249SV; Start 15; Stop 39
tggttcattttactatatcactttg

SEQ ID NO: 421025 - DNA, 25 bp, Artificial
  probe
  misc_feature (1)..(25): SEQ ID NO: 5771; WAN0249SV; Start 18; Stop 42
ttcattttactatatcactttggac

SEQ ID NO: 421026 - DNA, 25 bp, Artificial
  probe
  misc_feature (1)..(25): SEQ ID NO: 5771; WAN0249SV; Start 17; Stop 41
gttcattttactatatcactttgga

SEQ ID NO: 421027 - DNA, 25 bp, Artificial
  probe
  misc_feature (1)..(25): SEQ ID NO: 5772; WAN0249SW; Start 40; Stop 64
gttatagtgtagcattccaacttca

SEQ ID NO: 421028 - DNA, 25 bp, Artificial
  probe
  misc_feature (1)..(25): SEQ ID NO: 5772; WAN0249SW; Start 41; Stop 65
ttatagtgtagcattccaacttcaa

SEQ ID NO: 421029 - DNA, 25 bp, Artificial
  probe
  misc_feature (1)..(25): SEQ ID NO: 5772; WAN0249SW; Start 43; Stop 67
atagtgtagcattccaacttcaaag

SEQ ID NO: 421030 - DNA, 25 bp, Artificial
  probe
  misc_feature (1)..(25): SEQ ID NO: 5772; WAN0249SW; Start 36; Stop 60
ataagttatagtgtagcattccaac

SEQ ID NO: 421031 - DNA, 25 bp, Artificial
  probe
  misc_feature (1)..(25): SEQ ID NO: 5772; WAN0249SW; Start 44; Stop 68
tagtgtagcattccaacttcaaagc

SEQ ID NO: 421032 - DNA, 25 bp, Artificial
  probe
  misc_feature (1)..(25): SEQ ID NO: 5772; WAN0249SW; Start 42; Stop 66
tatagtgtagcattccaacttcaaa

SEQ ID NO: 421033 - DNA, 25 bp, Artificial
  probe
  misc_feature (1)..(25): SEQ ID NO: 5772; WAN0249SW; Start 39; Stop 63
agttatagtgtagcattccaacttc

SEQ ID NO: 421034 - DNA, 25 bp, Artificial
  probe
  misc_feature (1)..(25): SEQ ID NO: 5772; WAN0249SW; Start 47; Stop 71
tgtagcattccaacttcaaagcact

SEQ ID NO: 421035 - DNA, 25 bp, Artificial
  probe
  misc_feature (1)..(25): SEQ ID NO: 5772; WAN0249SW; Start 37; Stop 61
taagttatagtgtagcattccaact

SEQ ID NO: 421036 - DNA, 25 bp, Artificial
  probe
  misc_feature (1)..(25): SEQ ID NO: 5772; WAN0249SW; Start 45; Stop 69
agtgtagcattccaacttcaaagca

SEQ ID NO: 421037 - DNA, 25 bp, Artificial
  probe
  misc_feature (1)..(25): SEQ ID NO: 5772; WAN0249SW; Start 46; Stop 70
gtgtagcattccaacttcaaagcac

SEQ ID NO: 421038 - DNA, 25 bp, Artificial
  probe
  misc_feature (1)..(25): SEQ ID NO: 5772; WAN0249SW; Start 35; Stop 59
tataagttatagtgtagcattccaa

SEQ ID NO: 421039 - DNA, 25 bp, Artificial
  probe
  misc_feature (1)..(25): SEQ ID NO: 5772; WAN0249SW; Start 34; Stop 58
ttataagttatagtgtagcattcca

SEQ ID NO: 421040 - DNA, 25 bp, Artificial
  probe
  misc_feature (1)..(25): SEQ ID NO: 5772; WAN0249SW; Start 38; Stop 62
aagttatagtgtagcattccaactt

SEQ ID NO: 421041 - DNA, 25 bp, Artificial
  probe
  misc_feature (1)..(25): SEQ ID NO: 5773; WAN0249SU; Start 45; Stop 69
tagataatgaggaaaatgcaatggc

SEQ ID NO: 421042 - DNA, 25 bp, Artificial
  probe
  misc_feature (1)..(25): SEQ ID NO: 5773; WAN0249SU; Start 39; Stop 63
cgatactagataatgaggaaaatgc

SEQ ID NO: 421043 - DNA, 25 bp, Artificial
  probe
  misc_feature (1)..(25): SEQ ID NO: 5773; WAN0249SU; Start 44; Stop 68
ctagataatgaggaaaatgcaatgg

SEQ ID NO: 421044 - DNA, 25 bp, Artificial
  probe
  misc_feature (1)..(25): SEQ ID NO: 5773; WAN0249SU; Start 43; Stop 67
actagataatgaggaaaatgcaatg

SEQ ID NO: 421045 - DNA, 25 bp, Artificial
  probe
  misc_feature (1)..(25): SEQ ID NO: 5773; WAN0249SU; Start 38; Stop 62
acgatactagataatgaggaaaatg

SEQ ID NO: 421046 - DNA, 25 bp, Artificial
  probe
  misc_feature (1)..(25): SEQ ID NO: 5773; WAN0249SU; Start 48; Stop 72
ataatgaggaaaatgcaatggcaaa

SEQ ID NO: 421047 - DNA, 25 bp, Artificial
  probe
  misc_feature (1)..(25): SEQ ID NO: 5773; WAN0249SU; Start 47; Stop 71
gataatgaggaaaatgcaatggcaa

SEQ ID NO: 421048 - DNA, 25 bp, Artificial
  probe
  misc_feature (1)..(25): SEQ ID NO: 5773; WAN0249SU; Start 49; Stop 73
taatgaggaaaatgcaatggcaaac

SEQ ID NO: 421049 - DNA, 25 bp, Artificial
  probe
  misc_feature (1)..(25): SEQ ID NO: 5773; WAN0249SU; Start 46; Stop 70
agataatgaggaaaatgcaatggca

SEQ ID NO: 421050 - DNA, 25 bp, Artificial
  probe
  misc_feature (1)..(25): SEQ ID NO: 5773; WAN0249SU; Start 58; Stop 82
aaatgcaatggcaaacccaactttc

SEQ ID NO: 421051 - DNA, 25 bp, Artificial
  probe
  misc_feature (1)..(25): SEQ ID NO: 5773; WAN0249SU; Start 40; Stop 64
gatactagataatgaggaaaatgca

SEQ ID NO: 421052 - DNA, 25 bp, Artificial
  probe
  misc_feature (1)..(25): SEQ ID NO: 5773; WAN0249SU; Start 37; Stop 61
aacgatactagataatgaggaaaat

SEQ ID NO: 421053 - DNA, 25 bp, Artificial
  probe
  misc_feature (1)..(25): SEQ ID NO: 5773; WAN0249SU; Start 42; Stop 66
tactagataatgaggaaaatgcaat

SEQ ID NO: 421054 - DNA, 25 bp, Artificial
  probe
  misc_feature (1)..(25): SEQ ID NO: 5773; WAN0249SU; Start 41; Stop 65
atactagataatgaggaaaatgcaa

SEQ ID NO: 421055 - DNA, 25 bp, Artificial
  probe
  misc_feature (1)..(25): SEQ ID NO: 5773; WAN0249SU; Start 36; Stop 60
taacgatactagataatgaggaaaa

SEQ ID NO: 421056 - DNA, 25 bp, Artificial
  probe
  misc_feature (1)..(25): SEQ ID NO: 5773; WAN0249SU; Start 50; Stop 74
aatgaggaaaatgcaatggcaaacc

SEQ ID NO: 421057 - DNA, 25 bp, Artificial
  probe
  misc_feature (1)..(25): SEQ ID NO: 5773; WAN0249SU; Start 57; Stop 81
aaaatgcaatggcaaacccaacttt

SEQ ID NO: 421058 - DNA, 25 bp, Artificial
  probe
  misc_feature (1)..(25): SEQ ID NO: 5773; WAN0249SU; Start 56; Stop 80
gaaaatgcaatggcaaacccaactt

SEQ ID NO: 421059 - DNA, 25 bp, Artificial
  probe
  misc_feature (1)..(25): SEQ ID NO: 5773; WAN0249SU; Start 51; Stop 75
atgaggaaaatgcaatggcaaaccc

SEQ ID NO: 421060 - DNA, 25 bp, Artificial
  probe
  misc_feature (1)..(25): SEQ ID NO: 5773; WAN0249SU; Start 53; Stop 77
gaggaaaatgcaatggcaaacccaa

SEQ ID NO: 421061 - DNA, 25 bp, Artificial
  probe
  misc_feature (1)..(25): SEQ ID NO: 5774; WAN024DWK; Start 1120; Stop 1144
cataccttctatcgctatatctggc

SEQ ID NO: 421062 - DNA, 25 bp, Artificial
  probe
  misc_feature (1)..(25): SEQ ID NO: 5774; WAN024DWK; Start 1119; Stop 1143
tcataccttctatcgctatatctgg

SEQ ID NO: 421063 - DNA, 25 bp, Artificial
  probe
  misc_feature (1)..(25): SEQ ID NO: 5774; WAN024DWK; Start 1169; Stop 1193
tgacaacaagagataaggcagagaa

SEQ ID NO: 421064 - DNA, 25 bp, Artificial
  probe
  misc_feature (1)..(25): SEQ ID NO: 5774; WAN024DWK; Start 1114; Stop 1138
agttctcataccttctatcgctata

SEQ ID NO: 421065 - DNA, 25 bp, Artificial
  probe
  misc_feature (1)..(25): SEQ ID NO: 5774; WAN024DWK; Start 1168; Stop 1192
ttgacaacaagagataaggcagaga

SEQ ID NO: 421066 - DNA, 25 bp, Artificial
  probe
  misc_feature (1)..(25): SEQ ID NO: 5774; WAN024DWK; Start 1118; Stop 1142
ctcataccttctatcgctatatctg

SEQ ID NO: 421067 - DNA, 25 bp, Artificial
  probe
  misc_feature (1)..(25): SEQ ID NO: 5774; WAN024DWK; Start 1117; Stop 1141
tctcataccttctatcgctatatct

SEQ ID NO: 421068 - DNA, 25 bp, Artificial
  probe
  misc_feature (1)..(25): SEQ ID NO: 5774; WAN024DWK; Start 1115; Stop 1139
gttctcataccttctatcgctatat

SEQ ID NO: 421069 - DNA, 25 bp, Artificial
  probe
  misc_feature (1)..(25): SEQ ID NO: 5774; WAN024DWK; Start 168; Stop 192
ctacaccgataccttggacaatacg

SEQ ID NO: 421070 - DNA, 25 bp, Artificial
  probe
  misc_feature (1)..(25): SEQ ID NO: 5774; WAN024DWK; Start 1116; Stop 1140
ttctcataccttctatcgctatatc

SEQ ID NO: 421071 - DNA, 25 bp, Artificial
  probe
  misc_feature (1)..(25): SEQ ID NO: 5774; WAN024DWK; Start 761; Stop 785
atatgtttgctgtagtagtcttggg

SEQ ID NO: 421072 - DNA, 25 bp, Artificial
  probe
  misc_feature (1)..(25): SEQ ID NO: 5774; WAN024DWK; Start 766; Stop 790
tttgctgtagtagtcttgggttatg

SEQ ID NO: 421073 - DNA, 25 bp, Artificial
  probe
  misc_feature (1)..(25): SEQ ID NO: 5774; WAN024DWK; Start 765; Stop 789
gtttgctgtagtagtcttgggttat

SEQ ID NO: 421074 - DNA, 25 bp, Artificial
  probe
  misc_feature (1)..(25): SEQ ID NO: 5774; WAN024DWK; Start 1170; Stop 1194
gacaacaagagataaggcagagaaa

SEQ ID NO: 421075 - DNA, 25 bp, Artificial
  probe
  misc_feature (1)..(25): SEQ ID NO: 5774; WAN024DWK; Start 760; Stop 784
aatatgtttgctgtagtagtcttgg

SEQ ID NO: 421076 - DNA, 25 bp, Artificial
  probe
  misc_feature (1)..(25): SEQ ID NO: 5774; WAN024DWK; Start 167; Stop 191
gctacaccgataccttggacaatac

SEQ ID NO: 421077 - DNA, 25 bp, Artificial
  probe
  misc_feature (1)..(25): SEQ ID NO: 5774; WAN024DWK; Start 795; Stop 819
agaaatcttcgcagcattaaaccta

SEQ ID NO: 421078 - DNA, 25 bp, Artificial
  probe
  misc_feature (1)..(25): SEQ ID NO: 5774; WAN024DWK; Start 182; Stop 206
tggacaatacggttgaaatcttaga

SEQ ID NO: 421079 - DNA, 25 bp, Artificial
  probe
  misc_feature (1)..(25): SEQ ID NO: 5774; WAN024DWK; Start 767; Stop 791
ttgctgtagtagtcttgggttatgt

SEQ ID NO: 421080 - DNA, 25 bp, Artificial
  probe
  misc_feature (1)..(25): SEQ ID NO: 5774; WAN024DWK; Start 762; Stop 786
tatgtttgctgtagtagtcttgggt

SEQ ID NO: 421081 - DNA, 25 bp, Artificial
  probe
  misc_feature (1)..(25): SEQ ID NO: 5774; WAN024DWK; Start 181; Stop 205
ttggacaatacggttgaaatcttag

SEQ ID NO: 421082 - DNA, 25 bp, Artificial
  probe
  misc_feature (1)..(25): SEQ ID NO: 5774; WAN024DWK; Start 180; Stop 204
cttggacaatacggttgaaatctta

SEQ ID NO: 421083 - DNA, 25 bp, Artificial
  probe
  misc_feature (1)..(25): SEQ ID NO: 5774; WAN024DWK; Start 764; Stop 788
tgtttgctgtagtagtcttgggtta

SEQ ID NO: 421084 - DNA, 25 bp, Artificial
  probe
  misc_feature (1)..(25): SEQ ID NO: 5774; WAN024DWK; Start 183; Stop 207
ggacaatacggttgaaatcttagaa

SEQ ID NO: 421085 - DNA, 25 bp, Artificial
  probe
  misc_feature (1)..(25): SEQ ID NO: 5774; WAN024DWK; Start 796; Stop 820
gaaatcttcgcagcattaaacctag

SEQ ID NO: 421086 - DNA, 25 bp, Artificial
  probe
  misc_feature (1)..(25): SEQ ID NO: 5774; WAN024DWK; Start 166; Stop 190
tgctacaccgataccttggacaata

SEQ ID NO: 421087 - DNA, 25 bp, Artificial
  probe
  misc_feature (1)..(25): SEQ ID NO: 5774; WAN024DWK; Start 1307; Stop 1331
acatgatgttctgtgagttggtctt

SEQ ID NO: 421088 - DNA, 25 bp, Artificial
  probe
  misc_feature (1)..(25): SEQ ID NO: 5774; WAN024DWK; Start 179; Stop 203
ccttggacaatacggttgaaatctt

SEQ ID NO: 421089 - DNA, 25 bp, Artificial
  probe
  misc_feature (1)..(25): SEQ ID NO: 5774; WAN024DWK; Start 768; Stop 792
tgctgtagtagtcttgggttatgtg

SEQ ID NO: 421090 - DNA, 25 bp, Artificial
  probe
  misc_feature (1)..(25): SEQ ID NO: 5774; WAN024DWK; Start 763; Stop 787
atgtttgctgtagtagtcttgggtt

SEQ ID NO: 421091 - DNA, 25 bp, Artificial
  probe
  misc_feature (1)..(25): SEQ ID NO: 5774; WAN024DWK; Start 823; Stop 847
gatagccagagtgttattgctgatg

SEQ ID NO: 421092 - DNA, 25 bp, Artificial
  probe
  misc_feature (1)..(25): SEQ ID NO: 5774; WAN024DWK; Start 794; Stop 818
aagaaatcttcgcagcattaaacct

SEQ ID NO: 421093 - DNA, 25 bp, Artificial
  probe
  misc_feature (1)..(25): SEQ ID NO: 5774; WAN024DWK; Start 793; Stop 817
caagaaatcttcgcagcattaaacc

SEQ ID NO: 421094 - DNA, 25 bp, Artificial
  probe
  misc_feature (1)..(25): SEQ ID NO: 5775; WAN024ETV; Start 673; Stop 697
cagttggtccatattagcatgaagg

SEQ ID NO: 421095 - DNA, 25 bp, Artificial
  probe
  misc_feature (1)..(25): SEQ ID NO: 5775; WAN024ETV; Start 672; Stop 696
ccagttggtccatattagcatgaag

SEQ ID NO: 421096 - DNA, 25 bp, Artificial
  probe
  misc_feature (1)..(25): SEQ ID NO: 5775; WAN024ETV; Start 471; Stop 495
tagtcatttccatctgcccatttac

SEQ ID NO: 421097 - DNA, 25 bp, Artificial
  probe
  misc_feature (1)..(25): SEQ ID NO: 5775; WAN024ETV; Start 470; Stop 494
gtagtcatttccatctgcccattta

SEQ ID NO: 421098 - DNA, 25 bp, Artificial
  probe
  misc_feature (1)..(25): SEQ ID NO: 5775; WAN024ETV; Start 553; Stop 577
gcaacaaccctatctaaagattctg

SEQ ID NO: 421099 - DNA, 25 bp, Artificial
  probe
  misc_feature (1)..(25): SEQ ID NO: 5775; WAN024ETV; Start 552; Stop 576
agcaacaaccctatctaaagattct

SEQ ID NO: 421100 - DNA, 25 bp, Artificial
  probe
  misc_feature (1)..(25): SEQ ID NO: 5775; WAN024ETV; Start 577; Stop 601
gttgattacagagaactgccttcta

SEQ ID NO: 421101 - DNA, 25 bp, Artificial
  probe
  misc_feature (1)..(25): SEQ ID NO: 5775; WAN024ETV; Start 578; Stop 602
ttgattacagagaactgccttctat

SEQ ID NO: 421102 - DNA, 25 bp, Artificial
  probe
  misc_feature (1)..(25): SEQ ID NO: 5775; WAN024ETV; Start 421; Stop 445
gataagtcggcagacatctacagtc

SEQ ID NO: 421103 - DNA, 25 bp, Artificial
  probe
  misc_feature (1)..(25): SEQ ID NO: 5775; WAN024ETV; Start 405; Stop 429
aggagtgattgtttcagataagtcg

SEQ ID NO: 421104 - DNA, 25 bp, Artificial
  probe
  misc_feature (1)..(25): SEQ ID NO: 5775; WAN024ETV; Start 404; Stop 428
caggagtgattgtttcagataagtc

SEQ ID NO: 421105 - DNA, 25 bp, Artificial
  probe
  misc_feature (1)..(25): SEQ ID NO: 5775; WAN024ETV; Start 403; Stop 427
acaggagtgattgtttcagataagt

SEQ ID NO: 421106 - DNA, 25 bp, Artificial
  probe
  misc_feature (1)..(25): SEQ ID NO: 5775; WAN024ETV; Start 625; Stop 649
ggaaatgagggtcaaggaattagtc

SEQ ID NO: 421107 - DNA, 25 bp, Artificial
  probe
  misc_feature (1)..(25): SEQ ID NO: 5775; WAN024ETV; Start 616; Stop 640
ctagttatgggaaatgagggtcaag

SEQ ID NO: 421108 - DNA, 25 bp, Artificial
  probe
  misc_feature (1)..(25): SEQ ID NO: 5775; WAN024ETV; Start 579; Stop 603
tgattacagagaactgccttctata

SEQ ID NO: 421109 - DNA, 25 bp, Artificial
  probe
  misc_feature (1)..(25): SEQ ID NO: 5775; WAN024ETV; Start 406; Stop 430
ggagtgattgtttcagataagtcgg

SEQ ID NO: 421110 - DNA, 25 bp, Artificial
  probe
  misc_feature (1)..(25): SEQ ID NO: 5775; WAN024ETV; Start 551; Stop 575
tagcaacaaccctatctaaagattc

SEQ ID NO: 421111 - DNA, 25 bp, Artificial
  probe
  misc_feature (1)..(25): SEQ ID NO: 5775; WAN024ETV; Start 417; Stop 441
ttcagataagtcggcagacatctac

SEQ ID NO: 421112 - DNA, 25 bp, Artificial
  probe
  misc_feature (1)..(25): SEQ ID NO: 5775; WAN024ETV; Start 620; Stop 644
ttatgggaaatgagggtcaaggaat

SEQ ID NO: 421113 - DNA, 25 bp, Artificial
  probe
  misc_feature (1)..(25): SEQ ID NO: 5775; WAN024ETV; Start 622; Stop 646
atgggaaatgagggtcaaggaatta

SEQ ID NO: 421114 - DNA, 25 bp, Artificial
  probe
  misc_feature (1)..(25): SEQ ID NO: 5775; WAN024ETV; Start 621; Stop 645
tatgggaaatgagggtcaaggaatt

SEQ ID NO: 421115 - DNA, 25 bp, Artificial
  probe
  misc_feature (1)..(25): SEQ ID NO: 5775; WAN024ETV; Start 617; Stop 641
tagttatgggaaatgagggtcaagg

SEQ ID NO: 421116 - DNA, 25 bp, Artificial
  probe
  misc_feature (1)..(25): SEQ ID NO: 5775; WAN024ETV; Start 576; Stop 600
tgttgattacagagaactgccttct

SEQ ID NO: 421117 - DNA, 25 bp, Artificial
  probe
  misc_feature (1)..(25): SEQ ID NO: 5775; WAN024ETV; Start 290; Stop 314
aagaagaagtaggacaagctgattt

SEQ ID NO: 421118 - DNA, 25 bp, Artificial
  probe
  misc_feature (1)..(25): SEQ ID NO: 5775; WAN024ETV; Start 289; Stop 313
aaagaagaagtaggacaagctgatt

SEQ ID NO: 421119 - DNA, 25 bp, Artificial
  probe
  misc_feature (1)..(25): SEQ ID NO: 5775; WAN024ETV; Start 407; Stop 431
gagtgattgtttcagataagtcggc

SEQ ID NO: 421120 - DNA, 25 bp, Artificial
  probe
  misc_feature (1)..(25): SEQ ID NO: 5775; WAN024ETV; Start 402; Stop 426
tacaggagtgattgtttcagataag

SEQ ID NO: 421121 - DNA, 25 bp, Artificial
  probe
  misc_feature (1)..(25): SEQ ID NO: 5775; WAN024ETV; Start 554; Stop 578
caacaaccctatctaaagattctgt

SEQ ID NO: 421122 - DNA, 25 bp, Artificial
  probe
  misc_feature (1)..(25): SEQ ID NO: 5775; WAN024ETV; Start 671; Stop 695
accagttggtccatattagcatgaa

SEQ ID NO: 421123 - DNA, 25 bp, Artificial
  probe
  misc_feature (1)..(25): SEQ ID NO: 5775; WAN024ETV; Start 626; Stop 650
gaaatgagggtcaaggaattagtcc

SEQ ID NO: 421124 - DNA, 25 bp, Artificial
  probe
  misc_feature (1)..(25): SEQ ID NO: 5775; WAN024ETV; Start 410; Stop 434
tgattgtttcagataagtcggcaga

SEQ ID NO: 421125 - DNA, 25 bp, Artificial
  probe
  misc_feature (1)..(25): SEQ ID NO: 5775; WAN024ETV; Start 409; Stop 433
gtgattgtttcagataagtcggcag

SEQ ID NO: 421126 - DNA, 25 bp, Artificial
  probe
  misc_feature (1)..(25): SEQ ID NO: 5775; WAN024ETV; Start 624; Stop 648
gggaaatgagggtcaaggaattagt

SEQ ID NO: 421127 - DNA, 25 bp, Artificial
  probe
  misc_feature (1)..(25): SEQ ID NO: 5776; WAN024GBC; Start 190; Stop 214
agccattgtttcttgttcattactg

SEQ ID NO: 421128 - DNA, 25 bp, Artificial
  probe
  misc_feature (1)..(25): SEQ ID NO: 5776; WAN024GBC; Start 189; Stop 213
tagccattgtttcttgttcattact

SEQ ID NO: 421129 - DNA, 25 bp, Artificial
  probe
  misc_feature (1)..(25): SEQ ID NO: 5776; WAN024GBC; Start 187; Stop 211
cctagccattgtttcttgttcatta

SEQ ID NO: 421130 - DNA, 25 bp, Artificial
  probe
  misc_feature (1)..(25): SEQ ID NO: 5776; WAN024GBC; Start 191; Stop 215
gccattgtttcttgttcattactga

SEQ ID NO: 421131 - DNA, 25 bp, Artificial
  probe
  misc_feature (1)..(25): SEQ ID NO: 5776; WAN024GBC; Start 186; Stop 210
acctagccattgtttcttgttcatt

SEQ ID NO: 421132 - DNA, 25 bp, Artificial
  probe
  misc_feature (1)..(25): SEQ ID NO: 5776; WAN024GBC; Start 55; Stop 79
ttgtcatcaacaccaccagtatcag

SEQ ID NO: 421133 - DNA, 25 bp, Artificial
  probe
  misc_feature (1)..(25): SEQ ID NO: 5776; WAN024GBC; Start 188; Stop 212
ctagccattgtttcttgttcattac

SEQ ID NO: 421134 - DNA, 25 bp, Artificial
  probe
  misc_feature (1)..(25): SEQ ID NO: 5776; WAN024GBC; Start 185; Stop 209
gacctagccattgtttcttgttcat

SEQ ID NO: 421135 - DNA, 25 bp, Artificial
  probe
  misc_feature (1)..(25): SEQ ID NO: 5776; WAN024GBC; Start 53; Stop 77
atttgtcatcaacaccaccagtatc

SEQ ID NO: 421136 - DNA, 25 bp, Artificial
  probe
  misc_feature (1)..(25): SEQ ID NO: 5776; WAN024GBC; Start 52; Stop 76
gatttgtcatcaacaccaccagtat

SEQ ID NO: 421137 - DNA, 25 bp, Artificial
  probe
  misc_feature (1)..(25): SEQ ID NO: 5776; WAN024GBC; Start 184; Stop 208
agacctagccattgtttcttgttca

SEQ ID NO: 421138 - DNA, 25 bp, Artificial
  probe
  misc_feature (1)..(25): SEQ ID NO: 5776; WAN024GBC; Start 59; Stop 83
catcaacaccaccagtatcagtgac

SEQ ID NO: 421139 - DNA, 25 bp, Artificial
  probe
  misc_feature (1)..(25): SEQ ID NO: 5776; WAN024GBC; Start 57; Stop 81
gtcatcaacaccaccagtatcagtg

SEQ ID NO: 421140 - DNA, 25 bp, Artificial
  probe
  misc_feature (1)..(25): SEQ ID NO: 5776; WAN024GBC; Start 56; Stop 80
tgtcatcaacaccaccagtatcagt

SEQ ID NO: 421141 - DNA, 25 bp, Artificial
  probe
  misc_feature (1)..(25): SEQ ID NO: 5776; WAN024GBC; Start 58; Stop 82
tcatcaacaccaccagtatcagtga

SEQ ID NO: 421142 - DNA, 25 bp, Artificial
  probe
  misc_feature (1)..(25): SEQ ID NO: 5776; WAN024GBC; Start 54; Stop 78
tttgtcatcaacaccaccagtatca

SEQ ID NO: 421143 - DNA, 25 bp, Artificial
  probe
  misc_feature (1)..(25): SEQ ID NO: 5776; WAN024GBC; Start 183; Stop 207
aagacctagccattgtttcttgttc

SEQ ID NO: 421144 - DNA, 25 bp, Artificial
  probe
  misc_feature (1)..(25): SEQ ID NO: 5776; WAN024GBC; Start 63; Stop 87
aacaccaccagtatcagtgacgatt

SEQ ID NO: 421145 - DNA, 25 bp, Artificial
  probe
  misc_feature (1)..(25): SEQ ID NO: 5776; WAN024GBC; Start 123; Stop 147
gttacgagaagagcggttaccacat

SEQ ID NO: 421146 - DNA, 25 bp, Artificial
  probe
  misc_feature (1)..(25): SEQ ID NO: 5776; WAN024GBC; Start 109; Stop 133
gaagatgaagctgcgttacgagaag

SEQ ID NO: 421147 - DNA, 25 bp, Artificial
  probe
  misc_feature (1)..(25): SEQ ID NO: 5776; WAN024GBC; Start 49; Stop 73
aatgatttgtcatcaacaccaccag

SEQ ID NO: 421148 - DNA, 25 bp, Artificial
  probe
  misc_feature (1)..(25): SEQ ID NO: 5776; WAN024GBC; Start 48; Stop 72
gaatgatttgtcatcaacaccacca

SEQ ID NO: 421149 - DNA, 25 bp, Artificial
  probe
  misc_feature (1)..(25): SEQ ID NO: 5776; WAN024GBC; Start 192; Stop 216
ccattgtttcttgttcattactgaa

SEQ ID NO: 421150 - DNA, 25 bp, Artificial
  probe
  misc_feature (1)..(25): SEQ ID NO: 5776; WAN024GBC; Start 124; Stop 148
ttacgagaagagcggttaccacatg

SEQ ID NO: 421151 - DNA, 25 bp, Artificial
  probe
  misc_feature (1)..(25): SEQ ID NO: 5776; WAN024GBC; Start 110; Stop 134
aagatgaagctgcgttacgagaaga

SEQ ID NO: 421152 - DNA, 25 bp, Artificial
  probe
  misc_feature (1)..(25): SEQ ID NO: 5776; WAN024GBC; Start 108; Stop 132
agaagatgaagctgcgttacgagaa

SEQ ID NO: 421153 - DNA, 25 bp, Artificial
  probe
  misc_feature (1)..(25): SEQ ID NO: 5776; WAN024GBC; Start 51; Stop 75
tgatttgtcatcaacaccaccagta

SEQ ID NO: 421154 - DNA, 25 bp, Artificial
  probe
  misc_feature (1)..(25): SEQ ID NO: 5776; WAN024GBC; Start 71; Stop 95
cagtatcagtgacgattgctgcttt

SEQ ID NO: 421155 - DNA, 25 bp, Artificial
  probe
  misc_feature (1)..(25): SEQ ID NO: 5776; WAN024GBC; Start 64; Stop 88
acaccaccagtatcagtgacgattg

SEQ ID NO: 421156 - DNA, 25 bp, Artificial
  probe
  misc_feature (1)..(25): SEQ ID NO: 5776; WAN024GBC; Start 62; Stop 86
caacaccaccagtatcagtgacgat

SEQ ID NO: 421157 - DNA, 25 bp, Artificial
  probe
  misc_feature (1)..(25): SEQ ID NO: 5776; WAN024GBC; Start 60; Stop 84
atcaacaccaccagtatcagtgacg

SEQ ID NO: 421158 - DNA, 25 bp, Artificial
  probe
  misc_feature (1)..(25): SEQ ID NO: 5776; WAN024GBC; Start 50; Stop 74
atgatttgtcatcaacaccaccagt

SEQ ID NO: 421159 - DNA, 25 bp, Artificial
  probe
  misc_feature (1)..(25): SEQ ID NO: 5776; WAN024GBC; Start 111; Stop 135
agatgaagctgcgttacgagaagag

SEQ ID NO: 421160 - DNA, 25 bp, Artificial
  probe
  misc_feature (1)..(25): SEQ ID NO: 5777; WAN024CS5; Start 16; Stop 40
aggaacatctgcttggtatcattaa

SEQ ID NO: 421161 - DNA, 25 bp, Artificial
  probe
  misc_feature (1)..(25): SEQ ID NO: 5777; WAN024CS5; Start 15; Stop 39
aaggaacatctgcttggtatcatta

SEQ ID NO: 421162 - DNA, 25 bp, Artificial
  probe
  misc_feature (1)..(25): SEQ ID NO: 5777; WAN024CS5; Start 17; Stop 41
ggaacatctgcttggtatcattaaa

SEQ ID NO: 421163 - DNA, 25 bp, Artificial
  probe
  misc_feature (1)..(25): SEQ ID NO: 5777; WAN024CS5; Start 70; Stop 94
cctgtcttatcagagatacgtgaag

SEQ ID NO: 421164 - DNA, 25 bp, Artificial
  probe
  misc_feature (1)..(25): SEQ ID NO: 5777; WAN024CS5; Start 67; Stop 91
aatcctgtcttatcagagatacgtg

SEQ ID NO: 421165 - DNA, 25 bp, Artificial
  probe
  misc_feature (1)..(25): SEQ ID NO: 5777; WAN024CS5; Start 68; Stop 92
atcctgtcttatcagagatacgtga

SEQ ID NO: 421166 - DNA, 25 bp, Artificial
  probe
  misc_feature (1)..(25): SEQ ID NO: 5777; WAN024CS5; Start 69; Stop 93
tcctgtcttatcagagatacgtgaa

SEQ ID NO: 421167 - DNA, 25 bp, Artificial
  probe
  misc_feature (1)..(25): SEQ ID NO: 5777; WAN024CS5; Start 72; Stop 96
tgtcttatcagagatacgtgaagct

SEQ ID NO: 421168 - DNA, 25 bp, Artificial
  probe
  misc_feature (1)..(25): SEQ ID NO: 5777; WAN024CS5; Start 71; Stop 95
ctgtcttatcagagatacgtgaagc

SEQ ID NO: 421169 - DNA, 25 bp, Artificial
  probe
  misc_feature (1)..(25): SEQ ID NO: 5777; WAN024CS5; Start 18; Stop 42
gaacatctgcttggtatcattaaat

SEQ ID NO: 421170 - DNA, 25 bp, Artificial
  probe
  misc_feature (1)..(25): SEQ ID NO: 5777; WAN024CS5; Start 21; Stop 45
catctgcttggtatcattaaattca

SEQ ID NO: 421171 - DNA, 25 bp, Artificial
  probe
  misc_feature (1)..(25): SEQ ID NO: 5777; WAN024CS5; Start 20; Stop 44
acatctgcttggtatcattaaattc

SEQ ID NO: 421172 - DNA, 25 bp, Artificial
  probe
  misc_feature (1)..(25): SEQ ID NO: 5777; WAN024CS5; Start 142; Stop 166
agaccatacaaggtttcctcaattt

SEQ ID NO: 421173 - DNA, 25 bp, Artificial
  probe
  misc_feature (1)..(25): SEQ ID NO: 5777; WAN024CS5; Start 139; Stop 163
tttagaccatacaaggtttcctcaa

SEQ ID NO: 421174 - DNA, 25 bp, Artificial
  probe
  misc_feature (1)..(25): SEQ ID NO: 5777; WAN024CS5; Start 141; Stop 165
tagaccatacaaggtttcctcaatt

SEQ ID NO: 421175 - DNA, 25 bp, Artificial
  probe
  misc_feature (1)..(25): SEQ ID NO: 5777; WAN024CS5; Start 140; Stop 164
ttagaccatacaaggtttcctcaat

SEQ ID NO: 421176 - DNA, 25 bp, Artificial
  probe
  misc_feature (1)..(25): SEQ ID NO: 5777; WAN024CS5; Start 19; Stop 43
aacatctgcttggtatcattaaatt

SEQ ID NO: 421177 - DNA, 25 bp, Artificial
  probe
  misc_feature (1)..(25): SEQ ID NO: 5777; WAN024CS5; Start 25; Stop 49
tgcttggtatcattaaattcaatca

SEQ ID NO: 421178 - DNA, 25 bp, Artificial
  probe
  misc_feature (1)..(25): SEQ ID NO: 5777; WAN024CS5; Start 39; Stop 63
aaattcaatcaaatctccatctagg

SEQ ID NO: 421179 - DNA, 25 bp, Artificial
  probe
  misc_feature (1)..(25): SEQ ID NO: 5777; WAN024CS5; Start 42; Stop 66
ttcaatcaaatctccatctaggaaa

SEQ ID NO: 421180 - DNA, 25 bp, Artificial
  probe
  misc_feature (1)..(25): SEQ ID NO: 5777; WAN024CS5; Start 14; Stop 38
caaggaacatctgcttggtatcatt

SEQ ID NO: 421181 - DNA, 25 bp, Artificial
  probe
  misc_feature (1)..(25): SEQ ID NO: 5777; WAN024CS5; Start 23; Stop 47
tctgcttggtatcattaaattcaat

SEQ ID NO: 421182 - DNA, 25 bp, Artificial
  probe
  misc_feature (1)..(25): SEQ ID NO: 5777; WAN024CS5; Start 22; Stop 46
atctgcttggtatcattaaattcaa

SEQ ID NO: 421183 - DNA, 25 bp, Artificial
  probe
  misc_feature (1)..(25): SEQ ID NO: 5777; WAN024CS5; Start 11; Stop 35
gatcaaggaacatctgcttggtatc

SEQ ID NO: 421184 - DNA, 25 bp, Artificial
  probe
  misc_feature (1)..(25): SEQ ID NO: 5777; WAN024CS5; Start 41; Stop 65
attcaatcaaatctccatctaggaa

SEQ ID NO: 421185 - DNA, 25 bp, Artificial
  probe
  misc_feature (1)..(25): SEQ ID NO: 5777; WAN024CS5; Start 40; Stop 64
aattcaatcaaatctccatctagga

SEQ ID NO: 421186 - DNA, 25 bp, Artificial
  probe
  misc_feature (1)..(25): SEQ ID NO: 5777; WAN024CS5; Start 66; Stop 90
aaatcctgtcttatcagagatacgt

SEQ ID NO: 421187 - DNA, 25 bp, Artificial
  probe
  misc_feature (1)..(25): SEQ ID NO: 5777; WAN024CS5; Start 24; Stop 48
ctgcttggtatcattaaattcaatc

SEQ ID NO: 421188 - DNA, 25 bp, Artificial
  probe
  misc_feature (1)..(25): SEQ ID NO: 5777; WAN024CS5; Start 74; Stop 98
tcttatcagagatacgtgaagcttg

SEQ ID NO: 421189 - DNA, 25 bp, Artificial
  probe
  misc_feature (1)..(25): SEQ ID NO: 5777; WAN024CS5; Start 73; Stop 97
gtcttatcagagatacgtgaagctt

SEQ ID NO: 421190 - DNA, 25 bp, Artificial
  probe
  misc_feature (1)..(25): SEQ ID NO: 5777; WAN024CS5; Start 13; Stop 37
tcaaggaacatctgcttggtatcat

SEQ ID NO: 421191 - DNA, 25 bp, Artificial
  probe
  misc_feature (1)..(25): SEQ ID NO: 5777; WAN024CS5; Start 12; Stop 36
atcaaggaacatctgcttggtatca

SEQ ID NO: 421192 - DNA, 25 bp, Artificial
  probe
  misc_feature (1)..(25): SEQ ID NO: 5777; WAN024CS5; Start 119; Stop 143
gaagcatggtgtacttgtcttttag

SEQ ID NO: 421193 - DNA, 25 bp, Artificial
  probe
  misc_feature (1)..(25): SEQ ID NO: 5778; WAN024GN5; Start 710; Stop 734
ttaagagattgagtgatacaggagc

SEQ ID NO: 421194 - DNA, 25 bp, Artificial
  probe
  misc_feature (1)..(25): SEQ ID NO: 5778; WAN024GN5; Start 616; Stop 640
cctccatatattccattgtctgaga

SEQ ID NO: 421195 - DNA, 25 bp, Artificial
  probe
  misc_feature (1)..(25): SEQ ID NO: 5778; WAN024GN5; Start 715; Stop 739
agattgagtgatacaggagcttatg

SEQ ID NO: 421196 - DNA, 25 bp, Artificial
  probe
  misc_feature (1)..(25): SEQ ID NO: 5778; WAN024GN5; Start 714; Stop 738
gagattgagtgatacaggagcttat

SEQ ID NO: 421197 - DNA, 25 bp, Artificial
  probe
  misc_feature (1)..(25): SEQ ID NO: 5778; WAN024GN5; Start 685; Stop 709
gatcaagtaagattaagagatgcct

SEQ ID NO: 421198 - DNA, 25 bp, Artificial
  probe
  misc_feature (1)..(25): SEQ ID NO: 5778; WAN024GN5; Start 684; Stop 708
agatcaagtaagattaagagatgcc

SEQ ID NO: 421199 - DNA, 25 bp, Artificial
  probe
  misc_feature (1)..(25): SEQ ID NO: 5778; WAN024GN5; Start 713; Stop 737
agagattgagtgatacaggagctta

SEQ ID NO: 421200 - DNA, 25 bp, Artificial
  probe
  misc_feature (1)..(25): SEQ ID NO: 5778; WAN024GN5; Start 711; Stop 735
taagagattgagtgatacaggagct

SEQ ID NO: 421201 - DNA, 25 bp, Artificial
  probe
  misc_feature (1)..(25): SEQ ID NO: 5778; WAN024GN5; Start 686; Stop 710
atcaagtaagattaagagatgcctt

SEQ ID NO: 421202 - DNA, 25 bp, Artificial
  probe
  misc_feature (1)..(25): SEQ ID NO: 5778; WAN024GN5; Start 622; Stop 646
tatattccattgtctgagacgagtg

SEQ ID NO: 421203 - DNA, 25 bp, Artificial
  probe
  misc_feature (1)..(25): SEQ ID NO: 5778; WAN024GN5; Start 619; Stop 643
ccatatattccattgtctgagacga

SEQ ID NO: 421204 - DNA, 25 bp, Artificial
  probe
  misc_feature (1)..(25): SEQ ID NO: 5778; WAN024GN5; Start 618; Stop 642
tccatatattccattgtctgagacg

SEQ ID NO: 421205 - DNA, 25 bp, Artificial
  probe
  misc_feature (1)..(25): SEQ ID NO: 5778; WAN024GN5; Start 621; Stop 645
atatattccattgtctgagacgagt

SEQ ID NO: 421206 - DNA, 25 bp, Artificial
  probe
  misc_feature (1)..(25): SEQ ID NO: 5778; WAN024GN5; Start 712; Stop 736
aagagattgagtgatacaggagctt

SEQ ID NO: 421207 - DNA, 25 bp, Artificial
  probe
  misc_feature (1)..(25): SEQ ID NO: 5778; WAN024GN5; Start 705; Stop 729
tgcctttaagagattgagtgataca

SEQ ID NO: 421208 - DNA, 25 bp, Artificial
  probe
  misc_feature (1)..(25): SEQ ID NO: 5778; WAN024GN5; Start 702; Stop 726
agatgcctttaagagattgagtgat

SEQ ID NO: 421209 - DNA, 25 bp, Artificial
  probe
  misc_feature (1)..(25): SEQ ID NO: 5778; WAN024GN5; Start 701; Stop 725
gagatgcctttaagagattgagtga

SEQ ID NO: 421210 - DNA, 25 bp, Artificial
  probe
  misc_feature (1)..(25): SEQ ID NO: 5778; WAN024GN5; Start 700; Stop 724
agagatgcctttaagagattgagtg

SEQ ID NO: 421211 - DNA, 25 bp, Artificial
  probe
  misc_feature (1)..(25): SEQ ID NO: 5778; WAN024GN5; Start 620; Stop 644
catatattccattgtctgagacgag

SEQ ID NO: 421212 - DNA, 25 bp, Artificial
  probe
  misc_feature (1)..(25): SEQ ID NO: 5778; WAN024GN5; Start 355; Stop 379
agaatagatatgatgtccgaagtac

SEQ ID NO: 421213 - DNA, 25 bp, Artificial
  probe
  misc_feature (1)..(25): SEQ ID NO: 5778; WAN024GN5; Start 717; Stop 741
attgagtgatacaggagcttatgtt

SEQ ID NO: 421214 - DNA, 25 bp, Artificial
  probe
  misc_feature (1)..(25): SEQ ID NO: 5778; WAN024GN5; Start 716; Stop 740
gattgagtgatacaggagcttatgt

SEQ ID NO: 421215 - DNA, 25 bp, Artificial
  probe
  misc_feature (1)..(25): SEQ ID NO: 5778; WAN024GN5; Start 706; Stop 730
gcctttaagagattgagtgatacag

SEQ ID NO: 421216 - DNA, 25 bp, Artificial
  probe
  misc_feature (1)..(25): SEQ ID NO: 5778; WAN024GN5; Start 492; Stop 516
tgttgatgaggaattgatatctgct

SEQ ID NO: 421217 - DNA, 25 bp, Artificial
  probe
  misc_feature (1)..(25): SEQ ID NO: 5778; WAN024GN5; Start 385; Stop 409
gctgcacgtattctatatatgttga

SEQ ID NO: 421218 - DNA, 25 bp, Artificial
  probe
  misc_feature (1)..(25): SEQ ID NO: 5778; WAN024GN5; Start 384; Stop 408
agctgcacgtattctatatatgttg

SEQ ID NO: 421219 - DNA, 25 bp, Artificial
  probe
  misc_feature (1)..(25): SEQ ID NO: 5778; WAN024GN5; Start 699; Stop 723
aagagatgcctttaagagattgagt

SEQ ID NO: 421220 - DNA, 25 bp, Artificial
  probe
  misc_feature (1)..(25): SEQ ID NO: 5778; WAN024GN5; Start 617; Stop 641
ctccatatattccattgtctgagac

SEQ ID NO: 421221 - DNA, 25 bp, Artificial
  probe
  misc_feature (1)..(25): SEQ ID NO: 5778; WAN024GN5; Start 382; Stop 406
agagctgcacgtattctatatatgt

SEQ ID NO: 421222 - DNA, 25 bp, Artificial
  probe
  misc_feature (1)..(25): SEQ ID NO: 5778; WAN024GN5; Start 721; Stop 745
agtgatacaggagcttatgttatgt

SEQ ID NO: 421223 - DNA, 25 bp, Artificial
  probe
  misc_feature (1)..(25): SEQ ID NO: 5778; WAN024GN5; Start 491; Stop 515
ttgttgatgaggaattgatatctgc

SEQ ID NO: 421224 - DNA, 25 bp, Artificial
  probe
  misc_feature (1)..(25): SEQ ID NO: 5778; WAN024GN5; Start 718; Stop 742
ttgagtgatacaggagcttatgtta

SEQ ID NO: 421225 - DNA, 25 bp, Artificial
  probe
  misc_feature (1)..(25): SEQ ID NO: 5778; WAN024GN5; Start 383; Stop 407
gagctgcacgtattctatatatgtt

SEQ ID NO: 421226 - DNA, 25 bp, Artificial
  probe
  misc_feature (1)..(25): SEQ ID NO: 5779; WAN024DI3; Start 20; Stop 44
ataaggtcaatcattgtgaggaagc

SEQ ID NO: 421227 - DNA, 25 bp, Artificial
  probe
  misc_feature (1)..(25): SEQ ID NO: 5779; WAN024DI3; Start 19; Stop 43
tataaggtcaatcattgtgaggaag

SEQ ID NO: 421228 - DNA, 25 bp, Artificial
  probe
  misc_feature (1)..(25): SEQ ID NO: 5779; WAN024DI3; Start 51; Stop 75
ttggtatcaggatgtgaacttggtt

SEQ ID NO: 421229 - DNA, 25 bp, Artificial
  probe
  misc_feature (1)..(25): SEQ ID NO: 5779; WAN024DI3; Start 47; Stop 71
ttgcttggtatcaggatgtgaactt

SEQ ID NO: 421230 - DNA, 25 bp, Artificial
  probe
  misc_feature (1)..(25): SEQ ID NO: 5779; WAN024DI3; Start 50; Stop 74
cttggtatcaggatgtgaacttggt

SEQ ID NO: 421231 - DNA, 25 bp, Artificial
  probe
  misc_feature (1)..(25): SEQ ID NO: 5779; WAN024DI3; Start 286; Stop 310
ctaagtgctttgattgaattggctc

SEQ ID NO: 421232 - DNA, 25 bp, Artificial
  probe
  misc_feature (1)..(25): SEQ ID NO: 5779; WAN024DI3; Start 284; Stop 308
ttctaagtgctttgattgaattggc

SEQ ID NO: 421233 - DNA, 25 bp, Artificial
  probe
  misc_feature (1)..(25): SEQ ID NO: 5779; WAN024DI3; Start 285; Stop 309
tctaagtgctttgattgaattggct

SEQ ID NO: 421234 - DNA, 25 bp, Artificial
  probe
  misc_feature (1)..(25): SEQ ID NO: 5779; WAN024DI3; Start 54; Stop 78
gtatcaggatgtgaacttggtttac

SEQ ID NO: 421235 - DNA, 25 bp, Artificial
  probe
  misc_feature (1)..(25): SEQ ID NO: 5779; WAN024DI3; Start 18; Stop 42
ttataaggtcaatcattgtgaggaa

SEQ ID NO: 421236 - DNA, 25 bp, Artificial
  probe
  misc_feature (1)..(25): SEQ ID NO: 5779; WAN024DI3; Start 316; Stop 340
aaaggatggaaagaattgagagtca

SEQ ID NO: 421237 - DNA, 25 bp, Artificial
  probe
  misc_feature (1)..(25): SEQ ID NO: 5779; WAN024DI3; Start 53; Stop 77
ggtatcaggatgtgaacttggttta

SEQ ID NO: 421238 - DNA, 25 bp, Artificial
  probe
  misc_feature (1)..(25): SEQ ID NO: 5779; WAN024DI3; Start 17; Stop 41
attataaggtcaatcattgtgagga

SEQ ID NO: 421239 - DNA, 25 bp, Artificial
  probe
  misc_feature (1)..(25): SEQ ID NO: 5779; WAN024DI3; Start 55; Stop 79
tatcaggatgtgaacttggtttacc

SEQ ID NO: 421240 - DNA, 25 bp, Artificial
  probe
  misc_feature (1)..(25): SEQ ID NO: 5779; WAN024DI3; Start 48; Stop 72
tgcttggtatcaggatgtgaacttg

SEQ ID NO: 421241 - DNA, 25 bp, Artificial
  probe
  misc_feature (1)..(25): SEQ ID NO: 5779; WAN024DI3; Start 21; Stop 45
taaggtcaatcattgtgaggaagct

SEQ ID NO: 421242 - DNA, 25 bp, Artificial
  probe
  misc_feature (1)..(25): SEQ ID NO: 5779; WAN024DI3; Start 64; Stop 88
gtgaacttggtttacctcgtagatg

SEQ ID NO: 421243 - DNA, 25 bp, Artificial
  probe
  misc_feature (1)..(25): SEQ ID NO: 5779; WAN024DI3; Start 61; Stop 85
gatgtgaacttggtttacctcgtag

SEQ ID NO: 421244 - DNA, 25 bp, Artificial
  probe
  misc_feature (1)..(25): SEQ ID NO: 5779; WAN024DI3; Start 63; Stop 87
tgtgaacttggtttacctcgtagat

SEQ ID NO: 421245 - DNA, 25 bp, Artificial
  probe
  misc_feature (1)..(25): SEQ ID NO: 5779; WAN024DI3; Start 62; Stop 86
atgtgaacttggtttacctcgtaga

SEQ ID NO: 421246 - DNA, 25 bp, Artificial
  probe
  misc_feature (1)..(25): SEQ ID NO: 5779; WAN024DI3; Start 166; Stop 190
attgaagtcaaggagaagggagaat

SEQ ID NO: 421247 - DNA, 25 bp, Artificial
  probe
  misc_feature (1)..(25): SEQ ID NO: 5779; WAN024DI3; Start 287; Stop 311
taagtgctttgattgaattggctcg

SEQ ID NO: 421248 - DNA, 25 bp, Artificial
  probe
  misc_feature (1)..(25): SEQ ID NO: 5779; WAN024DI3; Start 52; Stop 76
tggtatcaggatgtgaacttggttt

SEQ ID NO: 421249 - DNA, 25 bp, Artificial
  probe
  misc_feature (1)..(25): SEQ ID NO: 5779; WAN024DI3; Start 65; Stop 89
tgaacttggtttacctcgtagatgg

SEQ ID NO: 421250 - DNA, 25 bp, Artificial
  probe
  misc_feature (1)..(25): SEQ ID NO: 5779; WAN024DI3; Start 49; Stop 73
gcttggtatcaggatgtgaacttgg

SEQ ID NO: 421251 - DNA, 25 bp, Artificial
  probe
  misc_feature (1)..(25): SEQ ID NO: 5779; WAN024DI3; Start 165; Stop 189
gattgaagtcaaggagaagggagaa

SEQ ID NO: 421252 - DNA, 25 bp, Artificial
  probe
  misc_feature (1)..(25): SEQ ID NO: 5779; WAN024DI3; Start 208; Stop 232
attacactatctcaggataatctcc

SEQ ID NO: 421253 - DNA, 25 bp, Artificial
  probe
  misc_feature (1)..(25): SEQ ID NO: 5779; WAN024DI3; Start 209; Stop 233
ttacactatctcaggataatctccc

SEQ ID NO: 421254 - DNA, 25 bp, Artificial
  probe
  misc_feature (1)..(25): SEQ ID NO: 5779; WAN024DI3; Start 46; Stop 70
tttgcttggtatcaggatgtgaact

SEQ ID NO: 421255 - DNA, 25 bp, Artificial
  probe
  misc_feature (1)..(25): SEQ ID NO: 5779; WAN024DI3; Start 60; Stop 84
ggatgtgaacttggtttacctcgta

SEQ ID NO: 421256 - DNA, 25 bp, Artificial
  probe
  misc_feature (1)..(25): SEQ ID NO: 5779; WAN024DI3; Start 56; Stop 80
atcaggatgtgaacttggtttacct

SEQ ID NO: 421257 - DNA, 25 bp, Artificial
  probe
  misc_feature (1)..(25): SEQ ID NO: 5779; WAN024DI3; Start 167; Stop 191
ttgaagtcaaggagaagggagaatg

SEQ ID NO: 421258 - DNA, 25 bp, Artificial
  probe
  misc_feature (1)..(25): SEQ ID NO: 5779; WAN024DI3; Start 283; Stop 307
attctaagtgctttgattgaattgg

SEQ ID NO: 421259 - DNA, 25 bp, Artificial
  probe
  misc_feature (1)..(25): SEQ ID NO: 5780; WAN024DKZ; Start 132; Stop 156
atgggatgatactgcgactctttat

SEQ ID NO: 421260 - DNA, 25 bp, Artificial
  probe
  misc_feature (1)..(25): SEQ ID NO: 5780; WAN024DKZ; Start 133; Stop 157
tgggatgatactgcgactctttatc

SEQ ID NO: 421261 - DNA, 25 bp, Artificial
  probe
  misc_feature (1)..(25): SEQ ID NO: 5780; WAN024DKZ; Start 131; Stop 155
catgggatgatactgcgactcttta

SEQ ID NO: 421262 - DNA, 25 bp, Artificial
  probe
  misc_feature (1)..(25): SEQ ID NO: 5780; WAN024DKZ; Start 139; Stop 163
gatactgcgactctttatcgtaaga

SEQ ID NO: 421263 - DNA, 25 bp, Artificial
  probe
  misc_feature (1)..(25): SEQ ID NO: 5780; WAN024DKZ; Start 138; Stop 162
tgatactgcgactctttatcgtaag

SEQ ID NO: 421264 - DNA, 25 bp, Artificial
  probe
  misc_feature (1)..(25): SEQ ID NO: 5780; WAN024DKZ; Start 137; Stop 161
atgatactgcgactctttatcgtaa

SEQ ID NO: 421265 - DNA, 25 bp, Artificial
  probe
  misc_feature (1)..(25): SEQ ID NO: 5780; WAN024DKZ; Start 136; Stop 160
gatgatactgcgactctttatcgta

SEQ ID NO: 421266 - DNA, 25 bp, Artificial
  probe
  misc_feature (1)..(25): SEQ ID NO: 5780; WAN024DKZ; Start 292; Stop 316
gtagtctggtctgaagtggaaacac

SEQ ID NO: 421267 - DNA, 25 bp, Artificial
  probe
  misc_feature (1)..(25): SEQ ID NO: 5780; WAN024DKZ; Start 291; Stop 315
ggtagtctggtctgaagtggaaaca

SEQ ID NO: 421268 - DNA, 25 bp, Artificial
  probe
  misc_feature (1)..(25): SEQ ID NO: 5780; WAN024DKZ; Start 290; Stop 314
tggtagtctggtctgaagtggaaac

SEQ ID NO: 421269 - DNA, 25 bp, Artificial
  probe
  misc_feature (1)..(25): SEQ ID NO: 5780; WAN024DKZ; Start 289; Stop 313
gtggtagtctggtctgaagtggaaa

SEQ ID NO: 421270 - DNA, 25 bp, Artificial
  probe
  misc_feature (1)..(25): SEQ ID NO: 5780; WAN024DKZ; Start 330; Stop 354
ttaccaacaagtaaagactgattac

SEQ ID NO: 421271 - DNA, 25 bp, Artificial
  probe
  misc_feature (1)..(25): SEQ ID NO: 5780; WAN024DKZ; Start 135; Stop 159
ggatgatactgcgactctttatcgt

SEQ ID NO: 421272 - DNA, 25 bp, Artificial
  probe
  misc_feature (1)..(25): SEQ ID NO: 5780; WAN024DKZ; Start 328; Stop 352
aattaccaacaagtaaagactgatt

SEQ ID NO: 421273 - DNA, 25 bp, Artificial
  probe
  misc_feature (1)..(25): SEQ ID NO: 5780; WAN024DKZ; Start 327; Stop 351
aaattaccaacaagtaaagactgat

SEQ ID NO: 421274 - DNA, 25 bp, Artificial
  probe
  misc_feature (1)..(25): SEQ ID NO: 5780; WAN024DKZ; Start 134; Stop 158
gggatgatactgcgactctttatcg

SEQ ID NO: 421275 - DNA, 25 bp, Artificial
  probe
  misc_feature (1)..(25): SEQ ID NO: 5780; WAN024DKZ; Start 329; Stop 353
attaccaacaagtaaagactgatta

SEQ ID NO: 421276 - DNA, 25 bp, Artificial
  probe
  misc_feature (1)..(25): SEQ ID NO: 5780; WAN024DKZ; Start 121; Stop 145
gctatctatgcatgggatgatactg

SEQ ID NO: 421277 - DNA, 25 bp, Artificial
  probe
  misc_feature (1)..(25): SEQ ID NO: 5780; WAN024DKZ; Start 333; Stop 357
ccaacaagtaaagactgattactca

SEQ ID NO: 421278 - DNA, 25 bp, Artificial
  probe
  misc_feature (1)..(25): SEQ ID NO: 5780; WAN024DKZ; Start 332; Stop 356
accaacaagtaaagactgattactc

SEQ ID NO: 421279 - DNA, 25 bp, Artificial
  probe
  misc_feature (1)..(25): SEQ ID NO: 5780; WAN024DKZ; Start 326; Stop 350
aaaattaccaacaagtaaagactga

SEQ ID NO: 421280 - DNA, 25 bp, Artificial
  probe
  misc_feature (1)..(25): SEQ ID NO: 5780; WAN024DKZ; Start 337; Stop 361
caagtaaagactgattactcagagt

SEQ ID NO: 421281 - DNA, 25 bp, Artificial
  probe
  misc_feature (1)..(25): SEQ ID NO: 5780; WAN024DKZ; Start 336; Stop 360
acaagtaaagactgattactcagag

SEQ ID NO: 421282 - DNA, 25 bp, Artificial
  probe
  misc_feature (1)..(25): SEQ ID NO: 5780; WAN024DKZ; Start 55; Stop 79
tcggtacccttatcaagacgtaatc

SEQ ID NO: 421283 - DNA, 25 bp, Artificial
  probe
  misc_feature (1)..(25): SEQ ID NO: 5780; WAN024DKZ; Start 54; Stop 78
ctcggtacccttatcaagacgtaat

SEQ ID NO: 421284 - DNA, 25 bp, Artificial
  probe
  misc_feature (1)..(25): SEQ ID NO: 5780; WAN024DKZ; Start 325; Stop 349
gaaaattaccaacaagtaaagactg

SEQ ID NO: 421285 - DNA, 25 bp, Artificial
  probe
  misc_feature (1)..(25): SEQ ID NO: 5780; WAN024DKZ; Start 334; Stop 358
caacaagtaaagactgattactcag

SEQ ID NO: 421286 - DNA, 25 bp, Artificial
  probe
  misc_feature (1)..(25): SEQ ID NO: 5780; WAN024DKZ; Start 324; Stop 348
agaaaattaccaacaagtaaagact

SEQ ID NO: 421287 - DNA, 25 bp, Artificial
  probe
  misc_feature (1)..(25): SEQ ID NO: 5780; WAN024DKZ; Start 346; Stop 370
actgattactcagagtttaaagtct

SEQ ID NO: 421288 - DNA, 25 bp, Artificial
  probe
  misc_feature (1)..(25): SEQ ID NO: 5780; WAN024DKZ; Start 344; Stop 368
agactgattactcagagtttaaagt

SEQ ID NO: 421289 - DNA, 25 bp, Artificial
  probe
  misc_feature (1)..(25): SEQ ID NO: 5780; WAN024DKZ; Start 335; Stop 359
aacaagtaaagactgattactcaga

SEQ ID NO: 421290 - DNA, 25 bp, Artificial
  probe
  misc_feature (1)..(25): SEQ ID NO: 5780; WAN024DKZ; Start 331; Stop 355
taccaacaagtaaagactgattact

SEQ ID NO: 421291 - DNA, 25 bp, Artificial
  probe
  misc_feature (1)..(25): SEQ ID NO: 5780; WAN024DKZ; Start 345; Stop 369
gactgattactcagagtttaaagtc

SEQ ID NO: 421292 - DNA, 25 bp, Artificial
  probe
  misc_feature (1)..(25): SEQ ID NO: 5781; WAN024FCT; Start 1870; Stop 1894
attgatagtaaccagaagaacggag

SEQ ID NO: 421293 - DNA, 25 bp, Artificial
  probe
  misc_feature (1)..(25): SEQ ID NO: 5781; WAN024FCT; Start 1871; Stop 1895
ttgatagtaaccagaagaacggaga

SEQ ID NO: 421294 - DNA, 25 bp, Artificial
  probe
  misc_feature (1)..(25): SEQ ID NO: 5781; WAN024FCT; Start 1869; Stop 1893
aattgatagtaaccagaagaacgga

SEQ ID NO: 421295 - DNA, 25 bp, Artificial
  probe
  misc_feature (1)..(25): SEQ ID NO: 5781; WAN024FCT; Start 1004; Stop 1028
tcataagtaaggagagcattcagat

SEQ ID NO: 421296 - DNA, 25 bp, Artificial
  probe
  misc_feature (1)..(25): SEQ ID NO: 5781; WAN024FCT; Start 1003; Stop 1027
atcataagtaaggagagcattcaga

SEQ ID NO: 421297 - DNA, 25 bp, Artificial
  probe
  misc_feature (1)..(25): SEQ ID NO: 5781; WAN024FCT; Start 1873; Stop 1897
gatagtaaccagaagaacggagagt

SEQ ID NO: 421298 - DNA, 25 bp, Artificial
  probe
  misc_feature (1)..(25): SEQ ID NO: 5781; WAN024FCT; Start 1872; Stop 1896
tgatagtaaccagaagaacggagag

SEQ ID NO: 421299 - DNA, 25 bp, Artificial
  probe
  misc_feature (1)..(25): SEQ ID NO: 5781; WAN024FCT; Start 2089; Stop 2113
ttcttaacagtgacaggaattggtt

SEQ ID NO: 421300 - DNA, 25 bp, Artificial
  probe
  misc_feature (1)..(25): SEQ ID NO: 5781; WAN024FCT; Start 1874; Stop 1898
atagtaaccagaagaacggagagtt

SEQ ID NO: 421301 - DNA, 25 bp, Artificial
  probe
  misc_feature (1)..(25): SEQ ID NO: 5781; WAN024FCT; Start 1052; Stop 1076
ttccttatgccttgaatgatgatgg

SEQ ID NO: 421302 - DNA, 25 bp, Artificial
  probe
  misc_feature (1)..(25): SEQ ID NO: 5781; WAN024FCT; Start 2082; Stop 2106
ggaactattcttaacagtgacagga

SEQ ID NO: 421303 - DNA, 25 bp, Artificial
  probe
  misc_feature (1)..(25): SEQ ID NO: 5781; WAN024FCT; Start 2081; Stop 2105
tggaactattcttaacagtgacagg

SEQ ID NO: 421304 - DNA, 25 bp, Artificial
  probe
  misc_feature (1)..(25): SEQ ID NO: 5781; WAN024FCT; Start 250; Stop 274
atgattgcctctaattcaaccacta

SEQ ID NO: 421305 - DNA, 25 bp, Artificial
  probe
  misc_feature (1)..(25): SEQ ID NO: 5781; WAN024FCT; Start 336; Stop 360
ttcacaattagacaacagaacagtt

SEQ ID NO: 421306 - DNA, 25 bp, Artificial
  probe
  misc_feature (1)..(25): SEQ ID NO: 5781; WAN024FCT; Start 253; Stop 277
attgcctctaattcaaccactaatg

SEQ ID NO: 421307 - DNA, 25 bp, Artificial
  probe
  misc_feature (1)..(25): SEQ ID NO: 5781; WAN024FCT; Start 251; Stop 275
tgattgcctctaattcaaccactaa

SEQ ID NO: 421308 - DNA, 25 bp, Artificial
  probe
  misc_feature (1)..(25): SEQ ID NO: 5781; WAN024FCT; Start 1006; Stop 1030
ataagtaaggagagcattcagattg

SEQ ID NO: 421309 - DNA, 25 bp, Artificial
  probe
  misc_feature (1)..(25): SEQ ID NO: 5781; WAN024FCT; Start 1005; Stop 1029
cataagtaaggagagcattcagatt

SEQ ID NO: 421310 - DNA, 25 bp, Artificial
  probe
  misc_feature (1)..(25): SEQ ID NO: 5781; WAN024FCT; Start 1002; Stop 1026
aatcataagtaaggagagcattcag

SEQ ID NO: 421311 - DNA, 25 bp, Artificial
  probe
  misc_feature (1)..(25): SEQ ID NO: 5781; WAN024FCT; Start 335; Stop 359
attcacaattagacaacagaacagt

SEQ ID NO: 421312 - DNA, 25 bp, Artificial
  probe
  misc_feature (1)..(25): SEQ ID NO: 5781; WAN024FCT; Start 351; Stop 375
cagaacagttgaatctacagtaaca

SEQ ID NO: 421313 - DNA, 25 bp, Artificial
  probe
  misc_feature (1)..(25): SEQ ID NO: 5781; WAN024FCT; Start 350; Stop 374
acagaacagttgaatctacagtaac

SEQ ID NO: 421314 - DNA, 25 bp, Artificial
  probe
  misc_feature (1)..(25): SEQ ID NO: 5781; WAN024FCT; Start 749; Stop 773
ttagttattctggtggtacgattga

SEQ ID NO: 421315 - DNA, 25 bp, Artificial
  probe
  misc_feature (1)..(25): SEQ ID NO: 5781; WAN024FCT; Start 1007; Stop 1031
taagtaaggagagcattcagattga

SEQ ID NO: 421316 - DNA, 25 bp, Artificial
  probe
  misc_feature (1)..(25): SEQ ID NO: 5781; WAN024FCT; Start 319; Stop 343
ggtactattcgttccaattcacaat

SEQ ID NO: 421317 - DNA, 25 bp, Artificial
  probe
  misc_feature (1)..(25): SEQ ID NO: 5781; WAN024FCT; Start 252; Stop 276
gattgcctctaattcaaccactaat

SEQ ID NO: 421318 - DNA, 25 bp, Artificial
  probe
  misc_feature (1)..(25): SEQ ID NO: 5781; WAN024FCT; Start 249; Stop 273
aatgattgcctctaattcaaccact

SEQ ID NO: 421319 - DNA, 25 bp, Artificial
  probe
  misc_feature (1)..(25): SEQ ID NO: 5781; WAN024FCT; Start 751; Stop 775
agttattctggtggtacgattgata

SEQ ID NO: 421320 - DNA, 25 bp, Artificial
  probe
  misc_feature (1)..(25): SEQ ID NO: 5781; WAN024FCT; Start 750; Stop 774
tagttattctggtggtacgattgat

SEQ ID NO: 421321 - DNA, 25 bp, Artificial
  probe
  misc_feature (1)..(25): SEQ ID NO: 5781; WAN024FCT; Start 1868; Stop 1892
taattgatagtaaccagaagaacgg

SEQ ID NO: 421322 - DNA, 25 bp, Artificial
  probe
  misc_feature (1)..(25): SEQ ID NO: 5781; WAN024FCT; Start 755; Stop 779
attctggtggtacgattgatatgaa

SEQ ID NO: 421323 - DNA, 25 bp, Artificial
  probe
  misc_feature (1)..(25): SEQ ID NO: 5781; WAN024FCT; Start 754; Stop 778
tattctggtggtacgattgatatga

SEQ ID NO: 421324 - DNA, 25 bp, Artificial
  probe
  misc_feature (1)..(25): SEQ ID NO: 5781; WAN024FCT; Start 327; Stop 351
tcgttccaattcacaattagacaac

SEQ ID NO: 421325 - DNA, 25 bp, Artificial
  probe
  misc_feature (1)..(25): SEQ ID NO: 5782; WAN024FNE; Start 151; Stop 175
gcttattctatcgctggagtttatc

SEQ ID NO: 421326 - DNA, 25 bp, Artificial
  probe
  misc_feature (1)..(25): SEQ ID NO: 5782; WAN024FNE; Start 218; Stop 242
ataatatcgtctatagcttgcagga

SEQ ID NO: 421327 - DNA, 25 bp, Artificial
  probe
  misc_feature (1)..(25): SEQ ID NO: 5782; WAN024FNE; Start 87; Stop 111
cgtgaaattggcttactttaatgga

SEQ ID NO: 421328 - DNA, 25 bp, Artificial
  probe
  misc_feature (1)..(25): SEQ ID NO: 5782; WAN024FNE; Start 215; Stop 239
aggataatatcgtctatagcttgca

SEQ ID NO: 421329 - DNA, 25 bp, Artificial
  probe
  misc_feature (1)..(25): SEQ ID NO: 5782; WAN024FNE; Start 217; Stop 241
gataatatcgtctatagcttgcagg

SEQ ID NO: 421330 - DNA, 25 bp, Artificial
  probe
  misc_feature (1)..(25): SEQ ID NO: 5782; WAN024FNE; Start 216; Stop 240
ggataatatcgtctatagcttgcag

SEQ ID NO: 421331 - DNA, 25 bp, Artificial
  probe
  misc_feature (1)..(25): SEQ ID NO: 5782; WAN024FNE; Start 188; Stop 212
actttgctaagaccaaggagaaata

SEQ ID NO: 421332 - DNA, 25 bp, Artificial
  probe
  misc_feature (1)..(25): SEQ ID NO: 5782; WAN024FNE; Start 193; Stop 217
gctaagaccaaggagaaatataagg

SEQ ID NO: 421333 - DNA, 25 bp, Artificial
  probe
  misc_feature (1)..(25): SEQ ID NO: 5782; WAN024FNE; Start 187; Stop 211
aactttgctaagaccaaggagaaat

SEQ ID NO: 421334 - DNA, 25 bp, Artificial
  probe
  misc_feature (1)..(25): SEQ ID NO: 5782; WAN024FNE; Start 95; Stop 119
tggcttactttaatggatcagatca

SEQ ID NO: 421335 - DNA, 25 bp, Artificial
  probe
  misc_feature (1)..(25): SEQ ID NO: 5782; WAN024FNE; Start 219; Stop 243
taatatcgtctatagcttgcaggac

SEQ ID NO: 421336 - DNA, 25 bp, Artificial
  probe
  misc_feature (1)..(25): SEQ ID NO: 5782; WAN024FNE; Start 189; Stop 213
ctttgctaagaccaaggagaaatat

SEQ ID NO: 421337 - DNA, 25 bp, Artificial
  probe
  misc_feature (1)..(25): SEQ ID NO: 5782; WAN024FNE; Start 186; Stop 210
gaactttgctaagaccaaggagaaa

SEQ ID NO: 421338 - DNA, 25 bp, Artificial
  probe
  misc_feature (1)..(25): SEQ ID NO: 5782; WAN024FNE; Start 214; Stop 238
aaggataatatcgtctatagcttgc

SEQ ID NO: 421339 - DNA, 25 bp, Artificial
  probe
  misc_feature (1)..(25): SEQ ID NO: 5782; WAN024FNE; Start 192; Stop 216
tgctaagaccaaggagaaatataag

SEQ ID NO: 421340 - DNA, 25 bp, Artificial
  probe
  misc_feature (1)..(25): SEQ ID NO: 5782; WAN024FNE; Start 120; Stop 144
agaattgactatccgtaactttgaa

SEQ ID NO: 421341 - DNA, 25 bp, Artificial
  probe
  misc_feature (1)..(25): SEQ ID NO: 5782; WAN024FNE; Start 96; Stop 120
ggcttactttaatggatcagatcaa

SEQ ID NO: 421342 - DNA, 25 bp, Artificial
  probe
  misc_feature (1)..(25): SEQ ID NO: 5782; WAN024FNE; Start 94; Stop 118
ttggcttactttaatggatcagatc

SEQ ID NO: 421343 - DNA, 25 bp, Artificial
  probe
  misc_feature (1)..(25): SEQ ID NO: 5782; WAN024FNE; Start 88; Stop 112
gtgaaattggcttactttaatggat

SEQ ID NO: 421344 - DNA, 25 bp, Artificial
  probe
  misc_feature (1)..(25): SEQ ID NO: 5782; WAN024FNE; Start 119; Stop 143
aagaattgactatccgtaactttga

SEQ ID NO: 421345 - DNA, 25 bp, Artificial
  probe
  misc_feature (1)..(25): SEQ ID NO: 5782; WAN024FNE; Start 92; Stop 116
aattggcttactttaatggatcaga

SEQ ID NO: 421346 - DNA, 25 bp, Artificial
  probe
  misc_feature (1)..(25): SEQ ID NO: 5782; WAN024FNE; Start 111; Stop 135
atcagatcaagaattgactatccgt

SEQ ID NO: 421347 - DNA, 25 bp, Artificial
  probe
  misc_feature (1)..(25): SEQ ID NO: 5782; WAN024FNE; Start 118; Stop 142
caagaattgactatccgtaactttg

SEQ ID NO: 421348 - DNA, 25 bp, Artificial
  probe
  misc_feature (1)..(25): SEQ ID NO: 5782; WAN024FNE; Start 221; Stop 245
atatcgtctatagcttgcaggacaa

SEQ ID NO: 421349 - DNA, 25 bp, Artificial
  probe
  misc_feature (1)..(25): SEQ ID NO: 5782; WAN024FNE; Start 220; Stop 244
aatatcgtctatagcttgcaggaca

SEQ ID NO: 421350 - DNA, 25 bp, Artificial
  probe
  misc_feature (1)..(25): SEQ ID NO: 5782; WAN024FNE; Start 110; Stop 134
gatcagatcaagaattgactatccg

SEQ ID NO: 421351 - DNA, 25 bp, Artificial
  probe
  misc_feature (1)..(25): SEQ ID NO: 5782; WAN024FNE; Start 93; Stop 117
attggcttactttaatggatcagat

SEQ ID NO: 421352 - DNA, 25 bp, Artificial
  probe
  misc_feature (1)..(25): SEQ ID NO: 5782; WAN024FNE; Start 112; Stop 136
tcagatcaagaattgactatccgta

SEQ ID NO: 421353 - DNA, 25 bp, Artificial
  probe
  misc_feature (1)..(25): SEQ ID NO: 5782; WAN024FNE; Start 121; Stop 145
gaattgactatccgtaactttgaaa

SEQ ID NO: 421354 - DNA, 25 bp, Artificial
  probe
  misc_feature (1)..(25): SEQ ID NO: 5782; WAN024FNE; Start 191; Stop 215
ttgctaagaccaaggagaaatataa

SEQ ID NO: 421355 - DNA, 25 bp, Artificial
  probe
  misc_feature (1)..(25): SEQ ID NO: 5782; WAN024FNE; Start 190; Stop 214
tttgctaagaccaaggagaaatata

SEQ ID NO: 421356 - DNA, 25 bp, Artificial
  probe
  misc_feature (1)..(25): SEQ ID NO: 5782; WAN024FNE; Start 115; Stop 139
gatcaagaattgactatccgtaact

SEQ ID NO: 421357 - DNA, 25 bp, Artificial
  probe
  misc_feature (1)..(25): SEQ ID NO: 5782; WAN024FNE; Start 114; Stop 138
agatcaagaattgactatccgtaac

SEQ ID NO: 421358 - DNA, 25 bp, Artificial
  probe
  misc_feature (1)..(25): SEQ ID NO: 5783; WAN024FFM; Start 124; Stop 148
cgtcataggaaccatatagtaaggc

SEQ ID NO: 421359 - DNA, 25 bp, Artificial
  probe
  misc_feature (1)..(25): SEQ ID NO: 5783; WAN024FFM; Start 128; Stop 152
ataggaaccatatagtaaggcaagg

SEQ ID NO: 421360 - DNA, 25 bp, Artificial
  probe
  misc_feature (1)..(25): SEQ ID NO: 5783; WAN024FFM; Start 125; Stop 149
gtcataggaaccatatagtaaggca

SEQ ID NO: 421361 - DNA, 25 bp, Artificial
  probe
  misc_feature (1)..(25): SEQ ID NO: 5783; WAN024FFM; Start 123; Stop 147
tcgtcataggaaccatatagtaagg

SEQ ID NO: 421362 - DNA, 25 bp, Artificial
  probe
  misc_feature (1)..(25): SEQ ID NO: 5783; WAN024FFM; Start 126; Stop 150
tcataggaaccatatagtaaggcaa

SEQ ID NO: 421363 - DNA, 25 bp, Artificial
  probe
  misc_feature (1)..(25): SEQ ID NO: 5783; WAN024FFM; Start 127; Stop 151
cataggaaccatatagtaaggcaag

SEQ ID NO: 421364 - DNA, 25 bp, Artificial
  probe
  misc_feature (1)..(25): SEQ ID NO: 5783; WAN024FFM; Start 129; Stop 153
taggaaccatatagtaaggcaaggc

SEQ ID NO: 421365 - DNA, 25 bp, Artificial
  probe
  misc_feature (1)..(25): SEQ ID NO: 5783; WAN024FFM; Start 122; Stop 146
ctcgtcataggaaccatatagtaag

SEQ ID NO: 421366 - DNA, 25 bp, Artificial
  probe
  misc_feature (1)..(25): SEQ ID NO: 5783; WAN024FFM; Start 121; Stop 145
actcgtcataggaaccatatagtaa

SEQ ID NO: 421367 - DNA, 25 bp, Artificial
  probe
  misc_feature (1)..(25): SEQ ID NO: 5783; WAN024FFM; Start 120; Stop 144
aactcgtcataggaaccatatagta

SEQ ID NO: 421368 - DNA, 25 bp, Artificial
  probe
  misc_feature (1)..(25): SEQ ID NO: 5783; WAN024FFM; Start 132; Stop 156
gaaccatatagtaaggcaaggcact

SEQ ID NO: 421369 - DNA, 25 bp, Artificial
  probe
  misc_feature (1)..(25): SEQ ID NO: 5783; WAN024FFM; Start 175; Stop 199
aagccaaagaaacatcaaataggtg

SEQ ID NO: 421370 - DNA, 25 bp, Artificial
  probe
  misc_feature (1)..(25): SEQ ID NO: 5783; WAN024FFM; Start 174; Stop 198
caagccaaagaaacatcaaataggt

SEQ ID NO: 421371 - DNA, 25 bp, Artificial
  probe
  misc_feature (1)..(25): SEQ ID NO: 5783; WAN024FFM; Start 172; Stop 196
accaagccaaagaaacatcaaatag

SEQ ID NO: 421372 - DNA, 25 bp, Artificial
  probe
  misc_feature (1)..(25): SEQ ID NO: 5783; WAN024FFM; Start 171; Stop 195
aaccaagccaaagaaacatcaaata

SEQ ID NO: 421373 - DNA, 25 bp, Artificial
  probe
  misc_feature (1)..(25): SEQ ID NO: 5783; WAN024FFM; Start 115; Stop 139
catcaaactcgtcataggaaccata

SEQ ID NO: 421374 - DNA, 25 bp, Artificial
  probe
  misc_feature (1)..(25): SEQ ID NO: 5783; WAN024FFM; Start 116; Stop 140
atcaaactcgtcataggaaccatat

SEQ ID NO: 421375 - DNA, 25 bp, Artificial
  probe
  misc_feature (1)..(25): SEQ ID NO: 5783; WAN024FFM; Start 166; Stop 190
catagaaccaagccaaagaaacatc

SEQ ID NO: 421376 - DNA, 25 bp, Artificial
  probe
  misc_feature (1)..(25): SEQ ID NO: 5783; WAN024FFM; Start 133; Stop 157
aaccatatagtaaggcaaggcacta

SEQ ID NO: 421377 - DNA, 25 bp, Artificial
  probe
  misc_feature (1)..(25): SEQ ID NO: 5783; WAN024FFM; Start 173; Stop 197
ccaagccaaagaaacatcaaatagg

SEQ ID NO: 421378 - DNA, 25 bp, Artificial
  probe
  misc_feature (1)..(25): SEQ ID NO: 5783; WAN024FFM; Start 170; Stop 194
gaaccaagccaaagaaacatcaaat

SEQ ID NO: 421379 - DNA, 25 bp, Artificial
  probe
  misc_feature (1)..(25): SEQ ID NO: 5783; WAN024FFM; Start 167; Stop 191
atagaaccaagccaaagaaacatca

SEQ ID NO: 421380 - DNA, 25 bp, Artificial
  probe
  misc_feature (1)..(25): SEQ ID NO: 5783; WAN024FFM; Start 117; Stop 141
tcaaactcgtcataggaaccatata

SEQ ID NO: 421381 - DNA, 25 bp, Artificial
  probe
  misc_feature (1)..(25): SEQ ID NO: 5783; WAN024FFM; Start 168; Stop 192
tagaaccaagccaaagaaacatcaa

SEQ ID NO: 421382 - DNA, 25 bp, Artificial
  probe
  misc_feature (1)..(25): SEQ ID NO: 5783; WAN024FFM; Start 118; Stop 142
caaactcgtcataggaaccatatag

SEQ ID NO: 421383 - DNA, 25 bp, Artificial
  probe
  misc_feature (1)..(25): SEQ ID NO: 5783; WAN024FFM; Start 131; Stop 155
ggaaccatatagtaaggcaaggcac

SEQ ID NO: 421384 - DNA, 25 bp, Artificial
  probe
  misc_feature (1)..(25): SEQ ID NO: 5783; WAN024FFM; Start 130; Stop 154
aggaaccatatagtaaggcaaggca

SEQ ID NO: 421385 - DNA, 25 bp, Artificial
  probe
  misc_feature (1)..(25): SEQ ID NO: 5783; WAN024FFM; Start 176; Stop 200
agccaaagaaacatcaaataggtga

SEQ ID NO: 421386 - DNA, 25 bp, Artificial
  probe
  misc_feature (1)..(25): SEQ ID NO: 5783; WAN024FFM; Start 119; Stop 143
aaactcgtcataggaaccatatagt

SEQ ID NO: 421387 - DNA, 25 bp, Artificial
  probe
  misc_feature (1)..(25): SEQ ID NO: 5783; WAN024FFM; Start 169; Stop 193
agaaccaagccaaagaaacatcaaa

SEQ ID NO: 421388 - DNA, 25 bp, Artificial
  probe
  misc_feature (1)..(25): SEQ ID NO: 5783; WAN024FFM; Start 165; Stop 189
gcatagaaccaagccaaagaaacat

SEQ ID NO: 421389 - DNA, 25 bp, Artificial
  probe
  misc_feature (1)..(25): SEQ ID NO: 5783; WAN024FFM; Start 163; Stop 187
cagcatagaaccaagccaaagaaac

SEQ ID NO: 421390 - DNA, 25 bp, Artificial
  probe
  misc_feature (1)..(25): SEQ ID NO: 5783; WAN024FFM; Start 164; Stop 188
agcatagaaccaagccaaagaaaca

SEQ ID NO: 421391 - DNA, 25 bp, Artificial
  probe
  misc_feature (1)..(25): SEQ ID NO: 5784; WAN024FQY; Start 60; Stop 84
gaaggctctggctattgataatctt

SEQ ID NO: 421392 - DNA, 25 bp, Artificial
  probe
  misc_feature (1)..(25): SEQ ID NO: 5784; WAN024FQY; Start 12; Stop 36
aaggcttgctgttatctcatctaag

SEQ ID NO: 421393 - DNA, 25 bp, Artificial
  probe
  misc_feature (1)..(25): SEQ ID NO: 5784; WAN024FQY; Start 58; Stop 82
aagaaggctctggctattgataatc

SEQ ID NO: 421394 - DNA, 25 bp, Artificial
  probe
  misc_feature (1)..(25): SEQ ID NO: 5784; WAN024FQY; Start 56; Stop 80
ttaagaaggctctggctattgataa

SEQ ID NO: 421395 - DNA, 25 bp, Artificial
  probe
  misc_feature (1)..(25): SEQ ID NO: 5784; WAN024FQY; Start 57; Stop 81
taagaaggctctggctattgataat

SEQ ID NO: 421396 - DNA, 25 bp, Artificial
  probe
  misc_feature (1)..(25): SEQ ID NO: 5784; WAN024FQY; Start 59; Stop 83
agaaggctctggctattgataatct

SEQ ID NO: 421397 - DNA, 25 bp, Artificial
  probe
  misc_feature (1)..(25): SEQ ID NO: 5784; WAN024FQY; Start 13; Stop 37
aggcttgctgttatctcatctaaga

SEQ ID NO: 421398 - DNA, 25 bp, Artificial
  probe
  misc_feature (1)..(25): SEQ ID NO: 5784; WAN024FQY; Start 11; Stop 35
caaggcttgctgttatctcatctaa

SEQ ID NO: 421399 - DNA, 25 bp, Artificial
  probe
  misc_feature (1)..(25): SEQ ID NO: 5784; WAN024FQY; Start 10; Stop 34
tcaaggcttgctgttatctcatcta

SEQ ID NO: 421400 - DNA, 25 bp, Artificial
  probe
  misc_feature (1)..(25): SEQ ID NO: 5784; WAN024FQY; Start 64; Stop 88
gctctggctattgataatctttgtc

SEQ ID NO: 421401 - DNA, 25 bp, Artificial
  probe
  misc_feature (1)..(25): SEQ ID NO: 5784; WAN024FQY; Start 80; Stop 104
atctttgtctttctcctcctgatag

SEQ ID NO: 421402 - DNA, 25 bp, Artificial
  probe
  misc_feature (1)..(25): SEQ ID NO: 5784; WAN024FQY; Start 62; Stop 86
aggctctggctattgataatctttg

SEQ ID NO: 421403 - DNA, 25 bp, Artificial
  probe
  misc_feature (1)..(25): SEQ ID NO: 5784; WAN024FQY; Start 77; Stop 101
ataatctttgtctttctcctcctga

SEQ ID NO: 421404 - DNA, 25 bp, Artificial
  probe
  misc_feature (1)..(25): SEQ ID NO: 5784; WAN024FQY; Start 75; Stop 99
tgataatctttgtctttctcctcct

SEQ ID NO: 421405 - DNA, 25 bp, Artificial
  probe
  misc_feature (1)..(25): SEQ ID NO: 5784; WAN024FQY; Start 63; Stop 87
ggctctggctattgataatctttgt

SEQ ID NO: 421406 - DNA, 25 bp, Artificial
  probe
  misc_feature (1)..(25): SEQ ID NO: 5784; WAN024FQY; Start 61; Stop 85
aaggctctggctattgataatcttt

SEQ ID NO: 421407 - DNA, 25 bp, Artificial
  probe
  misc_feature (1)..(25): SEQ ID NO: 5784; WAN024FQY; Start 9; Stop 33
atcaaggcttgctgttatctcatct

SEQ ID NO: 421408 - DNA, 25 bp, Artificial
  probe
  misc_feature (1)..(25): SEQ ID NO: 5784; WAN024FQY; Start 8; Stop 32
catcaaggcttgctgttatctcatc

SEQ ID NO: 421409 - DNA, 25 bp, Artificial
  probe
  misc_feature (1)..(25): SEQ ID NO: 5784; WAN024FQY; Start 79; Stop 103
aatctttgtctttctcctcctgata

SEQ ID NO: 421410 - DNA, 25 bp, Artificial
  probe
  misc_feature (1)..(25): SEQ ID NO: 5784; WAN024FQY; Start 78; Stop 102
taatctttgtctttctcctcctgat

SEQ ID NO: 421411 - DNA, 25 bp, Artificial
  probe
  misc_feature (1)..(25): SEQ ID NO: 5784; WAN024FQY; Start 76; Stop 100
gataatctttgtctttctcctcctg

SEQ ID NO: 421412 - DNA, 25 bp, Artificial
  probe
  misc_feature (1)..(25): SEQ ID NO: 5784; WAN024FQY; Start 14; Stop 38
ggcttgctgttatctcatctaagat

SEQ ID NO: 421413 - DNA, 25 bp, Artificial
  probe
  misc_feature (1)..(25): SEQ ID NO: 5784; WAN024FQY; Start 55; Stop 79
tttaagaaggctctggctattgata

SEQ ID NO: 421414 - DNA, 25 bp, Artificial
  probe
  misc_feature (1)..(25): SEQ ID NO: 5784; WAN024FQY; Start 25; Stop 49
atctcatctaagatcaatatcggcg

SEQ ID NO: 421415 - DNA, 25 bp, Artificial
  probe
  misc_feature (1)..(25): SEQ ID NO: 5784; WAN024FQY; Start 15; Stop 39
gcttgctgttatctcatctaagatc

SEQ ID NO: 421416 - DNA, 25 bp, Artificial
  probe
  misc_feature (1)..(25): SEQ ID NO: 5784; WAN024FQY; Start 74; Stop 98
ttgataatctttgtctttctcctcc

SEQ ID NO: 421417 - DNA, 25 bp, Artificial
  probe
  misc_feature (1)..(25): SEQ ID NO: 5784; WAN024FQY; Start 65; Stop 89
ctctggctattgataatctttgtct

SEQ ID NO: 421418 - DNA, 25 bp, Artificial
  probe
  misc_feature (1)..(25): SEQ ID NO: 5784; WAN024FQY; Start 81; Stop 105
tctttgtctttctcctcctgatagc

SEQ ID NO: 421419 - DNA, 25 bp, Artificial
  probe
  misc_feature (1)..(25): SEQ ID NO: 5784; WAN024FQY; Start 66; Stop 90
tctggctattgataatctttgtctt

SEQ ID NO: 421420 - DNA, 25 bp, Artificial
  probe
  misc_feature (1)..(25): SEQ ID NO: 5784; WAN024FQY; Start 7; Stop 31
acatcaaggcttgctgttatctcat

SEQ ID NO: 421421 - DNA, 25 bp, Artificial
  probe
  misc_feature (1)..(25): SEQ ID NO: 5784; WAN024FQY; Start 16; Stop 40
cttgctgttatctcatctaagatca

SEQ ID NO: 421422 - DNA, 25 bp, Artificial
  probe
  misc_feature (1)..(25): SEQ ID NO: 5784; WAN024FQY; Start 193; Stop 217
ttaacctcttcgtcacttgcatctt

SEQ ID NO: 421423 - DNA, 25 bp, Artificial
  probe
  misc_feature (1)..(25): SEQ ID NO: 5784; WAN024FQY; Start 118; Stop 142
tcaccaataactgtatcgaaacctt

SEQ ID NO: 421424 - DNA, 25 bp, Artificial
  probe
  misc_feature (1)..(25): SEQ ID NO: 5785; WAN024CUZ; Start 167; Stop 191
aattagaagaattgctacaatctcc

SEQ ID NO: 421425 - DNA, 25 bp, Artificial
  probe
  misc_feature (1)..(25): SEQ ID NO: 5785; WAN024CUZ; Start 275; Stop 299
aagaagagattcctttagccatcgc

SEQ ID NO: 421426 - DNA, 25 bp, Artificial
  probe
  misc_feature (1)..(25): SEQ ID NO: 5785; WAN024CUZ; Start 483; Stop 507
cgtcaaacagaaagagatggtgaga

SEQ ID NO: 421427 - DNA, 25 bp, Artificial
  probe
  misc_feature (1)..(25): SEQ ID NO: 5785; WAN024CUZ; Start 274; Stop 298
aaagaagagattcctttagccatcg

SEQ ID NO: 421428 - DNA, 25 bp, Artificial
  probe
  misc_feature (1)..(25): SEQ ID NO: 5785; WAN024CUZ; Start 482; Stop 506
ccgtcaaacagaaagagatggtgag

SEQ ID NO: 421429 - DNA, 25 bp, Artificial
  probe
  misc_feature (1)..(25): SEQ ID NO: 5785; WAN024CUZ; Start 437; Stop 461
caattgatgaggctaaatcccaaat

SEQ ID NO: 421430 - DNA, 25 bp, Artificial
  probe
  misc_feature (1)..(25): SEQ ID NO: 5785; WAN024CUZ; Start 430; Stop 454
gacgatgcaattgatgaggctaaat

SEQ ID NO: 421431 - DNA, 25 bp, Artificial
  probe
  misc_feature (1)..(25): SEQ ID NO: 5785; WAN024CUZ; Start 431; Stop 455
acgatgcaattgatgaggctaaatc

SEQ ID NO: 421432 - DNA, 25 bp, Artificial
  probe
  misc_feature (1)..(25): SEQ ID NO: 5785; WAN024CUZ; Start 277; Stop 301
gaagagattcctttagccatcgctt

SEQ ID NO: 421433 - DNA, 25 bp, Artificial
  probe
  misc_feature (1)..(25): SEQ ID NO: 5785; WAN024CUZ; Start 433; Stop 457
gatgcaattgatgaggctaaatccc

SEQ ID NO: 421434 - DNA, 25 bp, Artificial
  probe
  misc_feature (1)..(25): SEQ ID NO: 5785; WAN024CUZ; Start 436; Stop 460
gcaattgatgaggctaaatcccaaa

SEQ ID NO: 421435 - DNA, 25 bp, Artificial
  probe
  misc_feature (1)..(25): SEQ ID NO: 5785; WAN024CUZ; Start 278; Stop 302
aagagattcctttagccatcgcttg

SEQ ID NO: 421436 - DNA, 25 bp, Artificial
  probe
  misc_feature (1)..(25): SEQ ID NO: 5785; WAN024CUZ; Start 432; Stop 456
cgatgcaattgatgaggctaaatcc

SEQ ID NO: 421437 - DNA, 25 bp, Artificial
  probe
  misc_feature (1)..(25): SEQ ID NO: 5785; WAN024CUZ; Start 273; Stop 297
aaaagaagagattcctttagccatc

SEQ ID NO: 421438 - DNA, 25 bp, Artificial
  probe
  misc_feature (1)..(25): SEQ ID NO: 5785; WAN024CUZ; Start 434; Stop 458
atgcaattgatgaggctaaatccca

SEQ ID NO: 421439 - DNA, 25 bp, Artificial
  probe
  misc_feature (1)..(25): SEQ ID NO: 5785; WAN024CUZ; Start 276; Stop 300
agaagagattcctttagccatcgct

SEQ ID NO: 421440 - DNA, 25 bp, Artificial
  probe
  misc_feature (1)..(25): SEQ ID NO: 5785; WAN024CUZ; Start 435; Stop 459
tgcaattgatgaggctaaatcccaa

SEQ ID NO: 421441 - DNA, 25 bp, Artificial
  probe
  misc_feature (1)..(25): SEQ ID NO: 5785; WAN024CUZ; Start 19; Stop 43
cagatgtcctctgaacaacaggaac

SEQ ID NO: 421442 - DNA, 25 bp, Artificial
  probe
  misc_feature (1)..(25): SEQ ID NO: 5785; WAN024CUZ; Start 163; Stop 187
cagaaattagaagaattgctacaat

SEQ ID NO: 421443 - DNA, 25 bp, Artificial
  probe
  misc_feature (1)..(25): SEQ ID NO: 5785; WAN024CUZ; Start 166; Stop 190
aaattagaagaattgctacaatctc

SEQ ID NO: 421444 - DNA, 25 bp, Artificial
  probe
  misc_feature (1)..(25): SEQ ID NO: 5785; WAN024CUZ; Start 165; Stop 189
gaaattagaagaattgctacaatct

SEQ ID NO: 421445 - DNA, 25 bp, Artificial
  probe
  misc_feature (1)..(25): SEQ ID NO: 5785; WAN024CUZ; Start 164; Stop 188
agaaattagaagaattgctacaatc

SEQ ID NO: 421446 - DNA, 25 bp, Artificial
  probe
  misc_feature (1)..(25): SEQ ID NO: 5785; WAN024CUZ; Start 24; Stop 48
gtcctctgaacaacaggaacgaatg

SEQ ID NO: 421447 - DNA, 25 bp, Artificial
  probe
  misc_feature (1)..(25): SEQ ID NO: 5785; WAN024CUZ; Start 231; Stop 255
agacaaaccaattgatatagagaaa

SEQ ID NO: 421448 - DNA, 25 bp, Artificial
  probe
  misc_feature (1)..(25): SEQ ID NO: 5785; WAN024CUZ; Start 23; Stop 47
tgtcctctgaacaacaggaacgaat

SEQ ID NO: 421449 - DNA, 25 bp, Artificial
  probe
  misc_feature (1)..(25): SEQ ID NO: 5785; WAN024CUZ; Start 22; Stop 46
atgtcctctgaacaacaggaacgaa

SEQ ID NO: 421450 - DNA, 25 bp, Artificial
  probe
  misc_feature (1)..(25): SEQ ID NO: 5785; WAN024CUZ; Start 279; Stop 303
agagattcctttagccatcgcttgg

SEQ ID NO: 421451 - DNA, 25 bp, Artificial
  probe
  misc_feature (1)..(25): SEQ ID NO: 5785; WAN024CUZ; Start 21; Stop 45
gatgtcctctgaacaacaggaacga

SEQ ID NO: 421452 - DNA, 25 bp, Artificial
  probe
  misc_feature (1)..(25): SEQ ID NO: 5785; WAN024CUZ; Start 20; Stop 44
agatgtcctctgaacaacaggaacg

SEQ ID NO: 421453 - DNA, 25 bp, Artificial
  probe
  misc_feature (1)..(25): SEQ ID NO: 5785; WAN024CUZ; Start 194; Stop 218
attcgattgatacgattaatctgaa

SEQ ID NO: 421454 - DNA, 25 bp, Artificial
  probe
  misc_feature (1)..(25): SEQ ID NO: 5785; WAN024CUZ; Start 230; Stop 254
tagacaaaccaattgatatagagaa

SEQ ID NO: 421455 - DNA, 25 bp, Artificial
  probe
  misc_feature (1)..(25): SEQ ID NO: 5785; WAN024CUZ; Start 229; Stop 253
ttagacaaaccaattgatatagaga

SEQ ID NO: 421456 - DNA, 25 bp, Artificial
  probe
  misc_feature (1)..(25): SEQ ID NO: 5785; WAN024CUZ; Start 232; Stop 256
gacaaaccaattgatatagagaaat

SEQ ID NO: 421457 - DNA, 25 bp, Artificial
  probe
  misc_feature (1)..(25): SEQ ID NO: 5786; WAN024G7Y; Start 302; Stop 326
taccagtcagaggatcaataatgtg

SEQ ID NO: 421458 - DNA, 25 bp, Artificial
  probe
  misc_feature (1)..(25): SEQ ID NO: 5786; WAN024G7Y; Start 301; Stop 325
ttaccagtcagaggatcaataatgt

SEQ ID NO: 421459 - DNA, 25 bp, Artificial
  probe
  misc_feature (1)..(25): SEQ ID NO: 5786; WAN024G7Y; Start 303; Stop 327
accagtcagaggatcaataatgtga

SEQ ID NO: 421460 - DNA, 25 bp, Artificial
  probe
  misc_feature (1)..(25): SEQ ID NO: 5786; WAN024G7Y; Start 234; Stop 258
gataatatcctcacgagtgaaggtc

SEQ ID NO: 421461 - DNA, 25 bp, Artificial
  probe
  misc_feature (1)..(25): SEQ ID NO: 5786; WAN024G7Y; Start 235; Stop 259
ataatatcctcacgagtgaaggtct

SEQ ID NO: 421462 - DNA, 25 bp, Artificial
  probe
  misc_feature (1)..(25): SEQ ID NO: 5786; WAN024G7Y; Start 236; Stop 260
taatatcctcacgagtgaaggtctt

SEQ ID NO: 421463 - DNA, 25 bp, Artificial
  probe
  misc_feature (1)..(25): SEQ ID NO: 5786; WAN024G7Y; Start 224; Stop 248
tgttaatctcgataatatcctcacg

SEQ ID NO: 421464 - DNA, 25 bp, Artificial
  probe
  misc_feature (1)..(25): SEQ ID NO: 5786; WAN024G7Y; Start 222; Stop 246
ggtgttaatctcgataatatcctca

SEQ ID NO: 421465 - DNA, 25 bp, Artificial
  probe
  misc_feature (1)..(25): SEQ ID NO: 5786; WAN024G7Y; Start 233; Stop 257
cgataatatcctcacgagtgaaggt

SEQ ID NO: 421466 - DNA, 25 bp, Artificial
  probe
  misc_feature (1)..(25): SEQ ID NO: 5786; WAN024G7Y; Start 298; Stop 322
actttaccagtcagaggatcaataa

SEQ ID NO: 421467 - DNA, 25 bp, Artificial
  probe
  misc_feature (1)..(25): SEQ ID NO: 5786; WAN024G7Y; Start 300; Stop 324
tttaccagtcagaggatcaataatg

SEQ ID NO: 421468 - DNA, 25 bp, Artificial
  probe
  misc_feature (1)..(25): SEQ ID NO: 5786; WAN024G7Y; Start 299; Stop 323
ctttaccagtcagaggatcaataat

SEQ ID NO: 421469 - DNA, 25 bp, Artificial
  probe
  misc_feature (1)..(25): SEQ ID NO: 5786; WAN024G7Y; Start 217; Stop 241
ccgtgggtgttaatctcgataatat

SEQ ID NO: 421470 - DNA, 25 bp, Artificial
  probe
  misc_feature (1)..(25): SEQ ID NO: 5786; WAN024G7Y; Start 218; Stop 242
cgtgggtgttaatctcgataatatc

SEQ ID NO: 421471 - DNA, 25 bp, Artificial
  probe
  misc_feature (1)..(25): SEQ ID NO: 5786; WAN024G7Y; Start 219; Stop 243
gtgggtgttaatctcgataatatcc

SEQ ID NO: 421472 - DNA, 25 bp, Artificial
  probe
  misc_feature (1)..(25): SEQ ID NO: 5786; WAN024G7Y; Start 1; Stop 25
ttgttaatgaggtcagaaagggagc

SEQ ID NO: 421473 - DNA, 25 bp, Artificial
  probe
  misc_feature (1)..(25): SEQ ID NO: 5786; WAN024G7Y; Start 220; Stop 244
tgggtgttaatctcgataatatcct

SEQ ID NO: 421474 - DNA, 25 bp, Artificial
  probe
  misc_feature (1)..(25): SEQ ID NO: 5786; WAN024G7Y; Start 182; Stop 206
ctagctggagaatttcattggtcac

SEQ ID NO: 421475 - DNA, 25 bp, Artificial
  probe
  misc_feature (1)..(25): SEQ ID NO: 5786; WAN024G7Y; Start 232; Stop 256
tcgataatatcctcacgagtgaagg

SEQ ID NO: 421476 - DNA, 25 bp, Artificial
  probe
  misc_feature (1)..(25): SEQ ID NO: 5786; WAN024G7Y; Start 221; Stop 245
gggtgttaatctcgataatatcctc

SEQ ID NO: 421477 - DNA, 25 bp, Artificial
  probe
  misc_feature (1)..(25): SEQ ID NO: 5786; WAN024G7Y; Start 279; Stop 303
aaccataacctcgtccatgacttta

SEQ ID NO: 421478 - DNA, 25 bp, Artificial
  probe
  misc_feature (1)..(25): SEQ ID NO: 5786; WAN024G7Y; Start 29; Stop 53
ctaattgtttgaccgcaatgttcat

SEQ ID NO: 421479 - DNA, 25 bp, Artificial
  probe
  misc_feature (1)..(25): SEQ ID NO: 5786; WAN024G7Y; Start 58; Stop 82
ttgtcagtcttggcacggatgatat

SEQ ID NO: 421480 - DNA, 25 bp, Artificial
  probe
  misc_feature (1)..(25): SEQ ID NO: 5786; WAN024G7Y; Start 237; Stop 261
aatatcctcacgagtgaaggtcttt

SEQ ID NO: 421481 - DNA, 25 bp, Artificial
  probe
  misc_feature (1)..(25): SEQ ID NO: 5786; WAN024G7Y; Start 225; Stop 249
gttaatctcgataatatcctcacga

SEQ ID NO: 421482 - DNA, 25 bp, Artificial
  probe
  misc_feature (1)..(25): SEQ ID NO: 5786; WAN024G7Y; Start 27; Stop 51
gtctaattgtttgaccgcaatgttc

SEQ ID NO: 421483 - DNA, 25 bp, Artificial
  probe
  misc_feature (1)..(25): SEQ ID NO: 5786; WAN024G7Y; Start 16; Stop 40
gaaagggagccgtctaattgtttga

SEQ ID NO: 421484 - DNA, 25 bp, Artificial
  probe
  misc_feature (1)..(25): SEQ ID NO: 5786; WAN024G7Y; Start 283; Stop 307
ataacctcgtccatgactttaccag

SEQ ID NO: 421485 - DNA, 25 bp, Artificial
  probe
  misc_feature (1)..(25): SEQ ID NO: 5786; WAN024G7Y; Start 223; Stop 247
gtgttaatctcgataatatcctcac

SEQ ID NO: 421486 - DNA, 25 bp, Artificial
  probe
  misc_feature (1)..(25): SEQ ID NO: 5786; WAN024G7Y; Start 30; Stop 54
taattgtttgaccgcaatgttcatg

SEQ ID NO: 421487 - DNA, 25 bp, Artificial
  probe
  misc_feature (1)..(25): SEQ ID NO: 5786; WAN024G7Y; Start 28; Stop 52
tctaattgtttgaccgcaatgttca

SEQ ID NO: 421488 - DNA, 25 bp, Artificial
  probe
  misc_feature (1)..(25): SEQ ID NO: 5786; WAN024G7Y; Start 15; Stop 39
agaaagggagccgtctaattgtttg

SEQ ID NO: 421489 - DNA, 25 bp, Artificial
  probe
  misc_feature (1)..(25): SEQ ID NO: 5786; WAN024G7Y; Start 14; Stop 38
cagaaagggagccgtctaattgttt

SEQ ID NO: 421490 - DNA, 25 bp, Artificial
  probe
  misc_feature (1)..(25): SEQ ID NO: 5787; WAN024DEU; Start 174; Stop 198
tccatctaaccagcttatcttaact

SEQ ID NO: 421491 - DNA, 25 bp, Artificial
  probe
  misc_feature (1)..(25): SEQ ID NO: 5787; WAN024DEU; Start 176; Stop 200
catctaaccagcttatcttaactcc

SEQ ID NO: 421492 - DNA, 25 bp, Artificial
  probe
  misc_feature (1)..(25): SEQ ID NO: 5787; WAN024DEU; Start 175; Stop 199
ccatctaaccagcttatcttaactc

SEQ ID NO: 421493 - DNA, 25 bp, Artificial
  probe
  misc_feature (1)..(25): SEQ ID NO: 5787; WAN024DEU; Start 173; Stop 197
ttccatctaaccagcttatcttaac

SEQ ID NO: 421494 - DNA, 25 bp, Artificial
  probe
  misc_feature (1)..(25): SEQ ID NO: 5787; WAN024DEU; Start 220; Stop 244
aaactgtctggtattgctattgaaa

SEQ ID NO: 421495 - DNA, 25 bp, Artificial
  probe
  misc_feature (1)..(25): SEQ ID NO: 5787; WAN024DEU; Start 162; Stop 186
aagtttgttgtttccatctaaccag

SEQ ID NO: 421496 - DNA, 25 bp, Artificial
  probe
  misc_feature (1)..(25): SEQ ID NO: 5787; WAN024DEU; Start 161; Stop 185
caagtttgttgtttccatctaacca

SEQ ID NO: 421497 - DNA, 25 bp, Artificial
  probe
  misc_feature (1)..(25): SEQ ID NO: 5787; WAN024DEU; Start 163; Stop 187
agtttgttgtttccatctaaccagc

SEQ ID NO: 421498 - DNA, 25 bp, Artificial
  probe
  misc_feature (1)..(25): SEQ ID NO: 5787; WAN024DEU; Start 341; Stop 365
gccagtctgattattaccagttaaa

SEQ ID NO: 421499 - DNA, 25 bp, Artificial
  probe
  misc_feature (1)..(25): SEQ ID NO: 5787; WAN024DEU; Start 177; Stop 201
atctaaccagcttatcttaactccc

SEQ ID NO: 421500 - DNA, 25 bp, Artificial
  probe
  misc_feature (1)..(25): SEQ ID NO: 5787; WAN024DEU; Start 349; Stop 373
gattattaccagttaaaggttggcg

SEQ ID NO: 421501 - DNA, 25 bp, Artificial
  probe
  misc_feature (1)..(25): SEQ ID NO: 5787; WAN024DEU; Start 170; Stop 194
tgtttccatctaaccagcttatctt

SEQ ID NO: 421502 - DNA, 25 bp, Artificial
  probe
  misc_feature (1)..(25): SEQ ID NO: 5787; WAN024DEU; Start 169; Stop 193
ttgtttccatctaaccagcttatct

SEQ ID NO: 421503 - DNA, 25 bp, Artificial
  probe
  misc_feature (1)..(25): SEQ ID NO: 5787; WAN024DEU; Start 168; Stop 192
gttgtttccatctaaccagcttatc

SEQ ID NO: 421504 - DNA, 25 bp, Artificial
  probe
  misc_feature (1)..(25): SEQ ID NO: 5787; WAN024DEU; Start 167; Stop 191
tgttgtttccatctaaccagcttat

SEQ ID NO: 421505 - DNA, 25 bp, Artificial
  probe
  misc_feature (1)..(25): SEQ ID NO: 5787; WAN024DEU; Start 538; Stop 562
ccgacggaaattagtaattgtcttc

SEQ ID NO: 421506 - DNA, 25 bp, Artificial
  probe
  misc_feature (1)..(25): SEQ ID NO: 5787; WAN024DEU; Start 166; Stop 190
ttgttgtttccatctaaccagctta

SEQ ID NO: 421507 - DNA, 25 bp, Artificial
  probe
  misc_feature (1)..(25): SEQ ID NO: 5787; WAN024DEU; Start 348; Stop 372
tgattattaccagttaaaggttggc

SEQ ID NO: 421508 - DNA, 25 bp, Artificial
  probe
  misc_feature (1)..(25): SEQ ID NO: 5787; WAN024DEU; Start 350; Stop 374
attattaccagttaaaggttggcgg

SEQ ID NO: 421509 - DNA, 25 bp, Artificial
  probe
  misc_feature (1)..(25): SEQ ID NO: 5787; WAN024DEU; Start 340; Stop 364
ggccagtctgattattaccagttaa

SEQ ID NO: 421510 - DNA, 25 bp, Artificial
  probe
  misc_feature (1)..(25): SEQ ID NO: 5787; WAN024DEU; Start 165; Stop 189
tttgttgtttccatctaaccagctt

SEQ ID NO: 421511 - DNA, 25 bp, Artificial
  probe
  misc_feature (1)..(25): SEQ ID NO: 5787; WAN024DEU; Start 1; Stop 25
ttgttacaagagcaattggagaagg

SEQ ID NO: 421512 - DNA, 25 bp, Artificial
  probe
  misc_feature (1)..(25): SEQ ID NO: 5787; WAN024DEU; Start 533; Stop 557
tcttgccgacggaaattagtaattg

SEQ ID NO: 421513 - DNA, 25 bp, Artificial
  probe
  misc_feature (1)..(25): SEQ ID NO: 5787; WAN024DEU; Start 171; Stop 195
gtttccatctaaccagcttatctta

SEQ ID NO: 421514 - DNA, 25 bp, Artificial
  probe
  misc_feature (1)..(25): SEQ ID NO: 5787; WAN024DEU; Start 261; Stop 285
aacatctagtgccctgacttctttc

SEQ ID NO: 421515 - DNA, 25 bp, Artificial
  probe
  misc_feature (1)..(25): SEQ ID NO: 5787; WAN024DEU; Start 537; Stop 561
gccgacggaaattagtaattgtctt

SEQ ID NO: 421516 - DNA, 25 bp, Artificial
  probe
  misc_feature (1)..(25): SEQ ID NO: 5787; WAN024DEU; Start 532; Stop 556
gtcttgccgacggaaattagtaatt

SEQ ID NO: 421517 - DNA, 25 bp, Artificial
  probe
  misc_feature (1)..(25): SEQ ID NO: 5787; WAN024DEU; Start 534; Stop 558
cttgccgacggaaattagtaattgt

SEQ ID NO: 421518 - DNA, 25 bp, Artificial
  probe
  misc_feature (1)..(25): SEQ ID NO: 5787; WAN024DEU; Start 400; Stop 424
ggtgatacactggctggaatgattg

SEQ ID NO: 421519 - DNA, 25 bp, Artificial
  probe
  misc_feature (1)..(25): SEQ ID NO: 5787; WAN024DEU; Start 164; Stop 188
gtttgttgtttccatctaaccagct

SEQ ID NO: 421520 - DNA, 25 bp, Artificial
  probe
  misc_feature (1)..(25): SEQ ID NO: 5787; WAN024DEU; Start 260; Stop 284
caacatctagtgccctgacttcttt

SEQ ID NO: 421521 - DNA, 25 bp, Artificial
  probe
  misc_feature (1)..(25): SEQ ID NO: 5787; WAN024DEU; Start 535; Stop 559
ttgccgacggaaattagtaattgtc

SEQ ID NO: 421522 - DNA, 25 bp, Artificial
  probe
  misc_feature (1)..(25): SEQ ID NO: 5787; WAN024DEU; Start 172; Stop 196
tttccatctaaccagcttatcttaa

SEQ ID NO: 421523 - DNA, 25 bp, Artificial
  probe
  misc_feature (1)..(25): SEQ ID NO: 5788; WAN024FBS; Start 280; Stop 304
gcagcaactaaatcttcactcaaat

SEQ ID NO: 421524 - DNA, 25 bp, Artificial
  probe
  misc_feature (1)..(25): SEQ ID NO: 5788; WAN024FBS; Start 282; Stop 306
agcaactaaatcttcactcaaatca

SEQ ID NO: 421525 - DNA, 25 bp, Artificial
  probe
  misc_feature (1)..(25): SEQ ID NO: 5788; WAN024FBS; Start 279; Stop 303
agcagcaactaaatcttcactcaaa

SEQ ID NO: 421526 - DNA, 25 bp, Artificial
  probe
  misc_feature (1)..(25): SEQ ID NO: 5788; WAN024FBS; Start 281; Stop 305
cagcaactaaatcttcactcaaatc

SEQ ID NO: 421527 - DNA, 25 bp, Artificial
  probe
  misc_feature (1)..(25): SEQ ID NO: 5788; WAN024FBS; Start 176; Stop 200
gatgtttgggatttaggagcaattc

SEQ ID NO: 421528 - DNA, 25 bp, Artificial
  probe
  misc_feature (1)..(25): SEQ ID NO: 5788; WAN024FBS; Start 7; Stop 31
ctactatttgaacgctcacgagata

SEQ ID NO: 421529 - DNA, 25 bp, Artificial
  probe
  misc_feature (1)..(25): SEQ ID NO: 5788; WAN024FBS; Start 114; Stop 138
tcctctgtacttggcttcttctctt

SEQ ID NO: 421530 - DNA, 25 bp, Artificial
  probe
  misc_feature (1)..(25): SEQ ID NO: 5788; WAN024FBS; Start 113; Stop 137
ttcctctgtacttggcttcttctct

SEQ ID NO: 421531 - DNA, 25 bp, Artificial
  probe
  misc_feature (1)..(25): SEQ ID NO: 5788; WAN024FBS; Start 112; Stop 136
gttcctctgtacttggcttcttctc

SEQ ID NO: 421532 - DNA, 25 bp, Artificial
  probe
  misc_feature (1)..(25): SEQ ID NO: 5788; WAN024FBS; Start 1; Stop 25
ttgttactactatttgaacgctcac

SEQ ID NO: 421533 - DNA, 25 bp, Artificial
  probe
  misc_feature (1)..(25): SEQ ID NO: 5788; WAN024FBS; Start 177; Stop 201
atgtttgggatttaggagcaattca

SEQ ID NO: 421534 - DNA, 25 bp, Artificial
  probe
  misc_feature (1)..(25): SEQ ID NO: 5788; WAN024FBS; Start 4; Stop 28
ttactactatttgaacgctcacgag

SEQ ID NO: 421535 - DNA, 25 bp, Artificial
  probe
  misc_feature (1)..(25): SEQ ID NO: 5788; WAN024FBS; Start 3; Stop 27
gttactactatttgaacgctcacga

SEQ ID NO: 421536 - DNA, 25 bp, Artificial
  probe
  misc_feature (1)..(25): SEQ ID NO: 5788; WAN024FBS; Start 273; Stop 297
taggagagcagcaactaaatcttca

SEQ ID NO: 421537 - DNA, 25 bp, Artificial
  probe
  misc_feature (1)..(25): SEQ ID NO: 5788; WAN024FBS; Start 272; Stop 296
ctaggagagcagcaactaaatcttc

SEQ ID NO: 421538 - DNA, 25 bp, Artificial
  probe
  misc_feature (1)..(25): SEQ ID NO: 5788; WAN024FBS; Start 8; Stop 32
tactatttgaacgctcacgagatag

SEQ ID NO: 421539 - DNA, 25 bp, Artificial
  probe
  misc_feature (1)..(25): SEQ ID NO: 5788; WAN024FBS; Start 283; Stop 307
gcaactaaatcttcactcaaatcat

SEQ ID NO: 421540 - DNA, 25 bp, Artificial
  probe
  misc_feature (1)..(25): SEQ ID NO: 5788; WAN024FBS; Start 2; Stop 26
tgttactactatttgaacgctcacg

SEQ ID NO: 421541 - DNA, 25 bp, Artificial
  probe
  misc_feature (1)..(25): SEQ ID NO: 5788; WAN024FBS; Start 10; Stop 34
ctatttgaacgctcacgagatagat

SEQ ID NO: 421542 - DNA, 25 bp, Artificial
  probe
  misc_feature (1)..(25): SEQ ID NO: 5788; WAN024FBS; Start 271; Stop 295
tctaggagagcagcaactaaatctt

SEQ ID NO: 421543 - DNA, 25 bp, Artificial
  probe
  misc_feature (1)..(25): SEQ ID NO: 5788; WAN024FBS; Start 175; Stop 199
ggatgtttgggatttaggagcaatt

SEQ ID NO: 421544 - DNA, 25 bp, Artificial
  probe
  misc_feature (1)..(25): SEQ ID NO: 5788; WAN024FBS; Start 5; Stop 29
tactactatttgaacgctcacgaga

SEQ ID NO: 421545 - DNA, 25 bp, Artificial
  probe
  misc_feature (1)..(25): SEQ ID NO: 5788; WAN024FBS; Start 76; Stop 100
ttaaagagttcctcatacataagcg

SEQ ID NO: 421546 - DNA, 25 bp, Artificial
  probe
  misc_feature (1)..(25): SEQ ID NO: 5788; WAN024FBS; Start 11; Stop 35
tatttgaacgctcacgagatagatc

SEQ ID NO: 421547 - DNA, 25 bp, Artificial
  probe
  misc_feature (1)..(25): SEQ ID NO: 5788; WAN024FBS; Start 178; Stop 202
tgtttgggatttaggagcaattcac

SEQ ID NO: 421548 - DNA, 25 bp, Artificial
  probe
  misc_feature (1)..(25): SEQ ID NO: 5788; WAN024FBS; Start 278; Stop 302
gagcagcaactaaatcttcactcaa

SEQ ID NO: 421549 - DNA, 25 bp, Artificial
  probe
  misc_feature (1)..(25): SEQ ID NO: 5788; WAN024FBS; Start 276; Stop 300
gagagcagcaactaaatcttcactc

SEQ ID NO: 421550 - DNA, 25 bp, Artificial
  probe
  misc_feature (1)..(25): SEQ ID NO: 5788; WAN024FBS; Start 287; Stop 311
ctaaatcttcactcaaatcatgtcg

SEQ ID NO: 421551 - DNA, 25 bp, Artificial
  probe
  misc_feature (1)..(25): SEQ ID NO: 5788; WAN024FBS; Start 6; Stop 30
actactatttgaacgctcacgagat

SEQ ID NO: 421552 - DNA, 25 bp, Artificial
  probe
  misc_feature (1)..(25): SEQ ID NO: 5788; WAN024FBS; Start 111; Stop 135
agttcctctgtacttggcttcttct

SEQ ID NO: 421553 - DNA, 25 bp, Artificial
  probe
  misc_feature (1)..(25): SEQ ID NO: 5788; WAN024FBS; Start 9; Stop 33
actatttgaacgctcacgagataga

SEQ ID NO: 421554 - DNA, 25 bp, Artificial
  probe
  misc_feature (1)..(25): SEQ ID NO: 5788; WAN024FBS; Start 182; Stop 206
tgggatttaggagcaattcacgatt

SEQ ID NO: 421555 - DNA, 25 bp, Artificial
  probe
  misc_feature (1)..(25): SEQ ID NO: 5788; WAN024FBS; Start 110; Stop 134
cagttcctctgtacttggcttcttc

SEQ ID NO: 421556 - DNA, 25 bp, Artificial
  probe
  misc_feature (1)..(25): SEQ ID NO: 5789; WAN024F7Y; Start 70; Stop 94
gagatggttgatagaactgacgaag

SEQ ID NO: 421557 - DNA, 25 bp, Artificial
  probe
  misc_feature (1)..(25): SEQ ID NO: 5789; WAN024F7Y; Start 69; Stop 93
tgagatggttgatagaactgacgaa

SEQ ID NO: 421558 - DNA, 25 bp, Artificial
  probe
  misc_feature (1)..(25): SEQ ID NO: 5789; WAN024F7Y; Start 68; Stop 92
ttgagatggttgatagaactgacga

SEQ ID NO: 421559 - DNA, 25 bp, Artificial
  probe
  misc_feature (1)..(25): SEQ ID NO: 5789; WAN024F7Y; Start 71; Stop 95
agatggttgatagaactgacgaagt

SEQ ID NO: 421560 - DNA, 25 bp, Artificial
  probe
  misc_feature (1)..(25): SEQ ID NO: 5789; WAN024F7Y; Start 72; Stop 96
gatggttgatagaactgacgaagtc

SEQ ID NO: 421561 - DNA, 25 bp, Artificial
  probe
  misc_feature (1)..(25): SEQ ID NO: 5789; WAN024F7Y; Start 119; Stop 143
ttgtagataaggagaagctgatgtg

SEQ ID NO: 421562 - DNA, 25 bp, Artificial
  probe
  misc_feature (1)..(25): SEQ ID NO: 5789; WAN024F7Y; Start 118; Stop 142
gttgtagataaggagaagctgatgt

SEQ ID NO: 421563 - DNA, 25 bp, Artificial
  probe
  misc_feature (1)..(25): SEQ ID NO: 5789; WAN024F7Y; Start 117; Stop 141
ggttgtagataaggagaagctgatg

SEQ ID NO: 421564 - DNA, 25 bp, Artificial
  probe
  misc_feature (1)..(25): SEQ ID NO: 5789; WAN024F7Y; Start 116; Stop 140
aggttgtagataaggagaagctgat

SEQ ID NO: 421565 - DNA, 25 bp, Artificial
  probe
  misc_feature (1)..(25): SEQ ID NO: 5789; WAN024F7Y; Start 113; Stop 137
ttgaggttgtagataaggagaagct

SEQ ID NO: 421566 - DNA, 25 bp, Artificial
  probe
  misc_feature (1)..(25): SEQ ID NO: 5789; WAN024F7Y; Start 122; Stop 146
tagataaggagaagctgatgtggtt

SEQ ID NO: 421567 - DNA, 25 bp, Artificial
  probe
  misc_feature (1)..(25): SEQ ID NO: 5789; WAN024F7Y; Start 115; Stop 139
gaggttgtagataaggagaagctga

SEQ ID NO: 421568 - DNA, 25 bp, Artificial
  probe
  misc_feature (1)..(25): SEQ ID NO: 5789; WAN024F7Y; Start 112; Stop 136
tttgaggttgtagataaggagaagc

SEQ ID NO: 421569 - DNA, 25 bp, Artificial
  probe
  misc_feature (1)..(25): SEQ ID NO: 5789; WAN024F7Y; Start 114; Stop 138
tgaggttgtagataaggagaagctg

SEQ ID NO: 421570 - DNA, 25 bp, Artificial
  probe
  misc_feature (1)..(25): SEQ ID NO: 5789; WAN024F7Y; Start 121; Stop 145
gtagataaggagaagctgatgtggt

SEQ ID NO: 421571 - DNA, 25 bp, Artificial
  probe
  misc_feature (1)..(25): SEQ ID NO: 5789; WAN024F7Y; Start 120; Stop 144
tgtagataaggagaagctgatgtgg

SEQ ID NO: 421572 - DNA, 25 bp, Artificial
  probe
  misc_feature (1)..(25): SEQ ID NO: 5789; WAN024F7Y; Start 67; Stop 91
tttgagatggttgatagaactgacg

SEQ ID NO: 421573 - DNA, 25 bp, Artificial
  probe
  misc_feature (1)..(25): SEQ ID NO: 5789; WAN024F7Y; Start 124; Stop 148
gataaggagaagctgatgtggtttg

SEQ ID NO: 421574 - DNA, 25 bp, Artificial
  probe
  misc_feature (1)..(25): SEQ ID NO: 5789; WAN024F7Y; Start 123; Stop 147
agataaggagaagctgatgtggttt

SEQ ID NO: 421575 - DNA, 25 bp, Artificial
  probe
  misc_feature (1)..(25): SEQ ID NO: 5789; WAN024F7Y; Start 125; Stop 149
ataaggagaagctgatgtggtttga

SEQ ID NO: 421576 - DNA, 25 bp, Artificial
  probe
  misc_feature (1)..(25): SEQ ID NO: 5789; WAN024F7Y; Start 126; Stop 150
taaggagaagctgatgtggtttgaa

SEQ ID NO: 421577 - DNA, 25 bp, Artificial
  probe
  misc_feature (1)..(25): SEQ ID NO: 5789; WAN024F7Y; Start 109; Stop 133
ggttttgaggttgtagataaggaga

SEQ ID NO: 421578 - DNA, 25 bp, Artificial
  probe
  misc_feature (1)..(25): SEQ ID NO: 5789; WAN024F7Y; Start 110; Stop 134
gttttgaggttgtagataaggagaa

SEQ ID NO: 421579 - DNA, 25 bp, Artificial
  probe
  misc_feature (1)..(25): SEQ ID NO: 5789; WAN024F7Y; Start 66; Stop 90
ttttgagatggttgatagaactgac

SEQ ID NO: 421580 - DNA, 25 bp, Artificial
  probe
  misc_feature (1)..(25): SEQ ID NO: 5789; WAN024F7Y; Start 65; Stop 89
gttttgagatggttgatagaactga

SEQ ID NO: 421581 - DNA, 25 bp, Artificial
  probe
  misc_feature (1)..(25): SEQ ID NO: 5789; WAN024F7Y; Start 111; Stop 135
ttttgaggttgtagataaggagaag

SEQ ID NO: 421582 - DNA, 25 bp, Artificial
  probe
  misc_feature (1)..(25): SEQ ID NO: 5789; WAN024F7Y; Start 133; Stop 157
aagctgatgtggtttgaagaggttt

SEQ ID NO: 421583 - DNA, 25 bp, Artificial
  probe
  misc_feature (1)..(25): SEQ ID NO: 5789; WAN024F7Y; Start 127; Stop 151
aaggagaagctgatgtggtttgaag

SEQ ID NO: 421584 - DNA, 25 bp, Artificial
  probe
  misc_feature (1)..(25): SEQ ID NO: 5789; WAN024F7Y; Start 73; Stop 97
atggttgatagaactgacgaagtca

SEQ ID NO: 421585 - DNA, 25 bp, Artificial
  probe
  misc_feature (1)..(25): SEQ ID NO: 5789; WAN024F7Y; Start 132; Stop 156
gaagctgatgtggtttgaagaggtt

SEQ ID NO: 421586 - DNA, 25 bp, Artificial
  probe
  misc_feature (1)..(25): SEQ ID NO: 5789; WAN024F7Y; Start 136; Stop 160
ctgatgtggtttgaagaggttttcg

SEQ ID NO: 421587 - DNA, 25 bp, Artificial
  probe
  misc_feature (1)..(25): SEQ ID NO: 5789; WAN024F7Y; Start 130; Stop 154
gagaagctgatgtggtttgaagagg

SEQ ID NO: 421588 - DNA, 25 bp, Artificial
  probe
  misc_feature (1)..(25): SEQ ID NO: 5789; WAN024F7Y; Start 129; Stop 153
ggagaagctgatgtggtttgaagag

SEQ ID NO: 421589 - DNA, 25 bp, Artificial
  probe
  misc_feature (1)..(25): SEQ ID NO: 5790; WAN024B7N; Start 96; Stop 120
catggatttcactgatttgtattaa

SEQ ID NO: 421590 - DNA, 25 bp, Artificial
  probe
  misc_feature (1)..(25): SEQ ID NO: 5790; WAN024B7N; Start 97; Stop 121
atggatttcactgatttgtattaat

SEQ ID NO: 421591 - DNA, 25 bp, Artificial
  probe
  misc_feature (1)..(25): SEQ ID NO: 5790; WAN024B7N; Start 95; Stop 119
ccatggatttcactgatttgtatta

SEQ ID NO: 421592 - DNA, 25 bp, Artificial
  probe
  misc_feature (1)..(25): SEQ ID NO: 5791; WAN024B7V; Start 611; Stop 635
atgagatgatgattgtggatgagtg

SEQ ID NO: 421593 - DNA, 25 bp, Artificial
  probe
  misc_feature (1)..(25): SEQ ID NO: 5791; WAN024B7V; Start 610; Stop 634
tatgagatgatgattgtggatgagt

SEQ ID NO: 421594 - DNA, 25 bp, Artificial
  probe
  misc_feature (1)..(25): SEQ ID NO: 5791; WAN024B7V; Start 608; Stop 632
agtatgagatgatgattgtggatga

SEQ ID NO: 421595 - DNA, 25 bp, Artificial
  probe
  misc_feature (1)..(25): SEQ ID NO: 5791; WAN024B7V; Start 606; Stop 630
tgagtatgagatgatgattgtggat

SEQ ID NO: 421596 - DNA, 25 bp, Artificial
  probe
  misc_feature (1)..(25): SEQ ID NO: 5791; WAN024B7V; Start 605; Stop 629
atgagtatgagatgatgattgtgga

SEQ ID NO: 421597 - DNA, 25 bp, Artificial
  probe
  misc_feature (1)..(25): SEQ ID NO: 5791; WAN024B7V; Start 602; Stop 626
tggatgagtatgagatgatgattgt

SEQ ID NO: 421598 - DNA, 25 bp, Artificial
  probe
  misc_feature (1)..(25): SEQ ID NO: 5791; WAN024B7V; Start 609; Stop 633
gtatgagatgatgattgtggatgag

SEQ ID NO: 421599 - DNA, 25 bp, Artificial
  probe
  misc_feature (1)..(25): SEQ ID NO: 5791; WAN024B7V; Start 607; Stop 631
gagtatgagatgatgattgtggatg

SEQ ID NO: 421600 - DNA, 25 bp, Artificial
  probe
  misc_feature (1)..(25): SEQ ID NO: 5791; WAN024B7V; Start 604; Stop 628
gatgagtatgagatgatgattgtgg

SEQ ID NO: 421601 - DNA, 25 bp, Artificial
  probe
  misc_feature (1)..(25): SEQ ID NO: 5791; WAN024B7V; Start 603; Stop 627
ggatgagtatgagatgatgattgtg

SEQ ID NO: 421602 - DNA, 25 bp, Artificial
  probe
  misc_feature (1)..(25): SEQ ID NO: 5791; WAN024B7V; Start 1400; Stop 1424
gtagatatgagaaggtgttgagaga

SEQ ID NO: 421603 - DNA, 25 bp, Artificial
  probe
  misc_feature (1)..(25): SEQ ID NO: 5791; WAN024B7V; Start 1399; Stop 1423
agtagatatgagaaggtgttgagag

SEQ ID NO: 421604 - DNA, 25 bp, Artificial
  probe
  misc_feature (1)..(25): SEQ ID NO: 5791; WAN024B7V; Start 1402; Stop 1426
agatatgagaaggtgttgagagagg

SEQ ID NO: 421605 - DNA, 25 bp, Artificial
  probe
  misc_feature (1)..(25): SEQ ID NO: 5791; WAN024B7V; Start 1403; Stop 1427
gatatgagaaggtgttgagagagga

SEQ ID NO: 421606 - DNA, 25 bp, Artificial
  probe
  misc_feature (1)..(25): SEQ ID NO: 5791; WAN024B7V; Start 1401; Stop 1425
tagatatgagaaggtgttgagagag

SEQ ID NO: 421607 - DNA, 25 bp, Artificial
  probe
  misc_feature (1)..(25): SEQ ID NO: 5791; WAN024B7V; Start 613; Stop 637
gagatgatgattgtggatgagtgtc

SEQ ID NO: 421608 - DNA, 25 bp, Artificial
  probe
  misc_feature (1)..(25): SEQ ID NO: 5791; WAN024B7V; Start 1404; Stop 1428
atatgagaaggtgttgagagaggac

SEQ ID NO: 421609 - DNA, 25 bp, Artificial
  probe
  misc_feature (1)..(25): SEQ ID NO: 5791; WAN024B7V; Start 601; Stop 625
ttggatgagtatgagatgatgattg

SEQ ID NO: 421610 - DNA, 25 bp, Artificial
  probe
  misc_feature (1)..(25): SEQ ID NO: 5791; WAN024B7V; Start 542; Stop 566
aactggttgatgtcgttatgattca

SEQ ID NO: 421611 - DNA, 25 bp, Artificial
  probe
  misc_feature (1)..(25): SEQ ID NO: 5791; WAN024B7V; Start 765; Stop 789
gatactccatactgctgataagagg

SEQ ID NO: 421612 - DNA, 25 bp, Artificial
  probe
  misc_feature (1)..(25): SEQ ID NO: 5791; WAN024B7V; Start 612; Stop 636
tgagatgatgattgtggatgagtgt

SEQ ID NO: 421613 - DNA, 25 bp, Artificial
  probe
  misc_feature (1)..(25): SEQ ID NO: 5791; WAN024B7V; Start 762; Stop 786
tgagatactccatactgctgataag

SEQ ID NO: 421614 - DNA, 25 bp, Artificial
  probe
  misc_feature (1)..(25): SEQ ID NO: 5791; WAN024B7V; Start 764; Stop 788
agatactccatactgctgataagag

SEQ ID NO: 421615 - DNA, 25 bp, Artificial
  probe
  misc_feature (1)..(25): SEQ ID NO: 5791; WAN024B7V; Start 763; Stop 787
gagatactccatactgctgataaga

SEQ ID NO: 421616 - DNA, 25 bp, Artificial
  probe
  misc_feature (1)..(25): SEQ ID NO: 5791; WAN024B7V; Start 400; Stop 424
caactcttagaccaatggctagatc

SEQ ID NO: 421617 - DNA, 25 bp, Artificial
  probe
  misc_feature (1)..(25): SEQ ID NO: 5791; WAN024B7V; Start 1408; Stop 1432
gagaaggtgttgagagaggacttag

SEQ ID NO: 421618 - DNA, 25 bp, Artificial
  probe
  misc_feature (1)..(25): SEQ ID NO: 5791; WAN024B7V; Start 1398; Stop 1422
tagtagatatgagaaggtgttgaga

SEQ ID NO: 421619 - DNA, 25 bp, Artificial
  probe
  misc_feature (1)..(25): SEQ ID NO: 5791; WAN024B7V; Start 1405; Stop 1429
tatgagaaggtgttgagagaggact

SEQ ID NO: 421620 - DNA, 25 bp, Artificial
  probe
  misc_feature (1)..(25): SEQ ID NO: 5791; WAN024B7V; Start 340; Stop 364
ttaggtgctgctcttatctctgaac

SEQ ID NO: 421621 - DNA, 25 bp, Artificial
  probe
  misc_feature (1)..(25): SEQ ID NO: 5791; WAN024B7V; Start 389; Stop 413
tccataataagcaactcttagacca

SEQ ID NO: 421622 - DNA, 25 bp, Artificial
  probe
  misc_feature (1)..(25): SEQ ID NO: 5791; WAN024B7V; Start 406; Stop 430
ttagaccaatggctagatcgcttaa

SEQ ID NO: 421623 - DNA, 25 bp, Artificial
  probe
  misc_feature (1)..(25): SEQ ID NO: 5791; WAN024B7V; Start 614; Stop 638
agatgatgattgtggatgagtgtca

SEQ ID NO: 421624 - DNA, 25 bp, Artificial
  probe
  misc_feature (1)..(25): SEQ ID NO: 5791; WAN024B7V; Start 388; Stop 412
gtccataataagcaactcttagacc

SEQ ID NO: 421625 - DNA, 25 bp, Artificial
  probe
  misc_feature (1)..(25): SEQ ID NO: 5792; WAN024CP9; Start 396; Stop 420
ccacaatcactacatcaaggttcaa

SEQ ID NO: 421626 - DNA, 25 bp, Artificial
  probe
  misc_feature (1)..(25): SEQ ID NO: 5792; WAN024CP9; Start 157; Stop 181
gtcagagatacaggtgatgcttata

SEQ ID NO: 421627 - DNA, 25 bp, Artificial
  probe
  misc_feature (1)..(25): SEQ ID NO: 5792; WAN024CP9; Start 259; Stop 283
gaggtaggaagttcttctagttctg

SEQ ID NO: 421628 - DNA, 25 bp, Artificial
  probe
  misc_feature (1)..(25): SEQ ID NO: 5792; WAN024CP9; Start 152; Stop 176
atattgtcagagatacaggtgatgc

SEQ ID NO: 421629 - DNA, 25 bp, Artificial
  probe
  misc_feature (1)..(25): SEQ ID NO: 5792; WAN024CP9; Start 260; Stop 284
aggtaggaagttcttctagttctgt

SEQ ID NO: 421630 - DNA, 25 bp, Artificial
  probe
  misc_feature (1)..(25): SEQ ID NO: 5792; WAN024CP9; Start 258; Stop 282
agaggtaggaagttcttctagttct

SEQ ID NO: 421631 - DNA, 25 bp, Artificial
  probe
  misc_feature (1)..(25): SEQ ID NO: 5792; WAN024CP9; Start 158; Stop 182
tcagagatacaggtgatgcttatat

SEQ ID NO: 421632 - DNA, 25 bp, Artificial
  probe
  misc_feature (1)..(25): SEQ ID NO: 5792; WAN024CP9; Start 261; Stop 285
ggtaggaagttcttctagttctgta

SEQ ID NO: 421633 - DNA, 25 bp, Artificial
  probe
  misc_feature (1)..(25): SEQ ID NO: 5792; WAN024CP9; Start 156; Stop 180
tgtcagagatacaggtgatgcttat

SEQ ID NO: 421634 - DNA, 25 bp, Artificial
  probe
  misc_feature (1)..(25): SEQ ID NO: 5792; WAN024CP9; Start 153; Stop 177
tattgtcagagatacaggtgatgct

SEQ ID NO: 421635 - DNA, 25 bp, Artificial
  probe
  misc_feature (1)..(25): SEQ ID NO: 5792; WAN024CP9; Start 155; Stop 179
ttgtcagagatacaggtgatgctta

SEQ ID NO: 421636 - DNA, 25 bp, Artificial
  probe
  misc_feature (1)..(25): SEQ ID NO: 5792; WAN024CP9; Start 150; Stop 174
tgatattgtcagagatacaggtgat

SEQ ID NO: 421637 - DNA, 25 bp, Artificial
  probe
  misc_feature (1)..(25): SEQ ID NO: 5792; WAN024CP9; Start 149; Stop 173
atgatattgtcagagatacaggtga

SEQ ID NO: 421638 - DNA, 25 bp, Artificial
  probe
  misc_feature (1)..(25): SEQ ID NO: 5792; WAN024CP9; Start 151; Stop 175
gatattgtcagagatacaggtgatg

SEQ ID NO: 421639 - DNA, 25 bp, Artificial
  probe
  misc_feature (1)..(25): SEQ ID NO: 5792; WAN024CP9; Start 154; Stop 178
attgtcagagatacaggtgatgctt

SEQ ID NO: 421640 - DNA, 25 bp, Artificial
  probe
  misc_feature (1)..(25): SEQ ID NO: 5792; WAN024CP9; Start 248; Stop 272
ctaacacggaagaggtaggaagttc

SEQ ID NO: 421641 - DNA, 25 bp, Artificial
  probe
  misc_feature (1)..(25): SEQ ID NO: 5792; WAN024CP9; Start 148; Stop 172
aatgatattgtcagagatacaggtg

SEQ ID NO: 421642 - DNA, 25 bp, Artificial
  probe
  misc_feature (1)..(25): SEQ ID NO: 5792; WAN024CP9; Start 339; Stop 363
tgatgccaatcgaattataagtgaa

SEQ ID NO: 421643 - DNA, 25 bp, Artificial
  probe
  misc_feature (1)..(25): SEQ ID NO: 5792; WAN024CP9; Start 397; Stop 421
cacaatcactacatcaaggttcaaa

SEQ ID NO: 421644 - DNA, 25 bp, Artificial
  probe
  misc_feature (1)..(25): SEQ ID NO: 5792; WAN024CP9; Start 249; Stop 273
taacacggaagaggtaggaagttct

SEQ ID NO: 421645 - DNA, 25 bp, Artificial
  probe
  misc_feature (1)..(25): SEQ ID NO: 5792; WAN024CP9; Start 247; Stop 271
tctaacacggaagaggtaggaagtt

SEQ ID NO: 421646 - DNA, 25 bp, Artificial
  probe
  misc_feature (1)..(25): SEQ ID NO: 5792; WAN024CP9; Start 405; Stop 429
ctacatcaaggttcaaactaaggga

SEQ ID NO: 421647 - DNA, 25 bp, Artificial
  probe
  misc_feature (1)..(25): SEQ ID NO: 5792; WAN024CP9; Start 398; Stop 422
acaatcactacatcaaggttcaaac

SEQ ID NO: 421648 - DNA, 25 bp, Artificial
  probe
  misc_feature (1)..(25): SEQ ID NO: 5792; WAN024CP9; Start 404; Stop 428
actacatcaaggttcaaactaaggg

SEQ ID NO: 421649 - DNA, 25 bp, Artificial
  probe
  misc_feature (1)..(25): SEQ ID NO: 5792; WAN024CP9; Start 403; Stop 427
cactacatcaaggttcaaactaagg

SEQ ID NO: 421650 - DNA, 25 bp, Artificial
  probe
  misc_feature (1)..(25): SEQ ID NO: 5792; WAN024CP9; Start 341; Stop 365
atgccaatcgaattataagtgaaga

SEQ ID NO: 421651 - DNA, 25 bp, Artificial
  probe
  misc_feature (1)..(25): SEQ ID NO: 5792; WAN024CP9; Start 212; Stop 236
ttcctaagtcatctcttaacaatcc

SEQ ID NO: 421652 - DNA, 25 bp, Artificial
  probe
  misc_feature (1)..(25): SEQ ID NO: 5792; WAN024CP9; Start 399; Stop 423
caatcactacatcaaggttcaaact

SEQ ID NO: 421653 - DNA, 25 bp, Artificial
  probe
  misc_feature (1)..(25): SEQ ID NO: 5792; WAN024CP9; Start 407; Stop 431
acatcaaggttcaaactaagggata

SEQ ID NO: 421654 - DNA, 25 bp, Artificial
  probe
  misc_feature (1)..(25): SEQ ID NO: 5792; WAN024CP9; Start 406; Stop 430
tacatcaaggttcaaactaagggat

SEQ ID NO: 421655 - DNA, 25 bp, Artificial
  probe
  misc_feature (1)..(25): SEQ ID NO: 5792; WAN024CP9; Start 342; Stop 366
tgccaatcgaattataagtgaagat

SEQ ID NO: 421656 - DNA, 25 bp, Artificial
  probe
  misc_feature (1)..(25): SEQ ID NO: 5792; WAN024CP9; Start 340; Stop 364
gatgccaatcgaattataagtgaag

SEQ ID NO: 421657 - DNA, 25 bp, Artificial
  probe
  misc_feature (1)..(25): SEQ ID NO: 5792; WAN024CP9; Start 338; Stop 362
ttgatgccaatcgaattataagtga

SEQ ID NO: 421658 - DNA, 25 bp, Artificial
  probe
  misc_feature (1)..(25): SEQ ID NO: 5793; WAN024F4I; Start 114; Stop 138
cgaccgttatcaagtgattcctatt

SEQ ID NO: 421659 - DNA, 25 bp, Artificial
  probe
  misc_feature (1)..(25): SEQ ID NO: 5793; WAN024F4I; Start 361; Stop 385
gtagtgaactatacagatcgtgaga

SEQ ID NO: 421660 - DNA, 25 bp, Artificial
  probe
  misc_feature (1)..(25): SEQ ID NO: 5793; WAN024F4I; Start 365; Stop 389
tgaactatacagatcgtgagattcc

SEQ ID NO: 421661 - DNA, 25 bp, Artificial
  probe
  misc_feature (1)..(25): SEQ ID NO: 5793; WAN024F4I; Start 366; Stop 390
gaactatacagatcgtgagattcct

SEQ ID NO: 421662 - DNA, 25 bp, Artificial
  probe
  misc_feature (1)..(25): SEQ ID NO: 5793; WAN024F4I; Start 367; Stop 391
aactatacagatcgtgagattcctt

SEQ ID NO: 421663 - DNA, 25 bp, Artificial
  probe
  misc_feature (1)..(25): SEQ ID NO: 5793; WAN024F4I; Start 363; Stop 387
agtgaactatacagatcgtgagatt

SEQ ID NO: 421664 - DNA, 25 bp, Artificial
  probe
  misc_feature (1)..(25): SEQ ID NO: 5793; WAN024F4I; Start 378; Stop 402
tcgtgagattccttatactcgtatc

SEQ ID NO: 421665 - DNA, 25 bp, Artificial
  probe
  misc_feature (1)..(25): SEQ ID NO: 5793; WAN024F4I; Start 118; Stop 142
cgttatcaagtgattcctattggtg

SEQ ID NO: 421666 - DNA, 25 bp, Artificial
  probe
  misc_feature (1)..(25): SEQ ID NO: 5793; WAN024F4I; Start 115; Stop 139
gaccgttatcaagtgattcctattg

SEQ ID NO: 421667 - DNA, 25 bp, Artificial
  probe
  misc_feature (1)..(25): SEQ ID NO: 5793; WAN024F4I; Start 387; Stop 411
tccttatactcgtatcattgagcat

SEQ ID NO: 421668 - DNA, 25 bp, Artificial
  probe
  misc_feature (1)..(25): SEQ ID NO: 5793; WAN024F4I; Start 119; Stop 143
gttatcaagtgattcctattggtgg

SEQ ID NO: 421669 - DNA, 25 bp, Artificial
  probe
  misc_feature (1)..(25): SEQ ID NO: 5793; WAN024F4I; Start 117; Stop 141
ccgttatcaagtgattcctattggt

SEQ ID NO: 421670 - DNA, 25 bp, Artificial
  probe
  misc_feature (1)..(25): SEQ ID NO: 5793; WAN024F4I; Start 116; Stop 140
accgttatcaagtgattcctattgg

SEQ ID NO: 421671 - DNA, 25 bp, Artificial
  probe
  misc_feature (1)..(25): SEQ ID NO: 5793; WAN024F4I; Start 364; Stop 388
gtgaactatacagatcgtgagattc

SEQ ID NO: 421672 - DNA, 25 bp, Artificial
  probe
  misc_feature (1)..(25): SEQ ID NO: 5793; WAN024F4I; Start 377; Stop 401
atcgtgagattccttatactcgtat

SEQ ID NO: 421673 - DNA, 25 bp, Artificial
  probe
  misc_feature (1)..(25): SEQ ID NO: 5793; WAN024F4I; Start 374; Stop 398
cagatcgtgagattccttatactcg

SEQ ID NO: 421674 - DNA, 25 bp, Artificial
  probe
  misc_feature (1)..(25): SEQ ID NO: 5793; WAN024F4I; Start 373; Stop 397
acagatcgtgagattccttatactc

SEQ ID NO: 421675 - DNA, 25 bp, Artificial
  probe
  misc_feature (1)..(25): SEQ ID NO: 5793; WAN024F4I; Start 376; Stop 400
gatcgtgagattccttatactcgta

SEQ ID NO: 421676 - DNA, 25 bp, Artificial
  probe
  misc_feature (1)..(25): SEQ ID NO: 5793; WAN024F4I; Start 375; Stop 399
agatcgtgagattccttatactcgt

SEQ ID NO: 421677 - DNA, 25 bp, Artificial
  probe
  misc_feature (1)..(25): SEQ ID NO: 5793; WAN024F4I; Start 372; Stop 396
tacagatcgtgagattccttatact

SEQ ID NO: 421678 - DNA, 25 bp, Artificial
  probe
  misc_feature (1)..(25): SEQ ID NO: 5793; WAN024F4I; Start 368; Stop 392
actatacagatcgtgagattcctta

SEQ ID NO: 421679 - DNA, 25 bp, Artificial
  probe
  misc_feature (1)..(25): SEQ ID NO: 5793; WAN024F4I; Start 362; Stop 386
tagtgaactatacagatcgtgagat

SEQ ID NO: 421680 - DNA, 25 bp, Artificial
  probe
  misc_feature (1)..(25): SEQ ID NO: 5793; WAN024F4I; Start 113; Stop 137
acgaccgttatcaagtgattcctat

SEQ ID NO: 421681 - DNA, 25 bp, Artificial
  probe
  misc_feature (1)..(25): SEQ ID NO: 5793; WAN024F4I; Start 560; Stop 584
atgataaggttatcttctgtggacg

SEQ ID NO: 421682 - DNA, 25 bp, Artificial
  probe
  misc_feature (1)..(25): SEQ ID NO: 5793; WAN024F4I; Start 123; Stop 147
tcaagtgattcctattggtggatac

SEQ ID NO: 421683 - DNA, 25 bp, Artificial
  probe
  misc_feature (1)..(25): SEQ ID NO: 5793; WAN024F4I; Start 125; Stop 149
aagtgattcctattggtggatacaa

SEQ ID NO: 421684 - DNA, 25 bp, Artificial
  probe
  misc_feature (1)..(25): SEQ ID NO: 5793; WAN024F4I; Start 124; Stop 148
caagtgattcctattggtggataca

SEQ ID NO: 421685 - DNA, 25 bp, Artificial
  probe
  misc_feature (1)..(25): SEQ ID NO: 5793; WAN024F4I; Start 120; Stop 144
ttatcaagtgattcctattggtgga

SEQ ID NO: 421686 - DNA, 25 bp, Artificial
  probe
  misc_feature (1)..(25): SEQ ID NO: 5793; WAN024F4I; Start 3; Stop 27
gttagaagcggtccatactgagaag

SEQ ID NO: 421687 - DNA, 25 bp, Artificial
  probe
  misc_feature (1)..(25): SEQ ID NO: 5793; WAN024F4I; Start 550; Stop 574
gcttcacagaatgataaggttatct

SEQ ID NO: 421688 - DNA, 25 bp, Artificial
  probe
  misc_feature (1)..(25): SEQ ID NO: 5793; WAN024F4I; Start 122; Stop 146
atcaagtgattcctattggtggata

SEQ ID NO: 421689 - DNA, 25 bp, Artificial
  probe
  misc_feature (1)..(25): SEQ ID NO: 5793; WAN024F4I; Start 121; Stop 145
tatcaagtgattcctattggtggat

SEQ ID NO: 421690 - DNA, 25 bp, Artificial
  probe
  misc_feature (1)..(25): SEQ ID NO: 5793; WAN024F4I; Start 388; Stop 412
ccttatactcgtatcattgagcata

SEQ ID NO: 421691 - DNA, 25 bp, Artificial
  probe
  misc_feature (1)..(25): SEQ ID NO: 5794; WAN024DYP; Start 620; Stop 644
ttgtaggttccacttcagtatcttc

SEQ ID NO: 421692 - DNA, 25 bp, Artificial
  probe
  misc_feature (1)..(25): SEQ ID NO: 5794; WAN024DYP; Start 619; Stop 643
gttgtaggttccacttcagtatctt

SEQ ID NO: 421693 - DNA, 25 bp, Artificial
  probe
  misc_feature (1)..(25): SEQ ID NO: 5794; WAN024DYP; Start 622; Stop 646
gtaggttccacttcagtatcttctt

SEQ ID NO: 421694 - DNA, 25 bp, Artificial
  probe
  misc_feature (1)..(25): SEQ ID NO: 5794; WAN024DYP; Start 621; Stop 645
tgtaggttccacttcagtatcttct

SEQ ID NO: 421695 - DNA, 25 bp, Artificial
  probe
  misc_feature (1)..(25): SEQ ID NO: 5794; WAN024DYP; Start 529; Stop 553
ggtcaacaagtggtcacagataata

SEQ ID NO: 421696 - DNA, 25 bp, Artificial
  probe
  misc_feature (1)..(25): SEQ ID NO: 5794; WAN024DYP; Start 618; Stop 642
tgttgtaggttccacttcagtatct

SEQ ID NO: 421697 - DNA, 25 bp, Artificial
  probe
  misc_feature (1)..(25): SEQ ID NO: 5794; WAN024DYP; Start 530; Stop 554
gtcaacaagtggtcacagataataa

SEQ ID NO: 421698 - DNA, 25 bp, Artificial
  probe
  misc_feature (1)..(25): SEQ ID NO: 5794; WAN024DYP; Start 685; Stop 709
ccagaagttacgattgatattacct

SEQ ID NO: 421699 - DNA, 25 bp, Artificial
  probe
  misc_feature (1)..(25): SEQ ID NO: 5794; WAN024DYP; Start 684; Stop 708
tccagaagttacgattgatattacc

SEQ ID NO: 421700 - DNA, 25 bp, Artificial
  probe
  misc_feature (1)..(25): SEQ ID NO: 5794; WAN024DYP; Start 330; Stop 354
gaatgctaatgctatcggctacatc

SEQ ID NO: 421701 - DNA, 25 bp, Artificial
  probe
  misc_feature (1)..(25): SEQ ID NO: 5794; WAN024DYP; Start 850; Stop 874
aataatgacaataaggcaagccaag

SEQ ID NO: 421702 - DNA, 25 bp, Artificial
  probe
  misc_feature (1)..(25): SEQ ID NO: 5794; WAN024DYP; Start 849; Stop 873
caataatgacaataaggcaagccaa

SEQ ID NO: 421703 - DNA, 25 bp, Artificial
  probe
  misc_feature (1)..(25): SEQ ID NO: 5794; WAN024DYP; Start 335; Stop 359
ctaatgctatcggctacatctcctt

SEQ ID NO: 421704 - DNA, 25 bp, Artificial
  probe
  misc_feature (1)..(25): SEQ ID NO: 5794; WAN024DYP; Start 528; Stop 552
aggtcaacaagtggtcacagataat

SEQ ID NO: 421705 - DNA, 25 bp, Artificial
  probe
  misc_feature (1)..(25): SEQ ID NO: 5794; WAN024DYP; Start 617; Stop 641
ctgttgtaggttccacttcagtatc

SEQ ID NO: 421706 - DNA, 25 bp, Artificial
  probe
  misc_feature (1)..(25): SEQ ID NO: 5794; WAN024DYP; Start 336; Stop 360
taatgctatcggctacatctccttg

SEQ ID NO: 421707 - DNA, 25 bp, Artificial
  probe
  misc_feature (1)..(25): SEQ ID NO: 5794; WAN024DYP; Start 331; Stop 355
aatgctaatgctatcggctacatct

SEQ ID NO: 421708 - DNA, 25 bp, Artificial
  probe
  misc_feature (1)..(25): SEQ ID NO: 5794; WAN024DYP; Start 851; Stop 875
ataatgacaataaggcaagccaagt

SEQ ID NO: 421709 - DNA, 25 bp, Artificial
  probe
  misc_feature (1)..(25): SEQ ID NO: 5794; WAN024DYP; Start 527; Stop 551
aaggtcaacaagtggtcacagataa

SEQ ID NO: 421710 - DNA, 25 bp, Artificial
  probe
  misc_feature (1)..(25): SEQ ID NO: 5794; WAN024DYP; Start 601; Stop 625
ttatcaggcaagttgtctgttgtag

SEQ ID NO: 421711 - DNA, 25 bp, Artificial
  probe
  misc_feature (1)..(25): SEQ ID NO: 5794; WAN024DYP; Start 600; Stop 624
cttatcaggcaagttgtctgttgta

SEQ ID NO: 421712 - DNA, 25 bp, Artificial
  probe
  misc_feature (1)..(25): SEQ ID NO: 5794; WAN024DYP; Start 616; Stop 640
tctgttgtaggttccacttcagtat

SEQ ID NO: 421713 - DNA, 25 bp, Artificial
  probe
  misc_feature (1)..(25): SEQ ID NO: 5794; WAN024DYP; Start 332; Stop 356
atgctaatgctatcggctacatctc

SEQ ID NO: 421714 - DNA, 25 bp, Artificial
  probe
  misc_feature (1)..(25): SEQ ID NO: 5794; WAN024DYP; Start 848; Stop 872
tcaataatgacaataaggcaagcca

SEQ ID NO: 421715 - DNA, 25 bp, Artificial
  probe
  misc_feature (1)..(25): SEQ ID NO: 5794; WAN024DYP; Start 777; Stop 801
ggaattaactcctgaagaaggtaag

SEQ ID NO: 421716 - DNA, 25 bp, Artificial
  probe
  misc_feature (1)..(25): SEQ ID NO: 5794; WAN024DYP; Start 526; Stop 550
caaggtcaacaagtggtcacagata

SEQ ID NO: 421717 - DNA, 25 bp, Artificial
  probe
  misc_feature (1)..(25): SEQ ID NO: 5794; WAN024DYP; Start 814; Stop 838
gatgctattgctttagacggtattg

SEQ ID NO: 421718 - DNA, 25 bp, Artificial
  probe
  misc_feature (1)..(25): SEQ ID NO: 5794; WAN024DYP; Start 812; Stop 836
atgatgctattgctttagacggtat

SEQ ID NO: 421719 - DNA, 25 bp, Artificial
  probe
  misc_feature (1)..(25): SEQ ID NO: 5794; WAN024DYP; Start 615; Stop 639
gtctgttgtaggttccacttcagta

SEQ ID NO: 421720 - DNA, 25 bp, Artificial
  probe
  misc_feature (1)..(25): SEQ ID NO: 5794; WAN024DYP; Start 612; Stop 636
gttgtctgttgtaggttccacttca

SEQ ID NO: 421721 - DNA, 25 bp, Artificial
  probe
  misc_feature (1)..(25): SEQ ID NO: 5794; WAN024DYP; Start 686; Stop 710
cagaagttacgattgatattacctc

SEQ ID NO: 421722 - DNA, 25 bp, Artificial
  probe
  misc_feature (1)..(25): SEQ ID NO: 5794; WAN024DYP; Start 813; Stop 837
tgatgctattgctttagacggtatt

SEQ ID NO: 421723 - DNA, 25 bp, Artificial
  probe
  misc_feature (1)..(25): SEQ ID NO: 5794; WAN024DYP; Start 785; Stop 809
ctcctgaagaaggtaagagtctcac

SEQ ID NO: 421724 - DNA, 25 bp, Artificial
  probe
  misc_feature (1)..(25): SEQ ID NO: 5795; WAN024B4S; Start 85; Stop 109
agactgactaatacaagcatccatt

SEQ ID NO: 421725 - DNA, 25 bp, Artificial
  probe
  misc_feature (1)..(25): SEQ ID NO: 5795; WAN024B4S; Start 84; Stop 108
cagactgactaatacaagcatccat

SEQ ID NO: 421726 - DNA, 25 bp, Artificial
  probe
  misc_feature (1)..(25): SEQ ID NO: 5795; WAN024B4S; Start 82; Stop 106
atcagactgactaatacaagcatcc

SEQ ID NO: 421727 - DNA, 25 bp, Artificial
  probe
  misc_feature (1)..(25): SEQ ID NO: 5795; WAN024B4S; Start 80; Stop 104
tcatcagactgactaatacaagcat

SEQ ID NO: 421728 - DNA, 25 bp, Artificial
  probe
  misc_feature (1)..(25): SEQ ID NO: 5795; WAN024B4S; Start 81; Stop 105
catcagactgactaatacaagcatc

SEQ ID NO: 421729 - DNA, 25 bp, Artificial
  probe
  misc_feature (1)..(25): SEQ ID NO: 5795; WAN024B4S; Start 83; Stop 107
tcagactgactaatacaagcatcca

SEQ ID NO: 421730 - DNA, 25 bp, Artificial
  probe
  misc_feature (1)..(25): SEQ ID NO: 5795; WAN024B4S; Start 86; Stop 110
gactgactaatacaagcatccattt

SEQ ID NO: 421731 - DNA, 25 bp, Artificial
  probe
  misc_feature (1)..(25): SEQ ID NO: 5795; WAN024B4S; Start 63; Stop 87
tactaagaacaaagcagtcatcaga

SEQ ID NO: 421732 - DNA, 25 bp, Artificial
  probe
  misc_feature (1)..(25): SEQ ID NO: 5795; WAN024B4S; Start 62; Stop 86
ctactaagaacaaagcagtcatcag

SEQ ID NO: 421733 - DNA, 25 bp, Artificial
  probe
  misc_feature (1)..(25): SEQ ID NO: 5795; WAN024B4S; Start 139; Stop 163
tctactttcaataatacatctgcga

SEQ ID NO: 421734 - DNA, 25 bp, Artificial
  probe
  misc_feature (1)..(25): SEQ ID NO: 5795; WAN024B4S; Start 64; Stop 88
actaagaacaaagcagtcatcagac

SEQ ID NO: 421735 - DNA, 25 bp, Artificial
  probe
  misc_feature (1)..(25): SEQ ID NO: 5795; WAN024B4S; Start 12; Stop 36
gtactttgaccaattatctccacta

SEQ ID NO: 421736 - DNA, 25 bp, Artificial
  probe
  misc_feature (1)..(25): SEQ ID NO: 5795; WAN024B4S; Start 13; Stop 37
tactttgaccaattatctccactag

SEQ ID NO: 421737 - DNA, 25 bp, Artificial
  probe
  misc_feature (1)..(25): SEQ ID NO: 5795; WAN024B4S; Start 51; Stop 75
tttcccacaagctactaagaacaaa

SEQ ID NO: 421738 - DNA, 25 bp, Artificial
  probe
  misc_feature (1)..(25): SEQ ID NO: 5795; WAN024B4S; Start 138; Stop 162
ttctactttcaataatacatctgcg

SEQ ID NO: 421739 - DNA, 25 bp, Artificial
  probe
  misc_feature (1)..(25): SEQ ID NO: 5795; WAN024B4S; Start 52; Stop 76
ttcccacaagctactaagaacaaag

SEQ ID NO: 421740 - DNA, 25 bp, Artificial
  probe
  misc_feature (1)..(25): SEQ ID NO: 5795; WAN024B4S; Start 229; Stop 253
aagattagcttctccacttccaaac

SEQ ID NO: 421741 - DNA, 25 bp, Artificial
  probe
  misc_feature (1)..(25): SEQ ID NO: 5795; WAN024B4S; Start 228; Stop 252
caagattagcttctccacttccaaa

SEQ ID NO: 421742 - DNA, 25 bp, Artificial
  probe
  misc_feature (1)..(25): SEQ ID NO: 5795; WAN024B4S; Start 11; Stop 35
ggtactttgaccaattatctccact

SEQ ID NO: 421743 - DNA, 25 bp, Artificial
  probe
  misc_feature (1)..(25): SEQ ID NO: 5795; WAN024B4S; Start 227; Stop 251
gcaagattagcttctccacttccaa

SEQ ID NO: 421744 - DNA, 25 bp, Artificial
  probe
  misc_feature (1)..(25): SEQ ID NO: 5795; WAN024B4S; Start 237; Stop 261
cttctccacttccaaacgtaattct

SEQ ID NO: 421745 - DNA, 25 bp, Artificial
  probe
  misc_feature (1)..(25): SEQ ID NO: 5795; WAN024B4S; Start 140; Stop 164
ctactttcaataatacatctgcgat

SEQ ID NO: 421746 - DNA, 25 bp, Artificial
  probe
  misc_feature (1)..(25): SEQ ID NO: 5795; WAN024B4S; Start 238; Stop 262
ttctccacttccaaacgtaattctg

SEQ ID NO: 421747 - DNA, 25 bp, Artificial
  probe
  misc_feature (1)..(25): SEQ ID NO: 5795; WAN024B4S; Start 124; Stop 148
tcctcctatttaggttctactttca

SEQ ID NO: 421748 - DNA, 25 bp, Artificial
  probe
  misc_feature (1)..(25): SEQ ID NO: 5795; WAN024B4S; Start 234; Stop 258
tagcttctccacttccaaacgtaat

SEQ ID NO: 421749 - DNA, 25 bp, Artificial
  probe
  misc_feature (1)..(25): SEQ ID NO: 5795; WAN024B4S; Start 232; Stop 256
attagcttctccacttccaaacgta

SEQ ID NO: 421750 - DNA, 25 bp, Artificial
  probe
  misc_feature (1)..(25): SEQ ID NO: 5795; WAN024B4S; Start 61; Stop 85
gctactaagaacaaagcagtcatca

SEQ ID NO: 421751 - DNA, 25 bp, Artificial
  probe
  misc_feature (1)..(25): SEQ ID NO: 5795; WAN024B4S; Start 125; Stop 149
cctcctatttaggttctactttcaa

SEQ ID NO: 421752 - DNA, 25 bp, Artificial
  probe
  misc_feature (1)..(25): SEQ ID NO: 5795; WAN024B4S; Start 233; Stop 257
ttagcttctccacttccaaacgtaa

SEQ ID NO: 421753 - DNA, 25 bp, Artificial
  probe
  misc_feature (1)..(25): SEQ ID NO: 5795; WAN024B4S; Start 142; Stop 166
actttcaataatacatctgcgatat

SEQ ID NO: 421754 - DNA, 25 bp, Artificial
  probe
  misc_feature (1)..(25): SEQ ID NO: 5795; WAN024B4S; Start 87; Stop 111
actgactaatacaagcatccatttt

SEQ ID NO: 421755 - DNA, 25 bp, Artificial
  probe
  misc_feature (1)..(25): SEQ ID NO: 5795; WAN024B4S; Start 123; Stop 147
ttcctcctatttaggttctactttc

SEQ ID NO: 421756 - DNA, 25 bp, Artificial
  probe
  misc_feature (1)..(25): SEQ ID NO: 5795; WAN024B4S; Start 21; Stop 45
ccaattatctccactagtttcgcta

SEQ ID NO: 421757 - DNA, 25 bp, Artificial
  probe
  misc_feature (1)..(25): SEQ ID NO: 5796; WAN024F7H; Start 125; Stop 149
aaactagaaagctaggcacagactg

SEQ ID NO: 421758 - DNA, 25 bp, Artificial
  probe
  misc_feature (1)..(25): SEQ ID NO: 5796; WAN024F7H; Start 124; Stop 148
caaactagaaagctaggcacagact

SEQ ID NO: 421759 - DNA, 25 bp, Artificial
  probe
  misc_feature (1)..(25): SEQ ID NO: 5796; WAN024F7H; Start 120; Stop 144
aaagcaaactagaaagctaggcaca

SEQ ID NO: 421760 - DNA, 25 bp, Artificial
  probe
  misc_feature (1)..(25): SEQ ID NO: 5796; WAN024F7H; Start 23; Stop 47
cctcttatcaatttgttcatattct

SEQ ID NO: 421761 - DNA, 25 bp, Artificial
  probe
  misc_feature (1)..(25): SEQ ID NO: 5796; WAN024F7H; Start 22; Stop 46
tcctcttatcaatttgttcatattc

SEQ ID NO: 421762 - DNA, 25 bp, Artificial
  probe
  misc_feature (1)..(25): SEQ ID NO: 5796; WAN024F7H; Start 121; Stop 145
aagcaaactagaaagctaggcacag

SEQ ID NO: 421763 - DNA, 25 bp, Artificial
  probe
  misc_feature (1)..(25): SEQ ID NO: 5796; WAN024F7H; Start 68; Stop 92
tcccatcaactatgcatcataattt

SEQ ID NO: 421764 - DNA, 25 bp, Artificial
  probe
  misc_feature (1)..(25): SEQ ID NO: 5796; WAN024F7H; Start 67; Stop 91
atcccatcaactatgcatcataatt

SEQ ID NO: 421765 - DNA, 25 bp, Artificial
  probe
  misc_feature (1)..(25): SEQ ID NO: 5796; WAN024F7H; Start 63; Stop 87
atatatcccatcaactatgcatcat

SEQ ID NO: 421766 - DNA, 25 bp, Artificial
  probe
  misc_feature (1)..(25): SEQ ID NO: 5796; WAN024F7H; Start 123; Stop 147
gcaaactagaaagctaggcacagac

SEQ ID NO: 421767 - DNA, 25 bp, Artificial
  probe
  misc_feature (1)..(25): SEQ ID NO: 5796; WAN024F7H; Start 66; Stop 90
tatcccatcaactatgcatcataat

SEQ ID NO: 421768 - DNA, 25 bp, Artificial
  probe
  misc_feature (1)..(25): SEQ ID NO: 5796; WAN024F7H; Start 65; Stop 89
atatcccatcaactatgcatcataa

SEQ ID NO: 421769 - DNA, 25 bp, Artificial
  probe
  misc_feature (1)..(25): SEQ ID NO: 5796; WAN024F7H; Start 119; Stop 143
aaaagcaaactagaaagctaggcac

SEQ ID NO: 421770 - DNA, 25 bp, Artificial
  probe
  misc_feature (1)..(25): SEQ ID NO: 5796; WAN024F7H; Start 122; Stop 146
agcaaactagaaagctaggcacaga

SEQ ID NO: 421771 - DNA, 25 bp, Artificial
  probe
  misc_feature (1)..(25): SEQ ID NO: 5796; WAN024F7H; Start 62; Stop 86
tatatatcccatcaactatgcatca

SEQ ID NO: 421772 - DNA, 25 bp, Artificial
  probe
  misc_feature (1)..(25): SEQ ID NO: 5796; WAN024F7H; Start 184; Stop 208
gacgaagtcagctcaaacactgttt

SEQ ID NO: 421773 - DNA, 25 bp, Artificial
  probe
  misc_feature (1)..(25): SEQ ID NO: 5796; WAN024F7H; Start 69; Stop 93
cccatcaactatgcatcataattta

SEQ ID NO: 421774 - DNA, 25 bp, Artificial
  probe
  misc_feature (1)..(25): SEQ ID NO: 5796; WAN024F7H; Start 197; Stop 221
caaacactgttttgaggttgtggat

SEQ ID NO: 421775 - DNA, 25 bp, Artificial
  probe
  misc_feature (1)..(25): SEQ ID NO: 5796; WAN024F7H; Start 64; Stop 88
tatatcccatcaactatgcatcata

SEQ ID NO: 421776 - DNA, 25 bp, Artificial
  probe
  misc_feature (1)..(25): SEQ ID NO: 5796; WAN024F7H; Start 18; Stop 42
aaaatcctcttatcaatttgttcat

SEQ ID NO: 421777 - DNA, 25 bp, Artificial
  probe
  misc_feature (1)..(25): SEQ ID NO: 5796; WAN024F7H; Start 126; Stop 150
aactagaaagctaggcacagactgc

SEQ ID NO: 421778 - DNA, 25 bp, Artificial
  probe
  misc_feature (1)..(25): SEQ ID NO: 5796; WAN024F7H; Start 61; Stop 85
atatatatcccatcaactatgcatc

SEQ ID NO: 421779 - DNA, 25 bp, Artificial
  probe
  misc_feature (1)..(25): SEQ ID NO: 5796; WAN024F7H; Start 72; Stop 96
atcaactatgcatcataatttaggt

SEQ ID NO: 421780 - DNA, 25 bp, Artificial
  probe
  misc_feature (1)..(25): SEQ ID NO: 5796; WAN024F7H; Start 128; Stop 152
ctagaaagctaggcacagactgctc

SEQ ID NO: 421781 - DNA, 25 bp, Artificial
  probe
  misc_feature (1)..(25): SEQ ID NO: 5796; WAN024F7H; Start 71; Stop 95
catcaactatgcatcataatttagg

SEQ ID NO: 421782 - DNA, 25 bp, Artificial
  probe
  misc_feature (1)..(25): SEQ ID NO: 5796; WAN024F7H; Start 70; Stop 94
ccatcaactatgcatcataatttag

SEQ ID NO: 421783 - DNA, 25 bp, Artificial
  probe
  misc_feature (1)..(25): SEQ ID NO: 5796; WAN024F7H; Start 186; Stop 210
cgaagtcagctcaaacactgttttg

SEQ ID NO: 421784 - DNA, 25 bp, Artificial
  probe
  misc_feature (1)..(25): SEQ ID NO: 5796; WAN024F7H; Start 185; Stop 209
acgaagtcagctcaaacactgtttt

SEQ ID NO: 421785 - DNA, 25 bp, Artificial
  probe
  misc_feature (1)..(25): SEQ ID NO: 5796; WAN024F7H; Start 73; Stop 97
tcaactatgcatcataatttaggta

SEQ ID NO: 421786 - DNA, 25 bp, Artificial
  probe
  misc_feature (1)..(25): SEQ ID NO: 5796; WAN024F7H; Start 74; Stop 98
caactatgcatcataatttaggtaa

SEQ ID NO: 421787 - DNA, 25 bp, Artificial
  probe
  misc_feature (1)..(25): SEQ ID NO: 5796; WAN024F7H; Start 183; Stop 207
tgacgaagtcagctcaaacactgtt

SEQ ID NO: 421788 - DNA, 25 bp, Artificial
  probe
  misc_feature (1)..(25): SEQ ID NO: 5796; WAN024F7H; Start 187; Stop 211
gaagtcagctcaaacactgttttga

SEQ ID NO: 421789 - DNA, 25 bp, Artificial
  probe
  misc_feature (1)..(25): SEQ ID NO: 5796; WAN024F7H; Start 132; Stop 156
aaagctaggcacagactgctcaaaa

SEQ ID NO: 421790 - DNA, 25 bp, Artificial
  probe
  misc_feature (1)..(25): SEQ ID NO: 5797; WAN024FH7; Start 33; Stop 57
catcgtgttggtagaacttgtcatg

SEQ ID NO: 421791 - DNA, 25 bp, Artificial
  probe
  misc_feature (1)..(25): SEQ ID NO: 5797; WAN024FH7; Start 40; Stop 64
ttggtagaacttgtcatggtgtcag

SEQ ID NO: 421792 - DNA, 25 bp, Artificial
  probe
  misc_feature (1)..(25): SEQ ID NO: 5797; WAN024FH7; Start 39; Stop 63
gttggtagaacttgtcatggtgtca

SEQ ID NO: 421793 - DNA, 25 bp, Artificial
  probe
  misc_feature (1)..(25): SEQ ID NO: 5797; WAN024FH7; Start 38; Stop 62
tgttggtagaacttgtcatggtgtc

SEQ ID NO: 421794 - DNA, 25 bp, Artificial
  probe
  misc_feature (1)..(25): SEQ ID NO: 5797; WAN024FH7; Start 34; Stop 58
atcgtgttggtagaacttgtcatgg

SEQ ID NO: 421795 - DNA, 25 bp, Artificial
  probe
  misc_feature (1)..(25): SEQ ID NO: 5797; WAN024FH7; Start 37; Stop 61
gtgttggtagaacttgtcatggtgt

SEQ ID NO: 421796 - DNA, 25 bp, Artificial
  probe
  misc_feature (1)..(25): SEQ ID NO: 5797; WAN024FH7; Start 43; Stop 67
gtagaacttgtcatggtgtcagcag

SEQ ID NO: 421797 - DNA, 25 bp, Artificial
  probe
  misc_feature (1)..(25): SEQ ID NO: 5797; WAN024FH7; Start 32; Stop 56
ccatcgtgttggtagaacttgtcat

SEQ ID NO: 421798 - DNA, 25 bp, Artificial
  probe
  misc_feature (1)..(25): SEQ ID NO: 5797; WAN024FH7; Start 36; Stop 60
cgtgttggtagaacttgtcatggtg

SEQ ID NO: 421799 - DNA, 25 bp, Artificial
  probe
  misc_feature (1)..(25): SEQ ID NO: 5797; WAN024FH7; Start 35; Stop 59
tcgtgttggtagaacttgtcatggt

SEQ ID NO: 421800 - DNA, 25 bp, Artificial
  probe
  misc_feature (1)..(25): SEQ ID NO: 5797; WAN024FH7; Start 44; Stop 68
tagaacttgtcatggtgtcagcagg

SEQ ID NO: 421801 - DNA, 25 bp, Artificial
  probe
  misc_feature (1)..(25): SEQ ID NO: 5797; WAN024FH7; Start 42; Stop 66
ggtagaacttgtcatggtgtcagca

SEQ ID NO: 421802 - DNA, 25 bp, Artificial
  probe
  misc_feature (1)..(25): SEQ ID NO: 5797; WAN024FH7; Start 41; Stop 65
tggtagaacttgtcatggtgtcagc

SEQ ID NO: 421803 - DNA, 25 bp, Artificial
  probe
  misc_feature (1)..(25): SEQ ID NO: 5797; WAN024FH7; Start 1; Stop 25
ttgttagcagaagcagccatgtttt

SEQ ID NO: 421804 - DNA, 25 bp, Artificial
  probe
  misc_feature (1)..(25): SEQ ID NO: 5797; WAN024FH7; Start 4; Stop 28
ttagcagaagcagccatgttttcac

SEQ ID NO: 421805 - DNA, 25 bp, Artificial
  probe
  misc_feature (1)..(25): SEQ ID NO: 5797; WAN024FH7; Start 3; Stop 27
gttagcagaagcagccatgttttca

SEQ ID NO: 421806 - DNA, 25 bp, Artificial
  probe
  misc_feature (1)..(25): SEQ ID NO: 5797; WAN024FH7; Start 2; Stop 26
tgttagcagaagcagccatgttttc

SEQ ID NO: 421807 - DNA, 25 bp, Artificial
  probe
  misc_feature (1)..(25): SEQ ID NO: 5798; WAN024FVJ; Start 178; Stop 202
tcttcatccttgaccaataccttag

SEQ ID NO: 421808 - DNA, 25 bp, Artificial
  probe
  misc_feature (1)..(25): SEQ ID NO: 5798; WAN024FVJ; Start 176; Stop 200
catcttcatccttgaccaatacctt

SEQ ID NO: 421809 - DNA, 25 bp, Artificial
  probe
  misc_feature (1)..(25): SEQ ID NO: 5798; WAN024FVJ; Start 174; Stop 198
ttcatcttcatccttgaccaatacc

SEQ ID NO: 421810 - DNA, 25 bp, Artificial
  probe
  misc_feature (1)..(25): SEQ ID NO: 5798; WAN024FVJ; Start 177; Stop 201
atcttcatccttgaccaatacctta

SEQ ID NO: 421811 - DNA, 25 bp, Artificial
  probe
  misc_feature (1)..(25): SEQ ID NO: 5798; WAN024FVJ; Start 179; Stop 203
cttcatccttgaccaataccttagc

SEQ ID NO: 421812 - DNA, 25 bp, Artificial
  probe
  misc_feature (1)..(25): SEQ ID NO: 5798; WAN024FVJ; Start 175; Stop 199
tcatcttcatccttgaccaatacct

SEQ ID NO: 421813 - DNA, 25 bp, Artificial
  probe
  misc_feature (1)..(25): SEQ ID NO: 5798; WAN024FVJ; Start 182; Stop 206
catccttgaccaataccttagcaac

SEQ ID NO: 421814 - DNA, 25 bp, Artificial
  probe
  misc_feature (1)..(25): SEQ ID NO: 5798; WAN024FVJ; Start 183; Stop 207
atccttgaccaataccttagcaact

SEQ ID NO: 421815 - DNA, 25 bp, Artificial
  probe
  misc_feature (1)..(25): SEQ ID NO: 5798; WAN024FVJ; Start 184; Stop 208
tccttgaccaataccttagcaactt

SEQ ID NO: 421816 - DNA, 25 bp, Artificial
  probe
  misc_feature (1)..(25): SEQ ID NO: 5798; WAN024FVJ; Start 181; Stop 205
tcatccttgaccaataccttagcaa

SEQ ID NO: 421817 - DNA, 25 bp, Artificial
  probe
  misc_feature (1)..(25): SEQ ID NO: 5798; WAN024FVJ; Start 180; Stop 204
ttcatccttgaccaataccttagca

SEQ ID NO: 421818 - DNA, 25 bp, Artificial
  probe
  misc_feature (1)..(25): SEQ ID NO: 5798; WAN024FVJ; Start 86; Stop 110
ctacgatagtaatatcctggtctga

SEQ ID NO: 421819 - DNA, 25 bp, Artificial
  probe
  misc_feature (1)..(25): SEQ ID NO: 5798; WAN024FVJ; Start 82; Stop 106
tccactacgatagtaatatcctggt

SEQ ID NO: 421820 - DNA, 25 bp, Artificial
  probe
  misc_feature (1)..(25): SEQ ID NO: 5798; WAN024FVJ; Start 83; Stop 107
ccactacgatagtaatatcctggtc

SEQ ID NO: 421821 - DNA, 25 bp, Artificial
  probe
  misc_feature (1)..(25): SEQ ID NO: 5798; WAN024FVJ; Start 81; Stop 105
ttccactacgatagtaatatcctgg

SEQ ID NO: 421822 - DNA, 25 bp, Artificial
  probe
  misc_feature (1)..(25): SEQ ID NO: 5798; WAN024FVJ; Start 88; Stop 112
acgatagtaatatcctggtctgata

SEQ ID NO: 421823 - DNA, 25 bp, Artificial
  probe
  misc_feature (1)..(25): SEQ ID NO: 5798; WAN024FVJ; Start 87; Stop 111
tacgatagtaatatcctggtctgat

SEQ ID NO: 421824 - DNA, 25 bp, Artificial
  probe
  misc_feature (1)..(25): SEQ ID NO: 5798; WAN024FVJ; Start 132; Stop 156
tacaaagttaaagtcattccctgct

SEQ ID NO: 421825 - DNA, 25 bp, Artificial
  probe
  misc_feature (1)..(25): SEQ ID NO: 5798; WAN024FVJ; Start 131; Stop 155
ttacaaagttaaagtcattccctgc

SEQ ID NO: 421826 - DNA, 25 bp, Artificial
  probe
  misc_feature (1)..(25): SEQ ID NO: 5798; WAN024FVJ; Start 85; Stop 109
actacgatagtaatatcctggtctg

SEQ ID NO: 421827 - DNA, 25 bp, Artificial
  probe
  misc_feature (1)..(25): SEQ ID NO: 5798; WAN024FVJ; Start 84; Stop 108
cactacgatagtaatatcctggtct

SEQ ID NO: 421828 - DNA, 25 bp, Artificial
  probe
  misc_feature (1)..(25): SEQ ID NO: 5798; WAN024FVJ; Start 128; Stop 152
tggttacaaagttaaagtcattccc

SEQ ID NO: 421829 - DNA, 25 bp, Artificial
  probe
  misc_feature (1)..(25): SEQ ID NO: 5798; WAN024FVJ; Start 129; Stop 153
ggttacaaagttaaagtcattccct

SEQ ID NO: 421830 - DNA, 25 bp, Artificial
  probe
  misc_feature (1)..(25): SEQ ID NO: 5798; WAN024FVJ; Start 186; Stop 210
cttgaccaataccttagcaactttg

SEQ ID NO: 421831 - DNA, 25 bp, Artificial
  probe
  misc_feature (1)..(25): SEQ ID NO: 5798; WAN024FVJ; Start 188; Stop 212
tgaccaataccttagcaactttgat

SEQ ID NO: 421832 - DNA, 25 bp, Artificial
  probe
  misc_feature (1)..(25): SEQ ID NO: 5798; WAN024FVJ; Start 74; Stop 98
ccatcaattccactacgatagtaat

SEQ ID NO: 421833 - DNA, 25 bp, Artificial
  probe
  misc_feature (1)..(25): SEQ ID NO: 5798; WAN024FVJ; Start 187; Stop 211
ttgaccaataccttagcaactttga

SEQ ID NO: 421834 - DNA, 25 bp, Artificial
  probe
  misc_feature (1)..(25): SEQ ID NO: 5798; WAN024FVJ; Start 173; Stop 197
tttcatcttcatccttgaccaatac

SEQ ID NO: 421835 - DNA, 25 bp, Artificial
  probe
  misc_feature (1)..(25): SEQ ID NO: 5798; WAN024FVJ; Start 189; Stop 213
gaccaataccttagcaactttgata

SEQ ID NO: 421836 - DNA, 25 bp, Artificial
  probe
  misc_feature (1)..(25): SEQ ID NO: 5798; WAN024FVJ; Start 185; Stop 209
ccttgaccaataccttagcaacttt

SEQ ID NO: 421837 - DNA, 25 bp, Artificial
  probe
  misc_feature (1)..(25): SEQ ID NO: 5798; WAN024FVJ; Start 133; Stop 157
acaaagttaaagtcattccctgctg

SEQ ID NO: 421838 - DNA, 25 bp, Artificial
  probe
  misc_feature (1)..(25): SEQ ID NO: 5798; WAN024FVJ; Start 130; Stop 154
gttacaaagttaaagtcattccctg

SEQ ID NO: 421839 - DNA, 25 bp, Artificial
  probe
  misc_feature (1)..(25): SEQ ID NO: 5798; WAN024FVJ; Start 89; Stop 113
cgatagtaatatcctggtctgataa

SEQ ID NO: 421840 - DNA, 25 bp, Artificial
  probe
  misc_feature (1)..(25): SEQ ID NO: 5799; WAN024GDP; Start 71; Stop 95
caatgaagaccacaatgatgatgat

SEQ ID NO: 421841 - DNA, 25 bp, Artificial
  probe
  misc_feature (1)..(25): SEQ ID NO: 5799; WAN024GDP; Start 72; Stop 96
aatgaagaccacaatgatgatgatt

SEQ ID NO: 421842 - DNA, 25 bp, Artificial
  probe
  misc_feature (1)..(25): SEQ ID NO: 5799; WAN024GDP; Start 70; Stop 94
gcaatgaagaccacaatgatgatga

SEQ ID NO: 421843 - DNA, 25 bp, Artificial
  probe
  misc_feature (1)..(25): SEQ ID NO: 5799; WAN024GDP; Start 69; Stop 93
ggcaatgaagaccacaatgatgatg

SEQ ID NO: 421844 - DNA, 25 bp, Artificial
  probe
  misc_feature (1)..(25): SEQ ID NO: 5799; WAN024GDP; Start 73; Stop 97
atgaagaccacaatgatgatgattg

SEQ ID NO: 421845 - DNA, 25 bp, Artificial
  probe
  misc_feature (1)..(25): SEQ ID NO: 5799; WAN024GDP; Start 106; Stop 130
aaacgaagaaacgaagaaggaagag

SEQ ID NO: 421846 - DNA, 25 bp, Artificial
  probe
  misc_feature (1)..(25): SEQ ID NO: 5799; WAN024GDP; Start 105; Stop 129
gaaacgaagaaacgaagaaggaaga

SEQ ID NO: 421847 - DNA, 25 bp, Artificial
  probe
  misc_feature (1)..(25): SEQ ID NO: 5799; WAN024GDP; Start 57; Stop 81
ttacataaattgggcaatgaagacc

SEQ ID NO: 421848 - DNA, 25 bp, Artificial
  probe
  misc_feature (1)..(25): SEQ ID NO: 5799; WAN024GDP; Start 74; Stop 98
tgaagaccacaatgatgatgattgg

SEQ ID NO: 421849 - DNA, 25 bp, Artificial
  probe
  misc_feature (1)..(25): SEQ ID NO: 5799; WAN024GDP; Start 100; Stop 124
atgacgaaacgaagaaacgaagaag

SEQ ID NO: 421850 - DNA, 25 bp, Artificial
  probe
  misc_feature (1)..(25): SEQ ID NO: 5799; WAN024GDP; Start 56; Stop 80
attacataaattgggcaatgaagac

SEQ ID NO: 421851 - DNA, 25 bp, Artificial
  probe
  misc_feature (1)..(25): SEQ ID NO: 5799; WAN024GDP; Start 54; Stop 78
tgattacataaattgggcaatgaag

SEQ ID NO: 421852 - DNA, 25 bp, Artificial
  probe
  misc_feature (1)..(25): SEQ ID NO: 5799; WAN024GDP; Start 104; Stop 128
cgaaacgaagaaacgaagaaggaag

SEQ ID NO: 421853 - DNA, 25 bp, Artificial
  probe
  misc_feature (1)..(25): SEQ ID NO: 5799; WAN024GDP; Start 55; Stop 79
gattacataaattgggcaatgaaga

SEQ ID NO: 421854 - DNA, 25 bp, Artificial
  probe
  misc_feature (1)..(25): SEQ ID NO: 5799; WAN024GDP; Start 58; Stop 82
tacataaattgggcaatgaagacca

SEQ ID NO: 421855 - DNA, 25 bp, Artificial
  probe
  misc_feature (1)..(25): SEQ ID NO: 5799; WAN024GDP; Start 53; Stop 77
ttgattacataaattgggcaatgaa

SEQ ID NO: 421856 - DNA, 25 bp, Artificial
  probe
  misc_feature (1)..(25): SEQ ID NO: 5799; WAN024GDP; Start 52; Stop 76
tttgattacataaattgggcaatga

SEQ ID NO: 421857 - DNA, 25 bp, Artificial
  probe
  misc_feature (1)..(25): SEQ ID NO: 5799; WAN024GDP; Start 61; Stop 85
ataaattgggcaatgaagaccacaa

SEQ ID NO: 421858 - DNA, 25 bp, Artificial
  probe
  misc_feature (1)..(25): SEQ ID NO: 5799; WAN024GDP; Start 145; Stop 169
gtccttgtttccatgctctttcatc

SEQ ID NO: 421859 - DNA, 25 bp, Artificial
  probe
  misc_feature (1)..(25): SEQ ID NO: 5799; WAN024GDP; Start 103; Stop 127
acgaaacgaagaaacgaagaaggaa

SEQ ID NO: 421860 - DNA, 25 bp, Artificial
  probe
  misc_feature (1)..(25): SEQ ID NO: 5799; WAN024GDP; Start 144; Stop 168
agtccttgtttccatgctctttcat

SEQ ID NO: 421861 - DNA, 25 bp, Artificial
  probe
  misc_feature (1)..(25): SEQ ID NO: 5799; WAN024GDP; Start 62; Stop 86
taaattgggcaatgaagaccacaat

SEQ ID NO: 421862 - DNA, 25 bp, Artificial
  probe
  misc_feature (1)..(25): SEQ ID NO: 5799; WAN024GDP; Start 60; Stop 84
cataaattgggcaatgaagaccaca

SEQ ID NO: 421863 - DNA, 25 bp, Artificial
  probe
  misc_feature (1)..(25): SEQ ID NO: 5799; WAN024GDP; Start 59; Stop 83
acataaattgggcaatgaagaccac

SEQ ID NO: 421864 - DNA, 25 bp, Artificial
  probe
  misc_feature (1)..(25): SEQ ID NO: 5799; WAN024GDP; Start 110; Stop 134
gaagaaacgaagaaggaagagccag

SEQ ID NO: 421865 - DNA, 25 bp, Artificial
  probe
  misc_feature (1)..(25): SEQ ID NO: 5799; WAN024GDP; Start 107; Stop 131
aacgaagaaacgaagaaggaagagc

SEQ ID NO: 421866 - DNA, 25 bp, Artificial
  probe
  misc_feature (1)..(25): SEQ ID NO: 5799; WAN024GDP; Start 102; Stop 126
gacgaaacgaagaaacgaagaagga

SEQ ID NO: 421867 - DNA, 25 bp, Artificial
  probe
  misc_feature (1)..(25): SEQ ID NO: 5799; WAN024GDP; Start 68; Stop 92
gggcaatgaagaccacaatgatgat

SEQ ID NO: 421868 - DNA, 25 bp, Artificial
  probe
  misc_feature (1)..(25): SEQ ID NO: 5799; WAN024GDP; Start 151; Stop 175
gtttccatgctctttcatcgagatg

SEQ ID NO: 421869 - DNA, 25 bp, Artificial
  probe
  misc_feature (1)..(25): SEQ ID NO: 5799; WAN024GDP; Start 101; Stop 125
tgacgaaacgaagaaacgaagaagg

SEQ ID NO: 421870 - DNA, 25 bp, Artificial
  probe
  misc_feature (1)..(25): SEQ ID NO: 5799; WAN024GDP; Start 160; Stop 184
ctctttcatcgagatggagttcctc

SEQ ID NO: 421871 - DNA, 25 bp, Artificial
  probe
  misc_feature (1)..(25): SEQ ID NO: 5799; WAN024GDP; Start 148; Stop 172
cttgtttccatgctctttcatcgag

SEQ ID NO: 421872 - DNA, 25 bp, Artificial
  probe
  misc_feature (1)..(25): SEQ ID NO: 5799; WAN024GDP; Start 111; Stop 135
aagaaacgaagaaggaagagccaga

SEQ ID NO: 421873 - DNA, 25 bp, Artificial
  probe
  misc_feature (1)..(25): SEQ ID NO: 5800; WAN024GJ4; Start 65; Stop 89
ttacttccatgtactcatcgtcgtt

SEQ ID NO: 421874 - DNA, 25 bp, Artificial
  probe
  misc_feature (1)..(25): SEQ ID NO: 5800; WAN024GJ4; Start 76; Stop 100
tactcatcgtcgttcaagaactcaa

SEQ ID NO: 421875 - DNA, 25 bp, Artificial
  probe
  misc_feature (1)..(25): SEQ ID NO: 5800; WAN024GJ4; Start 73; Stop 97
atgtactcatcgtcgttcaagaact

SEQ ID NO: 421876 - DNA, 25 bp, Artificial
  probe
  misc_feature (1)..(25): SEQ ID NO: 5800; WAN024GJ4; Start 72; Stop 96
catgtactcatcgtcgttcaagaac

SEQ ID NO: 421877 - DNA, 25 bp, Artificial
  probe
  misc_feature (1)..(25): SEQ ID NO: 5800; WAN024GJ4; Start 66; Stop 90
tacttccatgtactcatcgtcgttc

SEQ ID NO: 421878 - DNA, 25 bp, Artificial
  probe
  misc_feature (1)..(25): SEQ ID NO: 5800; WAN024GJ4; Start 20; Stop 44
ctgctttgttaaggatttgtttacg

SEQ ID NO: 421879 - DNA, 25 bp, Artificial
  probe
  misc_feature (1)..(25): SEQ ID NO: 5800; WAN024GJ4; Start 17; Stop 41
gctctgctttgttaaggatttgttt

SEQ ID NO: 421880 - DNA, 25 bp, Artificial
  probe
  misc_feature (1)..(25): SEQ ID NO: 5800; WAN024GJ4; Start 64; Stop 88
gttacttccatgtactcatcgtcgt

SEQ ID NO: 421881 - DNA, 25 bp, Artificial
  probe
  misc_feature (1)..(25): SEQ ID NO: 5800; WAN024GJ4; Start 22; Stop 46
gctttgttaaggatttgtttacgca

SEQ ID NO: 421882 - DNA, 25 bp, Artificial
  probe
  misc_feature (1)..(25): SEQ ID NO: 5800; WAN024GJ4; Start 21; Stop 45
tgctttgttaaggatttgtttacgc

SEQ ID NO: 421883 - DNA, 25 bp, Artificial
  probe
  misc_feature (1)..(25): SEQ ID NO: 5800; WAN024GJ4; Start 23; Stop 47
ctttgttaaggatttgtttacgcaa

SEQ ID NO: 421884 - DNA, 25 bp, Artificial
  probe
  misc_feature (1)..(25): SEQ ID NO: 5800; WAN024GJ4; Start 51; Stop 75
gatagactcaggcgttacttccatg

SEQ ID NO: 421885 - DNA, 25 bp, Artificial
  probe
  misc_feature (1)..(25): SEQ ID NO: 5800; WAN024GJ4; Start 53; Stop 77
tagactcaggcgttacttccatgta

SEQ ID NO: 421886 - DNA, 25 bp, Artificial
  probe
  misc_feature (1)..(25): SEQ ID NO: 5800; WAN024GJ4; Start 103; Stop 127
gactcttcaagtgtcaagatacgag

SEQ ID NO: 421887 - DNA, 25 bp, Artificial
  probe
  misc_feature (1)..(25): SEQ ID NO: 5800; WAN024GJ4; Start 101; Stop 125
gagactcttcaagtgtcaagatacg

SEQ ID NO: 421888 - DNA, 25 bp, Artificial
  probe
  misc_feature (1)..(25): SEQ ID NO: 5800; WAN024GJ4; Start 100; Stop 124
agagactcttcaagtgtcaagatac

SEQ ID NO: 421889 - DNA, 25 bp, Artificial
  probe
  misc_feature (1)..(25): SEQ ID NO: 5800; WAN024GJ4; Start 75; Stop 99
gtactcatcgtcgttcaagaactca

SEQ ID NO: 421890 - DNA, 25 bp, Artificial
  probe
  misc_feature (1)..(25): SEQ ID NO: 5800; WAN024GJ4; Start 74; Stop 98
tgtactcatcgtcgttcaagaactc

SEQ ID NO: 421891 - DNA, 25 bp, Artificial
  probe
  misc_feature (1)..(25): SEQ ID NO: 5800; WAN024GJ4; Start 102; Stop 126
agactcttcaagtgtcaagatacga

SEQ ID NO: 421892 - DNA, 25 bp, Artificial
  probe
  misc_feature (1)..(25): SEQ ID NO: 5800; WAN024GJ4; Start 84; Stop 108
gtcgttcaagaactcaagagactct

SEQ ID NO: 421893 - DNA, 25 bp, Artificial
  probe
  misc_feature (1)..(25): SEQ ID NO: 5800; WAN024GJ4; Start 19; Stop 43
tctgctttgttaaggatttgtttac

SEQ ID NO: 421894 - DNA, 25 bp, Artificial
  probe
  misc_feature (1)..(25): SEQ ID NO: 5800; WAN024GJ4; Start 80; Stop 104
catcgtcgttcaagaactcaagaga

SEQ ID NO: 421895 - DNA, 25 bp, Artificial
  probe
  misc_feature (1)..(25): SEQ ID NO: 5800; WAN024GJ4; Start 79; Stop 103
tcatcgtcgttcaagaactcaagag

SEQ ID NO: 421896 - DNA, 25 bp, Artificial
  probe
  misc_feature (1)..(25): SEQ ID NO: 5800; WAN024GJ4; Start 78; Stop 102
ctcatcgtcgttcaagaactcaaga

SEQ ID NO: 421897 - DNA, 25 bp, Artificial
  probe
  misc_feature (1)..(25): SEQ ID NO: 5800; WAN024GJ4; Start 71; Stop 95
ccatgtactcatcgtcgttcaagaa

SEQ ID NO: 421898 - DNA, 25 bp, Artificial
  probe
  misc_feature (1)..(25): SEQ ID NO: 5800; WAN024GJ4; Start 69; Stop 93
ttccatgtactcatcgtcgttcaag

SEQ ID NO: 421899 - DNA, 25 bp, Artificial
  probe
  misc_feature (1)..(25): SEQ ID NO: 5800; WAN024GJ4; Start 68; Stop 92
cttccatgtactcatcgtcgttcaa

SEQ ID NO: 421900 - DNA, 25 bp, Artificial
  probe
  misc_feature (1)..(25): SEQ ID NO: 5800; WAN024GJ4; Start 18; Stop 42
ctctgctttgttaaggatttgttta

SEQ ID NO: 421901 - DNA, 25 bp, Artificial
  probe
  misc_feature (1)..(25): SEQ ID NO: 5800; WAN024GJ4; Start 77; Stop 101
actcatcgtcgttcaagaactcaag

SEQ ID NO: 421902 - DNA, 25 bp, Artificial
  probe
  misc_feature (1)..(25): SEQ ID NO: 5800; WAN024GJ4; Start 191; Stop 215
tcgtgatgttaactgtcaagtcatt

SEQ ID NO: 421903 - DNA, 25 bp, Artificial
  probe
  misc_feature (1)..(25): SEQ ID NO: 5800; WAN024GJ4; Start 190; Stop 214
ttcgtgatgttaactgtcaagtcat

SEQ ID NO: 421904 - DNA, 25 bp, Artificial
  probe
  misc_feature (1)..(25): SEQ ID NO: 5800; WAN024GJ4; Start 104; Stop 128
actcttcaagtgtcaagatacgagg

SEQ ID NO: 421905 - DNA, 25 bp, Artificial
  probe
  misc_feature (1)..(25): SEQ ID NO: 5800; WAN024GJ4; Start 52; Stop 76
atagactcaggcgttacttccatgt

SEQ ID NO: 421906 - DNA, 25 bp, Artificial
  probe
  misc_feature (1)..(25): SEQ ID NO: 5801; WAN0249F2; Start 27; Stop 51
aagcatagcataaatctgacaaatg

SEQ ID NO: 421907 - DNA, 25 bp, Artificial
  probe
  misc_feature (1)..(25): SEQ ID NO: 5801; WAN0249F2; Start 25; Stop 49
ttaagcatagcataaatctgacaaa

SEQ ID NO: 421908 - DNA, 25 bp, Artificial
  probe
  misc_feature (1)..(25): SEQ ID NO: 5801; WAN0249F2; Start 26; Stop 50
taagcatagcataaatctgacaaat

SEQ ID NO: 421909 - DNA, 25 bp, Artificial
  probe
  misc_feature (1)..(25): SEQ ID NO: 5801; WAN0249F2; Start 23; Stop 47
ccttaagcatagcataaatctgaca

SEQ ID NO: 421910 - DNA, 25 bp, Artificial
  probe
  misc_feature (1)..(25): SEQ ID NO: 5801; WAN0249F2; Start 22; Stop 46
accttaagcatagcataaatctgac

SEQ ID NO: 421911 - DNA, 25 bp, Artificial
  probe
  misc_feature (1)..(25): SEQ ID NO: 5801; WAN0249F2; Start 21; Stop 45
taccttaagcatagcataaatctga

SEQ ID NO: 421912 - DNA, 25 bp, Artificial
  probe
  misc_feature (1)..(25): SEQ ID NO: 5801; WAN0249F2; Start 24; Stop 48
cttaagcatagcataaatctgacaa

SEQ ID NO: 421913 - DNA, 25 bp, Artificial
  probe
  misc_feature (1)..(25): SEQ ID NO: 5801; WAN0249F2; Start 20; Stop 44
ctaccttaagcatagcataaatctg

SEQ ID NO: 421914 - DNA, 25 bp, Artificial
  probe
  misc_feature (1)..(25): SEQ ID NO: 5801; WAN0249F2; Start 19; Stop 43
tctaccttaagcatagcataaatct

SEQ ID NO: 421915 - DNA, 25 bp, Artificial
  probe
  misc_feature (1)..(25): SEQ ID NO: 5801; WAN0249F2; Start 18; Stop 42
ttctaccttaagcatagcataaatc

SEQ ID NO: 421916 - DNA, 25 bp, Artificial
  probe
  misc_feature (1)..(25): SEQ ID NO: 5801; WAN0249F2; Start 8; Stop 32
ccctttcattttctaccttaagcat

SEQ ID NO: 421917 - DNA, 25 bp, Artificial
  probe
  misc_feature (1)..(25): SEQ ID NO: 5801; WAN0249F2; Start 12; Stop 36
ttcattttctaccttaagcatagca

SEQ ID NO: 421918 - DNA, 25 bp, Artificial
  probe
  misc_feature (1)..(25): SEQ ID NO: 5801; WAN0249F2; Start 41; Stop 65
tctgacaaatgctaaaataatctgt

SEQ ID NO: 421919 - DNA, 25 bp, Artificial
  probe
  misc_feature (1)..(25): SEQ ID NO: 5801; WAN0249F2; Start 17; Stop 41
tttctaccttaagcatagcataaat

SEQ ID NO: 421920 - DNA, 25 bp, Artificial
  probe
  misc_feature (1)..(25): SEQ ID NO: 5801; WAN0249F2; Start 13; Stop 37
tcattttctaccttaagcatagcat

SEQ ID NO: 421921 - DNA, 25 bp, Artificial
  probe
  misc_feature (1)..(25): SEQ ID NO: 5801; WAN0249F2; Start 11; Stop 35
tttcattttctaccttaagcatagc

SEQ ID NO: 421922 - DNA, 25 bp, Artificial
  probe
  misc_feature (1)..(25): SEQ ID NO: 5801; WAN0249F2; Start 40; Stop 64
atctgacaaatgctaaaataatctg

SEQ ID NO: 421923 - DNA, 25 bp, Artificial
  probe
  misc_feature (1)..(25): SEQ ID NO: 5801; WAN0249F2; Start 42; Stop 66
ctgacaaatgctaaaataatctgtt

SEQ ID NO: 421924 - DNA, 25 bp, Artificial
  probe
  misc_feature (1)..(25): SEQ ID NO: 5801; WAN0249F2; Start 28; Stop 52
agcatagcataaatctgacaaatgc

SEQ ID NO: 421925 - DNA, 25 bp, Artificial
  probe
  misc_feature (1)..(25): SEQ ID NO: 5801; WAN0249F2; Start 14; Stop 38
cattttctaccttaagcatagcata

SEQ ID NO: 421926 - DNA, 25 bp, Artificial
  probe
  misc_feature (1)..(25): SEQ ID NO: 5801; WAN0249F2; Start 9; Stop 33
cctttcattttctaccttaagcata

SEQ ID NO: 421927 - DNA, 25 bp, Artificial
  probe
  misc_feature (1)..(25): SEQ ID NO: 5801; WAN0249F2; Start 43; Stop 67
tgacaaatgctaaaataatctgttt

SEQ ID NO: 421928 - DNA, 25 bp, Artificial
  probe
  misc_feature (1)..(25): SEQ ID NO: 5801; WAN0249F2; Start 46; Stop 70
caaatgctaaaataatctgtttctc

SEQ ID NO: 421929 - DNA, 25 bp, Artificial
  probe
  misc_feature (1)..(25): SEQ ID NO: 5801; WAN0249F2; Start 45; Stop 69
acaaatgctaaaataatctgtttct

SEQ ID NO: 421930 - DNA, 25 bp, Artificial
  probe
  misc_feature (1)..(25): SEQ ID NO: 5801; WAN0249F2; Start 39; Stop 63
aatctgacaaatgctaaaataatct

SEQ ID NO: 421931 - DNA, 25 bp, Artificial
  probe
  misc_feature (1)..(25): SEQ ID NO: 5801; WAN0249F2; Start 16; Stop 40
ttttctaccttaagcatagcataaa

SEQ ID NO: 421932 - DNA, 25 bp, Artificial
  probe
  misc_feature (1)..(25): SEQ ID NO: 5801; WAN0249F2; Start 44; Stop 68
gacaaatgctaaaataatctgtttc

SEQ ID NO: 421933 - DNA, 25 bp, Artificial
  probe
  misc_feature (1)..(25): SEQ ID NO: 5801; WAN0249F2; Start 49; Stop 73
atgctaaaataatctgtttctcttt

SEQ ID NO: 421934 - DNA, 25 bp, Artificial
  probe
  misc_feature (1)..(25): SEQ ID NO: 5801; WAN0249F2; Start 48; Stop 72
aatgctaaaataatctgtttctctt

SEQ ID NO: 421935 - DNA, 25 bp, Artificial
  probe
  misc_feature (1)..(25): SEQ ID NO: 5801; WAN0249F2; Start 47; Stop 71
aaatgctaaaataatctgtttctct

SEQ ID NO: 421936 - DNA, 25 bp, Artificial
  probe
  misc_feature (1)..(25): SEQ ID NO: 5801; WAN0249F2; Start 15; Stop 39
attttctaccttaagcatagcataa

SEQ ID NO: 421937 - DNA, 25 bp, Artificial
  probe
  misc_feature (1)..(25): SEQ ID NO: 5801; WAN0249F2; Start 10; Stop 34
ctttcattttctaccttaagcatag

SEQ ID NO: 421938 - DNA, 25 bp, Artificial
  probe
  misc_feature (1)..(25): SEQ ID NO: 5801; WAN0249F2; Start 50; Stop 74
tgctaaaataatctgtttctctttt

SEQ ID NO: 421939 - DNA, 25 bp, Artificial
  probe
  misc_feature (1)..(25): SEQ ID NO: 5801; WAN0249F2; Start 34; Stop 58
gcataaatctgacaaatgctaaaat

SEQ ID NO: 421940 - DNA, 25 bp, Artificial
  probe
  misc_feature (1)..(25): SEQ ID NO: 5802; WAN024GH4; Start 327; Stop 351
gaccgttcttcttagccaattcttc

SEQ ID NO: 421941 - DNA, 25 bp, Artificial
  probe
  misc_feature (1)..(25): SEQ ID NO: 5802; WAN024GH4; Start 330; Stop 354
cgttcttcttagccaattcttcgtg

SEQ ID NO: 421942 - DNA, 25 bp, Artificial
  probe
  misc_feature (1)..(25): SEQ ID NO: 5802; WAN024GH4; Start 326; Stop 350
agaccgttcttcttagccaattctt

SEQ ID NO: 421943 - DNA, 25 bp, Artificial
  probe
  misc_feature (1)..(25): SEQ ID NO: 5802; WAN024GH4; Start 335; Stop 359
ttcttagccaattcttcgtggataa

SEQ ID NO: 421944 - DNA, 25 bp, Artificial
  probe
  misc_feature (1)..(25): SEQ ID NO: 5802; WAN024GH4; Start 336; Stop 360
tcttagccaattcttcgtggataag

SEQ ID NO: 421945 - DNA, 25 bp, Artificial
  probe
  misc_feature (1)..(25): SEQ ID NO: 5802; WAN024GH4; Start 334; Stop 358
cttcttagccaattcttcgtggata

SEQ ID NO: 421946 - DNA, 25 bp, Artificial
  probe
  misc_feature (1)..(25): SEQ ID NO: 5802; WAN024GH4; Start 337; Stop 361
cttagccaattcttcgtggataagg

SEQ ID NO: 421947 - DNA, 25 bp, Artificial
  probe
  misc_feature (1)..(25): SEQ ID NO: 5802; WAN024GH4; Start 339; Stop 363
tagccaattcttcgtggataaggat

SEQ ID NO: 421948 - DNA, 25 bp, Artificial
  probe
  misc_feature (1)..(25): SEQ ID NO: 5802; WAN024GH4; Start 338; Stop 362
ttagccaattcttcgtggataagga

SEQ ID NO: 421949 - DNA, 25 bp, Artificial
  probe
  misc_feature (1)..(25): SEQ ID NO: 5802; WAN024GH4; Start 151; Stop 175
ggtttggctactttcatagtctgta

SEQ ID NO: 421950 - DNA, 25 bp, Artificial
  probe
  misc_feature (1)..(25): SEQ ID NO: 5802; WAN024GH4; Start 333; Stop 357
tcttcttagccaattcttcgtggat

SEQ ID NO: 421951 - DNA, 25 bp, Artificial
  probe
  misc_feature (1)..(25): SEQ ID NO: 5802; WAN024GH4; Start 194; Stop 218
aagtcagaagacaagcctgtgaatt

SEQ ID NO: 421952 - DNA, 25 bp, Artificial
  probe
  misc_feature (1)..(25): SEQ ID NO: 5802; WAN024GH4; Start 331; Stop 355
gttcttcttagccaattcttcgtgg

SEQ ID NO: 421953 - DNA, 25 bp, Artificial
  probe
  misc_feature (1)..(25): SEQ ID NO: 5802; WAN024GH4; Start 152; Stop 176
gtttggctactttcatagtctgtaa

SEQ ID NO: 421954 - DNA, 25 bp, Artificial
  probe
  misc_feature (1)..(25): SEQ ID NO: 5802; WAN024GH4; Start 329; Stop 353
ccgttcttcttagccaattcttcgt

SEQ ID NO: 421955 - DNA, 25 bp, Artificial
  probe
  misc_feature (1)..(25): SEQ ID NO: 5802; WAN024GH4; Start 328; Stop 352
accgttcttcttagccaattcttcg

SEQ ID NO: 421956 - DNA, 25 bp, Artificial
  probe
  misc_feature (1)..(25): SEQ ID NO: 5802; WAN024GH4; Start 332; Stop 356
ttcttcttagccaattcttcgtgga

SEQ ID NO: 421957 - DNA, 25 bp, Artificial
  probe
  misc_feature (1)..(25): SEQ ID NO: 5802; WAN024GH4; Start 340; Stop 364
agccaattcttcgtggataaggatt

SEQ ID NO: 421958 - DNA, 25 bp, Artificial
  probe
  misc_feature (1)..(25): SEQ ID NO: 5802; WAN024GH4; Start 193; Stop 217
gaagtcagaagacaagcctgtgaat

SEQ ID NO: 421959 - DNA, 25 bp, Artificial
  probe
  misc_feature (1)..(25): SEQ ID NO: 5802; WAN024GH4; Start 148; Stop 172
aagggtttggctactttcatagtct

SEQ ID NO: 421960 - DNA, 25 bp, Artificial
  probe
  misc_feature (1)..(25): SEQ ID NO: 5802; WAN024GH4; Start 153; Stop 177
tttggctactttcatagtctgtaaa

SEQ ID NO: 421961 - DNA, 25 bp, Artificial
  probe
  misc_feature (1)..(25): SEQ ID NO: 5802; WAN024GH4; Start 325; Stop 349
aagaccgttcttcttagccaattct

SEQ ID NO: 421962 - DNA, 25 bp, Artificial
  probe
  misc_feature (1)..(25): SEQ ID NO: 5802; WAN024GH4; Start 149; Stop 173
agggtttggctactttcatagtctg

SEQ ID NO: 421963 - DNA, 25 bp, Artificial
  probe
  misc_feature (1)..(25): SEQ ID NO: 5802; WAN024GH4; Start 150; Stop 174
gggtttggctactttcatagtctgt

SEQ ID NO: 421964 - DNA, 25 bp, Artificial
  probe
  misc_feature (1)..(25): SEQ ID NO: 5802; WAN024GH4; Start 341; Stop 365
gccaattcttcgtggataaggattt

SEQ ID NO: 421965 - DNA, 25 bp, Artificial
  probe
  misc_feature (1)..(25): SEQ ID NO: 5802; WAN024GH4; Start 196; Stop 220
gtcagaagacaagcctgtgaatttc

SEQ ID NO: 421966 - DNA, 25 bp, Artificial
  probe
  misc_feature (1)..(25): SEQ ID NO: 5802; WAN024GH4; Start 155; Stop 179
tggctactttcatagtctgtaaaga

SEQ ID NO: 421967 - DNA, 25 bp, Artificial
  probe
  misc_feature (1)..(25): SEQ ID NO: 5802; WAN024GH4; Start 147; Stop 171
aaagggtttggctactttcatagtc

SEQ ID NO: 421968 - DNA, 25 bp, Artificial
  probe
  misc_feature (1)..(25): SEQ ID NO: 5802; WAN024GH4; Start 117; Stop 141
ctgcactgacttgagcttcactatt

SEQ ID NO: 421969 - DNA, 25 bp, Artificial
  probe
  misc_feature (1)..(25): SEQ ID NO: 5802; WAN024GH4; Start 154; Stop 178
ttggctactttcatagtctgtaaag

SEQ ID NO: 421970 - DNA, 25 bp, Artificial
  probe
  misc_feature (1)..(25): SEQ ID NO: 5802; WAN024GH4; Start 195; Stop 219
agtcagaagacaagcctgtgaattt

SEQ ID NO: 421971 - DNA, 25 bp, Artificial
  probe
  misc_feature (1)..(25): SEQ ID NO: 5802; WAN024GH4; Start 350; Stop 374
tcgtggataaggattttcttggaat

SEQ ID NO: 421972 - DNA, 25 bp, Artificial
  probe
  misc_feature (1)..(25): SEQ ID NO: 5802; WAN024GH4; Start 118; Stop 142
tgcactgacttgagcttcactattg

SEQ ID NO: 421973 - DNA, 25 bp, Artificial
  probe
  misc_feature (1)..(25): SEQ ID NO: 5803; WAN024EXA; Start 39; Stop 63
ctgtcgtcacttctacaacttctat

SEQ ID NO: 421974 - DNA, 25 bp, Artificial
  probe
  misc_feature (1)..(25): SEQ ID NO: 5803; WAN024EXA; Start 41; Stop 65
gtcgtcacttctacaacttctatat

SEQ ID NO: 421975 - DNA, 25 bp, Artificial
  probe
  misc_feature (1)..(25): SEQ ID NO: 5803; WAN024EXA; Start 40; Stop 64
tgtcgtcacttctacaacttctata

SEQ ID NO: 421976 - DNA, 25 bp, Artificial
  probe
  misc_feature (1)..(25): SEQ ID NO: 5803; WAN024EXA; Start 256; Stop 280
gctggactcttcttcctctatctta

SEQ ID NO: 421977 - DNA, 25 bp, Artificial
  probe
  misc_feature (1)..(25): SEQ ID NO: 5803; WAN024EXA; Start 257; Stop 281
ctggactcttcttcctctatcttaa

SEQ ID NO: 421978 - DNA, 25 bp, Artificial
  probe
  misc_feature (1)..(25): SEQ ID NO: 5803; WAN024EXA; Start 42; Stop 66
tcgtcacttctacaacttctatatt

SEQ ID NO: 421979 - DNA, 25 bp, Artificial
  probe
  misc_feature (1)..(25): SEQ ID NO: 5803; WAN024EXA; Start 225; Stop 249
tttgtttcataatcgttcctggttc

SEQ ID NO: 421980 - DNA, 25 bp, Artificial
  probe
  misc_feature (1)..(25): SEQ ID NO: 5803; WAN024EXA; Start 224; Stop 248
ctttgtttcataatcgttcctggtt

SEQ ID NO: 421981 - DNA, 25 bp, Artificial
  probe
  misc_feature (1)..(25): SEQ ID NO: 5803; WAN024EXA; Start 222; Stop 246
gactttgtttcataatcgttcctgg

SEQ ID NO: 421982 - DNA, 25 bp, Artificial
  probe
  misc_feature (1)..(25): SEQ ID NO: 5803; WAN024EXA; Start 218; Stop 242
cctggactttgtttcataatcgttc

SEQ ID NO: 421983 - DNA, 25 bp, Artificial
  probe
  misc_feature (1)..(25): SEQ ID NO: 5803; WAN024EXA; Start 223; Stop 247
actttgtttcataatcgttcctggt

SEQ ID NO: 421984 - DNA, 25 bp, Artificial
  probe
  misc_feature (1)..(25): SEQ ID NO: 5803; WAN024EXA; Start 217; Stop 241
acctggactttgtttcataatcgtt

SEQ ID NO: 421985 - DNA, 25 bp, Artificial
  probe
  misc_feature (1)..(25): SEQ ID NO: 5803; WAN024EXA; Start 285; Stop 309
aattctcaggaaccttcttctgctt

SEQ ID NO: 421986 - DNA, 25 bp, Artificial
  probe
  misc_feature (1)..(25): SEQ ID NO: 5803; WAN024EXA; Start 260; Stop 284
gactcttcttcctctatcttaatca

SEQ ID NO: 421987 - DNA, 25 bp, Artificial
  probe
  misc_feature (1)..(25): SEQ ID NO: 5803; WAN024EXA; Start 38; Stop 62
gctgtcgtcacttctacaacttcta

SEQ ID NO: 421988 - DNA, 25 bp, Artificial
  probe
  misc_feature (1)..(25): SEQ ID NO: 5803; WAN024EXA; Start 258; Stop 282
tggactcttcttcctctatcttaat

SEQ ID NO: 421989 - DNA, 25 bp, Artificial
  probe
  misc_feature (1)..(25): SEQ ID NO: 5803; WAN024EXA; Start 281; Stop 305
atcaaattctcaggaaccttcttct

SEQ ID NO: 421990 - DNA, 25 bp, Artificial
  probe
  misc_feature (1)..(25): SEQ ID NO: 5803; WAN024EXA; Start 68; Stop 92
gcttccttaatcccaacaatttgaa

SEQ ID NO: 421991 - DNA, 25 bp, Artificial
  probe
  misc_feature (1)..(25): SEQ ID NO: 5803; WAN024EXA; Start 216; Stop 240
cacctggactttgtttcataatcgt

SEQ ID NO: 421992 - DNA, 25 bp, Artificial
  probe
  misc_feature (1)..(25): SEQ ID NO: 5803; WAN024EXA; Start 187; Stop 211
aggtttactcacatcataagtcgtt

SEQ ID NO: 421993 - DNA, 25 bp, Artificial
  probe
  misc_feature (1)..(25): SEQ ID NO: 5803; WAN024EXA; Start 189; Stop 213
gtttactcacatcataagtcgttcc

SEQ ID NO: 421994 - DNA, 25 bp, Artificial
  probe
  misc_feature (1)..(25): SEQ ID NO: 5803; WAN024EXA; Start 188; Stop 212
ggtttactcacatcataagtcgttc

SEQ ID NO: 421995 - DNA, 25 bp, Artificial
  probe
  misc_feature (1)..(25): SEQ ID NO: 5803; WAN024EXA; Start 280; Stop 304
aatcaaattctcaggaaccttcttc

SEQ ID NO: 421996 - DNA, 25 bp, Artificial
  probe
  misc_feature (1)..(25): SEQ ID NO: 5803; WAN024EXA; Start 186; Stop 210
taggtttactcacatcataagtcgt

SEQ ID NO: 421997 - DNA, 25 bp, Artificial
  probe
  misc_feature (1)..(25): SEQ ID NO: 5803; WAN024EXA; Start 190; Stop 214
tttactcacatcataagtcgttccg

SEQ ID NO: 421998 - DNA, 25 bp, Artificial
  probe
  misc_feature (1)..(25): SEQ ID NO: 5803; WAN024EXA; Start 185; Stop 209
gtaggtttactcacatcataagtcg

SEQ ID NO: 421999 - DNA, 25 bp, Artificial
  probe
  misc_feature (1)..(25): SEQ ID NO: 5803; WAN024EXA; Start 226; Stop 250
ttgtttcataatcgttcctggttcg

SEQ ID NO: 422000 - DNA, 25 bp, Artificial
  probe
  misc_feature (1)..(25): SEQ ID NO: 5803; WAN024EXA; Start 71; Stop 95
tccttaatcccaacaatttgaatca

SEQ ID NO: 422001 - DNA, 25 bp, Artificial
  probe
  misc_feature (1)..(25): SEQ ID NO: 5803; WAN024EXA; Start 259; Stop 283
ggactcttcttcctctatcttaatc

SEQ ID NO: 422002 - DNA, 25 bp, Artificial
  probe
  misc_feature (1)..(25): SEQ ID NO: 5803; WAN024EXA; Start 261; Stop 285
actcttcttcctctatcttaatcaa

SEQ ID NO: 422003 - DNA, 25 bp, Artificial
  probe
  misc_feature (1)..(25): SEQ ID NO: 5803; WAN024EXA; Start 286; Stop 310
attctcaggaaccttcttctgcttg

SEQ ID NO: 422004 - DNA, 25 bp, Artificial
  probe
  misc_feature (1)..(25): SEQ ID NO: 5803; WAN024EXA; Start 282; Stop 306
tcaaattctcaggaaccttcttctg

SEQ ID NO: 422005 - DNA, 25 bp, Artificial
  probe
  misc_feature (1)..(25): SEQ ID NO: 5803; WAN024EXA; Start 214; Stop 238
ggcacctggactttgtttcataatc

SEQ ID NO: 422006 - DNA, 25 bp, Artificial
  probe
  misc_feature (1)..(25): SEQ ID NO: 5804; WAN024G9V; Start 197; Stop 221
cgaccaacttcaacatcatcataga

SEQ ID NO: 422007 - DNA, 25 bp, Artificial
  probe
  misc_feature (1)..(25): SEQ ID NO: 5804; WAN024G9V; Start 196; Stop 220
acgaccaacttcaacatcatcatag

SEQ ID NO: 422008 - DNA, 25 bp, Artificial
  probe
  misc_feature (1)..(25): SEQ ID NO: 5804; WAN024G9V; Start 195; Stop 219
gacgaccaacttcaacatcatcata

SEQ ID NO: 422009 - DNA, 25 bp, Artificial
  probe
  misc_feature (1)..(25): SEQ ID NO: 5804; WAN024G9V; Start 198; Stop 222
gaccaacttcaacatcatcatagat

SEQ ID NO: 422010 - DNA, 25 bp, Artificial
  probe
  misc_feature (1)..(25): SEQ ID NO: 5804; WAN024G9V; Start 199; Stop 223
accaacttcaacatcatcatagata

SEQ ID NO: 422011 - DNA, 25 bp, Artificial
  probe
  misc_feature (1)..(25): SEQ ID NO: 5804; WAN024G9V; Start 112; Stop 136
ttcaacttcaacttcaaattcacga

SEQ ID NO: 422012 - DNA, 25 bp, Artificial
  probe
  misc_feature (1)..(25): SEQ ID NO: 5804; WAN024G9V; Start 113; Stop 137
tcaacttcaacttcaaattcacgag

SEQ ID NO: 422013 - DNA, 25 bp, Artificial
  probe
  misc_feature (1)..(25): SEQ ID NO: 5804; WAN024G9V; Start 212; Stop 236
tcatcatagatatcaagagcaccag

SEQ ID NO: 422014 - DNA, 25 bp, Artificial
  probe
  misc_feature (1)..(25): SEQ ID NO: 5804; WAN024G9V; Start 111; Stop 135
tttcaacttcaacttcaaattcacg

SEQ ID NO: 422015 - DNA, 25 bp, Artificial
  probe
  misc_feature (1)..(25): SEQ ID NO: 5804; WAN024G9V; Start 211; Stop 235
atcatcatagatatcaagagcacca

SEQ ID NO: 422016 - DNA, 25 bp, Artificial
  probe
  misc_feature (1)..(25): SEQ ID NO: 5804; WAN024G9V; Start 194; Stop 218
tgacgaccaacttcaacatcatcat

SEQ ID NO: 422017 - DNA, 25 bp, Artificial
  probe
  misc_feature (1)..(25): SEQ ID NO: 5804; WAN024G9V; Start 213; Stop 237
catcatagatatcaagagcaccagc

SEQ ID NO: 422018 - DNA, 25 bp, Artificial
  probe
  misc_feature (1)..(25): SEQ ID NO: 5804; WAN024G9V; Start 210; Stop 234
catcatcatagatatcaagagcacc

SEQ ID NO: 422019 - DNA, 25 bp, Artificial
  probe
  misc_feature (1)..(25): SEQ ID NO: 5804; WAN024G9V; Start 114; Stop 138
caacttcaacttcaaattcacgagt

SEQ ID NO: 422020 - DNA, 25 bp, Artificial
  probe
  misc_feature (1)..(25): SEQ ID NO: 5804; WAN024G9V; Start 214; Stop 238
atcatagatatcaagagcaccagca

SEQ ID NO: 422021 - DNA, 25 bp, Artificial
  probe
  misc_feature (1)..(25): SEQ ID NO: 5804; WAN024G9V; Start 216; Stop 240
catagatatcaagagcaccagcaac

SEQ ID NO: 422022 - DNA, 25 bp, Artificial
  probe
  misc_feature (1)..(25): SEQ ID NO: 5804; WAN024G9V; Start 215; Stop 239
tcatagatatcaagagcaccagcaa

SEQ ID NO: 422023 - DNA, 25 bp, Artificial
  probe
  misc_feature (1)..(25): SEQ ID NO: 5804; WAN024G9V; Start 200; Stop 224
ccaacttcaacatcatcatagatat

SEQ ID NO: 422024 - DNA, 25 bp, Artificial
  probe
  misc_feature (1)..(25): SEQ ID NO: 5804; WAN024G9V; Start 209; Stop 233
acatcatcatagatatcaagagcac

SEQ ID NO: 422025 - DNA, 25 bp, Artificial
  probe
  misc_feature (1)..(25): SEQ ID NO: 5804; WAN024G9V; Start 208; Stop 232
aacatcatcatagatatcaagagca

SEQ ID NO: 422026 - DNA, 25 bp, Artificial
  probe
  misc_feature (1)..(25): SEQ ID NO: 5804; WAN024G9V; Start 141; Stop 165
catcatctttagcaaccacacgaag

SEQ ID NO: 422027 - DNA, 25 bp, Artificial
  probe
  misc_feature (1)..(25): SEQ ID NO: 5804; WAN024G9V; Start 207; Stop 231
caacatcatcatagatatcaagagc

SEQ ID NO: 422028 - DNA, 25 bp, Artificial
  probe
  misc_feature (1)..(25): SEQ ID NO: 5804; WAN024G9V; Start 128; Stop 152
aattcacgagttgcatcatctttag

SEQ ID NO: 422029 - DNA, 25 bp, Artificial
  probe
  misc_feature (1)..(25): SEQ ID NO: 5804; WAN024G9V; Start 127; Stop 151
aaattcacgagttgcatcatcttta

SEQ ID NO: 422030 - DNA, 25 bp, Artificial
  probe
  misc_feature (1)..(25): SEQ ID NO: 5804; WAN024G9V; Start 217; Stop 241
atagatatcaagagcaccagcaacg

SEQ ID NO: 422031 - DNA, 25 bp, Artificial
  probe
  misc_feature (1)..(25): SEQ ID NO: 5804; WAN024G9V; Start 162; Stop 186
gaagaccaagtttaccatcgtcaac

SEQ ID NO: 422032 - DNA, 25 bp, Artificial
  probe
  misc_feature (1)..(25): SEQ ID NO: 5804; WAN024G9V; Start 126; Stop 150
caaattcacgagttgcatcatcttt

SEQ ID NO: 422033 - DNA, 25 bp, Artificial
  probe
  misc_feature (1)..(25): SEQ ID NO: 5804; WAN024G9V; Start 166; Stop 190
accaagtttaccatcgtcaaccaaa

SEQ ID NO: 422034 - DNA, 25 bp, Artificial
  probe
  misc_feature (1)..(25): SEQ ID NO: 5804; WAN024G9V; Start 192; Stop 216
cttgacgaccaacttcaacatcatc

SEQ ID NO: 422035 - DNA, 25 bp, Artificial
  probe
  misc_feature (1)..(25): SEQ ID NO: 5804; WAN024G9V; Start 123; Stop 147
cttcaaattcacgagttgcatcatc

SEQ ID NO: 422036 - DNA, 25 bp, Artificial
  probe
  misc_feature (1)..(25): SEQ ID NO: 5804; WAN024G9V; Start 125; Stop 149
tcaaattcacgagttgcatcatctt

SEQ ID NO: 422037 - DNA, 25 bp, Artificial
  probe
  misc_feature (1)..(25): SEQ ID NO: 5804; WAN024G9V; Start 124; Stop 148
ttcaaattcacgagttgcatcatct

SEQ ID NO: 422038 - DNA, 25 bp, Artificial
  probe
  misc_feature (1)..(25): SEQ ID NO: 5804; WAN024G9V; Start 129; Stop 153
attcacgagttgcatcatctttagc

SEQ ID NO: 422039 - DNA, 25 bp, Artificial
  probe
  misc_feature (1)..(25): SEQ ID NO: 5805; WAN024D79; Start 9; Stop 33
tgtaaaatggactaggatagggaaa

SEQ ID NO: 422040 - DNA, 25 bp, Artificial
  probe
  misc_feature (1)..(25): SEQ ID NO: 5805; WAN024D79; Start 8; Stop 32
atgtaaaatggactaggatagggaa

SEQ ID NO: 422041 - DNA, 25 bp, Artificial
  probe
  misc_feature (1)..(25): SEQ ID NO: 5805; WAN024D79; Start 7; Stop 31
aatgtaaaatggactaggataggga

SEQ ID NO: 422042 - DNA, 25 bp, Artificial
  probe
  misc_feature (1)..(25): SEQ ID NO: 5805; WAN024D79; Start 6; Stop 30
caatgtaaaatggactaggataggg

SEQ ID NO: 422043 - DNA, 25 bp, Artificial
  probe
  misc_feature (1)..(25): SEQ ID NO: 5805; WAN024D79; Start 1; Stop 25
ttgttcaatgtaaaatggactagga

SEQ ID NO: 422044 - DNA, 25 bp, Artificial
  probe
  misc_feature (1)..(25): SEQ ID NO: 5805; WAN024D79; Start 2; Stop 26
tgttcaatgtaaaatggactaggat

SEQ ID NO: 422045 - DNA, 25 bp, Artificial
  probe
  misc_feature (1)..(25): SEQ ID NO: 5805; WAN024D79; Start 10; Stop 34
gtaaaatggactaggatagggaaaa

SEQ ID NO: 422046 - DNA, 25 bp, Artificial
  probe
  misc_feature (1)..(25): SEQ ID NO: 5805; WAN024D79; Start 5; Stop 29
tcaatgtaaaatggactaggatagg

SEQ ID NO: 422047 - DNA, 25 bp, Artificial
  probe
  misc_feature (1)..(25): SEQ ID NO: 5805; WAN024D79; Start 36; Stop 60
aatgccagaaaatggtataatagga

SEQ ID NO: 422048 - DNA, 25 bp, Artificial
  probe
  misc_feature (1)..(25): SEQ ID NO: 5805; WAN024D79; Start 3; Stop 27
gttcaatgtaaaatggactaggata

SEQ ID NO: 422049 - DNA, 25 bp, Artificial
  probe
  misc_feature (1)..(25): SEQ ID NO: 5805; WAN024D79; Start 35; Stop 59
aaatgccagaaaatggtataatagg

SEQ ID NO: 422050 - DNA, 25 bp, Artificial
  probe
  misc_feature (1)..(25): SEQ ID NO: 5805; WAN024D79; Start 4; Stop 28
ttcaatgtaaaatggactaggatag

SEQ ID NO: 422051 - DNA, 25 bp, Artificial
  probe
  misc_feature (1)..(25): SEQ ID NO: 5805; WAN024D79; Start 34; Stop 58
aaaatgccagaaaatggtataatag

SEQ ID NO: 422052 - DNA, 25 bp, Artificial
  probe
  misc_feature (1)..(25): SEQ ID NO: 5806; WAN024AJ2; Start 5; Stop 29
tcaattaaagggtaacaagcaaact

SEQ ID NO: 422053 - DNA, 25 bp, Artificial
  probe
  misc_feature (1)..(25): SEQ ID NO: 5806; WAN024AJ2; Start 7; Stop 31
aattaaagggtaacaagcaaactct

SEQ ID NO: 422054 - DNA, 25 bp, Artificial
  probe
  misc_feature (1)..(25): SEQ ID NO: 5806; WAN024AJ2; Start 6; Stop 30
caattaaagggtaacaagcaaactc

SEQ ID NO: 422055 - DNA, 25 bp, Artificial
  probe
  misc_feature (1)..(25): SEQ ID NO: 5806; WAN024AJ2; Start 8; Stop 32
attaaagggtaacaagcaaactctt

SEQ ID NO: 422056 - DNA, 25 bp, Artificial
  probe
  misc_feature (1)..(25): SEQ ID NO: 5806; WAN024AJ2; Start 4; Stop 28
ttcaattaaagggtaacaagcaaac

SEQ ID NO: 422057 - DNA, 25 bp, Artificial
  probe
  misc_feature (1)..(25): SEQ ID NO: 5806; WAN024AJ2; Start 3; Stop 27
gttcaattaaagggtaacaagcaaa

SEQ ID NO: 422058 - DNA, 25 bp, Artificial
  probe
  misc_feature (1)..(25): SEQ ID NO: 5806; WAN024AJ2; Start 9; Stop 33
ttaaagggtaacaagcaaactcttt

SEQ ID NO: 422059 - DNA, 25 bp, Artificial
  probe
  misc_feature (1)..(25): SEQ ID NO: 5806; WAN024AJ2; Start 2; Stop 26
tgttcaattaaagggtaacaagcaa

SEQ ID NO: 422060 - DNA, 25 bp, Artificial
  probe
  misc_feature (1)..(25): SEQ ID NO: 5806; WAN024AJ2; Start 10; Stop 34
taaagggtaacaagcaaactctttt

SEQ ID NO: 422061 - DNA, 25 bp, Artificial
  probe
  misc_feature (1)..(25): SEQ ID NO: 5807; WAN024BDN; Start 24; Stop 48
aatcagtctccaaatcaaacagtct

SEQ ID NO: 422062 - DNA, 25 bp, Artificial
  probe
  misc_feature (1)..(25): SEQ ID NO: 5807; WAN024BDN; Start 23; Stop 47
aaatcagtctccaaatcaaacagtc

SEQ ID NO: 422063 - DNA, 25 bp, Artificial
  probe
  misc_feature (1)..(25): SEQ ID NO: 5807; WAN024BDN; Start 72; Stop 96
ccatatcagggagatagtcataagc

SEQ ID NO: 422064 - DNA, 25 bp, Artificial
  probe
  misc_feature (1)..(25): SEQ ID NO: 5807; WAN024BDN; Start 71; Stop 95
gccatatcagggagatagtcataag

SEQ ID NO: 422065 - DNA, 25 bp, Artificial
  probe
  misc_feature (1)..(25): SEQ ID NO: 5807; WAN024BDN; Start 69; Stop 93
atgccatatcagggagatagtcata

SEQ ID NO: 422066 - DNA, 25 bp, Artificial
  probe
  misc_feature (1)..(25): SEQ ID NO: 5807; WAN024BDN; Start 70; Stop 94
tgccatatcagggagatagtcataa

SEQ ID NO: 422067 - DNA, 25 bp, Artificial
  probe
  misc_feature (1)..(25): SEQ ID NO: 5807; WAN024BDN; Start 66; Stop 90
tagatgccatatcagggagatagtc

SEQ ID NO: 422068 - DNA, 25 bp, Artificial
  probe
  misc_feature (1)..(25): SEQ ID NO: 5807; WAN024BDN; Start 65; Stop 89
ctagatgccatatcagggagatagt

SEQ ID NO: 422069 - DNA, 25 bp, Artificial
  probe
  misc_feature (1)..(25): SEQ ID NO: 5807; WAN024BDN; Start 68; Stop 92
gatgccatatcagggagatagtcat

SEQ ID NO: 422070 - DNA, 25 bp, Artificial
  probe
  misc_feature (1)..(25): SEQ ID NO: 5807; WAN024BDN; Start 25; Stop 49
atcagtctccaaatcaaacagtctg

SEQ ID NO: 422071 - DNA, 25 bp, Artificial
  probe
  misc_feature (1)..(25): SEQ ID NO: 5807; WAN024BDN; Start 202; Stop 226
cgtcaaggtcttcatagctttaaat

SEQ ID NO: 422072 - DNA, 25 bp, Artificial
  probe
  misc_feature (1)..(25): SEQ ID NO: 5807; WAN024BDN; Start 64; Stop 88
gctagatgccatatcagggagatag

SEQ ID NO: 422073 - DNA, 25 bp, Artificial
  probe
  misc_feature (1)..(25): SEQ ID NO: 5807; WAN024BDN; Start 211; Stop 235
cttcatagctttaaatgtttctggc

SEQ ID NO: 422074 - DNA, 25 bp, Artificial
  probe
  misc_feature (1)..(25): SEQ ID NO: 5807; WAN024BDN; Start 67; Stop 91
agatgccatatcagggagatagtca

SEQ ID NO: 422075 - DNA, 25 bp, Artificial
  probe
  misc_feature (1)..(25): SEQ ID NO: 5807; WAN024BDN; Start 219; Stop 243
ctttaaatgtttctggctcaagtgc

SEQ ID NO: 422076 - DNA, 25 bp, Artificial
  probe
  misc_feature (1)..(25): SEQ ID NO: 5807; WAN024BDN; Start 218; Stop 242
gctttaaatgtttctggctcaagtg

SEQ ID NO: 422077 - DNA, 25 bp, Artificial
  probe
  misc_feature (1)..(25): SEQ ID NO: 5807; WAN024BDN; Start 135; Stop 159
atggagccagcaagagtttatcaaa

SEQ ID NO: 422078 - DNA, 25 bp, Artificial
  probe
  misc_feature (1)..(25): SEQ ID NO: 5807; WAN024BDN; Start 134; Stop 158
aatggagccagcaagagtttatcaa

SEQ ID NO: 422079 - DNA, 25 bp, Artificial
  probe
  misc_feature (1)..(25): SEQ ID NO: 5807; WAN024BDN; Start 133; Stop 157
aaatggagccagcaagagtttatca

SEQ ID NO: 422080 - DNA, 25 bp, Artificial
  probe
  misc_feature (1)..(25): SEQ ID NO: 5807; WAN024BDN; Start 204; Stop 228
tcaaggtcttcatagctttaaatgt

SEQ ID NO: 422081 - DNA, 25 bp, Artificial
  probe
  misc_feature (1)..(25): SEQ ID NO: 5807; WAN024BDN; Start 201; Stop 225
gcgtcaaggtcttcatagctttaaa

SEQ ID NO: 422082 - DNA, 25 bp, Artificial
  probe
  misc_feature (1)..(25): SEQ ID NO: 5807; WAN024BDN; Start 163; Stop 187
gacgaaggtacgctctacagaaatt

SEQ ID NO: 422083 - DNA, 25 bp, Artificial
  probe
  misc_feature (1)..(25): SEQ ID NO: 5807; WAN024BDN; Start 73; Stop 97
catatcagggagatagtcataagct

SEQ ID NO: 422084 - DNA, 25 bp, Artificial
  probe
  misc_feature (1)..(25): SEQ ID NO: 5807; WAN024BDN; Start 203; Stop 227
gtcaaggtcttcatagctttaaatg

SEQ ID NO: 422085 - DNA, 25 bp, Artificial
  probe
  misc_feature (1)..(25): SEQ ID NO: 5807; WAN024BDN; Start 222; Stop 246
taaatgtttctggctcaagtgcaaa

SEQ ID NO: 422086 - DNA, 25 bp, Artificial
  probe
  misc_feature (1)..(25): SEQ ID NO: 5807; WAN024BDN; Start 221; Stop 245
ttaaatgtttctggctcaagtgcaa

SEQ ID NO: 422087 - DNA, 25 bp, Artificial
  probe
  misc_feature (1)..(25): SEQ ID NO: 5807; WAN024BDN; Start 220; Stop 244
tttaaatgtttctggctcaagtgca

SEQ ID NO: 422088 - DNA, 25 bp, Artificial
  probe
  misc_feature (1)..(25): SEQ ID NO: 5807; WAN024BDN; Start 205; Stop 229
caaggtcttcatagctttaaatgtt

SEQ ID NO: 422089 - DNA, 25 bp, Artificial
  probe
  misc_feature (1)..(25): SEQ ID NO: 5807; WAN024BDN; Start 22; Stop 46
aaaatcagtctccaaatcaaacagt

SEQ ID NO: 422090 - DNA, 25 bp, Artificial
  probe
  misc_feature (1)..(25): SEQ ID NO: 5807; WAN024BDN; Start 26; Stop 50
tcagtctccaaatcaaacagtctgt

SEQ ID NO: 422091 - DNA, 25 bp, Artificial
  probe
  misc_feature (1)..(25): SEQ ID NO: 5807; WAN024BDN; Start 210; Stop 234
tcttcatagctttaaatgtttctgg

SEQ ID NO: 422092 - DNA, 25 bp, Artificial
  probe
  misc_feature (1)..(25): SEQ ID NO: 5807; WAN024BDN; Start 208; Stop 232
ggtcttcatagctttaaatgtttct

SEQ ID NO: 422093 - DNA, 25 bp, Artificial
  probe
  misc_feature (1)..(25): SEQ ID NO: 5807; WAN024BDN; Start 207; Stop 231
aggtcttcatagctttaaatgtttc

SEQ ID NO: 422094 - DNA, 25 bp, Artificial
  probe
  misc_feature (1)..(25): SEQ ID NO: 5808; WAN024DPY; Start 44; Stop 68
atacgtctagtttagccttaaagca

SEQ ID NO: 422095 - DNA, 25 bp, Artificial
  probe
  misc_feature (1)..(25): SEQ ID NO: 5808; WAN024DPY; Start 45; Stop 69
tacgtctagtttagccttaaagcag

SEQ ID NO: 422096 - DNA, 25 bp, Artificial
  probe
  misc_feature (1)..(25): SEQ ID NO: 5808; WAN024DPY; Start 43; Stop 67
gatacgtctagtttagccttaaagc

SEQ ID NO: 422097 - DNA, 25 bp, Artificial
  probe
  misc_feature (1)..(25): SEQ ID NO: 5808; WAN024DPY; Start 38; Stop 62
actttgatacgtctagtttagcctt

SEQ ID NO: 422098 - DNA, 25 bp, Artificial
  probe
  misc_feature (1)..(25): SEQ ID NO: 5808; WAN024DPY; Start 95; Stop 119
gagaaggaagtagatttatctgtct

SEQ ID NO: 422099 - DNA, 25 bp, Artificial
  probe
  misc_feature (1)..(25): SEQ ID NO: 5808; WAN024DPY; Start 94; Stop 118
agagaaggaagtagatttatctgtc

SEQ ID NO: 422100 - DNA, 25 bp, Artificial
  probe
  misc_feature (1)..(25): SEQ ID NO: 5808; WAN024DPY; Start 39; Stop 63
ctttgatacgtctagtttagcctta

SEQ ID NO: 422101 - DNA, 25 bp, Artificial
  probe
  misc_feature (1)..(25): SEQ ID NO: 5808; WAN024DPY; Start 42; Stop 66
tgatacgtctagtttagccttaaag

SEQ ID NO: 422102 - DNA, 25 bp, Artificial
  probe
  misc_feature (1)..(25): SEQ ID NO: 5808; WAN024DPY; Start 93; Stop 117
aagagaaggaagtagatttatctgt

SEQ ID NO: 422103 - DNA, 25 bp, Artificial
  probe
  misc_feature (1)..(25): SEQ ID NO: 5808; WAN024DPY; Start 40; Stop 64
tttgatacgtctagtttagccttaa

SEQ ID NO: 422104 - DNA, 25 bp, Artificial
  probe
  misc_feature (1)..(25): SEQ ID NO: 5808; WAN024DPY; Start 41; Stop 65
ttgatacgtctagtttagccttaaa

SEQ ID NO: 422105 - DNA, 25 bp, Artificial
  probe
  misc_feature (1)..(25): SEQ ID NO: 5808; WAN024DPY; Start 30; Stop 54
aactcttaactttgatacgtctagt

SEQ ID NO: 422106 - DNA, 25 bp, Artificial
  probe
  misc_feature (1)..(25): SEQ ID NO: 5808; WAN024DPY; Start 2; Stop 26
tgttcatctctttccagttacaaaa

SEQ ID NO: 422107 - DNA, 25 bp, Artificial
  probe
  misc_feature (1)..(25): SEQ ID NO: 5808; WAN024DPY; Start 1; Stop 25
ttgttcatctctttccagttacaaa

SEQ ID NO: 422108 - DNA, 25 bp, Artificial
  probe
  misc_feature (1)..(25): SEQ ID NO: 5808; WAN024DPY; Start 37; Stop 61
aactttgatacgtctagtttagcct

SEQ ID NO: 422109 - DNA, 25 bp, Artificial
  probe
  misc_feature (1)..(25): SEQ ID NO: 5808; WAN024DPY; Start 46; Stop 70
acgtctagtttagccttaaagcagg

SEQ ID NO: 422110 - DNA, 25 bp, Artificial
  probe
  misc_feature (1)..(25): SEQ ID NO: 5808; WAN024DPY; Start 29; Stop 53
aaactcttaactttgatacgtctag

SEQ ID NO: 422111 - DNA, 25 bp, Artificial
  probe
  misc_feature (1)..(25): SEQ ID NO: 5808; WAN024DPY; Start 27; Stop 51
acaaactcttaactttgatacgtct

SEQ ID NO: 422112 - DNA, 25 bp, Artificial
  probe
  misc_feature (1)..(25): SEQ ID NO: 5808; WAN024DPY; Start 36; Stop 60
taactttgatacgtctagtttagcc

SEQ ID NO: 422113 - DNA, 25 bp, Artificial
  probe
  misc_feature (1)..(25): SEQ ID NO: 5808; WAN024DPY; Start 68; Stop 92
aggcgcatttcaagaatcataaatt

SEQ ID NO: 422114 - DNA, 25 bp, Artificial
  probe
  misc_feature (1)..(25): SEQ ID NO: 5808; WAN024DPY; Start 96; Stop 120
agaaggaagtagatttatctgtcta

SEQ ID NO: 422115 - DNA, 25 bp, Artificial
  probe
  misc_feature (1)..(25): SEQ ID NO: 5808; WAN024DPY; Start 26; Stop 50
aacaaactcttaactttgatacgtc

SEQ ID NO: 422116 - DNA, 25 bp, Artificial
  probe
  misc_feature (1)..(25): SEQ ID NO: 5808; WAN024DPY; Start 71; Stop 95
cgcatttcaagaatcataaattaag

SEQ ID NO: 422117 - DNA, 25 bp, Artificial
  probe
  misc_feature (1)..(25): SEQ ID NO: 5808; WAN024DPY; Start 67; Stop 91
caggcgcatttcaagaatcataaat

SEQ ID NO: 422118 - DNA, 25 bp, Artificial
  probe
  misc_feature (1)..(25): SEQ ID NO: 5808; WAN024DPY; Start 69; Stop 93
ggcgcatttcaagaatcataaatta

SEQ ID NO: 422119 - DNA, 25 bp, Artificial
  probe
  misc_feature (1)..(25): SEQ ID NO: 5808; WAN024DPY; Start 25; Stop 49
aaacaaactcttaactttgatacgt

SEQ ID NO: 422120 - DNA, 25 bp, Artificial
  probe
  misc_feature (1)..(25): SEQ ID NO: 5808; WAN024DPY; Start 31; Stop 55
actcttaactttgatacgtctagtt

SEQ ID NO: 422121 - DNA, 25 bp, Artificial
  probe
  misc_feature (1)..(25): SEQ ID NO: 5808; WAN024DPY; Start 92; Stop 116
taagagaaggaagtagatttatctg

SEQ ID NO: 422122 - DNA, 25 bp, Artificial
  probe
  misc_feature (1)..(25): SEQ ID NO: 5808; WAN024DPY; Start 28; Stop 52
caaactcttaactttgatacgtcta

SEQ ID NO: 422123 - DNA, 25 bp, Artificial
  probe
  misc_feature (1)..(25): SEQ ID NO: 5808; WAN024DPY; Start 66; Stop 90
gcaggcgcatttcaagaatcataaa

SEQ ID NO: 422124 - DNA, 25 bp, Artificial
  probe
  misc_feature (1)..(25): SEQ ID NO: 5808; WAN024DPY; Start 61; Stop 85
ttaaagcaggcgcatttcaagaatc

SEQ ID NO: 422125 - DNA, 25 bp, Artificial
  probe
  misc_feature (1)..(25): SEQ ID NO: 5808; WAN024DPY; Start 35; Stop 59
ttaactttgatacgtctagtttagc

SEQ ID NO: 422126 - DNA, 25 bp, Artificial
  probe
  misc_feature (1)..(25): SEQ ID NO: 5808; WAN024DPY; Start 60; Stop 84
cttaaagcaggcgcatttcaagaat

SEQ ID NO: 422127 - DNA, 25 bp, Artificial
  probe
  misc_feature (1)..(25): SEQ ID NO: 5809; WAN024DNW; Start 5; Stop 29
tcatggtagggacttatgaaagctt

SEQ ID NO: 422128 - DNA, 25 bp, Artificial
  probe
  misc_feature (1)..(25): SEQ ID NO: 5809; WAN024DNW; Start 2; Stop 26
tgttcatggtagggacttatgaaag

SEQ ID NO: 422129 - DNA, 25 bp, Artificial
  probe
  misc_feature (1)..(25): SEQ ID NO: 5809; WAN024DNW; Start 1; Stop 25
ttgttcatggtagggacttatgaaa

SEQ ID NO: 422130 - DNA, 25 bp, Artificial
  probe
  misc_feature (1)..(25): SEQ ID NO: 5809; WAN024DNW; Start 4; Stop 28
ttcatggtagggacttatgaaagct

SEQ ID NO: 422131 - DNA, 25 bp, Artificial
  probe
  misc_feature (1)..(25): SEQ ID NO: 5809; WAN024DNW; Start 3; Stop 27
gttcatggtagggacttatgaaagc

SEQ ID NO: 422132 - DNA, 25 bp, Artificial
  probe
  misc_feature (1)..(25): SEQ ID NO: 5809; WAN024DNW; Start 61; Stop 85
aaaatgatggaggagcaaacatggc

SEQ ID NO: 422133 - DNA, 25 bp, Artificial
  probe
  misc_feature (1)..(25): SEQ ID NO: 5809; WAN024DNW; Start 39; Stop 63
aaaagaaaacagtttacaaagaaaa

SEQ ID NO: 422134 - DNA, 25 bp, Artificial
  probe
  misc_feature (1)..(25): SEQ ID NO: 5810; WAN024FIS; Start 325; Stop 349
ttcacgaagagcctccttaatcaag

SEQ ID NO: 422135 - DNA, 25 bp, Artificial
  probe
  misc_feature (1)..(25): SEQ ID NO: 5810; WAN024FIS; Start 82; Stop 106
tctatcacaattatacacagcttgc

SEQ ID NO: 422136 - DNA, 25 bp, Artificial
  probe
  misc_feature (1)..(25): SEQ ID NO: 5810; WAN024FIS; Start 341; Stop 365
ttaatcaagtcagcactggttccat

SEQ ID NO: 422137 - DNA, 25 bp, Artificial
  probe
  misc_feature (1)..(25): SEQ ID NO: 5810; WAN024FIS; Start 181; Stop 205
agatacctgtgtcaactgaggattg

SEQ ID NO: 422138 - DNA, 25 bp, Artificial
  probe
  misc_feature (1)..(25): SEQ ID NO: 5810; WAN024FIS; Start 180; Stop 204
cagatacctgtgtcaactgaggatt

SEQ ID NO: 422139 - DNA, 25 bp, Artificial
  probe
  misc_feature (1)..(25): SEQ ID NO: 5810; WAN024FIS; Start 83; Stop 107
ctatcacaattatacacagcttgca

SEQ ID NO: 422140 - DNA, 25 bp, Artificial
  probe
  misc_feature (1)..(25): SEQ ID NO: 5810; WAN024FIS; Start 329; Stop 353
cgaagagcctccttaatcaagtcag

SEQ ID NO: 422141 - DNA, 25 bp, Artificial
  probe
  misc_feature (1)..(25): SEQ ID NO: 5810; WAN024FIS; Start 324; Stop 348
cttcacgaagagcctccttaatcaa

SEQ ID NO: 422142 - DNA, 25 bp, Artificial
  probe
  misc_feature (1)..(25): SEQ ID NO: 5810; WAN024FIS; Start 338; Stop 362
tccttaatcaagtcagcactggttc

SEQ ID NO: 422143 - DNA, 25 bp, Artificial
  probe
  misc_feature (1)..(25): SEQ ID NO: 5810; WAN024FIS; Start 337; Stop 361
ctccttaatcaagtcagcactggtt

SEQ ID NO: 422144 - DNA, 25 bp, Artificial
  probe
  misc_feature (1)..(25): SEQ ID NO: 5810; WAN024FIS; Start 109; Stop 133
atcttactcggatttcaagcctact

SEQ ID NO: 422145 - DNA, 25 bp, Artificial
  probe
  misc_feature (1)..(25): SEQ ID NO: 5810; WAN024FIS; Start 330; Stop 354
gaagagcctccttaatcaagtcagc

SEQ ID NO: 422146 - DNA, 25 bp, Artificial
  probe
  misc_feature (1)..(25): SEQ ID NO: 5810; WAN024FIS; Start 327; Stop 351
cacgaagagcctccttaatcaagtc

SEQ ID NO: 422147 - DNA, 25 bp, Artificial
  probe
  misc_feature (1)..(25): SEQ ID NO: 5810; WAN024FIS; Start 110; Stop 134
tcttactcggatttcaagcctactt

SEQ ID NO: 422148 - DNA, 25 bp, Artificial
  probe
  misc_feature (1)..(25): SEQ ID NO: 5810; WAN024FIS; Start 342; Stop 366
taatcaagtcagcactggttccatc

SEQ ID NO: 422149 - DNA, 25 bp, Artificial
  probe
  misc_feature (1)..(25): SEQ ID NO: 5810; WAN024FIS; Start 340; Stop 364
cttaatcaagtcagcactggttcca

SEQ ID NO: 422150 - DNA, 25 bp, Artificial
  probe
  misc_feature (1)..(25): SEQ ID NO: 5810; WAN024FIS; Start 328; Stop 352
acgaagagcctccttaatcaagtca

SEQ ID NO: 422151 - DNA, 25 bp, Artificial
  probe
  misc_feature (1)..(25): SEQ ID NO: 5810; WAN024FIS; Start 326; Stop 350
tcacgaagagcctccttaatcaagt

SEQ ID NO: 422152 - DNA, 25 bp, Artificial
  probe
  misc_feature (1)..(25): SEQ ID NO: 5810; WAN024FIS; Start 339; Stop 363
ccttaatcaagtcagcactggttcc

SEQ ID NO: 422153 - DNA, 25 bp, Artificial
  probe
  misc_feature (1)..(25): SEQ ID NO: 5810; WAN024FIS; Start 331; Stop 355
aagagcctccttaatcaagtcagca

SEQ ID NO: 422154 - DNA, 25 bp, Artificial
  probe
  misc_feature (1)..(25): SEQ ID NO: 5810; WAN024FIS; Start 108; Stop 132
aatcttactcggatttcaagcctac

SEQ ID NO: 422155 - DNA, 25 bp, Artificial
  probe
  misc_feature (1)..(25): SEQ ID NO: 5810; WAN024FIS; Start 193; Stop 217
caactgaggattgcttgcttctctt

SEQ ID NO: 422156 - DNA, 25 bp, Artificial
  probe
  misc_feature (1)..(25): SEQ ID NO: 5810; WAN024FIS; Start 81; Stop 105
ttctatcacaattatacacagcttg

SEQ ID NO: 422157 - DNA, 25 bp, Artificial
  probe
  misc_feature (1)..(25): SEQ ID NO: 5810; WAN024FIS; Start 182; Stop 206
gatacctgtgtcaactgaggattgc

SEQ ID NO: 422158 - DNA, 25 bp, Artificial
  probe
  misc_feature (1)..(25): SEQ ID NO: 5810; WAN024FIS; Start 236; Stop 260
atttgagccacactcttgattcctt

SEQ ID NO: 422159 - DNA, 25 bp, Artificial
  probe
  misc_feature (1)..(25): SEQ ID NO: 5810; WAN024FIS; Start 235; Stop 259
aatttgagccacactcttgattcct

SEQ ID NO: 422160 - DNA, 25 bp, Artificial
  probe
  misc_feature (1)..(25): SEQ ID NO: 5810; WAN024FIS; Start 234; Stop 258
caatttgagccacactcttgattcc

SEQ ID NO: 422161 - DNA, 25 bp, Artificial
  probe
  misc_feature (1)..(25): SEQ ID NO: 5810; WAN024FIS; Start 285; Stop 309
cctgaatgtacttccagtttggttt

SEQ ID NO: 422162 - DNA, 25 bp, Artificial
  probe
  misc_feature (1)..(25): SEQ ID NO: 5810; WAN024FIS; Start 239; Stop 263
tgagccacactcttgattccttcat

SEQ ID NO: 422163 - DNA, 25 bp, Artificial
  probe
  misc_feature (1)..(25): SEQ ID NO: 5810; WAN024FIS; Start 240; Stop 264
gagccacactcttgattccttcatg

SEQ ID NO: 422164 - DNA, 25 bp, Artificial
  probe
  misc_feature (1)..(25): SEQ ID NO: 5810; WAN024FIS; Start 183; Stop 207
atacctgtgtcaactgaggattgct

SEQ ID NO: 422165 - DNA, 25 bp, Artificial
  probe
  misc_feature (1)..(25): SEQ ID NO: 5810; WAN024FIS; Start 191; Stop 215
gtcaactgaggattgcttgcttctc

SEQ ID NO: 422166 - DNA, 25 bp, Artificial
  probe
  misc_feature (1)..(25): SEQ ID NO: 5810; WAN024FIS; Start 332; Stop 356
agagcctccttaatcaagtcagcac

SEQ ID NO: 422167 - DNA, 25 bp, Artificial
  probe
  misc_feature (1)..(25): SEQ ID NO: 5811; WAN024GHH; Start 123; Stop 147
atttctcttctacttgaactgcctt

SEQ ID NO: 422168 - DNA, 25 bp, Artificial
  probe
  misc_feature (1)..(25): SEQ ID NO: 5811; WAN024GHH; Start 124; Stop 148
tttctcttctacttgaactgccttt

SEQ ID NO: 422169 - DNA, 25 bp, Artificial
  probe
  misc_feature (1)..(25): SEQ ID NO: 5811; WAN024GHH; Start 122; Stop 146
aatttctcttctacttgaactgcct

SEQ ID NO: 422170 - DNA, 25 bp, Artificial
  probe
  misc_feature (1)..(25): SEQ ID NO: 5811; WAN024GHH; Start 24; Stop 48
cacgcataatacggtcaaattcttc

SEQ ID NO: 422171 - DNA, 25 bp, Artificial
  probe
  misc_feature (1)..(25): SEQ ID NO: 5811; WAN024GHH; Start 22; Stop 46
atcacgcataatacggtcaaattct

SEQ ID NO: 422172 - DNA, 25 bp, Artificial
  probe
  misc_feature (1)..(25): SEQ ID NO: 5811; WAN024GHH; Start 21; Stop 45
catcacgcataatacggtcaaattc

SEQ ID NO: 422173 - DNA, 25 bp, Artificial
  probe
  misc_feature (1)..(25): SEQ ID NO: 5811; WAN024GHH; Start 23; Stop 47
tcacgcataatacggtcaaattctt

SEQ ID NO: 422174 - DNA, 25 bp, Artificial
  probe
  misc_feature (1)..(25): SEQ ID NO: 5811; WAN024GHH; Start 121; Stop 145
caatttctcttctacttgaactgcc

SEQ ID NO: 422175 - DNA, 25 bp, Artificial
  probe
  misc_feature (1)..(25): SEQ ID NO: 5811; WAN024GHH; Start 120; Stop 144
ccaatttctcttctacttgaactgc

SEQ ID NO: 422176 - DNA, 25 bp, Artificial
  probe
  misc_feature (1)..(25): SEQ ID NO: 5811; WAN024GHH; Start 119; Stop 143
gccaatttctcttctacttgaactg

SEQ ID NO: 422177 - DNA, 25 bp, Artificial
  probe
  misc_feature (1)..(25): SEQ ID NO: 5811; WAN024GHH; Start 253; Stop 277
ttcttggaaggcaatcaattctttg

SEQ ID NO: 422178 - DNA, 25 bp, Artificial
  probe
  misc_feature (1)..(25): SEQ ID NO: 5811; WAN024GHH; Start 20; Stop 44
acatcacgcataatacggtcaaatt

SEQ ID NO: 422179 - DNA, 25 bp, Artificial
  probe
  misc_feature (1)..(25): SEQ ID NO: 5811; WAN024GHH; Start 10; Stop 34
gatttcagccacatcacgcataata

SEQ ID NO: 422180 - DNA, 25 bp, Artificial
  probe
  misc_feature (1)..(25): SEQ ID NO: 5811; WAN024GHH; Start 19; Stop 43
cacatcacgcataatacggtcaaat

SEQ ID NO: 422181 - DNA, 25 bp, Artificial
  probe
  misc_feature (1)..(25): SEQ ID NO: 5811; WAN024GHH; Start 11; Stop 35
atttcagccacatcacgcataatac

SEQ ID NO: 422182 - DNA, 25 bp, Artificial
  probe
  misc_feature (1)..(25): SEQ ID NO: 5811; WAN024GHH; Start 25; Stop 49
acgcataatacggtcaaattcttcg

SEQ ID NO: 422183 - DNA, 25 bp, Artificial
  probe
  misc_feature (1)..(25): SEQ ID NO: 5811; WAN024GHH; Start 251; Stop 275
tcttcttggaaggcaatcaattctt

SEQ ID NO: 422184 - DNA, 25 bp, Artificial
  probe
  misc_feature (1)..(25): SEQ ID NO: 5811; WAN024GHH; Start 250; Stop 274
ttcttcttggaaggcaatcaattct

SEQ ID NO: 422185 - DNA, 25 bp, Artificial
  probe
  misc_feature (1)..(25): SEQ ID NO: 5811; WAN024GHH; Start 9; Stop 33
agatttcagccacatcacgcataat

SEQ ID NO: 422186 - DNA, 25 bp, Artificial
  probe
  misc_feature (1)..(25): SEQ ID NO: 5811; WAN024GHH; Start 8; Stop 32
aagatttcagccacatcacgcataa

SEQ ID NO: 422187 - DNA, 25 bp, Artificial
  probe
  misc_feature (1)..(25): SEQ ID NO: 5811; WAN024GHH; Start 125; Stop 149
ttctcttctacttgaactgcctttt

SEQ ID NO: 422188 - DNA, 25 bp, Artificial
  probe
  misc_feature (1)..(25): SEQ ID NO: 5811; WAN024GHH; Start 126; Stop 150
tctcttctacttgaactgccttttg

SEQ ID NO: 422189 - DNA, 25 bp, Artificial
  probe
  misc_feature (1)..(25): SEQ ID NO: 5811; WAN024GHH; Start 28; Stop 52
cataatacggtcaaattcttcgtgg

SEQ ID NO: 422190 - DNA, 25 bp, Artificial
  probe
  misc_feature (1)..(25): SEQ ID NO: 5811; WAN024GHH; Start 29; Stop 53
ataatacggtcaaattcttcgtggt

SEQ ID NO: 422191 - DNA, 25 bp, Artificial
  probe
  misc_feature (1)..(25): SEQ ID NO: 5811; WAN024GHH; Start 18; Stop 42
ccacatcacgcataatacggtcaaa

SEQ ID NO: 422192 - DNA, 25 bp, Artificial
  probe
  misc_feature (1)..(25): SEQ ID NO: 5811; WAN024GHH; Start 1; Stop 25
ttgttccaagatttcagccacatca

SEQ ID NO: 422193 - DNA, 25 bp, Artificial
  probe
  misc_feature (1)..(25): SEQ ID NO: 5811; WAN024GHH; Start 27; Stop 51
gcataatacggtcaaattcttcgtg

SEQ ID NO: 422194 - DNA, 25 bp, Artificial
  probe
  misc_feature (1)..(25): SEQ ID NO: 5811; WAN024GHH; Start 255; Stop 279
cttggaaggcaatcaattctttgac

SEQ ID NO: 422195 - DNA, 25 bp, Artificial
  probe
  misc_feature (1)..(25): SEQ ID NO: 5811; WAN024GHH; Start 254; Stop 278
tcttggaaggcaatcaattctttga

SEQ ID NO: 422196 - DNA, 25 bp, Artificial
  probe
  misc_feature (1)..(25): SEQ ID NO: 5811; WAN024GHH; Start 247; Stop 271
gatttcttcttggaaggcaatcaat

SEQ ID NO: 422197 - DNA, 25 bp, Artificial
  probe
  misc_feature (1)..(25): SEQ ID NO: 5811; WAN024GHH; Start 252; Stop 276
cttcttggaaggcaatcaattcttt

SEQ ID NO: 422198 - DNA, 25 bp, Artificial
  probe
  misc_feature (1)..(25): SEQ ID NO: 5811; WAN024GHH; Start 249; Stop 273
tttcttcttggaaggcaatcaattc

SEQ ID NO: 422199 - DNA, 25 bp, Artificial
  probe
  misc_feature (1)..(25): SEQ ID NO: 5811; WAN024GHH; Start 248; Stop 272
atttcttcttggaaggcaatcaatt

SEQ ID NO: 422200 - DNA, 25 bp, Artificial
  probe
  misc_feature (1)..(25): SEQ ID NO: 5812; WAN024GIV; Start 134; Stop 158
gtgtccataatgttgatacgagttc

SEQ ID NO: 422201 - DNA, 25 bp, Artificial
  probe
  misc_feature (1)..(25): SEQ ID NO: 5812; WAN024GIV; Start 133; Stop 157
tgtgtccataatgttgatacgagtt

SEQ ID NO: 422202 - DNA, 25 bp, Artificial
  probe
  misc_feature (1)..(25): SEQ ID NO: 5812; WAN024GIV; Start 135; Stop 159
tgtccataatgttgatacgagttcc

SEQ ID NO: 422203 - DNA, 25 bp, Artificial
  probe
  misc_feature (1)..(25): SEQ ID NO: 5812; WAN024GIV; Start 132; Stop 156
gtgtgtccataatgttgatacgagt

SEQ ID NO: 422204 - DNA, 25 bp, Artificial
  probe
  misc_feature (1)..(25): SEQ ID NO: 5812; WAN024GIV; Start 131; Stop 155
ggtgtgtccataatgttgatacgag

SEQ ID NO: 422205 - DNA, 25 bp, Artificial
  probe
  misc_feature (1)..(25): SEQ ID NO: 5812; WAN024GIV; Start 136; Stop 160
gtccataatgttgatacgagttccg

SEQ ID NO: 422206 - DNA, 25 bp, Artificial
  probe
  misc_feature (1)..(25): SEQ ID NO: 5812; WAN024GIV; Start 48; Stop 72
cttcataggcatctacgaccaagac

SEQ ID NO: 422207 - DNA, 25 bp, Artificial
  probe
  misc_feature (1)..(25): SEQ ID NO: 5812; WAN024GIV; Start 128; Stop 152
cctggtgtgtccataatgttgatac

SEQ ID NO: 422208 - DNA, 25 bp, Artificial
  probe
  misc_feature (1)..(25): SEQ ID NO: 5812; WAN024GIV; Start 127; Stop 151
tcctggtgtgtccataatgttgata

SEQ ID NO: 422209 - DNA, 25 bp, Artificial
  probe
  misc_feature (1)..(25): SEQ ID NO: 5812; WAN024GIV; Start 129; Stop 153
ctggtgtgtccataatgttgatacg

SEQ ID NO: 422210 - DNA, 25 bp, Artificial
  probe
  misc_feature (1)..(25): SEQ ID NO: 5812; WAN024GIV; Start 130; Stop 154
tggtgtgtccataatgttgatacga

SEQ ID NO: 422211 - DNA, 25 bp, Artificial
  probe
  misc_feature (1)..(25): SEQ ID NO: 5812; WAN024GIV; Start 51; Stop 75
cataggcatctacgaccaagacaac

SEQ ID NO: 422212 - DNA, 25 bp, Artificial
  probe
  misc_feature (1)..(25): SEQ ID NO: 5812; WAN024GIV; Start 50; Stop 74
tcataggcatctacgaccaagacaa

SEQ ID NO: 422213 - DNA, 25 bp, Artificial
  probe
  misc_feature (1)..(25): SEQ ID NO: 5812; WAN024GIV; Start 49; Stop 73
ttcataggcatctacgaccaagaca

SEQ ID NO: 422214 - DNA, 25 bp, Artificial
  probe
  misc_feature (1)..(25): SEQ ID NO: 5812; WAN024GIV; Start 141; Stop 165
taatgttgatacgagttccgttgta

SEQ ID NO: 422215 - DNA, 25 bp, Artificial
  probe
  misc_feature (1)..(25): SEQ ID NO: 5812; WAN024GIV; Start 139; Stop 163
cataatgttgatacgagttccgttg

SEQ ID NO: 422216 - DNA, 25 bp, Artificial
  probe
  misc_feature (1)..(25): SEQ ID NO: 5812; WAN024GIV; Start 140; Stop 164
ataatgttgatacgagttccgttgt

SEQ ID NO: 422217 - DNA, 25 bp, Artificial
  probe
  misc_feature (1)..(25): SEQ ID NO: 5812; WAN024GIV; Start 142; Stop 166
aatgttgatacgagttccgttgtaa

SEQ ID NO: 422218 - DNA, 25 bp, Artificial
  probe
  misc_feature (1)..(25): SEQ ID NO: 5812; WAN024GIV; Start 52; Stop 76
ataggcatctacgaccaagacaaca

SEQ ID NO: 422219 - DNA, 25 bp, Artificial
  probe
  misc_feature (1)..(25): SEQ ID NO: 5812; WAN024GIV; Start 143; Stop 167
atgttgatacgagttccgttgtaag

SEQ ID NO: 422220 - DNA, 25 bp, Artificial
  probe
  misc_feature (1)..(25): SEQ ID NO: 5812; WAN024GIV; Start 138; Stop 162
ccataatgttgatacgagttccgtt

SEQ ID NO: 422221 - DNA, 25 bp, Artificial
  probe
  misc_feature (1)..(25): SEQ ID NO: 5812; WAN024GIV; Start 126; Stop 150
gtcctggtgtgtccataatgttgat

SEQ ID NO: 422222 - DNA, 25 bp, Artificial
  probe
  misc_feature (1)..(25): SEQ ID NO: 5812; WAN024GIV; Start 41; Stop 65
atggttccttcataggcatctacga

SEQ ID NO: 422223 - DNA, 25 bp, Artificial
  probe
  misc_feature (1)..(25): SEQ ID NO: 5812; WAN024GIV; Start 137; Stop 161
tccataatgttgatacgagttccgt

SEQ ID NO: 422224 - DNA, 25 bp, Artificial
  probe
  misc_feature (1)..(25): SEQ ID NO: 5812; WAN024GIV; Start 45; Stop 69
ttccttcataggcatctacgaccaa

SEQ ID NO: 422225 - DNA, 25 bp, Artificial
  probe
  misc_feature (1)..(25): SEQ ID NO: 5812; WAN024GIV; Start 40; Stop 64
catggttccttcataggcatctacg

SEQ ID NO: 422226 - DNA, 25 bp, Artificial
  probe
  misc_feature (1)..(25): SEQ ID NO: 5812; WAN024GIV; Start 39; Stop 63
gcatggttccttcataggcatctac

SEQ ID NO: 422227 - DNA, 25 bp, Artificial
  probe
  misc_feature (1)..(25): SEQ ID NO: 5812; WAN024GIV; Start 47; Stop 71
ccttcataggcatctacgaccaaga

SEQ ID NO: 422228 - DNA, 25 bp, Artificial
  probe
  misc_feature (1)..(25): SEQ ID NO: 5812; WAN024GIV; Start 46; Stop 70
tccttcataggcatctacgaccaag

SEQ ID NO: 422229 - DNA, 25 bp, Artificial
  probe
  misc_feature (1)..(25): SEQ ID NO: 5812; WAN024GIV; Start 44; Stop 68
gttccttcataggcatctacgacca

SEQ ID NO: 422230 - DNA, 25 bp, Artificial
  probe
  misc_feature (1)..(25): SEQ ID NO: 5812; WAN024GIV; Start 42; Stop 66
tggttccttcataggcatctacgac

SEQ ID NO: 422231 - DNA, 25 bp, Artificial
  probe
  misc_feature (1)..(25): SEQ ID NO: 5812; WAN024GIV; Start 53; Stop 77
taggcatctacgaccaagacaacac

SEQ ID NO: 422232 - DNA, 25 bp, Artificial
  probe
  misc_feature (1)..(25): SEQ ID NO: 5812; WAN024GIV; Start 146; Stop 170
ttgatacgagttccgttgtaagcaa

SEQ ID NO: 422233 - DNA, 25 bp, Artificial
  probe
  misc_feature (1)..(25): SEQ ID NO: 5813; WAN024DWI; Start 203; Stop 227
tcaatgttgaaggagttagcatagg

SEQ ID NO: 422234 - DNA, 25 bp, Artificial
  probe
  misc_feature (1)..(25): SEQ ID NO: 5813; WAN024DWI; Start 202; Stop 226
ctcaatgttgaaggagttagcatag

SEQ ID NO: 422235 - DNA, 25 bp, Artificial
  probe
  misc_feature (1)..(25): SEQ ID NO: 5813; WAN024DWI; Start 201; Stop 225
cctcaatgttgaaggagttagcata

SEQ ID NO: 422236 - DNA, 25 bp, Artificial
  probe
  misc_feature (1)..(25): SEQ ID NO: 5813; WAN024DWI; Start 206; Stop 230
atgttgaaggagttagcatagggat

SEQ ID NO: 422237 - DNA, 25 bp, Artificial
  probe
  misc_feature (1)..(25): SEQ ID NO: 5813; WAN024DWI; Start 205; Stop 229
aatgttgaaggagttagcataggga

SEQ ID NO: 422238 - DNA, 25 bp, Artificial
  probe
  misc_feature (1)..(25): SEQ ID NO: 5813; WAN024DWI; Start 204; Stop 228
caatgttgaaggagttagcataggg

SEQ ID NO: 422239 - DNA, 25 bp, Artificial
  probe
  misc_feature (1)..(25): SEQ ID NO: 5813; WAN024DWI; Start 191; Stop 215
ttccagttctcctcaatgttgaagg

SEQ ID NO: 422240 - DNA, 25 bp, Artificial
  probe
  misc_feature (1)..(25): SEQ ID NO: 5813; WAN024DWI; Start 190; Stop 214
tttccagttctcctcaatgttgaag

SEQ ID NO: 422241 - DNA, 25 bp, Artificial
  probe
  misc_feature (1)..(25): SEQ ID NO: 5813; WAN024DWI; Start 189; Stop 213
ctttccagttctcctcaatgttgaa

SEQ ID NO: 422242 - DNA, 25 bp, Artificial
  probe
  misc_feature (1)..(25): SEQ ID NO: 5813; WAN024DWI; Start 207; Stop 231
tgttgaaggagttagcatagggatc

SEQ ID NO: 422243 - DNA, 25 bp, Artificial
  probe
  misc_feature (1)..(25): SEQ ID NO: 5813; WAN024DWI; Start 14; Stop 38
cacagatggagaatttccttagtcg

SEQ ID NO: 422244 - DNA, 25 bp, Artificial
  probe
  misc_feature (1)..(25): SEQ ID NO: 5813; WAN024DWI; Start 111; Stop 135
gatagcaaagcgaatccacctcata

SEQ ID NO: 422245 - DNA, 25 bp, Artificial
  probe
  misc_feature (1)..(25): SEQ ID NO: 5813; WAN024DWI; Start 13; Stop 37
ccacagatggagaatttccttagtc

SEQ ID NO: 422246 - DNA, 25 bp, Artificial
  probe
  misc_feature (1)..(25): SEQ ID NO: 5813; WAN024DWI; Start 112; Stop 136
atagcaaagcgaatccacctcatac

SEQ ID NO: 422247 - DNA, 25 bp, Artificial
  probe
  misc_feature (1)..(25): SEQ ID NO: 5813; WAN024DWI; Start 91; Stop 115
gagataagccaactgcaaaggatag

SEQ ID NO: 422248 - DNA, 25 bp, Artificial
  probe
  misc_feature (1)..(25): SEQ ID NO: 5813; WAN024DWI; Start 188; Stop 212
cctttccagttctcctcaatgttga

SEQ ID NO: 422249 - DNA, 25 bp, Artificial
  probe
  misc_feature (1)..(25): SEQ ID NO: 5813; WAN024DWI; Start 17; Stop 41
agatggagaatttccttagtcgctg

SEQ ID NO: 422250 - DNA, 25 bp, Artificial
  probe
  misc_feature (1)..(25): SEQ ID NO: 5813; WAN024DWI; Start 16; Stop 40
cagatggagaatttccttagtcgct

SEQ ID NO: 422251 - DNA, 25 bp, Artificial
  probe
  misc_feature (1)..(25): SEQ ID NO: 5813; WAN024DWI; Start 358; Stop 382
aatatccccagtcaagacaaaagtt

SEQ ID NO: 422252 - DNA, 25 bp, Artificial
  probe
  misc_feature (1)..(25): SEQ ID NO: 5813; WAN024DWI; Start 187; Stop 211
ccctttccagttctcctcaatgttg

SEQ ID NO: 422253 - DNA, 25 bp, Artificial
  probe
  misc_feature (1)..(25): SEQ ID NO: 5813; WAN024DWI; Start 357; Stop 381
gaatatccccagtcaagacaaaagt

SEQ ID NO: 422254 - DNA, 25 bp, Artificial
  probe
  misc_feature (1)..(25): SEQ ID NO: 5813; WAN024DWI; Start 15; Stop 39
acagatggagaatttccttagtcgc

SEQ ID NO: 422255 - DNA, 25 bp, Artificial
  probe
  misc_feature (1)..(25): SEQ ID NO: 5813; WAN024DWI; Start 304; Stop 328
tacatgaaggtagggtctgagttgg

SEQ ID NO: 422256 - DNA, 25 bp, Artificial
  probe
  misc_feature (1)..(25): SEQ ID NO: 5813; WAN024DWI; Start 81; Stop 105
ctttccagaggagataagccaactg

SEQ ID NO: 422257 - DNA, 25 bp, Artificial
  probe
  misc_feature (1)..(25): SEQ ID NO: 5813; WAN024DWI; Start 359; Stop 383
atatccccagtcaagacaaaagttg

SEQ ID NO: 422258 - DNA, 25 bp, Artificial
  probe
  misc_feature (1)..(25): SEQ ID NO: 5813; WAN024DWI; Start 90; Stop 114
ggagataagccaactgcaaaggata

SEQ ID NO: 422259 - DNA, 25 bp, Artificial
  probe
  misc_feature (1)..(25): SEQ ID NO: 5813; WAN024DWI; Start 80; Stop 104
tctttccagaggagataagccaact

SEQ ID NO: 422260 - DNA, 25 bp, Artificial
  probe
  misc_feature (1)..(25): SEQ ID NO: 5813; WAN024DWI; Start 113; Stop 137
tagcaaagcgaatccacctcatact

SEQ ID NO: 422261 - DNA, 25 bp, Artificial
  probe
  misc_feature (1)..(25): SEQ ID NO: 5813; WAN024DWI; Start 303; Stop 327
ctacatgaaggtagggtctgagttg

SEQ ID NO: 422262 - DNA, 25 bp, Artificial
  probe
  misc_feature (1)..(25): SEQ ID NO: 5813; WAN024DWI; Start 233; Stop 257
ttgagtaccaaggtcatctgacgtt

SEQ ID NO: 422263 - DNA, 25 bp, Artificial
  probe
  misc_feature (1)..(25): SEQ ID NO: 5813; WAN024DWI; Start 92; Stop 116
agataagccaactgcaaaggatagc

SEQ ID NO: 422264 - DNA, 25 bp, Artificial
  probe
  misc_feature (1)..(25): SEQ ID NO: 5813; WAN024DWI; Start 200; Stop 224
tcctcaatgttgaaggagttagcat

SEQ ID NO: 422265 - DNA, 25 bp, Artificial
  probe
  misc_feature (1)..(25): SEQ ID NO: 5813; WAN024DWI; Start 356; Stop 380
ggaatatccccagtcaagacaaaag

SEQ ID NO: 422266 - DNA, 25 bp, Artificial
  probe
  misc_feature (1)..(25): SEQ ID NO: 5814; WAN024CHB; Start 72; Stop 96
catcatcaggataatagccgacagg

SEQ ID NO: 422267 - DNA, 25 bp, Artificial
  probe
  misc_feature (1)..(25): SEQ ID NO: 5814; WAN024CHB; Start 208; Stop 232
aatcagcaaatcatccacttccatt

SEQ ID NO: 422268 - DNA, 25 bp, Artificial
  probe
  misc_feature (1)..(25): SEQ ID NO: 5814; WAN024CHB; Start 71; Stop 95
gcatcatcaggataatagccgacag

SEQ ID NO: 422269 - DNA, 25 bp, Artificial
  probe
  misc_feature (1)..(25): SEQ ID NO: 5814; WAN024CHB; Start 26; Stop 50
taagtatgttcttggctagaagcaa

SEQ ID NO: 422270 - DNA, 25 bp, Artificial
  probe
  misc_feature (1)..(25): SEQ ID NO: 5814; WAN024CHB; Start 209; Stop 233
atcagcaaatcatccacttccattc

SEQ ID NO: 422271 - DNA, 25 bp, Artificial
  probe
  misc_feature (1)..(25): SEQ ID NO: 5814; WAN024CHB; Start 205; Stop 229
atcaatcagcaaatcatccacttcc

SEQ ID NO: 422272 - DNA, 25 bp, Artificial
  probe
  misc_feature (1)..(25): SEQ ID NO: 5814; WAN024CHB; Start 25; Stop 49
gtaagtatgttcttggctagaagca

SEQ ID NO: 422273 - DNA, 25 bp, Artificial
  probe
  misc_feature (1)..(25): SEQ ID NO: 5814; WAN024CHB; Start 204; Stop 228
gatcaatcagcaaatcatccacttc

SEQ ID NO: 422274 - DNA, 25 bp, Artificial
  probe
  misc_feature (1)..(25): SEQ ID NO: 5814; WAN024CHB; Start 207; Stop 231
caatcagcaaatcatccacttccat

SEQ ID NO: 422275 - DNA, 25 bp, Artificial
  probe
  misc_feature (1)..(25): SEQ ID NO: 5814; WAN024CHB; Start 203; Stop 227
agatcaatcagcaaatcatccactt

SEQ ID NO: 422276 - DNA, 25 bp, Artificial
  probe
  misc_feature (1)..(25): SEQ ID NO: 5814; WAN024CHB; Start 30; Stop 54
tatgttcttggctagaagcaacttg

SEQ ID NO: 422277 - DNA, 25 bp, Artificial
  probe
  misc_feature (1)..(25): SEQ ID NO: 5814; WAN024CHB; Start 29; Stop 53
gtatgttcttggctagaagcaactt

SEQ ID NO: 422278 - DNA, 25 bp, Artificial
  probe
  misc_feature (1)..(25): SEQ ID NO: 5814; WAN024CHB; Start 27; Stop 51
aagtatgttcttggctagaagcaac

SEQ ID NO: 422279 - DNA, 25 bp, Artificial
  probe
  misc_feature (1)..(25): SEQ ID NO: 5814; WAN024CHB; Start 24; Stop 48
cgtaagtatgttcttggctagaagc

SEQ ID NO: 422280 - DNA, 25 bp, Artificial
  probe
  misc_feature (1)..(25): SEQ ID NO: 5814; WAN024CHB; Start 23; Stop 47
gcgtaagtatgttcttggctagaag

SEQ ID NO: 422281 - DNA, 25 bp, Artificial
  probe
  misc_feature (1)..(25): SEQ ID NO: 5814; WAN024CHB; Start 202; Stop 226
cagatcaatcagcaaatcatccact

SEQ ID NO: 422282 - DNA, 25 bp, Artificial
  probe
  misc_feature (1)..(25): SEQ ID NO: 5814; WAN024CHB; Start 226; Stop 250
ttccattcccaagtaatccaccttt

SEQ ID NO: 422283 - DNA, 25 bp, Artificial
  probe
  misc_feature (1)..(25): SEQ ID NO: 5814; WAN024CHB; Start 214; Stop 238
caaatcatccacttccattcccaag

SEQ ID NO: 422284 - DNA, 25 bp, Artificial
  probe
  misc_feature (1)..(25): SEQ ID NO: 5814; WAN024CHB; Start 14; Stop 38
aagtgatgggcgtaagtatgttctt

SEQ ID NO: 422285 - DNA, 25 bp, Artificial
  probe
  misc_feature (1)..(25): SEQ ID NO: 5814; WAN024CHB; Start 28; Stop 52
agtatgttcttggctagaagcaact

SEQ ID NO: 422286 - DNA, 25 bp, Artificial
  probe
  misc_feature (1)..(25): SEQ ID NO: 5814; WAN024CHB; Start 225; Stop 249
cttccattcccaagtaatccacctt

SEQ ID NO: 422287 - DNA, 25 bp, Artificial
  probe
  misc_feature (1)..(25): SEQ ID NO: 5814; WAN024CHB; Start 173; Stop 197
aaaccaattacatctgccatgctag

SEQ ID NO: 422288 - DNA, 25 bp, Artificial
  probe
  misc_feature (1)..(25): SEQ ID NO: 5814; WAN024CHB; Start 206; Stop 230
tcaatcagcaaatcatccacttcca

SEQ ID NO: 422289 - DNA, 25 bp, Artificial
  probe
  misc_feature (1)..(25): SEQ ID NO: 5814; WAN024CHB; Start 172; Stop 196
caaaccaattacatctgccatgcta

SEQ ID NO: 422290 - DNA, 25 bp, Artificial
  probe
  misc_feature (1)..(25): SEQ ID NO: 5814; WAN024CHB; Start 201; Stop 225
ccagatcaatcagcaaatcatccac

SEQ ID NO: 422291 - DNA, 25 bp, Artificial
  probe
  misc_feature (1)..(25): SEQ ID NO: 5814; WAN024CHB; Start 64; Stop 88
cgcaacggcatcatcaggataatag

SEQ ID NO: 422292 - DNA, 25 bp, Artificial
  probe
  misc_feature (1)..(25): SEQ ID NO: 5814; WAN024CHB; Start 13; Stop 37
caagtgatgggcgtaagtatgttct

SEQ ID NO: 422293 - DNA, 25 bp, Artificial
  probe
  misc_feature (1)..(25): SEQ ID NO: 5814; WAN024CHB; Start 33; Stop 57
gttcttggctagaagcaacttgatg

SEQ ID NO: 422294 - DNA, 25 bp, Artificial
  probe
  misc_feature (1)..(25): SEQ ID NO: 5814; WAN024CHB; Start 15; Stop 39
agtgatgggcgtaagtatgttcttg

SEQ ID NO: 422295 - DNA, 25 bp, Artificial
  probe
  misc_feature (1)..(25): SEQ ID NO: 5814; WAN024CHB; Start 32; Stop 56
tgttcttggctagaagcaacttgat

SEQ ID NO: 422296 - DNA, 25 bp, Artificial
  probe
  misc_feature (1)..(25): SEQ ID NO: 5814; WAN024CHB; Start 31; Stop 55
atgttcttggctagaagcaacttga

SEQ ID NO: 422297 - DNA, 25 bp, Artificial
  probe
  misc_feature (1)..(25): SEQ ID NO: 5814; WAN024CHB; Start 22; Stop 46
ggcgtaagtatgttcttggctagaa

SEQ ID NO: 422298 - DNA, 25 bp, Artificial
  probe
  misc_feature (1)..(25): SEQ ID NO: 5814; WAN024CHB; Start 65; Stop 89
gcaacggcatcatcaggataatagc

SEQ ID NO: 422299 - DNA, 25 bp, Artificial
  probe
  misc_feature (1)..(25): SEQ ID NO: 5815; WAN024F3J; Start 9; Stop 33
tgatgtacttaatagttggaagagc

SEQ ID NO: 422300 - DNA, 25 bp, Artificial
  probe
  misc_feature (1)..(25): SEQ ID NO: 5815; WAN024F3J; Start 13; Stop 37
gtacttaatagttggaagagctgct

SEQ ID NO: 422301 - DNA, 25 bp, Artificial
  probe
  misc_feature (1)..(25): SEQ ID NO: 5815; WAN024F3J; Start 14; Stop 38
tacttaatagttggaagagctgctg

SEQ ID NO: 422302 - DNA, 25 bp, Artificial
  probe
  misc_feature (1)..(25): SEQ ID NO: 5815; WAN024F3J; Start 12; Stop 36
tgtacttaatagttggaagagctgc

SEQ ID NO: 422303 - DNA, 25 bp, Artificial
  probe
  misc_feature (1)..(25): SEQ ID NO: 5815; WAN024F3J; Start 19; Stop 43
aatagttggaagagctgctgtgata

SEQ ID NO: 422304 - DNA, 25 bp, Artificial
  probe
  misc_feature (1)..(25): SEQ ID NO: 5815; WAN024F3J; Start 18; Stop 42
taatagttggaagagctgctgtgat

SEQ ID NO: 422305 - DNA, 25 bp, Artificial
  probe
  misc_feature (1)..(25): SEQ ID NO: 5815; WAN024F3J; Start 17; Stop 41
ttaatagttggaagagctgctgtga

SEQ ID NO: 422306 - DNA, 25 bp, Artificial
  probe
  misc_feature (1)..(25): SEQ ID NO: 5815; WAN024F3J; Start 16; Stop 40
cttaatagttggaagagctgctgtg

SEQ ID NO: 422307 - DNA, 25 bp, Artificial
  probe
  misc_feature (1)..(25): SEQ ID NO: 5815; WAN024F3J; Start 53; Stop 77
ttagtgattacgccatctttcaatg

SEQ ID NO: 422308 - DNA, 25 bp, Artificial
  probe
  misc_feature (1)..(25): SEQ ID NO: 5815; WAN024F3J; Start 52; Stop 76
gttagtgattacgccatctttcaat

SEQ ID NO: 422309 - DNA, 25 bp, Artificial
  probe
  misc_feature (1)..(25): SEQ ID NO: 5815; WAN024F3J; Start 11; Stop 35
atgtacttaatagttggaagagctg

SEQ ID NO: 422310 - DNA, 25 bp, Artificial
  probe
  misc_feature (1)..(25): SEQ ID NO: 5815; WAN024F3J; Start 6; Stop 30
cgatgatgtacttaatagttggaag

SEQ ID NO: 422311 - DNA, 25 bp, Artificial
  probe
  misc_feature (1)..(25): SEQ ID NO: 5815; WAN024F3J; Start 15; Stop 39
acttaatagttggaagagctgctgt

SEQ ID NO: 422312 - DNA, 25 bp, Artificial
  probe
  misc_feature (1)..(25): SEQ ID NO: 5815; WAN024F3J; Start 10; Stop 34
gatgtacttaatagttggaagagct

SEQ ID NO: 422313 - DNA, 25 bp, Artificial
  probe
  misc_feature (1)..(25): SEQ ID NO: 5815; WAN024F3J; Start 20; Stop 44
atagttggaagagctgctgtgatac

SEQ ID NO: 422314 - DNA, 25 bp, Artificial
  probe
  misc_feature (1)..(25): SEQ ID NO: 5815; WAN024F3J; Start 47; Stop 71
ttatcgttagtgattacgccatctt

SEQ ID NO: 422315 - DNA, 25 bp, Artificial
  probe
  misc_feature (1)..(25): SEQ ID NO: 5815; WAN024F3J; Start 37; Stop 61
tgtgatacggttatcgttagtgatt

SEQ ID NO: 422316 - DNA, 25 bp, Artificial
  probe
  misc_feature (1)..(25): SEQ ID NO: 5815; WAN024F3J; Start 36; Stop 60
ctgtgatacggttatcgttagtgat

SEQ ID NO: 422317 - DNA, 25 bp, Artificial
  probe
  misc_feature (1)..(25): SEQ ID NO: 5815; WAN024F3J; Start 40; Stop 64
gatacggttatcgttagtgattacg

SEQ ID NO: 422318 - DNA, 25 bp, Artificial
  probe
  misc_feature (1)..(25): SEQ ID NO: 5815; WAN024F3J; Start 46; Stop 70
gttatcgttagtgattacgccatct

SEQ ID NO: 422319 - DNA, 25 bp, Artificial
  probe
  misc_feature (1)..(25): SEQ ID NO: 5815; WAN024F3J; Start 41; Stop 65
atacggttatcgttagtgattacgc

SEQ ID NO: 422320 - DNA, 25 bp, Artificial
  probe
  misc_feature (1)..(25): SEQ ID NO: 5815; WAN024F3J; Start 3; Stop 27
gttcgatgatgtacttaatagttgg

SEQ ID NO: 422321 - DNA, 25 bp, Artificial
  probe
  misc_feature (1)..(25): SEQ ID NO: 5815; WAN024F3J; Start 5; Stop 29
tcgatgatgtacttaatagttggaa

SEQ ID NO: 422322 - DNA, 25 bp, Artificial
  probe
  misc_feature (1)..(25): SEQ ID NO: 5815; WAN024F3J; Start 4; Stop 28
ttcgatgatgtacttaatagttgga

SEQ ID NO: 422323 - DNA, 25 bp, Artificial
  probe
  misc_feature (1)..(25): SEQ ID NO: 5815; WAN024F3J; Start 45; Stop 69
ggttatcgttagtgattacgccatc

SEQ ID NO: 422324 - DNA, 25 bp, Artificial
  probe
  misc_feature (1)..(25): SEQ ID NO: 5815; WAN024F3J; Start 39; Stop 63
tgatacggttatcgttagtgattac

SEQ ID NO: 422325 - DNA, 25 bp, Artificial
  probe
  misc_feature (1)..(25): SEQ ID NO: 5815; WAN024F3J; Start 38; Stop 62
gtgatacggttatcgttagtgatta

SEQ ID NO: 422326 - DNA, 25 bp, Artificial
  probe
  misc_feature (1)..(25): SEQ ID NO: 5815; WAN024F3J; Start 114; Stop 138
ctttcaagtcaacgtctttaacagt

SEQ ID NO: 422327 - DNA, 25 bp, Artificial
  probe
  misc_feature (1)..(25): SEQ ID NO: 5815; WAN024F3J; Start 118; Stop 142
caagtcaacgtctttaacagtaagt

SEQ ID NO: 422328 - DNA, 25 bp, Artificial
  probe
  misc_feature (1)..(25): SEQ ID NO: 5815; WAN024F3J; Start 111; Stop 135
tacctttcaagtcaacgtctttaac

SEQ ID NO: 422329 - DNA, 25 bp, Artificial
  probe
  misc_feature (1)..(25): SEQ ID NO: 5815; WAN024F3J; Start 113; Stop 137
cctttcaagtcaacgtctttaacag

SEQ ID NO: 422330 - DNA, 25 bp, Artificial
  probe
  misc_feature (1)..(25): SEQ ID NO: 5815; WAN024F3J; Start 117; Stop 141
tcaagtcaacgtctttaacagtaag

SEQ ID NO: 422331 - DNA, 25 bp, Artificial
  probe
  misc_feature (1)..(25): SEQ ID NO: 5815; WAN024F3J; Start 180; Stop 204
cgaaactattatatcacactttgga

SEQ ID NO: 422332 - DNA, 25 bp, Artificial
  probe
  misc_feature (1)..(25): SEQ ID NO: 5816; WAN024G9Q; Start 337; Stop 361
gatagcctccatgacttccatatag

SEQ ID NO: 422333 - DNA, 25 bp, Artificial
  probe
  misc_feature (1)..(25): SEQ ID NO: 5816; WAN024G9Q; Start 336; Stop 360
agatagcctccatgacttccatata

SEQ ID NO: 422334 - DNA, 25 bp, Artificial
  probe
  misc_feature (1)..(25): SEQ ID NO: 5816; WAN024G9Q; Start 335; Stop 359
tagatagcctccatgacttccatat

SEQ ID NO: 422335 - DNA, 25 bp, Artificial
  probe
  misc_feature (1)..(25): SEQ ID NO: 5816; WAN024G9Q; Start 211; Stop 235
agaatctgcgatacagtggataatg

SEQ ID NO: 422336 - DNA, 25 bp, Artificial
  probe
  misc_feature (1)..(25): SEQ ID NO: 5816; WAN024G9Q; Start 334; Stop 358
gtagatagcctccatgacttccata

SEQ ID NO: 422337 - DNA, 25 bp, Artificial
  probe
  misc_feature (1)..(25): SEQ ID NO: 5816; WAN024G9Q; Start 338; Stop 362
atagcctccatgacttccatatagt

SEQ ID NO: 422338 - DNA, 25 bp, Artificial
  probe
  misc_feature (1)..(25): SEQ ID NO: 5816; WAN024G9Q; Start 192; Stop 216
tcagcaatccatagacaccagaatc

SEQ ID NO: 422339 - DNA, 25 bp, Artificial
  probe
  misc_feature (1)..(25): SEQ ID NO: 5816; WAN024G9Q; Start 339; Stop 363
tagcctccatgacttccatatagtt

SEQ ID NO: 422340 - DNA, 25 bp, Artificial
  probe
  misc_feature (1)..(25): SEQ ID NO: 5816; WAN024G9Q; Start 193; Stop 217
cagcaatccatagacaccagaatct

SEQ ID NO: 422341 - DNA, 25 bp, Artificial
  probe
  misc_feature (1)..(25): SEQ ID NO: 5816; WAN024G9Q; Start 210; Stop 234
cagaatctgcgatacagtggataat

SEQ ID NO: 422342 - DNA, 25 bp, Artificial
  probe
  misc_feature (1)..(25): SEQ ID NO: 5816; WAN024G9Q; Start 212; Stop 236
gaatctgcgatacagtggataatgc

SEQ ID NO: 422343 - DNA, 25 bp, Artificial
  probe
  misc_feature (1)..(25): SEQ ID NO: 5816; WAN024G9Q; Start 239; Stop 263
aatcggaacagaaattgactattgg

SEQ ID NO: 422344 - DNA, 25 bp, Artificial
  probe
  misc_feature (1)..(25): SEQ ID NO: 5816; WAN024G9Q; Start 327; Stop 351
gatagtcgtagatagcctccatgac

SEQ ID NO: 422345 - DNA, 25 bp, Artificial
  probe
  misc_feature (1)..(25): SEQ ID NO: 5816; WAN024G9Q; Start 108; Stop 132
tgagttctttatggtagtgattgac

SEQ ID NO: 422346 - DNA, 25 bp, Artificial
  probe
  misc_feature (1)..(25): SEQ ID NO: 5816; WAN024G9Q; Start 237; Stop 261
cgaatcggaacagaaattgactatt

SEQ ID NO: 422347 - DNA, 25 bp, Artificial
  probe
  misc_feature (1)..(25): SEQ ID NO: 5816; WAN024G9Q; Start 238; Stop 262
gaatcggaacagaaattgactattg

SEQ ID NO: 422348 - DNA, 25 bp, Artificial
  probe
  misc_feature (1)..(25): SEQ ID NO: 5816; WAN024G9Q; Start 103; Stop 127
ttgtttgagttctttatggtagtga

SEQ ID NO: 422349 - DNA, 25 bp, Artificial
  probe
  misc_feature (1)..(25): SEQ ID NO: 5816; WAN024G9Q; Start 321; Stop 345
catctggatagtcgtagatagcctc

SEQ ID NO: 422350 - DNA, 25 bp, Artificial
  probe
  misc_feature (1)..(25): SEQ ID NO: 5816; WAN024G9Q; Start 191; Stop 215
gtcagcaatccatagacaccagaat

SEQ ID NO: 422351 - DNA, 25 bp, Artificial
  probe
  misc_feature (1)..(25): SEQ ID NO: 5816; WAN024G9Q; Start 202; Stop 226
atagacaccagaatctgcgatacag

SEQ ID NO: 422352 - DNA, 25 bp, Artificial
  probe
  misc_feature (1)..(25): SEQ ID NO: 5816; WAN024G9Q; Start 240; Stop 264
atcggaacagaaattgactattggc

SEQ ID NO: 422353 - DNA, 25 bp, Artificial
  probe
  misc_feature (1)..(25): SEQ ID NO: 5816; WAN024G9Q; Start 245; Stop 269
aacagaaattgactattggcatgac

SEQ ID NO: 422354 - DNA, 25 bp, Artificial
  probe
  misc_feature (1)..(25): SEQ ID NO: 5816; WAN024G9Q; Start 244; Stop 268
gaacagaaattgactattggcatga

SEQ ID NO: 422355 - DNA, 25 bp, Artificial
  probe
  misc_feature (1)..(25): SEQ ID NO: 5816; WAN024G9Q; Start 276; Stop 300
cgttatagacaaagcctgtaaactg

SEQ ID NO: 422356 - DNA, 25 bp, Artificial
  probe
  misc_feature (1)..(25): SEQ ID NO: 5816; WAN024G9Q; Start 275; Stop 299
tcgttatagacaaagcctgtaaact

SEQ ID NO: 422357 - DNA, 25 bp, Artificial
  probe
  misc_feature (1)..(25): SEQ ID NO: 5816; WAN024G9Q; Start 280; Stop 304
atagacaaagcctgtaaactggatt

SEQ ID NO: 422358 - DNA, 25 bp, Artificial
  probe
  misc_feature (1)..(25): SEQ ID NO: 5816; WAN024G9Q; Start 277; Stop 301
gttatagacaaagcctgtaaactgg

SEQ ID NO: 422359 - DNA, 25 bp, Artificial
  probe
  misc_feature (1)..(25): SEQ ID NO: 5816; WAN024G9Q; Start 278; Stop 302
ttatagacaaagcctgtaaactgga

SEQ ID NO: 422360 - DNA, 25 bp, Artificial
  probe
  misc_feature (1)..(25): SEQ ID NO: 5816; WAN024G9Q; Start 104; Stop 128
tgtttgagttctttatggtagtgat

SEQ ID NO: 422361 - DNA, 25 bp, Artificial
  probe
  misc_feature (1)..(25): SEQ ID NO: 5816; WAN024G9Q; Start 286; Stop 310
aaagcctgtaaactggattgtcttg

SEQ ID NO: 422362 - DNA, 25 bp, Artificial
  probe
  misc_feature (1)..(25): SEQ ID NO: 5816; WAN024G9Q; Start 279; Stop 303
tatagacaaagcctgtaaactggat

SEQ ID NO: 422363 - DNA, 25 bp, Artificial
  probe
  misc_feature (1)..(25): SEQ ID NO: 5816; WAN024G9Q; Start 246; Stop 270
acagaaattgactattggcatgact

SEQ ID NO: 422364 - DNA, 25 bp, Artificial
  probe
  misc_feature (1)..(25): SEQ ID NO: 5816; WAN024G9Q; Start 243; Stop 267
ggaacagaaattgactattggcatg

SEQ ID NO: 422365 - DNA, 25 bp, Artificial
  probe
  misc_feature (1)..(25): SEQ ID NO: 5817; WAN024G4B; Start 587; Stop 611
acactatctggtataatcctcatca

SEQ ID NO: 422366 - DNA, 25 bp, Artificial
  probe
  misc_feature (1)..(25): SEQ ID NO: 5817; WAN024G4B; Start 588; Stop 612
cactatctggtataatcctcatcac

SEQ ID NO: 422367 - DNA, 25 bp, Artificial
  probe
  misc_feature (1)..(25): SEQ ID NO: 5817; WAN024G4B; Start 586; Stop 610
gacactatctggtataatcctcatc

SEQ ID NO: 422368 - DNA, 25 bp, Artificial
  probe
  misc_feature (1)..(25): SEQ ID NO: 5817; WAN024G4B; Start 584; Stop 608
ttgacactatctggtataatcctca

SEQ ID NO: 422369 - DNA, 25 bp, Artificial
  probe
  misc_feature (1)..(25): SEQ ID NO: 5817; WAN024G4B; Start 98; Stop 122
gagttgcggatattcaggcttataa

SEQ ID NO: 422370 - DNA, 25 bp, Artificial
  probe
  misc_feature (1)..(25): SEQ ID NO: 5817; WAN024G4B; Start 89; Stop 113
aagaagaaggagttgcggatattca

SEQ ID NO: 422371 - DNA, 25 bp, Artificial
  probe
  misc_feature (1)..(25): SEQ ID NO: 5817; WAN024G4B; Start 97; Stop 121
ggagttgcggatattcaggcttata

SEQ ID NO: 422372 - DNA, 25 bp, Artificial
  probe
  misc_feature (1)..(25): SEQ ID NO: 5817; WAN024G4B; Start 585; Stop 609
tgacactatctggtataatcctcat

SEQ ID NO: 422373 - DNA, 25 bp, Artificial
  probe
  misc_feature (1)..(25): SEQ ID NO: 5817; WAN024G4B; Start 90; Stop 114
agaagaaggagttgcggatattcag

SEQ ID NO: 422374 - DNA, 25 bp, Artificial
  probe
  misc_feature (1)..(25): SEQ ID NO: 5817; WAN024G4B; Start 583; Stop 607
attgacactatctggtataatcctc

SEQ ID NO: 422375 - DNA, 25 bp, Artificial
  probe
  misc_feature (1)..(25): SEQ ID NO: 5817; WAN024G4B; Start 527; Stop 551
cgctgatgattggagattctctaac

SEQ ID NO: 422376 - DNA, 25 bp, Artificial
  probe
  misc_feature (1)..(25): SEQ ID NO: 5817; WAN024G4B; Start 589; Stop 613
actatctggtataatcctcatcacc

SEQ ID NO: 422377 - DNA, 25 bp, Artificial
  probe
  misc_feature (1)..(25): SEQ ID NO: 5817; WAN024G4B; Start 526; Stop 550
acgctgatgattggagattctctaa

SEQ ID NO: 422378 - DNA, 25 bp, Artificial
  probe
  misc_feature (1)..(25): SEQ ID NO: 5817; WAN024G4B; Start 592; Stop 616
atctggtataatcctcatcacctcg

SEQ ID NO: 422379 - DNA, 25 bp, Artificial
  probe
  misc_feature (1)..(25): SEQ ID NO: 5817; WAN024G4B; Start 591; Stop 615
tatctggtataatcctcatcacctc

SEQ ID NO: 422380 - DNA, 25 bp, Artificial
  probe
  misc_feature (1)..(25): SEQ ID NO: 5817; WAN024G4B; Start 590; Stop 614
ctatctggtataatcctcatcacct

SEQ ID NO: 422381 - DNA, 25 bp, Artificial
  probe
  misc_feature (1)..(25): SEQ ID NO: 5817; WAN024G4B; Start 430; Stop 454
caagtctttatctcagaacagttgc

SEQ ID NO: 422382 - DNA, 25 bp, Artificial
  probe
  misc_feature (1)..(25): SEQ ID NO: 5817; WAN024G4B; Start 88; Stop 112
aaagaagaaggagttgcggatattc

SEQ ID NO: 422383 - DNA, 25 bp, Artificial
  probe
  misc_feature (1)..(25): SEQ ID NO: 5817; WAN024G4B; Start 662; Stop 686
aagacttgctggattgtttagataa

SEQ ID NO: 422384 - DNA, 25 bp, Artificial
  probe
  misc_feature (1)..(25): SEQ ID NO: 5817; WAN024G4B; Start 663; Stop 687
agacttgctggattgtttagataaa

SEQ ID NO: 422385 - DNA, 25 bp, Artificial
  probe
  misc_feature (1)..(25): SEQ ID NO: 5817; WAN024G4B; Start 429; Stop 453
tcaagtctttatctcagaacagttg

SEQ ID NO: 422386 - DNA, 25 bp, Artificial
  probe
  misc_feature (1)..(25): SEQ ID NO: 5817; WAN024G4B; Start 91; Stop 115
gaagaaggagttgcggatattcagg

SEQ ID NO: 422387 - DNA, 25 bp, Artificial
  probe
  misc_feature (1)..(25): SEQ ID NO: 5817; WAN024G4B; Start 652; Stop 676
tattcttaccaagacttgctggatt

SEQ ID NO: 422388 - DNA, 25 bp, Artificial
  probe
  misc_feature (1)..(25): SEQ ID NO: 5817; WAN024G4B; Start 651; Stop 675
ctattcttaccaagacttgctggat

SEQ ID NO: 422389 - DNA, 25 bp, Artificial
  probe
  misc_feature (1)..(25): SEQ ID NO: 5817; WAN024G4B; Start 99; Stop 123
agttgcggatattcaggcttataaa

SEQ ID NO: 422390 - DNA, 25 bp, Artificial
  probe
  misc_feature (1)..(25): SEQ ID NO: 5817; WAN024G4B; Start 102; Stop 126
tgcggatattcaggcttataaagat

SEQ ID NO: 422391 - DNA, 25 bp, Artificial
  probe
  misc_feature (1)..(25): SEQ ID NO: 5817; WAN024G4B; Start 101; Stop 125
ttgcggatattcaggcttataaaga

SEQ ID NO: 422392 - DNA, 25 bp, Artificial
  probe
  misc_feature (1)..(25): SEQ ID NO: 5817; WAN024G4B; Start 100; Stop 124
gttgcggatattcaggcttataaag

SEQ ID NO: 422393 - DNA, 25 bp, Artificial
  probe
  misc_feature (1)..(25): SEQ ID NO: 5817; WAN024G4B; Start 650; Stop 674
tctattcttaccaagacttgctgga

SEQ ID NO: 422394 - DNA, 25 bp, Artificial
  probe
  misc_feature (1)..(25): SEQ ID NO: 5817; WAN024G4B; Start 653; Stop 677
attcttaccaagacttgctggattg

SEQ ID NO: 422395 - DNA, 25 bp, Artificial
  probe
  misc_feature (1)..(25): SEQ ID NO: 5817; WAN024G4B; Start 137; Stop 161
ctatgaacaaggctctctggaaaga

SEQ ID NO: 422396 - DNA, 25 bp, Artificial
  probe
  misc_feature (1)..(25): SEQ ID NO: 5817; WAN024G4B; Start 96; Stop 120
aggagttgcggatattcaggcttat

SEQ ID NO: 422397 - DNA, 25 bp, Artificial
  probe
  misc_feature (1)..(25): SEQ ID NO: 5817; WAN024G4B; Start 661; Stop 685
caagacttgctggattgtttagata

SEQ ID NO: 422398 - DNA, 25 bp, Artificial
  probe
  misc_feature (1)..(25): SEQ ID NO: 5818; WAN024CGQ; Start 247; Stop 271
tacttaattgccttgcttccgatat

SEQ ID NO: 422399 - DNA, 25 bp, Artificial
  probe
  misc_feature (1)..(25): SEQ ID NO: 5818; WAN024CGQ; Start 246; Stop 270
ttacttaattgccttgcttccgata

SEQ ID NO: 422400 - DNA, 25 bp, Artificial
  probe
  misc_feature (1)..(25): SEQ ID NO: 5818; WAN024CGQ; Start 242; Stop 266
atctttacttaattgccttgcttcc

SEQ ID NO: 422401 - DNA, 25 bp, Artificial
  probe
  misc_feature (1)..(25): SEQ ID NO: 5818; WAN024CGQ; Start 249; Stop 273
cttaattgccttgcttccgatatct

SEQ ID NO: 422402 - DNA, 25 bp, Artificial
  probe
  misc_feature (1)..(25): SEQ ID NO: 5818; WAN024CGQ; Start 245; Stop 269
tttacttaattgccttgcttccgat

SEQ ID NO: 422403 - DNA, 25 bp, Artificial
  probe
  misc_feature (1)..(25): SEQ ID NO: 5818; WAN024CGQ; Start 250; Stop 274
ttaattgccttgcttccgatatctg

SEQ ID NO: 422404 - DNA, 25 bp, Artificial
  probe
  misc_feature (1)..(25): SEQ ID NO: 5818; WAN024CGQ; Start 248; Stop 272
acttaattgccttgcttccgatatc

SEQ ID NO: 422405 - DNA, 25 bp, Artificial
  probe
  misc_feature (1)..(25): SEQ ID NO: 5818; WAN024CGQ; Start 244; Stop 268
ctttacttaattgccttgcttccga

SEQ ID NO: 422406 - DNA, 25 bp, Artificial
  probe
  misc_feature (1)..(25): SEQ ID NO: 5818; WAN024CGQ; Start 243; Stop 267
tctttacttaattgccttgcttccg

SEQ ID NO: 422407 - DNA, 25 bp, Artificial
  probe
  misc_feature (1)..(25): SEQ ID NO: 5818; WAN024CGQ; Start 1; Stop 25
ttgttctatattagctcgctaacgc

SEQ ID NO: 422408 - DNA, 25 bp, Artificial
  probe
  misc_feature (1)..(25): SEQ ID NO: 5818; WAN024CGQ; Start 251; Stop 275
taattgccttgcttccgatatctgt

SEQ ID NO: 422409 - DNA, 25 bp, Artificial
  probe
  misc_feature (1)..(25): SEQ ID NO: 5818; WAN024CGQ; Start 241; Stop 265
tatctttacttaattgccttgcttc

SEQ ID NO: 422410 - DNA, 25 bp, Artificial
  probe
  misc_feature (1)..(25): SEQ ID NO: 5818; WAN024CGQ; Start 252; Stop 276
aattgccttgcttccgatatctgtt

SEQ ID NO: 422411 - DNA, 25 bp, Artificial
  probe
  misc_feature (1)..(25): SEQ ID NO: 5818; WAN024CGQ; Start 240; Stop 264
atatctttacttaattgccttgctt

SEQ ID NO: 422412 - DNA, 25 bp, Artificial
  probe
  misc_feature (1)..(25): SEQ ID NO: 5818; WAN024CGQ; Start 114; Stop 138
ttcggtttcattcctaaactttgag

SEQ ID NO: 422413 - DNA, 25 bp, Artificial
  probe
  misc_feature (1)..(25): SEQ ID NO: 5818; WAN024CGQ; Start 113; Stop 137
cttcggtttcattcctaaactttga

SEQ ID NO: 422414 - DNA, 25 bp, Artificial
  probe
  misc_feature (1)..(25): SEQ ID NO: 5818; WAN024CGQ; Start 112; Stop 136
ccttcggtttcattcctaaactttg

SEQ ID NO: 422415 - DNA, 25 bp, Artificial
  probe
  misc_feature (1)..(25): SEQ ID NO: 5818; WAN024CGQ; Start 3; Stop 27
gttctatattagctcgctaacgctc

SEQ ID NO: 422416 - DNA, 25 bp, Artificial
  probe
  misc_feature (1)..(25): SEQ ID NO: 5818; WAN024CGQ; Start 118; Stop 142
gtttcattcctaaactttgagccta

SEQ ID NO: 422417 - DNA, 25 bp, Artificial
  probe
  misc_feature (1)..(25): SEQ ID NO: 5818; WAN024CGQ; Start 111; Stop 135
accttcggtttcattcctaaacttt

SEQ ID NO: 422418 - DNA, 25 bp, Artificial
  probe
  misc_feature (1)..(25): SEQ ID NO: 5818; WAN024CGQ; Start 117; Stop 141
ggtttcattcctaaactttgagcct

SEQ ID NO: 422419 - DNA, 25 bp, Artificial
  probe
  misc_feature (1)..(25): SEQ ID NO: 5818; WAN024CGQ; Start 2; Stop 26
tgttctatattagctcgctaacgct

SEQ ID NO: 422420 - DNA, 25 bp, Artificial
  probe
  misc_feature (1)..(25): SEQ ID NO: 5818; WAN024CGQ; Start 253; Stop 277
attgccttgcttccgatatctgttc

SEQ ID NO: 422421 - DNA, 25 bp, Artificial
  probe
  misc_feature (1)..(25): SEQ ID NO: 5818; WAN024CGQ; Start 115; Stop 139
tcggtttcattcctaaactttgagc

SEQ ID NO: 422422 - DNA, 25 bp, Artificial
  probe
  misc_feature (1)..(25): SEQ ID NO: 5818; WAN024CGQ; Start 239; Stop 263
tatatctttacttaattgccttgct

SEQ ID NO: 422423 - DNA, 25 bp, Artificial
  probe
  misc_feature (1)..(25): SEQ ID NO: 5818; WAN024CGQ; Start 4; Stop 28
ttctatattagctcgctaacgctcg

SEQ ID NO: 422424 - DNA, 25 bp, Artificial
  probe
  misc_feature (1)..(25): SEQ ID NO: 5818; WAN024CGQ; Start 116; Stop 140
cggtttcattcctaaactttgagcc

SEQ ID NO: 422425 - DNA, 25 bp, Artificial
  probe
  misc_feature (1)..(25): SEQ ID NO: 5818; WAN024CGQ; Start 170; Stop 194
acattcactgttctggtcttttcac

SEQ ID NO: 422426 - DNA, 25 bp, Artificial
  probe
  misc_feature (1)..(25): SEQ ID NO: 5818; WAN024CGQ; Start 25; Stop 49
ctcgcaaaccatacgatcattaacg

SEQ ID NO: 422427 - DNA, 25 bp, Artificial
  probe
  misc_feature (1)..(25): SEQ ID NO: 5818; WAN024CGQ; Start 225; Stop 249
cggcgcgttattcttatatctttac

SEQ ID NO: 422428 - DNA, 25 bp, Artificial
  probe
  misc_feature (1)..(25): SEQ ID NO: 5818; WAN024CGQ; Start 24; Stop 48
gctcgcaaaccatacgatcattaac

SEQ ID NO: 422429 - DNA, 25 bp, Artificial
  probe
  misc_feature (1)..(25): SEQ ID NO: 5818; WAN024CGQ; Start 226; Stop 250
ggcgcgttattcttatatctttact

SEQ ID NO: 422430 - DNA, 25 bp, Artificial
  probe
  misc_feature (1)..(25): SEQ ID NO: 5818; WAN024CGQ; Start 238; Stop 262
ttatatctttacttaattgccttgc

SEQ ID NO: 422431 - DNA, 25 bp, Artificial
  probe
  misc_feature (1)..(25): SEQ ID NO: 5819; WAN024F2Z; Start 177; Stop 201
aagtcgttccaaggtaacaagtcta

SEQ ID NO: 422432 - DNA, 25 bp, Artificial
  probe
  misc_feature (1)..(25): SEQ ID NO: 5819; WAN024F2Z; Start 178; Stop 202
agtcgttccaaggtaacaagtctag

SEQ ID NO: 422433 - DNA, 25 bp, Artificial
  probe
  misc_feature (1)..(25): SEQ ID NO: 5819; WAN024F2Z; Start 174; Stop 198
ttcaagtcgttccaaggtaacaagt

SEQ ID NO: 422434 - DNA, 25 bp, Artificial
  probe
  misc_feature (1)..(25): SEQ ID NO: 5819; WAN024F2Z; Start 165; Stop 189
aaaggttatttcaagtcgttccaag

SEQ ID NO: 422435 - DNA, 25 bp, Artificial
  probe
  misc_feature (1)..(25): SEQ ID NO: 5819; WAN024F2Z; Start 169; Stop 193
gttatttcaagtcgttccaaggtaa

SEQ ID NO: 422436 - DNA, 25 bp, Artificial
  probe
  misc_feature (1)..(25): SEQ ID NO: 5819; WAN024F2Z; Start 2; Stop 26
tgttctcatcttatttcaatccgct

SEQ ID NO: 422437 - DNA, 25 bp, Artificial
  probe
  misc_feature (1)..(25): SEQ ID NO: 5819; WAN024F2Z; Start 34; Stop 58
atggtatcgaatcttcatcagaatg

SEQ ID NO: 422438 - DNA, 25 bp, Artificial
  probe
  misc_feature (1)..(25): SEQ ID NO: 5819; WAN024F2Z; Start 168; Stop 192
ggttatttcaagtcgttccaaggta

SEQ ID NO: 422439 - DNA, 25 bp, Artificial
  probe
  misc_feature (1)..(25): SEQ ID NO: 5819; WAN024F2Z; Start 3; Stop 27
gttctcatcttatttcaatccgcta

SEQ ID NO: 422440 - DNA, 25 bp, Artificial
  probe
  misc_feature (1)..(25): SEQ ID NO: 5819; WAN024F2Z; Start 171; Stop 195
tatttcaagtcgttccaaggtaaca

SEQ ID NO: 422441 - DNA, 25 bp, Artificial
  probe
  misc_feature (1)..(25): SEQ ID NO: 5819; WAN024F2Z; Start 170; Stop 194
ttatttcaagtcgttccaaggtaac

SEQ ID NO: 422442 - DNA, 25 bp, Artificial
  probe
  misc_feature (1)..(25): SEQ ID NO: 5819; WAN024F2Z; Start 1; Stop 25
ttgttctcatcttatttcaatccgc

SEQ ID NO: 422443 - DNA, 25 bp, Artificial
  probe
  misc_feature (1)..(25): SEQ ID NO: 5819; WAN024F2Z; Start 176; Stop 200
caagtcgttccaaggtaacaagtct

SEQ ID NO: 422444 - DNA, 25 bp, Artificial
  probe
  misc_feature (1)..(25): SEQ ID NO: 5819; WAN024F2Z; Start 175; Stop 199
tcaagtcgttccaaggtaacaagtc

SEQ ID NO: 422445 - DNA, 25 bp, Artificial
  probe
  misc_feature (1)..(25): SEQ ID NO: 5819; WAN024F2Z; Start 166; Stop 190
aaggttatttcaagtcgttccaagg

SEQ ID NO: 422446 - DNA, 25 bp, Artificial
  probe
  misc_feature (1)..(25): SEQ ID NO: 5819; WAN024F2Z; Start 172; Stop 196
atttcaagtcgttccaaggtaacaa

SEQ ID NO: 422447 - DNA, 25 bp, Artificial
  probe
  misc_feature (1)..(25): SEQ ID NO: 5819; WAN024F2Z; Start 4; Stop 28
ttctcatcttatttcaatccgctat

SEQ ID NO: 422448 - DNA, 25 bp, Artificial
  probe
  misc_feature (1)..(25): SEQ ID NO: 5819; WAN024F2Z; Start 173; Stop 197
tttcaagtcgttccaaggtaacaag

SEQ ID NO: 422449 - DNA, 25 bp, Artificial
  probe
  misc_feature (1)..(25): SEQ ID NO: 5819; WAN024F2Z; Start 183; Stop 207
ttccaaggtaacaagtctagatcag

SEQ ID NO: 422450 - DNA, 25 bp, Artificial
  probe
  misc_feature (1)..(25): SEQ ID NO: 5819; WAN024F2Z; Start 18; Stop 42
caatccgctatatattatggtatcg

SEQ ID NO: 422451 - DNA, 25 bp, Artificial
  probe
  misc_feature (1)..(25): SEQ ID NO: 5819; WAN024F2Z; Start 182; Stop 206
gttccaaggtaacaagtctagatca

SEQ ID NO: 422452 - DNA, 25 bp, Artificial
  probe
  misc_feature (1)..(25): SEQ ID NO: 5819; WAN024F2Z; Start 184; Stop 208
tccaaggtaacaagtctagatcaga

SEQ ID NO: 422453 - DNA, 25 bp, Artificial
  probe
  misc_feature (1)..(25): SEQ ID NO: 5819; WAN024F2Z; Start 185; Stop 209
ccaaggtaacaagtctagatcagat

SEQ ID NO: 422454 - DNA, 25 bp, Artificial
  probe
  misc_feature (1)..(25): SEQ ID NO: 5819; WAN024F2Z; Start 32; Stop 56
ttatggtatcgaatcttcatcagaa

SEQ ID NO: 422455 - DNA, 25 bp, Artificial
  probe
  misc_feature (1)..(25): SEQ ID NO: 5819; WAN024F2Z; Start 167; Stop 191
aggttatttcaagtcgttccaaggt

SEQ ID NO: 422456 - DNA, 25 bp, Artificial
  probe
  misc_feature (1)..(25): SEQ ID NO: 5819; WAN024F2Z; Start 192; Stop 216
aacaagtctagatcagattgaagct

SEQ ID NO: 422457 - DNA, 25 bp, Artificial
  probe
  misc_feature (1)..(25): SEQ ID NO: 5819; WAN024F2Z; Start 181; Stop 205
cgttccaaggtaacaagtctagatc

SEQ ID NO: 422458 - DNA, 25 bp, Artificial
  probe
  misc_feature (1)..(25): SEQ ID NO: 5819; WAN024F2Z; Start 33; Stop 57
tatggtatcgaatcttcatcagaat

SEQ ID NO: 422459 - DNA, 25 bp, Artificial
  probe
  misc_feature (1)..(25): SEQ ID NO: 5819; WAN024F2Z; Start 31; Stop 55
attatggtatcgaatcttcatcaga

SEQ ID NO: 422460 - DNA, 25 bp, Artificial
  probe
  misc_feature (1)..(25): SEQ ID NO: 5819; WAN024F2Z; Start 5; Stop 29
tctcatcttatttcaatccgctata

SEQ ID NO: 422461 - DNA, 25 bp, Artificial
  probe
  misc_feature (1)..(25): SEQ ID NO: 5819; WAN024F2Z; Start 180; Stop 204
tcgttccaaggtaacaagtctagat

SEQ ID NO: 422462 - DNA, 25 bp, Artificial
  probe
  misc_feature (1)..(25): SEQ ID NO: 5819; WAN024F2Z; Start 188; Stop 212
aggtaacaagtctagatcagattga

SEQ ID NO: 422463 - DNA, 25 bp, Artificial
  probe
  misc_feature (1)..(25): SEQ ID NO: 5819; WAN024F2Z; Start 193; Stop 217
acaagtctagatcagattgaagctg

SEQ ID NO: 422464 - DNA, 25 bp, Artificial
  probe
  misc_feature (1)..(25): SEQ ID NO: 5820; WAN024E2Y; Start 185; Stop 209
tcaatgataactgcttgttcagatg

SEQ ID NO: 422465 - DNA, 25 bp, Artificial
  probe
  misc_feature (1)..(25): SEQ ID NO: 5820; WAN024E2Y; Start 186; Stop 210
caatgataactgcttgttcagatgc

SEQ ID NO: 422466 - DNA, 25 bp, Artificial
  probe
  misc_feature (1)..(25): SEQ ID NO: 5820; WAN024E2Y; Start 184; Stop 208
atcaatgataactgcttgttcagat

SEQ ID NO: 422467 - DNA, 25 bp, Artificial
  probe
  misc_feature (1)..(25): SEQ ID NO: 5820; WAN024E2Y; Start 151; Stop 175
gaactctgctacaaattcatcgtaa

SEQ ID NO: 422468 - DNA, 25 bp, Artificial
  probe
  misc_feature (1)..(25): SEQ ID NO: 5820; WAN024E2Y; Start 140; Stop 164
tggtaagatttgaactctgctacaa

SEQ ID NO: 422469 - DNA, 25 bp, Artificial
  probe
  misc_feature (1)..(25): SEQ ID NO: 5820; WAN024E2Y; Start 152; Stop 176
aactctgctacaaattcatcgtaaa

SEQ ID NO: 422470 - DNA, 25 bp, Artificial
  probe
  misc_feature (1)..(25): SEQ ID NO: 5820; WAN024E2Y; Start 139; Stop 163
gtggtaagatttgaactctgctaca

SEQ ID NO: 422471 - DNA, 25 bp, Artificial
  probe
  misc_feature (1)..(25): SEQ ID NO: 5820; WAN024E2Y; Start 138; Stop 162
tgtggtaagatttgaactctgctac

SEQ ID NO: 422472 - DNA, 25 bp, Artificial
  probe
  misc_feature (1)..(25): SEQ ID NO: 5820; WAN024E2Y; Start 137; Stop 161
gtgtggtaagatttgaactctgcta

SEQ ID NO: 422473 - DNA, 25 bp, Artificial
  probe
  misc_feature (1)..(25): SEQ ID NO: 5820; WAN024E2Y; Start 210; Stop 234
cacagaccataccgttatcaaatga

SEQ ID NO: 422474 - DNA, 25 bp, Artificial
  probe
  misc_feature (1)..(25): SEQ ID NO: 5820; WAN024E2Y; Start 153; Stop 177
actctgctacaaattcatcgtaaat

SEQ ID NO: 422475 - DNA, 25 bp, Artificial
  probe
  misc_feature (1)..(25): SEQ ID NO: 5820; WAN024E2Y; Start 183; Stop 207
tatcaatgataactgcttgttcaga

SEQ ID NO: 422476 - DNA, 25 bp, Artificial
  probe
  misc_feature (1)..(25): SEQ ID NO: 5820; WAN024E2Y; Start 134; Stop 158
taagtgtggtaagatttgaactctg

SEQ ID NO: 422477 - DNA, 25 bp, Artificial
  probe
  misc_feature (1)..(25): SEQ ID NO: 5820; WAN024E2Y; Start 133; Stop 157
gtaagtgtggtaagatttgaactct

SEQ ID NO: 422478 - DNA, 25 bp, Artificial
  probe
  misc_feature (1)..(25): SEQ ID NO: 5820; WAN024E2Y; Start 132; Stop 156
agtaagtgtggtaagatttgaactc

SEQ ID NO: 422479 - DNA, 25 bp, Artificial
  probe
  misc_feature (1)..(25): SEQ ID NO: 5820; WAN024E2Y; Start 135; Stop 159
aagtgtggtaagatttgaactctgc

SEQ ID NO: 422480 - DNA, 25 bp, Artificial
  probe
  misc_feature (1)..(25): SEQ ID NO: 5820; WAN024E2Y; Start 131; Stop 155
aagtaagtgtggtaagatttgaact

SEQ ID NO: 422481 - DNA, 25 bp, Artificial
  probe
  misc_feature (1)..(25): SEQ ID NO: 5820; WAN024E2Y; Start 130; Stop 154
aaagtaagtgtggtaagatttgaac

SEQ ID NO: 422482 - DNA, 25 bp, Artificial
  probe
  misc_feature (1)..(25): SEQ ID NO: 5820; WAN024E2Y; Start 209; Stop 233
gcacagaccataccgttatcaaatg

SEQ ID NO: 422483 - DNA, 25 bp, Artificial
  probe
  misc_feature (1)..(25): SEQ ID NO: 5820; WAN024E2Y; Start 136; Stop 160
agtgtggtaagatttgaactctgct

SEQ ID NO: 422484 - DNA, 25 bp, Artificial
  probe
  misc_feature (1)..(25): SEQ ID NO: 5820; WAN024E2Y; Start 154; Stop 178
ctctgctacaaattcatcgtaaatt

SEQ ID NO: 422485 - DNA, 25 bp, Artificial
  probe
  misc_feature (1)..(25): SEQ ID NO: 5820; WAN024E2Y; Start 123; Stop 147
tgtttacaaagtaagtgtggtaaga

SEQ ID NO: 422486 - DNA, 25 bp, Artificial
  probe
  misc_feature (1)..(25): SEQ ID NO: 5820; WAN024E2Y; Start 206; Stop 230
gatgcacagaccataccgttatcaa

SEQ ID NO: 422487 - DNA, 25 bp, Artificial
  probe
  misc_feature (1)..(25): SEQ ID NO: 5820; WAN024E2Y; Start 204; Stop 228
cagatgcacagaccataccgttatc

SEQ ID NO: 422488 - DNA, 25 bp, Artificial
  probe
  misc_feature (1)..(25): SEQ ID NO: 5820; WAN024E2Y; Start 187; Stop 211
aatgataactgcttgttcagatgca

SEQ ID NO: 422489 - DNA, 25 bp, Artificial
  probe
  misc_feature (1)..(25): SEQ ID NO: 5820; WAN024E2Y; Start 141; Stop 165
ggtaagatttgaactctgctacaaa

SEQ ID NO: 422490 - DNA, 25 bp, Artificial
  probe
  misc_feature (1)..(25): SEQ ID NO: 5820; WAN024E2Y; Start 148; Stop 172
tttgaactctgctacaaattcatcg

SEQ ID NO: 422491 - DNA, 25 bp, Artificial
  probe
  misc_feature (1)..(25): SEQ ID NO: 5820; WAN024E2Y; Start 150; Stop 174
tgaactctgctacaaattcatcgta

SEQ ID NO: 422492 - DNA, 25 bp, Artificial
  probe
  misc_feature (1)..(25): SEQ ID NO: 5820; WAN024E2Y; Start 122; Stop 146
ttgtttacaaagtaagtgtggtaag

SEQ ID NO: 422493 - DNA, 25 bp, Artificial
  probe
  misc_feature (1)..(25): SEQ ID NO: 5820; WAN024E2Y; Start 124; Stop 148
gtttacaaagtaagtgtggtaagat

SEQ ID NO: 422494 - DNA, 25 bp, Artificial
  probe
  misc_feature (1)..(25): SEQ ID NO: 5820; WAN024E2Y; Start 128; Stop 152
acaaagtaagtgtggtaagatttga

SEQ ID NO: 422495 - DNA, 25 bp, Artificial
  probe
  misc_feature (1)..(25): SEQ ID NO: 5820; WAN024E2Y; Start 188; Stop 212
atgataactgcttgttcagatgcac

SEQ ID NO: 422496 - DNA, 25 bp, Artificial
  probe
  misc_feature (1)..(25): SEQ ID NO: 5820; WAN024E2Y; Start 205; Stop 229
agatgcacagaccataccgttatca

SEQ ID NO: 422497 - DNA, 25 bp, Artificial
  probe
  misc_feature (1)..(25): SEQ ID NO: 5821; WAN024CU3; Start 40; Stop 64
ggcaatggtattatcagcacttgtt

SEQ ID NO: 422498 - DNA, 25 bp, Artificial
  probe
  misc_feature (1)..(25): SEQ ID NO: 5821; WAN024CU3; Start 46; Stop 70
ggtattatcagcacttgtttcatcg

SEQ ID NO: 422499 - DNA, 25 bp, Artificial
  probe
  misc_feature (1)..(25): SEQ ID NO: 5821; WAN024CU3; Start 45; Stop 69
tggtattatcagcacttgtttcatc

SEQ ID NO: 422500 - DNA, 25 bp, Artificial
  probe
  misc_feature (1)..(25): SEQ ID NO: 5821; WAN024CU3; Start 43; Stop 67
aatggtattatcagcacttgtttca

SEQ ID NO: 422501 - DNA, 25 bp, Artificial
  probe
  misc_feature (1)..(25): SEQ ID NO: 5821; WAN024CU3; Start 41; Stop 65
gcaatggtattatcagcacttgttt

SEQ ID NO: 422502 - DNA, 25 bp, Artificial
  probe
  misc_feature (1)..(25): SEQ ID NO: 5821; WAN024CU3; Start 44; Stop 68
atggtattatcagcacttgtttcat

SEQ ID NO: 422503 - DNA, 25 bp, Artificial
  probe
  misc_feature (1)..(25): SEQ ID NO: 5821; WAN024CU3; Start 42; Stop 66
caatggtattatcagcacttgtttc

SEQ ID NO: 422504 - DNA, 25 bp, Artificial
  probe
  misc_feature (1)..(25): SEQ ID NO: 5821; WAN024CU3; Start 47; Stop 71
gtattatcagcacttgtttcatcga

SEQ ID NO: 422505 - DNA, 25 bp, Artificial
  probe
  misc_feature (1)..(25): SEQ ID NO: 5821; WAN024CU3; Start 49; Stop 73
attatcagcacttgtttcatcgaag

SEQ ID NO: 422506 - DNA, 25 bp, Artificial
  probe
  misc_feature (1)..(25): SEQ ID NO: 5821; WAN024CU3; Start 48; Stop 72
tattatcagcacttgtttcatcgaa

SEQ ID NO: 422507 - DNA, 25 bp, Artificial
  probe
  misc_feature (1)..(25): SEQ ID NO: 5821; WAN024CU3; Start 86; Stop 110
gcattcatagaaagagcacccatct

SEQ ID NO: 422508 - DNA, 25 bp, Artificial
  probe
  misc_feature (1)..(25): SEQ ID NO: 5821; WAN024CU3; Start 87; Stop 111
cattcatagaaagagcacccatctt

SEQ ID NO: 422509 - DNA, 25 bp, Artificial
  probe
  misc_feature (1)..(25): SEQ ID NO: 5821; WAN024CU3; Start 38; Stop 62
agggcaatggtattatcagcacttg

SEQ ID NO: 422510 - DNA, 25 bp, Artificial
  probe
  misc_feature (1)..(25): SEQ ID NO: 5821; WAN024CU3; Start 158; Stop 182
aagagaattttacctgcgatgtcaa

SEQ ID NO: 422511 - DNA, 25 bp, Artificial
  probe
  misc_feature (1)..(25): SEQ ID NO: 5821; WAN024CU3; Start 39; Stop 63
gggcaatggtattatcagcacttgt

SEQ ID NO: 422512 - DNA, 25 bp, Artificial
  probe
  misc_feature (1)..(25): SEQ ID NO: 5821; WAN024CU3; Start 154; Stop 178
gttcaagagaattttacctgcgatg

SEQ ID NO: 422513 - DNA, 25 bp, Artificial
  probe
  misc_feature (1)..(25): SEQ ID NO: 5821; WAN024CU3; Start 155; Stop 179
ttcaagagaattttacctgcgatgt

SEQ ID NO: 422514 - DNA, 25 bp, Artificial
  probe
  misc_feature (1)..(25): SEQ ID NO: 5821; WAN024CU3; Start 159; Stop 183
agagaattttacctgcgatgtcaag

SEQ ID NO: 422515 - DNA, 25 bp, Artificial
  probe
  misc_feature (1)..(25): SEQ ID NO: 5821; WAN024CU3; Start 156; Stop 180
tcaagagaattttacctgcgatgtc

SEQ ID NO: 422516 - DNA, 25 bp, Artificial
  probe
  misc_feature (1)..(25): SEQ ID NO: 5821; WAN024CU3; Start 157; Stop 181
caagagaattttacctgcgatgtca

SEQ ID NO: 422517 - DNA, 25 bp, Artificial
  probe
  misc_feature (1)..(25): SEQ ID NO: 5821; WAN024CU3; Start 150; Stop 174
gatcgttcaagagaattttacctgc

SEQ ID NO: 422518 - DNA, 25 bp, Artificial
  probe
  misc_feature (1)..(25): SEQ ID NO: 5821; WAN024CU3; Start 85; Stop 109
ggcattcatagaaagagcacccatc

SEQ ID NO: 422519 - DNA, 25 bp, Artificial
  probe
  misc_feature (1)..(25): SEQ ID NO: 5821; WAN024CU3; Start 149; Stop 173
tgatcgttcaagagaattttacctg

SEQ ID NO: 422520 - DNA, 25 bp, Artificial
  probe
  misc_feature (1)..(25): SEQ ID NO: 5821; WAN024CU3; Start 153; Stop 177
cgttcaagagaattttacctgcgat

SEQ ID NO: 422521 - DNA, 25 bp, Artificial
  probe
  misc_feature (1)..(25): SEQ ID NO: 5821; WAN024CU3; Start 151; Stop 175
atcgttcaagagaattttacctgcg

SEQ ID NO: 422522 - DNA, 25 bp, Artificial
  probe
  misc_feature (1)..(25): SEQ ID NO: 5821; WAN024CU3; Start 4; Stop 28
ttctggacttgttccttttggatag

SEQ ID NO: 422523 - DNA, 25 bp, Artificial
  probe
  misc_feature (1)..(25): SEQ ID NO: 5821; WAN024CU3; Start 148; Stop 172
atgatcgttcaagagaattttacct

SEQ ID NO: 422524 - DNA, 25 bp, Artificial
  probe
  misc_feature (1)..(25): SEQ ID NO: 5821; WAN024CU3; Start 3; Stop 27
gttctggacttgttccttttggata

SEQ ID NO: 422525 - DNA, 25 bp, Artificial
  probe
  misc_feature (1)..(25): SEQ ID NO: 5821; WAN024CU3; Start 147; Stop 171
catgatcgttcaagagaattttacc

SEQ ID NO: 422526 - DNA, 25 bp, Artificial
  probe
  misc_feature (1)..(25): SEQ ID NO: 5821; WAN024CU3; Start 143; Stop 167
ccctcatgatcgttcaagagaattt

SEQ ID NO: 422527 - DNA, 25 bp, Artificial
  probe
  misc_feature (1)..(25): SEQ ID NO: 5821; WAN024CU3; Start 175; Stop 199
gatgtcaaggtagtctttggctgga

SEQ ID NO: 422528 - DNA, 25 bp, Artificial
  probe
  misc_feature (1)..(25): SEQ ID NO: 5821; WAN024CU3; Start 160; Stop 184
gagaattttacctgcgatgtcaagg

SEQ ID NO: 422529 - DNA, 25 bp, Artificial
  probe
  misc_feature (1)..(25): SEQ ID NO: 5821; WAN024CU3; Start 142; Stop 166
accctcatgatcgttcaagagaatt

SEQ ID NO: 422530 - DNA, 25 bp, Artificial
  probe
  misc_feature (1)..(25): SEQ ID NO: 5822; WAN024FCH; Start 239; Stop 263
aatcaatgttacaaccaatccaacc

SEQ ID NO: 422531 - DNA, 25 bp, Artificial
  probe
  misc_feature (1)..(25): SEQ ID NO: 5822; WAN024FCH; Start 240; Stop 264
atcaatgttacaaccaatccaacct

SEQ ID NO: 422532 - DNA, 25 bp, Artificial
  probe
  misc_feature (1)..(25): SEQ ID NO: 5822; WAN024FCH; Start 99; Stop 123
ttctattgtccaacctcttgatgac

SEQ ID NO: 422533 - DNA, 25 bp, Artificial
  probe
  misc_feature (1)..(25): SEQ ID NO: 5822; WAN024FCH; Start 241; Stop 265
tcaatgttacaaccaatccaacctg

SEQ ID NO: 422534 - DNA, 25 bp, Artificial
  probe
  misc_feature (1)..(25): SEQ ID NO: 5822; WAN024FCH; Start 98; Stop 122
tttctattgtccaacctcttgatga

SEQ ID NO: 422535 - DNA, 25 bp, Artificial
  probe
  misc_feature (1)..(25): SEQ ID NO: 5822; WAN024FCH; Start 179; Stop 203
gatctctaacttgtccatcttgcac

SEQ ID NO: 422536 - DNA, 25 bp, Artificial
  probe
  misc_feature (1)..(25): SEQ ID NO: 5822; WAN024FCH; Start 200; Stop 224
gcacaagaaatatccttcctttaga

SEQ ID NO: 422537 - DNA, 25 bp, Artificial
  probe
  misc_feature (1)..(25): SEQ ID NO: 5822; WAN024FCH; Start 97; Stop 121
atttctattgtccaacctcttgatg

SEQ ID NO: 422538 - DNA, 25 bp, Artificial
  probe
  misc_feature (1)..(25): SEQ ID NO: 5822; WAN024FCH; Start 242; Stop 266
caatgttacaaccaatccaacctgc

SEQ ID NO: 422539 - DNA, 25 bp, Artificial
  probe
  misc_feature (1)..(25): SEQ ID NO: 5822; WAN024FCH; Start 95; Stop 119
gaatttctattgtccaacctcttga

SEQ ID NO: 422540 - DNA, 25 bp, Artificial
  probe
  misc_feature (1)..(25): SEQ ID NO: 5822; WAN024FCH; Start 238; Stop 262
aaatcaatgttacaaccaatccaac

SEQ ID NO: 422541 - DNA, 25 bp, Artificial
  probe
  misc_feature (1)..(25): SEQ ID NO: 5822; WAN024FCH; Start 243; Stop 267
aatgttacaaccaatccaacctgct

SEQ ID NO: 422542 - DNA, 25 bp, Artificial
  probe
  misc_feature (1)..(25): SEQ ID NO: 5822; WAN024FCH; Start 94; Stop 118
agaatttctattgtccaacctcttg

SEQ ID NO: 422543 - DNA, 25 bp, Artificial
  probe
  misc_feature (1)..(25): SEQ ID NO: 5822; WAN024FCH; Start 96; Stop 120
aatttctattgtccaacctcttgat

SEQ ID NO: 422544 - DNA, 25 bp, Artificial
  probe
  misc_feature (1)..(25): SEQ ID NO: 5822; WAN024FCH; Start 244; Stop 268
atgttacaaccaatccaacctgctc

SEQ ID NO: 422545 - DNA, 25 bp, Artificial
  probe
  misc_feature (1)..(25): SEQ ID NO: 5822; WAN024FCH; Start 38; Stop 62
aacgatacatatcttcaagggtaaa

SEQ ID NO: 422546 - DNA, 25 bp, Artificial
  probe
  misc_feature (1)..(25): SEQ ID NO: 5822; WAN024FCH; Start 37; Stop 61
aaacgatacatatcttcaagggtaa

SEQ ID NO: 422547 - DNA, 25 bp, Artificial
  probe
  misc_feature (1)..(25): SEQ ID NO: 5822; WAN024FCH; Start 180; Stop 204
atctctaacttgtccatcttgcaca

SEQ ID NO: 422548 - DNA, 25 bp, Artificial
  probe
  misc_feature (1)..(25): SEQ ID NO: 5822; WAN024FCH; Start 39; Stop 63
acgatacatatcttcaagggtaaat

SEQ ID NO: 422549 - DNA, 25 bp, Artificial
  probe
  misc_feature (1)..(25): SEQ ID NO: 5822; WAN024FCH; Start 237; Stop 261
taaatcaatgttacaaccaatccaa

SEQ ID NO: 422550 - DNA, 25 bp, Artificial
  probe
  misc_feature (1)..(25): SEQ ID NO: 5822; WAN024FCH; Start 44; Stop 68
acatatcttcaagggtaaattctga

SEQ ID NO: 422551 - DNA, 25 bp, Artificial
  probe
  misc_feature (1)..(25): SEQ ID NO: 5822; WAN024FCH; Start 197; Stop 221
cttgcacaagaaatatccttccttt

SEQ ID NO: 422552 - DNA, 25 bp, Artificial
  probe
  misc_feature (1)..(25): SEQ ID NO: 5822; WAN024FCH; Start 236; Stop 260
ataaatcaatgttacaaccaatcca

SEQ ID NO: 422553 - DNA, 25 bp, Artificial
  probe
  misc_feature (1)..(25): SEQ ID NO: 5822; WAN024FCH; Start 199; Stop 223
tgcacaagaaatatccttcctttag

SEQ ID NO: 422554 - DNA, 25 bp, Artificial
  probe
  misc_feature (1)..(25): SEQ ID NO: 5822; WAN024FCH; Start 178; Stop 202
ggatctctaacttgtccatcttgca

SEQ ID NO: 422555 - DNA, 25 bp, Artificial
  probe
  misc_feature (1)..(25): SEQ ID NO: 5822; WAN024FCH; Start 198; Stop 222
ttgcacaagaaatatccttccttta

SEQ ID NO: 422556 - DNA, 25 bp, Artificial
  probe
  misc_feature (1)..(25): SEQ ID NO: 5822; WAN024FCH; Start 60; Stop 84
aaattctgaaccctctatcttatct

SEQ ID NO: 422557 - DNA, 25 bp, Artificial
  probe
  misc_feature (1)..(25): SEQ ID NO: 5822; WAN024FCH; Start 223; Stop 247
gaaggtacttgtgataaatcaatgt

SEQ ID NO: 422558 - DNA, 25 bp, Artificial
  probe
  misc_feature (1)..(25): SEQ ID NO: 5822; WAN024FCH; Start 201; Stop 225
cacaagaaatatccttcctttagaa

SEQ ID NO: 422559 - DNA, 25 bp, Artificial
  probe
  misc_feature (1)..(25): SEQ ID NO: 5822; WAN024FCH; Start 235; Stop 259
gataaatcaatgttacaaccaatcc

SEQ ID NO: 422560 - DNA, 25 bp, Artificial
  probe
  misc_feature (1)..(25): SEQ ID NO: 5822; WAN024FCH; Start 40; Stop 64
cgatacatatcttcaagggtaaatt

SEQ ID NO: 422561 - DNA, 25 bp, Artificial
  probe
  misc_feature (1)..(25): SEQ ID NO: 5822; WAN024FCH; Start 232; Stop 256
tgtgataaatcaatgttacaaccaa

SEQ ID NO: 422562 - DNA, 25 bp, Artificial
  probe
  misc_feature (1)..(25): SEQ ID NO: 5822; WAN024FCH; Start 22; Stop 46
tttaggtcactttcaaaacgataca

SEQ ID NO: 422563 - DNA, 25 bp, Artificial
  probe
  misc_feature (1)..(25): SEQ ID NO: 5823; WAN024F4J; Start 52; Stop 76
cagggtgccattcttacatcaaata

SEQ ID NO: 422564 - DNA, 25 bp, Artificial
  probe
  misc_feature (1)..(25): SEQ ID NO: 5823; WAN024F4J; Start 51; Stop 75
tcagggtgccattcttacatcaaat

SEQ ID NO: 422565 - DNA, 25 bp, Artificial
  probe
  misc_feature (1)..(25): SEQ ID NO: 5823; WAN024F4J; Start 50; Stop 74
atcagggtgccattcttacatcaaa

SEQ ID NO: 422566 - DNA, 25 bp, Artificial
  probe
  misc_feature (1)..(25): SEQ ID NO: 5823; WAN024F4J; Start 46; Stop 70
aaacatcagggtgccattcttacat

SEQ ID NO: 422567 - DNA, 25 bp, Artificial
  probe
  misc_feature (1)..(25): SEQ ID NO: 5823; WAN024F4J; Start 214; Stop 238
aaatacgtttaccacctgtcagttt

SEQ ID NO: 422568 - DNA, 25 bp, Artificial
  probe
  misc_feature (1)..(25): SEQ ID NO: 5823; WAN024F4J; Start 49; Stop 73
catcagggtgccattcttacatcaa

SEQ ID NO: 422569 - DNA, 25 bp, Artificial
  probe
  misc_feature (1)..(25): SEQ ID NO: 5823; WAN024F4J; Start 47; Stop 71
aacatcagggtgccattcttacatc

SEQ ID NO: 422570 - DNA, 25 bp, Artificial
  probe
  misc_feature (1)..(25): SEQ ID NO: 5823; WAN024F4J; Start 215; Stop 239
aatacgtttaccacctgtcagtttg

SEQ ID NO: 422571 - DNA, 25 bp, Artificial
  probe
  misc_feature (1)..(25): SEQ ID NO: 5823; WAN024F4J; Start 45; Stop 69
gaaacatcagggtgccattcttaca

SEQ ID NO: 422572 - DNA, 25 bp, Artificial
  probe
  misc_feature (1)..(25): SEQ ID NO: 5823; WAN024F4J; Start 44; Stop 68
tgaaacatcagggtgccattcttac

SEQ ID NO: 422573 - DNA, 25 bp, Artificial
  probe
  misc_feature (1)..(25): SEQ ID NO: 5823; WAN024F4J; Start 216; Stop 240
atacgtttaccacctgtcagtttga

SEQ ID NO: 422574 - DNA, 25 bp, Artificial
  probe
  misc_feature (1)..(25): SEQ ID NO: 5823; WAN024F4J; Start 48; Stop 72
acatcagggtgccattcttacatca

SEQ ID NO: 422575 - DNA, 25 bp, Artificial
  probe
  misc_feature (1)..(25): SEQ ID NO: 5823; WAN024F4J; Start 213; Stop 237
aaaatacgtttaccacctgtcagtt

SEQ ID NO: 422576 - DNA, 25 bp, Artificial
  probe
  misc_feature (1)..(25): SEQ ID NO: 5823; WAN024F4J; Start 115; Stop 139
ctccccaaaagaagaagtcaacctt

SEQ ID NO: 422577 - DNA, 25 bp, Artificial
  probe
  misc_feature (1)..(25): SEQ ID NO: 5823; WAN024F4J; Start 212; Stop 236
gaaaatacgtttaccacctgtcagt

SEQ ID NO: 422578 - DNA, 25 bp, Artificial
  probe
  misc_feature (1)..(25): SEQ ID NO: 5823; WAN024F4J; Start 211; Stop 235
ggaaaatacgtttaccacctgtcag

SEQ ID NO: 422579 - DNA, 25 bp, Artificial
  probe
  misc_feature (1)..(25): SEQ ID NO: 5823; WAN024F4J; Start 122; Stop 146
aaagaagaagtcaaccttccactcg

SEQ ID NO: 422580 - DNA, 25 bp, Artificial
  probe
  misc_feature (1)..(25): SEQ ID NO: 5823; WAN024F4J; Start 150; Stop 174
caaggatttcctttaccagacaatc

SEQ ID NO: 422581 - DNA, 25 bp, Artificial
  probe
  misc_feature (1)..(25): SEQ ID NO: 5823; WAN024F4J; Start 149; Stop 173
ccaaggatttcctttaccagacaat

SEQ ID NO: 422582 - DNA, 25 bp, Artificial
  probe
  misc_feature (1)..(25): SEQ ID NO: 5823; WAN024F4J; Start 121; Stop 145
aaaagaagaagtcaaccttccactc

SEQ ID NO: 422583 - DNA, 25 bp, Artificial
  probe
  misc_feature (1)..(25): SEQ ID NO: 5823; WAN024F4J; Start 120; Stop 144
caaaagaagaagtcaaccttccact

SEQ ID NO: 422584 - DNA, 25 bp, Artificial
  probe
  misc_feature (1)..(25): SEQ ID NO: 5823; WAN024F4J; Start 186; Stop 210
aaatggtgatgtacaggcgtcatac

SEQ ID NO: 422585 - DNA, 25 bp, Artificial
  probe
  misc_feature (1)..(25): SEQ ID NO: 5823; WAN024F4J; Start 114; Stop 138
actccccaaaagaagaagtcaacct

SEQ ID NO: 422586 - DNA, 25 bp, Artificial
  probe
  misc_feature (1)..(25): SEQ ID NO: 5823; WAN024F4J; Start 43; Stop 67
ctgaaacatcagggtgccattctta

SEQ ID NO: 422587 - DNA, 25 bp, Artificial
  probe
  misc_feature (1)..(25): SEQ ID NO: 5823; WAN024F4J; Start 2; Stop 26
tgttctttgattttcattgtgtatt

SEQ ID NO: 422588 - DNA, 25 bp, Artificial
  probe
  misc_feature (1)..(25): SEQ ID NO: 5823; WAN024F4J; Start 1; Stop 25
ttgttctttgattttcattgtgtat

SEQ ID NO: 422589 - DNA, 25 bp, Artificial
  probe
  misc_feature (1)..(25): SEQ ID NO: 5823; WAN024F4J; Start 148; Stop 172
tccaaggatttcctttaccagacaa

SEQ ID NO: 422590 - DNA, 25 bp, Artificial
  probe
  misc_feature (1)..(25): SEQ ID NO: 5823; WAN024F4J; Start 204; Stop 228
gtcatacggaaaatacgtttaccac

SEQ ID NO: 422591 - DNA, 25 bp, Artificial
  probe
  misc_feature (1)..(25): SEQ ID NO: 5823; WAN024F4J; Start 210; Stop 234
cggaaaatacgtttaccacctgtca

SEQ ID NO: 422592 - DNA, 25 bp, Artificial
  probe
  misc_feature (1)..(25): SEQ ID NO: 5823; WAN024F4J; Start 147; Stop 171
ctccaaggatttcctttaccagaca

SEQ ID NO: 422593 - DNA, 25 bp, Artificial
  probe
  misc_feature (1)..(25): SEQ ID NO: 5823; WAN024F4J; Start 207; Stop 231
atacggaaaatacgtttaccacctg

SEQ ID NO: 422594 - DNA, 25 bp, Artificial
  probe
  misc_feature (1)..(25): SEQ ID NO: 5823; WAN024F4J; Start 206; Stop 230
catacggaaaatacgtttaccacct

SEQ ID NO: 422595 - DNA, 25 bp, Artificial
  probe
  misc_feature (1)..(25): SEQ ID NO: 5823; WAN024F4J; Start 205; Stop 229
tcatacggaaaatacgtttaccacc

SEQ ID NO: 422596 - DNA, 25 bp, Artificial
  probe
  misc_feature (1)..(25): SEQ ID NO: 5824; WAN024GCV; Start 171; Stop 195
tggctattatcttaccagaacttcc

SEQ ID NO: 422597 - DNA, 25 bp, Artificial
  probe
  misc_feature (1)..(25): SEQ ID NO: 5824; WAN024GCV; Start 157; Stop 181
agaggtattacagatggctattatc

SEQ ID NO: 422598 - DNA, 25 bp, Artificial
  probe
  misc_feature (1)..(25): SEQ ID NO: 5824; WAN024GCV; Start 40; Stop 64
gggtttcttgctgatttgcttattt

SEQ ID NO: 422599 - DNA, 25 bp, Artificial
  probe
  misc_feature (1)..(25): SEQ ID NO: 5824; WAN024GCV; Start 266; Stop 290
caaacttatgtcaacaatgccaatg

SEQ ID NO: 422600 - DNA, 25 bp, Artificial
  probe
  misc_feature (1)..(25): SEQ ID NO: 5824; WAN024GCV; Start 265; Stop 289
tcaaacttatgtcaacaatgccaat

SEQ ID NO: 422601 - DNA, 25 bp, Artificial
  probe
  misc_feature (1)..(25): SEQ ID NO: 5824; WAN024GCV; Start 264; Stop 288
atcaaacttatgtcaacaatgccaa

SEQ ID NO: 422602 - DNA, 25 bp, Artificial
  probe
  misc_feature (1)..(25): SEQ ID NO: 5824; WAN024GCV; Start 263; Stop 287
catcaaacttatgtcaacaatgcca

SEQ ID NO: 422603 - DNA, 25 bp, Artificial
  probe
  misc_feature (1)..(25): SEQ ID NO: 5824; WAN024GCV; Start 261; Stop 285
accatcaaacttatgtcaacaatgc

SEQ ID NO: 422604 - DNA, 25 bp, Artificial
  probe
  misc_feature (1)..(25): SEQ ID NO: 5824; WAN024GCV; Start 260; Stop 284
caccatcaaacttatgtcaacaatg

SEQ ID NO: 422605 - DNA, 25 bp, Artificial
  probe
  misc_feature (1)..(25): SEQ ID NO: 5824; WAN024GCV; Start 166; Stop 190
acagatggctattatcttaccagaa

SEQ ID NO: 422606 - DNA, 25 bp, Artificial
  probe
  misc_feature (1)..(25): SEQ ID NO: 5824; WAN024GCV; Start 170; Stop 194
atggctattatcttaccagaacttc

SEQ ID NO: 422607 - DNA, 25 bp, Artificial
  probe
  misc_feature (1)..(25): SEQ ID NO: 5824; WAN024GCV; Start 169; Stop 193
gatggctattatcttaccagaactt

SEQ ID NO: 422608 - DNA, 25 bp, Artificial
  probe
  misc_feature (1)..(25): SEQ ID NO: 5824; WAN024GCV; Start 267; Stop 291
aaacttatgtcaacaatgccaatgc

SEQ ID NO: 422609 - DNA, 25 bp, Artificial
  probe
  misc_feature (1)..(25): SEQ ID NO: 5824; WAN024GCV; Start 156; Stop 180
aagaggtattacagatggctattat

SEQ ID NO: 422610 - DNA, 25 bp, Artificial
  probe
  misc_feature (1)..(25): SEQ ID NO: 5824; WAN024GCV; Start 168; Stop 192
agatggctattatcttaccagaact

SEQ ID NO: 422611 - DNA, 25 bp, Artificial
  probe
  misc_feature (1)..(25): SEQ ID NO: 5824; WAN024GCV; Start 167; Stop 191
cagatggctattatcttaccagaac

SEQ ID NO: 422612 - DNA, 25 bp, Artificial
  probe
  misc_feature (1)..(25): SEQ ID NO: 5824; WAN024GCV; Start 39; Stop 63
tgggtttcttgctgatttgcttatt

SEQ ID NO: 422613 - DNA, 25 bp, Artificial
  probe
  misc_feature (1)..(25): SEQ ID NO: 5824; WAN024GCV; Start 741; Stop 765
ataaagtagatgaattgtacgcagc

SEQ ID NO: 422614 - DNA, 25 bp, Artificial
  probe
  misc_feature (1)..(25): SEQ ID NO: 5824; WAN024GCV; Start 262; Stop 286
ccatcaaacttatgtcaacaatgcc

SEQ ID NO: 422615 - DNA, 25 bp, Artificial
  probe
  misc_feature (1)..(25): SEQ ID NO: 5824; WAN024GCV; Start 258; Stop 282
aacaccatcaaacttatgtcaacaa

SEQ ID NO: 422616 - DNA, 25 bp, Artificial
  probe
  misc_feature (1)..(25): SEQ ID NO: 5824; WAN024GCV; Start 257; Stop 281
aaacaccatcaaacttatgtcaaca

SEQ ID NO: 422617 - DNA, 25 bp, Artificial
  probe
  misc_feature (1)..(25): SEQ ID NO: 5824; WAN024GCV; Start 255; Stop 279
acaaacaccatcaaacttatgtcaa

SEQ ID NO: 422618 - DNA, 25 bp, Artificial
  probe
  misc_feature (1)..(25): SEQ ID NO: 5824; WAN024GCV; Start 259; Stop 283
acaccatcaaacttatgtcaacaat

SEQ ID NO: 422619 - DNA, 25 bp, Artificial
  probe
  misc_feature (1)..(25): SEQ ID NO: 5824; WAN024GCV; Start 256; Stop 280
caaacaccatcaaacttatgtcaac

SEQ ID NO: 422620 - DNA, 25 bp, Artificial
  probe
  misc_feature (1)..(25): SEQ ID NO: 5824; WAN024GCV; Start 252; Stop 276
atgacaaacaccatcaaacttatgt

SEQ ID NO: 422621 - DNA, 25 bp, Artificial
  probe
  misc_feature (1)..(25): SEQ ID NO: 5824; WAN024GCV; Start 165; Stop 189
tacagatggctattatcttaccaga

SEQ ID NO: 422622 - DNA, 25 bp, Artificial
  probe
  misc_feature (1)..(25): SEQ ID NO: 5824; WAN024GCV; Start 250; Stop 274
ccatgacaaacaccatcaaacttat

SEQ ID NO: 422623 - DNA, 25 bp, Artificial
  probe
  misc_feature (1)..(25): SEQ ID NO: 5824; WAN024GCV; Start 38; Stop 62
gtgggtttcttgctgatttgcttat

SEQ ID NO: 422624 - DNA, 25 bp, Artificial
  probe
  misc_feature (1)..(25): SEQ ID NO: 5824; WAN024GCV; Start 251; Stop 275
catgacaaacaccatcaaacttatg

SEQ ID NO: 422625 - DNA, 25 bp, Artificial
  probe
  misc_feature (1)..(25): SEQ ID NO: 5824; WAN024GCV; Start 738; Stop 762
ggaataaagtagatgaattgtacgc

SEQ ID NO: 422626 - DNA, 25 bp, Artificial
  probe
  misc_feature (1)..(25): SEQ ID NO: 5824; WAN024GCV; Start 742; Stop 766
taaagtagatgaattgtacgcagct

SEQ ID NO: 422627 - DNA, 25 bp, Artificial
  probe
  misc_feature (1)..(25): SEQ ID NO: 5824; WAN024GCV; Start 249; Stop 273
accatgacaaacaccatcaaactta

SEQ ID NO: 422628 - DNA, 25 bp, Artificial
  probe
  misc_feature (1)..(25): SEQ ID NO: 5824; WAN024GCV; Start 164; Stop 188
ttacagatggctattatcttaccag

SEQ ID NO: 422629 - DNA, 25 bp, Artificial
  probe
  misc_feature (1)..(25): SEQ ID NO: 5825; WAN024DVN; Start 278; Stop 302
tggattcagttgatattgtaacagg

SEQ ID NO: 422630 - DNA, 25 bp, Artificial
  probe
  misc_feature (1)..(25): SEQ ID NO: 5825; WAN024DVN; Start 130; Stop 154
ttgatgcctggagagaatattgtag

SEQ ID NO: 422631 - DNA, 25 bp, Artificial
  probe
  misc_feature (1)..(25): SEQ ID NO: 5825; WAN024DVN; Start 132; Stop 156
gatgcctggagagaatattgtagag

SEQ ID NO: 422632 - DNA, 25 bp, Artificial
  probe
  misc_feature (1)..(25): SEQ ID NO: 5825; WAN024DVN; Start 133; Stop 157
atgcctggagagaatattgtagagt

SEQ ID NO: 422633 - DNA, 25 bp, Artificial
  probe
  misc_feature (1)..(25): SEQ ID NO: 5825; WAN024DVN; Start 131; Stop 155
tgatgcctggagagaatattgtaga

SEQ ID NO: 422634 - DNA, 25 bp, Artificial
  probe
  misc_feature (1)..(25): SEQ ID NO: 5825; WAN024DVN; Start 134; Stop 158
tgcctggagagaatattgtagagtt

SEQ ID NO: 422635 - DNA, 25 bp, Artificial
  probe
  misc_feature (1)..(25): SEQ ID NO: 5825; WAN024DVN; Start 277; Stop 301
ttggattcagttgatattgtaacag

SEQ ID NO: 422636 - DNA, 25 bp, Artificial
  probe
  misc_feature (1)..(25): SEQ ID NO: 5825; WAN024DVN; Start 239; Stop 263
gaagtcctaataatgtggctttgtc

SEQ ID NO: 422637 - DNA, 25 bp, Artificial
  probe
  misc_feature (1)..(25): SEQ ID NO: 5825; WAN024DVN; Start 240; Stop 264
aagtcctaataatgtggctttgtca

SEQ ID NO: 422638 - DNA, 25 bp, Artificial
  probe
  misc_feature (1)..(25): SEQ ID NO: 5825; WAN024DVN; Start 232; Stop 256
attggaggaagtcctaataatgtgg

SEQ ID NO: 422639 - DNA, 25 bp, Artificial
  probe
  misc_feature (1)..(25): SEQ ID NO: 5825; WAN024DVN; Start 112; Stop 136
agagttaggacattaggtttgatgc

SEQ ID NO: 422640 - DNA, 25 bp, Artificial
  probe
  misc_feature (1)..(25): SEQ ID NO: 5825; WAN024DVN; Start 93; Stop 117
tggtgagacaacaaatgatagagtt

SEQ ID NO: 422641 - DNA, 25 bp, Artificial
  probe
  misc_feature (1)..(25): SEQ ID NO: 5825; WAN024DVN; Start 407; Stop 431
aacaacttaacgtagaggaggaaga

SEQ ID NO: 422642 - DNA, 25 bp, Artificial
  probe
  misc_feature (1)..(25): SEQ ID NO: 5825; WAN024DVN; Start 406; Stop 430
caacaacttaacgtagaggaggaag

SEQ ID NO: 422643 - DNA, 25 bp, Artificial
  probe
  misc_feature (1)..(25): SEQ ID NO: 5825; WAN024DVN; Start 92; Stop 116
ttggtgagacaacaaatgatagagt

SEQ ID NO: 422644 - DNA, 25 bp, Artificial
  probe
  misc_feature (1)..(25): SEQ ID NO: 5825; WAN024DVN; Start 230; Stop 254
tgattggaggaagtcctaataatgt

SEQ ID NO: 422645 - DNA, 25 bp, Artificial
  probe
  misc_feature (1)..(25): SEQ ID NO: 5825; WAN024DVN; Start 279; Stop 303
ggattcagttgatattgtaacaggg

SEQ ID NO: 422646 - DNA, 25 bp, Artificial
  probe
  misc_feature (1)..(25): SEQ ID NO: 5825; WAN024DVN; Start 231; Stop 255
gattggaggaagtcctaataatgtg

SEQ ID NO: 422647 - DNA, 25 bp, Artificial
  probe
  misc_feature (1)..(25): SEQ ID NO: 5825; WAN024DVN; Start 405; Stop 429
acaacaacttaacgtagaggaggaa

SEQ ID NO: 422648 - DNA, 25 bp, Artificial
  probe
  misc_feature (1)..(25): SEQ ID NO: 5825; WAN024DVN; Start 404; Stop 428
aacaacaacttaacgtagaggagga

SEQ ID NO: 422649 - DNA, 25 bp, Artificial
  probe
  misc_feature (1)..(25): SEQ ID NO: 5825; WAN024DVN; Start 195; Stop 219
agactcaaatcaagaggttatcgtt

SEQ ID NO: 422650 - DNA, 25 bp, Artificial
  probe
  misc_feature (1)..(25): SEQ ID NO: 5825; WAN024DVN; Start 238; Stop 262
ggaagtcctaataatgtggctttgt

SEQ ID NO: 422651 - DNA, 25 bp, Artificial
  probe
  misc_feature (1)..(25): SEQ ID NO: 5825; WAN024DVN; Start 189; Stop 213
actgttagactcaaatcaagaggtt

SEQ ID NO: 422652 - DNA, 25 bp, Artificial
  probe
  misc_feature (1)..(25): SEQ ID NO: 5825; WAN024DVN; Start 188; Stop 212
aactgttagactcaaatcaagaggt

SEQ ID NO: 422653 - DNA, 25 bp, Artificial
  probe
  misc_feature (1)..(25): SEQ ID NO: 5825; WAN024DVN; Start 113; Stop 137
gagttaggacattaggtttgatgcc

SEQ ID NO: 422654 - DNA, 25 bp, Artificial
  probe
  misc_feature (1)..(25): SEQ ID NO: 5825; WAN024DVN; Start 280; Stop 304
gattcagttgatattgtaacagggt

SEQ ID NO: 422655 - DNA, 25 bp, Artificial
  probe
  misc_feature (1)..(25): SEQ ID NO: 5825; WAN024DVN; Start 196; Stop 220
gactcaaatcaagaggttatcgttt

SEQ ID NO: 422656 - DNA, 25 bp, Artificial
  probe
  misc_feature (1)..(25): SEQ ID NO: 5825; WAN024DVN; Start 187; Stop 211
gaactgttagactcaaatcaagagg

SEQ ID NO: 422657 - DNA, 25 bp, Artificial
  probe
  misc_feature (1)..(25): SEQ ID NO: 5825; WAN024DVN; Start 99; Stop 123
gacaacaaatgatagagttaggaca

SEQ ID NO: 422658 - DNA, 25 bp, Artificial
  probe
  misc_feature (1)..(25): SEQ ID NO: 5825; WAN024DVN; Start 94; Stop 118
ggtgagacaacaaatgatagagtta

SEQ ID NO: 422659 - DNA, 25 bp, Artificial
  probe
  misc_feature (1)..(25): SEQ ID NO: 5825; WAN024DVN; Start 194; Stop 218
tagactcaaatcaagaggttatcgt

SEQ ID NO: 422660 - DNA, 25 bp, Artificial
  probe
  misc_feature (1)..(25): SEQ ID NO: 5825; WAN024DVN; Start 282; Stop 306
ttcagttgatattgtaacagggttt

SEQ ID NO: 422661 - DNA, 25 bp, Artificial
  probe
  misc_feature (1)..(25): SEQ ID NO: 5825; WAN024DVN; Start 229; Stop 253
ttgattggaggaagtcctaataatg

SEQ ID NO: 422662 - DNA, 25 bp, Artificial
  probe
  misc_feature (1)..(25): SEQ ID NO: 5826; WAN024B2C; Start 94; Stop 118
gaagaaagacagaaattgttcaaga

SEQ ID NO: 422663 - DNA, 25 bp, Artificial
  probe
  misc_feature (1)..(25): SEQ ID NO: 5826; WAN024B2C; Start 93; Stop 117
agaagaaagacagaaattgttcaag

SEQ ID NO: 422664 - DNA, 25 bp, Artificial
  probe
  misc_feature (1)..(25): SEQ ID NO: 5826; WAN024B2C; Start 95; Stop 119
aagaaagacagaaattgttcaagaa

SEQ ID NO: 422665 - DNA, 25 bp, Artificial
  probe
  misc_feature (1)..(25): SEQ ID NO: 5826; WAN024B2C; Start 92; Stop 116
aagaagaaagacagaaattgttcaa

SEQ ID NO: 422666 - DNA, 25 bp, Artificial
  probe
  misc_feature (1)..(25): SEQ ID NO: 5826; WAN024B2C; Start 91; Stop 115
aaagaagaaagacagaaattgttca

SEQ ID NO: 422667 - DNA, 25 bp, Artificial
  probe
  misc_feature (1)..(25): SEQ ID NO: 5826; WAN024B2C; Start 96; Stop 120
agaaagacagaaattgttcaagaat

SEQ ID NO: 422668 - DNA, 25 bp, Artificial
  probe
  misc_feature (1)..(25): SEQ ID NO: 5826; WAN024B2C; Start 90; Stop 114
gaaagaagaaagacagaaattgttc

SEQ ID NO: 422669 - DNA, 25 bp, Artificial
  probe
  misc_feature (1)..(25): SEQ ID NO: 5826; WAN024B2C; Start 10; Stop 34
aaacaagagggagagtacctgagag

SEQ ID NO: 422670 - DNA, 25 bp, Artificial
  probe
  misc_feature (1)..(25): SEQ ID NO: 5826; WAN024B2C; Start 3; Stop 27
gttgagaaaacaagagggagagtac

SEQ ID NO: 422671 - DNA, 25 bp, Artificial
  probe
  misc_feature (1)..(25): SEQ ID NO: 5826; WAN024B2C; Start 4; Stop 28
ttgagaaaacaagagggagagtacc

SEQ ID NO: 422672 - DNA, 25 bp, Artificial
  probe
  misc_feature (1)..(25): SEQ ID NO: 5826; WAN024B2C; Start 8; Stop 32
gaaaacaagagggagagtacctgag

SEQ ID NO: 422673 - DNA, 25 bp, Artificial
  probe
  misc_feature (1)..(25): SEQ ID NO: 5826; WAN024B2C; Start 6; Stop 30
gagaaaacaagagggagagtacctg

SEQ ID NO: 422674 - DNA, 25 bp, Artificial
  probe
  misc_feature (1)..(25): SEQ ID NO: 5826; WAN024B2C; Start 9; Stop 33
aaaacaagagggagagtacctgaga

SEQ ID NO: 422675 - DNA, 25 bp, Artificial
  probe
  misc_feature (1)..(25): SEQ ID NO: 5826; WAN024B2C; Start 7; Stop 31
agaaaacaagagggagagtacctga

SEQ ID NO: 422676 - DNA, 25 bp, Artificial
  probe
  misc_feature (1)..(25): SEQ ID NO: 5826; WAN024B2C; Start 5; Stop 29
tgagaaaacaagagggagagtacct

SEQ ID NO: 422677 - DNA, 25 bp, Artificial
  probe
  misc_feature (1)..(25): SEQ ID NO: 5826; WAN024B2C; Start 2; Stop 26
tgttgagaaaacaagagggagagta

SEQ ID NO: 422678 - DNA, 25 bp, Artificial
  probe
  misc_feature (1)..(25): SEQ ID NO: 5826; WAN024B2C; Start 11; Stop 35
aacaagagggagagtacctgagagc

SEQ ID NO: 422679 - DNA, 25 bp, Artificial
  probe
  misc_feature (1)..(25): SEQ ID NO: 5827; WAN024CGA; Start 76; Stop 100
cgtgatacaatgcgtttaatagact

SEQ ID NO: 422680 - DNA, 25 bp, Artificial
  probe
  misc_feature (1)..(25): SEQ ID NO: 5827; WAN024CGA; Start 77; Stop 101
gtgatacaatgcgtttaatagacta

SEQ ID NO: 422681 - DNA, 25 bp, Artificial
  probe
  misc_feature (1)..(25): SEQ ID NO: 5827; WAN024CGA; Start 78; Stop 102
tgatacaatgcgtttaatagactat

SEQ ID NO: 422682 - DNA, 25 bp, Artificial
  probe
  misc_feature (1)..(25): SEQ ID NO: 5827; WAN024CGA; Start 75; Stop 99
acgtgatacaatgcgtttaatagac

SEQ ID NO: 422683 - DNA, 25 bp, Artificial
  probe
  misc_feature (1)..(25): SEQ ID NO: 5827; WAN024CGA; Start 104; Stop 128
aaattagttgtcttttcttctcaaa

SEQ ID NO: 422684 - DNA, 25 bp, Artificial
  probe
  misc_feature (1)..(25): SEQ ID NO: 5827; WAN024CGA; Start 74; Stop 98
aacgtgatacaatgcgtttaataga

SEQ ID NO: 422685 - DNA, 25 bp, Artificial
  probe
  misc_feature (1)..(25): SEQ ID NO: 5827; WAN024CGA; Start 105; Stop 129
aattagttgtcttttcttctcaaat

SEQ ID NO: 422686 - DNA, 25 bp, Artificial
  probe
  misc_feature (1)..(25): SEQ ID NO: 5827; WAN024CGA; Start 103; Stop 127
aaaattagttgtcttttcttctcaa

SEQ ID NO: 422687 - DNA, 25 bp, Artificial
  probe
  misc_feature (1)..(25): SEQ ID NO: 5827; WAN024CGA; Start 82; Stop 106
acaatgcgtttaatagactataaaa

SEQ ID NO: 422688 - DNA, 25 bp, Artificial
  probe
  misc_feature (1)..(25): SEQ ID NO: 5828; WAN024EU7; Start 138; Stop 162
tttagtcattgcgaccaaagatacg

SEQ ID NO: 422689 - DNA, 25 bp, Artificial
  probe
  misc_feature (1)..(25): SEQ ID NO: 5828; WAN024EU7; Start 16; Stop 40
acttttcttcatagacaactcctca

SEQ ID NO: 422690 - DNA, 25 bp, Artificial
  probe
  misc_feature (1)..(25): SEQ ID NO: 5828; WAN024EU7; Start 112; Stop 136
actcaaaacactgatttcatagacc

SEQ ID NO: 422691 - DNA, 25 bp, Artificial
  probe
  misc_feature (1)..(25): SEQ ID NO: 5828; WAN024EU7; Start 17; Stop 41
cttttcttcatagacaactcctcaa

SEQ ID NO: 422692 - DNA, 25 bp, Artificial
  probe
  misc_feature (1)..(25): SEQ ID NO: 5828; WAN024EU7; Start 15; Stop 39
aacttttcttcatagacaactcctc

SEQ ID NO: 422693 - DNA, 25 bp, Artificial
  probe
  misc_feature (1)..(25): SEQ ID NO: 5828; WAN024EU7; Start 54; Stop 78
cgtattatacacctatttccaagaa

SEQ ID NO: 422694 - DNA, 25 bp, Artificial
  probe
  misc_feature (1)..(25): SEQ ID NO: 5828; WAN024EU7; Start 113; Stop 137
ctcaaaacactgatttcatagacct

SEQ ID NO: 422695 - DNA, 25 bp, Artificial
  probe
  misc_feature (1)..(25): SEQ ID NO: 5828; WAN024EU7; Start 53; Stop 77
acgtattatacacctatttccaaga

SEQ ID NO: 422696 - DNA, 25 bp, Artificial
  probe
  misc_feature (1)..(25): SEQ ID NO: 5828; WAN024EU7; Start 19; Stop 43
tttcttcatagacaactcctcaaaa

SEQ ID NO: 422697 - DNA, 25 bp, Artificial
  probe
  misc_feature (1)..(25): SEQ ID NO: 5828; WAN024EU7; Start 18; Stop 42
ttttcttcatagacaactcctcaaa

SEQ ID NO: 422698 - DNA, 25 bp, Artificial
  probe
  misc_feature (1)..(25): SEQ ID NO: 5828; WAN024EU7; Start 14; Stop 38
aaacttttcttcatagacaactcct

SEQ ID NO: 422699 - DNA, 25 bp, Artificial
  probe
  misc_feature (1)..(25): SEQ ID NO: 5828; WAN024EU7; Start 137; Stop 161
ttttagtcattgcgaccaaagatac

SEQ ID NO: 422700 - DNA, 25 bp, Artificial
  probe
  misc_feature (1)..(25): SEQ ID NO: 5828; WAN024EU7; Start 114; Stop 138
tcaaaacactgatttcatagacctt

SEQ ID NO: 422701 - DNA, 25 bp, Artificial
  probe
  misc_feature (1)..(25): SEQ ID NO: 5828; WAN024EU7; Start 127; Stop 151
ttcatagaccttttagtcattgcga

SEQ ID NO: 422702 - DNA, 25 bp, Artificial
  probe
  misc_feature (1)..(25): SEQ ID NO: 5828; WAN024EU7; Start 126; Stop 150
tttcatagaccttttagtcattgcg

SEQ ID NO: 422703 - DNA, 25 bp, Artificial
  probe
  misc_feature (1)..(25): SEQ ID NO: 5828; WAN024EU7; Start 115; Stop 139
caaaacactgatttcatagaccttt

SEQ ID NO: 422704 - DNA, 25 bp, Artificial
  probe
  misc_feature (1)..(25): SEQ ID NO: 5828; WAN024EU7; Start 111; Stop 135
cactcaaaacactgatttcatagac

SEQ ID NO: 422705 - DNA, 25 bp, Artificial
  probe
  misc_feature (1)..(25): SEQ ID NO: 5828; WAN024EU7; Start 109; Stop 133
gtcactcaaaacactgatttcatag

SEQ ID NO: 422706 - DNA, 25 bp, Artificial
  probe
  misc_feature (1)..(25): SEQ ID NO: 5828; WAN024EU7; Start 108; Stop 132
tgtcactcaaaacactgatttcata

SEQ ID NO: 422707 - DNA, 25 bp, Artificial
  probe
  misc_feature (1)..(25): SEQ ID NO: 5828; WAN024EU7; Start 110; Stop 134
tcactcaaaacactgatttcataga

SEQ ID NO: 422708 - DNA, 25 bp, Artificial
  probe
  misc_feature (1)..(25): SEQ ID NO: 5828; WAN024EU7; Start 128; Stop 152
tcatagaccttttagtcattgcgac

SEQ ID NO: 422709 - DNA, 25 bp, Artificial
  probe
  misc_feature (1)..(25): SEQ ID NO: 5828; WAN024EU7; Start 119; Stop 143
acactgatttcatagaccttttagt

SEQ ID NO: 422710 - DNA, 25 bp, Artificial
  probe
  misc_feature (1)..(25): SEQ ID NO: 5828; WAN024EU7; Start 139; Stop 163
ttagtcattgcgaccaaagatacgt

SEQ ID NO: 422711 - DNA, 25 bp, Artificial
  probe
  misc_feature (1)..(25): SEQ ID NO: 5828; WAN024EU7; Start 129; Stop 153
catagaccttttagtcattgcgacc

SEQ ID NO: 422712 - DNA, 25 bp, Artificial
  probe
  misc_feature (1)..(25): SEQ ID NO: 5828; WAN024EU7; Start 13; Stop 37
aaaacttttcttcatagacaactcc

SEQ ID NO: 422713 - DNA, 25 bp, Artificial
  probe
  misc_feature (1)..(25): SEQ ID NO: 5828; WAN024EU7; Start 52; Stop 76
aacgtattatacacctatttccaag

SEQ ID NO: 422714 - DNA, 25 bp, Artificial
  probe
  misc_feature (1)..(25): SEQ ID NO: 5828; WAN024EU7; Start 130; Stop 154
atagaccttttagtcattgcgacca

SEQ ID NO: 422715 - DNA, 25 bp, Artificial
  probe
  misc_feature (1)..(25): SEQ ID NO: 5828; WAN024EU7; Start 136; Stop 160
cttttagtcattgcgaccaaagata

SEQ ID NO: 422716 - DNA, 25 bp, Artificial
  probe
  misc_feature (1)..(25): SEQ ID NO: 5828; WAN024EU7; Start 131; Stop 155
tagaccttttagtcattgcgaccaa

SEQ ID NO: 422717 - DNA, 25 bp, Artificial
  probe
  misc_feature (1)..(25): SEQ ID NO: 5828; WAN024EU7; Start 118; Stop 142
aacactgatttcatagaccttttag

SEQ ID NO: 422718 - DNA, 25 bp, Artificial
  probe
  misc_feature (1)..(25): SEQ ID NO: 5828; WAN024EU7; Start 125; Stop 149
atttcatagaccttttagtcattgc

SEQ ID NO: 422719 - DNA, 25 bp, Artificial
  probe
  misc_feature (1)..(25): SEQ ID NO: 5828; WAN024EU7; Start 121; Stop 145
actgatttcatagaccttttagtca

SEQ ID NO: 422720 - DNA, 25 bp, Artificial
  probe
  misc_feature (1)..(25): SEQ ID NO: 5828; WAN024EU7; Start 2; Stop 26
tgttgatggataaaacttttcttca

SEQ ID NO: 422721 - DNA, 25 bp, Artificial
  probe
  misc_feature (1)..(25): SEQ ID NO: 5829; WAN024G7Z; Start 555; Stop 579
ctcaacatcgtcatactcaggatag

SEQ ID NO: 422722 - DNA, 25 bp, Artificial
  probe
  misc_feature (1)..(25): SEQ ID NO: 5829; WAN024G7Z; Start 122; Stop 146
taatgcgattggtatcttggctaat

SEQ ID NO: 422723 - DNA, 25 bp, Artificial
  probe
  misc_feature (1)..(25): SEQ ID NO: 5829; WAN024G7Z; Start 121; Stop 145
ataatgcgattggtatcttggctaa

SEQ ID NO: 422724 - DNA, 25 bp, Artificial
  probe
  misc_feature (1)..(25): SEQ ID NO: 5829; WAN024G7Z; Start 120; Stop 144
aataatgcgattggtatcttggcta

SEQ ID NO: 422725 - DNA, 25 bp, Artificial
  probe
  misc_feature (1)..(25): SEQ ID NO: 5829; WAN024G7Z; Start 123; Stop 147
aatgcgattggtatcttggctaatt

SEQ ID NO: 422726 - DNA, 25 bp, Artificial
  probe
  misc_feature (1)..(25): SEQ ID NO: 5829; WAN024G7Z; Start 119; Stop 143
gaataatgcgattggtatcttggct

SEQ ID NO: 422727 - DNA, 25 bp, Artificial
  probe
  misc_feature (1)..(25): SEQ ID NO: 5829; WAN024G7Z; Start 117; Stop 141
tagaataatgcgattggtatcttgg

SEQ ID NO: 422728 - DNA, 25 bp, Artificial
  probe
  misc_feature (1)..(25): SEQ ID NO: 5829; WAN024G7Z; Start 118; Stop 142
agaataatgcgattggtatcttggc

SEQ ID NO: 422729 - DNA, 25 bp, Artificial
  probe
  misc_feature (1)..(25): SEQ ID NO: 5829; WAN024G7Z; Start 361; Stop 385
atatctgttacgatagccttgtcct

SEQ ID NO: 422730 - DNA, 25 bp, Artificial
  probe
  misc_feature (1)..(25): SEQ ID NO: 5829; WAN024G7Z; Start 116; Stop 140
gtagaataatgcgattggtatcttg

SEQ ID NO: 422731 - DNA, 25 bp, Artificial
  probe
  misc_feature (1)..(25): SEQ ID NO: 5829; WAN024G7Z; Start 362; Stop 386
tatctgttacgatagccttgtcctc

SEQ ID NO: 422732 - DNA, 25 bp, Artificial
  probe
  misc_feature (1)..(25): SEQ ID NO: 5829; WAN024G7Z; Start 115; Stop 139
agtagaataatgcgattggtatctt

SEQ ID NO: 422733 - DNA, 25 bp, Artificial
  probe
  misc_feature (1)..(25): SEQ ID NO: 5829; WAN024G7Z; Start 114; Stop 138
aagtagaataatgcgattggtatct

SEQ ID NO: 422734 - DNA, 25 bp, Artificial
  probe
  misc_feature (1)..(25): SEQ ID NO: 5829; WAN024G7Z; Start 554; Stop 578
cctcaacatcgtcatactcaggata

SEQ ID NO: 422735 - DNA, 25 bp, Artificial
  probe
  misc_feature (1)..(25): SEQ ID NO: 5829; WAN024G7Z; Start 391; Stop 415
aagaggttgttgagaaggcttgatt

SEQ ID NO: 422736 - DNA, 25 bp, Artificial
  probe
  misc_feature (1)..(25): SEQ ID NO: 5829; WAN024G7Z; Start 260; Stop 284
ctatgtcatctgtttcacgaatacc

SEQ ID NO: 422737 - DNA, 25 bp, Artificial
  probe
  misc_feature (1)..(25): SEQ ID NO: 5829; WAN024G7Z; Start 252; Stop 276
ttgttccactatgtcatctgtttca

SEQ ID NO: 422738 - DNA, 25 bp, Artificial
  probe
  misc_feature (1)..(25): SEQ ID NO: 5829; WAN024G7Z; Start 251; Stop 275
tttgttccactatgtcatctgtttc

SEQ ID NO: 422739 - DNA, 25 bp, Artificial
  probe
  misc_feature (1)..(25): SEQ ID NO: 5829; WAN024G7Z; Start 249; Stop 273
gatttgttccactatgtcatctgtt

SEQ ID NO: 422740 - DNA, 25 bp, Artificial
  probe
  misc_feature (1)..(25): SEQ ID NO: 5829; WAN024G7Z; Start 301; Stop 325
ttgagaggtacaccattgatgttga

SEQ ID NO: 422741 - DNA, 25 bp, Artificial
  probe
  misc_feature (1)..(25): SEQ ID NO: 5829; WAN024G7Z; Start 315; Stop 339
attgatgttgacgtactcttcgatg

SEQ ID NO: 422742 - DNA, 25 bp, Artificial
  probe
  misc_feature (1)..(25): SEQ ID NO: 5829; WAN024G7Z; Start 314; Stop 338
cattgatgttgacgtactcttcgat

SEQ ID NO: 422743 - DNA, 25 bp, Artificial
  probe
  misc_feature (1)..(25): SEQ ID NO: 5829; WAN024G7Z; Start 261; Stop 285
tatgtcatctgtttcacgaataccg

SEQ ID NO: 422744 - DNA, 25 bp, Artificial
  probe
  misc_feature (1)..(25): SEQ ID NO: 5829; WAN024G7Z; Start 259; Stop 283
actatgtcatctgtttcacgaatac

SEQ ID NO: 422745 - DNA, 25 bp, Artificial
  probe
  misc_feature (1)..(25): SEQ ID NO: 5829; WAN024G7Z; Start 258; Stop 282
cactatgtcatctgtttcacgaata

SEQ ID NO: 422746 - DNA, 25 bp, Artificial
  probe
  misc_feature (1)..(25): SEQ ID NO: 5829; WAN024G7Z; Start 253; Stop 277
tgttccactatgtcatctgtttcac

SEQ ID NO: 422747 - DNA, 25 bp, Artificial
  probe
  misc_feature (1)..(25): SEQ ID NO: 5829; WAN024G7Z; Start 39; Stop 63
tttaaggactgaaatacggataacg

SEQ ID NO: 422748 - DNA, 25 bp, Artificial
  probe
  misc_feature (1)..(25): SEQ ID NO: 5829; WAN024G7Z; Start 257; Stop 281
ccactatgtcatctgtttcacgaat

SEQ ID NO: 422749 - DNA, 25 bp, Artificial
  probe
  misc_feature (1)..(25): SEQ ID NO: 5829; WAN024G7Z; Start 250; Stop 274
atttgttccactatgtcatctgttt

SEQ ID NO: 422750 - DNA, 25 bp, Artificial
  probe
  misc_feature (1)..(25): SEQ ID NO: 5829; WAN024G7Z; Start 363; Stop 387
atctgttacgatagccttgtcctca

SEQ ID NO: 422751 - DNA, 25 bp, Artificial
  probe
  misc_feature (1)..(25): SEQ ID NO: 5829; WAN024G7Z; Start 248; Stop 272
cgatttgttccactatgtcatctgt

SEQ ID NO: 422752 - DNA, 25 bp, Artificial
  probe
  misc_feature (1)..(25): SEQ ID NO: 5829; WAN024G7Z; Start 503; Stop 527
gtaattgctcaaactccattgtctt

SEQ ID NO: 422753 - DNA, 25 bp, Artificial
  probe
  misc_feature (1)..(25): SEQ ID NO: 5829; WAN024G7Z; Start 138; Stop 162
ttggctaatttcaagaagttgtctg

SEQ ID NO: 422754 - DNA, 25 bp, Artificial
  probe
  misc_feature (1)..(25): SEQ ID NO: 5830; WAN024C99; Start 65; Stop 89
ttgcgaatgcttcagatactaccaa

SEQ ID NO: 422755 - DNA, 25 bp, Artificial
  probe
  misc_feature (1)..(25): SEQ ID NO: 5830; WAN024C99; Start 294; Stop 318
aatttctgccatttatgttctcctt

SEQ ID NO: 422756 - DNA, 25 bp, Artificial
  probe
  misc_feature (1)..(25): SEQ ID NO: 5830; WAN024C99; Start 175; Stop 199
ggagtgaatgtcaagattgcgattg

SEQ ID NO: 422757 - DNA, 25 bp, Artificial
  probe
  misc_feature (1)..(25): SEQ ID NO: 5830; WAN024C99; Start 286; Stop 310
gctgaagtaatttctgccatttatg

SEQ ID NO: 422758 - DNA, 25 bp, Artificial
  probe
  misc_feature (1)..(25): SEQ ID NO: 5830; WAN024C99; Start 167; Stop 191
ctttgtttggagtgaatgtcaagat

SEQ ID NO: 422759 - DNA, 25 bp, Artificial
  probe
  misc_feature (1)..(25): SEQ ID NO: 5830; WAN024C99; Start 169; Stop 193
ttgtttggagtgaatgtcaagattg

SEQ ID NO: 422760 - DNA, 25 bp, Artificial
  probe
  misc_feature (1)..(25): SEQ ID NO: 5830; WAN024C99; Start 168; Stop 192
tttgtttggagtgaatgtcaagatt

SEQ ID NO: 422761 - DNA, 25 bp, Artificial
  probe
  misc_feature (1)..(25): SEQ ID NO: 5830; WAN024C99; Start 298; Stop 322
tctgccatttatgttctccttattt

SEQ ID NO: 422762 - DNA, 25 bp, Artificial
  probe
  misc_feature (1)..(25): SEQ ID NO: 5830; WAN024C99; Start 297; Stop 321
ttctgccatttatgttctccttatt

SEQ ID NO: 422763 - DNA, 25 bp, Artificial
  probe
  misc_feature (1)..(25): SEQ ID NO: 5830; WAN024C99; Start 296; Stop 320
tttctgccatttatgttctccttat

SEQ ID NO: 422764 - DNA, 25 bp, Artificial
  probe
  misc_feature (1)..(25): SEQ ID NO: 5830; WAN024C99; Start 295; Stop 319
atttctgccatttatgttctcctta

SEQ ID NO: 422765 - DNA, 25 bp, Artificial
  probe
  misc_feature (1)..(25): SEQ ID NO: 5830; WAN024C99; Start 143; Stop 167
aaactttcaagatgatttcagcagc

SEQ ID NO: 422766 - DNA, 25 bp, Artificial
  probe
  misc_feature (1)..(25): SEQ ID NO: 5830; WAN024C99; Start 293; Stop 317
taatttctgccatttatgttctcct

SEQ ID NO: 422767 - DNA, 25 bp, Artificial
  probe
  misc_feature (1)..(25): SEQ ID NO: 5830; WAN024C99; Start 292; Stop 316
gtaatttctgccatttatgttctcc

SEQ ID NO: 422768 - DNA, 25 bp, Artificial
  probe
  misc_feature (1)..(25): SEQ ID NO: 5830; WAN024C99; Start 174; Stop 198
tggagtgaatgtcaagattgcgatt

SEQ ID NO: 422769 - DNA, 25 bp, Artificial
  probe
  misc_feature (1)..(25): SEQ ID NO: 5830; WAN024C99; Start 173; Stop 197
ttggagtgaatgtcaagattgcgat

SEQ ID NO: 422770 - DNA, 25 bp, Artificial
  probe
  misc_feature (1)..(25): SEQ ID NO: 5830; WAN024C99; Start 402; Stop 426
atgtcttcttggatgtaaacaggta

SEQ ID NO: 422771 - DNA, 25 bp, Artificial
  probe
  misc_feature (1)..(25): SEQ ID NO: 5830; WAN024C99; Start 404; Stop 428
gtcttcttggatgtaaacaggtacg

SEQ ID NO: 422772 - DNA, 25 bp, Artificial
  probe
  misc_feature (1)..(25): SEQ ID NO: 5830; WAN024C99; Start 176; Stop 200
gagtgaatgtcaagattgcgattgc

SEQ ID NO: 422773 - DNA, 25 bp, Artificial
  probe
  misc_feature (1)..(25): SEQ ID NO: 5830; WAN024C99; Start 403; Stop 427
tgtcttcttggatgtaaacaggtac

SEQ ID NO: 422774 - DNA, 25 bp, Artificial
  probe
  misc_feature (1)..(25): SEQ ID NO: 5830; WAN024C99; Start 287; Stop 311
ctgaagtaatttctgccatttatgt

SEQ ID NO: 422775 - DNA, 25 bp, Artificial
  probe
  misc_feature (1)..(25): SEQ ID NO: 5830; WAN024C99; Start 63; Stop 87
gtttgcgaatgcttcagatactacc

SEQ ID NO: 422776 - DNA, 25 bp, Artificial
  probe
  misc_feature (1)..(25): SEQ ID NO: 5830; WAN024C99; Start 395; Stop 419
gcctaccatgtcttcttggatgtaa

SEQ ID NO: 422777 - DNA, 25 bp, Artificial
  probe
  misc_feature (1)..(25): SEQ ID NO: 5830; WAN024C99; Start 291; Stop 315
agtaatttctgccatttatgttctc

SEQ ID NO: 422778 - DNA, 25 bp, Artificial
  probe
  misc_feature (1)..(25): SEQ ID NO: 5830; WAN024C99; Start 278; Stop 302
ttgctttagctgaagtaatttctgc

SEQ ID NO: 422779 - DNA, 25 bp, Artificial
  probe
  misc_feature (1)..(25): SEQ ID NO: 5830; WAN024C99; Start 281; Stop 305
ctttagctgaagtaatttctgccat

SEQ ID NO: 422780 - DNA, 25 bp, Artificial
  probe
  misc_feature (1)..(25): SEQ ID NO: 5830; WAN024C99; Start 43; Stop 67
cgtttcatagttggtccttcgtttg

SEQ ID NO: 422781 - DNA, 25 bp, Artificial
  probe
  misc_feature (1)..(25): SEQ ID NO: 5830; WAN024C99; Start 274; Stop 298
gccattgctttagctgaagtaattt

SEQ ID NO: 422782 - DNA, 25 bp, Artificial
  probe
  misc_feature (1)..(25): SEQ ID NO: 5830; WAN024C99; Start 170; Stop 194
tgtttggagtgaatgtcaagattgc

SEQ ID NO: 422783 - DNA, 25 bp, Artificial
  probe
  misc_feature (1)..(25): SEQ ID NO: 5830; WAN024C99; Start 166; Stop 190
gctttgtttggagtgaatgtcaaga

SEQ ID NO: 422784 - DNA, 25 bp, Artificial
  probe
  misc_feature (1)..(25): SEQ ID NO: 5830; WAN024C99; Start 401; Stop 425
catgtcttcttggatgtaaacaggt

SEQ ID NO: 422785 - DNA, 25 bp, Artificial
  probe
  misc_feature (1)..(25): SEQ ID NO: 5830; WAN024C99; Start 283; Stop 307
ttagctgaagtaatttctgccattt

SEQ ID NO: 422786 - DNA, 25 bp, Artificial
  probe
  misc_feature (1)..(25): SEQ ID NO: 5830; WAN024C99; Start 282; Stop 306
tttagctgaagtaatttctgccatt

SEQ ID NO: 422787 - DNA, 25 bp, Artificial
  probe
  misc_feature (1)..(25): SEQ ID NO: 5831; WAN024FC2; Start 1188; Stop 1212
gcaatcaatgtatggtctcaatctc

SEQ ID NO: 422788 - DNA, 25 bp, Artificial
  probe
  misc_feature (1)..(25): SEQ ID NO: 5831; WAN024FC2; Start 1414; Stop 1438
agagttcttaatacattggctggta

SEQ ID NO: 422789 - DNA, 25 bp, Artificial
  probe
  misc_feature (1)..(25): SEQ ID NO: 5831; WAN024FC2; Start 1193; Stop 1217
caatgtatggtctcaatctcaatgt

SEQ ID NO: 422790 - DNA, 25 bp, Artificial
  probe
  misc_feature (1)..(25): SEQ ID NO: 5831; WAN024FC2; Start 1192; Stop 1216
tcaatgtatggtctcaatctcaatg

SEQ ID NO: 422791 - DNA, 25 bp, Artificial
  probe
  misc_feature (1)..(25): SEQ ID NO: 5831; WAN024FC2; Start 1189; Stop 1213
caatcaatgtatggtctcaatctca

SEQ ID NO: 422792 - DNA, 25 bp, Artificial
  probe
  misc_feature (1)..(25): SEQ ID NO: 5831; WAN024FC2; Start 1415; Stop 1439
gagttcttaatacattggctggtaa

SEQ ID NO: 422793 - DNA, 25 bp, Artificial
  probe
  misc_feature (1)..(25): SEQ ID NO: 5831; WAN024FC2; Start 1413; Stop 1437
aagagttcttaatacattggctggt

SEQ ID NO: 422794 - DNA, 25 bp, Artificial
  probe
  misc_feature (1)..(25): SEQ ID NO: 5831; WAN024FC2; Start 1190; Stop 1214
aatcaatgtatggtctcaatctcaa

SEQ ID NO: 422795 - DNA, 25 bp, Artificial
  probe
  misc_feature (1)..(25): SEQ ID NO: 5831; WAN024FC2; Start 541; Stop 565
ggaattgaccgtaataatgccagtt

SEQ ID NO: 422796 - DNA, 25 bp, Artificial
  probe
  misc_feature (1)..(25): SEQ ID NO: 5831; WAN024FC2; Start 1191; Stop 1215
atcaatgtatggtctcaatctcaat

SEQ ID NO: 422797 - DNA, 25 bp, Artificial
  probe
  misc_feature (1)..(25): SEQ ID NO: 5831; WAN024FC2; Start 1416; Stop 1440
agttcttaatacattggctggtaag

SEQ ID NO: 422798 - DNA, 25 bp, Artificial
  probe
  misc_feature (1)..(25): SEQ ID NO: 5831; WAN024FC2; Start 1187; Stop 1211
tgcaatcaatgtatggtctcaatct

SEQ ID NO: 422799 - DNA, 25 bp, Artificial
  probe
  misc_feature (1)..(25): SEQ ID NO: 5831; WAN024FC2; Start 678; Stop 702
ggctttattactgggtctgtcttat

SEQ ID NO: 422800 - DNA, 25 bp, Artificial
  probe
  misc_feature (1)..(25): SEQ ID NO: 5831; WAN024FC2; Start 547; Stop 571
gaccgtaataatgccagtttgattt

SEQ ID NO: 422801 - DNA, 25 bp, Artificial
  probe
  misc_feature (1)..(25): SEQ ID NO: 5831; WAN024FC2; Start 1309; Stop 1333
cgttatgatttacaggtcttggaag

SEQ ID NO: 422802 - DNA, 25 bp, Artificial
  probe
  misc_feature (1)..(25): SEQ ID NO: 5831; WAN024FC2; Start 542; Stop 566
gaattgaccgtaataatgccagttt

SEQ ID NO: 422803 - DNA, 25 bp, Artificial
  probe
  misc_feature (1)..(25): SEQ ID NO: 5831; WAN024FC2; Start 1300; Stop 1324
gaattggagcgttatgatttacagg

SEQ ID NO: 422804 - DNA, 25 bp, Artificial
  probe
  misc_feature (1)..(25): SEQ ID NO: 5831; WAN024FC2; Start 1299; Stop 1323
ggaattggagcgttatgatttacag

SEQ ID NO: 422805 - DNA, 25 bp, Artificial
  probe
  misc_feature (1)..(25): SEQ ID NO: 5831; WAN024FC2; Start 1265; Stop 1289
atattcaaatcacggatgcctattc

SEQ ID NO: 422806 - DNA, 25 bp, Artificial
  probe
  misc_feature (1)..(25): SEQ ID NO: 5831; WAN024FC2; Start 1264; Stop 1288
gatattcaaatcacggatgcctatt

SEQ ID NO: 422807 - DNA, 25 bp, Artificial
  probe
  misc_feature (1)..(25): SEQ ID NO: 5831; WAN024FC2; Start 543; Stop 567
aattgaccgtaataatgccagtttg

SEQ ID NO: 422808 - DNA, 25 bp, Artificial
  probe
  misc_feature (1)..(25): SEQ ID NO: 5831; WAN024FC2; Start 1263; Stop 1287
ggatattcaaatcacggatgcctat

SEQ ID NO: 422809 - DNA, 25 bp, Artificial
  probe
  misc_feature (1)..(25): SEQ ID NO: 5831; WAN024FC2; Start 546; Stop 570
tgaccgtaataatgccagtttgatt

SEQ ID NO: 422810 - DNA, 25 bp, Artificial
  probe
  misc_feature (1)..(25): SEQ ID NO: 5831; WAN024FC2; Start 545; Stop 569
ttgaccgtaataatgccagtttgat

SEQ ID NO: 422811 - DNA, 25 bp, Artificial
  probe
  misc_feature (1)..(25): SEQ ID NO: 5831; WAN024FC2; Start 544; Stop 568
attgaccgtaataatgccagtttga

SEQ ID NO: 422812 - DNA, 25 bp, Artificial
  probe
  misc_feature (1)..(25): SEQ ID NO: 5831; WAN024FC2; Start 677; Stop 701
tggctttattactgggtctgtctta

SEQ ID NO: 422813 - DNA, 25 bp, Artificial
  probe
  misc_feature (1)..(25): SEQ ID NO: 5831; WAN024FC2; Start 1301; Stop 1325
aattggagcgttatgatttacaggt

SEQ ID NO: 422814 - DNA, 25 bp, Artificial
  probe
  misc_feature (1)..(25): SEQ ID NO: 5831; WAN024FC2; Start 1302; Stop 1326
attggagcgttatgatttacaggtc

SEQ ID NO: 422815 - DNA, 25 bp, Artificial
  probe
  misc_feature (1)..(25): SEQ ID NO: 5831; WAN024FC2; Start 1308; Stop 1332
gcgttatgatttacaggtcttggaa

SEQ ID NO: 422816 - DNA, 25 bp, Artificial
  probe
  misc_feature (1)..(25): SEQ ID NO: 5831; WAN024FC2; Start 1266; Stop 1290
tattcaaatcacggatgcctattcg

SEQ ID NO: 422817 - DNA, 25 bp, Artificial
  probe
  misc_feature (1)..(25): SEQ ID NO: 5831; WAN024FC2; Start 1157; Stop 1181
ttaacgaccgtgaagatggaaataa

SEQ ID NO: 422818 - DNA, 25 bp, Artificial
  probe
  misc_feature (1)..(25): SEQ ID NO: 5831; WAN024FC2; Start 1156; Stop 1180
tttaacgaccgtgaagatggaaata

SEQ ID NO: 422819 - DNA, 25 bp, Artificial
  probe
  misc_feature (1)..(25): SEQ ID NO: 5831; WAN024FC2; Start 1306; Stop 1330
gagcgttatgatttacaggtcttgg

SEQ ID NO: 422820 - DNA, 25 bp, Artificial
  probe
  misc_feature (1)..(25): SEQ ID NO: 5832; WAN024DGE; Start 97; Stop 121
tttacattattgggagctgcatcag

SEQ ID NO: 422821 - DNA, 25 bp, Artificial
  probe
  misc_feature (1)..(25): SEQ ID NO: 5832; WAN024DGE; Start 157; Stop 181
tatggagaaggttcaggaggtggtt

SEQ ID NO: 422822 - DNA, 25 bp, Artificial
  probe
  misc_feature (1)..(25): SEQ ID NO: 5832; WAN024DGE; Start 131; Stop 155
aatatccagatggaggagtatggac

SEQ ID NO: 422823 - DNA, 25 bp, Artificial
  probe
  misc_feature (1)..(25): SEQ ID NO: 5833; WAN024AXX; Start 198; Stop 222
agttagtctcattctattccgttct

SEQ ID NO: 422824 - DNA, 25 bp, Artificial
  probe
  misc_feature (1)..(25): SEQ ID NO: 5833; WAN024AXX; Start 199; Stop 223
gttagtctcattctattccgttctt

SEQ ID NO: 422825 - DNA, 25 bp, Artificial
  probe
  misc_feature (1)..(25): SEQ ID NO: 5833; WAN024AXX; Start 190; Stop 214
tctggtggagttagtctcattctat

SEQ ID NO: 422826 - DNA, 25 bp, Artificial
  probe
  misc_feature (1)..(25): SEQ ID NO: 5833; WAN024AXX; Start 192; Stop 216
tggtggagttagtctcattctattc

SEQ ID NO: 422827 - DNA, 25 bp, Artificial
  probe
  misc_feature (1)..(25): SEQ ID NO: 5833; WAN024AXX; Start 189; Stop 213
ttctggtggagttagtctcattcta

SEQ ID NO: 422828 - DNA, 25 bp, Artificial
  probe
  misc_feature (1)..(25): SEQ ID NO: 5833; WAN024AXX; Start 191; Stop 215
ctggtggagttagtctcattctatt

SEQ ID NO: 422829 - DNA, 25 bp, Artificial
  probe
  misc_feature (1)..(25): SEQ ID NO: 5833; WAN024AXX; Start 197; Stop 221
gagttagtctcattctattccgttc

SEQ ID NO: 422830 - DNA, 25 bp, Artificial
  probe
  misc_feature (1)..(25): SEQ ID NO: 5833; WAN024AXX; Start 196; Stop 220
ggagttagtctcattctattccgtt

SEQ ID NO: 422831 - DNA, 25 bp, Artificial
  probe
  misc_feature (1)..(25): SEQ ID NO: 5833; WAN024AXX; Start 193; Stop 217
ggtggagttagtctcattctattcc

SEQ ID NO: 422832 - DNA, 25 bp, Artificial
  probe
  misc_feature (1)..(25): SEQ ID NO: 5833; WAN024AXX; Start 194; Stop 218
gtggagttagtctcattctattccg

SEQ ID NO: 422833 - DNA, 25 bp, Artificial
  probe
  misc_feature (1)..(25): SEQ ID NO: 5833; WAN024AXX; Start 195; Stop 219
tggagttagtctcattctattccgt

SEQ ID NO: 422834 - DNA, 25 bp, Artificial
  probe
  misc_feature (1)..(25): SEQ ID NO: 5833; WAN024AXX; Start 180; Stop 204
aatgattgtttctggtggagttagt

SEQ ID NO: 422835 - DNA, 25 bp, Artificial
  probe
  misc_feature (1)..(25): SEQ ID NO: 5833; WAN024AXX; Start 139; Stop 163
tataaaggagataagcgtgtaggtg

SEQ ID NO: 422836 - DNA, 25 bp, Artificial
  probe
  misc_feature (1)..(25): SEQ ID NO: 5833; WAN024AXX; Start 138; Stop 162
ctataaaggagataagcgtgtaggt

SEQ ID NO: 422837 - DNA, 25 bp, Artificial
  probe
  misc_feature (1)..(25): SEQ ID NO: 5833; WAN024AXX; Start 137; Stop 161
actataaaggagataagcgtgtagg

SEQ ID NO: 422838 - DNA, 25 bp, Artificial
  probe
  misc_feature (1)..(25): SEQ ID NO: 5833; WAN024AXX; Start 181; Stop 205
atgattgtttctggtggagttagtc

SEQ ID NO: 422839 - DNA, 25 bp, Artificial
  probe
  misc_feature (1)..(25): SEQ ID NO: 5833; WAN024AXX; Start 200; Stop 224
ttagtctcattctattccgttctta

SEQ ID NO: 422840 - DNA, 25 bp, Artificial
  probe
  misc_feature (1)..(25): SEQ ID NO: 5833; WAN024AXX; Start 165; Stop 189
agctccgtctgtactaatgattgtt

SEQ ID NO: 422841 - DNA, 25 bp, Artificial
  probe
  misc_feature (1)..(25): SEQ ID NO: 5833; WAN024AXX; Start 179; Stop 203
taatgattgtttctggtggagttag

SEQ ID NO: 422842 - DNA, 25 bp, Artificial
  probe
  misc_feature (1)..(25): SEQ ID NO: 5833; WAN024AXX; Start 178; Stop 202
ctaatgattgtttctggtggagtta

SEQ ID NO: 422843 - DNA, 25 bp, Artificial
  probe
  misc_feature (1)..(25): SEQ ID NO: 5833; WAN024AXX; Start 177; Stop 201
actaatgattgtttctggtggagtt

SEQ ID NO: 422844 - DNA, 25 bp, Artificial
  probe
  misc_feature (1)..(25): SEQ ID NO: 5833; WAN024AXX; Start 176; Stop 200
tactaatgattgtttctggtggagt

SEQ ID NO: 422845 - DNA, 25 bp, Artificial
  probe
  misc_feature (1)..(25): SEQ ID NO: 5833; WAN024AXX; Start 79; Stop 103
ttactcttgaatgccttgaagattg

SEQ ID NO: 422846 - DNA, 25 bp, Artificial
  probe
  misc_feature (1)..(25): SEQ ID NO: 5833; WAN024AXX; Start 182; Stop 206
tgattgtttctggtggagttagtct

SEQ ID NO: 422847 - DNA, 25 bp, Artificial
  probe
  misc_feature (1)..(25): SEQ ID NO: 5833; WAN024AXX; Start 174; Stop 198
tgtactaatgattgtttctggtgga

SEQ ID NO: 422848 - DNA, 25 bp, Artificial
  probe
  misc_feature (1)..(25): SEQ ID NO: 5833; WAN024AXX; Start 170; Stop 194
cgtctgtactaatgattgtttctgg

SEQ ID NO: 422849 - DNA, 25 bp, Artificial
  probe
  misc_feature (1)..(25): SEQ ID NO: 5833; WAN024AXX; Start 169; Stop 193
ccgtctgtactaatgattgtttctg

SEQ ID NO: 422850 - DNA, 25 bp, Artificial
  probe
  misc_feature (1)..(25): SEQ ID NO: 5833; WAN024AXX; Start 168; Stop 192
tccgtctgtactaatgattgtttct

SEQ ID NO: 422851 - DNA, 25 bp, Artificial
  probe
  misc_feature (1)..(25): SEQ ID NO: 5833; WAN024AXX; Start 173; Stop 197
ctgtactaatgattgtttctggtgg

SEQ ID NO: 422852 - DNA, 25 bp, Artificial
  probe
  misc_feature (1)..(25): SEQ ID NO: 5833; WAN024AXX; Start 78; Stop 102
cttactcttgaatgccttgaagatt

SEQ ID NO: 422853 - DNA, 25 bp, Artificial
  probe
  misc_feature (1)..(25): SEQ ID NO: 5833; WAN024AXX; Start 167; Stop 191
ctccgtctgtactaatgattgtttc

SEQ ID NO: 422854 - DNA, 25 bp, Artificial
  probe
  misc_feature (1)..(25): SEQ ID NO: 5833; WAN024AXX; Start 175; Stop 199
gtactaatgattgtttctggtggag

SEQ ID NO: 422855 - DNA, 25 bp, Artificial
  probe
  misc_feature (1)..(25): SEQ ID NO: 5833; WAN024AXX; Start 77; Stop 101
ccttactcttgaatgccttgaagat

SEQ ID NO: 422856 - DNA, 25 bp, Artificial
  probe
  misc_feature (1)..(25): SEQ ID NO: 5834; WAN024CRO; Start 14; Stop 38
gtcacatcttctcctctaactctac

SEQ ID NO: 422857 - DNA, 25 bp, Artificial
  probe
  misc_feature (1)..(25): SEQ ID NO: 5834; WAN024CRO; Start 15; Stop 39
tcacatcttctcctctaactctacg

SEQ ID NO: 422858 - DNA, 25 bp, Artificial
  probe
  misc_feature (1)..(25): SEQ ID NO: 5834; WAN024CRO; Start 120; Stop 144
taagatattgcgacttgacgacatc

SEQ ID NO: 422859 - DNA, 25 bp, Artificial
  probe
  misc_feature (1)..(25): SEQ ID NO: 5834; WAN024CRO; Start 119; Stop 143
ctaagatattgcgacttgacgacat

SEQ ID NO: 422860 - DNA, 25 bp, Artificial
  probe
  misc_feature (1)..(25): SEQ ID NO: 5834; WAN024CRO; Start 13; Stop 37
agtcacatcttctcctctaactcta

SEQ ID NO: 422861 - DNA, 25 bp, Artificial
  probe
  misc_feature (1)..(25): SEQ ID NO: 5834; WAN024CRO; Start 8; Stop 32
tactgagtcacatcttctcctctaa

SEQ ID NO: 422862 - DNA, 25 bp, Artificial
  probe
  misc_feature (1)..(25): SEQ ID NO: 5834; WAN024CRO; Start 10; Stop 34
ctgagtcacatcttctcctctaact

SEQ ID NO: 422863 - DNA, 25 bp, Artificial
  probe
  misc_feature (1)..(25): SEQ ID NO: 5834; WAN024CRO; Start 9; Stop 33
actgagtcacatcttctcctctaac

SEQ ID NO: 422864 - DNA, 25 bp, Artificial
  probe
  misc_feature (1)..(25): SEQ ID NO: 5834; WAN024CRO; Start 7; Stop 31
gtactgagtcacatcttctcctcta

SEQ ID NO: 422865 - DNA, 25 bp, Artificial
  probe
  misc_feature (1)..(25): SEQ ID NO: 5834; WAN024CRO; Start 29; Stop 53
ctaactctacgtctggatacttgtc

SEQ ID NO: 422866 - DNA, 25 bp, Artificial
  probe
  misc_feature (1)..(25): SEQ ID NO: 5834; WAN024CRO; Start 28; Stop 52
tctaactctacgtctggatacttgt

SEQ ID NO: 422867 - DNA, 25 bp, Artificial
  probe
  misc_feature (1)..(25): SEQ ID NO: 5834; WAN024CRO; Start 27; Stop 51
ctctaactctacgtctggatacttg

SEQ ID NO: 422868 - DNA, 25 bp, Artificial
  probe
  misc_feature (1)..(25): SEQ ID NO: 5834; WAN024CRO; Start 1; Stop 25
ttgttggtactgagtcacatcttct

SEQ ID NO: 422869 - DNA, 25 bp, Artificial
  probe
  misc_feature (1)..(25): SEQ ID NO: 5834; WAN024CRO; Start 26; Stop 50
cctctaactctacgtctggatactt

SEQ ID NO: 422870 - DNA, 25 bp, Artificial
  probe
  misc_feature (1)..(25): SEQ ID NO: 5834; WAN024CRO; Start 19; Stop 43
atcttctcctctaactctacgtctg

SEQ ID NO: 422871 - DNA, 25 bp, Artificial
  probe
  misc_feature (1)..(25): SEQ ID NO: 5834; WAN024CRO; Start 18; Stop 42
catcttctcctctaactctacgtct

SEQ ID NO: 422872 - DNA, 25 bp, Artificial
  probe
  misc_feature (1)..(25): SEQ ID NO: 5834; WAN024CRO; Start 17; Stop 41
acatcttctcctctaactctacgtc

SEQ ID NO: 422873 - DNA, 25 bp, Artificial
  probe
  misc_feature (1)..(25): SEQ ID NO: 5834; WAN024CRO; Start 16; Stop 40
cacatcttctcctctaactctacgt

SEQ ID NO: 422874 - DNA, 25 bp, Artificial
  probe
  misc_feature (1)..(25): SEQ ID NO: 5834; WAN024CRO; Start 2; Stop 26
tgttggtactgagtcacatcttctc

SEQ ID NO: 422875 - DNA, 25 bp, Artificial
  probe
  misc_feature (1)..(25): SEQ ID NO: 5834; WAN024CRO; Start 113; Stop 137
ctttggctaagatattgcgacttga

SEQ ID NO: 422876 - DNA, 25 bp, Artificial
  probe
  misc_feature (1)..(25): SEQ ID NO: 5834; WAN024CRO; Start 121; Stop 145
aagatattgcgacttgacgacatcc

SEQ ID NO: 422877 - DNA, 25 bp, Artificial
  probe
  misc_feature (1)..(25): SEQ ID NO: 5834; WAN024CRO; Start 118; Stop 142
gctaagatattgcgacttgacgaca

SEQ ID NO: 422878 - DNA, 25 bp, Artificial
  probe
  misc_feature (1)..(25): SEQ ID NO: 5834; WAN024CRO; Start 4; Stop 28
ttggtactgagtcacatcttctcct

SEQ ID NO: 422879 - DNA, 25 bp, Artificial
  probe
  misc_feature (1)..(25): SEQ ID NO: 5834; WAN024CRO; Start 3; Stop 27
gttggtactgagtcacatcttctcc

SEQ ID NO: 422880 - DNA, 25 bp, Artificial
  probe
  misc_feature (1)..(25): SEQ ID NO: 5834; WAN024CRO; Start 114; Stop 138
tttggctaagatattgcgacttgac

SEQ ID NO: 422881 - DNA, 25 bp, Artificial
  probe
  misc_feature (1)..(25): SEQ ID NO: 5834; WAN024CRO; Start 6; Stop 30
ggtactgagtcacatcttctcctct

SEQ ID NO: 422882 - DNA, 25 bp, Artificial
  probe
  misc_feature (1)..(25): SEQ ID NO: 5834; WAN024CRO; Start 115; Stop 139
ttggctaagatattgcgacttgacg

SEQ ID NO: 422883 - DNA, 25 bp, Artificial
  probe
  misc_feature (1)..(25): SEQ ID NO: 5834; WAN024CRO; Start 20; Stop 44
tcttctcctctaactctacgtctgg

SEQ ID NO: 422884 - DNA, 25 bp, Artificial
  probe
  misc_feature (1)..(25): SEQ ID NO: 5834; WAN024CRO; Start 24; Stop 48
ctcctctaactctacgtctggatac

SEQ ID NO: 422885 - DNA, 25 bp, Artificial
  probe
  misc_feature (1)..(25): SEQ ID NO: 5834; WAN024CRO; Start 23; Stop 47
tctcctctaactctacgtctggata

SEQ ID NO: 422886 - DNA, 25 bp, Artificial
  probe
  misc_feature (1)..(25): SEQ ID NO: 5834; WAN024CRO; Start 30; Stop 54
taactctacgtctggatacttgtcc

SEQ ID NO: 422887 - DNA, 25 bp, Artificial
  probe
  misc_feature (1)..(25): SEQ ID NO: 5834; WAN024CRO; Start 5; Stop 29
tggtactgagtcacatcttctcctc

SEQ ID NO: 422888 - DNA, 25 bp, Artificial
  probe
  misc_feature (1)..(25): SEQ ID NO: 5834; WAN024CRO; Start 25; Stop 49
tcctctaactctacgtctggatact

SEQ ID NO: 422889 - DNA, 25 bp, Artificial
  probe
  misc_feature (1)..(25): SEQ ID NO: 5835; WAN024C8I; Start 62; Stop 86
aagacgatgtgattgaagttgaagg

SEQ ID NO: 422890 - DNA, 25 bp, Artificial
  probe
  misc_feature (1)..(25): SEQ ID NO: 5835; WAN024C8I; Start 89; Stop 113
aagtagttgatacaatgccgaatgc

SEQ ID NO: 422891 - DNA, 25 bp, Artificial
  probe
  misc_feature (1)..(25): SEQ ID NO: 5835; WAN024C8I; Start 61; Stop 85
aaagacgatgtgattgaagttgaag

SEQ ID NO: 422892 - DNA, 25 bp, Artificial
  probe
  misc_feature (1)..(25): SEQ ID NO: 5835; WAN024C8I; Start 88; Stop 112
aaagtagttgatacaatgccgaatg

SEQ ID NO: 422893 - DNA, 25 bp, Artificial
  probe
  misc_feature (1)..(25): SEQ ID NO: 5835; WAN024C8I; Start 87; Stop 111
caaagtagttgatacaatgccgaat

SEQ ID NO: 422894 - DNA, 25 bp, Artificial
  probe
  misc_feature (1)..(25): SEQ ID NO: 5835; WAN024C8I; Start 79; Stop 103
gttgaaggcaaagtagttgatacaa

SEQ ID NO: 422895 - DNA, 25 bp, Artificial
  probe
  misc_feature (1)..(25): SEQ ID NO: 5835; WAN024C8I; Start 73; Stop 97
attgaagttgaaggcaaagtagttg

SEQ ID NO: 422896 - DNA, 25 bp, Artificial
  probe
  misc_feature (1)..(25): SEQ ID NO: 5835; WAN024C8I; Start 72; Stop 96
gattgaagttgaaggcaaagtagtt

SEQ ID NO: 422897 - DNA, 25 bp, Artificial
  probe
  misc_feature (1)..(25): SEQ ID NO: 5835; WAN024C8I; Start 81; Stop 105
tgaaggcaaagtagttgatacaatg

SEQ ID NO: 422898 - DNA, 25 bp, Artificial
  probe
  misc_feature (1)..(25): SEQ ID NO: 5835; WAN024C8I; Start 78; Stop 102
agttgaaggcaaagtagttgataca

SEQ ID NO: 422899 - DNA, 25 bp, Artificial
  probe
  misc_feature (1)..(25): SEQ ID NO: 5835; WAN024C8I; Start 77; Stop 101
aagttgaaggcaaagtagttgatac

SEQ ID NO: 422900 - DNA, 25 bp, Artificial
  probe
  misc_feature (1)..(25): SEQ ID NO: 5835; WAN024C8I; Start 70; Stop 94
gtgattgaagttgaaggcaaagtag

SEQ ID NO: 422901 - DNA, 25 bp, Artificial
  probe
  misc_feature (1)..(25): SEQ ID NO: 5835; WAN024C8I; Start 76; Stop 100
gaagttgaaggcaaagtagttgata

SEQ ID NO: 422902 - DNA, 25 bp, Artificial
  probe
  misc_feature (1)..(25): SEQ ID NO: 5835; WAN024C8I; Start 75; Stop 99
tgaagttgaaggcaaagtagttgat

SEQ ID NO: 422903 - DNA, 25 bp, Artificial
  probe
  misc_feature (1)..(25): SEQ ID NO: 5835; WAN024C8I; Start 71; Stop 95
tgattgaagttgaaggcaaagtagt

SEQ ID NO: 422904 - DNA, 25 bp, Artificial
  probe
  misc_feature (1)..(25): SEQ ID NO: 5835; WAN024C8I; Start 74; Stop 98
ttgaagttgaaggcaaagtagttga

SEQ ID NO: 422905 - DNA, 25 bp, Artificial
  probe
  misc_feature (1)..(25): SEQ ID NO: 5835; WAN024C8I; Start 80; Stop 104
ttgaaggcaaagtagttgatacaat

SEQ ID NO: 422906 - DNA, 25 bp, Artificial
  probe
  misc_feature (1)..(25): SEQ ID NO: 5835; WAN024C8I; Start 69; Stop 93
tgtgattgaagttgaaggcaaagta

SEQ ID NO: 422907 - DNA, 25 bp, Artificial
  probe
  misc_feature (1)..(25): SEQ ID NO: 5835; WAN024C8I; Start 67; Stop 91
gatgtgattgaagttgaaggcaaag

SEQ ID NO: 422908 - DNA, 25 bp, Artificial
  probe
  misc_feature (1)..(25): SEQ ID NO: 5835; WAN024C8I; Start 112; Stop 136
gcaatgtttacggttgaacttgaaa

SEQ ID NO: 422909 - DNA, 25 bp, Artificial
  probe
  misc_feature (1)..(25): SEQ ID NO: 5835; WAN024C8I; Start 68; Stop 92
atgtgattgaagttgaaggcaaagt

SEQ ID NO: 422910 - DNA, 25 bp, Artificial
  probe
  misc_feature (1)..(25): SEQ ID NO: 5835; WAN024C8I; Start 63; Stop 87
agacgatgtgattgaagttgaaggc

SEQ ID NO: 422911 - DNA, 25 bp, Artificial
  probe
  misc_feature (1)..(25): SEQ ID NO: 5835; WAN024C8I; Start 65; Stop 89
acgatgtgattgaagttgaaggcaa

SEQ ID NO: 422912 - DNA, 25 bp, Artificial
  probe
  misc_feature (1)..(25): SEQ ID NO: 5835; WAN024C8I; Start 64; Stop 88
gacgatgtgattgaagttgaaggca

SEQ ID NO: 422913 - DNA, 25 bp, Artificial
  probe
  misc_feature (1)..(25): SEQ ID NO: 5835; WAN024C8I; Start 27; Stop 51
gaatcgaaatttatggaggtgcttt

SEQ ID NO: 422914 - DNA, 25 bp, Artificial
  probe
  misc_feature (1)..(25): SEQ ID NO: 5835; WAN024C8I; Start 66; Stop 90
cgatgtgattgaagttgaaggcaaa

SEQ ID NO: 422915 - DNA, 25 bp, Artificial
  probe
  misc_feature (1)..(25): SEQ ID NO: 5835; WAN024C8I; Start 210; Stop 234
tgttactgtcgaaatgagtccatat

SEQ ID NO: 422916 - DNA, 25 bp, Artificial
  probe
  misc_feature (1)..(25): SEQ ID NO: 5835; WAN024C8I; Start 250; Stop 274
cgtatcacttaccgctttaaataac

SEQ ID NO: 422917 - DNA, 25 bp, Artificial
  probe
  misc_feature (1)..(25): SEQ ID NO: 5835; WAN024C8I; Start 209; Stop 233
gtgttactgtcgaaatgagtccata

SEQ ID NO: 422918 - DNA, 25 bp, Artificial
  probe
  misc_feature (1)..(25): SEQ ID NO: 5835; WAN024C8I; Start 248; Stop 272
gacgtatcacttaccgctttaaata

SEQ ID NO: 422919 - DNA, 25 bp, Artificial
  probe
  misc_feature (1)..(25): SEQ ID NO: 5835; WAN024C8I; Start 247; Stop 271
ggacgtatcacttaccgctttaaat

SEQ ID NO: 422920 - DNA, 25 bp, Artificial
  probe
  misc_feature (1)..(25): SEQ ID NO: 5835; WAN024C8I; Start 249; Stop 273
acgtatcacttaccgctttaaataa

SEQ ID NO: 422921 - DNA, 25 bp, Artificial
  probe
  misc_feature (1)..(25): SEQ ID NO: 5835; WAN024C8I; Start 108; Stop 132
gaatgcaatgtttacggttgaactt

SEQ ID NO: 422922 - DNA, 25 bp, Artificial
  probe
  misc_feature (1)..(25): SEQ ID NO: 5836; WAN024GMO; Start 207; Stop 231
tcttagcaccatacttctccgataa

SEQ ID NO: 422923 - DNA, 25 bp, Artificial
  probe
  misc_feature (1)..(25): SEQ ID NO: 5836; WAN024GMO; Start 206; Stop 230
atcttagcaccatacttctccgata

SEQ ID NO: 422924 - DNA, 25 bp, Artificial
  probe
  misc_feature (1)..(25): SEQ ID NO: 5836; WAN024GMO; Start 205; Stop 229
aatcttagcaccatacttctccgat

SEQ ID NO: 422925 - DNA, 25 bp, Artificial
  probe
  misc_feature (1)..(25): SEQ ID NO: 5836; WAN024GMO; Start 203; Stop 227
taaatcttagcaccatacttctccg

SEQ ID NO: 422926 - DNA, 25 bp, Artificial
  probe
  misc_feature (1)..(25): SEQ ID NO: 5836; WAN024GMO; Start 15; Stop 39
taatgggcataaagatagtagcagg

SEQ ID NO: 422927 - DNA, 25 bp, Artificial
  probe
  misc_feature (1)..(25): SEQ ID NO: 5836; WAN024GMO; Start 9; Stop 33
gcgtagtaatgggcataaagatagt

SEQ ID NO: 422928 - DNA, 25 bp, Artificial
  probe
  misc_feature (1)..(25): SEQ ID NO: 5836; WAN024GMO; Start 13; Stop 37
agtaatgggcataaagatagtagca

SEQ ID NO: 422929 - DNA, 25 bp, Artificial
  probe
  misc_feature (1)..(25): SEQ ID NO: 5836; WAN024GMO; Start 19; Stop 43
gggcataaagatagtagcaggaatt

SEQ ID NO: 422930 - DNA, 25 bp, Artificial
  probe
  misc_feature (1)..(25): SEQ ID NO: 5836; WAN024GMO; Start 14; Stop 38
gtaatgggcataaagatagtagcag

SEQ ID NO: 422931 - DNA, 25 bp, Artificial
  probe
  misc_feature (1)..(25): SEQ ID NO: 5836; WAN024GMO; Start 8; Stop 32
ggcgtagtaatgggcataaagatag

SEQ ID NO: 422932 - DNA, 25 bp, Artificial
  probe
  misc_feature (1)..(25): SEQ ID NO: 5836; WAN024GMO; Start 18; Stop 42
tgggcataaagatagtagcaggaat

SEQ ID NO: 422933 - DNA, 25 bp, Artificial
  probe
  misc_feature (1)..(25): SEQ ID NO: 5836; WAN024GMO; Start 17; Stop 41
atgggcataaagatagtagcaggaa

SEQ ID NO: 422934 - DNA, 25 bp, Artificial
  probe
  misc_feature (1)..(25): SEQ ID NO: 5836; WAN024GMO; Start 16; Stop 40
aatgggcataaagatagtagcagga

SEQ ID NO: 422935 - DNA, 25 bp, Artificial
  probe
  misc_feature (1)..(25): SEQ ID NO: 5836; WAN024GMO; Start 20; Stop 44
ggcataaagatagtagcaggaattt

SEQ ID NO: 422936 - DNA, 25 bp, Artificial
  probe
  misc_feature (1)..(25): SEQ ID NO: 5836; WAN024GMO; Start 204; Stop 228
aaatcttagcaccatacttctccga

SEQ ID NO: 422937 - DNA, 25 bp, Artificial
  probe
  misc_feature (1)..(25): SEQ ID NO: 5836; WAN024GMO; Start 7; Stop 31
tggcgtagtaatgggcataaagata

SEQ ID NO: 422938 - DNA, 25 bp, Artificial
  probe
  misc_feature (1)..(25): SEQ ID NO: 5836; WAN024GMO; Start 202; Stop 226
ataaatcttagcaccatacttctcc

SEQ ID NO: 422939 - DNA, 25 bp, Artificial
  probe
  misc_feature (1)..(25): SEQ ID NO: 5836; WAN024GMO; Start 12; Stop 36
tagtaatgggcataaagatagtagc

SEQ ID NO: 422940 - DNA, 25 bp, Artificial
  probe
  misc_feature (1)..(25): SEQ ID NO: 5836; WAN024GMO; Start 10; Stop 34
cgtagtaatgggcataaagatagta

SEQ ID NO: 422941 - DNA, 25 bp, Artificial
  probe
  misc_feature (1)..(25): SEQ ID NO: 5836; WAN024GMO; Start 51; Stop 75
cattacaagtataggctactccctg

SEQ ID NO: 422942 - DNA, 25 bp, Artificial
  probe
  misc_feature (1)..(25): SEQ ID NO: 5836; WAN024GMO; Start 50; Stop 74
tcattacaagtataggctactccct

SEQ ID NO: 422943 - DNA, 25 bp, Artificial
  probe
  misc_feature (1)..(25): SEQ ID NO: 5836; WAN024GMO; Start 49; Stop 73
ttcattacaagtataggctactccc

SEQ ID NO: 422944 - DNA, 25 bp, Artificial
  probe
  misc_feature (1)..(25): SEQ ID NO: 5836; WAN024GMO; Start 6; Stop 30
gtggcgtagtaatgggcataaagat

SEQ ID NO: 422945 - DNA, 25 bp, Artificial
  probe
  misc_feature (1)..(25): SEQ ID NO: 5836; WAN024GMO; Start 139; Stop 163
aatggcataataggcaccacgaatt

SEQ ID NO: 422946 - DNA, 25 bp, Artificial
  probe
  misc_feature (1)..(25): SEQ ID NO: 5836; WAN024GMO; Start 52; Stop 76
attacaagtataggctactccctgc

SEQ ID NO: 422947 - DNA, 25 bp, Artificial
  probe
  misc_feature (1)..(25): SEQ ID NO: 5836; WAN024GMO; Start 201; Stop 225
aataaatcttagcaccatacttctc

SEQ ID NO: 422948 - DNA, 25 bp, Artificial
  probe
  misc_feature (1)..(25): SEQ ID NO: 5836; WAN024GMO; Start 4; Stop 28
ttgtggcgtagtaatgggcataaag

SEQ ID NO: 422949 - DNA, 25 bp, Artificial
  probe
  misc_feature (1)..(25): SEQ ID NO: 5836; WAN024GMO; Start 48; Stop 72
tttcattacaagtataggctactcc

SEQ ID NO: 422950 - DNA, 25 bp, Artificial
  probe
  misc_feature (1)..(25): SEQ ID NO: 5836; WAN024GMO; Start 143; Stop 167
gcataataggcaccacgaattttaa

SEQ ID NO: 422951 - DNA, 25 bp, Artificial
  probe
  misc_feature (1)..(25): SEQ ID NO: 5836; WAN024GMO; Start 198; Stop 222
tcaaataaatcttagcaccatactt

SEQ ID NO: 422952 - DNA, 25 bp, Artificial
  probe
  misc_feature (1)..(25): SEQ ID NO: 5836; WAN024GMO; Start 197; Stop 221
ttcaaataaatcttagcaccatact

SEQ ID NO: 422953 - DNA, 25 bp, Artificial
  probe
  misc_feature (1)..(25): SEQ ID NO: 5836; WAN024GMO; Start 43; Stop 67
tttcatttcattacaagtataggct

SEQ ID NO: 422954 - DNA, 25 bp, Artificial
  probe
  misc_feature (1)..(25): SEQ ID NO: 5836; WAN024GMO; Start 45; Stop 69
tcatttcattacaagtataggctac

SEQ ID NO: 422955 - DNA, 25 bp, Artificial
  probe
  misc_feature (1)..(25): SEQ ID NO: 5837; WAN024EWW; Start 391; Stop 415
ttcaatcacgctacgagtcataatc

SEQ ID NO: 422956 - DNA, 25 bp, Artificial
  probe
  misc_feature (1)..(25): SEQ ID NO: 5837; WAN024EWW; Start 405; Stop 429
gagtcataatcgtaccagcttctac

SEQ ID NO: 422957 - DNA, 25 bp, Artificial
  probe
  misc_feature (1)..(25): SEQ ID NO: 5837; WAN024EWW; Start 1; Stop 25
ttgttgtggtgtcaagacttcattg

SEQ ID NO: 422958 - DNA, 25 bp, Artificial
  probe
  misc_feature (1)..(25): SEQ ID NO: 5837; WAN024EWW; Start 343; Stop 367
gatgtagacaatcttgttcaagtcg

SEQ ID NO: 422959 - DNA, 25 bp, Artificial
  probe
  misc_feature (1)..(25): SEQ ID NO: 5837; WAN024EWW; Start 342; Stop 366
ggatgtagacaatcttgttcaagtc

SEQ ID NO: 422960 - DNA, 25 bp, Artificial
  probe
  misc_feature (1)..(25): SEQ ID NO: 5837; WAN024EWW; Start 409; Stop 433
cataatcgtaccagcttctaccaag

SEQ ID NO: 422961 - DNA, 25 bp, Artificial
  probe
  misc_feature (1)..(25): SEQ ID NO: 5837; WAN024EWW; Start 408; Stop 432
tcataatcgtaccagcttctaccaa

SEQ ID NO: 422962 - DNA, 25 bp, Artificial
  probe
  misc_feature (1)..(25): SEQ ID NO: 5837; WAN024EWW; Start 373; Stop 397
caaatggctttcaatgctttcaatc

SEQ ID NO: 422963 - DNA, 25 bp, Artificial
  probe
  misc_feature (1)..(25): SEQ ID NO: 5837; WAN024EWW; Start 411; Stop 435
taatcgtaccagcttctaccaagat

SEQ ID NO: 422964 - DNA, 25 bp, Artificial
  probe
  misc_feature (1)..(25): SEQ ID NO: 5837; WAN024EWW; Start 410; Stop 434
ataatcgtaccagcttctaccaaga

SEQ ID NO: 422965 - DNA, 25 bp, Artificial
  probe
  misc_feature (1)..(25): SEQ ID NO: 5837; WAN024EWW; Start 390; Stop 414
tttcaatcacgctacgagtcataat

SEQ ID NO: 422966 - DNA, 25 bp, Artificial
  probe
  misc_feature (1)..(25): SEQ ID NO: 5837; WAN024EWW; Start 374; Stop 398
aaatggctttcaatgctttcaatca

SEQ ID NO: 422967 - DNA, 25 bp, Artificial
  probe
  misc_feature (1)..(25): SEQ ID NO: 5837; WAN024EWW; Start 406; Stop 430
agtcataatcgtaccagcttctacc

SEQ ID NO: 422968 - DNA, 25 bp, Artificial
  probe
  misc_feature (1)..(25): SEQ ID NO: 5837; WAN024EWW; Start 426; Stop 450
ctaccaagatttctccagtttcagg

SEQ ID NO: 422969 - DNA, 25 bp, Artificial
  probe
  misc_feature (1)..(25): SEQ ID NO: 5837; WAN024EWW; Start 425; Stop 449
tctaccaagatttctccagtttcag

SEQ ID NO: 422970 - DNA, 25 bp, Artificial
  probe
  misc_feature (1)..(25): SEQ ID NO: 5837; WAN024EWW; Start 424; Stop 448
ttctaccaagatttctccagtttca

SEQ ID NO: 422971 - DNA, 25 bp, Artificial
  probe
  misc_feature (1)..(25): SEQ ID NO: 5837; WAN024EWW; Start 389; Stop 413
ctttcaatcacgctacgagtcataa

SEQ ID NO: 422972 - DNA, 25 bp, Artificial
  probe
  misc_feature (1)..(25): SEQ ID NO: 5837; WAN024EWW; Start 344; Stop 368
atgtagacaatcttgttcaagtcgc

SEQ ID NO: 422973 - DNA, 25 bp, Artificial
  probe
  misc_feature (1)..(25): SEQ ID NO: 5837; WAN024EWW; Start 375; Stop 399
aatggctttcaatgctttcaatcac

SEQ ID NO: 422974 - DNA, 25 bp, Artificial
  probe
  misc_feature (1)..(25): SEQ ID NO: 5837; WAN024EWW; Start 423; Stop 447
cttctaccaagatttctccagtttc

SEQ ID NO: 422975 - DNA, 25 bp, Artificial
  probe
  misc_feature (1)..(25): SEQ ID NO: 5837; WAN024EWW; Start 407; Stop 431
gtcataatcgtaccagcttctacca

SEQ ID NO: 422976 - DNA, 25 bp, Artificial
  probe
  misc_feature (1)..(25): SEQ ID NO: 5837; WAN024EWW; Start 237; Stop 261
ggttagcattaccaatgatcgttac

SEQ ID NO: 422977 - DNA, 25 bp, Artificial
  probe
  misc_feature (1)..(25): SEQ ID NO: 5837; WAN024EWW; Start 238; Stop 262
gttagcattaccaatgatcgttacg

SEQ ID NO: 422978 - DNA, 25 bp, Artificial
  probe
  misc_feature (1)..(25): SEQ ID NO: 5837; WAN024EWW; Start 422; Stop 446
gcttctaccaagatttctccagttt

SEQ ID NO: 422979 - DNA, 25 bp, Artificial
  probe
  misc_feature (1)..(25): SEQ ID NO: 5837; WAN024EWW; Start 380; Stop 404
ctttcaatgctttcaatcacgctac

SEQ ID NO: 422980 - DNA, 25 bp, Artificial
  probe
  misc_feature (1)..(25): SEQ ID NO: 5837; WAN024EWW; Start 431; Stop 455
aagatttctccagtttcagggtcta

SEQ ID NO: 422981 - DNA, 25 bp, Artificial
  probe
  misc_feature (1)..(25): SEQ ID NO: 5837; WAN024EWW; Start 3; Stop 27
gttgtggtgtcaagacttcattgtc

SEQ ID NO: 422982 - DNA, 25 bp, Artificial
  probe
  misc_feature (1)..(25): SEQ ID NO: 5837; WAN024EWW; Start 334; Stop 358
atcgtttgggatgtagacaatcttg

SEQ ID NO: 422983 - DNA, 25 bp, Artificial
  probe
  misc_feature (1)..(25): SEQ ID NO: 5837; WAN024EWW; Start 2; Stop 26
tgttgtggtgtcaagacttcattgt

SEQ ID NO: 422984 - DNA, 25 bp, Artificial
  probe
  misc_feature (1)..(25): SEQ ID NO: 5837; WAN024EWW; Start 372; Stop 396
ccaaatggctttcaatgctttcaat

SEQ ID NO: 422985 - DNA, 25 bp, Artificial
  probe
  misc_feature (1)..(25): SEQ ID NO: 5837; WAN024EWW; Start 432; Stop 456
agatttctccagtttcagggtctac

SEQ ID NO: 422986 - DNA, 25 bp, Artificial
  probe
  misc_feature (1)..(25): SEQ ID NO: 5837; WAN024EWW; Start 427; Stop 451
taccaagatttctccagtttcaggg

SEQ ID NO: 422987 - DNA, 25 bp, Artificial
  probe
  misc_feature (1)..(25): SEQ ID NO: 5837; WAN024EWW; Start 347; Stop 371
tagacaatcttgttcaagtcgccat

SEQ ID NO: 422988 - DNA, 25 bp, Artificial
  probe
  misc_feature (1)..(25): SEQ ID NO: 5838; WAN024DXJ; Start 210; Stop 234
taccttcttggaattgagtttggat

SEQ ID NO: 422989 - DNA, 25 bp, Artificial
  probe
  misc_feature (1)..(25): SEQ ID NO: 5838; WAN024DXJ; Start 209; Stop 233
ttaccttcttggaattgagtttgga

SEQ ID NO: 422990 - DNA, 25 bp, Artificial
  probe
  misc_feature (1)..(25): SEQ ID NO: 5838; WAN024DXJ; Start 208; Stop 232
tttaccttcttggaattgagtttgg

SEQ ID NO: 422991 - DNA, 25 bp, Artificial
  probe
  misc_feature (1)..(25): SEQ ID NO: 5838; WAN024DXJ; Start 141; Stop 165
ctccgtagtttactttagcatcttt

SEQ ID NO: 422992 - DNA, 25 bp, Artificial
  probe
  misc_feature (1)..(25): SEQ ID NO: 5838; WAN024DXJ; Start 212; Stop 236
ccttcttggaattgagtttggatta

SEQ ID NO: 422993 - DNA, 25 bp, Artificial
  probe
  misc_feature (1)..(25): SEQ ID NO: 5838; WAN024DXJ; Start 211; Stop 235
accttcttggaattgagtttggatt

SEQ ID NO: 422994 - DNA, 25 bp, Artificial
  probe
  misc_feature (1)..(25): SEQ ID NO: 5838; WAN024DXJ; Start 140; Stop 164
actccgtagtttactttagcatctt

SEQ ID NO: 422995 - DNA, 25 bp, Artificial
  probe
  misc_feature (1)..(25): SEQ ID NO: 5838; WAN024DXJ; Start 49; Stop 73
aaggttcttaacggcttgaggaatg

SEQ ID NO: 422996 - DNA, 25 bp, Artificial
  probe
  misc_feature (1)..(25): SEQ ID NO: 5838; WAN024DXJ; Start 114; Stop 138
catttggaagagttgggatagttgc

SEQ ID NO: 422997 - DNA, 25 bp, Artificial
  probe
  misc_feature (1)..(25): SEQ ID NO: 5838; WAN024DXJ; Start 142; Stop 166
tccgtagtttactttagcatcttta

SEQ ID NO: 422998 - DNA, 25 bp, Artificial
  probe
  misc_feature (1)..(25): SEQ ID NO: 5838; WAN024DXJ; Start 213; Stop 237
cttcttggaattgagtttggattaa

SEQ ID NO: 422999 - DNA, 25 bp, Artificial
  probe
  misc_feature (1)..(25): SEQ ID NO: 5838; WAN024DXJ; Start 52; Stop 76
gttcttaacggcttgaggaatgacc

SEQ ID NO: 423000 - DNA, 25 bp, Artificial
  probe
  misc_feature (1)..(25): SEQ ID NO: 5838; WAN024DXJ; Start 51; Stop 75
ggttcttaacggcttgaggaatgac

SEQ ID NO: 423001 - DNA, 25 bp, Artificial
  probe
  misc_feature (1)..(25): SEQ ID NO: 5838; WAN024DXJ; Start 143; Stop 167
ccgtagtttactttagcatctttaa

SEQ ID NO: 423002 - DNA, 25 bp, Artificial
  probe
  misc_feature (1)..(25): SEQ ID NO: 5838; WAN024DXJ; Start 50; Stop 74
aggttcttaacggcttgaggaatga

SEQ ID NO: 423003 - DNA, 25 bp, Artificial
  probe
  misc_feature (1)..(25): SEQ ID NO: 5838; WAN024DXJ; Start 113; Stop 137
ccatttggaagagttgggatagttg

SEQ ID NO: 423004 - DNA, 25 bp, Artificial
  probe
  misc_feature (1)..(25): SEQ ID NO: 5838; WAN024DXJ; Start 139; Stop 163
aactccgtagtttactttagcatct

SEQ ID NO: 423005 - DNA, 25 bp, Artificial
  probe
  misc_feature (1)..(25): SEQ ID NO: 5838; WAN024DXJ; Start 138; Stop 162
caactccgtagtttactttagcatc

SEQ ID NO: 423006 - DNA, 25 bp, Artificial
  probe
  misc_feature (1)..(25): SEQ ID NO: 5838; WAN024DXJ; Start 204; Stop 228
ctgttttaccttcttggaattgagt

SEQ ID NO: 423007 - DNA, 25 bp, Artificial
  probe
  misc_feature (1)..(25): SEQ ID NO: 5838; WAN024DXJ; Start 203; Stop 227
gctgttttaccttcttggaattgag

SEQ ID NO: 423008 - DNA, 25 bp, Artificial
  probe
  misc_feature (1)..(25): SEQ ID NO: 5838; WAN024DXJ; Start 112; Stop 136
tccatttggaagagttgggatagtt

SEQ ID NO: 423009 - DNA, 25 bp, Artificial
  probe
  misc_feature (1)..(25): SEQ ID NO: 5838; WAN024DXJ; Start 205; Stop 229
tgttttaccttcttggaattgagtt

SEQ ID NO: 423010 - DNA, 25 bp, Artificial
  probe
  misc_feature (1)..(25): SEQ ID NO: 5838; WAN024DXJ; Start 115; Stop 139
atttggaagagttgggatagttgca

SEQ ID NO: 423011 - DNA, 25 bp, Artificial
  probe
  misc_feature (1)..(25): SEQ ID NO: 5838; WAN024DXJ; Start 137; Stop 161
gcaactccgtagtttactttagcat

SEQ ID NO: 423012 - DNA, 25 bp, Artificial
  probe
  misc_feature (1)..(25): SEQ ID NO: 5838; WAN024DXJ; Start 207; Stop 231
ttttaccttcttggaattgagtttg

SEQ ID NO: 423013 - DNA, 25 bp, Artificial
  probe
  misc_feature (1)..(25): SEQ ID NO: 5838; WAN024DXJ; Start 206; Stop 230
gttttaccttcttggaattgagttt

SEQ ID NO: 423014 - DNA, 25 bp, Artificial
  probe
  misc_feature (1)..(25): SEQ ID NO: 5838; WAN024DXJ; Start 202; Stop 226
agctgttttaccttcttggaattga

SEQ ID NO: 423015 - DNA, 25 bp, Artificial
  probe
  misc_feature (1)..(25): SEQ ID NO: 5838; WAN024DXJ; Start 13; Stop 37
tgcaacaaggaagtctacaaatttt

SEQ ID NO: 423016 - DNA, 25 bp, Artificial
  probe
  misc_feature (1)..(25): SEQ ID NO: 5838; WAN024DXJ; Start 48; Stop 72
caaggttcttaacggcttgaggaat

SEQ ID NO: 423017 - DNA, 25 bp, Artificial
  probe
  misc_feature (1)..(25): SEQ ID NO: 5838; WAN024DXJ; Start 96; Stop 120
atgcagcatattcttttccatttgg

SEQ ID NO: 423018 - DNA, 25 bp, Artificial
  probe
  misc_feature (1)..(25): SEQ ID NO: 5838; WAN024DXJ; Start 12; Stop 36
ttgcaacaaggaagtctacaaattt

SEQ ID NO: 423019 - DNA, 25 bp, Artificial
  probe
  misc_feature (1)..(25): SEQ ID NO: 5838; WAN024DXJ; Start 53; Stop 77
ttcttaacggcttgaggaatgaccc

SEQ ID NO: 423020 - DNA, 25 bp, Artificial
  probe
  misc_feature (1)..(25): SEQ ID NO: 5838; WAN024DXJ; Start 136; Stop 160
tgcaactccgtagtttactttagca

SEQ ID NO: 423021 - DNA, 25 bp, Artificial
  probe
  misc_feature (1)..(25): SEQ ID NO: 5839; WAN024C9H; Start 41; Stop 65
tccttagattattcagcttcagcag

SEQ ID NO: 423022 - DNA, 25 bp, Artificial
  probe
  misc_feature (1)..(25): SEQ ID NO: 5839; WAN024C9H; Start 40; Stop 64
ctccttagattattcagcttcagca

SEQ ID NO: 423023 - DNA, 25 bp, Artificial
  probe
  misc_feature (1)..(25): SEQ ID NO: 5839; WAN024C9H; Start 38; Stop 62
tcctccttagattattcagcttcag

SEQ ID NO: 423024 - DNA, 25 bp, Artificial
  probe
  misc_feature (1)..(25): SEQ ID NO: 5839; WAN024C9H; Start 37; Stop 61
ttcctccttagattattcagcttca

SEQ ID NO: 423025 - DNA, 25 bp, Artificial
  probe
  misc_feature (1)..(25): SEQ ID NO: 5839; WAN024C9H; Start 39; Stop 63
cctccttagattattcagcttcagc

SEQ ID NO: 423026 - DNA, 25 bp, Artificial
  probe
  misc_feature (1)..(25): SEQ ID NO: 5839; WAN024C9H; Start 183; Stop 207
taacattggcaactttaacaccttc

SEQ ID NO: 423027 - DNA, 25 bp, Artificial
  probe
  misc_feature (1)..(25): SEQ ID NO: 5839; WAN024C9H; Start 27; Stop 51
cccacgatatttcctccttagatta

SEQ ID NO: 423028 - DNA, 25 bp, Artificial
  probe
  misc_feature (1)..(25): SEQ ID NO: 5839; WAN024C9H; Start 26; Stop 50
tcccacgatatttcctccttagatt

SEQ ID NO: 423029 - DNA, 25 bp, Artificial
  probe
  misc_feature (1)..(25): SEQ ID NO: 5839; WAN024C9H; Start 25; Stop 49
ttcccacgatatttcctccttagat

SEQ ID NO: 423030 - DNA, 25 bp, Artificial
  probe
  misc_feature (1)..(25): SEQ ID NO: 5839; WAN024C9H; Start 24; Stop 48
attcccacgatatttcctccttaga

SEQ ID NO: 423031 - DNA, 25 bp, Artificial
  probe
  misc_feature (1)..(25): SEQ ID NO: 5839; WAN024C9H; Start 23; Stop 47
aattcccacgatatttcctccttag

SEQ ID NO: 423032 - DNA, 25 bp, Artificial
  probe
  misc_feature (1)..(25): SEQ ID NO: 5839; WAN024C9H; Start 182; Stop 206
ttaacattggcaactttaacacctt

SEQ ID NO: 423033 - DNA, 25 bp, Artificial
  probe
  misc_feature (1)..(25): SEQ ID NO: 5839; WAN024C9H; Start 249; Stop 273
cacgagtgtcaacttcaaatacata

SEQ ID NO: 423034 - DNA, 25 bp, Artificial
  probe
  misc_feature (1)..(25): SEQ ID NO: 5839; WAN024C9H; Start 250; Stop 274
acgagtgtcaacttcaaatacatat

SEQ ID NO: 423035 - DNA, 25 bp, Artificial
  probe
  misc_feature (1)..(25): SEQ ID NO: 5839; WAN024C9H; Start 28; Stop 52
ccacgatatttcctccttagattat

SEQ ID NO: 423036 - DNA, 25 bp, Artificial
  probe
  misc_feature (1)..(25): SEQ ID NO: 5839; WAN024C9H; Start 44; Stop 68
ttagattattcagcttcagcagcaa

SEQ ID NO: 423037 - DNA, 25 bp, Artificial
  probe
  misc_feature (1)..(25): SEQ ID NO: 5839; WAN024C9H; Start 43; Stop 67
cttagattattcagcttcagcagca

SEQ ID NO: 423038 - DNA, 25 bp, Artificial
  probe
  misc_feature (1)..(25): SEQ ID NO: 5839; WAN024C9H; Start 184; Stop 208
aacattggcaactttaacaccttcg

SEQ ID NO: 423039 - DNA, 25 bp, Artificial
  probe
  misc_feature (1)..(25): SEQ ID NO: 5839; WAN024C9H; Start 248; Stop 272
gcacgagtgtcaacttcaaatacat

SEQ ID NO: 423040 - DNA, 25 bp, Artificial
  probe
  misc_feature (1)..(25): SEQ ID NO: 5839; WAN024C9H; Start 251; Stop 275
cgagtgtcaacttcaaatacatatt

SEQ ID NO: 423041 - DNA, 25 bp, Artificial
  probe
  misc_feature (1)..(25): SEQ ID NO: 5839; WAN024C9H; Start 36; Stop 60
tttcctccttagattattcagcttc

SEQ ID NO: 423042 - DNA, 25 bp, Artificial
  probe
  misc_feature (1)..(25): SEQ ID NO: 5839; WAN024C9H; Start 42; Stop 66
ccttagattattcagcttcagcagc

SEQ ID NO: 423043 - DNA, 25 bp, Artificial
  probe
  misc_feature (1)..(25): SEQ ID NO: 5839; WAN024C9H; Start 35; Stop 59
atttcctccttagattattcagctt

SEQ ID NO: 423044 - DNA, 25 bp, Artificial
  probe
  misc_feature (1)..(25): SEQ ID NO: 5839; WAN024C9H; Start 68; Stop 92
aacaactcgattgctttagaatcag

SEQ ID NO: 423045 - DNA, 25 bp, Artificial
  probe
  misc_feature (1)..(25): SEQ ID NO: 5839; WAN024C9H; Start 67; Stop 91
aaacaactcgattgctttagaatca

SEQ ID NO: 423046 - DNA, 25 bp, Artificial
  probe
  misc_feature (1)..(25): SEQ ID NO: 5839; WAN024C9H; Start 66; Stop 90
caaacaactcgattgctttagaatc

SEQ ID NO: 423047 - DNA, 25 bp, Artificial
  probe
  misc_feature (1)..(25): SEQ ID NO: 5839; WAN024C9H; Start 22; Stop 46
gaattcccacgatatttcctcctta

SEQ ID NO: 423048 - DNA, 25 bp, Artificial
  probe
  misc_feature (1)..(25): SEQ ID NO: 5839; WAN024C9H; Start 15; Stop 39
taaacacgaattcccacgatatttc

SEQ ID NO: 423049 - DNA, 25 bp, Artificial
  probe
  misc_feature (1)..(25): SEQ ID NO: 5839; WAN024C9H; Start 14; Stop 38
ataaacacgaattcccacgatattt

SEQ ID NO: 423050 - DNA, 25 bp, Artificial
  probe
  misc_feature (1)..(25): SEQ ID NO: 5839; WAN024C9H; Start 29; Stop 53
cacgatatttcctccttagattatt

SEQ ID NO: 423051 - DNA, 25 bp, Artificial
  probe
  misc_feature (1)..(25): SEQ ID NO: 5839; WAN024C9H; Start 13; Stop 37
tataaacacgaattcccacgatatt

SEQ ID NO: 423052 - DNA, 25 bp, Artificial
  probe
  misc_feature (1)..(25): SEQ ID NO: 5839; WAN024C9H; Start 12; Stop 36
ttataaacacgaattcccacgatat

SEQ ID NO: 423053 - DNA, 25 bp, Artificial
  probe
  misc_feature (1)..(25): SEQ ID NO: 5839; WAN024C9H; Start 45; Stop 69
tagattattcagcttcagcagcaaa

SEQ ID NO: 423054 - DNA, 25 bp, Artificial
  probe
  misc_feature (1)..(25): SEQ ID NO: 5840; WAN024C86; Start 68; Stop 92
agatacttgttggtctgttgaatca

SEQ ID NO: 423055 - DNA, 25 bp, Artificial
  probe
  misc_feature (1)..(25): SEQ ID NO: 5840; WAN024C86; Start 67; Stop 91
aagatacttgttggtctgttgaatc

SEQ ID NO: 423056 - DNA, 25 bp, Artificial
  probe
  misc_feature (1)..(25): SEQ ID NO: 5840; WAN024C86; Start 75; Stop 99
tgttggtctgttgaatcaattcttc

SEQ ID NO: 423057 - DNA, 25 bp, Artificial
  probe
  misc_feature (1)..(25): SEQ ID NO: 5840; WAN024C86; Start 73; Stop 97
cttgttggtctgttgaatcaattct

SEQ ID NO: 423058 - DNA, 25 bp, Artificial
  probe
  misc_feature (1)..(25): SEQ ID NO: 5840; WAN024C86; Start 72; Stop 96
acttgttggtctgttgaatcaattc

SEQ ID NO: 423059 - DNA, 25 bp, Artificial
  probe
  misc_feature (1)..(25): SEQ ID NO: 5840; WAN024C86; Start 76; Stop 100
gttggtctgttgaatcaattcttct

SEQ ID NO: 423060 - DNA, 25 bp, Artificial
  probe
  misc_feature (1)..(25): SEQ ID NO: 5840; WAN024C86; Start 74; Stop 98
ttgttggtctgttgaatcaattctt

SEQ ID NO: 423061 - DNA, 25 bp, Artificial
  probe
  misc_feature (1)..(25): SEQ ID NO: 5840; WAN024C86; Start 69; Stop 93
gatacttgttggtctgttgaatcaa

SEQ ID NO: 423062 - DNA, 25 bp, Artificial
  probe
  misc_feature (1)..(25): SEQ ID NO: 5840; WAN024C86; Start 77; Stop 101
ttggtctgttgaatcaattcttctt

SEQ ID NO: 423063 - DNA, 25 bp, Artificial
  probe
  misc_feature (1)..(25): SEQ ID NO: 5840; WAN024C86; Start 71; Stop 95
tacttgttggtctgttgaatcaatt

SEQ ID NO: 423064 - DNA, 25 bp, Artificial
  probe
  misc_feature (1)..(25): SEQ ID NO: 5840; WAN024C86; Start 70; Stop 94
atacttgttggtctgttgaatcaat

SEQ ID NO: 423065 - DNA, 25 bp, Artificial
  probe
  misc_feature (1)..(25): SEQ ID NO: 5840; WAN024C86; Start 3; Stop 27
gttgttgtccaccactgagtttatc

SEQ ID NO: 423066 - DNA, 25 bp, Artificial
  probe
  misc_feature (1)..(25): SEQ ID NO: 5840; WAN024C86; Start 78; Stop 102
tggtctgttgaatcaattcttcttt

SEQ ID NO: 423067 - DNA, 25 bp, Artificial
  probe
  misc_feature (1)..(25): SEQ ID NO: 5840; WAN024C86; Start 2; Stop 26
tgttgttgtccaccactgagtttat

SEQ ID NO: 423068 - DNA, 25 bp, Artificial
  probe
  misc_feature (1)..(25): SEQ ID NO: 5840; WAN024C86; Start 198; Stop 222
gtttgctgggttccatattattgat

SEQ ID NO: 423069 - DNA, 25 bp, Artificial
  probe
  misc_feature (1)..(25): SEQ ID NO: 5840; WAN024C86; Start 1; Stop 25
ttgttgttgtccaccactgagttta

SEQ ID NO: 423070 - DNA, 25 bp, Artificial
  probe
  misc_feature (1)..(25): SEQ ID NO: 5840; WAN024C86; Start 200; Stop 224
ttgctgggttccatattattgattt

SEQ ID NO: 423071 - DNA, 25 bp, Artificial
  probe
  misc_feature (1)..(25): SEQ ID NO: 5840; WAN024C86; Start 199; Stop 223
tttgctgggttccatattattgatt

SEQ ID NO: 423072 - DNA, 25 bp, Artificial
  probe
  misc_feature (1)..(25): SEQ ID NO: 5840; WAN024C86; Start 59; Stop 83
atgagttcaagatacttgttggtct

SEQ ID NO: 423073 - DNA, 25 bp, Artificial
  probe
  misc_feature (1)..(25): SEQ ID NO: 5840; WAN024C86; Start 58; Stop 82
catgagttcaagatacttgttggtc

SEQ ID NO: 423074 - DNA, 25 bp, Artificial
  probe
  misc_feature (1)..(25): SEQ ID NO: 5840; WAN024C86; Start 65; Stop 89
tcaagatacttgttggtctgttgaa

SEQ ID NO: 423075 - DNA, 25 bp, Artificial
  probe
  misc_feature (1)..(25): SEQ ID NO: 5840; WAN024C86; Start 64; Stop 88
ttcaagatacttgttggtctgttga

SEQ ID NO: 423076 - DNA, 25 bp, Artificial
  probe
  misc_feature (1)..(25): SEQ ID NO: 5840; WAN024C86; Start 63; Stop 87
gttcaagatacttgttggtctgttg

SEQ ID NO: 423077 - DNA, 25 bp, Artificial
  probe
  misc_feature (1)..(25): SEQ ID NO: 5840; WAN024C86; Start 62; Stop 86
agttcaagatacttgttggtctgtt

SEQ ID NO: 423078 - DNA, 25 bp, Artificial
  probe
  misc_feature (1)..(25): SEQ ID NO: 5840; WAN024C86; Start 66; Stop 90
caagatacttgttggtctgttgaat

SEQ ID NO: 423079 - DNA, 25 bp, Artificial
  probe
  misc_feature (1)..(25): SEQ ID NO: 5840; WAN024C86; Start 197; Stop 221
cgtttgctgggttccatattattga

SEQ ID NO: 423080 - DNA, 25 bp, Artificial
  probe
  misc_feature (1)..(25): SEQ ID NO: 5840; WAN024C86; Start 257; Stop 281
atactgttgaaacctgcaatcatac

SEQ ID NO: 423081 - DNA, 25 bp, Artificial
  probe
  misc_feature (1)..(25): SEQ ID NO: 5840; WAN024C86; Start 61; Stop 85
gagttcaagatacttgttggtctgt

SEQ ID NO: 423082 - DNA, 25 bp, Artificial
  probe
  misc_feature (1)..(25): SEQ ID NO: 5840; WAN024C86; Start 60; Stop 84
tgagttcaagatacttgttggtctg

SEQ ID NO: 423083 - DNA, 25 bp, Artificial
  probe
  misc_feature (1)..(25): SEQ ID NO: 5840; WAN024C86; Start 256; Stop 280
gatactgttgaaacctgcaatcata

SEQ ID NO: 423084 - DNA, 25 bp, Artificial
  probe
  misc_feature (1)..(25): SEQ ID NO: 5840; WAN024C86; Start 32; Stop 56
tttcgatccgcatattgagcaattt

SEQ ID NO: 423085 - DNA, 25 bp, Artificial
  probe
  misc_feature (1)..(25): SEQ ID NO: 5840; WAN024C86; Start 4; Stop 28
ttgttgtccaccactgagtttatcg

SEQ ID NO: 423086 - DNA, 25 bp, Artificial
  probe
  misc_feature (1)..(25): SEQ ID NO: 5840; WAN024C86; Start 263; Stop 287
ttgaaacctgcaatcatacgaagaa

SEQ ID NO: 423087 - DNA, 25 bp, Artificial
  probe
  misc_feature (1)..(25): SEQ ID NO: 5841; WAN024DZK; Start 960; Stop 984
accattaactcatctctatacgact

SEQ ID NO: 423088 - DNA, 25 bp, Artificial
  probe
  misc_feature (1)..(25): SEQ ID NO: 5841; WAN024DZK; Start 972; Stop 996
tctctatacgactgattctctagcg

SEQ ID NO: 423089 - DNA, 25 bp, Artificial
  probe
  misc_feature (1)..(25): SEQ ID NO: 5841; WAN024DZK; Start 961; Stop 985
ccattaactcatctctatacgactg

SEQ ID NO: 423090 - DNA, 25 bp, Artificial
  probe
  misc_feature (1)..(25): SEQ ID NO: 5841; WAN024DZK; Start 364; Stop 388
gagagtggtggactgtatctatctt

SEQ ID NO: 423091 - DNA, 25 bp, Artificial
  probe
  misc_feature (1)..(25): SEQ ID NO: 5841; WAN024DZK; Start 971; Stop 995
atctctatacgactgattctctagc

SEQ ID NO: 423092 - DNA, 25 bp, Artificial
  probe
  misc_feature (1)..(25): SEQ ID NO: 5841; WAN024DZK; Start 261; Stop 285
ggcgttgaagattaccttactatta

SEQ ID NO: 423093 - DNA, 25 bp, Artificial
  probe
  misc_feature (1)..(25): SEQ ID NO: 5841; WAN024DZK; Start 967; Stop 991
actcatctctatacgactgattctc

SEQ ID NO: 423094 - DNA, 25 bp, Artificial
  probe
  misc_feature (1)..(25): SEQ ID NO: 5841; WAN024DZK; Start 968; Stop 992
ctcatctctatacgactgattctct

SEQ ID NO: 423095 - DNA, 25 bp, Artificial
  probe
  misc_feature (1)..(25): SEQ ID NO: 5841; WAN024DZK; Start 966; Stop 990
aactcatctctatacgactgattct

SEQ ID NO: 423096 - DNA, 25 bp, Artificial
  probe
  misc_feature (1)..(25): SEQ ID NO: 5841; WAN024DZK; Start 362; Stop 386
ctgagagtggtggactgtatctatc

SEQ ID NO: 423097 - DNA, 25 bp, Artificial
  probe
  misc_feature (1)..(25): SEQ ID NO: 5841; WAN024DZK; Start 973; Stop 997
ctctatacgactgattctctagcgg

SEQ ID NO: 423098 - DNA, 25 bp, Artificial
  probe
  misc_feature (1)..(25): SEQ ID NO: 5841; WAN024DZK; Start 260; Stop 284
aggcgttgaagattaccttactatt

SEQ ID NO: 423099 - DNA, 25 bp, Artificial
  probe
  misc_feature (1)..(25): SEQ ID NO: 5841; WAN024DZK; Start 259; Stop 283
gaggcgttgaagattaccttactat

SEQ ID NO: 423100 - DNA, 25 bp, Artificial
  probe
  misc_feature (1)..(25): SEQ ID NO: 5841; WAN024DZK; Start 363; Stop 387
tgagagtggtggactgtatctatct

SEQ ID NO: 423101 - DNA, 25 bp, Artificial
  probe
  misc_feature (1)..(25): SEQ ID NO: 5841; WAN024DZK; Start 975; Stop 999
ctatacgactgattctctagcggtg

SEQ ID NO: 423102 - DNA, 25 bp, Artificial
  probe
  misc_feature (1)..(25): SEQ ID NO: 5841; WAN024DZK; Start 974; Stop 998
tctatacgactgattctctagcggt

SEQ ID NO: 423103 - DNA, 25 bp, Artificial
  probe
  misc_feature (1)..(25): SEQ ID NO: 5841; WAN024DZK; Start 258; Stop 282
tgaggcgttgaagattaccttacta

SEQ ID NO: 423104 - DNA, 25 bp, Artificial
  probe
  misc_feature (1)..(25): SEQ ID NO: 5841; WAN024DZK; Start 969; Stop 993
tcatctctatacgactgattctcta

SEQ ID NO: 423105 - DNA, 25 bp, Artificial
  probe
  misc_feature (1)..(25): SEQ ID NO: 5841; WAN024DZK; Start 959; Stop 983
taccattaactcatctctatacgac

SEQ ID NO: 423106 - DNA, 25 bp, Artificial
  probe
  misc_feature (1)..(25): SEQ ID NO: 5841; WAN024DZK; Start 371; Stop 395
gtggactgtatctatctttggtagg

SEQ ID NO: 423107 - DNA, 25 bp, Artificial
  probe
  misc_feature (1)..(25): SEQ ID NO: 5841; WAN024DZK; Start 370; Stop 394
ggtggactgtatctatctttggtag

SEQ ID NO: 423108 - DNA, 25 bp, Artificial
  probe
  misc_feature (1)..(25): SEQ ID NO: 5841; WAN024DZK; Start 86; Stop 110
acagttatttggttgctcatttagg

SEQ ID NO: 423109 - DNA, 25 bp, Artificial
  probe
  misc_feature (1)..(25): SEQ ID NO: 5841; WAN024DZK; Start 84; Stop 108
ggacagttatttggttgctcattta

SEQ ID NO: 423110 - DNA, 25 bp, Artificial
  probe
  misc_feature (1)..(25): SEQ ID NO: 5841; WAN024DZK; Start 21; Stop 45
cattcttaatattgcattgccagct

SEQ ID NO: 423111 - DNA, 25 bp, Artificial
  probe
  misc_feature (1)..(25): SEQ ID NO: 5841; WAN024DZK; Start 962; Stop 986
cattaactcatctctatacgactga

SEQ ID NO: 423112 - DNA, 25 bp, Artificial
  probe
  misc_feature (1)..(25): SEQ ID NO: 5841; WAN024DZK; Start 369; Stop 393
tggtggactgtatctatctttggta

SEQ ID NO: 423113 - DNA, 25 bp, Artificial
  probe
  misc_feature (1)..(25): SEQ ID NO: 5841; WAN024DZK; Start 970; Stop 994
catctctatacgactgattctctag

SEQ ID NO: 423114 - DNA, 25 bp, Artificial
  probe
  misc_feature (1)..(25): SEQ ID NO: 5841; WAN024DZK; Start 87; Stop 111
cagttatttggttgctcatttagga

SEQ ID NO: 423115 - DNA, 25 bp, Artificial
  probe
  misc_feature (1)..(25): SEQ ID NO: 5841; WAN024DZK; Start 20; Stop 44
acattcttaatattgcattgccagc

SEQ ID NO: 423116 - DNA, 25 bp, Artificial
  probe
  misc_feature (1)..(25): SEQ ID NO: 5841; WAN024DZK; Start 24; Stop 48
tcttaatattgcattgccagctatg

SEQ ID NO: 423117 - DNA, 25 bp, Artificial
  probe
  misc_feature (1)..(25): SEQ ID NO: 5841; WAN024DZK; Start 23; Stop 47
ttcttaatattgcattgccagctat

SEQ ID NO: 423118 - DNA, 25 bp, Artificial
  probe
  misc_feature (1)..(25): SEQ ID NO: 5841; WAN024DZK; Start 22; Stop 46
attcttaatattgcattgccagcta

SEQ ID NO: 423119 - DNA, 25 bp, Artificial
  probe
  misc_feature (1)..(25): SEQ ID NO: 5841; WAN024DZK; Start 19; Stop 43
gacattcttaatattgcattgccag

SEQ ID NO: 423120 - DNA, 25 bp, Artificial
  probe
  misc_feature (1)..(25): SEQ ID NO: 5842; WAN024GA9; Start 231; Stop 255
tagcatcatcgttgtagtaatcacc

SEQ ID NO: 423121 - DNA, 25 bp, Artificial
  probe
  misc_feature (1)..(25): SEQ ID NO: 5842; WAN024GA9; Start 230; Stop 254
atagcatcatcgttgtagtaatcac

SEQ ID NO: 423122 - DNA, 25 bp, Artificial
  probe
  misc_feature (1)..(25): SEQ ID NO: 5842; WAN024GA9; Start 229; Stop 253
aatagcatcatcgttgtagtaatca

SEQ ID NO: 423123 - DNA, 25 bp, Artificial
  probe
  misc_feature (1)..(25): SEQ ID NO: 5842; WAN024GA9; Start 224; Stop 248
tggtaaatagcatcatcgttgtagt

SEQ ID NO: 423124 - DNA, 25 bp, Artificial
  probe
  misc_feature (1)..(25): SEQ ID NO: 5842; WAN024GA9; Start 223; Stop 247
ttggtaaatagcatcatcgttgtag

SEQ ID NO: 423125 - DNA, 25 bp, Artificial
  probe
  misc_feature (1)..(25): SEQ ID NO: 5842; WAN024GA9; Start 232; Stop 256
agcatcatcgttgtagtaatcaccg

SEQ ID NO: 423126 - DNA, 25 bp, Artificial
  probe
  misc_feature (1)..(25): SEQ ID NO: 5842; WAN024GA9; Start 222; Stop 246
tttggtaaatagcatcatcgttgta

SEQ ID NO: 423127 - DNA, 25 bp, Artificial
  probe
  misc_feature (1)..(25): SEQ ID NO: 5842; WAN024GA9; Start 383; Stop 407
aaccaacctgtcttgtgcttgataa

SEQ ID NO: 423128 - DNA, 25 bp, Artificial
  probe
  misc_feature (1)..(25): SEQ ID NO: 5842; WAN024GA9; Start 225; Stop 249
ggtaaatagcatcatcgttgtagta

SEQ ID NO: 423129 - DNA, 25 bp, Artificial
  probe
  misc_feature (1)..(25): SEQ ID NO: 5842; WAN024GA9; Start 282; Stop 306
cactgagagcaatcactttggtaaa

SEQ ID NO: 423130 - DNA, 25 bp, Artificial
  probe
  misc_feature (1)..(25): SEQ ID NO: 5842; WAN024GA9; Start 234; Stop 258
catcatcgttgtagtaatcaccgac

SEQ ID NO: 423131 - DNA, 25 bp, Artificial
  probe
  misc_feature (1)..(25): SEQ ID NO: 5842; WAN024GA9; Start 243; Stop 267
tgtagtaatcaccgacaaagaaacg

SEQ ID NO: 423132 - DNA, 25 bp, Artificial
  probe
  misc_feature (1)..(25): SEQ ID NO: 5842; WAN024GA9; Start 235; Stop 259
atcatcgttgtagtaatcaccgaca

SEQ ID NO: 423133 - DNA, 25 bp, Artificial
  probe
  misc_feature (1)..(25): SEQ ID NO: 5842; WAN024GA9; Start 228; Stop 252
aaatagcatcatcgttgtagtaatc

SEQ ID NO: 423134 - DNA, 25 bp, Artificial
  probe
  misc_feature (1)..(25): SEQ ID NO: 5842; WAN024GA9; Start 198; Stop 222
tccaaatataatctactggcgagtt

SEQ ID NO: 423135 - DNA, 25 bp, Artificial
  probe
  misc_feature (1)..(25): SEQ ID NO: 5842; WAN024GA9; Start 197; Stop 221
ttccaaatataatctactggcgagt

SEQ ID NO: 423136 - DNA, 25 bp, Artificial
  probe
  misc_feature (1)..(25): SEQ ID NO: 5842; WAN024GA9; Start 195; Stop 219
ggttccaaatataatctactggcga

SEQ ID NO: 423137 - DNA, 25 bp, Artificial
  probe
  misc_feature (1)..(25): SEQ ID NO: 5842; WAN024GA9; Start 196; Stop 220
gttccaaatataatctactggcgag

SEQ ID NO: 423138 - DNA, 25 bp, Artificial
  probe
  misc_feature (1)..(25): SEQ ID NO: 5842; WAN024GA9; Start 194; Stop 218
tggttccaaatataatctactggcg

SEQ ID NO: 423139 - DNA, 25 bp, Artificial
  probe
  misc_feature (1)..(25): SEQ ID NO: 5842; WAN024GA9; Start 275; Stop 299
taaacaccactgagagcaatcactt

SEQ ID NO: 423140 - DNA, 25 bp, Artificial
  probe
  misc_feature (1)..(25): SEQ ID NO: 5842; WAN024GA9; Start 322; Stop 346
gaggaagaaattgagtgcatgatag

SEQ ID NO: 423141 - DNA, 25 bp, Artificial
  probe
  misc_feature (1)..(25): SEQ ID NO: 5842; WAN024GA9; Start 199; Stop 223
ccaaatataatctactggcgagttt

SEQ ID NO: 423142 - DNA, 25 bp, Artificial
  probe
  misc_feature (1)..(25): SEQ ID NO: 5842; WAN024GA9; Start 56; Stop 80
caggctggaatttgtttcttgtcaa

SEQ ID NO: 423143 - DNA, 25 bp, Artificial
  probe
  misc_feature (1)..(25): SEQ ID NO: 5842; WAN024GA9; Start 323; Stop 347
aggaagaaattgagtgcatgatagg

SEQ ID NO: 423144 - DNA, 25 bp, Artificial
  probe
  misc_feature (1)..(25): SEQ ID NO: 5842; WAN024GA9; Start 321; Stop 345
ggaggaagaaattgagtgcatgata

SEQ ID NO: 423145 - DNA, 25 bp, Artificial
  probe
  misc_feature (1)..(25): SEQ ID NO: 5842; WAN024GA9; Start 352; Stop 376
catagagcaacctgtcgtcatcatg

SEQ ID NO: 423146 - DNA, 25 bp, Artificial
  probe
  misc_feature (1)..(25): SEQ ID NO: 5842; WAN024GA9; Start 226; Stop 250
gtaaatagcatcatcgttgtagtaa

SEQ ID NO: 423147 - DNA, 25 bp, Artificial
  probe
  misc_feature (1)..(25): SEQ ID NO: 5842; WAN024GA9; Start 293; Stop 317
atcactttggtaaagacatctggat

SEQ ID NO: 423148 - DNA, 25 bp, Artificial
  probe
  misc_feature (1)..(25): SEQ ID NO: 5842; WAN024GA9; Start 292; Stop 316
aatcactttggtaaagacatctgga

SEQ ID NO: 423149 - DNA, 25 bp, Artificial
  probe
  misc_feature (1)..(25): SEQ ID NO: 5842; WAN024GA9; Start 291; Stop 315
caatcactttggtaaagacatctgg

SEQ ID NO: 423150 - DNA, 25 bp, Artificial
  probe
  misc_feature (1)..(25): SEQ ID NO: 5842; WAN024GA9; Start 288; Stop 312
gagcaatcactttggtaaagacatc

SEQ ID NO: 423151 - DNA, 25 bp, Artificial
  probe
  misc_feature (1)..(25): SEQ ID NO: 5842; WAN024GA9; Start 289; Stop 313
agcaatcactttggtaaagacatct

SEQ ID NO: 423152 - DNA, 25 bp, Artificial
  probe
  misc_feature (1)..(25): SEQ ID NO: 5842; WAN024GA9; Start 287; Stop 311
agagcaatcactttggtaaagacat

SEQ ID NO: 423153 - DNA, 25 bp, Artificial
  probe
  misc_feature (1)..(25): SEQ ID NO: 5843; WAN024DZI; Start 180; Stop 204
ctacatctccagccctcatcataag

SEQ ID NO: 423154 - DNA, 25 bp, Artificial
  probe
  misc_feature (1)..(25): SEQ ID NO: 5843; WAN024DZI; Start 98; Stop 122
tagttaaactgggtcaagacttctc

SEQ ID NO: 423155 - DNA, 25 bp, Artificial
  probe
  misc_feature (1)..(25): SEQ ID NO: 5843; WAN024DZI; Start 92; Stop 116
ggcatatagttaaactgggtcaaga

SEQ ID NO: 423156 - DNA, 25 bp, Artificial
  probe
  misc_feature (1)..(25): SEQ ID NO: 5843; WAN024DZI; Start 91; Stop 115
aggcatatagttaaactgggtcaag

SEQ ID NO: 423157 - DNA, 25 bp, Artificial
  probe
  misc_feature (1)..(25): SEQ ID NO: 5843; WAN024DZI; Start 93; Stop 117
gcatatagttaaactgggtcaagac

SEQ ID NO: 423158 - DNA, 25 bp, Artificial
  probe
  misc_feature (1)..(25): SEQ ID NO: 5843; WAN024DZI; Start 97; Stop 121
atagttaaactgggtcaagacttct

SEQ ID NO: 423159 - DNA, 25 bp, Artificial
  probe
  misc_feature (1)..(25): SEQ ID NO: 5843; WAN024DZI; Start 83; Stop 107
ccaaaggcaggcatatagttaaact

SEQ ID NO: 423160 - DNA, 25 bp, Artificial
  probe
  misc_feature (1)..(25): SEQ ID NO: 5843; WAN024DZI; Start 84; Stop 108
caaaggcaggcatatagttaaactg

SEQ ID NO: 423161 - DNA, 25 bp, Artificial
  probe
  misc_feature (1)..(25): SEQ ID NO: 5843; WAN024DZI; Start 90; Stop 114
caggcatatagttaaactgggtcaa

SEQ ID NO: 423162 - DNA, 25 bp, Artificial
  probe
  misc_feature (1)..(25): SEQ ID NO: 5843; WAN024DZI; Start 181; Stop 205
tacatctccagccctcatcataagt

SEQ ID NO: 423163 - DNA, 25 bp, Artificial
  probe
  misc_feature (1)..(25): SEQ ID NO: 5843; WAN024DZI; Start 179; Stop 203
actacatctccagccctcatcataa

SEQ ID NO: 423164 - DNA, 25 bp, Artificial
  probe
  misc_feature (1)..(25): SEQ ID NO: 5843; WAN024DZI; Start 85; Stop 109
aaaggcaggcatatagttaaactgg

SEQ ID NO: 423165 - DNA, 25 bp, Artificial
  probe
  misc_feature (1)..(25): SEQ ID NO: 5843; WAN024DZI; Start 96; Stop 120
tatagttaaactgggtcaagacttc

SEQ ID NO: 423166 - DNA, 25 bp, Artificial
  probe
  misc_feature (1)..(25): SEQ ID NO: 5843; WAN024DZI; Start 94; Stop 118
catatagttaaactgggtcaagact

SEQ ID NO: 423167 - DNA, 25 bp, Artificial
  probe
  misc_feature (1)..(25): SEQ ID NO: 5843; WAN024DZI; Start 99; Stop 123
agttaaactgggtcaagacttctcc

SEQ ID NO: 423168 - DNA, 25 bp, Artificial
  probe
  misc_feature (1)..(25): SEQ ID NO: 5843; WAN024DZI; Start 178; Stop 202
cactacatctccagccctcatcata

SEQ ID NO: 423169 - DNA, 25 bp, Artificial
  probe
  misc_feature (1)..(25): SEQ ID NO: 5843; WAN024DZI; Start 26; Stop 50
ttccaatcatcctctccaactgctc

SEQ ID NO: 423170 - DNA, 25 bp, Artificial
  probe
  misc_feature (1)..(25): SEQ ID NO: 5843; WAN024DZI; Start 102; Stop 126
taaactgggtcaagacttctccgat

SEQ ID NO: 423171 - DNA, 25 bp, Artificial
  probe
  misc_feature (1)..(25): SEQ ID NO: 5843; WAN024DZI; Start 100; Stop 124
gttaaactgggtcaagacttctccg

SEQ ID NO: 423172 - DNA, 25 bp, Artificial
  probe
  misc_feature (1)..(25): SEQ ID NO: 5843; WAN024DZI; Start 95; Stop 119
atatagttaaactgggtcaagactt

SEQ ID NO: 423173 - DNA, 25 bp, Artificial
  probe
  misc_feature (1)..(25): SEQ ID NO: 5843; WAN024DZI; Start 2; Stop 26
tgtttactcaaactagcaactcttt

SEQ ID NO: 423174 - DNA, 25 bp, Artificial
  probe
  misc_feature (1)..(25): SEQ ID NO: 5843; WAN024DZI; Start 1; Stop 25
ttgtttactcaaactagcaactctt

SEQ ID NO: 423175 - DNA, 25 bp, Artificial
  probe
  misc_feature (1)..(25): SEQ ID NO: 5843; WAN024DZI; Start 15; Stop 39
tagcaactcttttccaatcatcctc

SEQ ID NO: 423176 - DNA, 25 bp, Artificial
  probe
  misc_feature (1)..(25): SEQ ID NO: 5843; WAN024DZI; Start 101; Stop 125
ttaaactgggtcaagacttctccga

SEQ ID NO: 423177 - DNA, 25 bp, Artificial
  probe
  misc_feature (1)..(25): SEQ ID NO: 5843; WAN024DZI; Start 10; Stop 34
caaactagcaactcttttccaatca

SEQ ID NO: 423178 - DNA, 25 bp, Artificial
  probe
  misc_feature (1)..(25): SEQ ID NO: 5843; WAN024DZI; Start 6; Stop 30
tactcaaactagcaactcttttcca

SEQ ID NO: 423179 - DNA, 25 bp, Artificial
  probe
  misc_feature (1)..(25): SEQ ID NO: 5843; WAN024DZI; Start 89; Stop 113
gcaggcatatagttaaactgggtca

SEQ ID NO: 423180 - DNA, 25 bp, Artificial
  probe
  misc_feature (1)..(25): SEQ ID NO: 5843; WAN024DZI; Start 86; Stop 110
aaggcaggcatatagttaaactggg

SEQ ID NO: 423181 - DNA, 25 bp, Artificial
  probe
  misc_feature (1)..(25): SEQ ID NO: 5843; WAN024DZI; Start 21; Stop 45
ctcttttccaatcatcctctccaac

SEQ ID NO: 423182 - DNA, 25 bp, Artificial
  probe
  misc_feature (1)..(25): SEQ ID NO: 5843; WAN024DZI; Start 18; Stop 42
caactcttttccaatcatcctctcc

SEQ ID NO: 423183 - DNA, 25 bp, Artificial
  probe
  misc_feature (1)..(25): SEQ ID NO: 5843; WAN024DZI; Start 12; Stop 36
aactagcaactcttttccaatcatc

SEQ ID NO: 423184 - DNA, 25 bp, Artificial
  probe
  misc_feature (1)..(25): SEQ ID NO: 5843; WAN024DZI; Start 9; Stop 33
tcaaactagcaactcttttccaatc

SEQ ID NO: 423185 - DNA, 25 bp, Artificial
  probe
  misc_feature (1)..(25): SEQ ID NO: 5843; WAN024DZI; Start 8; Stop 32
ctcaaactagcaactcttttccaat

SEQ ID NO: 423186 - DNA, 25 bp, Artificial
  probe
  misc_feature (1)..(25): SEQ ID NO: 5844; WAN024FNF; Start 233; Stop 257
tgaatgccaactatacttcttctga

SEQ ID NO: 423187 - DNA, 25 bp, Artificial
  probe
  misc_feature (1)..(25): SEQ ID NO: 5844; WAN024FNF; Start 98; Stop 122
atgataagaatctaagaccgcttgt

SEQ ID NO: 423188 - DNA, 25 bp, Artificial
  probe
  misc_feature (1)..(25): SEQ ID NO: 5844; WAN024FNF; Start 99; Stop 123
tgataagaatctaagaccgcttgta

SEQ ID NO: 423189 - DNA, 25 bp, Artificial
  probe
  misc_feature (1)..(25): SEQ ID NO: 5844; WAN024FNF; Start 234; Stop 258
gaatgccaactatacttcttctgaa

SEQ ID NO: 423190 - DNA, 25 bp, Artificial
  probe
  misc_feature (1)..(25): SEQ ID NO: 5844; WAN024FNF; Start 232; Stop 256
atgaatgccaactatacttcttctg

SEQ ID NO: 423191 - DNA, 25 bp, Artificial
  probe
  misc_feature (1)..(25): SEQ ID NO: 5844; WAN024FNF; Start 229; Stop 253
tcaatgaatgccaactatacttctt

SEQ ID NO: 423192 - DNA, 25 bp, Artificial
  probe
  misc_feature (1)..(25): SEQ ID NO: 5844; WAN024FNF; Start 230; Stop 254
caatgaatgccaactatacttcttc

SEQ ID NO: 423193 - DNA, 25 bp, Artificial
  probe
  misc_feature (1)..(25): SEQ ID NO: 5844; WAN024FNF; Start 100; Stop 124
gataagaatctaagaccgcttgtac

SEQ ID NO: 423194 - DNA, 25 bp, Artificial
  probe
  misc_feature (1)..(25): SEQ ID NO: 5844; WAN024FNF; Start 231; Stop 255
aatgaatgccaactatacttcttct

SEQ ID NO: 423195 - DNA, 25 bp, Artificial
  probe
  misc_feature (1)..(25): SEQ ID NO: 5844; WAN024FNF; Start 228; Stop 252
ttcaatgaatgccaactatacttct

SEQ ID NO: 423196 - DNA, 25 bp, Artificial
  probe
  misc_feature (1)..(25): SEQ ID NO: 5844; WAN024FNF; Start 260; Stop 284
aagttctacgagagattgattacaa

SEQ ID NO: 423197 - DNA, 25 bp, Artificial
  probe
  misc_feature (1)..(25): SEQ ID NO: 5844; WAN024FNF; Start 235; Stop 259
aatgccaactatacttcttctgaaa

SEQ ID NO: 423198 - DNA, 25 bp, Artificial
  probe
  misc_feature (1)..(25): SEQ ID NO: 5844; WAN024FNF; Start 259; Stop 283
aaagttctacgagagattgattaca

SEQ ID NO: 423199 - DNA, 25 bp, Artificial
  probe
  misc_feature (1)..(25): SEQ ID NO: 5844; WAN024FNF; Start 261; Stop 285
agttctacgagagattgattacaaa

SEQ ID NO: 423200 - DNA, 25 bp, Artificial
  probe
  misc_feature (1)..(25): SEQ ID NO: 5844; WAN024FNF; Start 137; Stop 161
ttctaccaacttatctactgtcaaa

SEQ ID NO: 423201 - DNA, 25 bp, Artificial
  probe
  misc_feature (1)..(25): SEQ ID NO: 5844; WAN024FNF; Start 136; Stop 160
tttctaccaacttatctactgtcaa

SEQ ID NO: 423202 - DNA, 25 bp, Artificial
  probe
  misc_feature (1)..(25): SEQ ID NO: 5844; WAN024FNF; Start 191; Stop 215
tgcatagttcttatcataagtcgaa

SEQ ID NO: 423203 - DNA, 25 bp, Artificial
  probe
  misc_feature (1)..(25): SEQ ID NO: 5844; WAN024FNF; Start 190; Stop 214
ttgcatagttcttatcataagtcga

SEQ ID NO: 423204 - DNA, 25 bp, Artificial
  probe
  misc_feature (1)..(25): SEQ ID NO: 5844; WAN024FNF; Start 192; Stop 216
gcatagttcttatcataagtcgaag

SEQ ID NO: 423205 - DNA, 25 bp, Artificial
  probe
  misc_feature (1)..(25): SEQ ID NO: 5844; WAN024FNF; Start 189; Stop 213
cttgcatagttcttatcataagtcg

SEQ ID NO: 423206 - DNA, 25 bp, Artificial
  probe
  misc_feature (1)..(25): SEQ ID NO: 5844; WAN024FNF; Start 102; Stop 126
taagaatctaagaccgcttgtacac

SEQ ID NO: 423207 - DNA, 25 bp, Artificial
  probe
  misc_feature (1)..(25): SEQ ID NO: 5844; WAN024FNF; Start 101; Stop 125
ataagaatctaagaccgcttgtaca

SEQ ID NO: 423208 - DNA, 25 bp, Artificial
  probe
  misc_feature (1)..(25): SEQ ID NO: 5844; WAN024FNF; Start 36; Stop 60
attaatttctgctgaacaaaccaat

SEQ ID NO: 423209 - DNA, 25 bp, Artificial
  probe
  misc_feature (1)..(25): SEQ ID NO: 5844; WAN024FNF; Start 227; Stop 251
attcaatgaatgccaactatacttc

SEQ ID NO: 423210 - DNA, 25 bp, Artificial
  probe
  misc_feature (1)..(25): SEQ ID NO: 5844; WAN024FNF; Start 105; Stop 129
gaatctaagaccgcttgtacactac

SEQ ID NO: 423211 - DNA, 25 bp, Artificial
  probe
  misc_feature (1)..(25): SEQ ID NO: 5844; WAN024FNF; Start 104; Stop 128
agaatctaagaccgcttgtacacta

SEQ ID NO: 423212 - DNA, 25 bp, Artificial
  probe
  misc_feature (1)..(25): SEQ ID NO: 5844; WAN024FNF; Start 262; Stop 286
gttctacgagagattgattacaaat

SEQ ID NO: 423213 - DNA, 25 bp, Artificial
  probe
  misc_feature (1)..(25): SEQ ID NO: 5844; WAN024FNF; Start 109; Stop 133
ctaagaccgcttgtacactacctaa

SEQ ID NO: 423214 - DNA, 25 bp, Artificial
  probe
  misc_feature (1)..(25): SEQ ID NO: 5844; WAN024FNF; Start 103; Stop 127
aagaatctaagaccgcttgtacact

SEQ ID NO: 423215 - DNA, 25 bp, Artificial
  probe
  misc_feature (1)..(25): SEQ ID NO: 5844; WAN024FNF; Start 290; Stop 314
ttccgcttgaaattcctcttctgtc

SEQ ID NO: 423216 - DNA, 25 bp, Artificial
  probe
  misc_feature (1)..(25): SEQ ID NO: 5844; WAN024FNF; Start 297; Stop 321
tgaaattcctcttctgtcaagaaat

SEQ ID NO: 423217 - DNA, 25 bp, Artificial
  probe
  misc_feature (1)..(25): SEQ ID NO: 5844; WAN024FNF; Start 106; Stop 130
aatctaagaccgcttgtacactacc

SEQ ID NO: 423218 - DNA, 25 bp, Artificial
  probe
  misc_feature (1)..(25): SEQ ID NO: 5844; WAN024FNF; Start 108; Stop 132
tctaagaccgcttgtacactaccta

SEQ ID NO: 423219 - DNA, 25 bp, Artificial
  probe
  misc_feature (1)..(25): SEQ ID NO: 5845; WAN024BGL; Start 171; Stop 195
tcactatgttgaatgttatgctgtt

SEQ ID NO: 423220 - DNA, 25 bp, Artificial
  probe
  misc_feature (1)..(25): SEQ ID NO: 5845; WAN024BGL; Start 170; Stop 194
atcactatgttgaatgttatgctgt

SEQ ID NO: 423221 - DNA, 25 bp, Artificial
  probe
  misc_feature (1)..(25): SEQ ID NO: 5845; WAN024BGL; Start 9; Stop 33
ttgcttcatcattcatagaactact

SEQ ID NO: 423222 - DNA, 25 bp, Artificial
  probe
  misc_feature (1)..(25): SEQ ID NO: 5845; WAN024BGL; Start 7; Stop 31
acttgcttcatcattcatagaacta

SEQ ID NO: 423223 - DNA, 25 bp, Artificial
  probe
  misc_feature (1)..(25): SEQ ID NO: 5845; WAN024BGL; Start 6; Stop 30
tacttgcttcatcattcatagaact

SEQ ID NO: 423224 - DNA, 25 bp, Artificial
  probe
  misc_feature (1)..(25): SEQ ID NO: 5845; WAN024BGL; Start 211; Stop 235
atagcaagagatagaataacagtcc

SEQ ID NO: 423225 - DNA, 25 bp, Artificial
  probe
  misc_feature (1)..(25): SEQ ID NO: 5845; WAN024BGL; Start 8; Stop 32
cttgcttcatcattcatagaactac

SEQ ID NO: 423226 - DNA, 25 bp, Artificial
  probe
  misc_feature (1)..(25): SEQ ID NO: 5845; WAN024BGL; Start 169; Stop 193
gatcactatgttgaatgttatgctg

SEQ ID NO: 423227 - DNA, 25 bp, Artificial
  probe
  misc_feature (1)..(25): SEQ ID NO: 5845; WAN024BGL; Start 168; Stop 192
agatcactatgttgaatgttatgct

SEQ ID NO: 423228 - DNA, 25 bp, Artificial
  probe
  misc_feature (1)..(25): SEQ ID NO: 5845; WAN024BGL; Start 167; Stop 191
gagatcactatgttgaatgttatgc

SEQ ID NO: 423229 - DNA, 25 bp, Artificial
  probe
  misc_feature (1)..(25): SEQ ID NO: 5845; WAN024BGL; Start 5; Stop 29
ttacttgcttcatcattcatagaac

SEQ ID NO: 423230 - DNA, 25 bp, Artificial
  probe
  misc_feature (1)..(25): SEQ ID NO: 5845; WAN024BGL; Start 202; Stop 226
aatacggttatagcaagagatagaa

SEQ ID NO: 423231 - DNA, 25 bp, Artificial
  probe
  misc_feature (1)..(25): SEQ ID NO: 5845; WAN024BGL; Start 214; Stop 238
gcaagagatagaataacagtcccta

SEQ ID NO: 423232 - DNA, 25 bp, Artificial
  probe
  misc_feature (1)..(25): SEQ ID NO: 5845; WAN024BGL; Start 212; Stop 236
tagcaagagatagaataacagtccc

SEQ ID NO: 423233 - DNA, 25 bp, Artificial
  probe
  misc_feature (1)..(25): SEQ ID NO: 5845; WAN024BGL; Start 10; Stop 34
tgcttcatcattcatagaactacta

SEQ ID NO: 423234 - DNA, 25 bp, Artificial
  probe
  misc_feature (1)..(25): SEQ ID NO: 5845; WAN024BGL; Start 213; Stop 237
agcaagagatagaataacagtccct

SEQ ID NO: 423235 - DNA, 25 bp, Artificial
  probe
  misc_feature (1)..(25): SEQ ID NO: 5845; WAN024BGL; Start 92; Stop 116
ctattagaagaaattgtgagcgtgg

SEQ ID NO: 423236 - DNA, 25 bp, Artificial
  probe
  misc_feature (1)..(25): SEQ ID NO: 5845; WAN024BGL; Start 85; Stop 109
gctgaggctattagaagaaattgtg

SEQ ID NO: 423237 - DNA, 25 bp, Artificial
  probe
  misc_feature (1)..(25): SEQ ID NO: 5845; WAN024BGL; Start 93; Stop 117
tattagaagaaattgtgagcgtggt

SEQ ID NO: 423238 - DNA, 25 bp, Artificial
  probe
  misc_feature (1)..(25): SEQ ID NO: 5845; WAN024BGL; Start 203; Stop 227
atacggttatagcaagagatagaat

SEQ ID NO: 423239 - DNA, 25 bp, Artificial
  probe
  misc_feature (1)..(25): SEQ ID NO: 5845; WAN024BGL; Start 205; Stop 229
acggttatagcaagagatagaataa

SEQ ID NO: 423240 - DNA, 25 bp, Artificial
  probe
  misc_feature (1)..(25): SEQ ID NO: 5845; WAN024BGL; Start 51; Stop 75
gcaggaagtctattggaaagtaaga

SEQ ID NO: 423241 - DNA, 25 bp, Artificial
  probe
  misc_feature (1)..(25): SEQ ID NO: 5845; WAN024BGL; Start 164; Stop 188
aaggagatcactatgttgaatgtta

SEQ ID NO: 423242 - DNA, 25 bp, Artificial
  probe
  misc_feature (1)..(25): SEQ ID NO: 5845; WAN024BGL; Start 50; Stop 74
cgcaggaagtctattggaaagtaag

SEQ ID NO: 423243 - DNA, 25 bp, Artificial
  probe
  misc_feature (1)..(25): SEQ ID NO: 5845; WAN024BGL; Start 166; Stop 190
ggagatcactatgttgaatgttatg

SEQ ID NO: 423244 - DNA, 25 bp, Artificial
  probe
  misc_feature (1)..(25): SEQ ID NO: 5845; WAN024BGL; Start 198; Stop 222
agataatacggttatagcaagagat

SEQ ID NO: 423245 - DNA, 25 bp, Artificial
  probe
  misc_feature (1)..(25): SEQ ID NO: 5845; WAN024BGL; Start 172; Stop 196
cactatgttgaatgttatgctgttt

SEQ ID NO: 423246 - DNA, 25 bp, Artificial
  probe
  misc_feature (1)..(25): SEQ ID NO: 5845; WAN024BGL; Start 87; Stop 111
tgaggctattagaagaaattgtgag

SEQ ID NO: 423247 - DNA, 25 bp, Artificial
  probe
  misc_feature (1)..(25): SEQ ID NO: 5845; WAN024BGL; Start 86; Stop 110
ctgaggctattagaagaaattgtga

SEQ ID NO: 423248 - DNA, 25 bp, Artificial
  probe
  misc_feature (1)..(25): SEQ ID NO: 5845; WAN024BGL; Start 165; Stop 189
aggagatcactatgttgaatgttat

SEQ ID NO: 423249 - DNA, 25 bp, Artificial
  probe
  misc_feature (1)..(25): SEQ ID NO: 5845; WAN024BGL; Start 49; Stop 73
tcgcaggaagtctattggaaagtaa

SEQ ID NO: 423250 - DNA, 25 bp, Artificial
  probe
  misc_feature (1)..(25): SEQ ID NO: 5845; WAN024BGL; Start 48; Stop 72
ttcgcaggaagtctattggaaagta

SEQ ID NO: 423251 - DNA, 25 bp, Artificial
  probe
  misc_feature (1)..(25): SEQ ID NO: 5845; WAN024BGL; Start 94; Stop 118
attagaagaaattgtgagcgtggtg

SEQ ID NO: 423252 - DNA, 25 bp, Artificial
  probe
  misc_feature (1)..(25): SEQ ID NO: 5846; WAN024CBC; Start 55; Stop 79
gtctacaaacgatttcaactcatct

SEQ ID NO: 423253 - DNA, 25 bp, Artificial
  probe
  misc_feature (1)..(25): SEQ ID NO: 5846; WAN024CBC; Start 199; Stop 223
cttatagtcaaattgtccatcgctc

SEQ ID NO: 423254 - DNA, 25 bp, Artificial
  probe
  misc_feature (1)..(25): SEQ ID NO: 5846; WAN024CBC; Start 198; Stop 222
tcttatagtcaaattgtccatcgct

SEQ ID NO: 423255 - DNA, 25 bp, Artificial
  probe
  misc_feature (1)..(25): SEQ ID NO: 5846; WAN024CBC; Start 200; Stop 224
ttatagtcaaattgtccatcgctca

SEQ ID NO: 423256 - DNA, 25 bp, Artificial
  probe
  misc_feature (1)..(25): SEQ ID NO: 5846; WAN024CBC; Start 54; Stop 78
tgtctacaaacgatttcaactcatc

SEQ ID NO: 423257 - DNA, 25 bp, Artificial
  probe
  misc_feature (1)..(25): SEQ ID NO: 5846; WAN024CBC; Start 197; Stop 221
atcttatagtcaaattgtccatcgc

SEQ ID NO: 423258 - DNA, 25 bp, Artificial
  probe
  misc_feature (1)..(25): SEQ ID NO: 5846; WAN024CBC; Start 34; Stop 58
ataaagttctttgatgcgtttgtct

SEQ ID NO: 423259 - DNA, 25 bp, Artificial
  probe
  misc_feature (1)..(25): SEQ ID NO: 5846; WAN024CBC; Start 56; Stop 80
tctacaaacgatttcaactcatctt

SEQ ID NO: 423260 - DNA, 25 bp, Artificial
  probe
  misc_feature (1)..(25): SEQ ID NO: 5846; WAN024CBC; Start 201; Stop 225
tatagtcaaattgtccatcgctcaa

SEQ ID NO: 423261 - DNA, 25 bp, Artificial
  probe
  misc_feature (1)..(25): SEQ ID NO: 5846; WAN024CBC; Start 36; Stop 60
aaagttctttgatgcgtttgtctac

SEQ ID NO: 423262 - DNA, 25 bp, Artificial
  probe
  misc_feature (1)..(25): SEQ ID NO: 5846; WAN024CBC; Start 35; Stop 59
taaagttctttgatgcgtttgtcta

SEQ ID NO: 423263 - DNA, 25 bp, Artificial
  probe
  misc_feature (1)..(25): SEQ ID NO: 5846; WAN024CBC; Start 37; Stop 61
aagttctttgatgcgtttgtctaca

SEQ ID NO: 423264 - DNA, 25 bp, Artificial
  probe
  misc_feature (1)..(25): SEQ ID NO: 5846; WAN024CBC; Start 202; Stop 226
atagtcaaattgtccatcgctcaaa

SEQ ID NO: 423265 - DNA, 25 bp, Artificial
  probe
  misc_feature (1)..(25): SEQ ID NO: 5846; WAN024CBC; Start 57; Stop 81
ctacaaacgatttcaactcatcttg

SEQ ID NO: 423266 - DNA, 25 bp, Artificial
  probe
  misc_feature (1)..(25): SEQ ID NO: 5846; WAN024CBC; Start 33; Stop 57
tataaagttctttgatgcgtttgtc

SEQ ID NO: 423267 - DNA, 25 bp, Artificial
  probe
  misc_feature (1)..(25): SEQ ID NO: 5846; WAN024CBC; Start 53; Stop 77
ttgtctacaaacgatttcaactcat

SEQ ID NO: 423268 - DNA, 25 bp, Artificial
  probe
  misc_feature (1)..(25): SEQ ID NO: 5846; WAN024CBC; Start 257; Stop 281
gtatagttaaggatagttgggttgt

SEQ ID NO: 423269 - DNA, 25 bp, Artificial
  probe
  misc_feature (1)..(25): SEQ ID NO: 5846; WAN024CBC; Start 203; Stop 227
tagtcaaattgtccatcgctcaaac

SEQ ID NO: 423270 - DNA, 25 bp, Artificial
  probe
  misc_feature (1)..(25): SEQ ID NO: 5846; WAN024CBC; Start 259; Stop 283
atagttaaggatagttgggttgtcc

SEQ ID NO: 423271 - DNA, 25 bp, Artificial
  probe
  misc_feature (1)..(25): SEQ ID NO: 5846; WAN024CBC; Start 258; Stop 282
tatagttaaggatagttgggttgtc

SEQ ID NO: 423272 - DNA, 25 bp, Artificial
  probe
  misc_feature (1)..(25): SEQ ID NO: 5846; WAN024CBC; Start 38; Stop 62
agttctttgatgcgtttgtctacaa

SEQ ID NO: 423273 - DNA, 25 bp, Artificial
  probe
  misc_feature (1)..(25): SEQ ID NO: 5846; WAN024CBC; Start 256; Stop 280
agtatagttaaggatagttgggttg

SEQ ID NO: 423274 - DNA, 25 bp, Artificial
  probe
  misc_feature (1)..(25): SEQ ID NO: 5846; WAN024CBC; Start 196; Stop 220
aatcttatagtcaaattgtccatcg

SEQ ID NO: 423275 - DNA, 25 bp, Artificial
  probe
  misc_feature (1)..(25): SEQ ID NO: 5846; WAN024CBC; Start 32; Stop 56
ttataaagttctttgatgcgtttgt

SEQ ID NO: 423276 - DNA, 25 bp, Artificial
  probe
  misc_feature (1)..(25): SEQ ID NO: 5846; WAN024CBC; Start 277; Stop 301
gttgtccgtgtgttcagcattgtat

SEQ ID NO: 423277 - DNA, 25 bp, Artificial
  probe
  misc_feature (1)..(25): SEQ ID NO: 5846; WAN024CBC; Start 278; Stop 302
ttgtccgtgtgttcagcattgtatg

SEQ ID NO: 423278 - DNA, 25 bp, Artificial
  probe
  misc_feature (1)..(25): SEQ ID NO: 5846; WAN024CBC; Start 260; Stop 284
tagttaaggatagttgggttgtccg

SEQ ID NO: 423279 - DNA, 25 bp, Artificial
  probe
  misc_feature (1)..(25): SEQ ID NO: 5846; WAN024CBC; Start 59; Stop 83
acaaacgatttcaactcatcttgac

SEQ ID NO: 423280 - DNA, 25 bp, Artificial
  probe
  misc_feature (1)..(25): SEQ ID NO: 5846; WAN024CBC; Start 60; Stop 84
caaacgatttcaactcatcttgacc

SEQ ID NO: 423281 - DNA, 25 bp, Artificial
  probe
  misc_feature (1)..(25): SEQ ID NO: 5846; WAN024CBC; Start 58; Stop 82
tacaaacgatttcaactcatcttga

SEQ ID NO: 423282 - DNA, 25 bp, Artificial
  probe
  misc_feature (1)..(25): SEQ ID NO: 5846; WAN024CBC; Start 255; Stop 279
tagtatagttaaggatagttgggtt

SEQ ID NO: 423283 - DNA, 25 bp, Artificial
  probe
  misc_feature (1)..(25): SEQ ID NO: 5846; WAN024CBC; Start 254; Stop 278
ttagtatagttaaggatagttgggt

SEQ ID NO: 423284 - DNA, 25 bp, Artificial
  probe
  misc_feature (1)..(25): SEQ ID NO: 5846; WAN024CBC; Start 131; Stop 155
tcgataactttcaagttgtccaaac

SEQ ID NO: 423285 - DNA, 25 bp, Artificial
  probe
  misc_feature (1)..(25): SEQ ID NO: 5847; WAN024DOK; Start 5; Stop 29
ttagtttagttggtttcatatcact

SEQ ID NO: 423286 - DNA, 25 bp, Artificial
  probe
  misc_feature (1)..(25): SEQ ID NO: 5847; WAN024DOK; Start 4; Stop 28
tttagtttagttggtttcatatcac

SEQ ID NO: 423287 - DNA, 25 bp, Artificial
  probe
  misc_feature (1)..(25): SEQ ID NO: 5847; WAN024DOK; Start 3; Stop 27
gtttagtttagttggtttcatatca

SEQ ID NO: 423288 - DNA, 25 bp, Artificial
  probe
  misc_feature (1)..(25): SEQ ID NO: 5847; WAN024DOK; Start 2; Stop 26
tgtttagtttagttggtttcatatc

SEQ ID NO: 423289 - DNA, 25 bp, Artificial
  probe
  misc_feature (1)..(25): SEQ ID NO: 5847; WAN024DOK; Start 7; Stop 31
agtttagttggtttcatatcactat

SEQ ID NO: 423290 - DNA, 25 bp, Artificial
  probe
  misc_feature (1)..(25): SEQ ID NO: 5847; WAN024DOK; Start 1; Stop 25
ttgtttagtttagttggtttcatat

SEQ ID NO: 423291 - DNA, 25 bp, Artificial
  probe
  misc_feature (1)..(25): SEQ ID NO: 5847; WAN024DOK; Start 8; Stop 32
gtttagttggtttcatatcactatt

SEQ ID NO: 423292 - DNA, 25 bp, Artificial
  probe
  misc_feature (1)..(25): SEQ ID NO: 5847; WAN024DOK; Start 6; Stop 30
tagtttagttggtttcatatcacta

SEQ ID NO: 423293 - DNA, 25 bp, Artificial
  probe
  misc_feature (1)..(25): SEQ ID NO: 5848; WAN024F3K; Start 48; Stop 72
aaccttaccttcaagaagttccatt

SEQ ID NO: 423294 - DNA, 25 bp, Artificial
  probe
  misc_feature (1)..(25): SEQ ID NO: 5848; WAN024F3K; Start 86; Stop 110
ccgtactaatccatgagaacttgtc

SEQ ID NO: 423295 - DNA, 25 bp, Artificial
  probe
  misc_feature (1)..(25): SEQ ID NO: 5848; WAN024F3K; Start 87; Stop 111
cgtactaatccatgagaacttgtct

SEQ ID NO: 423296 - DNA, 25 bp, Artificial
  probe
  misc_feature (1)..(25): SEQ ID NO: 5848; WAN024F3K; Start 89; Stop 113
tactaatccatgagaacttgtctgc

SEQ ID NO: 423297 - DNA, 25 bp, Artificial
  probe
  misc_feature (1)..(25): SEQ ID NO: 5848; WAN024F3K; Start 49; Stop 73
accttaccttcaagaagttccattg

SEQ ID NO: 423298 - DNA, 25 bp, Artificial
  probe
  misc_feature (1)..(25): SEQ ID NO: 5848; WAN024F3K; Start 88; Stop 112
gtactaatccatgagaacttgtctg

SEQ ID NO: 423299 - DNA, 25 bp, Artificial
  probe
  misc_feature (1)..(25): SEQ ID NO: 5848; WAN024F3K; Start 155; Stop 179
cgatgattgatttaactcctggttg

SEQ ID NO: 423300 - DNA, 25 bp, Artificial
  probe
  misc_feature (1)..(25): SEQ ID NO: 5848; WAN024F3K; Start 165; Stop 189
tttaactcctggttgtttcacgata

SEQ ID NO: 423301 - DNA, 25 bp, Artificial
  probe
  misc_feature (1)..(25): SEQ ID NO: 5848; WAN024F3K; Start 156; Stop 180
gatgattgatttaactcctggttgt

SEQ ID NO: 423302 - DNA, 25 bp, Artificial
  probe
  misc_feature (1)..(25): SEQ ID NO: 5848; WAN024F3K; Start 166; Stop 190
ttaactcctggttgtttcacgatag

SEQ ID NO: 423303 - DNA, 25 bp, Artificial
  probe
  misc_feature (1)..(25): SEQ ID NO: 5848; WAN024F3K; Start 164; Stop 188
atttaactcctggttgtttcacgat

SEQ ID NO: 423304 - DNA, 25 bp, Artificial
  probe
  misc_feature (1)..(25): SEQ ID NO: 5848; WAN024F3K; Start 158; Stop 182
tgattgatttaactcctggttgttt

SEQ ID NO: 423305 - DNA, 25 bp, Artificial
  probe
  misc_feature (1)..(25): SEQ ID NO: 5848; WAN024F3K; Start 161; Stop 185
ttgatttaactcctggttgtttcac

SEQ ID NO: 423306 - DNA, 25 bp, Artificial
  probe
  misc_feature (1)..(25): SEQ ID NO: 5848; WAN024F3K; Start 157; Stop 181
atgattgatttaactcctggttgtt

SEQ ID NO: 423307 - DNA, 25 bp, Artificial
  probe
  misc_feature (1)..(25): SEQ ID NO: 5848; WAN024F3K; Start 154; Stop 178
ccgatgattgatttaactcctggtt

SEQ ID NO: 423308 - DNA, 25 bp, Artificial
  probe
  misc_feature (1)..(25): SEQ ID NO: 5848; WAN024F3K; Start 160; Stop 184
attgatttaactcctggttgtttca

SEQ ID NO: 423309 - DNA, 25 bp, Artificial
  probe
  misc_feature (1)..(25): SEQ ID NO: 5848; WAN024F3K; Start 152; Stop 176
caccgatgattgatttaactcctgg

SEQ ID NO: 423310 - DNA, 25 bp, Artificial
  probe
  misc_feature (1)..(25): SEQ ID NO: 5848; WAN024F3K; Start 151; Stop 175
ccaccgatgattgatttaactcctg

SEQ ID NO: 423311 - DNA, 25 bp, Artificial
  probe
  misc_feature (1)..(25): SEQ ID NO: 5848; WAN024F3K; Start 159; Stop 183
gattgatttaactcctggttgtttc

SEQ ID NO: 423312 - DNA, 25 bp, Artificial
  probe
  misc_feature (1)..(25): SEQ ID NO: 5848; WAN024F3K; Start 163; Stop 187
gatttaactcctggttgtttcacga

SEQ ID NO: 423313 - DNA, 25 bp, Artificial
  probe
  misc_feature (1)..(25): SEQ ID NO: 5848; WAN024F3K; Start 91; Stop 115
ctaatccatgagaacttgtctgcac

SEQ ID NO: 423314 - DNA, 25 bp, Artificial
  probe
  misc_feature (1)..(25): SEQ ID NO: 5848; WAN024F3K; Start 149; Stop 173
caccaccgatgattgatttaactcc

SEQ ID NO: 423315 - DNA, 25 bp, Artificial
  probe
  misc_feature (1)..(25): SEQ ID NO: 5848; WAN024F3K; Start 148; Stop 172
ccaccaccgatgattgatttaactc

SEQ ID NO: 423316 - DNA, 25 bp, Artificial
  probe
  misc_feature (1)..(25): SEQ ID NO: 5848; WAN024F3K; Start 150; Stop 174
accaccgatgattgatttaactcct

SEQ ID NO: 423317 - DNA, 25 bp, Artificial
  probe
  misc_feature (1)..(25): SEQ ID NO: 5848; WAN024F3K; Start 90; Stop 114
actaatccatgagaacttgtctgca

SEQ ID NO: 423318 - DNA, 25 bp, Artificial
  probe
  misc_feature (1)..(25): SEQ ID NO: 5848; WAN024F3K; Start 162; Stop 186
tgatttaactcctggttgtttcacg

SEQ ID NO: 423319 - DNA, 25 bp, Artificial
  probe
  misc_feature (1)..(25): SEQ ID NO: 5848; WAN024F3K; Start 50; Stop 74
ccttaccttcaagaagttccattga

SEQ ID NO: 423320 - DNA, 25 bp, Artificial
  probe
  misc_feature (1)..(25): SEQ ID NO: 5848; WAN024F3K; Start 52; Stop 76
ttaccttcaagaagttccattgatg

SEQ ID NO: 423321 - DNA, 25 bp, Artificial
  probe
  misc_feature (1)..(25): SEQ ID NO: 5848; WAN024F3K; Start 51; Stop 75
cttaccttcaagaagttccattgat

SEQ ID NO: 423322 - DNA, 25 bp, Artificial
  probe
  misc_feature (1)..(25): SEQ ID NO: 5848; WAN024F3K; Start 147; Stop 171
accaccaccgatgattgatttaact

SEQ ID NO: 423323 - DNA, 25 bp, Artificial
  probe
  misc_feature (1)..(25): SEQ ID NO: 5848; WAN024F3K; Start 146; Stop 170
caccaccaccgatgattgatttaac

SEQ ID NO: 423324 - DNA, 25 bp, Artificial
  probe
  misc_feature (1)..(25): SEQ ID NO: 5848; WAN024F3K; Start 43; Stop 67
ggaagaaccttaccttcaagaagtt

SEQ ID NO: 423325 - DNA, 25 bp, Artificial
  probe
  misc_feature (1)..(25): SEQ ID NO: 5848; WAN024F3K; Start 53; Stop 77
taccttcaagaagttccattgatgc

SEQ ID NO: 423326 - DNA, 25 bp, Artificial
  probe
  misc_feature (1)..(25): SEQ ID NO: 5849; WAN0249UC; Start 796; Stop 820
gattggatcttgtgtaatgcaggat

SEQ ID NO: 423327 - DNA, 25 bp, Artificial
  probe
  misc_feature (1)..(25): SEQ ID NO: 5849; WAN0249UC; Start 793; Stop 817
aaggattggatcttgtgtaatgcag

SEQ ID NO: 423328 - DNA, 25 bp, Artificial
  probe
  misc_feature (1)..(25): SEQ ID NO: 5849; WAN0249UC; Start 598; Stop 622
gagtcattccctcatcatacatatt

SEQ ID NO: 423329 - DNA, 25 bp, Artificial
  probe
  misc_feature (1)..(25): SEQ ID NO: 5849; WAN0249UC; Start 795; Stop 819
ggattggatcttgtgtaatgcagga

SEQ ID NO: 423330 - DNA, 25 bp, Artificial
  probe
  misc_feature (1)..(25): SEQ ID NO: 5849; WAN0249UC; Start 794; Stop 818
aggattggatcttgtgtaatgcagg

SEQ ID NO: 423331 - DNA, 25 bp, Artificial
  probe
  misc_feature (1)..(25): SEQ ID NO: 5849; WAN0249UC; Start 368; Stop 392
tgttcacatcttatttcaattcact

SEQ ID NO: 423332 - DNA, 25 bp, Artificial
  probe
  misc_feature (1)..(25): SEQ ID NO: 5849; WAN0249UC; Start 514; Stop 538
aataagtgcgaaggaaatgagcttt

SEQ ID NO: 423333 - DNA, 25 bp, Artificial
  probe
  misc_feature (1)..(25): SEQ ID NO: 5849; WAN0249UC; Start 513; Stop 537
aaataagtgcgaaggaaatgagctt

SEQ ID NO: 423334 - DNA, 25 bp, Artificial
  probe
  misc_feature (1)..(25): SEQ ID NO: 5849; WAN0249UC; Start 792; Stop 816
aaaggattggatcttgtgtaatgca

SEQ ID NO: 423335 - DNA, 25 bp, Artificial
  probe
  misc_feature (1)..(25): SEQ ID NO: 5849; WAN0249UC; Start 872; Stop 896
cgtcattaataaagacagatgggaa

SEQ ID NO: 423336 - DNA, 25 bp, Artificial
  probe
  misc_feature (1)..(25): SEQ ID NO: 5849; WAN0249UC; Start 599; Stop 623
agtcattccctcatcatacatatta

SEQ ID NO: 423337 - DNA, 25 bp, Artificial
  probe
  misc_feature (1)..(25): SEQ ID NO: 5849; WAN0249UC; Start 90; Stop 114
tttgaacacctgataggatgccttt

SEQ ID NO: 423338 - DNA, 25 bp, Artificial
  probe
  misc_feature (1)..(25): SEQ ID NO: 5849; WAN0249UC; Start 797; Stop 821
attggatcttgtgtaatgcaggatc

SEQ ID NO: 423339 - DNA, 25 bp, Artificial
  probe
  misc_feature (1)..(25): SEQ ID NO: 5849; WAN0249UC; Start 511; Stop 535
taaaataagtgcgaaggaaatgagc

SEQ ID NO: 423340 - DNA, 25 bp, Artificial
  probe
  misc_feature (1)..(25): SEQ ID NO: 5849; WAN0249UC; Start 363; Stop 387
agagttgttcacatcttatttcaat

SEQ ID NO: 423341 - DNA, 25 bp, Artificial
  probe
  misc_feature (1)..(25): SEQ ID NO: 5849; WAN0249UC; Start 219; Stop 243
tagaattcgatttgactgtcctgat

SEQ ID NO: 423342 - DNA, 25 bp, Artificial
  probe
  misc_feature (1)..(25): SEQ ID NO: 5849; WAN0249UC; Start 218; Stop 242
ttagaattcgatttgactgtcctga

SEQ ID NO: 423343 - DNA, 25 bp, Artificial
  probe
  misc_feature (1)..(25): SEQ ID NO: 5849; WAN0249UC; Start 217; Stop 241
gttagaattcgatttgactgtcctg

SEQ ID NO: 423344 - DNA, 25 bp, Artificial
  probe
  misc_feature (1)..(25): SEQ ID NO: 5849; WAN0249UC; Start 216; Stop 240
tgttagaattcgatttgactgtcct

SEQ ID NO: 423345 - DNA, 25 bp, Artificial
  probe
  misc_feature (1)..(25): SEQ ID NO: 5849; WAN0249UC; Start 215; Stop 239
ttgttagaattcgatttgactgtcc

SEQ ID NO: 423346 - DNA, 25 bp, Artificial
  probe
  misc_feature (1)..(25): SEQ ID NO: 5849; WAN0249UC; Start 820; Stop 844
tccaatcctttcaatcattttgtcc

SEQ ID NO: 423347 - DNA, 25 bp, Artificial
  probe
  misc_feature (1)..(25): SEQ ID NO: 5849; WAN0249UC; Start 708; Stop 732
gcttaacatctatttccagcaattt

SEQ ID NO: 423348 - DNA, 25 bp, Artificial
  probe
  misc_feature (1)..(25): SEQ ID NO: 5849; WAN0249UC; Start 821; Stop 845
ccaatcctttcaatcattttgtcca

SEQ ID NO: 423349 - DNA, 25 bp, Artificial
  probe
  misc_feature (1)..(25): SEQ ID NO: 5849; WAN0249UC; Start 220; Stop 244
agaattcgatttgactgtcctgatc

SEQ ID NO: 423350 - DNA, 25 bp, Artificial
  probe
  misc_feature (1)..(25): SEQ ID NO: 5849; WAN0249UC; Start 825; Stop 849
tcctttcaatcattttgtccaactt

SEQ ID NO: 423351 - DNA, 25 bp, Artificial
  probe
  misc_feature (1)..(25): SEQ ID NO: 5849; WAN0249UC; Start 824; Stop 848
atcctttcaatcattttgtccaact

SEQ ID NO: 423352 - DNA, 25 bp, Artificial
  probe
  misc_feature (1)..(25): SEQ ID NO: 5849; WAN0249UC; Start 367; Stop 391
ttgttcacatcttatttcaattcac

SEQ ID NO: 423353 - DNA, 25 bp, Artificial
  probe
  misc_feature (1)..(25): SEQ ID NO: 5849; WAN0249UC; Start 366; Stop 390
gttgttcacatcttatttcaattca

SEQ ID NO: 423354 - DNA, 25 bp, Artificial
  probe
  misc_feature (1)..(25): SEQ ID NO: 5849; WAN0249UC; Start 826; Stop 850
cctttcaatcattttgtccaacttt

SEQ ID NO: 423355 - DNA, 25 bp, Artificial
  probe
  misc_feature (1)..(25): SEQ ID NO: 5849; WAN0249UC; Start 791; Stop 815
aaaaggattggatcttgtgtaatgc

SEQ ID NO: 423356 - DNA, 25 bp, Artificial
  probe
  misc_feature (1)..(25): SEQ ID NO: 5849; WAN0249UC; Start 706; Stop 730
gagcttaacatctatttccagcaat

SEQ ID NO: 423357 - DNA, 25 bp, Artificial
  probe
  misc_feature (1)..(25): SEQ ID NO: 5849; WAN0249UC; Start 823; Stop 847
aatcctttcaatcattttgtccaac

SEQ ID NO: 423358 - DNA, 25 bp, Artificial
  probe
  misc_feature (1)..(25): SEQ ID NO: 5849; WAN0249UC; Start 822; Stop 846
caatcctttcaatcattttgtccaa

SEQ ID NO: 423359 - DNA, 25 bp, Artificial
  probe
  misc_feature (1)..(25): SEQ ID NO: 5850; WAN024DPJ; Start 32; Stop 56
ttgctgttattctctatatcctatt

SEQ ID NO: 423360 - DNA, 25 bp, Artificial
  probe
  misc_feature (1)..(25): SEQ ID NO: 5850; WAN024DPJ; Start 33; Stop 57
tgctgttattctctatatcctattt

SEQ ID NO: 423361 - DNA, 25 bp, Artificial
  probe
  misc_feature (1)..(25): SEQ ID NO: 5850; WAN024DPJ; Start 1; Stop 25
ttgtttattatcagtcctgatcttt

SEQ ID NO: 423362 - DNA, 25 bp, Artificial
  probe
  misc_feature (1)..(25): SEQ ID NO: 5850; WAN024DPJ; Start 2; Stop 26
tgtttattatcagtcctgatctttt

SEQ ID NO: 423363 - DNA, 25 bp, Artificial
  probe
  misc_feature (1)..(25): SEQ ID NO: 5851; WAN024BER; Start 126; Stop 150
ggttgcagatggaagcctaactaat

SEQ ID NO: 423364 - DNA, 25 bp, Artificial
  probe
  misc_feature (1)..(25): SEQ ID NO: 5851; WAN024BER; Start 125; Stop 149
aggttgcagatggaagcctaactaa

SEQ ID NO: 423365 - DNA, 25 bp, Artificial
  probe
  misc_feature (1)..(25): SEQ ID NO: 5851; WAN024BER; Start 124; Stop 148
gaggttgcagatggaagcctaacta

SEQ ID NO: 423366 - DNA, 25 bp, Artificial
  probe
  misc_feature (1)..(25): SEQ ID NO: 5851; WAN024BER; Start 122; Stop 146
ttgaggttgcagatggaagcctaac

SEQ ID NO: 423367 - DNA, 25 bp, Artificial
  probe
  misc_feature (1)..(25): SEQ ID NO: 5851; WAN024BER; Start 121; Stop 145
tttgaggttgcagatggaagcctaa

SEQ ID NO: 423368 - DNA, 25 bp, Artificial
  probe
  misc_feature (1)..(25): SEQ ID NO: 5851; WAN024BER; Start 120; Stop 144
ttttgaggttgcagatggaagccta

SEQ ID NO: 423369 - DNA, 25 bp, Artificial
  probe
  misc_feature (1)..(25): SEQ ID NO: 5851; WAN024BER; Start 63; Stop 87
cttaaaacagtgttttgaggttgtg

SEQ ID NO: 423370 - DNA, 25 bp, Artificial
  probe
  misc_feature (1)..(25): SEQ ID NO: 5851; WAN024BER; Start 64; Stop 88
ttaaaacagtgttttgaggttgtgg

SEQ ID NO: 423371 - DNA, 25 bp, Artificial
  probe
  misc_feature (1)..(25): SEQ ID NO: 5851; WAN024BER; Start 62; Stop 86
gcttaaaacagtgttttgaggttgt

SEQ ID NO: 423372 - DNA, 25 bp, Artificial
  probe
  misc_feature (1)..(25): SEQ ID NO: 5851; WAN024BER; Start 65; Stop 89
taaaacagtgttttgaggttgtgga

SEQ ID NO: 423373 - DNA, 25 bp, Artificial
  probe
  misc_feature (1)..(25): SEQ ID NO: 5852; WAN024FLU; Start 1149; Stop 1173
gaatggtataaggtagtcagtggtc

SEQ ID NO: 423374 - DNA, 25 bp, Artificial
  probe
  misc_feature (1)..(25): SEQ ID NO: 5852; WAN024FLU; Start 1152; Stop 1176
tggtataaggtagtcagtggtctat

SEQ ID NO: 423375 - DNA, 25 bp, Artificial
  probe
  misc_feature (1)..(25): SEQ ID NO: 5852; WAN024FLU; Start 1151; Stop 1175
atggtataaggtagtcagtggtcta

SEQ ID NO: 423376 - DNA, 25 bp, Artificial
  probe
  misc_feature (1)..(25): SEQ ID NO: 5852; WAN024FLU; Start 1150; Stop 1174
aatggtataaggtagtcagtggtct

SEQ ID NO: 423377 - DNA, 25 bp, Artificial
  probe
  misc_feature (1)..(25): SEQ ID NO: 5852; WAN024FLU; Start 434; Stop 458
taggattgttaatggattggtagcc

SEQ ID NO: 423378 - DNA, 25 bp, Artificial
  probe
  misc_feature (1)..(25): SEQ ID NO: 5852; WAN024FLU; Start 272; Stop 296
ttggatggagaagcataaggttaat

SEQ ID NO: 423379 - DNA, 25 bp, Artificial
  probe
  misc_feature (1)..(25): SEQ ID NO: 5852; WAN024FLU; Start 271; Stop 295
attggatggagaagcataaggttaa

SEQ ID NO: 423380 - DNA, 25 bp, Artificial
  probe
  misc_feature (1)..(25): SEQ ID NO: 5852; WAN024FLU; Start 270; Stop 294
gattggatggagaagcataaggtta

SEQ ID NO: 423381 - DNA, 25 bp, Artificial
  probe
  misc_feature (1)..(25): SEQ ID NO: 5852; WAN024FLU; Start 264; Stop 288
attgttgattggatggagaagcata

SEQ ID NO: 423382 - DNA, 25 bp, Artificial
  probe
  misc_feature (1)..(25): SEQ ID NO: 5852; WAN024FLU; Start 263; Stop 287
tattgttgattggatggagaagcat

SEQ ID NO: 423383 - DNA, 25 bp, Artificial
  probe
  misc_feature (1)..(25): SEQ ID NO: 5852; WAN024FLU; Start 273; Stop 297
tggatggagaagcataaggttaatc

SEQ ID NO: 423384 - DNA, 25 bp, Artificial
  probe
  misc_feature (1)..(25): SEQ ID NO: 5852; WAN024FLU; Start 262; Stop 286
ctattgttgattggatggagaagca

SEQ ID NO: 423385 - DNA, 25 bp, Artificial
  probe
  misc_feature (1)..(25): SEQ ID NO: 5852; WAN024FLU; Start 597; Stop 621
gtgattgttgccttgattatcgttc

SEQ ID NO: 423386 - DNA, 25 bp, Artificial
  probe
  misc_feature (1)..(25): SEQ ID NO: 5852; WAN024FLU; Start 279; Stop 303
gagaagcataaggttaatcgtgtta

SEQ ID NO: 423387 - DNA, 25 bp, Artificial
  probe
  misc_feature (1)..(25): SEQ ID NO: 5852; WAN024FLU; Start 265; Stop 289
ttgttgattggatggagaagcataa

SEQ ID NO: 423388 - DNA, 25 bp, Artificial
  probe
  misc_feature (1)..(25): SEQ ID NO: 5852; WAN024FLU; Start 600; Stop 624
attgttgccttgattatcgttcctt

SEQ ID NO: 423389 - DNA, 25 bp, Artificial
  probe
  misc_feature (1)..(25): SEQ ID NO: 5852; WAN024FLU; Start 278; Stop 302
ggagaagcataaggttaatcgtgtt

SEQ ID NO: 423390 - DNA, 25 bp, Artificial
  probe
  misc_feature (1)..(25): SEQ ID NO: 5852; WAN024FLU; Start 275; Stop 299
gatggagaagcataaggttaatcgt

SEQ ID NO: 423391 - DNA, 25 bp, Artificial
  probe
  misc_feature (1)..(25): SEQ ID NO: 5852; WAN024FLU; Start 276; Stop 300
atggagaagcataaggttaatcgtg

SEQ ID NO: 423392 - DNA, 25 bp, Artificial
  probe
  misc_feature (1)..(25): SEQ ID NO: 5852; WAN024FLU; Start 596; Stop 620
agtgattgttgccttgattatcgtt

SEQ ID NO: 423393 - DNA, 25 bp, Artificial
  probe
  misc_feature (1)..(25): SEQ ID NO: 5852; WAN024FLU; Start 433; Stop 457
ataggattgttaatggattggtagc

SEQ ID NO: 423394 - DNA, 25 bp, Artificial
  probe
  misc_feature (1)..(25): SEQ ID NO: 5852; WAN024FLU; Start 266; Stop 290
tgttgattggatggagaagcataag

SEQ ID NO: 423395 - DNA, 25 bp, Artificial
  probe
  misc_feature (1)..(25): SEQ ID NO: 5852; WAN024FLU; Start 283; Stop 307
agcataaggttaatcgtgttatagc

SEQ ID NO: 423396 - DNA, 25 bp, Artificial
  probe
  misc_feature (1)..(25): SEQ ID NO: 5852; WAN024FLU; Start 808; Stop 832
tcaagattattggtctacgctatgc

SEQ ID NO: 423397 - DNA, 25 bp, Artificial
  probe
  misc_feature (1)..(25): SEQ ID NO: 5852; WAN024FLU; Start 595; Stop 619
aagtgattgttgccttgattatcgt

SEQ ID NO: 423398 - DNA, 25 bp, Artificial
  probe
  misc_feature (1)..(25): SEQ ID NO: 5852; WAN024FLU; Start 1148; Stop 1172
cgaatggtataaggtagtcagtggt

SEQ ID NO: 423399 - DNA, 25 bp, Artificial
  probe
  misc_feature (1)..(25): SEQ ID NO: 5852; WAN024FLU; Start 274; Stop 298
ggatggagaagcataaggttaatcg

SEQ ID NO: 423400 - DNA, 25 bp, Artificial
  probe
  misc_feature (1)..(25): SEQ ID NO: 5852; WAN024FLU; Start 599; Stop 623
gattgttgccttgattatcgttcct

SEQ ID NO: 423401 - DNA, 25 bp, Artificial
  probe
  misc_feature (1)..(25): SEQ ID NO: 5852; WAN024FLU; Start 261; Stop 285
cctattgttgattggatggagaagc

SEQ ID NO: 423402 - DNA, 25 bp, Artificial
  probe
  misc_feature (1)..(25): SEQ ID NO: 5852; WAN024FLU; Start 807; Stop 831
ttcaagattattggtctacgctatg

SEQ ID NO: 423403 - DNA, 25 bp, Artificial
  probe
  misc_feature (1)..(25): SEQ ID NO: 5852; WAN024FLU; Start 804; Stop 828
ttcttcaagattattggtctacgct

SEQ ID NO: 423404 - DNA, 25 bp, Artificial
  probe
  misc_feature (1)..(25): SEQ ID NO: 5852; WAN024FLU; Start 803; Stop 827
cttcttcaagattattggtctacgc

SEQ ID NO: 423405 - DNA, 25 bp, Artificial
  probe
  misc_feature (1)..(25): SEQ ID NO: 5852; WAN024FLU; Start 1153; Stop 1177
ggtataaggtagtcagtggtctata

SEQ ID NO: 423406 - DNA, 25 bp, Artificial
  probe
  misc_feature (1)..(25): SEQ ID NO: 5853; WAN024FXO; Start 52; Stop 76
cacttccagatggtcgtagatgtag

SEQ ID NO: 423407 - DNA, 25 bp, Artificial
  probe
  misc_feature (1)..(25): SEQ ID NO: 5853; WAN024FXO; Start 131; Stop 155
gcaaagtcaaagttatgttctctca

SEQ ID NO: 423408 - DNA, 25 bp, Artificial
  probe
  misc_feature (1)..(25): SEQ ID NO: 5853; WAN024FXO; Start 130; Stop 154
cgcaaagtcaaagttatgttctctc

SEQ ID NO: 423409 - DNA, 25 bp, Artificial
  probe
  misc_feature (1)..(25): SEQ ID NO: 5853; WAN024FXO; Start 144; Stop 168
tatgttctctcaaataagcagccag

SEQ ID NO: 423410 - DNA, 25 bp, Artificial
  probe
  misc_feature (1)..(25): SEQ ID NO: 5853; WAN024FXO; Start 142; Stop 166
gttatgttctctcaaataagcagcc

SEQ ID NO: 423411 - DNA, 25 bp, Artificial
  probe
  misc_feature (1)..(25): SEQ ID NO: 5853; WAN024FXO; Start 143; Stop 167
ttatgttctctcaaataagcagcca

SEQ ID NO: 423412 - DNA, 25 bp, Artificial
  probe
  misc_feature (1)..(25): SEQ ID NO: 5853; WAN024FXO; Start 141; Stop 165
agttatgttctctcaaataagcagc

SEQ ID NO: 423413 - DNA, 25 bp, Artificial
  probe
  misc_feature (1)..(25): SEQ ID NO: 5853; WAN024FXO; Start 129; Stop 153
ccgcaaagtcaaagttatgttctct

SEQ ID NO: 423414 - DNA, 25 bp, Artificial
  probe
  misc_feature (1)..(25): SEQ ID NO: 5853; WAN024FXO; Start 132; Stop 156
caaagtcaaagttatgttctctcaa

SEQ ID NO: 423415 - DNA, 25 bp, Artificial
  probe
  misc_feature (1)..(25): SEQ ID NO: 5853; WAN024FXO; Start 53; Stop 77
acttccagatggtcgtagatgtagc

SEQ ID NO: 423416 - DNA, 25 bp, Artificial
  probe
  misc_feature (1)..(25): SEQ ID NO: 5853; WAN024FXO; Start 140; Stop 164
aagttatgttctctcaaataagcag

SEQ ID NO: 423417 - DNA, 25 bp, Artificial
  probe
  misc_feature (1)..(25): SEQ ID NO: 5853; WAN024FXO; Start 133; Stop 157
aaagtcaaagttatgttctctcaaa

SEQ ID NO: 423418 - DNA, 25 bp, Artificial
  probe
  misc_feature (1)..(25): SEQ ID NO: 5853; WAN024FXO; Start 145; Stop 169
atgttctctcaaataagcagccagg

SEQ ID NO: 423419 - DNA, 25 bp, Artificial
  probe
  misc_feature (1)..(25): SEQ ID NO: 5853; WAN024FXO; Start 134; Stop 158
aagtcaaagttatgttctctcaaat

SEQ ID NO: 423420 - DNA, 25 bp, Artificial
  probe
  misc_feature (1)..(25): SEQ ID NO: 5853; WAN024FXO; Start 128; Stop 152
gccgcaaagtcaaagttatgttctc

SEQ ID NO: 423421 - DNA, 25 bp, Artificial
  probe
  misc_feature (1)..(25): SEQ ID NO: 5853; WAN024FXO; Start 126; Stop 150
gagccgcaaagtcaaagttatgttc

SEQ ID NO: 423422 - DNA, 25 bp, Artificial
  probe
  misc_feature (1)..(25): SEQ ID NO: 5853; WAN024FXO; Start 51; Stop 75
ccacttccagatggtcgtagatgta

SEQ ID NO: 423423 - DNA, 25 bp, Artificial
  probe
  misc_feature (1)..(25): SEQ ID NO: 5853; WAN024FXO; Start 139; Stop 163
aaagttatgttctctcaaataagca

SEQ ID NO: 423424 - DNA, 25 bp, Artificial
  probe
  misc_feature (1)..(25): SEQ ID NO: 5853; WAN024FXO; Start 54; Stop 78
cttccagatggtcgtagatgtagcc

SEQ ID NO: 423425 - DNA, 25 bp, Artificial
  probe
  misc_feature (1)..(25): SEQ ID NO: 5853; WAN024FXO; Start 138; Stop 162
caaagttatgttctctcaaataagc

SEQ ID NO: 423426 - DNA, 25 bp, Artificial
  probe
  misc_feature (1)..(25): SEQ ID NO: 5853; WAN024FXO; Start 127; Stop 151
agccgcaaagtcaaagttatgttct

SEQ ID NO: 423427 - DNA, 25 bp, Artificial
  probe
  misc_feature (1)..(25): SEQ ID NO: 5853; WAN024FXO; Start 125; Stop 149
agagccgcaaagtcaaagttatgtt

SEQ ID NO: 423428 - DNA, 25 bp, Artificial
  probe
  misc_feature (1)..(25): SEQ ID NO: 5853; WAN024FXO; Start 49; Stop 73
atccacttccagatggtcgtagatg

SEQ ID NO: 423429 - DNA, 25 bp, Artificial
  probe
  misc_feature (1)..(25): SEQ ID NO: 5853; WAN024FXO; Start 57; Stop 81
ccagatggtcgtagatgtagccttg

SEQ ID NO: 423430 - DNA, 25 bp, Artificial
  probe
  misc_feature (1)..(25): SEQ ID NO: 5853; WAN024FXO; Start 65; Stop 89
tcgtagatgtagccttgcagtttag

SEQ ID NO: 423431 - DNA, 25 bp, Artificial
  probe
  misc_feature (1)..(25): SEQ ID NO: 5853; WAN024FXO; Start 56; Stop 80
tccagatggtcgtagatgtagcctt

SEQ ID NO: 423432 - DNA, 25 bp, Artificial
  probe
  misc_feature (1)..(25): SEQ ID NO: 5853; WAN024FXO; Start 55; Stop 79
ttccagatggtcgtagatgtagcct

SEQ ID NO: 423433 - DNA, 25 bp, Artificial
  probe
  misc_feature (1)..(25): SEQ ID NO: 5853; WAN024FXO; Start 64; Stop 88
gtcgtagatgtagccttgcagttta

SEQ ID NO: 423434 - DNA, 25 bp, Artificial
  probe
  misc_feature (1)..(25): SEQ ID NO: 5853; WAN024FXO; Start 135; Stop 159
agtcaaagttatgttctctcaaata

SEQ ID NO: 423435 - DNA, 25 bp, Artificial
  probe
  misc_feature (1)..(25): SEQ ID NO: 5853; WAN024FXO; Start 124; Stop 148
gagagccgcaaagtcaaagttatgt

SEQ ID NO: 423436 - DNA, 25 bp, Artificial
  probe
  misc_feature (1)..(25): SEQ ID NO: 5853; WAN024FXO; Start 58; Stop 82
cagatggtcgtagatgtagccttgc

SEQ ID NO: 423437 - DNA, 25 bp, Artificial
  probe
  misc_feature (1)..(25): SEQ ID NO: 5853; WAN024FXO; Start 123; Stop 147
tgagagccgcaaagtcaaagttatg

SEQ ID NO: 423438 - DNA, 25 bp, Artificial
  probe
  misc_feature (1)..(25): SEQ ID NO: 5853; WAN024FXO; Start 122; Stop 146
gtgagagccgcaaagtcaaagttat

SEQ ID NO: 423439 - DNA, 25 bp, Artificial
  probe
  misc_feature (1)..(25): SEQ ID NO: 5854; WAN024BFS; Start 1308; Stop 1332
tgtcaatcgtctccatactatcaag

SEQ ID NO: 423440 - DNA, 25 bp, Artificial
  probe
  misc_feature (1)..(25): SEQ ID NO: 5854; WAN024BFS; Start 872; Stop 896
ataatgccgaatatgagaatggaca

SEQ ID NO: 423441 - DNA, 25 bp, Artificial
  probe
  misc_feature (1)..(25): SEQ ID NO: 5854; WAN024BFS; Start 871; Stop 895
gataatgccgaatatgagaatggac

SEQ ID NO: 423442 - DNA, 25 bp, Artificial
  probe
  misc_feature (1)..(25): SEQ ID NO: 5854; WAN024BFS; Start 870; Stop 894
ggataatgccgaatatgagaatgga

SEQ ID NO: 423443 - DNA, 25 bp, Artificial
  probe
  misc_feature (1)..(25): SEQ ID NO: 5854; WAN024BFS; Start 868; Stop 892
ttggataatgccgaatatgagaatg

SEQ ID NO: 423444 - DNA, 25 bp, Artificial
  probe
  misc_feature (1)..(25): SEQ ID NO: 5854; WAN024BFS; Start 864; Stop 888
ggaattggataatgccgaatatgag

SEQ ID NO: 423445 - DNA, 25 bp, Artificial
  probe
  misc_feature (1)..(25): SEQ ID NO: 5854; WAN024BFS; Start 873; Stop 897
taatgccgaatatgagaatggacag

SEQ ID NO: 423446 - DNA, 25 bp, Artificial
  probe
  misc_feature (1)..(25): SEQ ID NO: 5854; WAN024BFS; Start 869; Stop 893
tggataatgccgaatatgagaatgg

SEQ ID NO: 423447 - DNA, 25 bp, Artificial
  probe
  misc_feature (1)..(25): SEQ ID NO: 5854; WAN024BFS; Start 862; Stop 886
ttggaattggataatgccgaatatg

SEQ ID NO: 423448 - DNA, 25 bp, Artificial
  probe
  misc_feature (1)..(25): SEQ ID NO: 5854; WAN024BFS; Start 861; Stop 885
gttggaattggataatgccgaatat

SEQ ID NO: 423449 - DNA, 25 bp, Artificial
  probe
  misc_feature (1)..(25): SEQ ID NO: 5854; WAN024BFS; Start 863; Stop 887
tggaattggataatgccgaatatga

SEQ ID NO: 423450 - DNA, 25 bp, Artificial
  probe
  misc_feature (1)..(25): SEQ ID NO: 5854; WAN024BFS; Start 860; Stop 884
agttggaattggataatgccgaata

SEQ ID NO: 423451 - DNA, 25 bp, Artificial
  probe
  misc_feature (1)..(25): SEQ ID NO: 5854; WAN024BFS; Start 1309; Stop 1333
gtcaatcgtctccatactatcaagc

SEQ ID NO: 423452 - DNA, 25 bp, Artificial
  probe
  misc_feature (1)..(25): SEQ ID NO: 5854; WAN024BFS; Start 1307; Stop 1331
atgtcaatcgtctccatactatcaa

SEQ ID NO: 423453 - DNA, 25 bp, Artificial
  probe
  misc_feature (1)..(25): SEQ ID NO: 5854; WAN024BFS; Start 865; Stop 889
gaattggataatgccgaatatgaga

SEQ ID NO: 423454 - DNA, 25 bp, Artificial
  probe
  misc_feature (1)..(25): SEQ ID NO: 5854; WAN024BFS; Start 867; Stop 891
attggataatgccgaatatgagaat

SEQ ID NO: 423455 - DNA, 25 bp, Artificial
  probe
  misc_feature (1)..(25): SEQ ID NO: 5854; WAN024BFS; Start 866; Stop 890
aattggataatgccgaatatgagaa

SEQ ID NO: 423456 - DNA, 25 bp, Artificial
  probe
  misc_feature (1)..(25): SEQ ID NO: 5854; WAN024BFS; Start 77; Stop 101
tagttctggcttatgtagtggcaat

SEQ ID NO: 423457 - DNA, 25 bp, Artificial
  probe
  misc_feature (1)..(25): SEQ ID NO: 5854; WAN024BFS; Start 880; Stop 904
gaatatgagaatggacaggcacaag

SEQ ID NO: 423458 - DNA, 25 bp, Artificial
  probe
  misc_feature (1)..(25): SEQ ID NO: 5854; WAN024BFS; Start 667; Stop 691
ttaagtcatattgtggatcgtgttc

SEQ ID NO: 423459 - DNA, 25 bp, Artificial
  probe
  misc_feature (1)..(25): SEQ ID NO: 5854; WAN024BFS; Start 1316; Stop 1340
gtctccatactatcaagcgatacat

SEQ ID NO: 423460 - DNA, 25 bp, Artificial
  probe
  misc_feature (1)..(25): SEQ ID NO: 5854; WAN024BFS; Start 76; Stop 100
ttagttctggcttatgtagtggcaa

SEQ ID NO: 423461 - DNA, 25 bp, Artificial
  probe
  misc_feature (1)..(25): SEQ ID NO: 5854; WAN024BFS; Start 881; Stop 905
aatatgagaatggacaggcacaaga

SEQ ID NO: 423462 - DNA, 25 bp, Artificial
  probe
  misc_feature (1)..(25): SEQ ID NO: 5854; WAN024BFS; Start 859; Stop 883
cagttggaattggataatgccgaat

SEQ ID NO: 423463 - DNA, 25 bp, Artificial
  probe
  misc_feature (1)..(25): SEQ ID NO: 5854; WAN024BFS; Start 515; Stop 539
attcagaacagtatggtcaagcctt

SEQ ID NO: 423464 - DNA, 25 bp, Artificial
  probe
  misc_feature (1)..(25): SEQ ID NO: 5854; WAN024BFS; Start 1559; Stop 1583
aatattctaaccgctatcgctcatt

SEQ ID NO: 423465 - DNA, 25 bp, Artificial
  probe
  misc_feature (1)..(25): SEQ ID NO: 5854; WAN024BFS; Start 80; Stop 104
ttctggcttatgtagtggcaatctt

SEQ ID NO: 423466 - DNA, 25 bp, Artificial
  probe
  misc_feature (1)..(25): SEQ ID NO: 5854; WAN024BFS; Start 854; Stop 878
ttcgtcagttggaattggataatgc

SEQ ID NO: 423467 - DNA, 25 bp, Artificial
  probe
  misc_feature (1)..(25): SEQ ID NO: 5854; WAN024BFS; Start 514; Stop 538
aattcagaacagtatggtcaagcct

SEQ ID NO: 423468 - DNA, 25 bp, Artificial
  probe
  misc_feature (1)..(25): SEQ ID NO: 5854; WAN024BFS; Start 1310; Stop 1334
tcaatcgtctccatactatcaagcg

SEQ ID NO: 423469 - DNA, 25 bp, Artificial
  probe
  misc_feature (1)..(25): SEQ ID NO: 5854; WAN024BFS; Start 882; Stop 906
atatgagaatggacaggcacaagag

SEQ ID NO: 423470 - DNA, 25 bp, Artificial
  probe
  misc_feature (1)..(25): SEQ ID NO: 5854; WAN024BFS; Start 1558; Stop 1582
caatattctaaccgctatcgctcat

SEQ ID NO: 423471 - DNA, 25 bp, Artificial
  probe
  misc_feature (1)..(25): SEQ ID NO: 5854; WAN024BFS; Start 424; Stop 448
gcagacttagagaagcaagaatcta

SEQ ID NO: 423472 - DNA, 25 bp, Artificial
  probe
  misc_feature (1)..(25): SEQ ID NO: 5855; WAN024GMF; Start 57; Stop 81
aaacatcaaacattacaagaggctc

SEQ ID NO: 423473 - DNA, 25 bp, Artificial
  probe
  misc_feature (1)..(25): SEQ ID NO: 5855; WAN024GMF; Start 59; Stop 83
acatcaaacattacaagaggctcat

SEQ ID NO: 423474 - DNA, 25 bp, Artificial
  probe
  misc_feature (1)..(25): SEQ ID NO: 5855; WAN024GMF; Start 58; Stop 82
aacatcaaacattacaagaggctca

SEQ ID NO: 423475 - DNA, 25 bp, Artificial
  probe
  misc_feature (1)..(25): SEQ ID NO: 5855; WAN024GMF; Start 9; Stop 33
attggtaatgagtttgataacgcat

SEQ ID NO: 423476 - DNA, 25 bp, Artificial
  probe
  misc_feature (1)..(25): SEQ ID NO: 5855; WAN024GMF; Start 8; Stop 32
aattggtaatgagtttgataacgca

SEQ ID NO: 423477 - DNA, 25 bp, Artificial
  probe
  misc_feature (1)..(25): SEQ ID NO: 5855; WAN024GMF; Start 10; Stop 34
ttggtaatgagtttgataacgcata

SEQ ID NO: 423478 - DNA, 25 bp, Artificial
  probe
  misc_feature (1)..(25): SEQ ID NO: 5855; WAN024GMF; Start 56; Stop 80
aaaacatcaaacattacaagaggct

SEQ ID NO: 423479 - DNA, 25 bp, Artificial
  probe
  misc_feature (1)..(25): SEQ ID NO: 5855; WAN024GMF; Start 55; Stop 79
gaaaacatcaaacattacaagaggc

SEQ ID NO: 423480 - DNA, 25 bp, Artificial
  probe
  misc_feature (1)..(25): SEQ ID NO: 5855; WAN024GMF; Start 7; Stop 31
caattggtaatgagtttgataacgc

SEQ ID NO: 423481 - DNA, 25 bp, Artificial
  probe
  misc_feature (1)..(25): SEQ ID NO: 5855; WAN024GMF; Start 54; Stop 78
tgaaaacatcaaacattacaagagg

SEQ ID NO: 423482 - DNA, 25 bp, Artificial
  probe
  misc_feature (1)..(25): SEQ ID NO: 5855; WAN024GMF; Start 53; Stop 77
atgaaaacatcaaacattacaagag

SEQ ID NO: 423483 - DNA, 25 bp, Artificial
  probe
  misc_feature (1)..(25): SEQ ID NO: 5855; WAN024GMF; Start 6; Stop 30
tcaattggtaatgagtttgataacg

SEQ ID NO: 423484 - DNA, 25 bp, Artificial
  probe
  misc_feature (1)..(25): SEQ ID NO: 5855; WAN024GMF; Start 1; Stop 25
ttgtttcaattggtaatgagtttga

SEQ ID NO: 423485 - DNA, 25 bp, Artificial
  probe
  misc_feature (1)..(25): SEQ ID NO: 5855; WAN024GMF; Start 2; Stop 26
tgtttcaattggtaatgagtttgat

SEQ ID NO: 423486 - DNA, 25 bp, Artificial
  probe
  misc_feature (1)..(25): SEQ ID NO: 5855; WAN024GMF; Start 52; Stop 76
aatgaaaacatcaaacattacaaga

SEQ ID NO: 423487 - DNA, 25 bp, Artificial
  probe
  misc_feature (1)..(25): SEQ ID NO: 5855; WAN024GMF; Start 5; Stop 29
ttcaattggtaatgagtttgataac

SEQ ID NO: 423488 - DNA, 25 bp, Artificial
  probe
  misc_feature (1)..(25): SEQ ID NO: 5855; WAN024GMF; Start 3; Stop 27
gtttcaattggtaatgagtttgata

SEQ ID NO: 423489 - DNA, 25 bp, Artificial
  probe
  misc_feature (1)..(25): SEQ ID NO: 5855; WAN024GMF; Start 4; Stop 28
tttcaattggtaatgagtttgataa

SEQ ID NO: 423490 - DNA, 25 bp, Artificial
  probe
  misc_feature (1)..(25): SEQ ID NO: 5856; WAN024CSQ; Start 159; Stop 183
gaagttgacgaagttgttcttgaag

SEQ ID NO: 423491 - DNA, 25 bp, Artificial
  probe
  misc_feature (1)..(25): SEQ ID NO: 5856; WAN024CSQ; Start 160; Stop 184
aagttgacgaagttgttcttgaagt

SEQ ID NO: 423492 - DNA, 25 bp, Artificial
  probe
  misc_feature (1)..(25): SEQ ID NO: 5856; WAN024CSQ; Start 158; Stop 182
tgaagttgacgaagttgttcttgaa

SEQ ID NO: 423493 - DNA, 25 bp, Artificial
  probe
  misc_feature (1)..(25): SEQ ID NO: 5856; WAN024CSQ; Start 157; Stop 181
ttgaagttgacgaagttgttcttga

SEQ ID NO: 423494 - DNA, 25 bp, Artificial
  probe
  misc_feature (1)..(25): SEQ ID NO: 5856; WAN024CSQ; Start 172; Stop 196
ttgttcttgaagtccttctaccttg

SEQ ID NO: 423495 - DNA, 25 bp, Artificial
  probe
  misc_feature (1)..(25): SEQ ID NO: 5856; WAN024CSQ; Start 171; Stop 195
gttgttcttgaagtccttctacctt

SEQ ID NO: 423496 - DNA, 25 bp, Artificial
  probe
  misc_feature (1)..(25): SEQ ID NO: 5856; WAN024CSQ; Start 169; Stop 193
aagttgttcttgaagtccttctacc

SEQ ID NO: 423497 - DNA, 25 bp, Artificial
  probe
  misc_feature (1)..(25): SEQ ID NO: 5856; WAN024CSQ; Start 53; Stop 77
acttgactagcaatgtaacgatgac

SEQ ID NO: 423498 - DNA, 25 bp, Artificial
  probe
  misc_feature (1)..(25): SEQ ID NO: 5856; WAN024CSQ; Start 52; Stop 76
cacttgactagcaatgtaacgatga

SEQ ID NO: 423499 - DNA, 25 bp, Artificial
  probe
  misc_feature (1)..(25): SEQ ID NO: 5856; WAN024CSQ; Start 43; Stop 67
ggatacagacacttgactagcaatg

SEQ ID NO: 423500 - DNA, 25 bp, Artificial
  probe
  misc_feature (1)..(25): SEQ ID NO: 5856; WAN024CSQ; Start 44; Stop 68
gatacagacacttgactagcaatgt

SEQ ID NO: 423501 - DNA, 25 bp, Artificial
  probe
  misc_feature (1)..(25): SEQ ID NO: 5856; WAN024CSQ; Start 174; Stop 198
gttcttgaagtccttctaccttgtg

SEQ ID NO: 423502 - DNA, 25 bp, Artificial
  probe
  misc_feature (1)..(25): SEQ ID NO: 5856; WAN024CSQ; Start 73; Stop 97
atgaccgttgacttccttaacatct

SEQ ID NO: 423503 - DNA, 25 bp, Artificial
  probe
  misc_feature (1)..(25): SEQ ID NO: 5856; WAN024CSQ; Start 175; Stop 199
ttcttgaagtccttctaccttgtga

SEQ ID NO: 423504 - DNA, 25 bp, Artificial
  probe
  misc_feature (1)..(25): SEQ ID NO: 5856; WAN024CSQ; Start 170; Stop 194
agttgttcttgaagtccttctacct

SEQ ID NO: 423505 - DNA, 25 bp, Artificial
  probe
  misc_feature (1)..(25): SEQ ID NO: 5856; WAN024CSQ; Start 47; Stop 71
acagacacttgactagcaatgtaac

SEQ ID NO: 423506 - DNA, 25 bp, Artificial
  probe
  misc_feature (1)..(25): SEQ ID NO: 5856; WAN024CSQ; Start 173; Stop 197
tgttcttgaagtccttctaccttgt

SEQ ID NO: 423507 - DNA, 25 bp, Artificial
  probe
  misc_feature (1)..(25): SEQ ID NO: 5856; WAN024CSQ; Start 74; Stop 98
tgaccgttgacttccttaacatctt

SEQ ID NO: 423508 - DNA, 25 bp, Artificial
  probe
  misc_feature (1)..(25): SEQ ID NO: 5856; WAN024CSQ; Start 54; Stop 78
cttgactagcaatgtaacgatgacc

SEQ ID NO: 423509 - DNA, 25 bp, Artificial
  probe
  misc_feature (1)..(25): SEQ ID NO: 5856; WAN024CSQ; Start 50; Stop 74
gacacttgactagcaatgtaacgat

SEQ ID NO: 423510 - DNA, 25 bp, Artificial
  probe
  misc_feature (1)..(25): SEQ ID NO: 5856; WAN024CSQ; Start 51; Stop 75
acacttgactagcaatgtaacgatg

SEQ ID NO: 423511 - DNA, 25 bp, Artificial
  probe
  misc_feature (1)..(25): SEQ ID NO: 5856; WAN024CSQ; Start 176; Stop 200
tcttgaagtccttctaccttgtgag

SEQ ID NO: 423512 - DNA, 25 bp, Artificial
  probe
  misc_feature (1)..(25): SEQ ID NO: 5856; WAN024CSQ; Start 161; Stop 185
agttgacgaagttgttcttgaagtc

SEQ ID NO: 423513 - DNA, 25 bp, Artificial
  probe
  misc_feature (1)..(25): SEQ ID NO: 5856; WAN024CSQ; Start 48; Stop 72
cagacacttgactagcaatgtaacg

SEQ ID NO: 423514 - DNA, 25 bp, Artificial
  probe
  misc_feature (1)..(25): SEQ ID NO: 5856; WAN024CSQ; Start 49; Stop 73
agacacttgactagcaatgtaacga

SEQ ID NO: 423515 - DNA, 25 bp, Artificial
  probe
  misc_feature (1)..(25): SEQ ID NO: 5856; WAN024CSQ; Start 42; Stop 66
cggatacagacacttgactagcaat

SEQ ID NO: 423516 - DNA, 25 bp, Artificial
  probe
  misc_feature (1)..(25): SEQ ID NO: 5856; WAN024CSQ; Start 46; Stop 70
tacagacacttgactagcaatgtaa

SEQ ID NO: 423517 - DNA, 25 bp, Artificial
  probe
  misc_feature (1)..(25): SEQ ID NO: 5856; WAN024CSQ; Start 156; Stop 180
tttgaagttgacgaagttgttcttg

SEQ ID NO: 423518 - DNA, 25 bp, Artificial
  probe
  misc_feature (1)..(25): SEQ ID NO: 5856; WAN024CSQ; Start 45; Stop 69
atacagacacttgactagcaatgta

SEQ ID NO: 423519 - DNA, 25 bp, Artificial
  probe
  misc_feature (1)..(25): SEQ ID NO: 5856; WAN024CSQ; Start 78; Stop 102
cgttgacttccttaacatctttgaa

SEQ ID NO: 423520 - DNA, 25 bp, Artificial
  probe
  misc_feature (1)..(25): SEQ ID NO: 5856; WAN024CSQ; Start 39; Stop 63
catcggatacagacacttgactagc

SEQ ID NO: 423521 - DNA, 25 bp, Artificial
  probe
  misc_feature (1)..(25): SEQ ID NO: 5856; WAN024CSQ; Start 38; Stop 62
gcatcggatacagacacttgactag

SEQ ID NO: 423522 - DNA, 25 bp, Artificial
  probe
  misc_feature (1)..(25): SEQ ID NO: 5856; WAN024CSQ; Start 164; Stop 188
tgacgaagttgttcttgaagtcctt

SEQ ID NO: 423523 - DNA, 25 bp, Artificial
  probe
  misc_feature (1)..(25): SEQ ID NO: 5857; WAN024DR8; Start 76; Stop 100
attgcactttcagaggaaggagtat

SEQ ID NO: 423524 - DNA, 25 bp, Artificial
  probe
  misc_feature (1)..(25): SEQ ID NO: 5857; WAN024DR8; Start 78; Stop 102
tgcactttcagaggaaggagtattt

SEQ ID NO: 423525 - DNA, 25 bp, Artificial
  probe
  misc_feature (1)..(25): SEQ ID NO: 5857; WAN024DR8; Start 77; Stop 101
ttgcactttcagaggaaggagtatt

SEQ ID NO: 423526 - DNA, 25 bp, Artificial
  probe
  misc_feature (1)..(25): SEQ ID NO: 5857; WAN024DR8; Start 2; Stop 26
tgtttcctattgctttctcagctat

SEQ ID NO: 423527 - DNA, 25 bp, Artificial
  probe
  misc_feature (1)..(25): SEQ ID NO: 5857; WAN024DR8; Start 1; Stop 25
ttgtttcctattgctttctcagcta

SEQ ID NO: 423528 - DNA, 25 bp, Artificial
  probe
  misc_feature (1)..(25): SEQ ID NO: 5857; WAN024DR8; Start 79; Stop 103
gcactttcagaggaaggagtatttt

SEQ ID NO: 423529 - DNA, 25 bp, Artificial
  probe
  misc_feature (1)..(25): SEQ ID NO: 5857; WAN024DR8; Start 3; Stop 27
gtttcctattgctttctcagctatt

SEQ ID NO: 423530 - DNA, 25 bp, Artificial
  probe
  misc_feature (1)..(25): SEQ ID NO: 5857; WAN024DR8; Start 4; Stop 28
tttcctattgctttctcagctatta

SEQ ID NO: 423531 - DNA, 25 bp, Artificial
  probe
  misc_feature (1)..(25): SEQ ID NO: 5857; WAN024DR8; Start 6; Stop 30
tcctattgctttctcagctattatt

SEQ ID NO: 423532 - DNA, 25 bp, Artificial
  probe
  misc_feature (1)..(25): SEQ ID NO: 5857; WAN024DR8; Start 5; Stop 29
ttcctattgctttctcagctattat

SEQ ID NO: 423533 - DNA, 25 bp, Artificial
  probe
  misc_feature (1)..(25): SEQ ID NO: 5857; WAN024DR8; Start 10; Stop 34
attgctttctcagctattatttgtt

SEQ ID NO: 423534 - DNA, 25 bp, Artificial
  probe
  misc_feature (1)..(25): SEQ ID NO: 5857; WAN024DR8; Start 7; Stop 31
cctattgctttctcagctattattt

SEQ ID NO: 423535 - DNA, 25 bp, Artificial
  probe
  misc_feature (1)..(25): SEQ ID NO: 5857; WAN024DR8; Start 11; Stop 35
ttgctttctcagctattatttgtta

SEQ ID NO: 423536 - DNA, 25 bp, Artificial
  probe
  misc_feature (1)..(25): SEQ ID NO: 5857; WAN024DR8; Start 12; Stop 36
tgctttctcagctattatttgttat

SEQ ID NO: 423537 - DNA, 25 bp, Artificial
  probe
  misc_feature (1)..(25): SEQ ID NO: 5857; WAN024DR8; Start 9; Stop 33
tattgctttctcagctattatttgt

SEQ ID NO: 423538 - DNA, 25 bp, Artificial
  probe
  misc_feature (1)..(25): SEQ ID NO: 5857; WAN024DR8; Start 8; Stop 32
ctattgctttctcagctattatttg

SEQ ID NO: 423539 - DNA, 25 bp, Artificial
  probe
  misc_feature (1)..(25): SEQ ID NO: 5857; WAN024DR8; Start 13; Stop 37
gctttctcagctattatttgttata

SEQ ID NO: 423540 - DNA, 25 bp, Artificial
  probe
  misc_feature (1)..(25): SEQ ID NO: 5858; WAN024DYR; Start 111; Stop 135
tattcactactggtcaagagaggtt

SEQ ID NO: 423541 - DNA, 25 bp, Artificial
  probe
  misc_feature (1)..(25): SEQ ID NO: 5858; WAN024DYR; Start 110; Stop 134
gtattcactactggtcaagagaggt

SEQ ID NO: 423542 - DNA, 25 bp, Artificial
  probe
  misc_feature (1)..(25): SEQ ID NO: 5858; WAN024DYR; Start 112; Stop 136
attcactactggtcaagagaggttg

SEQ ID NO: 423543 - DNA, 25 bp, Artificial
  probe
  misc_feature (1)..(25): SEQ ID NO: 5858; WAN024DYR; Start 108; Stop 132
aagtattcactactggtcaagagag

SEQ ID NO: 423544 - DNA, 25 bp, Artificial
  probe
  misc_feature (1)..(25): SEQ ID NO: 5858; WAN024DYR; Start 109; Stop 133
agtattcactactggtcaagagagg

SEQ ID NO: 423545 - DNA, 25 bp, Artificial
  probe
  misc_feature (1)..(25): SEQ ID NO: 5858; WAN024DYR; Start 201; Stop 225
aaagaaagggctagaagaaagagac

SEQ ID NO: 423546 - DNA, 25 bp, Artificial
  probe
  misc_feature (1)..(25): SEQ ID NO: 5858; WAN024DYR; Start 200; Stop 224
caaagaaagggctagaagaaagaga

SEQ ID NO: 423547 - DNA, 25 bp, Artificial
  probe
  misc_feature (1)..(25): SEQ ID NO: 5858; WAN024DYR; Start 62; Stop 86
cacatactgagccaaagactttaag

SEQ ID NO: 423548 - DNA, 25 bp, Artificial
  probe
  misc_feature (1)..(25): SEQ ID NO: 5858; WAN024DYR; Start 61; Stop 85
acacatactgagccaaagactttaa

SEQ ID NO: 423549 - DNA, 25 bp, Artificial
  probe
  misc_feature (1)..(25): SEQ ID NO: 5858; WAN024DYR; Start 60; Stop 84
gacacatactgagccaaagacttta

SEQ ID NO: 423550 - DNA, 25 bp, Artificial
  probe
  misc_feature (1)..(25): SEQ ID NO: 5858; WAN024DYR; Start 199; Stop 223
ccaaagaaagggctagaagaaagag

SEQ ID NO: 423551 - DNA, 25 bp, Artificial
  probe
  misc_feature (1)..(25): SEQ ID NO: 5858; WAN024DYR; Start 63; Stop 87
acatactgagccaaagactttaagt

SEQ ID NO: 423552 - DNA, 25 bp, Artificial
  probe
  misc_feature (1)..(25): SEQ ID NO: 5858; WAN024DYR; Start 202; Stop 226
aagaaagggctagaagaaagagacc

SEQ ID NO: 423553 - DNA, 25 bp, Artificial
  probe
  misc_feature (1)..(25): SEQ ID NO: 5858; WAN024DYR; Start 59; Stop 83
agacacatactgagccaaagacttt

SEQ ID NO: 423554 - DNA, 25 bp, Artificial
  probe
  misc_feature (1)..(25): SEQ ID NO: 5858; WAN024DYR; Start 113; Stop 137
ttcactactggtcaagagaggttgg

SEQ ID NO: 423555 - DNA, 25 bp, Artificial
  probe
  misc_feature (1)..(25): SEQ ID NO: 5858; WAN024DYR; Start 107; Stop 131
aaagtattcactactggtcaagaga

SEQ ID NO: 423556 - DNA, 25 bp, Artificial
  probe
  misc_feature (1)..(25): SEQ ID NO: 5858; WAN024DYR; Start 212; Stop 236
tagaagaaagagaccgatgccttta

SEQ ID NO: 423557 - DNA, 25 bp, Artificial
  probe
  misc_feature (1)..(25): SEQ ID NO: 5858; WAN024DYR; Start 58; Stop 82
cagacacatactgagccaaagactt

SEQ ID NO: 423558 - DNA, 25 bp, Artificial
  probe
  misc_feature (1)..(25): SEQ ID NO: 5858; WAN024DYR; Start 205; Stop 229
aaagggctagaagaaagagaccgat

SEQ ID NO: 423559 - DNA, 25 bp, Artificial
  probe
  misc_feature (1)..(25): SEQ ID NO: 5858; WAN024DYR; Start 211; Stop 235
ctagaagaaagagaccgatgccttt

SEQ ID NO: 423560 - DNA, 25 bp, Artificial
  probe
  misc_feature (1)..(25): SEQ ID NO: 5858; WAN024DYR; Start 114; Stop 138
tcactactggtcaagagaggttggt

SEQ ID NO: 423561 - DNA, 25 bp, Artificial
  probe
  misc_feature (1)..(25): SEQ ID NO: 5858; WAN024DYR; Start 148; Stop 172
caaaagcaacttcccatttccaaag

SEQ ID NO: 423562 - DNA, 25 bp, Artificial
  probe
  misc_feature (1)..(25): SEQ ID NO: 5858; WAN024DYR; Start 214; Stop 238
gaagaaagagaccgatgcctttact

SEQ ID NO: 423563 - DNA, 25 bp, Artificial
  probe
  misc_feature (1)..(25): SEQ ID NO: 5858; WAN024DYR; Start 213; Stop 237
agaagaaagagaccgatgcctttac

SEQ ID NO: 423564 - DNA, 25 bp, Artificial
  probe
  misc_feature (1)..(25): SEQ ID NO: 5858; WAN024DYR; Start 204; Stop 228
gaaagggctagaagaaagagaccga

SEQ ID NO: 423565 - DNA, 25 bp, Artificial
  probe
  misc_feature (1)..(25): SEQ ID NO: 5858; WAN024DYR; Start 203; Stop 227
agaaagggctagaagaaagagaccg

SEQ ID NO: 423566 - DNA, 25 bp, Artificial
  probe
  misc_feature (1)..(25): SEQ ID NO: 5858; WAN024DYR; Start 147; Stop 171
tcaaaagcaacttcccatttccaaa

SEQ ID NO: 423567 - DNA, 25 bp, Artificial
  probe
  misc_feature (1)..(25): SEQ ID NO: 5858; WAN024DYR; Start 206; Stop 230
aagggctagaagaaagagaccgatg

SEQ ID NO: 423568 - DNA, 25 bp, Artificial
  probe
  misc_feature (1)..(25): SEQ ID NO: 5858; WAN024DYR; Start 115; Stop 139
cactactggtcaagagaggttggtg

SEQ ID NO: 423569 - DNA, 25 bp, Artificial
  probe
  misc_feature (1)..(25): SEQ ID NO: 5858; WAN024DYR; Start 215; Stop 239
aagaaagagaccgatgcctttactg

SEQ ID NO: 423570 - DNA, 25 bp, Artificial
  probe
  misc_feature (1)..(25): SEQ ID NO: 5858; WAN024DYR; Start 146; Stop 170
ctcaaaagcaacttcccatttccaa

SEQ ID NO: 423571 - DNA, 25 bp, Artificial
  probe
  misc_feature (1)..(25): SEQ ID NO: 5858; WAN024DYR; Start 17; Stop 41
cttgtattgctgatcctgttgggag

SEQ ID NO: 423572 - DNA, 25 bp, Artificial
  probe
  misc_feature (1)..(25): SEQ ID NO: 5858; WAN024DYR; Start 198; Stop 222
cccaaagaaagggctagaagaaaga

SEQ ID NO: 423573 - DNA, 25 bp, Artificial
  probe
  misc_feature (1)..(25): SEQ ID NO: 5859; WAN024DG2; Start 232; Stop 256
tactataatggaggtggtgacaatt

SEQ ID NO: 423574 - DNA, 25 bp, Artificial
  probe
  misc_feature (1)..(25): SEQ ID NO: 5859; WAN024DG2; Start 233; Stop 257
actataatggaggtggtgacaatta

SEQ ID NO: 423575 - DNA, 25 bp, Artificial
  probe
  misc_feature (1)..(25): SEQ ID NO: 5859; WAN024DG2; Start 231; Stop 255
gtactataatggaggtggtgacaat

SEQ ID NO: 423576 - DNA, 25 bp, Artificial
  probe
  misc_feature (1)..(25): SEQ ID NO: 5859; WAN024DG2; Start 213; Stop 237
tggctctaggattgtcatgtactat

SEQ ID NO: 423577 - DNA, 25 bp, Artificial
  probe
  misc_feature (1)..(25): SEQ ID NO: 5859; WAN024DG2; Start 224; Stop 248
ttgtcatgtactataatggaggtgg

SEQ ID NO: 423578 - DNA, 25 bp, Artificial
  probe
  misc_feature (1)..(25): SEQ ID NO: 5859; WAN024DG2; Start 228; Stop 252
catgtactataatggaggtggtgac

SEQ ID NO: 423579 - DNA, 25 bp, Artificial
  probe
  misc_feature (1)..(25): SEQ ID NO: 5859; WAN024DG2; Start 226; Stop 250
gtcatgtactataatggaggtggtg

SEQ ID NO: 423580 - DNA, 25 bp, Artificial
  probe
  misc_feature (1)..(25): SEQ ID NO: 5859; WAN024DG2; Start 214; Stop 238
ggctctaggattgtcatgtactata

SEQ ID NO: 423581 - DNA, 25 bp, Artificial
  probe
  misc_feature (1)..(25): SEQ ID NO: 5859; WAN024DG2; Start 225; Stop 249
tgtcatgtactataatggaggtggt

SEQ ID NO: 423582 - DNA, 25 bp, Artificial
  probe
  misc_feature (1)..(25): SEQ ID NO: 5859; WAN024DG2; Start 212; Stop 236
ctggctctaggattgtcatgtacta

SEQ ID NO: 423583 - DNA, 25 bp, Artificial
  probe
  misc_feature (1)..(25): SEQ ID NO: 5859; WAN024DG2; Start 227; Stop 251
tcatgtactataatggaggtggtga

SEQ ID NO: 423584 - DNA, 25 bp, Artificial
  probe
  misc_feature (1)..(25): SEQ ID NO: 5859; WAN024DG2; Start 229; Stop 253
atgtactataatggaggtggtgaca

SEQ ID NO: 423585 - DNA, 25 bp, Artificial
  probe
  misc_feature (1)..(25): SEQ ID NO: 5859; WAN024DG2; Start 221; Stop 245
ggattgtcatgtactataatggagg

SEQ ID NO: 423586 - DNA, 25 bp, Artificial
  probe
  misc_feature (1)..(25): SEQ ID NO: 5859; WAN024DG2; Start 230; Stop 254
tgtactataatggaggtggtgacaa

SEQ ID NO: 423587 - DNA, 25 bp, Artificial
  probe
  misc_feature (1)..(25): SEQ ID NO: 5859; WAN024DG2; Start 237; Stop 261
taatggaggtggtgacaattatatt

SEQ ID NO: 423588 - DNA, 25 bp, Artificial
  probe
  misc_feature (1)..(25): SEQ ID NO: 5859; WAN024DG2; Start 223; Stop 247
attgtcatgtactataatggaggtg

SEQ ID NO: 423589 - DNA, 25 bp, Artificial
  probe
  misc_feature (1)..(25): SEQ ID NO: 5859; WAN024DG2; Start 222; Stop 246
gattgtcatgtactataatggaggt

SEQ ID NO: 423590 - DNA, 25 bp, Artificial
  probe
  misc_feature (1)..(25): SEQ ID NO: 5859; WAN024DG2; Start 257; Stop 281
atattggttctggtactagattagc

SEQ ID NO: 423591 - DNA, 25 bp, Artificial
  probe
  misc_feature (1)..(25): SEQ ID NO: 5859; WAN024DG2; Start 246; Stop 270
tggtgacaattatattggttctggt

SEQ ID NO: 423592 - DNA, 25 bp, Artificial
  probe
  misc_feature (1)..(25): SEQ ID NO: 5859; WAN024DG2; Start 245; Stop 269
gtggtgacaattatattggttctgg

SEQ ID NO: 423593 - DNA, 25 bp, Artificial
  probe
  misc_feature (1)..(25): SEQ ID NO: 5859; WAN024DG2; Start 244; Stop 268
ggtggtgacaattatattggttctg

SEQ ID NO: 423594 - DNA, 25 bp, Artificial
  probe
  misc_feature (1)..(25): SEQ ID NO: 5859; WAN024DG2; Start 243; Stop 267
aggtggtgacaattatattggttct

SEQ ID NO: 423595 - DNA, 25 bp, Artificial
  probe
  misc_feature (1)..(25): SEQ ID NO: 5859; WAN024DG2; Start 242; Stop 266
gaggtggtgacaattatattggttc

SEQ ID NO: 423596 - DNA, 25 bp, Artificial
  probe
  misc_feature (1)..(25): SEQ ID NO: 5859; WAN024DG2; Start 258; Stop 282
tattggttctggtactagattagct

SEQ ID NO: 423597 - DNA, 25 bp, Artificial
  probe
  misc_feature (1)..(25): SEQ ID NO: 5859; WAN024DG2; Start 210; Stop 234
gtctggctctaggattgtcatgtac

SEQ ID NO: 423598 - DNA, 25 bp, Artificial
  probe
  misc_feature (1)..(25): SEQ ID NO: 5859; WAN024DG2; Start 239; Stop 263
atggaggtggtgacaattatattgg

SEQ ID NO: 423599 - DNA, 25 bp, Artificial
  probe
  misc_feature (1)..(25): SEQ ID NO: 5859; WAN024DG2; Start 220; Stop 244
aggattgtcatgtactataatggag

SEQ ID NO: 423600 - DNA, 25 bp, Artificial
  probe
  misc_feature (1)..(25): SEQ ID NO: 5859; WAN024DG2; Start 241; Stop 265
ggaggtggtgacaattatattggtt

SEQ ID NO: 423601 - DNA, 25 bp, Artificial
  probe
  misc_feature (1)..(25): SEQ ID NO: 5859; WAN024DG2; Start 215; Stop 239
gctctaggattgtcatgtactataa

SEQ ID NO: 423602 - DNA, 25 bp, Artificial
  probe
  misc_feature (1)..(25): SEQ ID NO: 5859; WAN024DG2; Start 211; Stop 235
tctggctctaggattgtcatgtact

SEQ ID NO: 423603 - DNA, 25 bp, Artificial
  probe
  misc_feature (1)..(25): SEQ ID NO: 5859; WAN024DG2; Start 238; Stop 262
aatggaggtggtgacaattatattg

SEQ ID NO: 423604 - DNA, 25 bp, Artificial
  probe
  misc_feature (1)..(25): SEQ ID NO: 5859; WAN024DG2; Start 247; Stop 271
ggtgacaattatattggttctggta

SEQ ID NO: 423605 - DNA, 25 bp, Artificial
  probe
  misc_feature (1)..(25): SEQ ID NO: 5859; WAN024DG2; Start 240; Stop 264
tggaggtggtgacaattatattggt

SEQ ID NO: 423606 - DNA, 25 bp, Artificial
  probe
  misc_feature (1)..(25): SEQ ID NO: 5860; WAN024ERW; Start 135; Stop 159
atttccatcaactagagcccaatat

SEQ ID NO: 423607 - DNA, 25 bp, Artificial
  probe
  misc_feature (1)..(25): SEQ ID NO: 5860; WAN024ERW; Start 133; Stop 157
atatttccatcaactagagcccaat

SEQ ID NO: 423608 - DNA, 25 bp, Artificial
  probe
  misc_feature (1)..(25): SEQ ID NO: 5860; WAN024ERW; Start 2; Stop 26
tgtttgagaattgctttaatctgct

SEQ ID NO: 423609 - DNA, 25 bp, Artificial
  probe
  misc_feature (1)..(25): SEQ ID NO: 5860; WAN024ERW; Start 132; Stop 156
gatatttccatcaactagagcccaa

SEQ ID NO: 423610 - DNA, 25 bp, Artificial
  probe
  misc_feature (1)..(25): SEQ ID NO: 5860; WAN024ERW; Start 1; Stop 25
ttgtttgagaattgctttaatctgc

SEQ ID NO: 423611 - DNA, 25 bp, Artificial
  probe
  misc_feature (1)..(25): SEQ ID NO: 5860; WAN024ERW; Start 6; Stop 30
tgagaattgctttaatctgcttaca

SEQ ID NO: 423612 - DNA, 25 bp, Artificial
  probe
  misc_feature (1)..(25): SEQ ID NO: 5860; WAN024ERW; Start 3; Stop 27
gtttgagaattgctttaatctgctt

SEQ ID NO: 423613 - DNA, 25 bp, Artificial
  probe
  misc_feature (1)..(25): SEQ ID NO: 5860; WAN024ERW; Start 134; Stop 158
tatttccatcaactagagcccaata

SEQ ID NO: 423614 - DNA, 25 bp, Artificial
  probe
  misc_feature (1)..(25): SEQ ID NO: 5860; WAN024ERW; Start 15; Stop 39
ctttaatctgcttacatgcgtttca

SEQ ID NO: 423615 - DNA, 25 bp, Artificial
  probe
  misc_feature (1)..(25): SEQ ID NO: 5860; WAN024ERW; Start 9; Stop 33
gaattgctttaatctgcttacatgc

SEQ ID NO: 423616 - DNA, 25 bp, Artificial
  probe
  misc_feature (1)..(25): SEQ ID NO: 5860; WAN024ERW; Start 10; Stop 34
aattgctttaatctgcttacatgcg

SEQ ID NO: 423617 - DNA, 25 bp, Artificial
  probe
  misc_feature (1)..(25): SEQ ID NO: 5860; WAN024ERW; Start 136; Stop 160
tttccatcaactagagcccaatatt

SEQ ID NO: 423618 - DNA, 25 bp, Artificial
  probe
  misc_feature (1)..(25): SEQ ID NO: 5860; WAN024ERW; Start 137; Stop 161
ttccatcaactagagcccaatattc

SEQ ID NO: 423619 - DNA, 25 bp, Artificial
  probe
  misc_feature (1)..(25): SEQ ID NO: 5860; WAN024ERW; Start 5; Stop 29
ttgagaattgctttaatctgcttac

SEQ ID NO: 423620 - DNA, 25 bp, Artificial
  probe
  misc_feature (1)..(25): SEQ ID NO: 5860; WAN024ERW; Start 7; Stop 31
gagaattgctttaatctgcttacat

SEQ ID NO: 423621 - DNA, 25 bp, Artificial
  probe
  misc_feature (1)..(25): SEQ ID NO: 5860; WAN024ERW; Start 14; Stop 38
gctttaatctgcttacatgcgtttc

SEQ ID NO: 423622 - DNA, 25 bp, Artificial
  probe
  misc_feature (1)..(25): SEQ ID NO: 5860; WAN024ERW; Start 224; Stop 248
caaagagaactaagccactggtttc

SEQ ID NO: 423623 - DNA, 25 bp, Artificial
  probe
  misc_feature (1)..(25): SEQ ID NO: 5860; WAN024ERW; Start 138; Stop 162
tccatcaactagagcccaatattct

SEQ ID NO: 423624 - DNA, 25 bp, Artificial
  probe
  misc_feature (1)..(25): SEQ ID NO: 5860; WAN024ERW; Start 16; Stop 40
tttaatctgcttacatgcgtttcag

SEQ ID NO: 423625 - DNA, 25 bp, Artificial
  probe
  misc_feature (1)..(25): SEQ ID NO: 5860; WAN024ERW; Start 11; Stop 35
attgctttaatctgcttacatgcgt

SEQ ID NO: 423626 - DNA, 25 bp, Artificial
  probe
  misc_feature (1)..(25): SEQ ID NO: 5860; WAN024ERW; Start 13; Stop 37
tgctttaatctgcttacatgcgttt

SEQ ID NO: 423627 - DNA, 25 bp, Artificial
  probe
  misc_feature (1)..(25): SEQ ID NO: 5860; WAN024ERW; Start 12; Stop 36
ttgctttaatctgcttacatgcgtt

SEQ ID NO: 423628 - DNA, 25 bp, Artificial
  probe
  misc_feature (1)..(25): SEQ ID NO: 5860; WAN024ERW; Start 139; Stop 163
ccatcaactagagcccaatattctc

SEQ ID NO: 423629 - DNA, 25 bp, Artificial
  probe
  misc_feature (1)..(25): SEQ ID NO: 5860; WAN024ERW; Start 8; Stop 32
agaattgctttaatctgcttacatg

SEQ ID NO: 423630 - DNA, 25 bp, Artificial
  probe
  misc_feature (1)..(25): SEQ ID NO: 5860; WAN024ERW; Start 4; Stop 28
tttgagaattgctttaatctgctta

SEQ ID NO: 423631 - DNA, 25 bp, Artificial
  probe
  misc_feature (1)..(25): SEQ ID NO: 5860; WAN024ERW; Start 225; Stop 249
aaagagaactaagccactggtttcc

SEQ ID NO: 423632 - DNA, 25 bp, Artificial
  probe
  misc_feature (1)..(25): SEQ ID NO: 5860; WAN024ERW; Start 195; Stop 219
gagaatgggcaggataaaaggattt

SEQ ID NO: 423633 - DNA, 25 bp, Artificial
  probe
  misc_feature (1)..(25): SEQ ID NO: 5860; WAN024ERW; Start 131; Stop 155
tgatatttccatcaactagagccca

SEQ ID NO: 423634 - DNA, 25 bp, Artificial
  probe
  misc_feature (1)..(25): SEQ ID NO: 5860; WAN024ERW; Start 186; Stop 210
taagcgattgagaatgggcaggata

SEQ ID NO: 423635 - DNA, 25 bp, Artificial
  probe
  misc_feature (1)..(25): SEQ ID NO: 5860; WAN024ERW; Start 191; Stop 215
gattgagaatgggcaggataaaagg

SEQ ID NO: 423636 - DNA, 25 bp, Artificial
  probe
  misc_feature (1)..(25): SEQ ID NO: 5860; WAN024ERW; Start 150; Stop 174
agcccaatattctctagaaatctct

SEQ ID NO: 423637 - DNA, 25 bp, Artificial
  probe
  misc_feature (1)..(25): SEQ ID NO: 5860; WAN024ERW; Start 194; Stop 218
tgagaatgggcaggataaaaggatt

SEQ ID NO: 423638 - DNA, 25 bp, Artificial
  probe
  misc_feature (1)..(25): SEQ ID NO: 5860; WAN024ERW; Start 193; Stop 217
ttgagaatgggcaggataaaaggat

SEQ ID NO: 423639 - DNA, 25 bp, Artificial
  probe
  misc_feature (1)..(25): SEQ ID NO: 5861; WAN024EYS; Start 182; Stop 206
cattccttaccatagttgaccatct

SEQ ID NO: 423640 - DNA, 25 bp, Artificial
  probe
  misc_feature (1)..(25): SEQ ID NO: 5861; WAN024EYS; Start 6; Stop 30
tgatagaactaactccttgtatgcc

SEQ ID NO: 423641 - DNA, 25 bp, Artificial
  probe
  misc_feature (1)..(25): SEQ ID NO: 5861; WAN024EYS; Start 11; Stop 35
gaactaactccttgtatgcctactt

SEQ ID NO: 423642 - DNA, 25 bp, Artificial
  probe
  misc_feature (1)..(25): SEQ ID NO: 5861; WAN024EYS; Start 7; Stop 31
gatagaactaactccttgtatgcct

SEQ ID NO: 423643 - DNA, 25 bp, Artificial
  probe
  misc_feature (1)..(25): SEQ ID NO: 5861; WAN024EYS; Start 192; Stop 216
catagttgaccatcttagaggctac

SEQ ID NO: 423644 - DNA, 25 bp, Artificial
  probe
  misc_feature (1)..(25): SEQ ID NO: 5861; WAN024EYS; Start 183; Stop 207
attccttaccatagttgaccatctt

SEQ ID NO: 423645 - DNA, 25 bp, Artificial
  probe
  misc_feature (1)..(25): SEQ ID NO: 5861; WAN024EYS; Start 185; Stop 209
tccttaccatagttgaccatcttag

SEQ ID NO: 423646 - DNA, 25 bp, Artificial
  probe
  misc_feature (1)..(25): SEQ ID NO: 5861; WAN024EYS; Start 172; Stop 196
gataccttgccattccttaccatag

SEQ ID NO: 423647 - DNA, 25 bp, Artificial
  probe
  misc_feature (1)..(25): SEQ ID NO: 5861; WAN024EYS; Start 193; Stop 217
atagttgaccatcttagaggctaca

SEQ ID NO: 423648 - DNA, 25 bp, Artificial
  probe
  misc_feature (1)..(25): SEQ ID NO: 5861; WAN024EYS; Start 10; Stop 34
agaactaactccttgtatgcctact

SEQ ID NO: 423649 - DNA, 25 bp, Artificial
  probe
  misc_feature (1)..(25): SEQ ID NO: 5861; WAN024EYS; Start 9; Stop 33
tagaactaactccttgtatgcctac

SEQ ID NO: 423650 - DNA, 25 bp, Artificial
  probe
  misc_feature (1)..(25): SEQ ID NO: 5861; WAN024EYS; Start 188; Stop 212
ttaccatagttgaccatcttagagg

SEQ ID NO: 423651 - DNA, 25 bp, Artificial
  probe
  misc_feature (1)..(25): SEQ ID NO: 5861; WAN024EYS; Start 186; Stop 210
ccttaccatagttgaccatcttaga

SEQ ID NO: 423652 - DNA, 25 bp, Artificial
  probe
  misc_feature (1)..(25): SEQ ID NO: 5861; WAN024EYS; Start 181; Stop 205
ccattccttaccatagttgaccatc

SEQ ID NO: 423653 - DNA, 25 bp, Artificial
  probe
  misc_feature (1)..(25): SEQ ID NO: 5861; WAN024EYS; Start 184; Stop 208
ttccttaccatagttgaccatctta

SEQ ID NO: 423654 - DNA, 25 bp, Artificial
  probe
  misc_feature (1)..(25): SEQ ID NO: 5861; WAN024EYS; Start 191; Stop 215
ccatagttgaccatcttagaggcta

SEQ ID NO: 423655 - DNA, 25 bp, Artificial
  probe
  misc_feature (1)..(25): SEQ ID NO: 5861; WAN024EYS; Start 173; Stop 197
ataccttgccattccttaccatagt

SEQ ID NO: 423656 - DNA, 25 bp, Artificial
  probe
  misc_feature (1)..(25): SEQ ID NO: 5861; WAN024EYS; Start 171; Stop 195
tgataccttgccattccttaccata

SEQ ID NO: 423657 - DNA, 25 bp, Artificial
  probe
  misc_feature (1)..(25): SEQ ID NO: 5861; WAN024EYS; Start 167; Stop 191
aagttgataccttgccattccttac

SEQ ID NO: 423658 - DNA, 25 bp, Artificial
  probe
  misc_feature (1)..(25): SEQ ID NO: 5861; WAN024EYS; Start 189; Stop 213
taccatagttgaccatcttagaggc

SEQ ID NO: 423659 - DNA, 25 bp, Artificial
  probe
  misc_feature (1)..(25): SEQ ID NO: 5861; WAN024EYS; Start 174; Stop 198
taccttgccattccttaccatagtt

SEQ ID NO: 423660 - DNA, 25 bp, Artificial
  probe
  misc_feature (1)..(25): SEQ ID NO: 5861; WAN024EYS; Start 194; Stop 218
tagttgaccatcttagaggctacaa

SEQ ID NO: 423661 - DNA, 25 bp, Artificial
  probe
  misc_feature (1)..(25): SEQ ID NO: 5861; WAN024EYS; Start 203; Stop 227
atcttagaggctacaacttcaccaa

SEQ ID NO: 423662 - DNA, 25 bp, Artificial
  probe
  misc_feature (1)..(25): SEQ ID NO: 5861; WAN024EYS; Start 8; Stop 32
atagaactaactccttgtatgccta

SEQ ID NO: 423663 - DNA, 25 bp, Artificial
  probe
  misc_feature (1)..(25): SEQ ID NO: 5861; WAN024EYS; Start 177; Stop 201
cttgccattccttaccatagttgac

SEQ ID NO: 423664 - DNA, 25 bp, Artificial
  probe
  misc_feature (1)..(25): SEQ ID NO: 5861; WAN024EYS; Start 5; Stop 29
ttgatagaactaactccttgtatgc

SEQ ID NO: 423665 - DNA, 25 bp, Artificial
  probe
  misc_feature (1)..(25): SEQ ID NO: 5861; WAN024EYS; Start 199; Stop 223
gaccatcttagaggctacaacttca

SEQ ID NO: 423666 - DNA, 25 bp, Artificial
  probe
  misc_feature (1)..(25): SEQ ID NO: 5861; WAN024EYS; Start 198; Stop 222
tgaccatcttagaggctacaacttc

SEQ ID NO: 423667 - DNA, 25 bp, Artificial
  probe
  misc_feature (1)..(25): SEQ ID NO: 5861; WAN024EYS; Start 187; Stop 211
cttaccatagttgaccatcttagag

SEQ ID NO: 423668 - DNA, 25 bp, Artificial
  probe
  misc_feature (1)..(25): SEQ ID NO: 5861; WAN024EYS; Start 40; Stop 64
tgttacttccacagtcttatccaag

SEQ ID NO: 423669 - DNA, 25 bp, Artificial
  probe
  misc_feature (1)..(25): SEQ ID NO: 5861; WAN024EYS; Start 170; Stop 194
ttgataccttgccattccttaccat

SEQ ID NO: 423670 - DNA, 25 bp, Artificial
  probe
  misc_feature (1)..(25): SEQ ID NO: 5861; WAN024EYS; Start 197; Stop 221
ttgaccatcttagaggctacaactt

SEQ ID NO: 423671 - DNA, 25 bp, Artificial
  probe
  misc_feature (1)..(25): SEQ ID NO: 5861; WAN024EYS; Start 202; Stop 226
catcttagaggctacaacttcacca

SEQ ID NO: 423672 - DNA, 25 bp, Artificial
  probe
  misc_feature (1)..(25): SEQ ID NO: 5862; WAN024DW3; Start 142; Stop 166
ggaagcgaagtctttatcaataacc

SEQ ID NO: 423673 - DNA, 25 bp, Artificial
  probe
  misc_feature (1)..(25): SEQ ID NO: 5862; WAN024DW3; Start 141; Stop 165
gggaagcgaagtctttatcaataac

SEQ ID NO: 423674 - DNA, 25 bp, Artificial
  probe
  misc_feature (1)..(25): SEQ ID NO: 5862; WAN024DW3; Start 230; Stop 254
gctacgacgacttgaccattattta

SEQ ID NO: 423675 - DNA, 25 bp, Artificial
  probe
  misc_feature (1)..(25): SEQ ID NO: 5862; WAN024DW3; Start 140; Stop 164
tgggaagcgaagtctttatcaataa

SEQ ID NO: 423676 - DNA, 25 bp, Artificial
  probe
  misc_feature (1)..(25): SEQ ID NO: 5862; WAN024DW3; Start 143; Stop 167
gaagcgaagtctttatcaataaccg

SEQ ID NO: 423677 - DNA, 25 bp, Artificial
  probe
  misc_feature (1)..(25): SEQ ID NO: 5862; WAN024DW3; Start 231; Stop 255
ctacgacgacttgaccattatttaa

SEQ ID NO: 423678 - DNA, 25 bp, Artificial
  probe
  misc_feature (1)..(25): SEQ ID NO: 5862; WAN024DW3; Start 139; Stop 163
ttgggaagcgaagtctttatcaata

SEQ ID NO: 423679 - DNA, 25 bp, Artificial
  probe
  misc_feature (1)..(25): SEQ ID NO: 5862; WAN024DW3; Start 138; Stop 162
gttgggaagcgaagtctttatcaat

SEQ ID NO: 423680 - DNA, 25 bp, Artificial
  probe
  misc_feature (1)..(25): SEQ ID NO: 5862; WAN024DW3; Start 49; Stop 73
ttcctggtttggcttgttgtagtta

SEQ ID NO: 423681 - DNA, 25 bp, Artificial
  probe
  misc_feature (1)..(25): SEQ ID NO: 5862; WAN024DW3; Start 228; Stop 252
cagctacgacgacttgaccattatt

SEQ ID NO: 423682 - DNA, 25 bp, Artificial
  probe
  misc_feature (1)..(25): SEQ ID NO: 5862; WAN024DW3; Start 50; Stop 74
tcctggtttggcttgttgtagttaa

SEQ ID NO: 423683 - DNA, 25 bp, Artificial
  probe
  misc_feature (1)..(25): SEQ ID NO: 5862; WAN024DW3; Start 149; Stop 173
aagtctttatcaataaccgcttcga

SEQ ID NO: 423684 - DNA, 25 bp, Artificial
  probe
  misc_feature (1)..(25): SEQ ID NO: 5862; WAN024DW3; Start 155; Stop 179
ttatcaataaccgcttcgacaccag

SEQ ID NO: 423685 - DNA, 25 bp, Artificial
  probe
  misc_feature (1)..(25): SEQ ID NO: 5862; WAN024DW3; Start 152; Stop 176
tctttatcaataaccgcttcgacac

SEQ ID NO: 423686 - DNA, 25 bp, Artificial
  probe
  misc_feature (1)..(25): SEQ ID NO: 5862; WAN024DW3; Start 74; Stop 98
acaaatacataatctacacctgtca

SEQ ID NO: 423687 - DNA, 25 bp, Artificial
  probe
  misc_feature (1)..(25): SEQ ID NO: 5862; WAN024DW3; Start 48; Stop 72
tttcctggtttggcttgttgtagtt

SEQ ID NO: 423688 - DNA, 25 bp, Artificial
  probe
  misc_feature (1)..(25): SEQ ID NO: 5862; WAN024DW3; Start 229; Stop 253
agctacgacgacttgaccattattt

SEQ ID NO: 423689 - DNA, 25 bp, Artificial
  probe
  misc_feature (1)..(25): SEQ ID NO: 5862; WAN024DW3; Start 150; Stop 174
agtctttatcaataaccgcttcgac

SEQ ID NO: 423690 - DNA, 25 bp, Artificial
  probe
  misc_feature (1)..(25): SEQ ID NO: 5862; WAN024DW3; Start 153; Stop 177
ctttatcaataaccgcttcgacacc

SEQ ID NO: 423691 - DNA, 25 bp, Artificial
  probe
  misc_feature (1)..(25): SEQ ID NO: 5862; WAN024DW3; Start 151; Stop 175
gtctttatcaataaccgcttcgaca

SEQ ID NO: 423692 - DNA, 25 bp, Artificial
  probe
  misc_feature (1)..(25): SEQ ID NO: 5862; WAN024DW3; Start 104; Stop 128
atgaagaggtctgcatcaaccaatt

SEQ ID NO: 423693 - DNA, 25 bp, Artificial
  probe
  misc_feature (1)..(25): SEQ ID NO: 5862; WAN024DW3; Start 82; Stop 106
ataatctacacctgtcaaaacgatg

SEQ ID NO: 423694 - DNA, 25 bp, Artificial
  probe
  misc_feature (1)..(25): SEQ ID NO: 5862; WAN024DW3; Start 81; Stop 105
cataatctacacctgtcaaaacgat

SEQ ID NO: 423695 - DNA, 25 bp, Artificial
  probe
  misc_feature (1)..(25): SEQ ID NO: 5862; WAN024DW3; Start 75; Stop 99
caaatacataatctacacctgtcaa

SEQ ID NO: 423696 - DNA, 25 bp, Artificial
  probe
  misc_feature (1)..(25): SEQ ID NO: 5862; WAN024DW3; Start 73; Stop 97
aacaaatacataatctacacctgtc

SEQ ID NO: 423697 - DNA, 25 bp, Artificial
  probe
  misc_feature (1)..(25): SEQ ID NO: 5862; WAN024DW3; Start 190; Stop 214
attgttttctttgacgacgggaata

SEQ ID NO: 423698 - DNA, 25 bp, Artificial
  probe
  misc_feature (1)..(25): SEQ ID NO: 5862; WAN024DW3; Start 83; Stop 107
taatctacacctgtcaaaacgatga

SEQ ID NO: 423699 - DNA, 25 bp, Artificial
  probe
  misc_feature (1)..(25): SEQ ID NO: 5862; WAN024DW3; Start 84; Stop 108
aatctacacctgtcaaaacgatgaa

SEQ ID NO: 423700 - DNA, 25 bp, Artificial
  probe
  misc_feature (1)..(25): SEQ ID NO: 5862; WAN024DW3; Start 137; Stop 161
cgttgggaagcgaagtctttatcaa

SEQ ID NO: 423701 - DNA, 25 bp, Artificial
  probe
  misc_feature (1)..(25): SEQ ID NO: 5862; WAN024DW3; Start 154; Stop 178
tttatcaataaccgcttcgacacca

SEQ ID NO: 423702 - DNA, 25 bp, Artificial
  probe
  misc_feature (1)..(25): SEQ ID NO: 5862; WAN024DW3; Start 148; Stop 172
gaagtctttatcaataaccgcttcg

SEQ ID NO: 423703 - DNA, 25 bp, Artificial
  probe
  misc_feature (1)..(25): SEQ ID NO: 5862; WAN024DW3; Start 147; Stop 171
cgaagtctttatcaataaccgcttc

SEQ ID NO: 423704 - DNA, 25 bp, Artificial
  probe
  misc_feature (1)..(25): SEQ ID NO: 5862; WAN024DW3; Start 176; Stop 200
ccagtcaaatgtccattgttttctt

SEQ ID NO: 423705 - DNA, 25 bp, Artificial
  probe
  misc_feature (1)..(25): SEQ ID NO: 5863; WAN024DZC; Start 9; Stop 33
tggagggaaatttggtataatagca

SEQ ID NO: 423706 - DNA, 25 bp, Artificial
  probe
  misc_feature (1)..(25): SEQ ID NO: 5863; WAN024DZC; Start 6; Stop 30
tgctggagggaaatttggtataata

SEQ ID NO: 423707 - DNA, 25 bp, Artificial
  probe
  misc_feature (1)..(25): SEQ ID NO: 5863; WAN024DZC; Start 5; Stop 29
ttgctggagggaaatttggtataat

SEQ ID NO: 423708 - DNA, 25 bp, Artificial
  probe
  misc_feature (1)..(25): SEQ ID NO: 5863; WAN024DZC; Start 4; Stop 28
tttgctggagggaaatttggtataa

SEQ ID NO: 423709 - DNA, 25 bp, Artificial
  probe
  misc_feature (1)..(25): SEQ ID NO: 5863; WAN024DZC; Start 8; Stop 32
ctggagggaaatttggtataatagc

SEQ ID NO: 423710 - DNA, 25 bp, Artificial
  probe
  misc_feature (1)..(25): SEQ ID NO: 5863; WAN024DZC; Start 7; Stop 31
gctggagggaaatttggtataatag

SEQ ID NO: 423711 - DNA, 25 bp, Artificial
  probe
  misc_feature (1)..(25): SEQ ID NO: 5863; WAN024DZC; Start 3; Stop 27
gtttgctggagggaaatttggtata

SEQ ID NO: 423712 - DNA, 25 bp, Artificial
  probe
  misc_feature (1)..(25): SEQ ID NO: 5863; WAN024DZC; Start 10; Stop 34
ggagggaaatttggtataatagcaa

SEQ ID NO: 423713 - DNA, 25 bp, Artificial
  probe
  misc_feature (1)..(25): SEQ ID NO: 5863; WAN024DZC; Start 2; Stop 26
tgtttgctggagggaaatttggtat

SEQ ID NO: 423714 - DNA, 25 bp, Artificial
  probe
  misc_feature (1)..(25): SEQ ID NO: 5863; WAN024DZC; Start 1; Stop 25
ttgtttgctggagggaaatttggta

SEQ ID NO: 423715 - DNA, 25 bp, Artificial
  probe
  misc_feature (1)..(25): SEQ ID NO: 5863; WAN024DZC; Start 13; Stop 37
gggaaatttggtataatagcaaagt

SEQ ID NO: 423716 - DNA, 25 bp, Artificial
  probe
  misc_feature (1)..(25): SEQ ID NO: 5863; WAN024DZC; Start 12; Stop 36
agggaaatttggtataatagcaaag

SEQ ID NO: 423717 - DNA, 25 bp, Artificial
  probe
  misc_feature (1)..(25): SEQ ID NO: 5863; WAN024DZC; Start 11; Stop 35
gagggaaatttggtataatagcaaa

SEQ ID NO: 423718 - DNA, 25 bp, Artificial
  probe
  misc_feature (1)..(25): SEQ ID NO: 5863; WAN024DZC; Start 14; Stop 38
ggaaatttggtataatagcaaagta

SEQ ID NO: 423719 - DNA, 25 bp, Artificial
  probe
  misc_feature (1)..(25): SEQ ID NO: 5863; WAN024DZC; Start 48; Stop 72
agaaaaggagtttcattatgaagaa

SEQ ID NO: 423720 - DNA, 25 bp, Artificial
  probe
  misc_feature (1)..(25): SEQ ID NO: 5863; WAN024DZC; Start 47; Stop 71
aagaaaaggagtttcattatgaaga

SEQ ID NO: 423721 - DNA, 25 bp, Artificial
  probe
  misc_feature (1)..(25): SEQ ID NO: 5863; WAN024DZC; Start 49; Stop 73
gaaaaggagtttcattatgaagaaa

SEQ ID NO: 423722 - DNA, 25 bp, Artificial
  probe
  misc_feature (1)..(25): SEQ ID NO: 5863; WAN024DZC; Start 46; Stop 70
aaagaaaaggagtttcattatgaag

SEQ ID NO: 423723 - DNA, 25 bp, Artificial
  probe
  misc_feature (1)..(25): SEQ ID NO: 5863; WAN024DZC; Start 50; Stop 74
aaaaggagtttcattatgaagaaaa

SEQ ID NO: 423724 - DNA, 25 bp, Artificial
  probe
  misc_feature (1)..(25): SEQ ID NO: 5863; WAN024DZC; Start 45; Stop 69
aaaagaaaaggagtttcattatgaa

SEQ ID NO: 423725 - DNA, 25 bp, Artificial
  probe
  misc_feature (1)..(25): SEQ ID NO: 5864; WAN024FT4; Start 99; Stop 123
gctagaatcacttcaaccaagactg

SEQ ID NO: 423726 - DNA, 25 bp, Artificial
  probe
  misc_feature (1)..(25): SEQ ID NO: 5864; WAN024FT4; Start 98; Stop 122
tgctagaatcacttcaaccaagact

SEQ ID NO: 423727 - DNA, 25 bp, Artificial
  probe
  misc_feature (1)..(25): SEQ ID NO: 5864; WAN024FT4; Start 103; Stop 127
gaatcacttcaaccaagactggatt

SEQ ID NO: 423728 - DNA, 25 bp, Artificial
  probe
  misc_feature (1)..(25): SEQ ID NO: 5864; WAN024FT4; Start 100; Stop 124
ctagaatcacttcaaccaagactgg

SEQ ID NO: 423729 - DNA, 25 bp, Artificial
  probe
  misc_feature (1)..(25): SEQ ID NO: 5864; WAN024FT4; Start 101; Stop 125
tagaatcacttcaaccaagactgga

SEQ ID NO: 423730 - DNA, 25 bp, Artificial
  probe
  misc_feature (1)..(25): SEQ ID NO: 5864; WAN024FT4; Start 97; Stop 121
gtgctagaatcacttcaaccaagac

SEQ ID NO: 423731 - DNA, 25 bp, Artificial
  probe
  misc_feature (1)..(25): SEQ ID NO: 5864; WAN024FT4; Start 102; Stop 126
agaatcacttcaaccaagactggat

SEQ ID NO: 423732 - DNA, 25 bp, Artificial
  probe
  misc_feature (1)..(25): SEQ ID NO: 5864; WAN024FT4; Start 199; Stop 223
gataaatccatttcttctggcgaac

SEQ ID NO: 423733 - DNA, 25 bp, Artificial
  probe
  misc_feature (1)..(25): SEQ ID NO: 5864; WAN024FT4; Start 198; Stop 222
agataaatccatttcttctggcgaa

SEQ ID NO: 423734 - DNA, 25 bp, Artificial
  probe
  misc_feature (1)..(25): SEQ ID NO: 5864; WAN024FT4; Start 195; Stop 219
aggagataaatccatttcttctggc

SEQ ID NO: 423735 - DNA, 25 bp, Artificial
  probe
  misc_feature (1)..(25): SEQ ID NO: 5864; WAN024FT4; Start 104; Stop 128
aatcacttcaaccaagactggattt

SEQ ID NO: 423736 - DNA, 25 bp, Artificial
  probe
  misc_feature (1)..(25): SEQ ID NO: 5864; WAN024FT4; Start 197; Stop 221
gagataaatccatttcttctggcga

SEQ ID NO: 423737 - DNA, 25 bp, Artificial
  probe
  misc_feature (1)..(25): SEQ ID NO: 5864; WAN024FT4; Start 200; Stop 224
ataaatccatttcttctggcgaaca

SEQ ID NO: 423738 - DNA, 25 bp, Artificial
  probe
  misc_feature (1)..(25): SEQ ID NO: 5864; WAN024FT4; Start 148; Stop 172
aaagagatggtgccagatcaaagaa

SEQ ID NO: 423739 - DNA, 25 bp, Artificial
  probe
  misc_feature (1)..(25): SEQ ID NO: 5864; WAN024FT4; Start 105; Stop 129
atcacttcaaccaagactggatttg

SEQ ID NO: 423740 - DNA, 25 bp, Artificial
  probe
  misc_feature (1)..(25): SEQ ID NO: 5864; WAN024FT4; Start 201; Stop 225
taaatccatttcttctggcgaacag

SEQ ID NO: 423741 - DNA, 25 bp, Artificial
  probe
  misc_feature (1)..(25): SEQ ID NO: 5864; WAN024FT4; Start 109; Stop 133
cttcaaccaagactggatttgtcaa

SEQ ID NO: 423742 - DNA, 25 bp, Artificial
  probe
  misc_feature (1)..(25): SEQ ID NO: 5864; WAN024FT4; Start 192; Stop 216
gctaggagataaatccatttcttct

SEQ ID NO: 423743 - DNA, 25 bp, Artificial
  probe
  misc_feature (1)..(25): SEQ ID NO: 5864; WAN024FT4; Start 196; Stop 220
ggagataaatccatttcttctggcg

SEQ ID NO: 423744 - DNA, 25 bp, Artificial
  probe
  misc_feature (1)..(25): SEQ ID NO: 5864; WAN024FT4; Start 149; Stop 173
aagagatggtgccagatcaaagaag

SEQ ID NO: 423745 - DNA, 25 bp, Artificial
  probe
  misc_feature (1)..(25): SEQ ID NO: 5864; WAN024FT4; Start 110; Stop 134
ttcaaccaagactggatttgtcaac

SEQ ID NO: 423746 - DNA, 25 bp, Artificial
  probe
  misc_feature (1)..(25): SEQ ID NO: 5864; WAN024FT4; Start 194; Stop 218
taggagataaatccatttcttctgg

SEQ ID NO: 423747 - DNA, 25 bp, Artificial
  probe
  misc_feature (1)..(25): SEQ ID NO: 5864; WAN024FT4; Start 107; Stop 131
cacttcaaccaagactggatttgtc

SEQ ID NO: 423748 - DNA, 25 bp, Artificial
  probe
  misc_feature (1)..(25): SEQ ID NO: 5864; WAN024FT4; Start 108; Stop 132
acttcaaccaagactggatttgtca

SEQ ID NO: 423749 - DNA, 25 bp, Artificial
  probe
  misc_feature (1)..(25): SEQ ID NO: 5864; WAN024FT4; Start 106; Stop 130
tcacttcaaccaagactggatttgt

SEQ ID NO: 423750 - DNA, 25 bp, Artificial
  probe
  misc_feature (1)..(25): SEQ ID NO: 5864; WAN024FT4; Start 53; Stop 77
acaaaagatttccttggttccatag

SEQ ID NO: 423751 - DNA, 25 bp, Artificial
  probe
  misc_feature (1)..(25): SEQ ID NO: 5864; WAN024FT4; Start 229; Stop 253
ggtaaacccaaactgtcaaaagtaa

SEQ ID NO: 423752 - DNA, 25 bp, Artificial
  probe
  misc_feature (1)..(25): SEQ ID NO: 5864; WAN024FT4; Start 50; Stop 74
tttacaaaagatttccttggttcca

SEQ ID NO: 423753 - DNA, 25 bp, Artificial
  probe
  misc_feature (1)..(25): SEQ ID NO: 5864; WAN024FT4; Start 232; Stop 256
aaacccaaactgtcaaaagtaattg

SEQ ID NO: 423754 - DNA, 25 bp, Artificial
  probe
  misc_feature (1)..(25): SEQ ID NO: 5864; WAN024FT4; Start 51; Stop 75
ttacaaaagatttccttggttccat

SEQ ID NO: 423755 - DNA, 25 bp, Artificial
  probe
  misc_feature (1)..(25): SEQ ID NO: 5864; WAN024FT4; Start 238; Stop 262
aaactgtcaaaagtaattggaaacc

SEQ ID NO: 423756 - DNA, 25 bp, Artificial
  probe
  misc_feature (1)..(25): SEQ ID NO: 5864; WAN024FT4; Start 49; Stop 73
ttttacaaaagatttccttggttcc

SEQ ID NO: 423757 - DNA, 25 bp, Artificial
  probe
  misc_feature (1)..(25): SEQ ID NO: 5864; WAN024FT4; Start 282; Stop 306
aaaccaagcaaataaatctgccaga

SEQ ID NO: 423758 - DNA, 25 bp, Artificial
  probe
  misc_feature (1)..(25): SEQ ID NO: 5865; WAN024FFU; Start 138; Stop 162
tgacatcatcgtattgaaggacttg

SEQ ID NO: 423759 - DNA, 25 bp, Artificial
  probe
  misc_feature (1)..(25): SEQ ID NO: 5865; WAN024FFU; Start 140; Stop 164
acatcatcgtattgaaggacttgtt

SEQ ID NO: 423760 - DNA, 25 bp, Artificial
  probe
  misc_feature (1)..(25): SEQ ID NO: 5865; WAN024FFU; Start 137; Stop 161
atgacatcatcgtattgaaggactt

SEQ ID NO: 423761 - DNA, 25 bp, Artificial
  probe
  misc_feature (1)..(25): SEQ ID NO: 5865; WAN024FFU; Start 139; Stop 163
gacatcatcgtattgaaggacttgt

SEQ ID NO: 423762 - DNA, 25 bp, Artificial
  probe
  misc_feature (1)..(25): SEQ ID NO: 5865; WAN024FFU; Start 136; Stop 160
catgacatcatcgtattgaaggact

SEQ ID NO: 423763 - DNA, 25 bp, Artificial
  probe
  misc_feature (1)..(25): SEQ ID NO: 5865; WAN024FFU; Start 149; Stop 173
tattgaaggacttgtttacgggtat

SEQ ID NO: 423764 - DNA, 25 bp, Artificial
  probe
  misc_feature (1)..(25): SEQ ID NO: 5865; WAN024FFU; Start 148; Stop 172
gtattgaaggacttgtttacgggta

SEQ ID NO: 423765 - DNA, 25 bp, Artificial
  probe
  misc_feature (1)..(25): SEQ ID NO: 5865; WAN024FFU; Start 150; Stop 174
attgaaggacttgtttacgggtatc

SEQ ID NO: 423766 - DNA, 25 bp, Artificial
  probe
  misc_feature (1)..(25): SEQ ID NO: 5865; WAN024FFU; Start 110; Stop 134
gcatagataatctcacgttgttcac

SEQ ID NO: 423767 - DNA, 25 bp, Artificial
  probe
  misc_feature (1)..(25): SEQ ID NO: 5865; WAN024FFU; Start 109; Stop 133
agcatagataatctcacgttgttca

SEQ ID NO: 423768 - DNA, 25 bp, Artificial
  probe
  misc_feature (1)..(25): SEQ ID NO: 5865; WAN024FFU; Start 135; Stop 159
gcatgacatcatcgtattgaaggac

SEQ ID NO: 423769 - DNA, 25 bp, Artificial
  probe
  misc_feature (1)..(25): SEQ ID NO: 5865; WAN024FFU; Start 108; Stop 132
gagcatagataatctcacgttgttc

SEQ ID NO: 423770 - DNA, 25 bp, Artificial
  probe
  misc_feature (1)..(25): SEQ ID NO: 5865; WAN024FFU; Start 141; Stop 165
catcatcgtattgaaggacttgttt

SEQ ID NO: 423771 - DNA, 25 bp, Artificial
  probe
  misc_feature (1)..(25): SEQ ID NO: 5865; WAN024FFU; Start 143; Stop 167
tcatcgtattgaaggacttgtttac

SEQ ID NO: 423772 - DNA, 25 bp, Artificial
  probe
  misc_feature (1)..(25): SEQ ID NO: 5865; WAN024FFU; Start 299; Stop 323
cgtttcatcaaatcatcttcaagag

SEQ ID NO: 423773 - DNA, 25 bp, Artificial
  probe
  misc_feature (1)..(25): SEQ ID NO: 5865; WAN024FFU; Start 142; Stop 166
atcatcgtattgaaggacttgttta

SEQ ID NO: 423774 - DNA, 25 bp, Artificial
  probe
  misc_feature (1)..(25): SEQ ID NO: 5865; WAN024FFU; Start 151; Stop 175
ttgaaggacttgtttacgggtatcg

SEQ ID NO: 423775 - DNA, 25 bp, Artificial
  probe
  misc_feature (1)..(25): SEQ ID NO: 5865; WAN024FFU; Start 134; Stop 158
cgcatgacatcatcgtattgaagga

SEQ ID NO: 423776 - DNA, 25 bp, Artificial
  probe
  misc_feature (1)..(25): SEQ ID NO: 5865; WAN024FFU; Start 300; Stop 324
gtttcatcaaatcatcttcaagaga

SEQ ID NO: 423777 - DNA, 25 bp, Artificial
  probe
  misc_feature (1)..(25): SEQ ID NO: 5865; WAN024FFU; Start 264; Stop 288
gttcaaagattcccttcaagcgttc

SEQ ID NO: 423778 - DNA, 25 bp, Artificial
  probe
  misc_feature (1)..(25): SEQ ID NO: 5865; WAN024FFU; Start 298; Stop 322
acgtttcatcaaatcatcttcaaga

SEQ ID NO: 423779 - DNA, 25 bp, Artificial
  probe
  misc_feature (1)..(25): SEQ ID NO: 5865; WAN024FFU; Start 179; Stop 203
ttatttccttcgacacgtttctgag

SEQ ID NO: 423780 - DNA, 25 bp, Artificial
  probe
  misc_feature (1)..(25): SEQ ID NO: 5865; WAN024FFU; Start 268; Stop 292
aaagattcccttcaagcgttcagaa

SEQ ID NO: 423781 - DNA, 25 bp, Artificial
  probe
  misc_feature (1)..(25): SEQ ID NO: 5865; WAN024FFU; Start 111; Stop 135
catagataatctcacgttgttcacg

SEQ ID NO: 423782 - DNA, 25 bp, Artificial
  probe
  misc_feature (1)..(25): SEQ ID NO: 5865; WAN024FFU; Start 178; Stop 202
gttatttccttcgacacgtttctga

SEQ ID NO: 423783 - DNA, 25 bp, Artificial
  probe
  misc_feature (1)..(25): SEQ ID NO: 5865; WAN024FFU; Start 265; Stop 289
ttcaaagattcccttcaagcgttca

SEQ ID NO: 423784 - DNA, 25 bp, Artificial
  probe
  misc_feature (1)..(25): SEQ ID NO: 5865; WAN024FFU; Start 112; Stop 136
atagataatctcacgttgttcacgc

SEQ ID NO: 423785 - DNA, 25 bp, Artificial
  probe
  misc_feature (1)..(25): SEQ ID NO: 5865; WAN024FFU; Start 132; Stop 156
cacgcatgacatcatcgtattgaag

SEQ ID NO: 423786 - DNA, 25 bp, Artificial
  probe
  misc_feature (1)..(25): SEQ ID NO: 5865; WAN024FFU; Start 267; Stop 291
caaagattcccttcaagcgttcaga

SEQ ID NO: 423787 - DNA, 25 bp, Artificial
  probe
  misc_feature (1)..(25): SEQ ID NO: 5865; WAN024FFU; Start 266; Stop 290
tcaaagattcccttcaagcgttcag

SEQ ID NO: 423788 - DNA, 25 bp, Artificial
  probe
  misc_feature (1)..(25): SEQ ID NO: 5865; WAN024FFU; Start 129; Stop 153
gttcacgcatgacatcatcgtattg

SEQ ID NO: 423789 - DNA, 25 bp, Artificial
  probe
  misc_feature (1)..(25): SEQ ID NO: 5865; WAN024FFU; Start 95; Stop 119
acatcgtaacgttgagcatagataa

SEQ ID NO: 423790 - DNA, 25 bp, Artificial
  probe
  misc_feature (1)..(25): SEQ ID NO: 5865; WAN024FFU; Start 94; Stop 118
gacatcgtaacgttgagcatagata

SEQ ID NO: 423791 - DNA, 25 bp, Artificial
  probe
  misc_feature (1)..(25): SEQ ID NO: 5866; WAN024FKP; Start 199; Stop 223
ggtatctgtaatgtgagacaagaca

SEQ ID NO: 423792 - DNA, 25 bp, Artificial
  probe
  misc_feature (1)..(25): SEQ ID NO: 5866; WAN024FKP; Start 198; Stop 222
tggtatctgtaatgtgagacaagac

SEQ ID NO: 423793 - DNA, 25 bp, Artificial
  probe
  misc_feature (1)..(25): SEQ ID NO: 5866; WAN024FKP; Start 197; Stop 221
ctggtatctgtaatgtgagacaaga

SEQ ID NO: 423794 - DNA, 25 bp, Artificial
  probe
  misc_feature (1)..(25): SEQ ID NO: 5866; WAN024FKP; Start 212; Stop 236
tgagacaagacatgagacaacatac

SEQ ID NO: 423795 - DNA, 25 bp, Artificial
  probe
  misc_feature (1)..(25): SEQ ID NO: 5866; WAN024FKP; Start 211; Stop 235
gtgagacaagacatgagacaacata

SEQ ID NO: 423796 - DNA, 25 bp, Artificial
  probe
  misc_feature (1)..(25): SEQ ID NO: 5866; WAN024FKP; Start 213; Stop 237
gagacaagacatgagacaacatacc

SEQ ID NO: 423797 - DNA, 25 bp, Artificial
  probe
  misc_feature (1)..(25): SEQ ID NO: 5866; WAN024FKP; Start 75; Stop 99
tgttggtgataatagagtattctgg

SEQ ID NO: 423798 - DNA, 25 bp, Artificial
  probe
  misc_feature (1)..(25): SEQ ID NO: 5866; WAN024FKP; Start 215; Stop 239
gacaagacatgagacaacatacctg

SEQ ID NO: 423799 - DNA, 25 bp, Artificial
  probe
  misc_feature (1)..(25): SEQ ID NO: 5866; WAN024FKP; Start 214; Stop 238
agacaagacatgagacaacatacct

SEQ ID NO: 423800 - DNA, 25 bp, Artificial
  probe
  misc_feature (1)..(25): SEQ ID NO: 5866; WAN024FKP; Start 68; Stop 92
aagtcaatgttggtgataatagagt

SEQ ID NO: 423801 - DNA, 25 bp, Artificial
  probe
  misc_feature (1)..(25): SEQ ID NO: 5866; WAN024FKP; Start 53; Stop 77
taatctggatggtcaaagtcaatgt

SEQ ID NO: 423802 - DNA, 25 bp, Artificial
  probe
  misc_feature (1)..(25): SEQ ID NO: 5866; WAN024FKP; Start 54; Stop 78
aatctggatggtcaaagtcaatgtt

SEQ ID NO: 423803 - DNA, 25 bp, Artificial
  probe
  misc_feature (1)..(25): SEQ ID NO: 5866; WAN024FKP; Start 52; Stop 76
ataatctggatggtcaaagtcaatg

SEQ ID NO: 423804 - DNA, 25 bp, Artificial
  probe
  misc_feature (1)..(25): SEQ ID NO: 5866; WAN024FKP; Start 49; Stop 73
gaaataatctggatggtcaaagtca

SEQ ID NO: 423805 - DNA, 25 bp, Artificial
  probe
  misc_feature (1)..(25): SEQ ID NO: 5866; WAN024FKP; Start 79; Stop 103
ggtgataatagagtattctgggtgg

SEQ ID NO: 423806 - DNA, 25 bp, Artificial
  probe
  misc_feature (1)..(25): SEQ ID NO: 5866; WAN024FKP; Start 41; Stop 65
agacttgtgaaataatctggatggt

SEQ ID NO: 423807 - DNA, 25 bp, Artificial
  probe
  misc_feature (1)..(25): SEQ ID NO: 5866; WAN024FKP; Start 39; Stop 63
cgagacttgtgaaataatctggatg

SEQ ID NO: 423808 - DNA, 25 bp, Artificial
  probe
  misc_feature (1)..(25): SEQ ID NO: 5866; WAN024FKP; Start 4; Stop 28
tttggcatagtcgttaaaggcatta

SEQ ID NO: 423809 - DNA, 25 bp, Artificial
  probe
  misc_feature (1)..(25): SEQ ID NO: 5866; WAN024FKP; Start 40; Stop 64
gagacttgtgaaataatctggatgg

SEQ ID NO: 423810 - DNA, 25 bp, Artificial
  probe
  misc_feature (1)..(25): SEQ ID NO: 5866; WAN024FKP; Start 78; Stop 102
tggtgataatagagtattctgggtg

SEQ ID NO: 423811 - DNA, 25 bp, Artificial
  probe
  misc_feature (1)..(25): SEQ ID NO: 5866; WAN024FKP; Start 80; Stop 104
gtgataatagagtattctgggtggt

SEQ ID NO: 423812 - DNA, 25 bp, Artificial
  probe
  misc_feature (1)..(25): SEQ ID NO: 5866; WAN024FKP; Start 119; Stop 143
cgctcatattcgtcagattcaaaga

SEQ ID NO: 423813 - DNA, 25 bp, Artificial
  probe
  misc_feature (1)..(25): SEQ ID NO: 5866; WAN024FKP; Start 216; Stop 240
acaagacatgagacaacatacctgt

SEQ ID NO: 423814 - DNA, 25 bp, Artificial
  probe
  misc_feature (1)..(25): SEQ ID NO: 5866; WAN024FKP; Start 50; Stop 74
aaataatctggatggtcaaagtcaa

SEQ ID NO: 423815 - DNA, 25 bp, Artificial
  probe
  misc_feature (1)..(25): SEQ ID NO: 5866; WAN024FKP; Start 69; Stop 93
agtcaatgttggtgataatagagta

SEQ ID NO: 423816 - DNA, 25 bp, Artificial
  probe
  misc_feature (1)..(25): SEQ ID NO: 5866; WAN024FKP; Start 63; Stop 87
ggtcaaagtcaatgttggtgataat

SEQ ID NO: 423817 - DNA, 25 bp, Artificial
  probe
  misc_feature (1)..(25): SEQ ID NO: 5866; WAN024FKP; Start 43; Stop 67
acttgtgaaataatctggatggtca

SEQ ID NO: 423818 - DNA, 25 bp, Artificial
  probe
  misc_feature (1)..(25): SEQ ID NO: 5866; WAN024FKP; Start 61; Stop 85
atggtcaaagtcaatgttggtgata

SEQ ID NO: 423819 - DNA, 25 bp, Artificial
  probe
  misc_feature (1)..(25): SEQ ID NO: 5866; WAN024FKP; Start 51; Stop 75
aataatctggatggtcaaagtcaat

SEQ ID NO: 423820 - DNA, 25 bp, Artificial
  probe
  misc_feature (1)..(25): SEQ ID NO: 5866; WAN024FKP; Start 210; Stop 234
tgtgagacaagacatgagacaacat

SEQ ID NO: 423821 - DNA, 25 bp, Artificial
  probe
  misc_feature (1)..(25): SEQ ID NO: 5866; WAN024FKP; Start 84; Stop 108
taatagagtattctgggtggtaagg

SEQ ID NO: 423822 - DNA, 25 bp, Artificial
  probe
  misc_feature (1)..(25): SEQ ID NO: 5866; WAN024FKP; Start 47; Stop 71
gtgaaataatctggatggtcaaagt

SEQ ID NO: 423823 - DNA, 25 bp, Artificial
  probe
  misc_feature (1)..(25): SEQ ID NO: 5866; WAN024FKP; Start 46; Stop 70
tgtgaaataatctggatggtcaaag

SEQ ID NO: 423824 - DNA, 25 bp, Artificial
  probe
  misc_feature (1)..(25): SEQ ID NO: 5867; WAN024DFY; Start 214; Stop 238
gatatgacgactggagtatattgct

SEQ ID NO: 423825 - DNA, 25 bp, Artificial
  probe
  misc_feature (1)..(25): SEQ ID NO: 5867; WAN024DFY; Start 213; Stop 237
agatatgacgactggagtatattgc

SEQ ID NO: 423826 - DNA, 25 bp, Artificial
  probe
  misc_feature (1)..(25): SEQ ID NO: 5867; WAN024DFY; Start 215; Stop 239
atatgacgactggagtatattgctt

SEQ ID NO: 423827 - DNA, 25 bp, Artificial
  probe
  misc_feature (1)..(25): SEQ ID NO: 5867; WAN024DFY; Start 205; Stop 229
ttacttcaagatatgacgactggag

SEQ ID NO: 423828 - DNA, 25 bp, Artificial
  probe
  misc_feature (1)..(25): SEQ ID NO: 5867; WAN024DFY; Start 208; Stop 232
cttcaagatatgacgactggagtat

SEQ ID NO: 423829 - DNA, 25 bp, Artificial
  probe
  misc_feature (1)..(25): SEQ ID NO: 5867; WAN024DFY; Start 207; Stop 231
acttcaagatatgacgactggagta

SEQ ID NO: 423830 - DNA, 25 bp, Artificial
  probe
  misc_feature (1)..(25): SEQ ID NO: 5867; WAN024DFY; Start 206; Stop 230
tacttcaagatatgacgactggagt

SEQ ID NO: 423831 - DNA, 25 bp, Artificial
  probe
  misc_feature (1)..(25): SEQ ID NO: 5867; WAN024DFY; Start 209; Stop 233
ttcaagatatgacgactggagtata

SEQ ID NO: 423832 - DNA, 25 bp, Artificial
  probe
  misc_feature (1)..(25): SEQ ID NO: 5867; WAN024DFY; Start 210; Stop 234
tcaagatatgacgactggagtatat

SEQ ID NO: 423833 - DNA, 25 bp, Artificial
  probe
  misc_feature (1)..(25): SEQ ID NO: 5867; WAN024DFY; Start 212; Stop 236
aagatatgacgactggagtatattg

SEQ ID NO: 423834 - DNA, 25 bp, Artificial
  probe
  misc_feature (1)..(25): SEQ ID NO: 5867; WAN024DFY; Start 211; Stop 235
caagatatgacgactggagtatatt

SEQ ID NO: 423835 - DNA, 25 bp, Artificial
  probe
  misc_feature (1)..(25): SEQ ID NO: 5867; WAN024DFY; Start 216; Stop 240
tatgacgactggagtatattgcttt

SEQ ID NO: 423836 - DNA, 25 bp, Artificial
  probe
  misc_feature (1)..(25): SEQ ID NO: 5867; WAN024DFY; Start 309; Stop 333
tcgtctgaaatcaattaagcacttt

SEQ ID NO: 423837 - DNA, 25 bp, Artificial
  probe
  misc_feature (1)..(25): SEQ ID NO: 5867; WAN024DFY; Start 217; Stop 241
atgacgactggagtatattgctttc

SEQ ID NO: 423838 - DNA, 25 bp, Artificial
  probe
  misc_feature (1)..(25): SEQ ID NO: 5867; WAN024DFY; Start 227; Stop 251
gagtatattgctttccgttcacata

SEQ ID NO: 423839 - DNA, 25 bp, Artificial
  probe
  misc_feature (1)..(25): SEQ ID NO: 5867; WAN024DFY; Start 303; Stop 327
tcgcattcgtctgaaatcaattaag

SEQ ID NO: 423840 - DNA, 25 bp, Artificial
  probe
  misc_feature (1)..(25): SEQ ID NO: 5867; WAN024DFY; Start 308; Stop 332
ttcgtctgaaatcaattaagcactt

SEQ ID NO: 423841 - DNA, 25 bp, Artificial
  probe
  misc_feature (1)..(25): SEQ ID NO: 5867; WAN024DFY; Start 302; Stop 326
gtcgcattcgtctgaaatcaattaa

SEQ ID NO: 423842 - DNA, 25 bp, Artificial
  probe
  misc_feature (1)..(25): SEQ ID NO: 5867; WAN024DFY; Start 306; Stop 330
cattcgtctgaaatcaattaagcac

SEQ ID NO: 423843 - DNA, 25 bp, Artificial
  probe
  misc_feature (1)..(25): SEQ ID NO: 5867; WAN024DFY; Start 307; Stop 331
attcgtctgaaatcaattaagcact

SEQ ID NO: 423844 - DNA, 25 bp, Artificial
  probe
  misc_feature (1)..(25): SEQ ID NO: 5867; WAN024DFY; Start 305; Stop 329
gcattcgtctgaaatcaattaagca

SEQ ID NO: 423845 - DNA, 25 bp, Artificial
  probe
  misc_feature (1)..(25): SEQ ID NO: 5867; WAN024DFY; Start 287; Stop 311
ttaataggttggagtgtcgcattcg

SEQ ID NO: 423846 - DNA, 25 bp, Artificial
  probe
  misc_feature (1)..(25): SEQ ID NO: 5867; WAN024DFY; Start 785; Stop 809
gaaactggaggagagtgtaactaat

SEQ ID NO: 423847 - DNA, 25 bp, Artificial
  probe
  misc_feature (1)..(25): SEQ ID NO: 5867; WAN024DFY; Start 783; Stop 807
tagaaactggaggagagtgtaacta

SEQ ID NO: 423848 - DNA, 25 bp, Artificial
  probe
  misc_feature (1)..(25): SEQ ID NO: 5867; WAN024DFY; Start 286; Stop 310
tttaataggttggagtgtcgcattc

SEQ ID NO: 423849 - DNA, 25 bp, Artificial
  probe
  misc_feature (1)..(25): SEQ ID NO: 5867; WAN024DFY; Start 782; Stop 806
atagaaactggaggagagtgtaact

SEQ ID NO: 423850 - DNA, 25 bp, Artificial
  probe
  misc_feature (1)..(25): SEQ ID NO: 5867; WAN024DFY; Start 781; Stop 805
catagaaactggaggagagtgtaac

SEQ ID NO: 423851 - DNA, 25 bp, Artificial
  probe
  misc_feature (1)..(25): SEQ ID NO: 5867; WAN024DFY; Start 780; Stop 804
tcatagaaactggaggagagtgtaa

SEQ ID NO: 423852 - DNA, 25 bp, Artificial
  probe
  misc_feature (1)..(25): SEQ ID NO: 5867; WAN024DFY; Start 779; Stop 803
ttcatagaaactggaggagagtgta

SEQ ID NO: 423853 - DNA, 25 bp, Artificial
  probe
  misc_feature (1)..(25): SEQ ID NO: 5867; WAN024DFY; Start 204; Stop 228
tttacttcaagatatgacgactgga

SEQ ID NO: 423854 - DNA, 25 bp, Artificial
  probe
  misc_feature (1)..(25): SEQ ID NO: 5867; WAN024DFY; Start 784; Stop 808
agaaactggaggagagtgtaactaa

SEQ ID NO: 423855 - DNA, 25 bp, Artificial
  probe
  misc_feature (1)..(25): SEQ ID NO: 5867; WAN024DFY; Start 775; Stop 799
tctgttcatagaaactggaggagag

SEQ ID NO: 423856 - DNA, 25 bp, Artificial
  probe
  misc_feature (1)..(25): SEQ ID NO: 5867; WAN024DFY; Start 228; Stop 252
agtatattgctttccgttcacatat

SEQ ID NO: 423857 - DNA, 25 bp, Artificial
  probe
  misc_feature (1)..(25): SEQ ID NO: 5868; WAN024CCA; Start 274; Stop 298
acctatctcaatatgcgttccatta

SEQ ID NO: 423858 - DNA, 25 bp, Artificial
  probe
  misc_feature (1)..(25): SEQ ID NO: 5868; WAN024CCA; Start 273; Stop 297
aacctatctcaatatgcgttccatt

SEQ ID NO: 423859 - DNA, 25 bp, Artificial
  probe
  misc_feature (1)..(25): SEQ ID NO: 5868; WAN024CCA; Start 277; Stop 301
tatctcaatatgcgttccattatcg

SEQ ID NO: 423860 - DNA, 25 bp, Artificial
  probe
  misc_feature (1)..(25): SEQ ID NO: 5868; WAN024CCA; Start 278; Stop 302
atctcaatatgcgttccattatcgg

SEQ ID NO: 423861 - DNA, 25 bp, Artificial
  probe
  misc_feature (1)..(25): SEQ ID NO: 5868; WAN024CCA; Start 547; Stop 571
attgaatacctccatctcatcactg

SEQ ID NO: 423862 - DNA, 25 bp, Artificial
  probe
  misc_feature (1)..(25): SEQ ID NO: 5868; WAN024CCA; Start 546; Stop 570
cattgaatacctccatctcatcact

SEQ ID NO: 423863 - DNA, 25 bp, Artificial
  probe
  misc_feature (1)..(25): SEQ ID NO: 5868; WAN024CCA; Start 275; Stop 299
cctatctcaatatgcgttccattat

SEQ ID NO: 423864 - DNA, 25 bp, Artificial
  probe
  misc_feature (1)..(25): SEQ ID NO: 5868; WAN024CCA; Start 545; Stop 569
ccattgaatacctccatctcatcac

SEQ ID NO: 423865 - DNA, 25 bp, Artificial
  probe
  misc_feature (1)..(25): SEQ ID NO: 5868; WAN024CCA; Start 276; Stop 300
ctatctcaatatgcgttccattatc

SEQ ID NO: 423866 - DNA, 25 bp, Artificial
  probe
  misc_feature (1)..(25): SEQ ID NO: 5868; WAN024CCA; Start 652; Stop 676
tccacactctatctatacaatcaag

SEQ ID NO: 423867 - DNA, 25 bp, Artificial
  probe
  misc_feature (1)..(25): SEQ ID NO: 5868; WAN024CCA; Start 245; Stop 269
aaccaagtcaacgcacagagattat

SEQ ID NO: 423868 - DNA, 25 bp, Artificial
  probe
  misc_feature (1)..(25): SEQ ID NO: 5868; WAN024CCA; Start 653; Stop 677
ccacactctatctatacaatcaaga

SEQ ID NO: 423869 - DNA, 25 bp, Artificial
  probe
  misc_feature (1)..(25): SEQ ID NO: 5868; WAN024CCA; Start 485; Stop 509
aacaagatacatggtatgagagtga

SEQ ID NO: 423870 - DNA, 25 bp, Artificial
  probe
  misc_feature (1)..(25): SEQ ID NO: 5868; WAN024CCA; Start 486; Stop 510
acaagatacatggtatgagagtgat

SEQ ID NO: 423871 - DNA, 25 bp, Artificial
  probe
  misc_feature (1)..(25): SEQ ID NO: 5868; WAN024CCA; Start 837; Stop 861
aacttctatgctgtctcatctcaaa

SEQ ID NO: 423872 - DNA, 25 bp, Artificial
  probe
  misc_feature (1)..(25): SEQ ID NO: 5868; WAN024CCA; Start 836; Stop 860
aaacttctatgctgtctcatctcaa

SEQ ID NO: 423873 - DNA, 25 bp, Artificial
  probe
  misc_feature (1)..(25): SEQ ID NO: 5868; WAN024CCA; Start 835; Stop 859
gaaacttctatgctgtctcatctca

SEQ ID NO: 423874 - DNA, 25 bp, Artificial
  probe
  misc_feature (1)..(25): SEQ ID NO: 5868; WAN024CCA; Start 651; Stop 675
ttccacactctatctatacaatcaa

SEQ ID NO: 423875 - DNA, 25 bp, Artificial
  probe
  misc_feature (1)..(25): SEQ ID NO: 5868; WAN024CCA; Start 272; Stop 296
aaacctatctcaatatgcgttccat

SEQ ID NO: 423876 - DNA, 25 bp, Artificial
  probe
  misc_feature (1)..(25): SEQ ID NO: 5868; WAN024CCA; Start 487; Stop 511
caagatacatggtatgagagtgatc

SEQ ID NO: 423877 - DNA, 25 bp, Artificial
  probe
  misc_feature (1)..(25): SEQ ID NO: 5868; WAN024CCA; Start 647; Stop 671
acctttccacactctatctatacaa

SEQ ID NO: 423878 - DNA, 25 bp, Artificial
  probe
  misc_feature (1)..(25): SEQ ID NO: 5868; WAN024CCA; Start 646; Stop 670
aacctttccacactctatctataca

SEQ ID NO: 423879 - DNA, 25 bp, Artificial
  probe
  misc_feature (1)..(25): SEQ ID NO: 5868; WAN024CCA; Start 834; Stop 858
ggaaacttctatgctgtctcatctc

SEQ ID NO: 423880 - DNA, 25 bp, Artificial
  probe
  misc_feature (1)..(25): SEQ ID NO: 5868; WAN024CCA; Start 548; Stop 572
ttgaatacctccatctcatcactgg

SEQ ID NO: 423881 - DNA, 25 bp, Artificial
  probe
  misc_feature (1)..(25): SEQ ID NO: 5868; WAN024CCA; Start 833; Stop 857
aggaaacttctatgctgtctcatct

SEQ ID NO: 423882 - DNA, 25 bp, Artificial
  probe
  misc_feature (1)..(25): SEQ ID NO: 5868; WAN024CCA; Start 305; Stop 329
ccagcgatcttgtcaatttatttca

SEQ ID NO: 423883 - DNA, 25 bp, Artificial
  probe
  misc_feature (1)..(25): SEQ ID NO: 5868; WAN024CCA; Start 304; Stop 328
accagcgatcttgtcaatttatttc

SEQ ID NO: 423884 - DNA, 25 bp, Artificial
  probe
  misc_feature (1)..(25): SEQ ID NO: 5868; WAN024CCA; Start 271; Stop 295
caaacctatctcaatatgcgttcca

SEQ ID NO: 423885 - DNA, 25 bp, Artificial
  probe
  misc_feature (1)..(25): SEQ ID NO: 5868; WAN024CCA; Start 186; Stop 210
tcttctccgtcaaatcaatatgagt

SEQ ID NO: 423886 - DNA, 25 bp, Artificial
  probe
  misc_feature (1)..(25): SEQ ID NO: 5868; WAN024CCA; Start 246; Stop 270
accaagtcaacgcacagagattatg

SEQ ID NO: 423887 - DNA, 25 bp, Artificial
  probe
  misc_feature (1)..(25): SEQ ID NO: 5868; WAN024CCA; Start 187; Stop 211
cttctccgtcaaatcaatatgagtt

SEQ ID NO: 423888 - DNA, 25 bp, Artificial
  probe
  misc_feature (1)..(25): SEQ ID NO: 5868; WAN024CCA; Start 50; Stop 74
tcggaaaggtctataaagaaatacg

SEQ ID NO: 423889 - DNA, 25 bp, Artificial
  probe
  misc_feature (1)..(25): SEQ ID NO: 5868; WAN024CCA; Start 39; Stop 63
gcgttatgatttcggaaaggtctat

SEQ ID NO: 423890 - DNA, 25 bp, Artificial
  probe
  misc_feature (1)..(25): SEQ ID NO: 5869; WAN024FZZ; Start 86; Stop 110
ttcttgattgtctgtggtacgatac

SEQ ID NO: 423891 - DNA, 25 bp, Artificial
  probe
  misc_feature (1)..(25): SEQ ID NO: 5869; WAN024FZZ; Start 79; Stop 103
gatttctttcttgattgtctgtggt

SEQ ID NO: 423892 - DNA, 25 bp, Artificial
  probe
  misc_feature (1)..(25): SEQ ID NO: 5869; WAN024FZZ; Start 78; Stop 102
ggatttctttcttgattgtctgtgg

SEQ ID NO: 423893 - DNA, 25 bp, Artificial
  probe
  misc_feature (1)..(25): SEQ ID NO: 5869; WAN024FZZ; Start 77; Stop 101
cggatttctttcttgattgtctgtg

SEQ ID NO: 423894 - DNA, 25 bp, Artificial
  probe
  misc_feature (1)..(25): SEQ ID NO: 5869; WAN024FZZ; Start 75; Stop 99
cacggatttctttcttgattgtctg

SEQ ID NO: 423895 - DNA, 25 bp, Artificial
  probe
  misc_feature (1)..(25): SEQ ID NO: 5869; WAN024FZZ; Start 76; Stop 100
acggatttctttcttgattgtctgt

SEQ ID NO: 423896 - DNA, 25 bp, Artificial
  probe
  misc_feature (1)..(25): SEQ ID NO: 5869; WAN024FZZ; Start 630; Stop 654
caatcactgtctcggtctgttcatt

SEQ ID NO: 423897 - DNA, 25 bp, Artificial
  probe
  misc_feature (1)..(25): SEQ ID NO: 5869; WAN024FZZ; Start 80; Stop 104
atttctttcttgattgtctgtggta

SEQ ID NO: 423898 - DNA, 25 bp, Artificial
  probe
  misc_feature (1)..(25): SEQ ID NO: 5869; WAN024FZZ; Start 85; Stop 109
tttcttgattgtctgtggtacgata

SEQ ID NO: 423899 - DNA, 25 bp, Artificial
  probe
  misc_feature (1)..(25): SEQ ID NO: 5869; WAN024FZZ; Start 74; Stop 98
tcacggatttctttcttgattgtct

SEQ ID NO: 423900 - DNA, 25 bp, Artificial
  probe
  misc_feature (1)..(25): SEQ ID NO: 5869; WAN024FZZ; Start 73; Stop 97
gtcacggatttctttcttgattgtc

SEQ ID NO: 423901 - DNA, 25 bp, Artificial
  probe
  misc_feature (1)..(25): SEQ ID NO: 5869; WAN024FZZ; Start 81; Stop 105
tttctttcttgattgtctgtggtac

SEQ ID NO: 423902 - DNA, 25 bp, Artificial
  probe
  misc_feature (1)..(25): SEQ ID NO: 5869; WAN024FZZ; Start 27; Stop 51
cttccttgtcctcttccttagcaac

SEQ ID NO: 423903 - DNA, 25 bp, Artificial
  probe
  misc_feature (1)..(25): SEQ ID NO: 5869; WAN024FZZ; Start 84; Stop 108
ctttcttgattgtctgtggtacgat

SEQ ID NO: 423904 - DNA, 25 bp, Artificial
  probe
  misc_feature (1)..(25): SEQ ID NO: 5869; WAN024FZZ; Start 551; Stop 575
aagaggtcatcaatctgtcccatag

SEQ ID NO: 423905 - DNA, 25 bp, Artificial
  probe
  misc_feature (1)..(25): SEQ ID NO: 5869; WAN024FZZ; Start 82; Stop 106
ttctttcttgattgtctgtggtacg

SEQ ID NO: 423906 - DNA, 25 bp, Artificial
  probe
  misc_feature (1)..(25): SEQ ID NO: 5869; WAN024FZZ; Start 1; Stop 25
ttgtttgttgaggctattgatgtcg

SEQ ID NO: 423907 - DNA, 25 bp, Artificial
  probe
  misc_feature (1)..(25): SEQ ID NO: 5869; WAN024FZZ; Start 71; Stop 95
aggtcacggatttctttcttgattg

SEQ ID NO: 423908 - DNA, 25 bp, Artificial
  probe
  misc_feature (1)..(25): SEQ ID NO: 5869; WAN024FZZ; Start 70; Stop 94
caggtcacggatttctttcttgatt

SEQ ID NO: 423909 - DNA, 25 bp, Artificial
  probe
  misc_feature (1)..(25): SEQ ID NO: 5869; WAN024FZZ; Start 553; Stop 577
gaggtcatcaatctgtcccatagtc

SEQ ID NO: 423910 - DNA, 25 bp, Artificial
  probe
  misc_feature (1)..(25): SEQ ID NO: 5869; WAN024FZZ; Start 28; Stop 52
ttccttgtcctcttccttagcaact

SEQ ID NO: 423911 - DNA, 25 bp, Artificial
  probe
  misc_feature (1)..(25): SEQ ID NO: 5869; WAN024FZZ; Start 26; Stop 50
acttccttgtcctcttccttagcaa

SEQ ID NO: 423912 - DNA, 25 bp, Artificial
  probe
  misc_feature (1)..(25): SEQ ID NO: 5869; WAN024FZZ; Start 415; Stop 439
cttgatatccgagtgcatgtacttg

SEQ ID NO: 423913 - DNA, 25 bp, Artificial
  probe
  misc_feature (1)..(25): SEQ ID NO: 5869; WAN024FZZ; Start 414; Stop 438
tcttgatatccgagtgcatgtactt

SEQ ID NO: 423914 - DNA, 25 bp, Artificial
  probe
  misc_feature (1)..(25): SEQ ID NO: 5869; WAN024FZZ; Start 72; Stop 96
ggtcacggatttctttcttgattgt

SEQ ID NO: 423915 - DNA, 25 bp, Artificial
  probe
  misc_feature (1)..(25): SEQ ID NO: 5869; WAN024FZZ; Start 416; Stop 440
ttgatatccgagtgcatgtacttga

SEQ ID NO: 423916 - DNA, 25 bp, Artificial
  probe
  misc_feature (1)..(25): SEQ ID NO: 5869; WAN024FZZ; Start 631; Stop 655
aatcactgtctcggtctgttcattt

SEQ ID NO: 423917 - DNA, 25 bp, Artificial
  probe
  misc_feature (1)..(25): SEQ ID NO: 5869; WAN024FZZ; Start 629; Stop 653
tcaatcactgtctcggtctgttcat

SEQ ID NO: 423918 - DNA, 25 bp, Artificial
  probe
  misc_feature (1)..(25): SEQ ID NO: 5869; WAN024FZZ; Start 83; Stop 107
tctttcttgattgtctgtggtacga

SEQ ID NO: 423919 - DNA, 25 bp, Artificial
  probe
  misc_feature (1)..(25): SEQ ID NO: 5869; WAN024FZZ; Start 69; Stop 93
tcaggtcacggatttctttcttgat

SEQ ID NO: 423920 - DNA, 25 bp, Artificial
  probe
  misc_feature (1)..(25): SEQ ID NO: 5869; WAN024FZZ; Start 68; Stop 92
atcaggtcacggatttctttcttga

SEQ ID NO: 423921 - DNA, 25 bp, Artificial
  probe
  misc_feature (1)..(25): SEQ ID NO: 5869; WAN024FZZ; Start 413; Stop 437
gtcttgatatccgagtgcatgtact

SEQ ID NO: 423922 - DNA, 25 bp, Artificial
  probe
  misc_feature (1)..(25): SEQ ID NO: 5869; WAN024FZZ; Start 552; Stop 576
agaggtcatcaatctgtcccatagt

SEQ ID NO: 423923 - DNA, 25 bp, Artificial
  probe
  misc_feature (1)..(25): SEQ ID NO: 5870; WAN024DYV; Start 56; Stop 80
aatacttgagcagaaatggcagatt

SEQ ID NO: 423924 - DNA, 25 bp, Artificial
  probe
  misc_feature (1)..(25): SEQ ID NO: 5870; WAN024DYV; Start 66; Stop 90
cagaaatggcagatttatcaaggaa

SEQ ID NO: 423925 - DNA, 25 bp, Artificial
  probe
  misc_feature (1)..(25): SEQ ID NO: 5870; WAN024DYV; Start 63; Stop 87
gagcagaaatggcagatttatcaag

SEQ ID NO: 423926 - DNA, 25 bp, Artificial
  probe
  misc_feature (1)..(25): SEQ ID NO: 5870; WAN024DYV; Start 60; Stop 84
cttgagcagaaatggcagatttatc

SEQ ID NO: 423927 - DNA, 25 bp, Artificial
  probe
  misc_feature (1)..(25): SEQ ID NO: 5870; WAN024DYV; Start 58; Stop 82
tacttgagcagaaatggcagattta

SEQ ID NO: 423928 - DNA, 25 bp, Artificial
  probe
  misc_feature (1)..(25): SEQ ID NO: 5870; WAN024DYV; Start 55; Stop 79
caatacttgagcagaaatggcagat

SEQ ID NO: 423929 - DNA, 25 bp, Artificial
  probe
  misc_feature (1)..(25): SEQ ID NO: 5870; WAN024DYV; Start 62; Stop 86
tgagcagaaatggcagatttatcaa

SEQ ID NO: 423930 - DNA, 25 bp, Artificial
  probe
  misc_feature (1)..(25): SEQ ID NO: 5870; WAN024DYV; Start 61; Stop 85
ttgagcagaaatggcagatttatca

SEQ ID NO: 423931 - DNA, 25 bp, Artificial
  probe
  misc_feature (1)..(25): SEQ ID NO: 5870; WAN024DYV; Start 59; Stop 83
acttgagcagaaatggcagatttat

SEQ ID NO: 423932 - DNA, 25 bp, Artificial
  probe
  misc_feature (1)..(25): SEQ ID NO: 5870; WAN024DYV; Start 57; Stop 81
atacttgagcagaaatggcagattt

SEQ ID NO: 423933 - DNA, 25 bp, Artificial
  probe
  misc_feature (1)..(25): SEQ ID NO: 5870; WAN024DYV; Start 67; Stop 91
agaaatggcagatttatcaaggaaa

SEQ ID NO: 423934 - DNA, 25 bp, Artificial
  probe
  misc_feature (1)..(25): SEQ ID NO: 5870; WAN024DYV; Start 65; Stop 89
gcagaaatggcagatttatcaagga

SEQ ID NO: 423935 - DNA, 25 bp, Artificial
  probe
  misc_feature (1)..(25): SEQ ID NO: 5870; WAN024DYV; Start 64; Stop 88
agcagaaatggcagatttatcaagg

SEQ ID NO: 423936 - DNA, 25 bp, Artificial
  probe
  misc_feature (1)..(25): SEQ ID NO: 5870; WAN024DYV; Start 13; Stop 37
attttggtcagcatagtgttctttt

SEQ ID NO: 423937 - DNA, 25 bp, Artificial
  probe
  misc_feature (1)..(25): SEQ ID NO: 5870; WAN024DYV; Start 165; Stop 189
caatcatttgtggtgctttacgttc

SEQ ID NO: 423938 - DNA, 25 bp, Artificial
  probe
  misc_feature (1)..(25): SEQ ID NO: 5870; WAN024DYV; Start 12; Stop 36
tattttggtcagcatagtgttcttt

SEQ ID NO: 423939 - DNA, 25 bp, Artificial
  probe
  misc_feature (1)..(25): SEQ ID NO: 5870; WAN024DYV; Start 11; Stop 35
atattttggtcagcatagtgttctt

SEQ ID NO: 423940 - DNA, 25 bp, Artificial
  probe
  misc_feature (1)..(25): SEQ ID NO: 5870; WAN024DYV; Start 166; Stop 190
aatcatttgtggtgctttacgttcg

SEQ ID NO: 423941 - DNA, 25 bp, Artificial
  probe
  misc_feature (1)..(25): SEQ ID NO: 5870; WAN024DYV; Start 54; Stop 78
gcaatacttgagcagaaatggcaga

SEQ ID NO: 423942 - DNA, 25 bp, Artificial
  probe
  misc_feature (1)..(25): SEQ ID NO: 5870; WAN024DYV; Start 68; Stop 92
gaaatggcagatttatcaaggaaaa

SEQ ID NO: 423943 - DNA, 25 bp, Artificial
  probe
  misc_feature (1)..(25): SEQ ID NO: 5870; WAN024DYV; Start 10; Stop 34
aatattttggtcagcatagtgttct

SEQ ID NO: 423944 - DNA, 25 bp, Artificial
  probe
  misc_feature (1)..(25): SEQ ID NO: 5870; WAN024DYV; Start 9; Stop 33
caatattttggtcagcatagtgttc

SEQ ID NO: 423945 - DNA, 25 bp, Artificial
  probe
  misc_feature (1)..(25): SEQ ID NO: 5870; WAN024DYV; Start 123; Stop 147
tttcaaaggcttggctgttcatttt

SEQ ID NO: 423946 - DNA, 25 bp, Artificial
  probe
  misc_feature (1)..(25): SEQ ID NO: 5870; WAN024DYV; Start 122; Stop 146
ttttcaaaggcttggctgttcattt

SEQ ID NO: 423947 - DNA, 25 bp, Artificial
  probe
  misc_feature (1)..(25): SEQ ID NO: 5870; WAN024DYV; Start 213; Stop 237
ggaaagcaatgtctcccatttctga

SEQ ID NO: 423948 - DNA, 25 bp, Artificial
  probe
  misc_feature (1)..(25): SEQ ID NO: 5870; WAN024DYV; Start 167; Stop 191
atcatttgtggtgctttacgttcga

SEQ ID NO: 423949 - DNA, 25 bp, Artificial
  probe
  misc_feature (1)..(25): SEQ ID NO: 5870; WAN024DYV; Start 41; Stop 65
gtggtaacagcttgcaatacttgag

SEQ ID NO: 423950 - DNA, 25 bp, Artificial
  probe
  misc_feature (1)..(25): SEQ ID NO: 5870; WAN024DYV; Start 170; Stop 194
atttgtggtgctttacgttcgactt

SEQ ID NO: 423951 - DNA, 25 bp, Artificial
  probe
  misc_feature (1)..(25): SEQ ID NO: 5870; WAN024DYV; Start 40; Stop 64
agtggtaacagcttgcaatacttga

SEQ ID NO: 423952 - DNA, 25 bp, Artificial
  probe
  misc_feature (1)..(25): SEQ ID NO: 5870; WAN024DYV; Start 39; Stop 63
cagtggtaacagcttgcaatacttg

SEQ ID NO: 423953 - DNA, 25 bp, Artificial
  probe
  misc_feature (1)..(25): SEQ ID NO: 5870; WAN024DYV; Start 38; Stop 62
tcagtggtaacagcttgcaatactt

SEQ ID NO: 423954 - DNA, 25 bp, Artificial
  probe
  misc_feature (1)..(25): SEQ ID NO: 5870; WAN024DYV; Start 37; Stop 61
ttcagtggtaacagcttgcaatact

SEQ ID NO: 423955 - DNA, 25 bp, Artificial
  probe
  misc_feature (1)..(25): SEQ ID NO: 5870; WAN024DYV; Start 171; Stop 195
tttgtggtgctttacgttcgacttt

SEQ ID NO: 423956 - DNA, 25 bp, Artificial
  probe
  misc_feature (1)..(25): SEQ ID NO: 5871; WAN024A27; Start 50; Stop 74
cagaacagaatgaagcacaagataa

SEQ ID NO: 423957 - DNA, 25 bp, Artificial
  probe
  misc_feature (1)..(25): SEQ ID NO: 5871; WAN024A27; Start 49; Stop 73
tcagaacagaatgaagcacaagata

SEQ ID NO: 423958 - DNA, 25 bp, Artificial
  probe
  misc_feature (1)..(25): SEQ ID NO: 5871; WAN024A27; Start 45; Stop 69
taagtcagaacagaatgaagcacaa

SEQ ID NO: 423959 - DNA, 25 bp, Artificial
  probe
  misc_feature (1)..(25): SEQ ID NO: 5871; WAN024A27; Start 44; Stop 68
ttaagtcagaacagaatgaagcaca

SEQ ID NO: 423960 - DNA, 25 bp, Artificial
  probe
  misc_feature (1)..(25): SEQ ID NO: 5871; WAN024A27; Start 48; Stop 72
gtcagaacagaatgaagcacaagat

SEQ ID NO: 423961 - DNA, 25 bp, Artificial
  probe
  misc_feature (1)..(25): SEQ ID NO: 5871; WAN024A27; Start 46; Stop 70
aagtcagaacagaatgaagcacaag

SEQ ID NO: 423962 - DNA, 25 bp, Artificial
  probe
  misc_feature (1)..(25): SEQ ID NO: 5871; WAN024A27; Start 47; Stop 71
agtcagaacagaatgaagcacaaga

SEQ ID NO: 423963 - DNA, 25 bp, Artificial
  probe
  misc_feature (1)..(25): SEQ ID NO: 5871; WAN024A27; Start 51; Stop 75
agaacagaatgaagcacaagataaa

SEQ ID NO: 423964 - DNA, 25 bp, Artificial
  probe
  misc_feature (1)..(25): SEQ ID NO: 5871; WAN024A27; Start 7; Stop 31
tatcctcatcatttgtattggtagc

SEQ ID NO: 423965 - DNA, 25 bp, Artificial
  probe
  misc_feature (1)..(25): SEQ ID NO: 5871; WAN024A27; Start 43; Stop 67
tttaagtcagaacagaatgaagcac

SEQ ID NO: 423966 - DNA, 25 bp, Artificial
  probe
  misc_feature (1)..(25): SEQ ID NO: 5871; WAN024A27; Start 123; Stop 147
taacttaaggccagatagctcattc

SEQ ID NO: 423967 - DNA, 25 bp, Artificial
  probe
  misc_feature (1)..(25): SEQ ID NO: 5871; WAN024A27; Start 122; Stop 146
ttaacttaaggccagatagctcatt

SEQ ID NO: 423968 - DNA, 25 bp, Artificial
  probe
  misc_feature (1)..(25): SEQ ID NO: 5871; WAN024A27; Start 126; Stop 150
cttaaggccagatagctcattcatt

SEQ ID NO: 423969 - DNA, 25 bp, Artificial
  probe
  misc_feature (1)..(25): SEQ ID NO: 5871; WAN024A27; Start 8; Stop 32
atcctcatcatttgtattggtagct

SEQ ID NO: 423970 - DNA, 25 bp, Artificial
  probe
  misc_feature (1)..(25): SEQ ID NO: 5871; WAN024A27; Start 125; Stop 149
acttaaggccagatagctcattcat

SEQ ID NO: 423971 - DNA, 25 bp, Artificial
  probe
  misc_feature (1)..(25): SEQ ID NO: 5871; WAN024A27; Start 124; Stop 148
aacttaaggccagatagctcattca

SEQ ID NO: 423972 - DNA, 25 bp, Artificial
  probe
  misc_feature (1)..(25): SEQ ID NO: 5871; WAN024A27; Start 121; Stop 145
cttaacttaaggccagatagctcat

SEQ ID NO: 423973 - DNA, 25 bp, Artificial
  probe
  misc_feature (1)..(25): SEQ ID NO: 5871; WAN024A27; Start 127; Stop 151
ttaaggccagatagctcattcattt

SEQ ID NO: 423974 - DNA, 25 bp, Artificial
  probe
  misc_feature (1)..(25): SEQ ID NO: 5871; WAN024A27; Start 6; Stop 30
ttatcctcatcatttgtattggtag

SEQ ID NO: 423975 - DNA, 25 bp, Artificial
  probe
  misc_feature (1)..(25): SEQ ID NO: 5871; WAN024A27; Start 9; Stop 33
tcctcatcatttgtattggtagcta

SEQ ID NO: 423976 - DNA, 25 bp, Artificial
  probe
  misc_feature (1)..(25): SEQ ID NO: 5871; WAN024A27; Start 52; Stop 76
gaacagaatgaagcacaagataaaa

SEQ ID NO: 423977 - DNA, 25 bp, Artificial
  probe
  misc_feature (1)..(25): SEQ ID NO: 5871; WAN024A27; Start 42; Stop 66
ttttaagtcagaacagaatgaagca

SEQ ID NO: 423978 - DNA, 25 bp, Artificial
  probe
  misc_feature (1)..(25): SEQ ID NO: 5871; WAN024A27; Start 5; Stop 29
tttatcctcatcatttgtattggta

SEQ ID NO: 423979 - DNA, 25 bp, Artificial
  probe
  misc_feature (1)..(25): SEQ ID NO: 5871; WAN024A27; Start 33; Stop 57
accttttcattttaagtcagaacag

SEQ ID NO: 423980 - DNA, 25 bp, Artificial
  probe
  misc_feature (1)..(25): SEQ ID NO: 5871; WAN024A27; Start 41; Stop 65
attttaagtcagaacagaatgaagc

SEQ ID NO: 423981 - DNA, 25 bp, Artificial
  probe
  misc_feature (1)..(25): SEQ ID NO: 5871; WAN024A27; Start 30; Stop 54
gctaccttttcattttaagtcagaa

SEQ ID NO: 423982 - DNA, 25 bp, Artificial
  probe
  misc_feature (1)..(25): SEQ ID NO: 5871; WAN024A27; Start 34; Stop 58
ccttttcattttaagtcagaacaga

SEQ ID NO: 423983 - DNA, 25 bp, Artificial
  probe
  misc_feature (1)..(25): SEQ ID NO: 5871; WAN024A27; Start 29; Stop 53
agctaccttttcattttaagtcaga

SEQ ID NO: 423984 - DNA, 25 bp, Artificial
  probe
  misc_feature (1)..(25): SEQ ID NO: 5871; WAN024A27; Start 4; Stop 28
ttttatcctcatcatttgtattggt

SEQ ID NO: 423985 - DNA, 25 bp, Artificial
  probe
  misc_feature (1)..(25): SEQ ID NO: 5871; WAN024A27; Start 32; Stop 56
taccttttcattttaagtcagaaca

SEQ ID NO: 423986 - DNA, 25 bp, Artificial
  probe
  misc_feature (1)..(25): SEQ ID NO: 5871; WAN024A27; Start 3; Stop 27
gttttatcctcatcatttgtattgg

SEQ ID NO: 423987 - DNA, 25 bp, Artificial
  probe
  misc_feature (1)..(25): SEQ ID NO: 5871; WAN024A27; Start 31; Stop 55
ctaccttttcattttaagtcagaac

SEQ ID NO: 423988 - DNA, 25 bp, Artificial
  probe
  misc_feature (1)..(25): SEQ ID NO: 5871; WAN024A27; Start 35; Stop 59
cttttcattttaagtcagaacagaa

SEQ ID NO: 423989 - DNA, 25 bp, Artificial
  probe
  misc_feature (1)..(25): SEQ ID NO: 5872; WAN024GOD; Start 40; Stop 64
cttaaagacataggaacctgctaca

SEQ ID NO: 423990 - DNA, 25 bp, Artificial
  probe
  misc_feature (1)..(25): SEQ ID NO: 5872; WAN024GOD; Start 42; Stop 66
taaagacataggaacctgctacaaa

SEQ ID NO: 423991 - DNA, 25 bp, Artificial
  probe
  misc_feature (1)..(25): SEQ ID NO: 5872; WAN024GOD; Start 41; Stop 65
ttaaagacataggaacctgctacaa

SEQ ID NO: 423992 - DNA, 25 bp, Artificial
  probe
  misc_feature (1)..(25): SEQ ID NO: 5872; WAN024GOD; Start 25; Stop 49
ctcattgacttctcccttaaagaca

SEQ ID NO: 423993 - DNA, 25 bp, Artificial
  probe
  misc_feature (1)..(25): SEQ ID NO: 5872; WAN024GOD; Start 26; Stop 50
tcattgacttctcccttaaagacat

SEQ ID NO: 423994 - DNA, 25 bp, Artificial
  probe
  misc_feature (1)..(25): SEQ ID NO: 5872; WAN024GOD; Start 24; Stop 48
gctcattgacttctcccttaaagac

SEQ ID NO: 423995 - DNA, 25 bp, Artificial
  probe
  misc_feature (1)..(25): SEQ ID NO: 5872; WAN024GOD; Start 92; Stop 116
tgagcaatagtttggtcatcaatcc

SEQ ID NO: 423996 - DNA, 25 bp, Artificial
  probe
  misc_feature (1)..(25): SEQ ID NO: 5872; WAN024GOD; Start 27; Stop 51
cattgacttctcccttaaagacata

SEQ ID NO: 423997 - DNA, 25 bp, Artificial
  probe
  misc_feature (1)..(25): SEQ ID NO: 5872; WAN024GOD; Start 81; Stop 105
cttctttggcttgagcaatagtttg

SEQ ID NO: 423998 - DNA, 25 bp, Artificial
  probe
  misc_feature (1)..(25): SEQ ID NO: 5872; WAN024GOD; Start 29; Stop 53
ttgacttctcccttaaagacatagg

SEQ ID NO: 423999 - DNA, 25 bp, Artificial
  probe
  misc_feature (1)..(25): SEQ ID NO: 5872; WAN024GOD; Start 93; Stop 117
gagcaatagtttggtcatcaatccc

SEQ ID NO: 424000 - DNA, 25 bp, Artificial
  probe
  misc_feature (1)..(25): SEQ ID NO: 5872; WAN024GOD; Start 39; Stop 63
ccttaaagacataggaacctgctac

SEQ ID NO: 424001 - DNA, 25 bp, Artificial
  probe
  misc_feature (1)..(25): SEQ ID NO: 5872; WAN024GOD; Start 28; Stop 52
attgacttctcccttaaagacatag

SEQ ID NO: 424002 - DNA, 25 bp, Artificial
  probe
  misc_feature (1)..(25): SEQ ID NO: 5872; WAN024GOD; Start 33; Stop 57
cttctcccttaaagacataggaacc

SEQ ID NO: 424003 - DNA, 25 bp, Artificial
  probe
  misc_feature (1)..(25): SEQ ID NO: 5872; WAN024GOD; Start 32; Stop 56
acttctcccttaaagacataggaac

SEQ ID NO: 424004 - DNA, 25 bp, Artificial
  probe
  misc_feature (1)..(25): SEQ ID NO: 5872; WAN024GOD; Start 30; Stop 54
tgacttctcccttaaagacatagga

SEQ ID NO: 424005 - DNA, 25 bp, Artificial
  probe
  misc_feature (1)..(25): SEQ ID NO: 5872; WAN024GOD; Start 31; Stop 55
gacttctcccttaaagacataggaa

SEQ ID NO: 424006 - DNA, 25 bp, Artificial
  probe
  misc_feature (1)..(25): SEQ ID NO: 5872; WAN024GOD; Start 14; Stop 38
gtttgtactcgctcattgacttctc

SEQ ID NO: 424007 - DNA, 25 bp, Artificial
  probe
  misc_feature (1)..(25): SEQ ID NO: 5872; WAN024GOD; Start 34; Stop 58
ttctcccttaaagacataggaacct

SEQ ID NO: 424008 - DNA, 25 bp, Artificial
  probe
  misc_feature (1)..(25): SEQ ID NO: 5872; WAN024GOD; Start 21; Stop 45
ctcgctcattgacttctcccttaaa

SEQ ID NO: 424009 - DNA, 25 bp, Artificial
  probe
  misc_feature (1)..(25): SEQ ID NO: 5872; WAN024GOD; Start 38; Stop 62
cccttaaagacataggaacctgcta

SEQ ID NO: 424010 - DNA, 25 bp, Artificial
  probe
  misc_feature (1)..(25): SEQ ID NO: 5872; WAN024GOD; Start 35; Stop 59
tctcccttaaagacataggaacctg

SEQ ID NO: 424011 - DNA, 25 bp, Artificial
  probe
  misc_feature (1)..(25): SEQ ID NO: 5872; WAN024GOD; Start 22; Stop 46
tcgctcattgacttctcccttaaag

SEQ ID NO: 424012 - DNA, 25 bp, Artificial
  probe
  misc_feature (1)..(25): SEQ ID NO: 5872; WAN024GOD; Start 23; Stop 47
cgctcattgacttctcccttaaaga

SEQ ID NO: 424013 - DNA, 25 bp, Artificial
  probe
  misc_feature (1)..(25): SEQ ID NO: 5872; WAN024GOD; Start 19; Stop 43
tactcgctcattgacttctccctta

SEQ ID NO: 424014 - DNA, 25 bp, Artificial
  probe
  misc_feature (1)..(25): SEQ ID NO: 5872; WAN024GOD; Start 82; Stop 106
ttctttggcttgagcaatagtttgg

SEQ ID NO: 424015 - DNA, 25 bp, Artificial
  probe
  misc_feature (1)..(25): SEQ ID NO: 5872; WAN024GOD; Start 13; Stop 37
agtttgtactcgctcattgacttct

SEQ ID NO: 424016 - DNA, 25 bp, Artificial
  probe
  misc_feature (1)..(25): SEQ ID NO: 5872; WAN024GOD; Start 96; Stop 120
caatagtttggtcatcaatcccacc

SEQ ID NO: 424017 - DNA, 25 bp, Artificial
  probe
  misc_feature (1)..(25): SEQ ID NO: 5872; WAN024GOD; Start 15; Stop 39
tttgtactcgctcattgacttctcc

SEQ ID NO: 424018 - DNA, 25 bp, Artificial
  probe
  misc_feature (1)..(25): SEQ ID NO: 5872; WAN024GOD; Start 84; Stop 108
ctttggcttgagcaatagtttggtc

SEQ ID NO: 424019 - DNA, 25 bp, Artificial
  probe
  misc_feature (1)..(25): SEQ ID NO: 5872; WAN024GOD; Start 43; Stop 67
aaagacataggaacctgctacaaaa

SEQ ID NO: 424020 - DNA, 25 bp, Artificial
  probe
  misc_feature (1)..(25): SEQ ID NO: 5872; WAN024GOD; Start 20; Stop 44
actcgctcattgacttctcccttaa

SEQ ID NO: 424021 - DNA, 25 bp, Artificial
  probe
  misc_feature (1)..(25): SEQ ID NO: 5872; WAN024GOD; Start 91; Stop 115
ttgagcaatagtttggtcatcaatc

SEQ ID NO: 424022 - DNA, 25 bp, Artificial
  probe
  misc_feature (1)..(25): SEQ ID NO: 5873; WAN024FFB; Start 410; Stop 434
ctgaattggacgagattacctatgt

SEQ ID NO: 424023 - DNA, 25 bp, Artificial
  probe
  misc_feature (1)..(25): SEQ ID NO: 5873; WAN024FFB; Start 461; Stop 485
ttaaggatgtcagtgagttagagag

SEQ ID NO: 424024 - DNA, 25 bp, Artificial
  probe
  misc_feature (1)..(25): SEQ ID NO: 5873; WAN024FFB; Start 411; Stop 435
tgaattggacgagattacctatgta

SEQ ID NO: 424025 - DNA, 25 bp, Artificial
  probe
  misc_feature (1)..(25): SEQ ID NO: 5873; WAN024FFB; Start 462; Stop 486
taaggatgtcagtgagttagagagc

SEQ ID NO: 424026 - DNA, 25 bp, Artificial
  probe
  misc_feature (1)..(25): SEQ ID NO: 5873; WAN024FFB; Start 409; Stop 433
gctgaattggacgagattacctatg

SEQ ID NO: 424027 - DNA, 25 bp, Artificial
  probe
  misc_feature (1)..(25): SEQ ID NO: 5873; WAN024FFB; Start 413; Stop 437
aattggacgagattacctatgtacg

SEQ ID NO: 424028 - DNA, 25 bp, Artificial
  probe
  misc_feature (1)..(25): SEQ ID NO: 5873; WAN024FFB; Start 412; Stop 436
gaattggacgagattacctatgtac

SEQ ID NO: 424029 - DNA, 25 bp, Artificial
  probe
  misc_feature (1)..(25): SEQ ID NO: 5873; WAN024FFB; Start 310; Stop 334
atcaacatggtagtcaatcgtatcg

SEQ ID NO: 424030 - DNA, 25 bp, Artificial
  probe
  misc_feature (1)..(25): SEQ ID NO: 5873; WAN024FFB; Start 309; Stop 333
aatcaacatggtagtcaatcgtatc

SEQ ID NO: 424031 - DNA, 25 bp, Artificial
  probe
  misc_feature (1)..(25): SEQ ID NO: 5873; WAN024FFB; Start 408; Stop 432
ggctgaattggacgagattacctat

SEQ ID NO: 424032 - DNA, 25 bp, Artificial
  probe
  misc_feature (1)..(25): SEQ ID NO: 5873; WAN024FFB; Start 403; Stop 427
gagttggctgaattggacgagatta

SEQ ID NO: 424033 - DNA, 25 bp, Artificial
  probe
  misc_feature (1)..(25): SEQ ID NO: 5873; WAN024FFB; Start 186; Stop 210
acgagtagaagaaagaaccttagtg

SEQ ID NO: 424034 - DNA, 25 bp, Artificial
  probe
  misc_feature (1)..(25): SEQ ID NO: 5873; WAN024FFB; Start 183; Stop 207
cgaacgagtagaagaaagaacctta

SEQ ID NO: 424035 - DNA, 25 bp, Artificial
  probe
  misc_feature (1)..(25): SEQ ID NO: 5873; WAN024FFB; Start 187; Stop 211
cgagtagaagaaagaaccttagtgg

SEQ ID NO: 424036 - DNA, 25 bp, Artificial
  probe
  misc_feature (1)..(25): SEQ ID NO: 5873; WAN024FFB; Start 185; Stop 209
aacgagtagaagaaagaaccttagt

SEQ ID NO: 424037 - DNA, 25 bp, Artificial
  probe
  misc_feature (1)..(25): SEQ ID NO: 5873; WAN024FFB; Start 181; Stop 205
tacgaacgagtagaagaaagaacct

SEQ ID NO: 424038 - DNA, 25 bp, Artificial
  probe
  misc_feature (1)..(25): SEQ ID NO: 5873; WAN024FFB; Start 460; Stop 484
tttaaggatgtcagtgagttagaga

SEQ ID NO: 424039 - DNA, 25 bp, Artificial
  probe
  misc_feature (1)..(25): SEQ ID NO: 5873; WAN024FFB; Start 184; Stop 208
gaacgagtagaagaaagaaccttag

SEQ ID NO: 424040 - DNA, 25 bp, Artificial
  probe
  misc_feature (1)..(25): SEQ ID NO: 5873; WAN024FFB; Start 404; Stop 428
agttggctgaattggacgagattac

SEQ ID NO: 424041 - DNA, 25 bp, Artificial
  probe
  misc_feature (1)..(25): SEQ ID NO: 5873; WAN024FFB; Start 365; Stop 389
aaattcaaagtgaggacattggttc

SEQ ID NO: 424042 - DNA, 25 bp, Artificial
  probe
  misc_feature (1)..(25): SEQ ID NO: 5873; WAN024FFB; Start 364; Stop 388
gaaattcaaagtgaggacattggtt

SEQ ID NO: 424043 - DNA, 25 bp, Artificial
  probe
  misc_feature (1)..(25): SEQ ID NO: 5873; WAN024FFB; Start 174; Stop 198
tacaacctacgaacgagtagaagaa

SEQ ID NO: 424044 - DNA, 25 bp, Artificial
  probe
  misc_feature (1)..(25): SEQ ID NO: 5873; WAN024FFB; Start 173; Stop 197
ttacaacctacgaacgagtagaaga

SEQ ID NO: 424045 - DNA, 25 bp, Artificial
  probe
  misc_feature (1)..(25): SEQ ID NO: 5873; WAN024FFB; Start 366; Stop 390
aattcaaagtgaggacattggttca

SEQ ID NO: 424046 - DNA, 25 bp, Artificial
  probe
  misc_feature (1)..(25): SEQ ID NO: 5873; WAN024FFB; Start 407; Stop 431
tggctgaattggacgagattaccta

SEQ ID NO: 424047 - DNA, 25 bp, Artificial
  probe
  misc_feature (1)..(25): SEQ ID NO: 5873; WAN024FFB; Start 307; Stop 331
gaaatcaacatggtagtcaatcgta

SEQ ID NO: 424048 - DNA, 25 bp, Artificial
  probe
  misc_feature (1)..(25): SEQ ID NO: 5873; WAN024FFB; Start 362; Stop 386
atgaaattcaaagtgaggacattgg

SEQ ID NO: 424049 - DNA, 25 bp, Artificial
  probe
  misc_feature (1)..(25): SEQ ID NO: 5873; WAN024FFB; Start 182; Stop 206
acgaacgagtagaagaaagaacctt

SEQ ID NO: 424050 - DNA, 25 bp, Artificial
  probe
  misc_feature (1)..(25): SEQ ID NO: 5873; WAN024FFB; Start 465; Stop 489
ggatgtcagtgagttagagagcttg

SEQ ID NO: 424051 - DNA, 25 bp, Artificial
  probe
  misc_feature (1)..(25): SEQ ID NO: 5873; WAN024FFB; Start 363; Stop 387
tgaaattcaaagtgaggacattggt

SEQ ID NO: 424052 - DNA, 25 bp, Artificial
  probe
  misc_feature (1)..(25): SEQ ID NO: 5873; WAN024FFB; Start 305; Stop 329
atgaaatcaacatggtagtcaatcg

SEQ ID NO: 424053 - DNA, 25 bp, Artificial
  probe
  misc_feature (1)..(25): SEQ ID NO: 5873; WAN024FFB; Start 464; Stop 488
aggatgtcagtgagttagagagctt

SEQ ID NO: 424054 - DNA, 25 bp, Artificial
  probe
  misc_feature (1)..(25): SEQ ID NO: 5873; WAN024FFB; Start 463; Stop 487
aaggatgtcagtgagttagagagct

SEQ ID NO: 424055 - DNA, 25 bp, Artificial
  probe
  misc_feature (1)..(25): SEQ ID NO: 5874; WAN024C42; Start 6; Stop 30
ttgtcatctattatctcctattggt

SEQ ID NO: 424056 - DNA, 25 bp, Artificial
  probe
  misc_feature (1)..(25): SEQ ID NO: 5874; WAN024C42; Start 50; Stop 74
cagaaatcctaacattgctaaatca

SEQ ID NO: 424057 - DNA, 25 bp, Artificial
  probe
  misc_feature (1)..(25): SEQ ID NO: 5874; WAN024C42; Start 52; Stop 76
gaaatcctaacattgctaaatcaga

SEQ ID NO: 424058 - DNA, 25 bp, Artificial
  probe
  misc_feature (1)..(25): SEQ ID NO: 5874; WAN024C42; Start 51; Stop 75
agaaatcctaacattgctaaatcag

SEQ ID NO: 424059 - DNA, 25 bp, Artificial
  probe
  misc_feature (1)..(25): SEQ ID NO: 5874; WAN024C42; Start 49; Stop 73
tcagaaatcctaacattgctaaatc

SEQ ID NO: 424060 - DNA, 25 bp, Artificial
  probe
  misc_feature (1)..(25): SEQ ID NO: 5874; WAN024C42; Start 7; Stop 31
tgtcatctattatctcctattggta

SEQ ID NO: 424061 - DNA, 25 bp, Artificial
  probe
  misc_feature (1)..(25): SEQ ID NO: 5874; WAN024C42; Start 20; Stop 44
ctcctattggtaacattataacaca

SEQ ID NO: 424062 - DNA, 25 bp, Artificial
  probe
  misc_feature (1)..(25): SEQ ID NO: 5874; WAN024C42; Start 48; Stop 72
atcagaaatcctaacattgctaaat

SEQ ID NO: 424063 - DNA, 25 bp, Artificial
  probe
  misc_feature (1)..(25): SEQ ID NO: 5874; WAN024C42; Start 53; Stop 77
aaatcctaacattgctaaatcagat

SEQ ID NO: 424064 - DNA, 25 bp, Artificial
  probe
  misc_feature (1)..(25): SEQ ID NO: 5874; WAN024C42; Start 44; Stop 68
aattatcagaaatcctaacattgct

SEQ ID NO: 424065 - DNA, 25 bp, Artificial
  probe
  misc_feature (1)..(25): SEQ ID NO: 5874; WAN024C42; Start 19; Stop 43
tctcctattggtaacattataacac

SEQ ID NO: 424066 - DNA, 25 bp, Artificial
  probe
  misc_feature (1)..(25): SEQ ID NO: 5874; WAN024C42; Start 39; Stop 63
aacacaattatcagaaatcctaaca

SEQ ID NO: 424067 - DNA, 25 bp, Artificial
  probe
  misc_feature (1)..(25): SEQ ID NO: 5874; WAN024C42; Start 40; Stop 64
acacaattatcagaaatcctaacat

SEQ ID NO: 424068 - DNA, 25 bp, Artificial
  probe
  misc_feature (1)..(25): SEQ ID NO: 5874; WAN024C42; Start 10; Stop 34
catctattatctcctattggtaaca

SEQ ID NO: 424069 - DNA, 25 bp, Artificial
  probe
  misc_feature (1)..(25): SEQ ID NO: 5874; WAN024C42; Start 47; Stop 71
tatcagaaatcctaacattgctaaa

SEQ ID NO: 424070 - DNA, 25 bp, Artificial
  probe
  misc_feature (1)..(25): SEQ ID NO: 5874; WAN024C42; Start 46; Stop 70
ttatcagaaatcctaacattgctaa

SEQ ID NO: 424071 - DNA, 25 bp, Artificial
  probe
  misc_feature (1)..(25): SEQ ID NO: 5874; WAN024C42; Start 21; Stop 45
tcctattggtaacattataacacaa

SEQ ID NO: 424072 - DNA, 25 bp, Artificial
  probe
  misc_feature (1)..(25): SEQ ID NO: 5874; WAN024C42; Start 56; Stop 80
tcctaacattgctaaatcagattaa

SEQ ID NO: 424073 - DNA, 25 bp, Artificial
  probe
  misc_feature (1)..(25): SEQ ID NO: 5874; WAN024C42; Start 45; Stop 69
attatcagaaatcctaacattgcta

SEQ ID NO: 424074 - DNA, 25 bp, Artificial
  probe
  misc_feature (1)..(25): SEQ ID NO: 5874; WAN024C42; Start 9; Stop 33
tcatctattatctcctattggtaac

SEQ ID NO: 424075 - DNA, 25 bp, Artificial
  probe
  misc_feature (1)..(25): SEQ ID NO: 5874; WAN024C42; Start 8; Stop 32
gtcatctattatctcctattggtaa

SEQ ID NO: 424076 - DNA, 25 bp, Artificial
  probe
  misc_feature (1)..(25): SEQ ID NO: 5874; WAN024C42; Start 55; Stop 79
atcctaacattgctaaatcagatta

SEQ ID NO: 424077 - DNA, 25 bp, Artificial
  probe
  misc_feature (1)..(25): SEQ ID NO: 5874; WAN024C42; Start 5; Stop 29
tttgtcatctattatctcctattgg

SEQ ID NO: 424078 - DNA, 25 bp, Artificial
  probe
  misc_feature (1)..(25): SEQ ID NO: 5874; WAN024C42; Start 54; Stop 78
aatcctaacattgctaaatcagatt

SEQ ID NO: 424079 - DNA, 25 bp, Artificial
  probe
  misc_feature (1)..(25): SEQ ID NO: 5874; WAN024C42; Start 43; Stop 67
caattatcagaaatcctaacattgc

SEQ ID NO: 424080 - DNA, 25 bp, Artificial
  probe
  misc_feature (1)..(25): SEQ ID NO: 5874; WAN024C42; Start 41; Stop 65
cacaattatcagaaatcctaacatt

SEQ ID NO: 424081 - DNA, 25 bp, Artificial
  probe
  misc_feature (1)..(25): SEQ ID NO: 5874; WAN024C42; Start 18; Stop 42
atctcctattggtaacattataaca

SEQ ID NO: 424082 - DNA, 25 bp, Artificial
  probe
  misc_feature (1)..(25): SEQ ID NO: 5874; WAN024C42; Start 57; Stop 81
cctaacattgctaaatcagattaaa

SEQ ID NO: 424083 - DNA, 25 bp, Artificial
  probe
  misc_feature (1)..(25): SEQ ID NO: 5874; WAN024C42; Start 62; Stop 86
cattgctaaatcagattaaatttgc

SEQ ID NO: 424084 - DNA, 25 bp, Artificial
  probe
  misc_feature (1)..(25): SEQ ID NO: 5874; WAN024C42; Start 38; Stop 62
taacacaattatcagaaatcctaac

SEQ ID NO: 424085 - DNA, 25 bp, Artificial
  probe
  misc_feature (1)..(25): SEQ ID NO: 5874; WAN024C42; Start 42; Stop 66
acaattatcagaaatcctaacattg

SEQ ID NO: 424086 - DNA, 25 bp, Artificial
  probe
  misc_feature (1)..(25): SEQ ID NO: 5874; WAN024C42; Start 22; Stop 46
cctattggtaacattataacacaat

SEQ ID NO: 424087 - DNA, 25 bp, Artificial
  probe
  misc_feature (1)..(25): SEQ ID NO: 5874; WAN024C42; Start 1; Stop 25
ttgttttgtcatctattatctccta

SEQ ID NO: 424088 - DNA, 25 bp, Artificial
  probe
  misc_feature (1)..(25): SEQ ID NO: 5875; WAN024AYC; Start 402; Stop 426
acgcctgacacattatacttatgaa

SEQ ID NO: 424089 - DNA, 25 bp, Artificial
  probe
  misc_feature (1)..(25): SEQ ID NO: 5875; WAN024AYC; Start 401; Stop 425
aacgcctgacacattatacttatga

SEQ ID NO: 424090 - DNA, 25 bp, Artificial
  probe
  misc_feature (1)..(25): SEQ ID NO: 5875; WAN024AYC; Start 403; Stop 427
cgcctgacacattatacttatgaag

SEQ ID NO: 424091 - DNA, 25 bp, Artificial
  probe
  misc_feature (1)..(25): SEQ ID NO: 5875; WAN024AYC; Start 167; Stop 191
agattgatgtattgattaaccacga

SEQ ID NO: 424092 - DNA, 25 bp, Artificial
  probe
  misc_feature (1)..(25): SEQ ID NO: 5875; WAN024AYC; Start 404; Stop 428
gcctgacacattatacttatgaaga

SEQ ID NO: 424093 - DNA, 25 bp, Artificial
  probe
  misc_feature (1)..(25): SEQ ID NO: 5875; WAN024AYC; Start 166; Stop 190
gagattgatgtattgattaaccacg

SEQ ID NO: 424094 - DNA, 25 bp, Artificial
  probe
  misc_feature (1)..(25): SEQ ID NO: 5875; WAN024AYC; Start 415; Stop 439
tatacttatgaagaggtagtggctc

SEQ ID NO: 424095 - DNA, 25 bp, Artificial
  probe
  misc_feature (1)..(25): SEQ ID NO: 5875; WAN024AYC; Start 414; Stop 438
ttatacttatgaagaggtagtggct

SEQ ID NO: 424096 - DNA, 25 bp, Artificial
  probe
  misc_feature (1)..(25): SEQ ID NO: 5875; WAN024AYC; Start 168; Stop 192
gattgatgtattgattaaccacgaa

SEQ ID NO: 424097 - DNA, 25 bp, Artificial
  probe
  misc_feature (1)..(25): SEQ ID NO: 5875; WAN024AYC; Start 369; Stop 393
ttcgacaacatatcagctacatcaa

SEQ ID NO: 424098 - DNA, 25 bp, Artificial
  probe
  misc_feature (1)..(25): SEQ ID NO: 5875; WAN024AYC; Start 413; Stop 437
attatacttatgaagaggtagtggc

SEQ ID NO: 424099 - DNA, 25 bp, Artificial
  probe
  misc_feature (1)..(25): SEQ ID NO: 5875; WAN024AYC; Start 394; Stop 418
aatcctaaacgcctgacacattata

SEQ ID NO: 424100 - DNA, 25 bp, Artificial
  probe
  misc_feature (1)..(25): SEQ ID NO: 5875; WAN024AYC; Start 395; Stop 419
atcctaaacgcctgacacattatac

SEQ ID NO: 424101 - DNA, 25 bp, Artificial
  probe
  misc_feature (1)..(25): SEQ ID NO: 5875; WAN024AYC; Start 393; Stop 417
aaatcctaaacgcctgacacattat

SEQ ID NO: 424102 - DNA, 25 bp, Artificial
  probe
  misc_feature (1)..(25): SEQ ID NO: 5875; WAN024AYC; Start 397; Stop 421
cctaaacgcctgacacattatactt

SEQ ID NO: 424103 - DNA, 25 bp, Artificial
  probe
  misc_feature (1)..(25): SEQ ID NO: 5875; WAN024AYC; Start 407; Stop 431
tgacacattatacttatgaagaggt

SEQ ID NO: 424104 - DNA, 25 bp, Artificial
  probe
  misc_feature (1)..(25): SEQ ID NO: 5875; WAN024AYC; Start 400; Stop 424
aaacgcctgacacattatacttatg

SEQ ID NO: 424105 - DNA, 25 bp, Artificial
  probe
  misc_feature (1)..(25): SEQ ID NO: 5875; WAN024AYC; Start 763; Stop 787
gtggcaacaaatcaggtttatacaa

SEQ ID NO: 424106 - DNA, 25 bp, Artificial
  probe
  misc_feature (1)..(25): SEQ ID NO: 5875; WAN024AYC; Start 764; Stop 788
tggcaacaaatcaggtttatacaaa

SEQ ID NO: 424107 - DNA, 25 bp, Artificial
  probe
  misc_feature (1)..(25): SEQ ID NO: 5875; WAN024AYC; Start 398; Stop 422
ctaaacgcctgacacattatactta

SEQ ID NO: 424108 - DNA, 25 bp, Artificial
  probe
  misc_feature (1)..(25): SEQ ID NO: 5875; WAN024AYC; Start 165; Stop 189
agagattgatgtattgattaaccac

SEQ ID NO: 424109 - DNA, 25 bp, Artificial
  probe
  misc_feature (1)..(25): SEQ ID NO: 5875; WAN024AYC; Start 396; Stop 420
tcctaaacgcctgacacattatact

SEQ ID NO: 424110 - DNA, 25 bp, Artificial
  probe
  misc_feature (1)..(25): SEQ ID NO: 5875; WAN024AYC; Start 460; Stop 484
gggagccaacttagtctaactttaa

SEQ ID NO: 424111 - DNA, 25 bp, Artificial
  probe
  misc_feature (1)..(25): SEQ ID NO: 5875; WAN024AYC; Start 459; Stop 483
agggagccaacttagtctaacttta

SEQ ID NO: 424112 - DNA, 25 bp, Artificial
  probe
  misc_feature (1)..(25): SEQ ID NO: 5875; WAN024AYC; Start 406; Stop 430
ctgacacattatacttatgaagagg

SEQ ID NO: 424113 - DNA, 25 bp, Artificial
  probe
  misc_feature (1)..(25): SEQ ID NO: 5875; WAN024AYC; Start 405; Stop 429
cctgacacattatacttatgaagag

SEQ ID NO: 424114 - DNA, 25 bp, Artificial
  probe
  misc_feature (1)..(25): SEQ ID NO: 5875; WAN024AYC; Start 586; Stop 610
ccgattcttcatggttcctttattg

SEQ ID NO: 424115 - DNA, 25 bp, Artificial
  probe
  misc_feature (1)..(25): SEQ ID NO: 5875; WAN024AYC; Start 761; Stop 785
atgtggcaacaaatcaggtttatac

SEQ ID NO: 424116 - DNA, 25 bp, Artificial
  probe
  misc_feature (1)..(25): SEQ ID NO: 5875; WAN024AYC; Start 759; Stop 783
aaatgtggcaacaaatcaggtttat

SEQ ID NO: 424117 - DNA, 25 bp, Artificial
  probe
  misc_feature (1)..(25): SEQ ID NO: 5875; WAN024AYC; Start 587; Stop 611
cgattcttcatggttcctttattgt

SEQ ID NO: 424118 - DNA, 25 bp, Artificial
  probe
  misc_feature (1)..(25): SEQ ID NO: 5875; WAN024AYC; Start 399; Stop 423
taaacgcctgacacattatacttat

SEQ ID NO: 424119 - DNA, 25 bp, Artificial
  probe
  misc_feature (1)..(25): SEQ ID NO: 5875; WAN024AYC; Start 760; Stop 784
aatgtggcaacaaatcaggtttata

SEQ ID NO: 424120 - DNA, 25 bp, Artificial
  probe
  misc_feature (1)..(25): SEQ ID NO: 5875; WAN024AYC; Start 712; Stop 736
ggatacaagagaatttatacaccga

SEQ ID NO: 424121 - DNA, 25 bp, Artificial
  probe
  misc_feature (1)..(25): SEQ ID NO: 5876; WAN024AYB; Start 402; Stop 426
acggttgacacattatacttatgga

SEQ ID NO: 424122 - DNA, 25 bp, Artificial
  probe
  misc_feature (1)..(25): SEQ ID NO: 5876; WAN024AYB; Start 403; Stop 427
cggttgacacattatacttatggag

SEQ ID NO: 424123 - DNA, 25 bp, Artificial
  probe
  misc_feature (1)..(25): SEQ ID NO: 5876; WAN024AYB; Start 401; Stop 425
aacggttgacacattatacttatgg

SEQ ID NO: 424124 - DNA, 25 bp, Artificial
  probe
  misc_feature (1)..(25): SEQ ID NO: 5876; WAN024AYB; Start 404; Stop 428
ggttgacacattatacttatggaga

SEQ ID NO: 424125 - DNA, 25 bp, Artificial
  probe
  misc_feature (1)..(25): SEQ ID NO: 5876; WAN024AYB; Start 364; Stop 388
atcttctcgactacttaccaacttc

SEQ ID NO: 424126 - DNA, 25 bp, Artificial
  probe
  misc_feature (1)..(25): SEQ ID NO: 5876; WAN024AYB; Start 366; Stop 390
cttctcgactacttaccaacttcac

SEQ ID NO: 424127 - DNA, 25 bp, Artificial
  probe
  misc_feature (1)..(25): SEQ ID NO: 5876; WAN024AYB; Start 365; Stop 389
tcttctcgactacttaccaacttca

SEQ ID NO: 424128 - DNA, 25 bp, Artificial
  probe
  misc_feature (1)..(25): SEQ ID NO: 5876; WAN024AYB; Start 363; Stop 387
tatcttctcgactacttaccaactt

SEQ ID NO: 424129 - DNA, 25 bp, Artificial
  probe
  misc_feature (1)..(25): SEQ ID NO: 5876; WAN024AYB; Start 362; Stop 386
atatcttctcgactacttaccaact

SEQ ID NO: 424130 - DNA, 25 bp, Artificial
  probe
  misc_feature (1)..(25): SEQ ID NO: 5876; WAN024AYB; Start 208; Stop 232
cgtggaaataatgtggcttatcaat

SEQ ID NO: 424131 - DNA, 25 bp, Artificial
  probe
  misc_feature (1)..(25): SEQ ID NO: 5876; WAN024AYB; Start 207; Stop 231
tcgtggaaataatgtggcttatcaa

SEQ ID NO: 424132 - DNA, 25 bp, Artificial
  probe
  misc_feature (1)..(25): SEQ ID NO: 5876; WAN024AYB; Start 367; Stop 391
ttctcgactacttaccaacttcacc

SEQ ID NO: 424133 - DNA, 25 bp, Artificial
  probe
  misc_feature (1)..(25): SEQ ID NO: 5876; WAN024AYB; Start 206; Stop 230
ctcgtggaaataatgtggcttatca

SEQ ID NO: 424134 - DNA, 25 bp, Artificial
  probe
  misc_feature (1)..(25): SEQ ID NO: 5876; WAN024AYB; Start 369; Stop 393
ctcgactacttaccaacttcaccaa

SEQ ID NO: 424135 - DNA, 25 bp, Artificial
  probe
  misc_feature (1)..(25): SEQ ID NO: 5876; WAN024AYB; Start 361; Stop 385
gatatcttctcgactacttaccaac

SEQ ID NO: 424136 - DNA, 25 bp, Artificial
  probe
  misc_feature (1)..(25): SEQ ID NO: 5876; WAN024AYB; Start 405; Stop 429
gttgacacattatacttatggagaa

SEQ ID NO: 424137 - DNA, 25 bp, Artificial
  probe
  misc_feature (1)..(25): SEQ ID NO: 5876; WAN024AYB; Start 220; Stop 244
gtggcttatcaatttgctaaggaaa

SEQ ID NO: 424138 - DNA, 25 bp, Artificial
  probe
  misc_feature (1)..(25): SEQ ID NO: 5876; WAN024AYB; Start 217; Stop 241
aatgtggcttatcaatttgctaagg

SEQ ID NO: 424139 - DNA, 25 bp, Artificial
  probe
  misc_feature (1)..(25): SEQ ID NO: 5876; WAN024AYB; Start 218; Stop 242
atgtggcttatcaatttgctaagga

SEQ ID NO: 424140 - DNA, 25 bp, Artificial
  probe
  misc_feature (1)..(25): SEQ ID NO: 5876; WAN024AYB; Start 219; Stop 243
tgtggcttatcaatttgctaaggaa

SEQ ID NO: 424141 - DNA, 25 bp, Artificial
  probe
  misc_feature (1)..(25): SEQ ID NO: 5876; WAN024AYB; Start 209; Stop 233
gtggaaataatgtggcttatcaatt

SEQ ID NO: 424142 - DNA, 25 bp, Artificial
  probe
  misc_feature (1)..(25): SEQ ID NO: 5876; WAN024AYB; Start 406; Stop 430
ttgacacattatacttatggagaag

SEQ ID NO: 424143 - DNA, 25 bp, Artificial
  probe
  misc_feature (1)..(25): SEQ ID NO: 5876; WAN024AYB; Start 400; Stop 424
aaacggttgacacattatacttatg

SEQ ID NO: 424144 - DNA, 25 bp, Artificial
  probe
  misc_feature (1)..(25): SEQ ID NO: 5876; WAN024AYB; Start 205; Stop 229
gctcgtggaaataatgtggcttatc

SEQ ID NO: 424145 - DNA, 25 bp, Artificial
  probe
  misc_feature (1)..(25): SEQ ID NO: 5876; WAN024AYB; Start 497; Stop 521
ggttgaaagctagtaaagttcttcg

SEQ ID NO: 424146 - DNA, 25 bp, Artificial
  probe
  misc_feature (1)..(25): SEQ ID NO: 5876; WAN024AYB; Start 493; Stop 517
tgttggttgaaagctagtaaagttc

SEQ ID NO: 424147 - DNA, 25 bp, Artificial
  probe
  misc_feature (1)..(25): SEQ ID NO: 5876; WAN024AYB; Start 492; Stop 516
atgttggttgaaagctagtaaagtt

SEQ ID NO: 424148 - DNA, 25 bp, Artificial
  probe
  misc_feature (1)..(25): SEQ ID NO: 5876; WAN024AYB; Start 491; Stop 515
aatgttggttgaaagctagtaaagt

SEQ ID NO: 424149 - DNA, 25 bp, Artificial
  probe
  misc_feature (1)..(25): SEQ ID NO: 5876; WAN024AYB; Start 494; Stop 518
gttggttgaaagctagtaaagttct

SEQ ID NO: 424150 - DNA, 25 bp, Artificial
  probe
  misc_feature (1)..(25): SEQ ID NO: 5876; WAN024AYB; Start 368; Stop 392
tctcgactacttaccaacttcacca

SEQ ID NO: 424151 - DNA, 25 bp, Artificial
  probe
  misc_feature (1)..(25): SEQ ID NO: 5876; WAN024AYB; Start 496; Stop 520
tggttgaaagctagtaaagttcttc

SEQ ID NO: 424152 - DNA, 25 bp, Artificial
  probe
  misc_feature (1)..(25): SEQ ID NO: 5876; WAN024AYB; Start 498; Stop 522
gttgaaagctagtaaagttcttcga

SEQ ID NO: 424153 - DNA, 25 bp, Artificial
  probe
  misc_feature (1)..(25): SEQ ID NO: 5876; WAN024AYB; Start 213; Stop 237
aaataatgtggcttatcaatttgct

SEQ ID NO: 424154 - DNA, 25 bp, Artificial
  probe
  misc_feature (1)..(25): SEQ ID NO: 5877; WAN024CVA; Start 22; Stop 46
gcatccctttatcttcaaactcatc

SEQ ID NO: 424155 - DNA, 25 bp, Artificial
  probe
  misc_feature (1)..(25): SEQ ID NO: 5877; WAN024CVA; Start 21; Stop 45
agcatccctttatcttcaaactcat

SEQ ID NO: 424156 - DNA, 25 bp, Artificial
  probe
  misc_feature (1)..(25): SEQ ID NO: 5877; WAN024CVA; Start 18; Stop 42
atcagcatccctttatcttcaaact

SEQ ID NO: 424157 - DNA, 25 bp, Artificial
  probe
  misc_feature (1)..(25): SEQ ID NO: 5877; WAN024CVA; Start 19; Stop 43
tcagcatccctttatcttcaaactc

SEQ ID NO: 424158 - DNA, 25 bp, Artificial
  probe
  misc_feature (1)..(25): SEQ ID NO: 5877; WAN024CVA; Start 103; Stop 127
catttctttctgattcaccatccat

SEQ ID NO: 424159 - DNA, 25 bp, Artificial
  probe
  misc_feature (1)..(25): SEQ ID NO: 5877; WAN024CVA; Start 20; Stop 44
cagcatccctttatcttcaaactca

SEQ ID NO: 424160 - DNA, 25 bp, Artificial
  probe
  misc_feature (1)..(25): SEQ ID NO: 5877; WAN024CVA; Start 74; Stop 98
cctatctgctaagagaaacgagaaa

SEQ ID NO: 424161 - DNA, 25 bp, Artificial
  probe
  misc_feature (1)..(25): SEQ ID NO: 5877; WAN024CVA; Start 71; Stop 95
aatcctatctgctaagagaaacgag

SEQ ID NO: 424162 - DNA, 25 bp, Artificial
  probe
  misc_feature (1)..(25): SEQ ID NO: 5877; WAN024CVA; Start 70; Stop 94
caatcctatctgctaagagaaacga

SEQ ID NO: 424163 - DNA, 25 bp, Artificial
  probe
  misc_feature (1)..(25): SEQ ID NO: 5877; WAN024CVA; Start 17; Stop 41
tatcagcatccctttatcttcaaac

SEQ ID NO: 424164 - DNA, 25 bp, Artificial
  probe
  misc_feature (1)..(25): SEQ ID NO: 5877; WAN024CVA; Start 69; Stop 93
acaatcctatctgctaagagaaacg

SEQ ID NO: 424165 - DNA, 25 bp, Artificial
  probe
  misc_feature (1)..(25): SEQ ID NO: 5877; WAN024CVA; Start 105; Stop 129
tttctttctgattcaccatccattt

SEQ ID NO: 424166 - DNA, 25 bp, Artificial
  probe
  misc_feature (1)..(25): SEQ ID NO: 5877; WAN024CVA; Start 23; Stop 47
catccctttatcttcaaactcatca

SEQ ID NO: 424167 - DNA, 25 bp, Artificial
  probe
  misc_feature (1)..(25): SEQ ID NO: 5877; WAN024CVA; Start 72; Stop 96
atcctatctgctaagagaaacgaga

SEQ ID NO: 424168 - DNA, 25 bp, Artificial
  probe
  misc_feature (1)..(25): SEQ ID NO: 5877; WAN024CVA; Start 104; Stop 128
atttctttctgattcaccatccatt

SEQ ID NO: 424169 - DNA, 25 bp, Artificial
  probe
  misc_feature (1)..(25): SEQ ID NO: 5877; WAN024CVA; Start 73; Stop 97
tcctatctgctaagagaaacgagaa

SEQ ID NO: 424170 - DNA, 25 bp, Artificial
  probe
  misc_feature (1)..(25): SEQ ID NO: 5877; WAN024CVA; Start 101; Stop 125
ctcatttctttctgattcaccatcc

SEQ ID NO: 424171 - DNA, 25 bp, Artificial
  probe
  misc_feature (1)..(25): SEQ ID NO: 5877; WAN024CVA; Start 68; Stop 92
gacaatcctatctgctaagagaaac

SEQ ID NO: 424172 - DNA, 25 bp, Artificial
  probe
  misc_feature (1)..(25): SEQ ID NO: 5877; WAN024CVA; Start 67; Stop 91
agacaatcctatctgctaagagaaa

SEQ ID NO: 424173 - DNA, 25 bp, Artificial
  probe
  misc_feature (1)..(25): SEQ ID NO: 5877; WAN024CVA; Start 102; Stop 126
tcatttctttctgattcaccatcca

SEQ ID NO: 424174 - DNA, 25 bp, Artificial
  probe
  misc_feature (1)..(25): SEQ ID NO: 5877; WAN024CVA; Start 100; Stop 124
tctcatttctttctgattcaccatc

SEQ ID NO: 424175 - DNA, 25 bp, Artificial
  probe
  misc_feature (1)..(25): SEQ ID NO: 5877; WAN024CVA; Start 16; Stop 40
ttatcagcatccctttatcttcaaa

SEQ ID NO: 424176 - DNA, 25 bp, Artificial
  probe
  misc_feature (1)..(25): SEQ ID NO: 5877; WAN024CVA; Start 15; Stop 39
tttatcagcatccctttatcttcaa

SEQ ID NO: 424177 - DNA, 25 bp, Artificial
  probe
  misc_feature (1)..(25): SEQ ID NO: 5877; WAN024CVA; Start 25; Stop 49
tccctttatcttcaaactcatcatt

SEQ ID NO: 424178 - DNA, 25 bp, Artificial
  probe
  misc_feature (1)..(25): SEQ ID NO: 5877; WAN024CVA; Start 99; Stop 123
atctcatttctttctgattcaccat

SEQ ID NO: 424179 - DNA, 25 bp, Artificial
  probe
  misc_feature (1)..(25): SEQ ID NO: 5877; WAN024CVA; Start 24; Stop 48
atccctttatcttcaaactcatcat

SEQ ID NO: 424180 - DNA, 25 bp, Artificial
  probe
  misc_feature (1)..(25): SEQ ID NO: 5877; WAN024CVA; Start 26; Stop 50
ccctttatcttcaaactcatcattt

SEQ ID NO: 424181 - DNA, 25 bp, Artificial
  probe
  misc_feature (1)..(25): SEQ ID NO: 5877; WAN024CVA; Start 98; Stop 122
aatctcatttctttctgattcacca

SEQ ID NO: 424182 - DNA, 25 bp, Artificial
  probe
  misc_feature (1)..(25): SEQ ID NO: 5877; WAN024CVA; Start 64; Stop 88
aacagacaatcctatctgctaagag

SEQ ID NO: 424183 - DNA, 25 bp, Artificial
  probe
  misc_feature (1)..(25): SEQ ID NO: 5877; WAN024CVA; Start 66; Stop 90
cagacaatcctatctgctaagagaa

SEQ ID NO: 424184 - DNA, 25 bp, Artificial
  probe
  misc_feature (1)..(25): SEQ ID NO: 5877; WAN024CVA; Start 61; Stop 85
cctaacagacaatcctatctgctaa

SEQ ID NO: 424185 - DNA, 25 bp, Artificial
  probe
  misc_feature (1)..(25): SEQ ID NO: 5877; WAN024CVA; Start 60; Stop 84
tcctaacagacaatcctatctgcta

SEQ ID NO: 424186 - DNA, 25 bp, Artificial
  probe
  misc_feature (1)..(25): SEQ ID NO: 5877; WAN024CVA; Start 65; Stop 89
acagacaatcctatctgctaagaga

SEQ ID NO: 424187 - DNA, 25 bp, Artificial
  probe
  misc_feature (1)..(25): SEQ ID NO: 5878; WAN024G3G; Start 35; Stop 59
tcaccaccataacatttagcaagta

SEQ ID NO: 424188 - DNA, 25 bp, Artificial
  probe
  misc_feature (1)..(25): SEQ ID NO: 5878; WAN024G3G; Start 80; Stop 104
atatcagtacgagcgacaatcttgt

SEQ ID NO: 424189 - DNA, 25 bp, Artificial
  probe
  misc_feature (1)..(25): SEQ ID NO: 5878; WAN024G3G; Start 117; Stop 141
cttggattggaacttcaaattgttg

SEQ ID NO: 424190 - DNA, 25 bp, Artificial
  probe
  misc_feature (1)..(25): SEQ ID NO: 5878; WAN024G3G; Start 34; Stop 58
gtcaccaccataacatttagcaagt

SEQ ID NO: 424191 - DNA, 25 bp, Artificial
  probe
  misc_feature (1)..(25): SEQ ID NO: 5878; WAN024G3G; Start 118; Stop 142
ttggattggaacttcaaattgttgg

SEQ ID NO: 424192 - DNA, 25 bp, Artificial
  probe
  misc_feature (1)..(25): SEQ ID NO: 5878; WAN024G3G; Start 36; Stop 60
caccaccataacatttagcaagtac

SEQ ID NO: 424193 - DNA, 25 bp, Artificial
  probe
  misc_feature (1)..(25): SEQ ID NO: 5878; WAN024G3G; Start 116; Stop 140
gcttggattggaacttcaaattgtt

SEQ ID NO: 424194 - DNA, 25 bp, Artificial
  probe
  misc_feature (1)..(25): SEQ ID NO: 5878; WAN024G3G; Start 79; Stop 103
gatatcagtacgagcgacaatcttg

SEQ ID NO: 424195 - DNA, 25 bp, Artificial
  probe
  misc_feature (1)..(25): SEQ ID NO: 5878; WAN024G3G; Start 160; Stop 184
gagtttatcaacgatgagtttccca

SEQ ID NO: 424196 - DNA, 25 bp, Artificial
  probe
  misc_feature (1)..(25): SEQ ID NO: 5878; WAN024G3G; Start 159; Stop 183
tgagtttatcaacgatgagtttccc

SEQ ID NO: 424197 - DNA, 25 bp, Artificial
  probe
  misc_feature (1)..(25): SEQ ID NO: 5878; WAN024G3G; Start 161; Stop 185
agtttatcaacgatgagtttcccac

SEQ ID NO: 424198 - DNA, 25 bp, Artificial
  probe
  misc_feature (1)..(25): SEQ ID NO: 5878; WAN024G3G; Start 37; Stop 61
accaccataacatttagcaagtacg

SEQ ID NO: 424199 - DNA, 25 bp, Artificial
  probe
  misc_feature (1)..(25): SEQ ID NO: 5878; WAN024G3G; Start 81; Stop 105
tatcagtacgagcgacaatcttgtg

SEQ ID NO: 424200 - DNA, 25 bp, Artificial
  probe
  misc_feature (1)..(25): SEQ ID NO: 5878; WAN024G3G; Start 8; Stop 32
tcaaggagtttacgcttacgagaaa

SEQ ID NO: 424201 - DNA, 25 bp, Artificial
  probe
  misc_feature (1)..(25): SEQ ID NO: 5878; WAN024G3G; Start 7; Stop 31
ttcaaggagtttacgcttacgagaa

SEQ ID NO: 424202 - DNA, 25 bp, Artificial
  probe
  misc_feature (1)..(25): SEQ ID NO: 5878; WAN024G3G; Start 6; Stop 30
tttcaaggagtttacgcttacgaga

SEQ ID NO: 424203 - DNA, 25 bp, Artificial
  probe
  misc_feature (1)..(25): SEQ ID NO: 5878; WAN024G3G; Start 33; Stop 57
cgtcaccaccataacatttagcaag

SEQ ID NO: 424204 - DNA, 25 bp, Artificial
  probe
  misc_feature (1)..(25): SEQ ID NO: 5878; WAN024G3G; Start 29; Stop 53
gaaacgtcaccaccataacatttag

SEQ ID NO: 424205 - DNA, 25 bp, Artificial
  probe
  misc_feature (1)..(25): SEQ ID NO: 5878; WAN024G3G; Start 162; Stop 186
gtttatcaacgatgagtttcccacg

SEQ ID NO: 424206 - DNA, 25 bp, Artificial
  probe
  misc_feature (1)..(25): SEQ ID NO: 5878; WAN024G3G; Start 28; Stop 52
agaaacgtcaccaccataacattta

SEQ ID NO: 424207 - DNA, 25 bp, Artificial
  probe
  misc_feature (1)..(25): SEQ ID NO: 5878; WAN024G3G; Start 193; Stop 217
ggcaaagtccttgtgaacgataaag

SEQ ID NO: 424208 - DNA, 25 bp, Artificial
  probe
  misc_feature (1)..(25): SEQ ID NO: 5878; WAN024G3G; Start 39; Stop 63
caccataacatttagcaagtacgtt

SEQ ID NO: 424209 - DNA, 25 bp, Artificial
  probe
  misc_feature (1)..(25): SEQ ID NO: 5878; WAN024G3G; Start 40; Stop 64
accataacatttagcaagtacgttc

SEQ ID NO: 424210 - DNA, 25 bp, Artificial
  probe
  misc_feature (1)..(25): SEQ ID NO: 5878; WAN024G3G; Start 119; Stop 143
tggattggaacttcaaattgttggc

SEQ ID NO: 424211 - DNA, 25 bp, Artificial
  probe
  misc_feature (1)..(25): SEQ ID NO: 5878; WAN024G3G; Start 41; Stop 65
ccataacatttagcaagtacgttct

SEQ ID NO: 424212 - DNA, 25 bp, Artificial
  probe
  misc_feature (1)..(25): SEQ ID NO: 5878; WAN024G3G; Start 122; Stop 146
attggaacttcaaattgttggcgag

SEQ ID NO: 424213 - DNA, 25 bp, Artificial
  probe
  misc_feature (1)..(25): SEQ ID NO: 5878; WAN024G3G; Start 121; Stop 145
gattggaacttcaaattgttggcga

SEQ ID NO: 424214 - DNA, 25 bp, Artificial
  probe
  misc_feature (1)..(25): SEQ ID NO: 5878; WAN024G3G; Start 115; Stop 139
cgcttggattggaacttcaaattgt

SEQ ID NO: 424215 - DNA, 25 bp, Artificial
  probe
  misc_feature (1)..(25): SEQ ID NO: 5878; WAN024G3G; Start 225; Stop 249
catccaccttatctccattgagaag

SEQ ID NO: 424216 - DNA, 25 bp, Artificial
  probe
  misc_feature (1)..(25): SEQ ID NO: 5878; WAN024G3G; Start 38; Stop 62
ccaccataacatttagcaagtacgt

SEQ ID NO: 424217 - DNA, 25 bp, Artificial
  probe
  misc_feature (1)..(25): SEQ ID NO: 5878; WAN024G3G; Start 196; Stop 220
aaagtccttgtgaacgataaagctg

SEQ ID NO: 424218 - DNA, 25 bp, Artificial
  probe
  misc_feature (1)..(25): SEQ ID NO: 5878; WAN024G3G; Start 191; Stop 215
taggcaaagtccttgtgaacgataa

SEQ ID NO: 424219 - DNA, 25 bp, Artificial
  probe
  misc_feature (1)..(25): SEQ ID NO: 5878; WAN024G3G; Start 195; Stop 219
caaagtccttgtgaacgataaagct

SEQ ID NO: 424220 - DNA, 25 bp, Artificial
  probe
  misc_feature (1)..(25): SEQ ID NO: 5879; WAN024DX3; Start 471; Stop 495
atttgacaccttgaataccgatttc

SEQ ID NO: 424221 - DNA, 25 bp, Artificial
  probe
  misc_feature (1)..(25): SEQ ID NO: 5879; WAN024DX3; Start 470; Stop 494
aatttgacaccttgaataccgattt

SEQ ID NO: 424222 - DNA, 25 bp, Artificial
  probe
  misc_feature (1)..(25): SEQ ID NO: 5879; WAN024DX3; Start 295; Stop 319
attctctactgccaccttgtcttct

SEQ ID NO: 424223 - DNA, 25 bp, Artificial
  probe
  misc_feature (1)..(25): SEQ ID NO: 5879; WAN024DX3; Start 294; Stop 318
cattctctactgccaccttgtcttc

SEQ ID NO: 424224 - DNA, 25 bp, Artificial
  probe
  misc_feature (1)..(25): SEQ ID NO: 5879; WAN024DX3; Start 469; Stop 493
caatttgacaccttgaataccgatt

SEQ ID NO: 424225 - DNA, 25 bp, Artificial
  probe
  misc_feature (1)..(25): SEQ ID NO: 5879; WAN024DX3; Start 398; Stop 422
ggtgtcaaatagtcaatcaaggctt

SEQ ID NO: 424226 - DNA, 25 bp, Artificial
  probe
  misc_feature (1)..(25): SEQ ID NO: 5879; WAN024DX3; Start 804; Stop 828
gactgataacctcgtaatgctcaaa

SEQ ID NO: 424227 - DNA, 25 bp, Artificial
  probe
  misc_feature (1)..(25): SEQ ID NO: 5879; WAN024DX3; Start 472; Stop 496
tttgacaccttgaataccgatttcc

SEQ ID NO: 424228 - DNA, 25 bp, Artificial
  probe
  misc_feature (1)..(25): SEQ ID NO: 5879; WAN024DX3; Start 296; Stop 320
ttctctactgccaccttgtcttctt

SEQ ID NO: 424229 - DNA, 25 bp, Artificial
  probe
  misc_feature (1)..(25): SEQ ID NO: 5879; WAN024DX3; Start 73; Stop 97
aaagtaagcaaccaaaccatcgtag

SEQ ID NO: 424230 - DNA, 25 bp, Artificial
  probe
  misc_feature (1)..(25): SEQ ID NO: 5879; WAN024DX3; Start 475; Stop 499
gacaccttgaataccgatttccttc

SEQ ID NO: 424231 - DNA, 25 bp, Artificial
  probe
  misc_feature (1)..(25): SEQ ID NO: 5879; WAN024DX3; Start 264; Stop 288
cttcatcaagaaagtccaagataga

SEQ ID NO: 424232 - DNA, 25 bp, Artificial
  probe
  misc_feature (1)..(25): SEQ ID NO: 5879; WAN024DX3; Start 72; Stop 96
caaagtaagcaaccaaaccatcgta

SEQ ID NO: 424233 - DNA, 25 bp, Artificial
  probe
  misc_feature (1)..(25): SEQ ID NO: 5879; WAN024DX3; Start 266; Stop 290
tcatcaagaaagtccaagatagacg

SEQ ID NO: 424234 - DNA, 25 bp, Artificial
  probe
  misc_feature (1)..(25): SEQ ID NO: 5879; WAN024DX3; Start 394; Stop 418
gagcggtgtcaaatagtcaatcaag

SEQ ID NO: 424235 - DNA, 25 bp, Artificial
  probe
  misc_feature (1)..(25): SEQ ID NO: 5879; WAN024DX3; Start 322; Stop 346
ttccttagagtccaagacacgaaga

SEQ ID NO: 424236 - DNA, 25 bp, Artificial
  probe
  misc_feature (1)..(25): SEQ ID NO: 5879; WAN024DX3; Start 399; Stop 423
gtgtcaaatagtcaatcaaggcttg

SEQ ID NO: 424237 - DNA, 25 bp, Artificial
  probe
  misc_feature (1)..(25): SEQ ID NO: 5879; WAN024DX3; Start 327; Stop 351
tagagtccaagacacgaagaggatt

SEQ ID NO: 424238 - DNA, 25 bp, Artificial
  probe
  misc_feature (1)..(25): SEQ ID NO: 5879; WAN024DX3; Start 326; Stop 350
ttagagtccaagacacgaagaggat

SEQ ID NO: 424239 - DNA, 25 bp, Artificial
  probe
  misc_feature (1)..(25): SEQ ID NO: 5879; WAN024DX3; Start 267; Stop 291
catcaagaaagtccaagatagacgg

SEQ ID NO: 424240 - DNA, 25 bp, Artificial
  probe
  misc_feature (1)..(25): SEQ ID NO: 5879; WAN024DX3; Start 474; Stop 498
tgacaccttgaataccgatttcctt

SEQ ID NO: 424241 - DNA, 25 bp, Artificial
  probe
  misc_feature (1)..(25): SEQ ID NO: 5879; WAN024DX3; Start 473; Stop 497
ttgacaccttgaataccgatttcct

SEQ ID NO: 424242 - DNA, 25 bp, Artificial
  probe
  misc_feature (1)..(25): SEQ ID NO: 5879; WAN024DX3; Start 125; Stop 149
ttgccctcaatctctgtgataaact

SEQ ID NO: 424243 - DNA, 25 bp, Artificial
  probe
  misc_feature (1)..(25): SEQ ID NO: 5879; WAN024DX3; Start 265; Stop 289
ttcatcaagaaagtccaagatagac

SEQ ID NO: 424244 - DNA, 25 bp, Artificial
  probe
  misc_feature (1)..(25): SEQ ID NO: 5879; WAN024DX3; Start 69; Stop 93
ctccaaagtaagcaaccaaaccatc

SEQ ID NO: 424245 - DNA, 25 bp, Artificial
  probe
  misc_feature (1)..(25): SEQ ID NO: 5879; WAN024DX3; Start 468; Stop 492
gcaatttgacaccttgaataccgat

SEQ ID NO: 424246 - DNA, 25 bp, Artificial
  probe
  misc_feature (1)..(25): SEQ ID NO: 5879; WAN024DX3; Start 323; Stop 347
tccttagagtccaagacacgaagag

SEQ ID NO: 424247 - DNA, 25 bp, Artificial
  probe
  misc_feature (1)..(25): SEQ ID NO: 5879; WAN024DX3; Start 197; Stop 221
tcgatgatgtaatctactccaagat

SEQ ID NO: 424248 - DNA, 25 bp, Artificial
  probe
  misc_feature (1)..(25): SEQ ID NO: 5879; WAN024DX3; Start 400; Stop 424
tgtcaaatagtcaatcaaggcttgg

SEQ ID NO: 424249 - DNA, 25 bp, Artificial
  probe
  misc_feature (1)..(25): SEQ ID NO: 5879; WAN024DX3; Start 126; Stop 150
tgccctcaatctctgtgataaactc

SEQ ID NO: 424250 - DNA, 25 bp, Artificial
  probe
  misc_feature (1)..(25): SEQ ID NO: 5879; WAN024DX3; Start 778; Stop 802
gatatccgttgtatctccgacagag

SEQ ID NO: 424251 - DNA, 25 bp, Artificial
  probe
  misc_feature (1)..(25): SEQ ID NO: 5879; WAN024DX3; Start 129; Stop 153
cctcaatctctgtgataaactcgaa

SEQ ID NO: 424252 - DNA, 25 bp, Artificial
  probe
  misc_feature (1)..(25): SEQ ID NO: 5879; WAN024DX3; Start 325; Stop 349
cttagagtccaagacacgaagagga

SEQ ID NO: 424253 - DNA, 25 bp, Artificial
  probe
  misc_feature (1)..(25): SEQ ID NO: 5880; WAN0249FO; Start 9; Stop 33
cctcctgatgtctaacaaagtgtaa

SEQ ID NO: 424254 - DNA, 25 bp, Artificial
  probe
  misc_feature (1)..(25): SEQ ID NO: 5880; WAN0249FO; Start 6; Stop 30
tttcctcctgatgtctaacaaagtg

SEQ ID NO: 424255 - DNA, 25 bp, Artificial
  probe
  misc_feature (1)..(25): SEQ ID NO: 5880; WAN0249FO; Start 8; Stop 32
tcctcctgatgtctaacaaagtgta

SEQ ID NO: 424256 - DNA, 25 bp, Artificial
  probe
  misc_feature (1)..(25): SEQ ID NO: 5880; WAN0249FO; Start 10; Stop 34
ctcctgatgtctaacaaagtgtaaa

SEQ ID NO: 424257 - DNA, 25 bp, Artificial
  probe
  misc_feature (1)..(25): SEQ ID NO: 5880; WAN0249FO; Start 7; Stop 31
ttcctcctgatgtctaacaaagtgt

SEQ ID NO: 424258 - DNA, 25 bp, Artificial
  probe
  misc_feature (1)..(25): SEQ ID NO: 5880; WAN0249FO; Start 5; Stop 29
ttttcctcctgatgtctaacaaagt

SEQ ID NO: 424259 - DNA, 25 bp, Artificial
  probe
  misc_feature (1)..(25): SEQ ID NO: 5880; WAN0249FO; Start 11; Stop 35
tcctgatgtctaacaaagtgtaaaa

SEQ ID NO: 424260 - DNA, 25 bp, Artificial
  probe
  misc_feature (1)..(25): SEQ ID NO: 5880; WAN0249FO; Start 52; Stop 76
aaataaacattcaagaaaacgcttt

SEQ ID NO: 424261 - DNA, 25 bp, Artificial
  probe
  misc_feature (1)..(25): SEQ ID NO: 5880; WAN0249FO; Start 50; Stop 74
ttaaataaacattcaagaaaacgct

SEQ ID NO: 424262 - DNA, 25 bp, Artificial
  probe
  misc_feature (1)..(25): SEQ ID NO: 5880; WAN0249FO; Start 51; Stop 75
taaataaacattcaagaaaacgctt

SEQ ID NO: 424263 - DNA, 25 bp, Artificial
  probe
  misc_feature (1)..(25): SEQ ID NO: 5880; WAN0249FO; Start 36; Stop 60
aaccaactactttcttaaataaaca

SEQ ID NO: 424264 - DNA, 25 bp, Artificial
  probe
  misc_feature (1)..(25): SEQ ID NO: 5880; WAN0249FO; Start 49; Stop 73
cttaaataaacattcaagaaaacgc

SEQ ID NO: 424265 - DNA, 25 bp, Artificial
  probe
  misc_feature (1)..(25): SEQ ID NO: 5880; WAN0249FO; Start 53; Stop 77
aataaacattcaagaaaacgctttc

SEQ ID NO: 424266 - DNA, 25 bp, Artificial
  probe
  misc_feature (1)..(25): SEQ ID NO: 5880; WAN0249FO; Start 58; Stop 82
acattcaagaaaacgctttctattt

SEQ ID NO: 424267 - DNA, 25 bp, Artificial
  probe
  misc_feature (1)..(25): SEQ ID NO: 5880; WAN0249FO; Start 57; Stop 81
aacattcaagaaaacgctttctatt

SEQ ID NO: 424268 - DNA, 25 bp, Artificial
  probe
  misc_feature (1)..(25): SEQ ID NO: 5880; WAN0249FO; Start 56; Stop 80
aaacattcaagaaaacgctttctat

SEQ ID NO: 424269 - DNA, 25 bp, Artificial
  probe
  misc_feature (1)..(25): SEQ ID NO: 5880; WAN0249FO; Start 54; Stop 78
ataaacattcaagaaaacgctttct

SEQ ID NO: 424270 - DNA, 25 bp, Artificial
  probe
  misc_feature (1)..(25): SEQ ID NO: 5880; WAN0249FO; Start 55; Stop 79
taaacattcaagaaaacgctttcta

SEQ ID NO: 424271 - DNA, 25 bp, Artificial
  probe
  misc_feature (1)..(25): SEQ ID NO: 5880; WAN0249FO; Start 48; Stop 72
tcttaaataaacattcaagaaaacg

SEQ ID NO: 424272 - DNA, 25 bp, Artificial
  probe
  misc_feature (1)..(25): SEQ ID NO: 5880; WAN0249FO; Start 59; Stop 83
cattcaagaaaacgctttctattta

SEQ ID NO: 424273 - DNA, 25 bp, Artificial
  probe
  misc_feature (1)..(25): SEQ ID NO: 5880; WAN0249FO; Start 60; Stop 84
attcaagaaaacgctttctatttat

SEQ ID NO: 424274 - DNA, 25 bp, Artificial
  probe
  misc_feature (1)..(25): SEQ ID NO: 5880; WAN0249FO; Start 61; Stop 85
ttcaagaaaacgctttctatttata

SEQ ID NO: 424275 - DNA, 25 bp, Artificial
  probe
  misc_feature (1)..(25): SEQ ID NO: 5880; WAN0249FO; Start 62; Stop 86
tcaagaaaacgctttctatttatat

SEQ ID NO: 424276 - DNA, 25 bp, Artificial
  probe
  misc_feature (1)..(25): SEQ ID NO: 5880; WAN0249FO; Start 124; Stop 148
tgaaatattgtacatgttttcaaga

SEQ ID NO: 424277 - DNA, 25 bp, Artificial
  probe
  misc_feature (1)..(25): SEQ ID NO: 5881; WAN024FG8; Start 68; Stop 92
tgttcaataatgtgttggttagtca

SEQ ID NO: 424278 - DNA, 25 bp, Artificial
  probe
  misc_feature (1)..(25): SEQ ID NO: 5881; WAN024FG8; Start 231; Stop 255
ccttaatagttggcaacatacctac

SEQ ID NO: 424279 - DNA, 25 bp, Artificial
  probe
  misc_feature (1)..(25): SEQ ID NO: 5881; WAN024FG8; Start 234; Stop 258
taatagttggcaacatacctactgg

SEQ ID NO: 424280 - DNA, 25 bp, Artificial
  probe
  misc_feature (1)..(25): SEQ ID NO: 5881; WAN024FG8; Start 69; Stop 93
gttcaataatgtgttggttagtcaa

SEQ ID NO: 424281 - DNA, 25 bp, Artificial
  probe
  misc_feature (1)..(25): SEQ ID NO: 5881; WAN024FG8; Start 67; Stop 91
ttgttcaataatgtgttggttagtc

SEQ ID NO: 424282 - DNA, 25 bp, Artificial
  probe
  misc_feature (1)..(25): SEQ ID NO: 5881; WAN024FG8; Start 235; Stop 259
aatagttggcaacatacctactgga

SEQ ID NO: 424283 - DNA, 25 bp, Artificial
  probe
  misc_feature (1)..(25): SEQ ID NO: 5881; WAN024FG8; Start 233; Stop 257
ttaatagttggcaacatacctactg

SEQ ID NO: 424284 - DNA, 25 bp, Artificial
  probe
  misc_feature (1)..(25): SEQ ID NO: 5881; WAN024FG8; Start 232; Stop 256
cttaatagttggcaacatacctact

SEQ ID NO: 424285 - DNA, 25 bp, Artificial
  probe
  misc_feature (1)..(25): SEQ ID NO: 5881; WAN024FG8; Start 236; Stop 260
atagttggcaacatacctactggag

SEQ ID NO: 424286 - DNA, 25 bp, Artificial
  probe
  misc_feature (1)..(25): SEQ ID NO: 5881; WAN024FG8; Start 230; Stop 254
cccttaatagttggcaacataccta

SEQ ID NO: 424287 - DNA, 25 bp, Artificial
  probe
  misc_feature (1)..(25): SEQ ID NO: 5881; WAN024FG8; Start 120; Stop 144
tttcataaccaatagcagtaccttt

SEQ ID NO: 424288 - DNA, 25 bp, Artificial
  probe
  misc_feature (1)..(25): SEQ ID NO: 5881; WAN024FG8; Start 17; Stop 41
tttgctgctttcataggatctgttc

SEQ ID NO: 424289 - DNA, 25 bp, Artificial
  probe
  misc_feature (1)..(25): SEQ ID NO: 5881; WAN024FG8; Start 84; Stop 108
ggttagtcaacataccagcttgtac

SEQ ID NO: 424290 - DNA, 25 bp, Artificial
  probe
  misc_feature (1)..(25): SEQ ID NO: 5881; WAN024FG8; Start 237; Stop 261
tagttggcaacatacctactggagt

SEQ ID NO: 424291 - DNA, 25 bp, Artificial
  probe
  misc_feature (1)..(25): SEQ ID NO: 5881; WAN024FG8; Start 23; Stop 47
gctttcataggatctgttccatttg

SEQ ID NO: 424292 - DNA, 25 bp, Artificial
  probe
  misc_feature (1)..(25): SEQ ID NO: 5881; WAN024FG8; Start 22; Stop 46
tgctttcataggatctgttccattt

SEQ ID NO: 424293 - DNA, 25 bp, Artificial
  probe
  misc_feature (1)..(25): SEQ ID NO: 5881; WAN024FG8; Start 66; Stop 90
tttgttcaataatgtgttggttagt

SEQ ID NO: 424294 - DNA, 25 bp, Artificial
  probe
  misc_feature (1)..(25): SEQ ID NO: 5881; WAN024FG8; Start 21; Stop 45
ctgctttcataggatctgttccatt

SEQ ID NO: 424295 - DNA, 25 bp, Artificial
  probe
  misc_feature (1)..(25): SEQ ID NO: 5881; WAN024FG8; Start 24; Stop 48
ctttcataggatctgttccatttgt

SEQ ID NO: 424296 - DNA, 25 bp, Artificial
  probe
  misc_feature (1)..(25): SEQ ID NO: 5881; WAN024FG8; Start 238; Stop 262
agttggcaacatacctactggagtt

SEQ ID NO: 424297 - DNA, 25 bp, Artificial
  probe
  misc_feature (1)..(25): SEQ ID NO: 5881; WAN024FG8; Start 86; Stop 110
ttagtcaacataccagcttgtacac

SEQ ID NO: 424298 - DNA, 25 bp, Artificial
  probe
  misc_feature (1)..(25): SEQ ID NO: 5881; WAN024FG8; Start 85; Stop 109
gttagtcaacataccagcttgtaca

SEQ ID NO: 424299 - DNA, 25 bp, Artificial
  probe
  misc_feature (1)..(25): SEQ ID NO: 5881; WAN024FG8; Start 216; Stop 240
cagaatcgctaatccccttaatagt

SEQ ID NO: 424300 - DNA, 25 bp, Artificial
  probe
  misc_feature (1)..(25): SEQ ID NO: 5881; WAN024FG8; Start 219; Stop 243
aatcgctaatccccttaatagttgg

SEQ ID NO: 424301 - DNA, 25 bp, Artificial
  probe
  misc_feature (1)..(25): SEQ ID NO: 5881; WAN024FG8; Start 218; Stop 242
gaatcgctaatccccttaatagttg

SEQ ID NO: 424302 - DNA, 25 bp, Artificial
  probe
  misc_feature (1)..(25): SEQ ID NO: 5881; WAN024FG8; Start 26; Stop 50
ttcataggatctgttccatttgtaa

SEQ ID NO: 424303 - DNA, 25 bp, Artificial
  probe
  misc_feature (1)..(25): SEQ ID NO: 5881; WAN024FG8; Start 25; Stop 49
tttcataggatctgttccatttgta

SEQ ID NO: 424304 - DNA, 25 bp, Artificial
  probe
  misc_feature (1)..(25): SEQ ID NO: 5881; WAN024FG8; Start 217; Stop 241
agaatcgctaatccccttaatagtt

SEQ ID NO: 424305 - DNA, 25 bp, Artificial
  probe
  misc_feature (1)..(25): SEQ ID NO: 5881; WAN024FG8; Start 87; Stop 111
tagtcaacataccagcttgtacact

SEQ ID NO: 424306 - DNA, 25 bp, Artificial
  probe
  misc_feature (1)..(25): SEQ ID NO: 5881; WAN024FG8; Start 192; Stop 216
gagtttcattttctttataggctgc

SEQ ID NO: 424307 - DNA, 25 bp, Artificial
  probe
  misc_feature (1)..(25): SEQ ID NO: 5881; WAN024FG8; Start 190; Stop 214
acgagtttcattttctttataggct

SEQ ID NO: 424308 - DNA, 25 bp, Artificial
  probe
  misc_feature (1)..(25): SEQ ID NO: 5881; WAN024FG8; Start 215; Stop 239
gcagaatcgctaatccccttaatag

SEQ ID NO: 424309 - DNA, 25 bp, Artificial
  probe
  misc_feature (1)..(25): SEQ ID NO: 5881; WAN024FG8; Start 27; Stop 51
tcataggatctgttccatttgtaat

SEQ ID NO: 424310 - DNA, 25 bp, Artificial
  probe
  misc_feature (1)..(25): SEQ ID NO: 5882; WAN024D68; Start 54; Stop 78
ggtaaatcttagcgacttccttgat

SEQ ID NO: 424311 - DNA, 25 bp, Artificial
  probe
  misc_feature (1)..(25): SEQ ID NO: 5882; WAN024D68; Start 57; Stop 81
aaatcttagcgacttccttgatagc

SEQ ID NO: 424312 - DNA, 25 bp, Artificial
  probe
  misc_feature (1)..(25): SEQ ID NO: 5882; WAN024D68; Start 116; Stop 140
tgaatttctacgaacaagtcttcct

SEQ ID NO: 424313 - DNA, 25 bp, Artificial
  probe
  misc_feature (1)..(25): SEQ ID NO: 5882; WAN024D68; Start 44; Stop 68
ttattccactggtaaatcttagcga

SEQ ID NO: 424314 - DNA, 25 bp, Artificial
  probe
  misc_feature (1)..(25): SEQ ID NO: 5882; WAN024D68; Start 117; Stop 141
gaatttctacgaacaagtcttcctc

SEQ ID NO: 424315 - DNA, 25 bp, Artificial
  probe
  misc_feature (1)..(25): SEQ ID NO: 5882; WAN024D68; Start 45; Stop 69
tattccactggtaaatcttagcgac

SEQ ID NO: 424316 - DNA, 25 bp, Artificial
  probe
  misc_feature (1)..(25): SEQ ID NO: 5882; WAN024D68; Start 52; Stop 76
ctggtaaatcttagcgacttccttg

SEQ ID NO: 424317 - DNA, 25 bp, Artificial
  probe
  misc_feature (1)..(25): SEQ ID NO: 5882; WAN024D68; Start 112; Stop 136
ggtttgaatttctacgaacaagtct

SEQ ID NO: 424318 - DNA, 25 bp, Artificial
  probe
  misc_feature (1)..(25): SEQ ID NO: 5882; WAN024D68; Start 115; Stop 139
ttgaatttctacgaacaagtcttcc

SEQ ID NO: 424319 - DNA, 25 bp, Artificial
  probe
  misc_feature (1)..(25): SEQ ID NO: 5882; WAN024D68; Start 111; Stop 135
gggtttgaatttctacgaacaagtc

SEQ ID NO: 424320 - DNA, 25 bp, Artificial
  probe
  misc_feature (1)..(25): SEQ ID NO: 5882; WAN024D68; Start 55; Stop 79
gtaaatcttagcgacttccttgata

SEQ ID NO: 424321 - DNA, 25 bp, Artificial
  probe
  misc_feature (1)..(25): SEQ ID NO: 5882; WAN024D68; Start 53; Stop 77
tggtaaatcttagcgacttccttga

SEQ ID NO: 424322 - DNA, 25 bp, Artificial
  probe
  misc_feature (1)..(25): SEQ ID NO: 5882; WAN024D68; Start 51; Stop 75
actggtaaatcttagcgacttcctt

SEQ ID NO: 424323 - DNA, 25 bp, Artificial
  probe
  misc_feature (1)..(25): SEQ ID NO: 5882; WAN024D68; Start 43; Stop 67
tttattccactggtaaatcttagcg

SEQ ID NO: 424324 - DNA, 25 bp, Artificial
  probe
  misc_feature (1)..(25): SEQ ID NO: 5882; WAN024D68; Start 56; Stop 80
taaatcttagcgacttccttgatag

SEQ ID NO: 424325 - DNA, 25 bp, Artificial
  probe
  misc_feature (1)..(25): SEQ ID NO: 5882; WAN024D68; Start 46; Stop 70
attccactggtaaatcttagcgact

SEQ ID NO: 424326 - DNA, 25 bp, Artificial
  probe
  misc_feature (1)..(25): SEQ ID NO: 5882; WAN024D68; Start 113; Stop 137
gtttgaatttctacgaacaagtctt

SEQ ID NO: 424327 - DNA, 25 bp, Artificial
  probe
  misc_feature (1)..(25): SEQ ID NO: 5882; WAN024D68; Start 47; Stop 71
ttccactggtaaatcttagcgactt

SEQ ID NO: 424328 - DNA, 25 bp, Artificial
  probe
  misc_feature (1)..(25): SEQ ID NO: 5882; WAN024D68; Start 50; Stop 74
cactggtaaatcttagcgacttcct

SEQ ID NO: 424329 - DNA, 25 bp, Artificial
  probe
  misc_feature (1)..(25): SEQ ID NO: 5882; WAN024D68; Start 114; Stop 138
tttgaatttctacgaacaagtcttc

SEQ ID NO: 424330 - DNA, 25 bp, Artificial
  probe
  misc_feature (1)..(25): SEQ ID NO: 5882; WAN024D68; Start 110; Stop 134
cgggtttgaatttctacgaacaagt

SEQ ID NO: 424331 - DNA, 25 bp, Artificial
  probe
  misc_feature (1)..(25): SEQ ID NO: 5882; WAN024D68; Start 48; Stop 72
tccactggtaaatcttagcgacttc

SEQ ID NO: 424332 - DNA, 25 bp, Artificial
  probe
  misc_feature (1)..(25): SEQ ID NO: 5882; WAN024D68; Start 59; Stop 83
atcttagcgacttccttgatagctt

SEQ ID NO: 424333 - DNA, 25 bp, Artificial
  probe
  misc_feature (1)..(25): SEQ ID NO: 5882; WAN024D68; Start 58; Stop 82
aatcttagcgacttccttgatagct

SEQ ID NO: 424334 - DNA, 25 bp, Artificial
  probe
  misc_feature (1)..(25): SEQ ID NO: 5882; WAN024D68; Start 106; Stop 130
gatgcgggtttgaatttctacgaac

SEQ ID NO: 424335 - DNA, 25 bp, Artificial
  probe
  misc_feature (1)..(25): SEQ ID NO: 5882; WAN024D68; Start 49; Stop 73
ccactggtaaatcttagcgacttcc

SEQ ID NO: 424336 - DNA, 25 bp, Artificial
  probe
  misc_feature (1)..(25): SEQ ID NO: 5882; WAN024D68; Start 118; Stop 142
aatttctacgaacaagtcttcctcg

SEQ ID NO: 424337 - DNA, 25 bp, Artificial
  probe
  misc_feature (1)..(25): SEQ ID NO: 5882; WAN024D68; Start 109; Stop 133
gcgggtttgaatttctacgaacaag

SEQ ID NO: 424338 - DNA, 25 bp, Artificial
  probe
  misc_feature (1)..(25): SEQ ID NO: 5882; WAN024D68; Start 60; Stop 84
tcttagcgacttccttgatagcttg

SEQ ID NO: 424339 - DNA, 25 bp, Artificial
  probe
  misc_feature (1)..(25): SEQ ID NO: 5882; WAN024D68; Start 36; Stop 60
gctgacttttattccactggtaaat

SEQ ID NO: 424340 - DNA, 25 bp, Artificial
  probe
  misc_feature (1)..(25): SEQ ID NO: 5882; WAN024D68; Start 107; Stop 131
atgcgggtttgaatttctacgaaca

SEQ ID NO: 424341 - DNA, 25 bp, Artificial
  probe
  misc_feature (1)..(25): SEQ ID NO: 5882; WAN024D68; Start 108; Stop 132
tgcgggtttgaatttctacgaacaa

SEQ ID NO: 424342 - DNA, 25 bp, Artificial
  probe
  misc_feature (1)..(25): SEQ ID NO: 5882; WAN024D68; Start 105; Stop 129
ggatgcgggtttgaatttctacgaa

SEQ ID NO: 424343 - DNA, 25 bp, Artificial
  probe
  misc_feature (1)..(25): SEQ ID NO: 5883; WAN024GB3; Start 125; Stop 149
tcaacttatcagccactattccatc

SEQ ID NO: 424344 - DNA, 25 bp, Artificial
  probe
  misc_feature (1)..(25): SEQ ID NO: 5883; WAN024GB3; Start 124; Stop 148
gtcaacttatcagccactattccat

SEQ ID NO: 424345 - DNA, 25 bp, Artificial
  probe
  misc_feature (1)..(25): SEQ ID NO: 5883; WAN024GB3; Start 121; Stop 145
aaggtcaacttatcagccactattc

SEQ ID NO: 424346 - DNA, 25 bp, Artificial
  probe
  misc_feature (1)..(25): SEQ ID NO: 5883; WAN024GB3; Start 126; Stop 150
caacttatcagccactattccatcc

SEQ ID NO: 424347 - DNA, 25 bp, Artificial
  probe
  misc_feature (1)..(25): SEQ ID NO: 5883; WAN024GB3; Start 127; Stop 151
aacttatcagccactattccatcca

SEQ ID NO: 424348 - DNA, 25 bp, Artificial
  probe
  misc_feature (1)..(25): SEQ ID NO: 5883; WAN024GB3; Start 130; Stop 154
ttatcagccactattccatccacaa

SEQ ID NO: 424349 - DNA, 25 bp, Artificial
  probe
  misc_feature (1)..(25): SEQ ID NO: 5883; WAN024GB3; Start 122; Stop 146
aggtcaacttatcagccactattcc

SEQ ID NO: 424350 - DNA, 25 bp, Artificial
  probe
  misc_feature (1)..(25): SEQ ID NO: 5883; WAN024GB3; Start 129; Stop 153
cttatcagccactattccatccaca

SEQ ID NO: 424351 - DNA, 25 bp, Artificial
  probe
  misc_feature (1)..(25): SEQ ID NO: 5883; WAN024GB3; Start 128; Stop 152
acttatcagccactattccatccac

SEQ ID NO: 424352 - DNA, 25 bp, Artificial
  probe
  misc_feature (1)..(25): SEQ ID NO: 5883; WAN024GB3; Start 131; Stop 155
tatcagccactattccatccacaac

SEQ ID NO: 424353 - DNA, 25 bp, Artificial
  probe
  misc_feature (1)..(25): SEQ ID NO: 5883; WAN024GB3; Start 123; Stop 147
ggtcaacttatcagccactattcca

SEQ ID NO: 424354 - DNA, 25 bp, Artificial
  probe
  misc_feature (1)..(25): SEQ ID NO: 5883; WAN024GB3; Start 217; Stop 241
tcaggaactaagatagaaagaacgg

SEQ ID NO: 424355 - DNA, 25 bp, Artificial
  probe
  misc_feature (1)..(25): SEQ ID NO: 5883; WAN024GB3; Start 177; Stop 201
tagtttatccttggtctgtccttca

SEQ ID NO: 424356 - DNA, 25 bp, Artificial
  probe
  misc_feature (1)..(25): SEQ ID NO: 5883; WAN024GB3; Start 120; Stop 144
aaaggtcaacttatcagccactatt

SEQ ID NO: 424357 - DNA, 25 bp, Artificial
  probe
  misc_feature (1)..(25): SEQ ID NO: 5883; WAN024GB3; Start 218; Stop 242
caggaactaagatagaaagaacggc

SEQ ID NO: 424358 - DNA, 25 bp, Artificial
  probe
  misc_feature (1)..(25): SEQ ID NO: 5883; WAN024GB3; Start 176; Stop 200
ctagtttatccttggtctgtccttc

SEQ ID NO: 424359 - DNA, 25 bp, Artificial
  probe
  misc_feature (1)..(25): SEQ ID NO: 5883; WAN024GB3; Start 172; Stop 196
cttcctagtttatccttggtctgtc

SEQ ID NO: 424360 - DNA, 25 bp, Artificial
  probe
  misc_feature (1)..(25): SEQ ID NO: 5883; WAN024GB3; Start 180; Stop 204
tttatccttggtctgtccttcaaac

SEQ ID NO: 424361 - DNA, 25 bp, Artificial
  probe
  misc_feature (1)..(25): SEQ ID NO: 5883; WAN024GB3; Start 179; Stop 203
gtttatccttggtctgtccttcaaa

SEQ ID NO: 424362 - DNA, 25 bp, Artificial
  probe
  misc_feature (1)..(25): SEQ ID NO: 5883; WAN024GB3; Start 216; Stop 240
ttcaggaactaagatagaaagaacg

SEQ ID NO: 424363 - DNA, 25 bp, Artificial
  probe
  misc_feature (1)..(25): SEQ ID NO: 5883; WAN024GB3; Start 175; Stop 199
cctagtttatccttggtctgtcctt

SEQ ID NO: 424364 - DNA, 25 bp, Artificial
  probe
  misc_feature (1)..(25): SEQ ID NO: 5883; WAN024GB3; Start 173; Stop 197
ttcctagtttatccttggtctgtcc

SEQ ID NO: 424365 - DNA, 25 bp, Artificial
  probe
  misc_feature (1)..(25): SEQ ID NO: 5883; WAN024GB3; Start 181; Stop 205
ttatccttggtctgtccttcaaact

SEQ ID NO: 424366 - DNA, 25 bp, Artificial
  probe
  misc_feature (1)..(25): SEQ ID NO: 5883; WAN024GB3; Start 178; Stop 202
agtttatccttggtctgtccttcaa

SEQ ID NO: 424367 - DNA, 25 bp, Artificial
  probe
  misc_feature (1)..(25): SEQ ID NO: 5883; WAN024GB3; Start 171; Stop 195
gcttcctagtttatccttggtctgt

SEQ ID NO: 424368 - DNA, 25 bp, Artificial
  probe
  misc_feature (1)..(25): SEQ ID NO: 5883; WAN024GB3; Start 132; Stop 156
atcagccactattccatccacaact

SEQ ID NO: 424369 - DNA, 25 bp, Artificial
  probe
  misc_feature (1)..(25): SEQ ID NO: 5883; WAN024GB3; Start 174; Stop 198
tcctagtttatccttggtctgtcct

SEQ ID NO: 424370 - DNA, 25 bp, Artificial
  probe
  misc_feature (1)..(25): SEQ ID NO: 5883; WAN024GB3; Start 182; Stop 206
tatccttggtctgtccttcaaactg

SEQ ID NO: 424371 - DNA, 25 bp, Artificial
  probe
  misc_feature (1)..(25): SEQ ID NO: 5883; WAN024GB3; Start 76; Stop 100
ttgcggatgaggttagaagctaatt

SEQ ID NO: 424372 - DNA, 25 bp, Artificial
  probe
  misc_feature (1)..(25): SEQ ID NO: 5883; WAN024GB3; Start 170; Stop 194
ggcttcctagtttatccttggtctg

SEQ ID NO: 424373 - DNA, 25 bp, Artificial
  probe
  misc_feature (1)..(25): SEQ ID NO: 5883; WAN024GB3; Start 77; Stop 101
tgcggatgaggttagaagctaattc

SEQ ID NO: 424374 - DNA, 25 bp, Artificial
  probe
  misc_feature (1)..(25): SEQ ID NO: 5883; WAN024GB3; Start 75; Stop 99
cttgcggatgaggttagaagctaat

SEQ ID NO: 424375 - DNA, 25 bp, Artificial
  probe
  misc_feature (1)..(25): SEQ ID NO: 5883; WAN024GB3; Start 206; Stop 230
gcaagtgttcttcaggaactaagat

SEQ ID NO: 424376 - DNA, 25 bp, Artificial
  probe
  misc_feature (1)..(25): SEQ ID NO: 5884; WAN024C92; Start 78; Stop 102
tttgaatttcatggttcgggataaa

SEQ ID NO: 424377 - DNA, 25 bp, Artificial
  probe
  misc_feature (1)..(25): SEQ ID NO: 5884; WAN024C92; Start 87; Stop 111
catggttcgggataaaatagttcac

SEQ ID NO: 424378 - DNA, 25 bp, Artificial
  probe
  misc_feature (1)..(25): SEQ ID NO: 5884; WAN024C92; Start 86; Stop 110
tcatggttcgggataaaatagttca

SEQ ID NO: 424379 - DNA, 25 bp, Artificial
  probe
  misc_feature (1)..(25): SEQ ID NO: 5884; WAN024C92; Start 85; Stop 109
ttcatggttcgggataaaatagttc

SEQ ID NO: 424380 - DNA, 25 bp, Artificial
  probe
  misc_feature (1)..(25): SEQ ID NO: 5884; WAN024C92; Start 84; Stop 108
tttcatggttcgggataaaatagtt

SEQ ID NO: 424381 - DNA, 25 bp, Artificial
  probe
  misc_feature (1)..(25): SEQ ID NO: 5884; WAN024C92; Start 76; Stop 100
cttttgaatttcatggttcgggata

SEQ ID NO: 424382 - DNA, 25 bp, Artificial
  probe
  misc_feature (1)..(25): SEQ ID NO: 5884; WAN024C92; Start 79; Stop 103
ttgaatttcatggttcgggataaaa

SEQ ID NO: 424383 - DNA, 25 bp, Artificial
  probe
  misc_feature (1)..(25): SEQ ID NO: 5884; WAN024C92; Start 77; Stop 101
ttttgaatttcatggttcgggataa

SEQ ID NO: 424384 - DNA, 25 bp, Artificial
  probe
  misc_feature (1)..(25): SEQ ID NO: 5884; WAN024C92; Start 80; Stop 104
tgaatttcatggttcgggataaaat

SEQ ID NO: 424385 - DNA, 25 bp, Artificial
  probe
  misc_feature (1)..(25): SEQ ID NO: 5884; WAN024C92; Start 75; Stop 99
acttttgaatttcatggttcgggat

SEQ ID NO: 424386 - DNA, 25 bp, Artificial
  probe
  misc_feature (1)..(25): SEQ ID NO: 5884; WAN024C92; Start 74; Stop 98
aacttttgaatttcatggttcggga

SEQ ID NO: 424387 - DNA, 25 bp, Artificial
  probe
  misc_feature (1)..(25): SEQ ID NO: 5884; WAN024C92; Start 83; Stop 107
atttcatggttcgggataaaatagt

SEQ ID NO: 424388 - DNA, 25 bp, Artificial
  probe
  misc_feature (1)..(25): SEQ ID NO: 5884; WAN024C92; Start 82; Stop 106
aatttcatggttcgggataaaatag

SEQ ID NO: 424389 - DNA, 25 bp, Artificial
  probe
  misc_feature (1)..(25): SEQ ID NO: 5884; WAN024C92; Start 81; Stop 105
gaatttcatggttcgggataaaata

SEQ ID NO: 424390 - DNA, 25 bp, Artificial
  probe
  misc_feature (1)..(25): SEQ ID NO: 5884; WAN024C92; Start 31; Stop 55
gataaaatccgaggggctagaaacg

SEQ ID NO: 424391 - DNA, 25 bp, Artificial
  probe
  misc_feature (1)..(25): SEQ ID NO: 5884; WAN024C92; Start 73; Stop 97
gaacttttgaatttcatggttcggg

SEQ ID NO: 424392 - DNA, 25 bp, Artificial
  probe
  misc_feature (1)..(25): SEQ ID NO: 5884; WAN024C92; Start 70; Stop 94
gccgaacttttgaatttcatggttc

SEQ ID NO: 424393 - DNA, 25 bp, Artificial
  probe
  misc_feature (1)..(25): SEQ ID NO: 5884; WAN024C92; Start 32; Stop 56
ataaaatccgaggggctagaaacgt

SEQ ID NO: 424394 - DNA, 25 bp, Artificial
  probe
  misc_feature (1)..(25): SEQ ID NO: 5884; WAN024C92; Start 69; Stop 93
ggccgaacttttgaatttcatggtt

SEQ ID NO: 424395 - DNA, 25 bp, Artificial
  probe
  misc_feature (1)..(25): SEQ ID NO: 5884; WAN024C92; Start 43; Stop 67
ggggctagaaacgttgttaaatcaa

SEQ ID NO: 424396 - DNA, 25 bp, Artificial
  probe
  misc_feature (1)..(25): SEQ ID NO: 5884; WAN024C92; Start 30; Stop 54
ggataaaatccgaggggctagaaac

SEQ ID NO: 424397 - DNA, 25 bp, Artificial
  probe
  misc_feature (1)..(25): SEQ ID NO: 5884; WAN024C92; Start 44; Stop 68
gggctagaaacgttgttaaatcaac

SEQ ID NO: 424398 - DNA, 25 bp, Artificial
  probe
  misc_feature (1)..(25): SEQ ID NO: 5884; WAN024C92; Start 41; Stop 65
gaggggctagaaacgttgttaaatc

SEQ ID NO: 424399 - DNA, 25 bp, Artificial
  probe
  misc_feature (1)..(25): SEQ ID NO: 5884; WAN024C92; Start 42; Stop 66
aggggctagaaacgttgttaaatca

SEQ ID NO: 424400 - DNA, 25 bp, Artificial
  probe
  misc_feature (1)..(25): SEQ ID NO: 5884; WAN024C92; Start 40; Stop 64
cgaggggctagaaacgttgttaaat

SEQ ID NO: 424401 - DNA, 25 bp, Artificial
  probe
  misc_feature (1)..(25): SEQ ID NO: 5884; WAN024C92; Start 33; Stop 57
taaaatccgaggggctagaaacgtt

SEQ ID NO: 424402 - DNA, 25 bp, Artificial
  probe
  misc_feature (1)..(25): SEQ ID NO: 5884; WAN024C92; Start 39; Stop 63
ccgaggggctagaaacgttgttaaa

SEQ ID NO: 424403 - DNA, 25 bp, Artificial
  probe
  misc_feature (1)..(25): SEQ ID NO: 5885; WAN024EVJ; Start 129; Stop 153
tcagaaggctaggctactaactaat

SEQ ID NO: 424404 - DNA, 25 bp, Artificial
  probe
  misc_feature (1)..(25): SEQ ID NO: 5885; WAN024EVJ; Start 128; Stop 152
ttcagaaggctaggctactaactaa

SEQ ID NO: 424405 - DNA, 25 bp, Artificial
  probe
  misc_feature (1)..(25): SEQ ID NO: 5885; WAN024EVJ; Start 98; Stop 122
ttcaactgactatatctcctatggt

SEQ ID NO: 424406 - DNA, 25 bp, Artificial
  probe
  misc_feature (1)..(25): SEQ ID NO: 5885; WAN024EVJ; Start 127; Stop 151
gttcagaaggctaggctactaacta

SEQ ID NO: 424407 - DNA, 25 bp, Artificial
  probe
  misc_feature (1)..(25): SEQ ID NO: 5885; WAN024EVJ; Start 99; Stop 123
tcaactgactatatctcctatggtt

SEQ ID NO: 424408 - DNA, 25 bp, Artificial
  probe
  misc_feature (1)..(25): SEQ ID NO: 5885; WAN024EVJ; Start 100; Stop 124
caactgactatatctcctatggttc

SEQ ID NO: 424409 - DNA, 25 bp, Artificial
  probe
  misc_feature (1)..(25): SEQ ID NO: 5885; WAN024EVJ; Start 101; Stop 125
aactgactatatctcctatggttct

SEQ ID NO: 424410 - DNA, 25 bp, Artificial
  probe
  misc_feature (1)..(25): SEQ ID NO: 5885; WAN024EVJ; Start 102; Stop 126
actgactatatctcctatggttcta

SEQ ID NO: 424411 - DNA, 25 bp, Artificial
  probe
  misc_feature (1)..(25): SEQ ID NO: 5885; WAN024EVJ; Start 109; Stop 133
atatctcctatggttctagttcaga

SEQ ID NO: 424412 - DNA, 25 bp, Artificial
  probe
  misc_feature (1)..(25): SEQ ID NO: 5885; WAN024EVJ; Start 125; Stop 149
tagttcagaaggctaggctactaac

SEQ ID NO: 424413 - DNA, 25 bp, Artificial
  probe
  misc_feature (1)..(25): SEQ ID NO: 5885; WAN024EVJ; Start 124; Stop 148
ctagttcagaaggctaggctactaa

SEQ ID NO: 424414 - DNA, 25 bp, Artificial
  probe
  misc_feature (1)..(25): SEQ ID NO: 5885; WAN024EVJ; Start 5; Stop 29
tctacaatcctgttgagaagacacg

SEQ ID NO: 424415 - DNA, 25 bp, Artificial
  probe
  misc_feature (1)..(25): SEQ ID NO: 5885; WAN024EVJ; Start 123; Stop 147
tctagttcagaaggctaggctacta

SEQ ID NO: 424416 - DNA, 25 bp, Artificial
  probe
  misc_feature (1)..(25): SEQ ID NO: 5885; WAN024EVJ; Start 116; Stop 140
ctatggttctagttcagaaggctag

SEQ ID NO: 424417 - DNA, 25 bp, Artificial
  probe
  misc_feature (1)..(25): SEQ ID NO: 5885; WAN024EVJ; Start 112; Stop 136
tctcctatggttctagttcagaagg

SEQ ID NO: 424418 - DNA, 25 bp, Artificial
  probe
  misc_feature (1)..(25): SEQ ID NO: 5885; WAN024EVJ; Start 111; Stop 135
atctcctatggttctagttcagaag

SEQ ID NO: 424419 - DNA, 25 bp, Artificial
  probe
  misc_feature (1)..(25): SEQ ID NO: 5885; WAN024EVJ; Start 117; Stop 141
tatggttctagttcagaaggctagg

SEQ ID NO: 424420 - DNA, 25 bp, Artificial
  probe
  misc_feature (1)..(25): SEQ ID NO: 5885; WAN024EVJ; Start 115; Stop 139
cctatggttctagttcagaaggcta

SEQ ID NO: 424421 - DNA, 25 bp, Artificial
  probe
  misc_feature (1)..(25): SEQ ID NO: 5885; WAN024EVJ; Start 103; Stop 127
ctgactatatctcctatggttctag

SEQ ID NO: 424422 - DNA, 25 bp, Artificial
  probe
  misc_feature (1)..(25): SEQ ID NO: 5885; WAN024EVJ; Start 104; Stop 128
tgactatatctcctatggttctagt

SEQ ID NO: 424423 - DNA, 25 bp, Artificial
  probe
  misc_feature (1)..(25): SEQ ID NO: 5885; WAN024EVJ; Start 113; Stop 137
ctcctatggttctagttcagaaggc

SEQ ID NO: 424424 - DNA, 25 bp, Artificial
  probe
  misc_feature (1)..(25): SEQ ID NO: 5885; WAN024EVJ; Start 110; Stop 134
tatctcctatggttctagttcagaa

SEQ ID NO: 424425 - DNA, 25 bp, Artificial
  probe
  misc_feature (1)..(25): SEQ ID NO: 5885; WAN024EVJ; Start 108; Stop 132
tatatctcctatggttctagttcag

SEQ ID NO: 424426 - DNA, 25 bp, Artificial
  probe
  misc_feature (1)..(25): SEQ ID NO: 5885; WAN024EVJ; Start 107; Stop 131
ctatatctcctatggttctagttca

SEQ ID NO: 424427 - DNA, 25 bp, Artificial
  probe
  misc_feature (1)..(25): SEQ ID NO: 5885; WAN024EVJ; Start 122; Stop 146
ttctagttcagaaggctaggctact

SEQ ID NO: 424428 - DNA, 25 bp, Artificial
  probe
  misc_feature (1)..(25): SEQ ID NO: 5885; WAN024EVJ; Start 121; Stop 145
gttctagttcagaaggctaggctac

SEQ ID NO: 424429 - DNA, 25 bp, Artificial
  probe
  misc_feature (1)..(25): SEQ ID NO: 5885; WAN024EVJ; Start 97; Stop 121
tttcaactgactatatctcctatgg

SEQ ID NO: 424430 - DNA, 25 bp, Artificial
  probe
  misc_feature (1)..(25): SEQ ID NO: 5885; WAN024EVJ; Start 93; Stop 117
tttgtttcaactgactatatctcct

SEQ ID NO: 424431 - DNA, 25 bp, Artificial
  probe
  misc_feature (1)..(25): SEQ ID NO: 5885; WAN024EVJ; Start 114; Stop 138
tcctatggttctagttcagaaggct

SEQ ID NO: 424432 - DNA, 25 bp, Artificial
  probe
  misc_feature (1)..(25): SEQ ID NO: 5885; WAN024EVJ; Start 6; Stop 30
ctacaatcctgttgagaagacacgt

SEQ ID NO: 424433 - DNA, 25 bp, Artificial
  probe
  misc_feature (1)..(25): SEQ ID NO: 5885; WAN024EVJ; Start 126; Stop 150
agttcagaaggctaggctactaact

SEQ ID NO: 424434 - DNA, 25 bp, Artificial
  probe
  misc_feature (1)..(25): SEQ ID NO: 5885; WAN024EVJ; Start 120; Stop 144
ggttctagttcagaaggctaggcta

SEQ ID NO: 424435 - DNA, 25 bp, Artificial
  probe
  misc_feature (1)..(25): SEQ ID NO: 5885; WAN024EVJ; Start 95; Stop 119
tgtttcaactgactatatctcctat

SEQ ID NO: 424436 - DNA, 25 bp, Artificial
  probe
  misc_feature (1)..(25): SEQ ID NO: 5886; WAN024CH9; Start 136; Stop 160
atatgggttgaaaccttgagcaatg

SEQ ID NO: 424437 - DNA, 25 bp, Artificial
  probe
  misc_feature (1)..(25): SEQ ID NO: 5886; WAN024CH9; Start 115; Stop 139
gtatggagaccattcagctacatat

SEQ ID NO: 424438 - DNA, 25 bp, Artificial
  probe
  misc_feature (1)..(25): SEQ ID NO: 5886; WAN024CH9; Start 170; Stop 194
gtatgagtcacaccgtgttgaactg

SEQ ID NO: 424439 - DNA, 25 bp, Artificial
  probe
  misc_feature (1)..(25): SEQ ID NO: 5886; WAN024CH9; Start 169; Stop 193
agtatgagtcacaccgtgttgaact

SEQ ID NO: 424440 - DNA, 25 bp, Artificial
  probe
  misc_feature (1)..(25): SEQ ID NO: 5886; WAN024CH9; Start 168; Stop 192
cagtatgagtcacaccgtgttgaac

SEQ ID NO: 424441 - DNA, 25 bp, Artificial
  probe
  misc_feature (1)..(25): SEQ ID NO: 5886; WAN024CH9; Start 114; Stop 138
ggtatggagaccattcagctacata

SEQ ID NO: 424442 - DNA, 25 bp, Artificial
  probe
  misc_feature (1)..(25): SEQ ID NO: 5886; WAN024CH9; Start 137; Stop 161
tatgggttgaaaccttgagcaatga

SEQ ID NO: 424443 - DNA, 25 bp, Artificial
  probe
  misc_feature (1)..(25): SEQ ID NO: 5886; WAN024CH9; Start 215; Stop 239
tcagttggtgtgagttggtaacgac

SEQ ID NO: 424444 - DNA, 25 bp, Artificial
  probe
  misc_feature (1)..(25): SEQ ID NO: 5886; WAN024CH9; Start 132; Stop 156
ctacatatgggttgaaaccttgagc

SEQ ID NO: 424445 - DNA, 25 bp, Artificial
  probe
  misc_feature (1)..(25): SEQ ID NO: 5886; WAN024CH9; Start 131; Stop 155
gctacatatgggttgaaaccttgag

SEQ ID NO: 424446 - DNA, 25 bp, Artificial
  probe
  misc_feature (1)..(25): SEQ ID NO: 5886; WAN024CH9; Start 116; Stop 140
tatggagaccattcagctacatatg

SEQ ID NO: 424447 - DNA, 25 bp, Artificial
  probe
  misc_feature (1)..(25): SEQ ID NO: 5886; WAN024CH9; Start 135; Stop 159
catatgggttgaaaccttgagcaat

SEQ ID NO: 424448 - DNA, 25 bp, Artificial
  probe
  misc_feature (1)..(25): SEQ ID NO: 5886; WAN024CH9; Start 130; Stop 154
agctacatatgggttgaaaccttga

SEQ ID NO: 424449 - DNA, 25 bp, Artificial
  probe
  misc_feature (1)..(25): SEQ ID NO: 5886; WAN024CH9; Start 129; Stop 153
cagctacatatgggttgaaaccttg

SEQ ID NO: 424450 - DNA, 25 bp, Artificial
  probe
  misc_feature (1)..(25): SEQ ID NO: 5886; WAN024CH9; Start 128; Stop 152
tcagctacatatgggttgaaacctt

SEQ ID NO: 424451 - DNA, 25 bp, Artificial
  probe
  misc_feature (1)..(25): SEQ ID NO: 5886; WAN024CH9; Start 133; Stop 157
tacatatgggttgaaaccttgagca

SEQ ID NO: 424452 - DNA, 25 bp, Artificial
  probe
  misc_feature (1)..(25): SEQ ID NO: 5886; WAN024CH9; Start 125; Stop 149
cattcagctacatatgggttgaaac

SEQ ID NO: 424453 - DNA, 25 bp, Artificial
  probe
  misc_feature (1)..(25): SEQ ID NO: 5886; WAN024CH9; Start 126; Stop 150
attcagctacatatgggttgaaacc

SEQ ID NO: 424454 - DNA, 25 bp, Artificial
  probe
  misc_feature (1)..(25): SEQ ID NO: 5886; WAN024CH9; Start 117; Stop 141
atggagaccattcagctacatatgg

SEQ ID NO: 424455 - DNA, 25 bp, Artificial
  probe
  misc_feature (1)..(25): SEQ ID NO: 5886; WAN024CH9; Start 171; Stop 195
tatgagtcacaccgtgttgaactgg

SEQ ID NO: 424456 - DNA, 25 bp, Artificial
  probe
  misc_feature (1)..(25): SEQ ID NO: 5886; WAN024CH9; Start 134; Stop 158
acatatgggttgaaaccttgagcaa

SEQ ID NO: 424457 - DNA, 25 bp, Artificial
  probe
  misc_feature (1)..(25): SEQ ID NO: 5886; WAN024CH9; Start 127; Stop 151
ttcagctacatatgggttgaaacct

SEQ ID NO: 424458 - DNA, 25 bp, Artificial
  probe
  misc_feature (1)..(25): SEQ ID NO: 5886; WAN024CH9; Start 142; Stop 166
gttgaaaccttgagcaatgaccgac

SEQ ID NO: 424459 - DNA, 25 bp, Artificial
  probe
  misc_feature (1)..(25): SEQ ID NO: 5886; WAN024CH9; Start 138; Stop 162
atgggttgaaaccttgagcaatgac

SEQ ID NO: 424460 - DNA, 25 bp, Artificial
  probe
  misc_feature (1)..(25): SEQ ID NO: 5886; WAN024CH9; Start 124; Stop 148
ccattcagctacatatgggttgaaa

SEQ ID NO: 424461 - DNA, 25 bp, Artificial
  probe
  misc_feature (1)..(25): SEQ ID NO: 5886; WAN024CH9; Start 113; Stop 137
tggtatggagaccattcagctacat

SEQ ID NO: 424462 - DNA, 25 bp, Artificial
  probe
  misc_feature (1)..(25): SEQ ID NO: 5886; WAN024CH9; Start 123; Stop 147
accattcagctacatatgggttgaa

SEQ ID NO: 424463 - DNA, 25 bp, Artificial
  probe
  misc_feature (1)..(25): SEQ ID NO: 5886; WAN024CH9; Start 120; Stop 144
gagaccattcagctacatatgggtt

SEQ ID NO: 424464 - DNA, 25 bp, Artificial
  probe
  misc_feature (1)..(25): SEQ ID NO: 5886; WAN024CH9; Start 187; Stop 211
ttgaactggcaatttctgcacagat

SEQ ID NO: 424465 - DNA, 25 bp, Artificial
  probe
  misc_feature (1)..(25): SEQ ID NO: 5886; WAN024CH9; Start 80; Stop 104
gcagttgcttcgataaccgcataag

SEQ ID NO: 424466 - DNA, 25 bp, Artificial
  probe
  misc_feature (1)..(25): SEQ ID NO: 5886; WAN024CH9; Start 122; Stop 146
gaccattcagctacatatgggttga

SEQ ID NO: 424467 - DNA, 25 bp, Artificial
  probe
  misc_feature (1)..(25): SEQ ID NO: 5886; WAN024CH9; Start 121; Stop 145
agaccattcagctacatatgggttg

SEQ ID NO: 424468 - DNA, 25 bp, Artificial
  probe
  misc_feature (1)..(25): SEQ ID NO: 5886; WAN024CH9; Start 214; Stop 238
ctcagttggtgtgagttggtaacga

SEQ ID NO: 424469 - DNA, 25 bp, Artificial
  probe
  misc_feature (1)..(25): SEQ ID NO: 5887; WAN0249M3; Start 23; Stop 47
aactcgtactaatatagactgtgat

SEQ ID NO: 424470 - DNA, 25 bp, Artificial
  probe
  misc_feature (1)..(25): SEQ ID NO: 5887; WAN0249M3; Start 112; Stop 136
tcaaagactatagattccatgagct

SEQ ID NO: 424471 - DNA, 25 bp, Artificial
  probe
  misc_feature (1)..(25): SEQ ID NO: 5887; WAN0249M3; Start 99; Stop 123
ctcttcctctgtgtcaaagactata

SEQ ID NO: 424472 - DNA, 25 bp, Artificial
  probe
  misc_feature (1)..(25): SEQ ID NO: 5887; WAN0249M3; Start 98; Stop 122
actcttcctctgtgtcaaagactat

SEQ ID NO: 424473 - DNA, 25 bp, Artificial
  probe
  misc_feature (1)..(25): SEQ ID NO: 5887; WAN0249M3; Start 101; Stop 125
cttcctctgtgtcaaagactataga

SEQ ID NO: 424474 - DNA, 25 bp, Artificial
  probe
  misc_feature (1)..(25): SEQ ID NO: 5887; WAN0249M3; Start 97; Stop 121
aactcttcctctgtgtcaaagacta

SEQ ID NO: 424475 - DNA, 25 bp, Artificial
  probe
  misc_feature (1)..(25): SEQ ID NO: 5887; WAN0249M3; Start 111; Stop 135
gtcaaagactatagattccatgagc

SEQ ID NO: 424476 - DNA, 25 bp, Artificial
  probe
  misc_feature (1)..(25): SEQ ID NO: 5887; WAN0249M3; Start 24; Stop 48
actcgtactaatatagactgtgata

SEQ ID NO: 424477 - DNA, 25 bp, Artificial
  probe
  misc_feature (1)..(25): SEQ ID NO: 5887; WAN0249M3; Start 106; Stop 130
tctgtgtcaaagactatagattcca

SEQ ID NO: 424478 - DNA, 25 bp, Artificial
  probe
  misc_feature (1)..(25): SEQ ID NO: 5887; WAN0249M3; Start 22; Stop 46
aaactcgtactaatatagactgtga

SEQ ID NO: 424479 - DNA, 25 bp, Artificial
  probe
  misc_feature (1)..(25): SEQ ID NO: 5887; WAN0249M3; Start 21; Stop 45
caaactcgtactaatatagactgtg

SEQ ID NO: 424480 - DNA, 25 bp, Artificial
  probe
  misc_feature (1)..(25): SEQ ID NO: 5887; WAN0249M3; Start 20; Stop 44
tcaaactcgtactaatatagactgt

SEQ ID NO: 424481 - DNA, 25 bp, Artificial
  probe
  misc_feature (1)..(25): SEQ ID NO: 5887; WAN0249M3; Start 103; Stop 127
tcctctgtgtcaaagactatagatt

SEQ ID NO: 424482 - DNA, 25 bp, Artificial
  probe
  misc_feature (1)..(25): SEQ ID NO: 5887; WAN0249M3; Start 102; Stop 126
ttcctctgtgtcaaagactatagat

SEQ ID NO: 424483 - DNA, 25 bp, Artificial
  probe
  misc_feature (1)..(25): SEQ ID NO: 5887; WAN0249M3; Start 105; Stop 129
ctctgtgtcaaagactatagattcc

SEQ ID NO: 424484 - DNA, 25 bp, Artificial
  probe
  misc_feature (1)..(25): SEQ ID NO: 5887; WAN0249M3; Start 104; Stop 128
cctctgtgtcaaagactatagattc

SEQ ID NO: 424485 - DNA, 25 bp, Artificial
  probe
  misc_feature (1)..(25): SEQ ID NO: 5887; WAN0249M3; Start 108; Stop 132
tgtgtcaaagactatagattccatg

SEQ ID NO: 424486 - DNA, 25 bp, Artificial
  probe
  misc_feature (1)..(25): SEQ ID NO: 5887; WAN0249M3; Start 109; Stop 133
gtgtcaaagactatagattccatga

SEQ ID NO: 424487 - DNA, 25 bp, Artificial
  probe
  misc_feature (1)..(25): SEQ ID NO: 5887; WAN0249M3; Start 107; Stop 131
ctgtgtcaaagactatagattccat

SEQ ID NO: 424488 - DNA, 25 bp, Artificial
  probe
  misc_feature (1)..(25): SEQ ID NO: 5887; WAN0249M3; Start 110; Stop 134
tgtcaaagactatagattccatgag

SEQ ID NO: 424489 - DNA, 25 bp, Artificial
  probe
  misc_feature (1)..(25): SEQ ID NO: 5887; WAN0249M3; Start 5; Stop 29
aatctctatttatcatcaaactcgt

SEQ ID NO: 424490 - DNA, 25 bp, Artificial
  probe
  misc_feature (1)..(25): SEQ ID NO: 5887; WAN0249M3; Start 100; Stop 124
tcttcctctgtgtcaaagactatag

SEQ ID NO: 424491 - DNA, 25 bp, Artificial
  probe
  misc_feature (1)..(25): SEQ ID NO: 5887; WAN0249M3; Start 8; Stop 32
ctctatttatcatcaaactcgtact

SEQ ID NO: 424492 - DNA, 25 bp, Artificial
  probe
  misc_feature (1)..(25): SEQ ID NO: 5887; WAN0249M3; Start 7; Stop 31
tctctatttatcatcaaactcgtac

SEQ ID NO: 424493 - DNA, 25 bp, Artificial
  probe
  misc_feature (1)..(25): SEQ ID NO: 5887; WAN0249M3; Start 25; Stop 49
ctcgtactaatatagactgtgataa

SEQ ID NO: 424494 - DNA, 25 bp, Artificial
  probe
  misc_feature (1)..(25): SEQ ID NO: 5887; WAN0249M3; Start 117; Stop 141
gactatagattccatgagctcttct

SEQ ID NO: 424495 - DNA, 25 bp, Artificial
  probe
  misc_feature (1)..(25): SEQ ID NO: 5887; WAN0249M3; Start 116; Stop 140
agactatagattccatgagctcttc

SEQ ID NO: 424496 - DNA, 25 bp, Artificial
  probe
  misc_feature (1)..(25): SEQ ID NO: 5887; WAN0249M3; Start 17; Stop 41
tcatcaaactcgtactaatatagac

SEQ ID NO: 424497 - DNA, 25 bp, Artificial
  probe
  misc_feature (1)..(25): SEQ ID NO: 5887; WAN0249M3; Start 19; Stop 43
atcaaactcgtactaatatagactg

SEQ ID NO: 424498 - DNA, 25 bp, Artificial
  probe
  misc_feature (1)..(25): SEQ ID NO: 5887; WAN0249M3; Start 18; Stop 42
catcaaactcgtactaatatagact

SEQ ID NO: 424499 - DNA, 25 bp, Artificial
  probe
  misc_feature (1)..(25): SEQ ID NO: 5887; WAN0249M3; Start 6; Stop 30
atctctatttatcatcaaactcgta

SEQ ID NO: 424500 - DNA, 25 bp, Artificial
  probe
  misc_feature (1)..(25): SEQ ID NO: 5887; WAN0249M3; Start 38; Stop 62
agactgtgataaacaaagtactact

SEQ ID NO: 424501 - DNA, 25 bp, Artificial
  probe
  misc_feature (1)..(25): SEQ ID NO: 5887; WAN0249M3; Start 9; Stop 33
tctatttatcatcaaactcgtacta

SEQ ID NO: 424502 - DNA, 25 bp, Artificial
  probe
  misc_feature (1)..(25): SEQ ID NO: 5888; WAN024E25; Start 721; Stop 745
aaggaattgagtctcatcatagagt

SEQ ID NO: 424503 - DNA, 25 bp, Artificial
  probe
  misc_feature (1)..(25): SEQ ID NO: 5888; WAN024E25; Start 771; Stop 795
tagtgagttggaaatctatgctgaa

SEQ ID NO: 424504 - DNA, 25 bp, Artificial
  probe
  misc_feature (1)..(25): SEQ ID NO: 5888; WAN024E25; Start 772; Stop 796
agtgagttggaaatctatgctgaaa

SEQ ID NO: 424505 - DNA, 25 bp, Artificial
  probe
  misc_feature (1)..(25): SEQ ID NO: 5888; WAN024E25; Start 770; Stop 794
gtagtgagttggaaatctatgctga

SEQ ID NO: 424506 - DNA, 25 bp, Artificial
  probe
  misc_feature (1)..(25): SEQ ID NO: 5888; WAN024E25; Start 766; Stop 790
ctgggtagtgagttggaaatctatg

SEQ ID NO: 424507 - DNA, 25 bp, Artificial
  probe
  misc_feature (1)..(25): SEQ ID NO: 5888; WAN024E25; Start 722; Stop 746
aggaattgagtctcatcatagagta

SEQ ID NO: 424508 - DNA, 25 bp, Artificial
  probe
  misc_feature (1)..(25): SEQ ID NO: 5888; WAN024E25; Start 205; Stop 229
cacctgagtttgggaaagatagaag

SEQ ID NO: 424509 - DNA, 25 bp, Artificial
  probe
  misc_feature (1)..(25): SEQ ID NO: 5888; WAN024E25; Start 206; Stop 230
acctgagtttgggaaagatagaaga

SEQ ID NO: 424510 - DNA, 25 bp, Artificial
  probe
  misc_feature (1)..(25): SEQ ID NO: 5888; WAN024E25; Start 859; Stop 883
tttatctttgtggcactgattatcg

SEQ ID NO: 424511 - DNA, 25 bp, Artificial
  probe
  misc_feature (1)..(25): SEQ ID NO: 5888; WAN024E25; Start 769; Stop 793
ggtagtgagttggaaatctatgctg

SEQ ID NO: 424512 - DNA, 25 bp, Artificial
  probe
  misc_feature (1)..(25): SEQ ID NO: 5888; WAN024E25; Start 861; Stop 885
tatctttgtggcactgattatcgtt

SEQ ID NO: 424513 - DNA, 25 bp, Artificial
  probe
  misc_feature (1)..(25): SEQ ID NO: 5888; WAN024E25; Start 860; Stop 884
ttatctttgtggcactgattatcgt

SEQ ID NO: 424514 - DNA, 25 bp, Artificial
  probe
  misc_feature (1)..(25): SEQ ID NO: 5888; WAN024E25; Start 127; Stop 151
tcagaaatgatggaaagtttgggat

SEQ ID NO: 424515 - DNA, 25 bp, Artificial
  probe
  misc_feature (1)..(25): SEQ ID NO: 5888; WAN024E25; Start 862; Stop 886
atctttgtggcactgattatcgttt

SEQ ID NO: 424516 - DNA, 25 bp, Artificial
  probe
  misc_feature (1)..(25): SEQ ID NO: 5888; WAN024E25; Start 126; Stop 150
ctcagaaatgatggaaagtttggga

SEQ ID NO: 424517 - DNA, 25 bp, Artificial
  probe
  misc_feature (1)..(25): SEQ ID NO: 5888; WAN024E25; Start 125; Stop 149
tctcagaaatgatggaaagtttggg

SEQ ID NO: 424518 - DNA, 25 bp, Artificial
  probe
  misc_feature (1)..(25): SEQ ID NO: 5888; WAN024E25; Start 124; Stop 148
ttctcagaaatgatggaaagtttgg

SEQ ID NO: 424519 - DNA, 25 bp, Artificial
  probe
  misc_feature (1)..(25): SEQ ID NO: 5888; WAN024E25; Start 768; Stop 792
gggtagtgagttggaaatctatgct

SEQ ID NO: 424520 - DNA, 25 bp, Artificial
  probe
  misc_feature (1)..(25): SEQ ID NO: 5888; WAN024E25; Start 765; Stop 789
gctgggtagtgagttggaaatctat

SEQ ID NO: 424521 - DNA, 25 bp, Artificial
  probe
  misc_feature (1)..(25): SEQ ID NO: 5888; WAN024E25; Start 723; Stop 747
ggaattgagtctcatcatagagtat

SEQ ID NO: 424522 - DNA, 25 bp, Artificial
  probe
  misc_feature (1)..(25): SEQ ID NO: 5888; WAN024E25; Start 725; Stop 749
aattgagtctcatcatagagtatgg

SEQ ID NO: 424523 - DNA, 25 bp, Artificial
  probe
  misc_feature (1)..(25): SEQ ID NO: 5888; WAN024E25; Start 767; Stop 791
tgggtagtgagttggaaatctatgc

SEQ ID NO: 424524 - DNA, 25 bp, Artificial
  probe
  misc_feature (1)..(25): SEQ ID NO: 5888; WAN024E25; Start 123; Stop 147
attctcagaaatgatggaaagtttg

SEQ ID NO: 424525 - DNA, 25 bp, Artificial
  probe
  misc_feature (1)..(25): SEQ ID NO: 5888; WAN024E25; Start 726; Stop 750
attgagtctcatcatagagtatggg

SEQ ID NO: 424526 - DNA, 25 bp, Artificial
  probe
  misc_feature (1)..(25): SEQ ID NO: 5888; WAN024E25; Start 724; Stop 748
gaattgagtctcatcatagagtatg

SEQ ID NO: 424527 - DNA, 25 bp, Artificial
  probe
  misc_feature (1)..(25): SEQ ID NO: 5888; WAN024E25; Start 773; Stop 797
gtgagttggaaatctatgctgaaaa

SEQ ID NO: 424528 - DNA, 25 bp, Artificial
  probe
  misc_feature (1)..(25): SEQ ID NO: 5888; WAN024E25; Start 291; Stop 315
gattttgctgggttttcttctctta

SEQ ID NO: 424529 - DNA, 25 bp, Artificial
  probe
  misc_feature (1)..(25): SEQ ID NO: 5888; WAN024E25; Start 875; Stop 899
tgattatcgttttactttatgcggc

SEQ ID NO: 424530 - DNA, 25 bp, Artificial
  probe
  misc_feature (1)..(25): SEQ ID NO: 5888; WAN024E25; Start 885; Stop 909
tttactttatgcggcaatgctcatg

SEQ ID NO: 424531 - DNA, 25 bp, Artificial
  probe
  misc_feature (1)..(25): SEQ ID NO: 5888; WAN024E25; Start 293; Stop 317
ttttgctgggttttcttctcttaat

SEQ ID NO: 424532 - DNA, 25 bp, Artificial
  probe
  misc_feature (1)..(25): SEQ ID NO: 5888; WAN024E25; Start 292; Stop 316
attttgctgggttttcttctcttaa

SEQ ID NO: 424533 - DNA, 25 bp, Artificial
  probe
  misc_feature (1)..(25): SEQ ID NO: 5888; WAN024E25; Start 868; Stop 892
gtggcactgattatcgttttacttt

SEQ ID NO: 424534 - DNA, 25 bp, Artificial
  probe
  misc_feature (1)..(25): SEQ ID NO: 5888; WAN024E25; Start 864; Stop 888
ctttgtggcactgattatcgtttta

SEQ ID NO: 424535 - DNA, 25 bp, Artificial
  probe
  misc_feature (1)..(25): SEQ ID NO: 5889; WAN0249UD; Start 134; Stop 158
gttgaatctataacagtacgcatcg

SEQ ID NO: 424536 - DNA, 25 bp, Artificial
  probe
  misc_feature (1)..(25): SEQ ID NO: 5889; WAN0249UD; Start 69; Stop 93
gttagagtagtacacaactgcttct

SEQ ID NO: 424537 - DNA, 25 bp, Artificial
  probe
  misc_feature (1)..(25): SEQ ID NO: 5889; WAN0249UD; Start 73; Stop 97
gagtagtacacaactgcttctaaga

SEQ ID NO: 424538 - DNA, 25 bp, Artificial
  probe
  misc_feature (1)..(25): SEQ ID NO: 5889; WAN0249UD; Start 72; Stop 96
agagtagtacacaactgcttctaag

SEQ ID NO: 424539 - DNA, 25 bp, Artificial
  probe
  misc_feature (1)..(25): SEQ ID NO: 5889; WAN0249UD; Start 74; Stop 98
agtagtacacaactgcttctaagat

SEQ ID NO: 424540 - DNA, 25 bp, Artificial
  probe
  misc_feature (1)..(25): SEQ ID NO: 5889; WAN0249UD; Start 8; Stop 32
atagacaactccttgaatcatcagg

SEQ ID NO: 424541 - DNA, 25 bp, Artificial
  probe
  misc_feature (1)..(25): SEQ ID NO: 5889; WAN0249UD; Start 75; Stop 99
gtagtacacaactgcttctaagatc

SEQ ID NO: 424542 - DNA, 25 bp, Artificial
  probe
  misc_feature (1)..(25): SEQ ID NO: 5889; WAN0249UD; Start 135; Stop 159
ttgaatctataacagtacgcatcga

SEQ ID NO: 424543 - DNA, 25 bp, Artificial
  probe
  misc_feature (1)..(25): SEQ ID NO: 5889; WAN0249UD; Start 136; Stop 160
tgaatctataacagtacgcatcgac

SEQ ID NO: 424544 - DNA, 25 bp, Artificial
  probe
  misc_feature (1)..(25): SEQ ID NO: 5889; WAN0249UD; Start 7; Stop 31
tatagacaactccttgaatcatcag

SEQ ID NO: 424545 - DNA, 25 bp, Artificial
  probe
  misc_feature (1)..(25): SEQ ID NO: 5889; WAN0249UD; Start 137; Stop 161
gaatctataacagtacgcatcgact

SEQ ID NO: 424546 - DNA, 25 bp, Artificial
  probe
  misc_feature (1)..(25): SEQ ID NO: 5889; WAN0249UD; Start 71; Stop 95
tagagtagtacacaactgcttctaa

SEQ ID NO: 424547 - DNA, 25 bp, Artificial
  probe
  misc_feature (1)..(25): SEQ ID NO: 5889; WAN0249UD; Start 70; Stop 94
ttagagtagtacacaactgcttcta

SEQ ID NO: 424548 - DNA, 25 bp, Artificial
  probe
  misc_feature (1)..(25): SEQ ID NO: 5889; WAN0249UD; Start 133; Stop 157
cgttgaatctataacagtacgcatc

SEQ ID NO: 424549 - DNA, 25 bp, Artificial
  probe
  misc_feature (1)..(25): SEQ ID NO: 5889; WAN0249UD; Start 68; Stop 92
agttagagtagtacacaactgcttc

SEQ ID NO: 424550 - DNA, 25 bp, Artificial
  probe
  misc_feature (1)..(25): SEQ ID NO: 5889; WAN0249UD; Start 66; Stop 90
gaagttagagtagtacacaactgct

SEQ ID NO: 424551 - DNA, 25 bp, Artificial
  probe
  misc_feature (1)..(25): SEQ ID NO: 5889; WAN0249UD; Start 65; Stop 89
tgaagttagagtagtacacaactgc

SEQ ID NO: 424552 - DNA, 25 bp, Artificial
  probe
  misc_feature (1)..(25): SEQ ID NO: 5889; WAN0249UD; Start 67; Stop 91
aagttagagtagtacacaactgctt

SEQ ID NO: 424553 - DNA, 25 bp, Artificial
  probe
  misc_feature (1)..(25): SEQ ID NO: 5889; WAN0249UD; Start 5; Stop 29
actatagacaactccttgaatcatc

SEQ ID NO: 424554 - DNA, 25 bp, Artificial
  probe
  misc_feature (1)..(25): SEQ ID NO: 5889; WAN0249UD; Start 6; Stop 30
ctatagacaactccttgaatcatca

SEQ ID NO: 424555 - DNA, 25 bp, Artificial
  probe
  misc_feature (1)..(25): SEQ ID NO: 5889; WAN0249UD; Start 82; Stop 106
acaactgcttctaagatctggttaa

SEQ ID NO: 424556 - DNA, 25 bp, Artificial
  probe
  misc_feature (1)..(25): SEQ ID NO: 5889; WAN0249UD; Start 81; Stop 105
cacaactgcttctaagatctggtta

SEQ ID NO: 424557 - DNA, 25 bp, Artificial
  probe
  misc_feature (1)..(25): SEQ ID NO: 5889; WAN0249UD; Start 78; Stop 102
gtacacaactgcttctaagatctgg

SEQ ID NO: 424558 - DNA, 25 bp, Artificial
  probe
  misc_feature (1)..(25): SEQ ID NO: 5889; WAN0249UD; Start 77; Stop 101
agtacacaactgcttctaagatctg

SEQ ID NO: 424559 - DNA, 25 bp, Artificial
  probe
  misc_feature (1)..(25): SEQ ID NO: 5889; WAN0249UD; Start 4; Stop 28
aactatagacaactccttgaatcat

SEQ ID NO: 424560 - DNA, 25 bp, Artificial
  probe
  misc_feature (1)..(25): SEQ ID NO: 5889; WAN0249UD; Start 79; Stop 103
tacacaactgcttctaagatctggt

SEQ ID NO: 424561 - DNA, 25 bp, Artificial
  probe
  misc_feature (1)..(25): SEQ ID NO: 5889; WAN0249UD; Start 64; Stop 88
ttgaagttagagtagtacacaactg

SEQ ID NO: 424562 - DNA, 25 bp, Artificial
  probe
  misc_feature (1)..(25): SEQ ID NO: 5889; WAN0249UD; Start 76; Stop 100
tagtacacaactgcttctaagatct

SEQ ID NO: 424563 - DNA, 25 bp, Artificial
  probe
  misc_feature (1)..(25): SEQ ID NO: 5889; WAN0249UD; Start 9; Stop 33
tagacaactccttgaatcatcaggg

SEQ ID NO: 424564 - DNA, 25 bp, Artificial
  probe
  misc_feature (1)..(25): SEQ ID NO: 5889; WAN0249UD; Start 17; Stop 41
tccttgaatcatcagggagttgttt

SEQ ID NO: 424565 - DNA, 25 bp, Artificial
  probe
  misc_feature (1)..(25): SEQ ID NO: 5889; WAN0249UD; Start 3; Stop 27
taactatagacaactccttgaatca

SEQ ID NO: 424566 - DNA, 25 bp, Artificial
  probe
  misc_feature (1)..(25): SEQ ID NO: 5889; WAN0249UD; Start 80; Stop 104
acacaactgcttctaagatctggtt

SEQ ID NO: 424567 - DNA, 25 bp, Artificial
  probe
  misc_feature (1)..(25): SEQ ID NO: 5889; WAN0249UD; Start 62; Stop 86
tattgaagttagagtagtacacaac

SEQ ID NO: 424568 - DNA, 25 bp, Artificial
  probe
  misc_feature (1)..(25): SEQ ID NO: 5892; WAN0249KI; Start 158; Stop 182
ataacagtagcatatacctcaagcc

SEQ ID NO: 424569 - DNA, 25 bp, Artificial
  probe
  misc_feature (1)..(25): SEQ ID NO: 5892; WAN0249KI; Start 296; Stop 320
tatattgcttaatgagtggacacct

SEQ ID NO: 424570 - DNA, 25 bp, Artificial
  probe
  misc_feature (1)..(25): SEQ ID NO: 5892; WAN0249KI; Start 295; Stop 319
ttatattgcttaatgagtggacacc

SEQ ID NO: 424571 - DNA, 25 bp, Artificial
  probe
  misc_feature (1)..(25): SEQ ID NO: 5892; WAN0249KI; Start 297; Stop 321
atattgcttaatgagtggacacctc

SEQ ID NO: 424572 - DNA, 25 bp, Artificial
  probe
  misc_feature (1)..(25): SEQ ID NO: 5892; WAN0249KI; Start 159; Stop 183
taacagtagcatatacctcaagccg

SEQ ID NO: 424573 - DNA, 25 bp, Artificial
  probe
  misc_feature (1)..(25): SEQ ID NO: 5892; WAN0249KI; Start 157; Stop 181
tataacagtagcatatacctcaagc

SEQ ID NO: 424574 - DNA, 25 bp, Artificial
  probe
  misc_feature (1)..(25): SEQ ID NO: 5892; WAN0249KI; Start 301; Stop 325
tgcttaatgagtggacacctctatt

SEQ ID NO: 424575 - DNA, 25 bp, Artificial
  probe
  misc_feature (1)..(25): SEQ ID NO: 5892; WAN0249KI; Start 300; Stop 324
ttgcttaatgagtggacacctctat

SEQ ID NO: 424576 - DNA, 25 bp, Artificial
  probe
  misc_feature (1)..(25): SEQ ID NO: 5892; WAN0249KI; Start 299; Stop 323
attgcttaatgagtggacacctcta

SEQ ID NO: 424577 - DNA, 25 bp, Artificial
  probe
  misc_feature (1)..(25): SEQ ID NO: 5892; WAN0249KI; Start 298; Stop 322
tattgcttaatgagtggacacctct

SEQ ID NO: 424578 - DNA, 25 bp, Artificial
  probe
  misc_feature (1)..(25): SEQ ID NO: 5892; WAN0249KI; Start 170; Stop 194
tatacctcaagccgtttagcaatta

SEQ ID NO: 424579 - DNA, 25 bp, Artificial
  probe
  misc_feature (1)..(25): SEQ ID NO: 5892; WAN0249KI; Start 177; Stop 201
caagccgtttagcaattagaataga

SEQ ID NO: 424580 - DNA, 25 bp, Artificial
  probe
  misc_feature (1)..(25): SEQ ID NO: 5892; WAN0249KI; Start 176; Stop 200
tcaagccgtttagcaattagaatag

SEQ ID NO: 424581 - DNA, 25 bp, Artificial
  probe
  misc_feature (1)..(25): SEQ ID NO: 5892; WAN0249KI; Start 175; Stop 199
ctcaagccgtttagcaattagaata

SEQ ID NO: 424582 - DNA, 25 bp, Artificial
  probe
  misc_feature (1)..(25): SEQ ID NO: 5892; WAN0249KI; Start 169; Stop 193
atatacctcaagccgtttagcaatt

SEQ ID NO: 424583 - DNA, 25 bp, Artificial
  probe
  misc_feature (1)..(25): SEQ ID NO: 5892; WAN0249KI; Start 164; Stop 188
gtagcatatacctcaagccgtttag

SEQ ID NO: 424584 - DNA, 25 bp, Artificial
  probe
  misc_feature (1)..(25): SEQ ID NO: 5892; WAN0249KI; Start 168; Stop 192
catatacctcaagccgtttagcaat

SEQ ID NO: 424585 - DNA, 25 bp, Artificial
  probe
  misc_feature (1)..(25): SEQ ID NO: 5892; WAN0249KI; Start 180; Stop 204
gccgtttagcaattagaatagaact

SEQ ID NO: 424586 - DNA, 25 bp, Artificial
  probe
  misc_feature (1)..(25): SEQ ID NO: 5892; WAN0249KI; Start 179; Stop 203
agccgtttagcaattagaatagaac

SEQ ID NO: 424587 - DNA, 25 bp, Artificial
  probe
  misc_feature (1)..(25): SEQ ID NO: 5892; WAN0249KI; Start 178; Stop 202
aagccgtttagcaattagaatagaa

SEQ ID NO: 424588 - DNA, 25 bp, Artificial
  probe
  misc_feature (1)..(25): SEQ ID NO: 5892; WAN0249KI; Start 171; Stop 195
atacctcaagccgtttagcaattag

SEQ ID NO: 424589 - DNA, 25 bp, Artificial
  probe
  misc_feature (1)..(25): SEQ ID NO: 5892; WAN0249KI; Start 163; Stop 187
agtagcatatacctcaagccgttta

SEQ ID NO: 424590 - DNA, 25 bp, Artificial
  probe
  misc_feature (1)..(25): SEQ ID NO: 5892; WAN0249KI; Start 174; Stop 198
cctcaagccgtttagcaattagaat

SEQ ID NO: 424591 - DNA, 25 bp, Artificial
  probe
  misc_feature (1)..(25): SEQ ID NO: 5892; WAN0249KI; Start 302; Stop 326
gcttaatgagtggacacctctattt

SEQ ID NO: 424592 - DNA, 25 bp, Artificial
  probe
  misc_feature (1)..(25): SEQ ID NO: 5892; WAN0249KI; Start 172; Stop 196
tacctcaagccgtttagcaattaga

SEQ ID NO: 424593 - DNA, 25 bp, Artificial
  probe
  misc_feature (1)..(25): SEQ ID NO: 5892; WAN0249KI; Start 161; Stop 185
acagtagcatatacctcaagccgtt

SEQ ID NO: 424594 - DNA, 25 bp, Artificial
  probe
  misc_feature (1)..(25): SEQ ID NO: 5892; WAN0249KI; Start 160; Stop 184
aacagtagcatatacctcaagccgt

SEQ ID NO: 424595 - DNA, 25 bp, Artificial
  probe
  misc_feature (1)..(25): SEQ ID NO: 5892; WAN0249KI; Start 155; Stop 179
tctataacagtagcatatacctcaa

SEQ ID NO: 424596 - DNA, 25 bp, Artificial
  probe
  misc_feature (1)..(25): SEQ ID NO: 5892; WAN0249KI; Start 154; Stop 178
ttctataacagtagcatatacctca

SEQ ID NO: 424597 - DNA, 25 bp, Artificial
  probe
  misc_feature (1)..(25): SEQ ID NO: 5892; WAN0249KI; Start 165; Stop 189
tagcatatacctcaagccgtttagc

SEQ ID NO: 424598 - DNA, 25 bp, Artificial
  probe
  misc_feature (1)..(25): SEQ ID NO: 5892; WAN0249KI; Start 156; Stop 180
ctataacagtagcatatacctcaag

SEQ ID NO: 424599 - DNA, 25 bp, Artificial
  probe
  misc_feature (1)..(25): SEQ ID NO: 5892; WAN0249KI; Start 162; Stop 186
cagtagcatatacctcaagccgttt

SEQ ID NO: 424600 - DNA, 25 bp, Artificial
  probe
  misc_feature (1)..(25): SEQ ID NO: 5892; WAN0249KI; Start 294; Stop 318
tttatattgcttaatgagtggacac

SEQ ID NO: 424601 - DNA, 25 bp, Artificial
  probe
  misc_feature (1)..(25): SEQ ID NO: 5893; WAN024E2A; Start 319; Stop 343
attacagaggacaatcaactggttc

SEQ ID NO: 424602 - DNA, 25 bp, Artificial
  probe
  misc_feature (1)..(25): SEQ ID NO: 5893; WAN024E2A; Start 189; Stop 213
caatcgcctatacatgaagcaagat

SEQ ID NO: 424603 - DNA, 25 bp, Artificial
  probe
  misc_feature (1)..(25): SEQ ID NO: 5893; WAN024E2A; Start 190; Stop 214
aatcgcctatacatgaagcaagatg

SEQ ID NO: 424604 - DNA, 25 bp, Artificial
  probe
  misc_feature (1)..(25): SEQ ID NO: 5893; WAN024E2A; Start 318; Stop 342
gattacagaggacaatcaactggtt

SEQ ID NO: 424605 - DNA, 25 bp, Artificial
  probe
  misc_feature (1)..(25): SEQ ID NO: 5893; WAN024E2A; Start 196; Stop 220
ctatacatgaagcaagatggcaagg

SEQ ID NO: 424606 - DNA, 25 bp, Artificial
  probe
  misc_feature (1)..(25): SEQ ID NO: 5893; WAN024E2A; Start 195; Stop 219
cctatacatgaagcaagatggcaag

SEQ ID NO: 424607 - DNA, 25 bp, Artificial
  probe
  misc_feature (1)..(25): SEQ ID NO: 5893; WAN024E2A; Start 197; Stop 221
tatacatgaagcaagatggcaagga

SEQ ID NO: 424608 - DNA, 25 bp, Artificial
  probe
  misc_feature (1)..(25): SEQ ID NO: 5893; WAN024E2A; Start 1; Stop 25
tttaccttgttagaatccctgcttg

SEQ ID NO: 424609 - DNA, 25 bp, Artificial
  probe
  misc_feature (1)..(25): SEQ ID NO: 5893; WAN024E2A; Start 364; Stop 388
aaaggcttagaaagggagttcatct

SEQ ID NO: 424610 - DNA, 25 bp, Artificial
  probe
  misc_feature (1)..(25): SEQ ID NO: 5893; WAN024E2A; Start 191; Stop 215
atcgcctatacatgaagcaagatgg

SEQ ID NO: 424611 - DNA, 25 bp, Artificial
  probe
  misc_feature (1)..(25): SEQ ID NO: 5893; WAN024E2A; Start 372; Stop 396
agaaagggagttcatctatcgtgtg

SEQ ID NO: 424612 - DNA, 25 bp, Artificial
  probe
  misc_feature (1)..(25): SEQ ID NO: 5893; WAN024E2A; Start 370; Stop 394
ttagaaagggagttcatctatcgtg

SEQ ID NO: 424613 - DNA, 25 bp, Artificial
  probe
  misc_feature (1)..(25): SEQ ID NO: 5893; WAN024E2A; Start 369; Stop 393
cttagaaagggagttcatctatcgt

SEQ ID NO: 424614 - DNA, 25 bp, Artificial
  probe
  misc_feature (1)..(25): SEQ ID NO: 5893; WAN024E2A; Start 367; Stop 391
ggcttagaaagggagttcatctatc

SEQ ID NO: 424615 - DNA, 25 bp, Artificial
  probe
  misc_feature (1)..(25): SEQ ID NO: 5893; WAN024E2A; Start 366; Stop 390
aggcttagaaagggagttcatctat

SEQ ID NO: 424616 - DNA, 25 bp, Artificial
  probe
  misc_feature (1)..(25): SEQ ID NO: 5893; WAN024E2A; Start 371; Stop 395
tagaaagggagttcatctatcgtgt

SEQ ID NO: 424617 - DNA, 25 bp, Artificial
  probe
  misc_feature (1)..(25): SEQ ID NO: 5893; WAN024E2A; Start 368; Stop 392
gcttagaaagggagttcatctatcg

SEQ ID NO: 424618 - DNA, 25 bp, Artificial
  probe
  misc_feature (1)..(25): SEQ ID NO: 5893; WAN024E2A; Start 365; Stop 389
aaggcttagaaagggagttcatcta

SEQ ID NO: 424619 - DNA, 25 bp, Artificial
  probe
  misc_feature (1)..(25): SEQ ID NO: 5893; WAN024E2A; Start 198; Stop 222
atacatgaagcaagatggcaaggac

SEQ ID NO: 424620 - DNA, 25 bp, Artificial
  probe
  misc_feature (1)..(25): SEQ ID NO: 5893; WAN024E2A; Start 188; Stop 212
gcaatcgcctatacatgaagcaaga

SEQ ID NO: 424621 - DNA, 25 bp, Artificial
  probe
  misc_feature (1)..(25): SEQ ID NO: 5893; WAN024E2A; Start 2; Stop 26
ttaccttgttagaatccctgcttgc

SEQ ID NO: 424622 - DNA, 25 bp, Artificial
  probe
  misc_feature (1)..(25): SEQ ID NO: 5893; WAN024E2A; Start 373; Stop 397
gaaagggagttcatctatcgtgtgg

SEQ ID NO: 424623 - DNA, 25 bp, Artificial
  probe
  misc_feature (1)..(25): SEQ ID NO: 5893; WAN024E2A; Start 76; Stop 100
ctcctcatttcagaagttcgctacc

SEQ ID NO: 424624 - DNA, 25 bp, Artificial
  probe
  misc_feature (1)..(25): SEQ ID NO: 5893; WAN024E2A; Start 374; Stop 398
aaagggagttcatctatcgtgtgga

SEQ ID NO: 424625 - DNA, 25 bp, Artificial
  probe
  misc_feature (1)..(25): SEQ ID NO: 5893; WAN024E2A; Start 376; Stop 400
agggagttcatctatcgtgtggaaa

SEQ ID NO: 424626 - DNA, 25 bp, Artificial
  probe
  misc_feature (1)..(25): SEQ ID NO: 5893; WAN024E2A; Start 375; Stop 399
aagggagttcatctatcgtgtggaa

SEQ ID NO: 424627 - DNA, 25 bp, Artificial
  probe
  misc_feature (1)..(25): SEQ ID NO: 5893; WAN024E2A; Start 78; Stop 102
cctcatttcagaagttcgctaccag

SEQ ID NO: 424628 - DNA, 25 bp, Artificial
  probe
  misc_feature (1)..(25): SEQ ID NO: 5893; WAN024E2A; Start 70; Stop 94
agtcagctcctcatttcagaagttc

SEQ ID NO: 424629 - DNA, 25 bp, Artificial
  probe
  misc_feature (1)..(25): SEQ ID NO: 5893; WAN024E2A; Start 363; Stop 387
aaaaggcttagaaagggagttcatc

SEQ ID NO: 424630 - DNA, 25 bp, Artificial
  probe
  misc_feature (1)..(25): SEQ ID NO: 5893; WAN024E2A; Start 77; Stop 101
tcctcatttcagaagttcgctacca

SEQ ID NO: 424631 - DNA, 25 bp, Artificial
  probe
  misc_feature (1)..(25): SEQ ID NO: 5893; WAN024E2A; Start 75; Stop 99
gctcctcatttcagaagttcgctac

SEQ ID NO: 424632 - DNA, 25 bp, Artificial
  probe
  misc_feature (1)..(25): SEQ ID NO: 5893; WAN024E2A; Start 69; Stop 93
gagtcagctcctcatttcagaagtt

SEQ ID NO: 424633 - DNA, 25 bp, Artificial
  probe
  misc_feature (1)..(25): SEQ ID NO: 5893; WAN024E2A; Start 199; Stop 223
tacatgaagcaagatggcaaggaca

SEQ ID NO: 424634 - DNA, 25 bp, Artificial
  probe
  misc_feature (1)..(25): SEQ ID NO: 5894; WAN0249H7; Start 49; Stop 73
tttctactgaatctcccatctactt

SEQ ID NO: 424635 - DNA, 25 bp, Artificial
  probe
  misc_feature (1)..(25): SEQ ID NO: 5894; WAN0249H7; Start 48; Stop 72
atttctactgaatctcccatctact

SEQ ID NO: 424636 - DNA, 25 bp, Artificial
  probe
  misc_feature (1)..(25): SEQ ID NO: 5894; WAN0249H7; Start 51; Stop 75
tctactgaatctcccatctacttat

SEQ ID NO: 424637 - DNA, 25 bp, Artificial
  probe
  misc_feature (1)..(25): SEQ ID NO: 5894; WAN0249H7; Start 50; Stop 74
ttctactgaatctcccatctactta

SEQ ID NO: 424638 - DNA, 25 bp, Artificial
  probe
  misc_feature (1)..(25): SEQ ID NO: 5894; WAN0249H7; Start 54; Stop 78
actgaatctcccatctacttattcc

SEQ ID NO: 424639 - DNA, 25 bp, Artificial
  probe
  misc_feature (1)..(25): SEQ ID NO: 5894; WAN0249H7; Start 55; Stop 79
ctgaatctcccatctacttattcct

SEQ ID NO: 424640 - DNA, 25 bp, Artificial
  probe
  misc_feature (1)..(25): SEQ ID NO: 5894; WAN0249H7; Start 52; Stop 76
ctactgaatctcccatctacttatt

SEQ ID NO: 424641 - DNA, 25 bp, Artificial
  probe
  misc_feature (1)..(25): SEQ ID NO: 5894; WAN0249H7; Start 45; Stop 69
tttatttctactgaatctcccatct

SEQ ID NO: 424642 - DNA, 25 bp, Artificial
  probe
  misc_feature (1)..(25): SEQ ID NO: 5894; WAN0249H7; Start 79; Stop 103
taaagttgctttcatttgcctcttt

SEQ ID NO: 424643 - DNA, 25 bp, Artificial
  probe
  misc_feature (1)..(25): SEQ ID NO: 5894; WAN0249H7; Start 78; Stop 102
ctaaagttgctttcatttgcctctt

SEQ ID NO: 424644 - DNA, 25 bp, Artificial
  probe
  misc_feature (1)..(25): SEQ ID NO: 5894; WAN0249H7; Start 59; Stop 83
atctcccatctacttattcctaaag

SEQ ID NO: 424645 - DNA, 25 bp, Artificial
  probe
  misc_feature (1)..(25): SEQ ID NO: 5894; WAN0249H7; Start 47; Stop 71
tatttctactgaatctcccatctac

SEQ ID NO: 424646 - DNA, 25 bp, Artificial
  probe
  misc_feature (1)..(25): SEQ ID NO: 5894; WAN0249H7; Start 74; Stop 98
attcctaaagttgctttcatttgcc

SEQ ID NO: 424647 - DNA, 25 bp, Artificial
  probe
  misc_feature (1)..(25): SEQ ID NO: 5894; WAN0249H7; Start 56; Stop 80
tgaatctcccatctacttattccta

SEQ ID NO: 424648 - DNA, 25 bp, Artificial
  probe
  misc_feature (1)..(25): SEQ ID NO: 5894; WAN0249H7; Start 73; Stop 97
tattcctaaagttgctttcatttgc

SEQ ID NO: 424649 - DNA, 25 bp, Artificial
  probe
  misc_feature (1)..(25): SEQ ID NO: 5894; WAN0249H7; Start 75; Stop 99
ttcctaaagttgctttcatttgcct

SEQ ID NO: 424650 - DNA, 25 bp, Artificial
  probe
  misc_feature (1)..(25): SEQ ID NO: 5894; WAN0249H7; Start 58; Stop 82
aatctcccatctacttattcctaaa

SEQ ID NO: 424651 - DNA, 25 bp, Artificial
  probe
  misc_feature (1)..(25): SEQ ID NO: 5894; WAN0249H7; Start 94; Stop 118
ttgcctcttttgatacacttaaact

SEQ ID NO: 424652 - DNA, 25 bp, Artificial
  probe
  misc_feature (1)..(25): SEQ ID NO: 5894; WAN0249H7; Start 77; Stop 101
cctaaagttgctttcatttgcctct

SEQ ID NO: 424653 - DNA, 25 bp, Artificial
  probe
  misc_feature (1)..(25): SEQ ID NO: 5894; WAN0249H7; Start 76; Stop 100
tcctaaagttgctttcatttgcctc

SEQ ID NO: 424654 - DNA, 25 bp, Artificial
  probe
  misc_feature (1)..(25): SEQ ID NO: 5894; WAN0249H7; Start 84; Stop 108
ttgctttcatttgcctcttttgata

SEQ ID NO: 424655 - DNA, 25 bp, Artificial
  probe
  misc_feature (1)..(25): SEQ ID NO: 5894; WAN0249H7; Start 63; Stop 87
cccatctacttattcctaaagttgc

SEQ ID NO: 424656 - DNA, 25 bp, Artificial
  probe
  misc_feature (1)..(25): SEQ ID NO: 5894; WAN0249H7; Start 46; Stop 70
ttatttctactgaatctcccatcta

SEQ ID NO: 424657 - DNA, 25 bp, Artificial
  probe
  misc_feature (1)..(25): SEQ ID NO: 5894; WAN0249H7; Start 89; Stop 113
ttcatttgcctcttttgatacactt

SEQ ID NO: 424658 - DNA, 25 bp, Artificial
  probe
  misc_feature (1)..(25): SEQ ID NO: 5894; WAN0249H7; Start 88; Stop 112
tttcatttgcctcttttgatacact

SEQ ID NO: 424659 - DNA, 25 bp, Artificial
  probe
  misc_feature (1)..(25): SEQ ID NO: 5894; WAN0249H7; Start 86; Stop 110
gctttcatttgcctcttttgataca

SEQ ID NO: 424660 - DNA, 25 bp, Artificial
  probe
  misc_feature (1)..(25): SEQ ID NO: 5894; WAN0249H7; Start 85; Stop 109
tgctttcatttgcctcttttgatac

SEQ ID NO: 424661 - DNA, 25 bp, Artificial
  probe
  misc_feature (1)..(25): SEQ ID NO: 5894; WAN0249H7; Start 87; Stop 111
ctttcatttgcctcttttgatacac

SEQ ID NO: 424662 - DNA, 25 bp, Artificial
  probe
  misc_feature (1)..(25): SEQ ID NO: 5894; WAN0249H7; Start 81; Stop 105
aagttgctttcatttgcctcttttg

SEQ ID NO: 424663 - DNA, 25 bp, Artificial
  probe
  misc_feature (1)..(25): SEQ ID NO: 5894; WAN0249H7; Start 93; Stop 117
tttgcctcttttgatacacttaaac

SEQ ID NO: 424664 - DNA, 25 bp, Artificial
  probe
  misc_feature (1)..(25): SEQ ID NO: 5894; WAN0249H7; Start 83; Stop 107
gttgctttcatttgcctcttttgat

SEQ ID NO: 424665 - DNA, 25 bp, Artificial
  probe
  misc_feature (1)..(25): SEQ ID NO: 5894; WAN0249H7; Start 90; Stop 114
tcatttgcctcttttgatacactta

SEQ ID NO: 424666 - DNA, 25 bp, Artificial
  probe
  misc_feature (1)..(25): SEQ ID NO: 5894; WAN0249H7; Start 91; Stop 115
catttgcctcttttgatacacttaa

SEQ ID NO: 424667 - DNA, 25 bp, Artificial
  probe
  misc_feature (1)..(25): SEQ ID NO: 5895; WAN0249KG; Start 2; Stop 26
ttagttgaactgtaggacttacttt

SEQ ID NO: 424668 - DNA, 25 bp, Artificial
  probe
  misc_feature (1)..(25): SEQ ID NO: 5895; WAN0249KG; Start 1; Stop 25
tttagttgaactgtaggacttactt

SEQ ID NO: 424669 - DNA, 25 bp, Artificial
  probe
  misc_feature (1)..(25): SEQ ID NO: 5895; WAN0249KG; Start 25; Stop 49
ttttcagagggctccaaattttatt

SEQ ID NO: 424670 - DNA, 25 bp, Artificial
  probe
  misc_feature (1)..(25): SEQ ID NO: 5895; WAN0249KG; Start 3; Stop 27
tagttgaactgtaggacttactttt

SEQ ID NO: 424671 - DNA, 25 bp, Artificial
  probe
  misc_feature (1)..(25): SEQ ID NO: 5895; WAN0249KG; Start 26; Stop 50
tttcagagggctccaaattttattt

SEQ ID NO: 424672 - DNA, 25 bp, Artificial
  probe
  misc_feature (1)..(25): SEQ ID NO: 5896; WAN0249W6; Start 47; Stop 71
tttgtatagtgtgatgagtaggctc

SEQ ID NO: 424673 - DNA, 25 bp, Artificial
  probe
  misc_feature (1)..(25): SEQ ID NO: 5896; WAN0249W6; Start 95; Stop 119
gcaaatatgatatactaaagagcga

SEQ ID NO: 424674 - DNA, 25 bp, Artificial
  probe
  misc_feature (1)..(25): SEQ ID NO: 5896; WAN0249W6; Start 94; Stop 118
agcaaatatgatatactaaagagcg

SEQ ID NO: 424675 - DNA, 25 bp, Artificial
  probe
  misc_feature (1)..(25): SEQ ID NO: 5896; WAN0249W6; Start 108; Stop 132
actaaagagcgagtattctagtaga

SEQ ID NO: 424676 - DNA, 25 bp, Artificial
  probe
  misc_feature (1)..(25): SEQ ID NO: 5896; WAN0249W6; Start 48; Stop 72
ttgtatagtgtgatgagtaggctca

SEQ ID NO: 424677 - DNA, 25 bp, Artificial
  probe
  misc_feature (1)..(25): SEQ ID NO: 5896; WAN0249W6; Start 46; Stop 70
ttttgtatagtgtgatgagtaggct

SEQ ID NO: 424678 - DNA, 25 bp, Artificial
  probe
  misc_feature (1)..(25): SEQ ID NO: 5896; WAN0249W6; Start 49; Stop 73
tgtatagtgtgatgagtaggctcag

SEQ ID NO: 424679 - DNA, 25 bp, Artificial
  probe
  misc_feature (1)..(25): SEQ ID NO: 5896; WAN0249W6; Start 8; Stop 32
aaaatcaaagaggctgaaaatcgtt

SEQ ID NO: 424680 - DNA, 25 bp, Artificial
  probe
  misc_feature (1)..(25): SEQ ID NO: 5896; WAN0249W6; Start 50; Stop 74
gtatagtgtgatgagtaggctcagg

SEQ ID NO: 424681 - DNA, 25 bp, Artificial
  probe
  misc_feature (1)..(25): SEQ ID NO: 5896; WAN0249W6; Start 9; Stop 33
aaatcaaagaggctgaaaatcgttc

SEQ ID NO: 424682 - DNA, 25 bp, Artificial
  probe
  misc_feature (1)..(25): SEQ ID NO: 5896; WAN0249W6; Start 62; Stop 86
gagtaggctcaggttcaagttttaa

SEQ ID NO: 424683 - DNA, 25 bp, Artificial
  probe
  misc_feature (1)..(25): SEQ ID NO: 5896; WAN0249W6; Start 51; Stop 75
tatagtgtgatgagtaggctcaggt

SEQ ID NO: 424684 - DNA, 25 bp, Artificial
  probe
  misc_feature (1)..(25): SEQ ID NO: 5896; WAN0249W6; Start 63; Stop 87
agtaggctcaggttcaagttttaaa

SEQ ID NO: 424685 - DNA, 25 bp, Artificial
  probe
  misc_feature (1)..(25): SEQ ID NO: 5896; WAN0249W6; Start 14; Stop 38
aaagaggctgaaaatcgttcctatc

SEQ ID NO: 424686 - DNA, 25 bp, Artificial
  probe
  misc_feature (1)..(25): SEQ ID NO: 5896; WAN0249W6; Start 10; Stop 34
aatcaaagaggctgaaaatcgttcc

SEQ ID NO: 424687 - DNA, 25 bp, Artificial
  probe
  misc_feature (1)..(25): SEQ ID NO: 5896; WAN0249W6; Start 13; Stop 37
caaagaggctgaaaatcgttcctat

SEQ ID NO: 424688 - DNA, 25 bp, Artificial
  probe
  misc_feature (1)..(25): SEQ ID NO: 5896; WAN0249W6; Start 52; Stop 76
atagtgtgatgagtaggctcaggtt

SEQ ID NO: 424689 - DNA, 25 bp, Artificial
  probe
  misc_feature (1)..(25): SEQ ID NO: 5896; WAN0249W6; Start 109; Stop 133
ctaaagagcgagtattctagtagaa

SEQ ID NO: 424690 - DNA, 25 bp, Artificial
  probe
  misc_feature (1)..(25): SEQ ID NO: 5896; WAN0249W6; Start 12; Stop 36
tcaaagaggctgaaaatcgttccta

SEQ ID NO: 424691 - DNA, 25 bp, Artificial
  probe
  misc_feature (1)..(25): SEQ ID NO: 5896; WAN0249W6; Start 96; Stop 120
caaatatgatatactaaagagcgag

SEQ ID NO: 424692 - DNA, 25 bp, Artificial
  probe
  misc_feature (1)..(25): SEQ ID NO: 5896; WAN0249W6; Start 53; Stop 77
tagtgtgatgagtaggctcaggttc

SEQ ID NO: 424693 - DNA, 25 bp, Artificial
  probe
  misc_feature (1)..(25): SEQ ID NO: 5896; WAN0249W6; Start 58; Stop 82
tgatgagtaggctcaggttcaagtt

SEQ ID NO: 424694 - DNA, 25 bp, Artificial
  probe
  misc_feature (1)..(25): SEQ ID NO: 5896; WAN0249W6; Start 97; Stop 121
aaatatgatatactaaagagcgagt

SEQ ID NO: 424695 - DNA, 25 bp, Artificial
  probe
  misc_feature (1)..(25): SEQ ID NO: 5896; WAN0249W6; Start 116; Stop 140
gcgagtattctagtagaattaggac

SEQ ID NO: 424696 - DNA, 25 bp, Artificial
  probe
  misc_feature (1)..(25): SEQ ID NO: 5896; WAN0249W6; Start 11; Stop 35
atcaaagaggctgaaaatcgttcct

SEQ ID NO: 424697 - DNA, 25 bp, Artificial
  probe
  misc_feature (1)..(25): SEQ ID NO: 5896; WAN0249W6; Start 115; Stop 139
agcgagtattctagtagaattagga

SEQ ID NO: 424698 - DNA, 25 bp, Artificial
  probe
  misc_feature (1)..(25): SEQ ID NO: 5896; WAN0249W6; Start 114; Stop 138
gagcgagtattctagtagaattagg

SEQ ID NO: 424699 - DNA, 25 bp, Artificial
  probe
  misc_feature (1)..(25): SEQ ID NO: 5896; WAN0249W6; Start 93; Stop 117
aagcaaatatgatatactaaagagc

SEQ ID NO: 424700 - DNA, 25 bp, Artificial
  probe
  misc_feature (1)..(25): SEQ ID NO: 5896; WAN0249W6; Start 15; Stop 39
aagaggctgaaaatcgttcctatcg

SEQ ID NO: 424701 - DNA, 25 bp, Artificial
  probe
  misc_feature (1)..(25): SEQ ID NO: 5896; WAN0249W6; Start 59; Stop 83
gatgagtaggctcaggttcaagttt

SEQ ID NO: 424702 - DNA, 25 bp, Artificial
  probe
  misc_feature (1)..(25): SEQ ID NO: 5896; WAN0249W6; Start 90; Stop 114
accaagcaaatatgatatactaaag

SEQ ID NO: 424703 - DNA, 25 bp, Artificial
  probe
  misc_feature (1)..(25): SEQ ID NO: 5896; WAN0249W6; Start 107; Stop 131
tactaaagagcgagtattctagtag

SEQ ID NO: 424704 - DNA, 25 bp, Artificial
  probe
  misc_feature (1)..(25): SEQ ID NO: 5896; WAN0249W6; Start 57; Stop 81
gtgatgagtaggctcaggttcaagt

SEQ ID NO: 424705 - DNA, 25 bp, Artificial
  probe
  misc_feature (1)..(25): SEQ ID NO: 5897; WAN024AKU; Start 113; Stop 137
actccatctatgtaaaccctttctc

SEQ ID NO: 424706 - DNA, 25 bp, Artificial
  probe
  misc_feature (1)..(25): SEQ ID NO: 5897; WAN024AKU; Start 116; Stop 140
ccatctatgtaaaccctttctctcc

SEQ ID NO: 424707 - DNA, 25 bp, Artificial
  probe
  misc_feature (1)..(25): SEQ ID NO: 5897; WAN024AKU; Start 115; Stop 139
tccatctatgtaaaccctttctctc

SEQ ID NO: 424708 - DNA, 25 bp, Artificial
  probe
  misc_feature (1)..(25): SEQ ID NO: 5897; WAN024AKU; Start 114; Stop 138
ctccatctatgtaaaccctttctct

SEQ ID NO: 424709 - DNA, 25 bp, Artificial
  probe
  misc_feature (1)..(25): SEQ ID NO: 5897; WAN024AKU; Start 112; Stop 136
aactccatctatgtaaaccctttct

SEQ ID NO: 424710 - DNA, 25 bp, Artificial
  probe
  misc_feature (1)..(25): SEQ ID NO: 5897; WAN024AKU; Start 29; Stop 53
ggtcatcccatttacattgttcatt

SEQ ID NO: 424711 - DNA, 25 bp, Artificial
  probe
  misc_feature (1)..(25): SEQ ID NO: 5897; WAN024AKU; Start 109; Stop 133
tctaactccatctatgtaaaccctt

SEQ ID NO: 424712 - DNA, 25 bp, Artificial
  probe
  misc_feature (1)..(25): SEQ ID NO: 5897; WAN024AKU; Start 108; Stop 132
ttctaactccatctatgtaaaccct

SEQ ID NO: 424713 - DNA, 25 bp, Artificial
  probe
  misc_feature (1)..(25): SEQ ID NO: 5897; WAN024AKU; Start 107; Stop 131
cttctaactccatctatgtaaaccc

SEQ ID NO: 424714 - DNA, 25 bp, Artificial
  probe
  misc_feature (1)..(25): SEQ ID NO: 5897; WAN024AKU; Start 30; Stop 54
gtcatcccatttacattgttcattt

SEQ ID NO: 424715 - DNA, 25 bp, Artificial
  probe
  misc_feature (1)..(25): SEQ ID NO: 5897; WAN024AKU; Start 111; Stop 135
taactccatctatgtaaaccctttc

SEQ ID NO: 424716 - DNA, 25 bp, Artificial
  probe
  misc_feature (1)..(25): SEQ ID NO: 5897; WAN024AKU; Start 110; Stop 134
ctaactccatctatgtaaacccttt

SEQ ID NO: 424717 - DNA, 25 bp, Artificial
  probe
  misc_feature (1)..(25): SEQ ID NO: 5897; WAN024AKU; Start 106; Stop 130
tcttctaactccatctatgtaaacc

SEQ ID NO: 424718 - DNA, 25 bp, Artificial
  probe
  misc_feature (1)..(25): SEQ ID NO: 5897; WAN024AKU; Start 28; Stop 52
gggtcatcccatttacattgttcat

SEQ ID NO: 424719 - DNA, 25 bp, Artificial
  probe
  misc_feature (1)..(25): SEQ ID NO: 5897; WAN024AKU; Start 96; Stop 120
cgattgattttcttctaactccatc

SEQ ID NO: 424720 - DNA, 25 bp, Artificial
  probe
  misc_feature (1)..(25): SEQ ID NO: 5897; WAN024AKU; Start 105; Stop 129
ttcttctaactccatctatgtaaac

SEQ ID NO: 424721 - DNA, 25 bp, Artificial
  probe
  misc_feature (1)..(25): SEQ ID NO: 5897; WAN024AKU; Start 31; Stop 55
tcatcccatttacattgttcatttt

SEQ ID NO: 424722 - DNA, 25 bp, Artificial
  probe
  misc_feature (1)..(25): SEQ ID NO: 5897; WAN024AKU; Start 88; Stop 112
cgcagtttcgattgattttcttcta

SEQ ID NO: 424723 - DNA, 25 bp, Artificial
  probe
  misc_feature (1)..(25): SEQ ID NO: 5897; WAN024AKU; Start 94; Stop 118
ttcgattgattttcttctaactcca

SEQ ID NO: 424724 - DNA, 25 bp, Artificial
  probe
  misc_feature (1)..(25): SEQ ID NO: 5897; WAN024AKU; Start 89; Stop 113
gcagtttcgattgattttcttctaa

SEQ ID NO: 424725 - DNA, 25 bp, Artificial
  probe
  misc_feature (1)..(25): SEQ ID NO: 5897; WAN024AKU; Start 95; Stop 119
tcgattgattttcttctaactccat

SEQ ID NO: 424726 - DNA, 25 bp, Artificial
  probe
  misc_feature (1)..(25): SEQ ID NO: 5897; WAN024AKU; Start 104; Stop 128
tttcttctaactccatctatgtaaa

SEQ ID NO: 424727 - DNA, 25 bp, Artificial
  probe
  misc_feature (1)..(25): SEQ ID NO: 5897; WAN024AKU; Start 97; Stop 121
gattgattttcttctaactccatct

SEQ ID NO: 424728 - DNA, 25 bp, Artificial
  probe
  misc_feature (1)..(25): SEQ ID NO: 5897; WAN024AKU; Start 93; Stop 117
tttcgattgattttcttctaactcc

SEQ ID NO: 424729 - DNA, 25 bp, Artificial
  probe
  misc_feature (1)..(25): SEQ ID NO: 5897; WAN024AKU; Start 87; Stop 111
ccgcagtttcgattgattttcttct

SEQ ID NO: 424730 - DNA, 25 bp, Artificial
  probe
  misc_feature (1)..(25): SEQ ID NO: 5897; WAN024AKU; Start 82; Stop 106
ttttcccgcagtttcgattgatttt

SEQ ID NO: 424731 - DNA, 25 bp, Artificial
  probe
  misc_feature (1)..(25): SEQ ID NO: 5897; WAN024AKU; Start 101; Stop 125
gattttcttctaactccatctatgt

SEQ ID NO: 424732 - DNA, 25 bp, Artificial
  probe
  misc_feature (1)..(25): SEQ ID NO: 5897; WAN024AKU; Start 100; Stop 124
tgattttcttctaactccatctatg

SEQ ID NO: 424733 - DNA, 25 bp, Artificial
  probe
  misc_feature (1)..(25): SEQ ID NO: 5897; WAN024AKU; Start 35; Stop 59
cccatttacattgttcattttatca

SEQ ID NO: 424734 - DNA, 25 bp, Artificial
  probe
  misc_feature (1)..(25): SEQ ID NO: 5897; WAN024AKU; Start 32; Stop 56
catcccatttacattgttcatttta

SEQ ID NO: 424735 - DNA, 25 bp, Artificial
  probe
  misc_feature (1)..(25): SEQ ID NO: 5897; WAN024AKU; Start 83; Stop 107
tttcccgcagtttcgattgattttc

SEQ ID NO: 424736 - DNA, 25 bp, Artificial
  probe
  misc_feature (1)..(25): SEQ ID NO: 5897; WAN024AKU; Start 90; Stop 114
cagtttcgattgattttcttctaac

SEQ ID NO: 424737 - DNA, 25 bp, Artificial
  probe
  misc_feature (1)..(25): SEQ ID NO: 5897; WAN024AKU; Start 34; Stop 58
tcccatttacattgttcattttatc

SEQ ID NO: 424738 - DNA, 25 bp, Artificial
  probe
  misc_feature (1)..(25): SEQ ID NO: 5898; WAN0249PR; Start 143; Stop 167
ttggacagttagtcttgaagtagtc

SEQ ID NO: 424739 - DNA, 25 bp, Artificial
  probe
  misc_feature (1)..(25): SEQ ID NO: 5898; WAN0249PR; Start 144; Stop 168
tggacagttagtcttgaagtagtct

SEQ ID NO: 424740 - DNA, 25 bp, Artificial
  probe
  misc_feature (1)..(25): SEQ ID NO: 5898; WAN0249PR; Start 142; Stop 166
attggacagttagtcttgaagtagt

SEQ ID NO: 424741 - DNA, 25 bp, Artificial
  probe
  misc_feature (1)..(25): SEQ ID NO: 5898; WAN0249PR; Start 195; Stop 219
ccttgctaataatgaggaggttagt

SEQ ID NO: 424742 - DNA, 25 bp, Artificial
  probe
  misc_feature (1)..(25): SEQ ID NO: 5898; WAN0249PR; Start 145; Stop 169
ggacagttagtcttgaagtagtcta

SEQ ID NO: 424743 - DNA, 25 bp, Artificial
  probe
  misc_feature (1)..(25): SEQ ID NO: 5898; WAN0249PR; Start 194; Stop 218
gccttgctaataatgaggaggttag

SEQ ID NO: 424744 - DNA, 25 bp, Artificial
  probe
  misc_feature (1)..(25): SEQ ID NO: 5898; WAN0249PR; Start 196; Stop 220
cttgctaataatgaggaggttagtt

SEQ ID NO: 424745 - DNA, 25 bp, Artificial
  probe
  misc_feature (1)..(25): SEQ ID NO: 5898; WAN0249PR; Start 176; Stop 200
aggttataatcagtagaagccttgc

SEQ ID NO: 424746 - DNA, 25 bp, Artificial
  probe
  misc_feature (1)..(25): SEQ ID NO: 5898; WAN0249PR; Start 139; Stop 163
attattggacagttagtcttgaagt

SEQ ID NO: 424747 - DNA, 25 bp, Artificial
  probe
  misc_feature (1)..(25): SEQ ID NO: 5898; WAN0249PR; Start 141; Stop 165
tattggacagttagtcttgaagtag

SEQ ID NO: 424748 - DNA, 25 bp, Artificial
  probe
  misc_feature (1)..(25): SEQ ID NO: 5898; WAN0249PR; Start 189; Stop 213
tagaagccttgctaataatgaggag

SEQ ID NO: 424749 - DNA, 25 bp, Artificial
  probe
  misc_feature (1)..(25): SEQ ID NO: 5898; WAN0249PR; Start 188; Stop 212
gtagaagccttgctaataatgagga

SEQ ID NO: 424750 - DNA, 25 bp, Artificial
  probe
  misc_feature (1)..(25): SEQ ID NO: 5898; WAN0249PR; Start 187; Stop 211
agtagaagccttgctaataatgagg

SEQ ID NO: 424751 - DNA, 25 bp, Artificial
  probe
  misc_feature (1)..(25): SEQ ID NO: 5898; WAN0249PR; Start 185; Stop 209
tcagtagaagccttgctaataatga

SEQ ID NO: 424752 - DNA, 25 bp, Artificial
  probe
  misc_feature (1)..(25): SEQ ID NO: 5898; WAN0249PR; Start 147; Stop 171
acagttagtcttgaagtagtctaag

SEQ ID NO: 424753 - DNA, 25 bp, Artificial
  probe
  misc_feature (1)..(25): SEQ ID NO: 5898; WAN0249PR; Start 146; Stop 170
gacagttagtcttgaagtagtctaa

SEQ ID NO: 424754 - DNA, 25 bp, Artificial
  probe
  misc_feature (1)..(25): SEQ ID NO: 5898; WAN0249PR; Start 186; Stop 210
cagtagaagccttgctaataatgag

SEQ ID NO: 424755 - DNA, 25 bp, Artificial
  probe
  misc_feature (1)..(25): SEQ ID NO: 5898; WAN0249PR; Start 140; Stop 164
ttattggacagttagtcttgaagta

SEQ ID NO: 424756 - DNA, 25 bp, Artificial
  probe
  misc_feature (1)..(25): SEQ ID NO: 5898; WAN0249PR; Start 193; Stop 217
agccttgctaataatgaggaggtta

SEQ ID NO: 424757 - DNA, 25 bp, Artificial
  probe
  misc_feature (1)..(25): SEQ ID NO: 5898; WAN0249PR; Start 184; Stop 208
atcagtagaagccttgctaataatg

SEQ ID NO: 424758 - DNA, 25 bp, Artificial
  probe
  misc_feature (1)..(25): SEQ ID NO: 5898; WAN0249PR; Start 177; Stop 201
ggttataatcagtagaagccttgct

SEQ ID NO: 424759 - DNA, 25 bp, Artificial
  probe
  misc_feature (1)..(25): SEQ ID NO: 5898; WAN0249PR; Start 192; Stop 216
aagccttgctaataatgaggaggtt

SEQ ID NO: 424760 - DNA, 25 bp, Artificial
  probe
  misc_feature (1)..(25): SEQ ID NO: 5898; WAN0249PR; Start 183; Stop 207
aatcagtagaagccttgctaataat

SEQ ID NO: 424761 - DNA, 25 bp, Artificial
  probe
  misc_feature (1)..(25): SEQ ID NO: 5898; WAN0249PR; Start 175; Stop 199
taggttataatcagtagaagccttg

SEQ ID NO: 424762 - DNA, 25 bp, Artificial
  probe
  misc_feature (1)..(25): SEQ ID NO: 5898; WAN0249PR; Start 190; Stop 214
agaagccttgctaataatgaggagg

SEQ ID NO: 424763 - DNA, 25 bp, Artificial
  probe
  misc_feature (1)..(25): SEQ ID NO: 5898; WAN0249PR; Start 178; Stop 202
gttataatcagtagaagccttgcta

SEQ ID NO: 424764 - DNA, 25 bp, Artificial
  probe
  misc_feature (1)..(25): SEQ ID NO: 5898; WAN0249PR; Start 191; Stop 215
gaagccttgctaataatgaggaggt

SEQ ID NO: 424765 - DNA, 25 bp, Artificial
  probe
  misc_feature (1)..(25): SEQ ID NO: 5898; WAN0249PR; Start 182; Stop 206
taatcagtagaagccttgctaataa

SEQ ID NO: 424766 - DNA, 25 bp, Artificial
  probe
  misc_feature (1)..(25): SEQ ID NO: 5898; WAN0249PR; Start 197; Stop 221
ttgctaataatgaggaggttagttt

SEQ ID NO: 424767 - DNA, 25 bp, Artificial
  probe
  misc_feature (1)..(25): SEQ ID NO: 5898; WAN0249PR; Start 181; Stop 205
ataatcagtagaagccttgctaata

SEQ ID NO: 424768 - DNA, 25 bp, Artificial
  probe
  misc_feature (1)..(25): SEQ ID NO: 5898; WAN0249PR; Start 180; Stop 204
tataatcagtagaagccttgctaat

SEQ ID NO: 424769 - DNA, 25 bp, Artificial
  probe
  misc_feature (1)..(25): SEQ ID NO: 5898; WAN0249PR; Start 148; Stop 172
cagttagtcttgaagtagtctaaga

SEQ ID NO: 424770 - DNA, 25 bp, Artificial
  probe
  misc_feature (1)..(25): SEQ ID NO: 5898; WAN0249PR; Start 174; Stop 198
ttaggttataatcagtagaagcctt

SEQ ID NO: 424771 - DNA, 25 bp, Artificial
  probe
  misc_feature (1)..(25): SEQ ID NO: 5899; WAN024A5D; Start 63; Stop 87
gcgtccattacacacaagatatagt

SEQ ID NO: 424772 - DNA, 25 bp, Artificial
  probe
  misc_feature (1)..(25): SEQ ID NO: 5899; WAN024A5D; Start 62; Stop 86
tgcgtccattacacacaagatatag

SEQ ID NO: 424773 - DNA, 25 bp, Artificial
  probe
  misc_feature (1)..(25): SEQ ID NO: 5899; WAN024A5D; Start 64; Stop 88
cgtccattacacacaagatatagtt

SEQ ID NO: 424774 - DNA, 25 bp, Artificial
  probe
  misc_feature (1)..(25): SEQ ID NO: 5899; WAN024A5D; Start 61; Stop 85
gtgcgtccattacacacaagatata

SEQ ID NO: 424775 - DNA, 25 bp, Artificial
  probe
  misc_feature (1)..(25): SEQ ID NO: 5899; WAN024A5D; Start 13; Stop 37
tctttgtcaatcttgaggaatcttc

SEQ ID NO: 424776 - DNA, 25 bp, Artificial
  probe
  misc_feature (1)..(25): SEQ ID NO: 5899; WAN024A5D; Start 6; Stop 30
tctcctatctttgtcaatcttgagg

SEQ ID NO: 424777 - DNA, 25 bp, Artificial
  probe
  misc_feature (1)..(25): SEQ ID NO: 5899; WAN024A5D; Start 34; Stop 58
cttcctcagcggataaactgtattt

SEQ ID NO: 424778 - DNA, 25 bp, Artificial
  probe
  misc_feature (1)..(25): SEQ ID NO: 5899; WAN024A5D; Start 12; Stop 36
atctttgtcaatcttgaggaatctt

SEQ ID NO: 424779 - DNA, 25 bp, Artificial
  probe
  misc_feature (1)..(25): SEQ ID NO: 5899; WAN024A5D; Start 32; Stop 56
atcttcctcagcggataaactgtat

SEQ ID NO: 424780 - DNA, 25 bp, Artificial
  probe
  misc_feature (1)..(25): SEQ ID NO: 5899; WAN024A5D; Start 5; Stop 29
ttctcctatctttgtcaatcttgag

SEQ ID NO: 424781 - DNA, 25 bp, Artificial
  probe
  misc_feature (1)..(25): SEQ ID NO: 5899; WAN024A5D; Start 33; Stop 57
tcttcctcagcggataaactgtatt

SEQ ID NO: 424782 - DNA, 25 bp, Artificial
  probe
  misc_feature (1)..(25): SEQ ID NO: 5899; WAN024A5D; Start 31; Stop 55
aatcttcctcagcggataaactgta

SEQ ID NO: 424783 - DNA, 25 bp, Artificial
  probe
  misc_feature (1)..(25): SEQ ID NO: 5899; WAN024A5D; Start 9; Stop 33
cctatctttgtcaatcttgaggaat

SEQ ID NO: 424784 - DNA, 25 bp, Artificial
  probe
  misc_feature (1)..(25): SEQ ID NO: 5899; WAN024A5D; Start 14; Stop 38
ctttgtcaatcttgaggaatcttcc

SEQ ID NO: 424785 - DNA, 25 bp, Artificial
  probe
  misc_feature (1)..(25): SEQ ID NO: 5899; WAN024A5D; Start 11; Stop 35
tatctttgtcaatcttgaggaatct

SEQ ID NO: 424786 - DNA, 25 bp, Artificial
  probe
  misc_feature (1)..(25): SEQ ID NO: 5899; WAN024A5D; Start 4; Stop 28
attctcctatctttgtcaatcttga

SEQ ID NO: 424787 - DNA, 25 bp, Artificial
  probe
  misc_feature (1)..(25): SEQ ID NO: 5899; WAN024A5D; Start 65; Stop 89
gtccattacacacaagatatagttt

SEQ ID NO: 424788 - DNA, 25 bp, Artificial
  probe
  misc_feature (1)..(25): SEQ ID NO: 5899; WAN024A5D; Start 10; Stop 34
ctatctttgtcaatcttgaggaatc

SEQ ID NO: 424789 - DNA, 25 bp, Artificial
  probe
  misc_feature (1)..(25): SEQ ID NO: 5899; WAN024A5D; Start 30; Stop 54
gaatcttcctcagcggataaactgt

SEQ ID NO: 424790 - DNA, 25 bp, Artificial
  probe
  misc_feature (1)..(25): SEQ ID NO: 5899; WAN024A5D; Start 72; Stop 96
acacacaagatatagtttaccaaat

SEQ ID NO: 424791 - DNA, 25 bp, Artificial
  probe
  misc_feature (1)..(25): SEQ ID NO: 5899; WAN024A5D; Start 3; Stop 27
tattctcctatctttgtcaatcttg

SEQ ID NO: 424792 - DNA, 25 bp, Artificial
  probe
  misc_feature (1)..(25): SEQ ID NO: 5899; WAN024A5D; Start 71; Stop 95
tacacacaagatatagtttaccaaa

SEQ ID NO: 424793 - DNA, 25 bp, Artificial
  probe
  misc_feature (1)..(25): SEQ ID NO: 5899; WAN024A5D; Start 70; Stop 94
ttacacacaagatatagtttaccaa

SEQ ID NO: 424794 - DNA, 25 bp, Artificial
  probe
  misc_feature (1)..(25): SEQ ID NO: 5899; WAN024A5D; Start 35; Stop 59
ttcctcagcggataaactgtatttt

SEQ ID NO: 424795 - DNA, 25 bp, Artificial
  probe
  misc_feature (1)..(25): SEQ ID NO: 5899; WAN024A5D; Start 69; Stop 93
attacacacaagatatagtttacca

SEQ ID NO: 424796 - DNA, 25 bp, Artificial
  probe
  misc_feature (1)..(25): SEQ ID NO: 5899; WAN024A5D; Start 2; Stop 26
ttattctcctatctttgtcaatctt

SEQ ID NO: 424797 - DNA, 25 bp, Artificial
  probe
  misc_feature (1)..(25): SEQ ID NO: 5899; WAN024A5D; Start 1; Stop 25
tttattctcctatctttgtcaatct

SEQ ID NO: 424798 - DNA, 25 bp, Artificial
  probe
  misc_feature (1)..(25): SEQ ID NO: 5899; WAN024A5D; Start 29; Stop 53
ggaatcttcctcagcggataaactg

SEQ ID NO: 424799 - DNA, 25 bp, Artificial
  probe
  misc_feature (1)..(25): SEQ ID NO: 5899; WAN024A5D; Start 68; Stop 92
cattacacacaagatatagtttacc

SEQ ID NO: 424800 - DNA, 25 bp, Artificial
  probe
  misc_feature (1)..(25): SEQ ID NO: 5899; WAN024A5D; Start 67; Stop 91
ccattacacacaagatatagtttac

SEQ ID NO: 424801 - DNA, 25 bp, Artificial
  probe
  misc_feature (1)..(25): SEQ ID NO: 5899; WAN024A5D; Start 73; Stop 97
cacacaagatatagtttaccaaatt

SEQ ID NO: 424802 - DNA, 25 bp, Artificial
  probe
  misc_feature (1)..(25): SEQ ID NO: 5899; WAN024A5D; Start 66; Stop 90
tccattacacacaagatatagttta

SEQ ID NO: 424803 - DNA, 25 bp, Artificial
  probe
  misc_feature (1)..(25): SEQ ID NO: 5899; WAN024A5D; Start 7; Stop 31
ctcctatctttgtcaatcttgagga

SEQ ID NO: 424804 - DNA, 25 bp, Artificial
  probe
  misc_feature (1)..(25): SEQ ID NO: 5900; WAN024FI7; Start 115; Stop 139
ctaagtgtctggaatgataacgagg

SEQ ID NO: 424805 - DNA, 25 bp, Artificial
  probe
  misc_feature (1)..(25): SEQ ID NO: 5900; WAN024FI7; Start 114; Stop 138
cctaagtgtctggaatgataacgag

SEQ ID NO: 424806 - DNA, 25 bp, Artificial
  probe
  misc_feature (1)..(25): SEQ ID NO: 5900; WAN024FI7; Start 111; Stop 135
aaccctaagtgtctggaatgataac

SEQ ID NO: 424807 - DNA, 25 bp, Artificial
  probe
  misc_feature (1)..(25): SEQ ID NO: 5900; WAN024FI7; Start 106; Stop 130
aatctaaccctaagtgtctggaatg

SEQ ID NO: 424808 - DNA, 25 bp, Artificial
  probe
  misc_feature (1)..(25): SEQ ID NO: 5900; WAN024FI7; Start 108; Stop 132
tctaaccctaagtgtctggaatgat

SEQ ID NO: 424809 - DNA, 25 bp, Artificial
  probe
  misc_feature (1)..(25): SEQ ID NO: 5900; WAN024FI7; Start 107; Stop 131
atctaaccctaagtgtctggaatga

SEQ ID NO: 424810 - DNA, 25 bp, Artificial
  probe
  misc_feature (1)..(25): SEQ ID NO: 5900; WAN024FI7; Start 109; Stop 133
ctaaccctaagtgtctggaatgata

SEQ ID NO: 424811 - DNA, 25 bp, Artificial
  probe
  misc_feature (1)..(25): SEQ ID NO: 5900; WAN024FI7; Start 101; Stop 125
gcaataatctaaccctaagtgtctg

SEQ ID NO: 424812 - DNA, 25 bp, Artificial
  probe
  misc_feature (1)..(25): SEQ ID NO: 5900; WAN024FI7; Start 110; Stop 134
taaccctaagtgtctggaatgataa

SEQ ID NO: 424813 - DNA, 25 bp, Artificial
  probe
  misc_feature (1)..(25): SEQ ID NO: 5900; WAN024FI7; Start 76; Stop 100
tgctattatgctaaagaaattggct

SEQ ID NO: 424814 - DNA, 25 bp, Artificial
  probe
  misc_feature (1)..(25): SEQ ID NO: 5900; WAN024FI7; Start 102; Stop 126
caataatctaaccctaagtgtctgg

SEQ ID NO: 424815 - DNA, 25 bp, Artificial
  probe
  misc_feature (1)..(25): SEQ ID NO: 5900; WAN024FI7; Start 78; Stop 102
ctattatgctaaagaaattggctgc

SEQ ID NO: 424816 - DNA, 25 bp, Artificial
  probe
  misc_feature (1)..(25): SEQ ID NO: 5900; WAN024FI7; Start 77; Stop 101
gctattatgctaaagaaattggctg

SEQ ID NO: 424817 - DNA, 25 bp, Artificial
  probe
  misc_feature (1)..(25): SEQ ID NO: 5900; WAN024FI7; Start 75; Stop 99
ctgctattatgctaaagaaattggc

SEQ ID NO: 424818 - DNA, 25 bp, Artificial
  probe
  misc_feature (1)..(25): SEQ ID NO: 5900; WAN024FI7; Start 105; Stop 129
taatctaaccctaagtgtctggaat

SEQ ID NO: 424819 - DNA, 25 bp, Artificial
  probe
  misc_feature (1)..(25): SEQ ID NO: 5900; WAN024FI7; Start 104; Stop 128
ataatctaaccctaagtgtctggaa

SEQ ID NO: 424820 - DNA, 25 bp, Artificial
  probe
  misc_feature (1)..(25): SEQ ID NO: 5900; WAN024FI7; Start 103; Stop 127
aataatctaaccctaagtgtctgga

SEQ ID NO: 424821 - DNA, 25 bp, Artificial
  probe
  misc_feature (1)..(25): SEQ ID NO: 5900; WAN024FI7; Start 152; Stop 176
tttatcaaagacaagggatgaaacc

SEQ ID NO: 424822 - DNA, 25 bp, Artificial
  probe
  misc_feature (1)..(25): SEQ ID NO: 5900; WAN024FI7; Start 116; Stop 140
taagtgtctggaatgataacgaggg

SEQ ID NO: 424823 - DNA, 25 bp, Artificial
  probe
  misc_feature (1)..(25): SEQ ID NO: 5900; WAN024FI7; Start 113; Stop 137
ccctaagtgtctggaatgataacga

SEQ ID NO: 424824 - DNA, 25 bp, Artificial
  probe
  misc_feature (1)..(25): SEQ ID NO: 5900; WAN024FI7; Start 112; Stop 136
accctaagtgtctggaatgataacg

SEQ ID NO: 424825 - DNA, 25 bp, Artificial
  probe
  misc_feature (1)..(25): SEQ ID NO: 5900; WAN024FI7; Start 176; Stop 200
cccaagaaacaacaatggaaatgat

SEQ ID NO: 424826 - DNA, 25 bp, Artificial
  probe
  misc_feature (1)..(25): SEQ ID NO: 5900; WAN024FI7; Start 100; Stop 124
tgcaataatctaaccctaagtgtct

SEQ ID NO: 424827 - DNA, 25 bp, Artificial
  probe
  misc_feature (1)..(25): SEQ ID NO: 5900; WAN024FI7; Start 74; Stop 98
tctgctattatgctaaagaaattgg

SEQ ID NO: 424828 - DNA, 25 bp, Artificial
  probe
  misc_feature (1)..(25): SEQ ID NO: 5900; WAN024FI7; Start 99; Stop 123
ctgcaataatctaaccctaagtgtc

SEQ ID NO: 424829 - DNA, 25 bp, Artificial
  probe
  misc_feature (1)..(25): SEQ ID NO: 5900; WAN024FI7; Start 98; Stop 122
gctgcaataatctaaccctaagtgt

SEQ ID NO: 424830 - DNA, 25 bp, Artificial
  probe
  misc_feature (1)..(25): SEQ ID NO: 5900; WAN024FI7; Start 95; Stop 119
ttggctgcaataatctaaccctaag

SEQ ID NO: 424831 - DNA, 25 bp, Artificial
  probe
  misc_feature (1)..(25): SEQ ID NO: 5900; WAN024FI7; Start 177; Stop 201
ccaagaaacaacaatggaaatgata

SEQ ID NO: 424832 - DNA, 25 bp, Artificial
  probe
  misc_feature (1)..(25): SEQ ID NO: 5900; WAN024FI7; Start 97; Stop 121
ggctgcaataatctaaccctaagtg

SEQ ID NO: 424833 - DNA, 25 bp, Artificial
  probe
  misc_feature (1)..(25): SEQ ID NO: 5900; WAN024FI7; Start 178; Stop 202
caagaaacaacaatggaaatgataa

SEQ ID NO: 424834 - DNA, 25 bp, Artificial
  probe
  misc_feature (1)..(25): SEQ ID NO: 5900; WAN024FI7; Start 96; Stop 120
tggctgcaataatctaaccctaagt

SEQ ID NO: 424835 - DNA, 25 bp, Artificial
  probe
  misc_feature (1)..(25): SEQ ID NO: 5900; WAN024FI7; Start 117; Stop 141
aagtgtctggaatgataacgagggt

SEQ ID NO: 424836 - DNA, 25 bp, Artificial
  probe
  misc_feature (1)..(25): SEQ ID NO: 5900; WAN024FI7; Start 24; Stop 48
cccctatgctttcctttcaaaatat

SEQ ID NO: 424837 - DNA, 25 bp, Artificial
  probe
  misc_feature (1)..(25): SEQ ID NO: 5901; WAN0249EM; Start 104; Stop 128
attatggtataatgggtgccaagag

SEQ ID NO: 424838 - DNA, 25 bp, Artificial
  probe
  misc_feature (1)..(25): SEQ ID NO: 5901; WAN0249EM; Start 101; Stop 125
ggtattatggtataatgggtgccaa

SEQ ID NO: 424839 - DNA, 25 bp, Artificial
  probe
  misc_feature (1)..(25): SEQ ID NO: 5901; WAN0249EM; Start 103; Stop 127
tattatggtataatgggtgccaaga

SEQ ID NO: 424840 - DNA, 25 bp, Artificial
  probe
  misc_feature (1)..(25): SEQ ID NO: 5901; WAN0249EM; Start 102; Stop 126
gtattatggtataatgggtgccaag

SEQ ID NO: 424841 - DNA, 25 bp, Artificial
  probe
  misc_feature (1)..(25): SEQ ID NO: 5901; WAN0249EM; Start 105; Stop 129
ttatggtataatgggtgccaagagg

SEQ ID NO: 424842 - DNA, 25 bp, Artificial
  probe
  misc_feature (1)..(25): SEQ ID NO: 5901; WAN0249EM; Start 100; Stop 124
gggtattatggtataatgggtgcca

SEQ ID NO: 424843 - DNA, 25 bp, Artificial
  probe
  misc_feature (1)..(25): SEQ ID NO: 5901; WAN0249EM; Start 1; Stop 25
tttcaatatgtgtaaaggtaggttt

SEQ ID NO: 424844 - DNA, 25 bp, Artificial
  probe
  misc_feature (1)..(25): SEQ ID NO: 5901; WAN0249EM; Start 106; Stop 130
tatggtataatgggtgccaagaggt

SEQ ID NO: 424845 - DNA, 25 bp, Artificial
  probe
  misc_feature (1)..(25): SEQ ID NO: 5901; WAN0249EM; Start 2; Stop 26
ttcaatatgtgtaaaggtaggttta

SEQ ID NO: 424846 - DNA, 25 bp, Artificial
  probe
  misc_feature (1)..(25): SEQ ID NO: 5901; WAN0249EM; Start 97; Stop 121
gaggggtattatggtataatgggtg

SEQ ID NO: 424847 - DNA, 25 bp, Artificial
  probe
  misc_feature (1)..(25): SEQ ID NO: 5901; WAN0249EM; Start 96; Stop 120
tgaggggtattatggtataatgggt

SEQ ID NO: 424848 - DNA, 25 bp, Artificial
  probe
  misc_feature (1)..(25): SEQ ID NO: 5901; WAN0249EM; Start 95; Stop 119
ttgaggggtattatggtataatggg

SEQ ID NO: 424849 - DNA, 25 bp, Artificial
  probe
  misc_feature (1)..(25): SEQ ID NO: 5901; WAN0249EM; Start 107; Stop 131
atggtataatgggtgccaagaggtt

SEQ ID NO: 424850 - DNA, 25 bp, Artificial
  probe
  misc_feature (1)..(25): SEQ ID NO: 5901; WAN0249EM; Start 98; Stop 122
aggggtattatggtataatgggtgc

SEQ ID NO: 424851 - DNA, 25 bp, Artificial
  probe
  misc_feature (1)..(25): SEQ ID NO: 5901; WAN0249EM; Start 108; Stop 132
tggtataatgggtgccaagaggttt

SEQ ID NO: 424852 - DNA, 25 bp, Artificial
  probe
  misc_feature (1)..(25): SEQ ID NO: 5901; WAN0249EM; Start 111; Stop 135
tataatgggtgccaagaggttttga

SEQ ID NO: 424853 - DNA, 25 bp, Artificial
  probe
  misc_feature (1)..(25): SEQ ID NO: 5901; WAN0249EM; Start 110; Stop 134
gtataatgggtgccaagaggttttg

SEQ ID NO: 424854 - DNA, 25 bp, Artificial
  probe
  misc_feature (1)..(25): SEQ ID NO: 5901; WAN0249EM; Start 13; Stop 37
taaaggtaggtttactgaattgtaa

SEQ ID NO: 424855 - DNA, 25 bp, Artificial
  probe
  misc_feature (1)..(25): SEQ ID NO: 5901; WAN0249EM; Start 94; Stop 118
tttgaggggtattatggtataatgg

SEQ ID NO: 424856 - DNA, 25 bp, Artificial
  probe
  misc_feature (1)..(25): SEQ ID NO: 5901; WAN0249EM; Start 11; Stop 35
tgtaaaggtaggtttactgaattgt

SEQ ID NO: 424857 - DNA, 25 bp, Artificial
  probe
  misc_feature (1)..(25): SEQ ID NO: 5901; WAN0249EM; Start 9; Stop 33
tgtgtaaaggtaggtttactgaatt

SEQ ID NO: 424858 - DNA, 25 bp, Artificial
  probe
  misc_feature (1)..(25): SEQ ID NO: 5901; WAN0249EM; Start 10; Stop 34
gtgtaaaggtaggtttactgaattg

SEQ ID NO: 424859 - DNA, 25 bp, Artificial
  probe
  misc_feature (1)..(25): SEQ ID NO: 5901; WAN0249EM; Start 8; Stop 32
atgtgtaaaggtaggtttactgaat

SEQ ID NO: 424860 - DNA, 25 bp, Artificial
  probe
  misc_feature (1)..(25): SEQ ID NO: 5901; WAN0249EM; Start 99; Stop 123
ggggtattatggtataatgggtgcc

SEQ ID NO: 424861 - DNA, 25 bp, Artificial
  probe
  misc_feature (1)..(25): SEQ ID NO: 5901; WAN0249EM; Start 109; Stop 133
ggtataatgggtgccaagaggtttt

SEQ ID NO: 424862 - DNA, 25 bp, Artificial
  probe
  misc_feature (1)..(25): SEQ ID NO: 5901; WAN0249EM; Start 7; Stop 31
tatgtgtaaaggtaggtttactgaa

SEQ ID NO: 424863 - DNA, 25 bp, Artificial
  probe
  misc_feature (1)..(25): SEQ ID NO: 5901; WAN0249EM; Start 6; Stop 30
atatgtgtaaaggtaggtttactga

SEQ ID NO: 424864 - DNA, 25 bp, Artificial
  probe
  misc_feature (1)..(25): SEQ ID NO: 5901; WAN0249EM; Start 5; Stop 29
aatatgtgtaaaggtaggtttactg

SEQ ID NO: 424865 - DNA, 25 bp, Artificial
  probe
  misc_feature (1)..(25): SEQ ID NO: 5901; WAN0249EM; Start 4; Stop 28
caatatgtgtaaaggtaggtttact

SEQ ID NO: 424866 - DNA, 25 bp, Artificial
  probe
  misc_feature (1)..(25): SEQ ID NO: 5901; WAN0249EM; Start 3; Stop 27
tcaatatgtgtaaaggtaggtttac

SEQ ID NO: 424867 - DNA, 25 bp, Artificial
  probe
  misc_feature (1)..(25): SEQ ID NO: 5901; WAN0249EM; Start 14; Stop 38
aaaggtaggtttactgaattgtaaa

SEQ ID NO: 424868 - DNA, 25 bp, Artificial
  probe
  misc_feature (1)..(25): SEQ ID NO: 5901; WAN0249EM; Start 12; Stop 36
gtaaaggtaggtttactgaattgta

SEQ ID NO: 424869 - DNA, 25 bp, Artificial
  probe
  misc_feature (1)..(25): SEQ ID NO: 5901; WAN0249EM; Start 93; Stop 117
ttttgaggggtattatggtataatg

SEQ ID NO: 424870 - DNA, 25 bp, Artificial
  probe
  misc_feature (1)..(25): SEQ ID NO: 5901; WAN0249EM; Start 23; Stop 47
tttactgaattgtaaactacctttt

SEQ ID NO: 424871 - DNA, 25 bp, Artificial
  probe
  misc_feature (1)..(25): SEQ ID NO: 5902; WAN024AOE; Start 2; Stop 26
ttcagattcggtccactattccttc

SEQ ID NO: 424872 - DNA, 25 bp, Artificial
  probe
  misc_feature (1)..(25): SEQ ID NO: 5902; WAN024AOE; Start 1; Stop 25
tttcagattcggtccactattcctt

SEQ ID NO: 424873 - DNA, 25 bp, Artificial
  probe
  misc_feature (1)..(25): SEQ ID NO: 5902; WAN024AOE; Start 3; Stop 27
tcagattcggtccactattccttcc

SEQ ID NO: 424874 - DNA, 25 bp, Artificial
  probe
  misc_feature (1)..(25): SEQ ID NO: 5902; WAN024AOE; Start 7; Stop 31
attcggtccactattccttcccaaa

SEQ ID NO: 424875 - DNA, 25 bp, Artificial
  probe
  misc_feature (1)..(25): SEQ ID NO: 5902; WAN024AOE; Start 6; Stop 30
gattcggtccactattccttcccaa

SEQ ID NO: 424876 - DNA, 25 bp, Artificial
  probe
  misc_feature (1)..(25): SEQ ID NO: 5902; WAN024AOE; Start 4; Stop 28
cagattcggtccactattccttccc

SEQ ID NO: 424877 - DNA, 25 bp, Artificial
  probe
  misc_feature (1)..(25): SEQ ID NO: 5902; WAN024AOE; Start 5; Stop 29
agattcggtccactattccttccca

SEQ ID NO: 424878 - DNA, 25 bp, Artificial
  probe
  misc_feature (1)..(25): SEQ ID NO: 5902; WAN024AOE; Start 8; Stop 32
ttcggtccactattccttcccaaaa

SEQ ID NO: 424879 - DNA, 25 bp, Artificial
  probe
  misc_feature (1)..(25): SEQ ID NO: 5902; WAN024AOE; Start 67; Stop 91
tatcccaagcacaaaaccctcagtc

SEQ ID NO: 424880 - DNA, 25 bp, Artificial
  probe
  misc_feature (1)..(25): SEQ ID NO: 5902; WAN024AOE; Start 66; Stop 90
ctatcccaagcacaaaaccctcagt

SEQ ID NO: 424881 - DNA, 25 bp, Artificial
  probe
  misc_feature (1)..(25): SEQ ID NO: 5902; WAN024AOE; Start 65; Stop 89
actatcccaagcacaaaaccctcag

SEQ ID NO: 424882 - DNA, 25 bp, Artificial
  probe
  misc_feature (1)..(25): SEQ ID NO: 5902; WAN024AOE; Start 35; Stop 59
attgcatattgcgccgaaggaattg

SEQ ID NO: 424883 - DNA, 25 bp, Artificial
  probe
  misc_feature (1)..(25): SEQ ID NO: 5902; WAN024AOE; Start 34; Stop 58
cattgcatattgcgccgaaggaatt

SEQ ID NO: 424884 - DNA, 25 bp, Artificial
  probe
  misc_feature (1)..(25): SEQ ID NO: 5903; WAN0249XB; Start 18; Stop 42
atctagtcaagggaaaagtttgcca

SEQ ID NO: 424885 - DNA, 25 bp, Artificial
  probe
  misc_feature (1)..(25): SEQ ID NO: 5903; WAN0249XB; Start 19; Stop 43
tctagtcaagggaaaagtttgccag

SEQ ID NO: 424886 - DNA, 25 bp, Artificial
  probe
  misc_feature (1)..(25): SEQ ID NO: 5903; WAN0249XB; Start 20; Stop 44
ctagtcaagggaaaagtttgccagc

SEQ ID NO: 424887 - DNA, 25 bp, Artificial
  probe
  misc_feature (1)..(25): SEQ ID NO: 5904; WAN0249TA; Start 169; Stop 193
gtaatcctacttcacttgtgtctgt

SEQ ID NO: 424888 - DNA, 25 bp, Artificial
  probe
  misc_feature (1)..(25): SEQ ID NO: 5904; WAN0249TA; Start 171; Stop 195
aatcctacttcacttgtgtctgtaa

SEQ ID NO: 424889 - DNA, 25 bp, Artificial
  probe
  misc_feature (1)..(25): SEQ ID NO: 5904; WAN0249TA; Start 170; Stop 194
taatcctacttcacttgtgtctgta

SEQ ID NO: 424890 - DNA, 25 bp, Artificial
  probe
  misc_feature (1)..(25): SEQ ID NO: 5904; WAN0249TA; Start 168; Stop 192
agtaatcctacttcacttgtgtctg

SEQ ID NO: 424891 - DNA, 25 bp, Artificial
  probe
  misc_feature (1)..(25): SEQ ID NO: 5904; WAN0249TA; Start 172; Stop 196
atcctacttcacttgtgtctgtaaa

SEQ ID NO: 424892 - DNA, 25 bp, Artificial
  probe
  misc_feature (1)..(25): SEQ ID NO: 5904; WAN0249TA; Start 248; Stop 272
tcaccaatataagatgtccctcagg

SEQ ID NO: 424893 - DNA, 25 bp, Artificial
  probe
  misc_feature (1)..(25): SEQ ID NO: 5904; WAN0249TA; Start 252; Stop 276
caatataagatgtccctcaggcacc

SEQ ID NO: 424894 - DNA, 25 bp, Artificial
  probe
  misc_feature (1)..(25): SEQ ID NO: 5904; WAN0249TA; Start 251; Stop 275
ccaatataagatgtccctcaggcac

SEQ ID NO: 424895 - DNA, 25 bp, Artificial
  probe
  misc_feature (1)..(25): SEQ ID NO: 5904; WAN0249TA; Start 249; Stop 273
caccaatataagatgtccctcaggc

SEQ ID NO: 424896 - DNA, 25 bp, Artificial
  probe
  misc_feature (1)..(25): SEQ ID NO: 5904; WAN0249TA; Start 57; Stop 81
tagtagtgaggaaacttccgtaatg

SEQ ID NO: 424897 - DNA, 25 bp, Artificial
  probe
  misc_feature (1)..(25): SEQ ID NO: 5904; WAN0249TA; Start 55; Stop 79
catagtagtgaggaaacttccgtaa

SEQ ID NO: 424898 - DNA, 25 bp, Artificial
  probe
  misc_feature (1)..(25): SEQ ID NO: 5904; WAN0249TA; Start 20; Stop 44
gtagtaacaacgaatcatgagaagt

SEQ ID NO: 424899 - DNA, 25 bp, Artificial
  probe
  misc_feature (1)..(25): SEQ ID NO: 5904; WAN0249TA; Start 21; Stop 45
tagtaacaacgaatcatgagaagtc

SEQ ID NO: 424900 - DNA, 25 bp, Artificial
  probe
  misc_feature (1)..(25): SEQ ID NO: 5904; WAN0249TA; Start 23; Stop 47
gtaacaacgaatcatgagaagtcag

SEQ ID NO: 424901 - DNA, 25 bp, Artificial
  probe
  misc_feature (1)..(25): SEQ ID NO: 5904; WAN0249TA; Start 22; Stop 46
agtaacaacgaatcatgagaagtca

SEQ ID NO: 424902 - DNA, 25 bp, Artificial
  probe
  misc_feature (1)..(25): SEQ ID NO: 5904; WAN0249TA; Start 56; Stop 80
atagtagtgaggaaacttccgtaat

SEQ ID NO: 424903 - DNA, 25 bp, Artificial
  probe
  misc_feature (1)..(25): SEQ ID NO: 5904; WAN0249TA; Start 254; Stop 278
atataagatgtccctcaggcaccaa

SEQ ID NO: 424904 - DNA, 25 bp, Artificial
  probe
  misc_feature (1)..(25): SEQ ID NO: 5904; WAN0249TA; Start 253; Stop 277
aatataagatgtccctcaggcacca

SEQ ID NO: 424905 - DNA, 25 bp, Artificial
  probe
  misc_feature (1)..(25): SEQ ID NO: 5904; WAN0249TA; Start 250; Stop 274
accaatataagatgtccctcaggca

SEQ ID NO: 424906 - DNA, 25 bp, Artificial
  probe
  misc_feature (1)..(25): SEQ ID NO: 5904; WAN0249TA; Start 54; Stop 78
ccatagtagtgaggaaacttccgta

SEQ ID NO: 424907 - DNA, 25 bp, Artificial
  probe
  misc_feature (1)..(25): SEQ ID NO: 5904; WAN0249TA; Start 255; Stop 279
tataagatgtccctcaggcaccaaa

SEQ ID NO: 424908 - DNA, 25 bp, Artificial
  probe
  misc_feature (1)..(25): SEQ ID NO: 5904; WAN0249TA; Start 24; Stop 48
taacaacgaatcatgagaagtcagc

SEQ ID NO: 424909 - DNA, 25 bp, Artificial
  probe
  misc_feature (1)..(25): SEQ ID NO: 5904; WAN0249TA; Start 173; Stop 197
tcctacttcacttgtgtctgtaaaa

SEQ ID NO: 424910 - DNA, 25 bp, Artificial
  probe
  misc_feature (1)..(25): SEQ ID NO: 5904; WAN0249TA; Start 128; Stop 152
gtttgaggtctgtcgctagaaagag

SEQ ID NO: 424911 - DNA, 25 bp, Artificial
  probe
  misc_feature (1)..(25): SEQ ID NO: 5904; WAN0249TA; Start 59; Stop 83
gtagtgaggaaacttccgtaatgga

SEQ ID NO: 424912 - DNA, 25 bp, Artificial
  probe
  misc_feature (1)..(25): SEQ ID NO: 5904; WAN0249TA; Start 58; Stop 82
agtagtgaggaaacttccgtaatgg

SEQ ID NO: 424913 - DNA, 25 bp, Artificial
  probe
  misc_feature (1)..(25): SEQ ID NO: 5904; WAN0249TA; Start 131; Stop 155
tgaggtctgtcgctagaaagagaaa

SEQ ID NO: 424914 - DNA, 25 bp, Artificial
  probe
  misc_feature (1)..(25): SEQ ID NO: 5904; WAN0249TA; Start 130; Stop 154
ttgaggtctgtcgctagaaagagaa

SEQ ID NO: 424915 - DNA, 25 bp, Artificial
  probe
  misc_feature (1)..(25): SEQ ID NO: 5904; WAN0249TA; Start 129; Stop 153
tttgaggtctgtcgctagaaagaga

SEQ ID NO: 424916 - DNA, 25 bp, Artificial
  probe
  misc_feature (1)..(25): SEQ ID NO: 5904; WAN0249TA; Start 126; Stop 150
ctgtttgaggtctgtcgctagaaag

SEQ ID NO: 424917 - DNA, 25 bp, Artificial
  probe
  misc_feature (1)..(25): SEQ ID NO: 5904; WAN0249TA; Start 13; Stop 37
tgaaagcgtagtaacaacgaatcat

SEQ ID NO: 424918 - DNA, 25 bp, Artificial
  probe
  misc_feature (1)..(25): SEQ ID NO: 5904; WAN0249TA; Start 14; Stop 38
gaaagcgtagtaacaacgaatcatg

SEQ ID NO: 424919 - DNA, 25 bp, Artificial
  probe
  misc_feature (1)..(25): SEQ ID NO: 5904; WAN0249TA; Start 167; Stop 191
aagtaatcctacttcacttgtgtct

SEQ ID NO: 424920 - DNA, 25 bp, Artificial
  probe
  misc_feature (1)..(25): SEQ ID NO: 5905; WAN024A6C; Start 142; Stop 166
ggtaggtcattacaaaagaaacgag

SEQ ID NO: 424921 - DNA, 25 bp, Artificial
  probe
  misc_feature (1)..(25): SEQ ID NO: 5905; WAN024A6C; Start 141; Stop 165
aggtaggtcattacaaaagaaacga

SEQ ID NO: 424922 - DNA, 25 bp, Artificial
  probe
  misc_feature (1)..(25): SEQ ID NO: 5905; WAN024A6C; Start 136; Stop 160
agcataggtaggtcattacaaaaga

SEQ ID NO: 424923 - DNA, 25 bp, Artificial
  probe
  misc_feature (1)..(25): SEQ ID NO: 5905; WAN024A6C; Start 134; Stop 158
agagcataggtaggtcattacaaaa

SEQ ID NO: 424924 - DNA, 25 bp, Artificial
  probe
  misc_feature (1)..(25): SEQ ID NO: 5905; WAN024A6C; Start 135; Stop 159
gagcataggtaggtcattacaaaag

SEQ ID NO: 424925 - DNA, 25 bp, Artificial
  probe
  misc_feature (1)..(25): SEQ ID NO: 5905; WAN024A6C; Start 143; Stop 167
gtaggtcattacaaaagaaacgaga

SEQ ID NO: 424926 - DNA, 25 bp, Artificial
  probe
  misc_feature (1)..(25): SEQ ID NO: 5905; WAN024A6C; Start 140; Stop 164
taggtaggtcattacaaaagaaacg

SEQ ID NO: 424927 - DNA, 25 bp, Artificial
  probe
  misc_feature (1)..(25): SEQ ID NO: 5905; WAN024A6C; Start 137; Stop 161
gcataggtaggtcattacaaaagaa

SEQ ID NO: 424928 - DNA, 25 bp, Artificial
  probe
  misc_feature (1)..(25): SEQ ID NO: 5905; WAN024A6C; Start 146; Stop 170
ggtcattacaaaagaaacgagacat

SEQ ID NO: 424929 - DNA, 25 bp, Artificial
  probe
  misc_feature (1)..(25): SEQ ID NO: 5905; WAN024A6C; Start 145; Stop 169
aggtcattacaaaagaaacgagaca

SEQ ID NO: 424930 - DNA, 25 bp, Artificial
  probe
  misc_feature (1)..(25): SEQ ID NO: 5905; WAN024A6C; Start 144; Stop 168
taggtcattacaaaagaaacgagac

SEQ ID NO: 424931 - DNA, 25 bp, Artificial
  probe
  misc_feature (1)..(25): SEQ ID NO: 5905; WAN024A6C; Start 94; Stop 118
taataaattaaggaaacgtcggaaa

SEQ ID NO: 424932 - DNA, 25 bp, Artificial
  probe
  misc_feature (1)..(25): SEQ ID NO: 5905; WAN024A6C; Start 147; Stop 171
gtcattacaaaagaaacgagacatc

SEQ ID NO: 424933 - DNA, 25 bp, Artificial
  probe
  misc_feature (1)..(25): SEQ ID NO: 5905; WAN024A6C; Start 93; Stop 117
ataataaattaaggaaacgtcggaa

SEQ ID NO: 424934 - DNA, 25 bp, Artificial
  probe
  misc_feature (1)..(25): SEQ ID NO: 5905; WAN024A6C; Start 97; Stop 121
taaattaaggaaacgtcggaaaagg

SEQ ID NO: 424935 - DNA, 25 bp, Artificial
  probe
  misc_feature (1)..(25): SEQ ID NO: 5905; WAN024A6C; Start 148; Stop 172
tcattacaaaagaaacgagacatcg

SEQ ID NO: 424936 - DNA, 25 bp, Artificial
  probe
  misc_feature (1)..(25): SEQ ID NO: 5905; WAN024A6C; Start 139; Stop 163
ataggtaggtcattacaaaagaaac

SEQ ID NO: 424937 - DNA, 25 bp, Artificial
  probe
  misc_feature (1)..(25): SEQ ID NO: 5905; WAN024A6C; Start 138; Stop 162
cataggtaggtcattacaaaagaaa

SEQ ID NO: 424938 - DNA, 25 bp, Artificial
  probe
  misc_feature (1)..(25): SEQ ID NO: 5905; WAN024A6C; Start 96; Stop 120
ataaattaaggaaacgtcggaaaag

SEQ ID NO: 424939 - DNA, 25 bp, Artificial
  probe
  misc_feature (1)..(25): SEQ ID NO: 5905; WAN024A6C; Start 92; Stop 116
tataataaattaaggaaacgtcgga

SEQ ID NO: 424940 - DNA, 25 bp, Artificial
  probe
  misc_feature (1)..(25): SEQ ID NO: 5905; WAN024A6C; Start 95; Stop 119
aataaattaaggaaacgtcggaaaa

SEQ ID NO: 424941 - DNA, 25 bp, Artificial
  probe
  misc_feature (1)..(25): SEQ ID NO: 5905; WAN024A6C; Start 98; Stop 122
aaattaaggaaacgtcggaaaaggc

SEQ ID NO: 424942 - DNA, 25 bp, Artificial
  probe
  misc_feature (1)..(25): SEQ ID NO: 5905; WAN024A6C; Start 149; Stop 173
cattacaaaagaaacgagacatcga

SEQ ID NO: 424943 - DNA, 25 bp, Artificial
  probe
  misc_feature (1)..(25): SEQ ID NO: 5905; WAN024A6C; Start 91; Stop 115
ttataataaattaaggaaacgtcgg

SEQ ID NO: 424944 - DNA, 25 bp, Artificial
  probe
  misc_feature (1)..(25): SEQ ID NO: 5905; WAN024A6C; Start 150; Stop 174
attacaaaagaaacgagacatcgat

SEQ ID NO: 424945 - DNA, 25 bp, Artificial
  probe
  misc_feature (1)..(25): SEQ ID NO: 5905; WAN024A6C; Start 99; Stop 123
aattaaggaaacgtcggaaaaggcg

SEQ ID NO: 424946 - DNA, 25 bp, Artificial
  probe
  misc_feature (1)..(25): SEQ ID NO: 5905; WAN024A6C; Start 101; Stop 125
ttaaggaaacgtcggaaaaggcgta

SEQ ID NO: 424947 - DNA, 25 bp, Artificial
  probe
  misc_feature (1)..(25): SEQ ID NO: 5905; WAN024A6C; Start 102; Stop 126
taaggaaacgtcggaaaaggcgtag

SEQ ID NO: 424948 - DNA, 25 bp, Artificial
  probe
  misc_feature (1)..(25): SEQ ID NO: 5906; WAN0249RR; Start 191; Stop 215
agtcagtaacatatatacggcaagg

SEQ ID NO: 424949 - DNA, 25 bp, Artificial
  probe
  misc_feature (1)..(25): SEQ ID NO: 5906; WAN0249RR; Start 188; Stop 212
cgaagtcagtaacatatatacggca

SEQ ID NO: 424950 - DNA, 25 bp, Artificial
  probe
  misc_feature (1)..(25): SEQ ID NO: 5906; WAN0249RR; Start 187; Stop 211
acgaagtcagtaacatatatacggc

SEQ ID NO: 424951 - DNA, 25 bp, Artificial
  probe
  misc_feature (1)..(25): SEQ ID NO: 5906; WAN0249RR; Start 192; Stop 216
gtcagtaacatatatacggcaaggc

SEQ ID NO: 424952 - DNA, 25 bp, Artificial
  probe
  misc_feature (1)..(25): SEQ ID NO: 5906; WAN0249RR; Start 189; Stop 213
gaagtcagtaacatatatacggcaa

SEQ ID NO: 424953 - DNA, 25 bp, Artificial
  probe
  misc_feature (1)..(25): SEQ ID NO: 5906; WAN0249RR; Start 190; Stop 214
aagtcagtaacatatatacggcaag

SEQ ID NO: 424954 - DNA, 25 bp, Artificial
  probe
  misc_feature (1)..(25): SEQ ID NO: 5906; WAN0249RR; Start 186; Stop 210
gacgaagtcagtaacatatatacgg

SEQ ID NO: 424955 - DNA, 25 bp, Artificial
  probe
  misc_feature (1)..(25): SEQ ID NO: 5906; WAN0249RR; Start 195; Stop 219
agtaacatatatacggcaaggcgac

SEQ ID NO: 424956 - DNA, 25 bp, Artificial
  probe
  misc_feature (1)..(25): SEQ ID NO: 5906; WAN0249RR; Start 194; Stop 218
cagtaacatatatacggcaaggcga

SEQ ID NO: 424957 - DNA, 25 bp, Artificial
  probe
  misc_feature (1)..(25): SEQ ID NO: 5906; WAN0249RR; Start 193; Stop 217
tcagtaacatatatacggcaaggcg

SEQ ID NO: 424958 - DNA, 25 bp, Artificial
  probe
  misc_feature (1)..(25): SEQ ID NO: 5906; WAN0249RR; Start 196; Stop 220
gtaacatatatacggcaaggcgacg

SEQ ID NO: 424959 - DNA, 25 bp, Artificial
  probe
  misc_feature (1)..(25): SEQ ID NO: 5906; WAN0249RR; Start 243; Stop 267
ttgaagagtatgaaacgaaaaggag

SEQ ID NO: 424960 - DNA, 25 bp, Artificial
  probe
  misc_feature (1)..(25): SEQ ID NO: 5906; WAN0249RR; Start 245; Stop 269
gaagagtatgaaacgaaaaggaggt

SEQ ID NO: 424961 - DNA, 25 bp, Artificial
  probe
  misc_feature (1)..(25): SEQ ID NO: 5906; WAN0249RR; Start 244; Stop 268
tgaagagtatgaaacgaaaaggagg

SEQ ID NO: 424962 - DNA, 25 bp, Artificial
  probe
  misc_feature (1)..(25): SEQ ID NO: 5906; WAN0249RR; Start 242; Stop 266
tttgaagagtatgaaacgaaaagga

SEQ ID NO: 424963 - DNA, 25 bp, Artificial
  probe
  misc_feature (1)..(25): SEQ ID NO: 5906; WAN0249RR; Start 246; Stop 270
aagagtatgaaacgaaaaggaggtt

SEQ ID NO: 424964 - DNA, 25 bp, Artificial
  probe
  misc_feature (1)..(25): SEQ ID NO: 5906; WAN0249RR; Start 247; Stop 271
agagtatgaaacgaaaaggaggttg

SEQ ID NO: 424965 - DNA, 25 bp, Artificial
  probe
  misc_feature (1)..(25): SEQ ID NO: 5906; WAN0249RR; Start 74; Stop 98
ctttgaggttgcagatagaactgac

SEQ ID NO: 424966 - DNA, 25 bp, Artificial
  probe
  misc_feature (1)..(25): SEQ ID NO: 5906; WAN0249RR; Start 248; Stop 272
gagtatgaaacgaaaaggaggttgg

SEQ ID NO: 424967 - DNA, 25 bp, Artificial
  probe
  misc_feature (1)..(25): SEQ ID NO: 5906; WAN0249RR; Start 250; Stop 274
gtatgaaacgaaaaggaggttggtc

SEQ ID NO: 424968 - DNA, 25 bp, Artificial
  probe
  misc_feature (1)..(25): SEQ ID NO: 5906; WAN0249RR; Start 185; Stop 209
tgacgaagtcagtaacatatatacg

SEQ ID NO: 424969 - DNA, 25 bp, Artificial
  probe
  misc_feature (1)..(25): SEQ ID NO: 5906; WAN0249RR; Start 249; Stop 273
agtatgaaacgaaaaggaggttggt

SEQ ID NO: 424970 - DNA, 25 bp, Artificial
  probe
  misc_feature (1)..(25): SEQ ID NO: 5906; WAN0249RR; Start 251; Stop 275
tatgaaacgaaaaggaggttggtca

SEQ ID NO: 424971 - DNA, 25 bp, Artificial
  probe
  misc_feature (1)..(25): SEQ ID NO: 5906; WAN0249RR; Start 241; Stop 265
ttttgaagagtatgaaacgaaaagg

SEQ ID NO: 424972 - DNA, 25 bp, Artificial
  probe
  misc_feature (1)..(25): SEQ ID NO: 5906; WAN0249RR; Start 256; Stop 280
aacgaaaaggaggttggtcattgta

SEQ ID NO: 424973 - DNA, 25 bp, Artificial
  probe
  misc_feature (1)..(25): SEQ ID NO: 5906; WAN0249RR; Start 2; Stop 26
ttcctaaatctgatactcaatgaaa

SEQ ID NO: 424974 - DNA, 25 bp, Artificial
  probe
  misc_feature (1)..(25): SEQ ID NO: 5906; WAN0249RR; Start 1; Stop 25
tttcctaaatctgatactcaatgaa

SEQ ID NO: 424975 - DNA, 25 bp, Artificial
  probe
  misc_feature (1)..(25): SEQ ID NO: 5906; WAN0249RR; Start 254; Stop 278
gaaacgaaaaggaggttggtcattg

SEQ ID NO: 424976 - DNA, 25 bp, Artificial
  probe
  misc_feature (1)..(25): SEQ ID NO: 5906; WAN0249RR; Start 73; Stop 97
gctttgaggttgcagatagaactga

SEQ ID NO: 424977 - DNA, 25 bp, Artificial
  probe
  misc_feature (1)..(25): SEQ ID NO: 5906; WAN0249RR; Start 253; Stop 277
tgaaacgaaaaggaggttggtcatt

SEQ ID NO: 424978 - DNA, 25 bp, Artificial
  probe
  misc_feature (1)..(25): SEQ ID NO: 5906; WAN0249RR; Start 255; Stop 279
aaacgaaaaggaggttggtcattgt

SEQ ID NO: 424979 - DNA, 25 bp, Artificial
  probe
  misc_feature (1)..(25): SEQ ID NO: 5906; WAN0249RR; Start 257; Stop 281
acgaaaaggaggttggtcattgtac

SEQ ID NO: 424980 - DNA, 25 bp, Artificial
  probe
  misc_feature (1)..(25): SEQ ID NO: 5906; WAN0249RR; Start 197; Stop 221
taacatatatacggcaaggcgacgt

SEQ ID NO: 424981 - DNA, 25 bp, Artificial
  probe
  misc_feature (1)..(25): SEQ ID NO: 5907; WAN024AD6; Start 95; Stop 119
gagagactcacaaggtgtcagataa

SEQ ID NO: 424982 - DNA, 25 bp, Artificial
  probe
  misc_feature (1)..(25): SEQ ID NO: 5907; WAN024AD6; Start 94; Stop 118
agagagactcacaaggtgtcagata

SEQ ID NO: 424983 - DNA, 25 bp, Artificial
  probe
  misc_feature (1)..(25): SEQ ID NO: 5907; WAN024AD6; Start 96; Stop 120
agagactcacaaggtgtcagataaa

SEQ ID NO: 424984 - DNA, 25 bp, Artificial
  probe
  misc_feature (1)..(25): SEQ ID NO: 5907; WAN024AD6; Start 151; Stop 175
ttgagtgtgctctcttgtgttgtac

SEQ ID NO: 424985 - DNA, 25 bp, Artificial
  probe
  misc_feature (1)..(25): SEQ ID NO: 5907; WAN024AD6; Start 155; Stop 179
gtgtgctctcttgtgttgtacgatt

SEQ ID NO: 424986 - DNA, 25 bp, Artificial
  probe
  misc_feature (1)..(25): SEQ ID NO: 5907; WAN024AD6; Start 93; Stop 117
cagagagactcacaaggtgtcagat

SEQ ID NO: 424987 - DNA, 25 bp, Artificial
  probe
  misc_feature (1)..(25): SEQ ID NO: 5907; WAN024AD6; Start 150; Stop 174
tttgagtgtgctctcttgtgttgta

SEQ ID NO: 424988 - DNA, 25 bp, Artificial
  probe
  misc_feature (1)..(25): SEQ ID NO: 5907; WAN024AD6; Start 156; Stop 180
tgtgctctcttgtgttgtacgattt

SEQ ID NO: 424989 - DNA, 25 bp, Artificial
  probe
  misc_feature (1)..(25): SEQ ID NO: 5907; WAN024AD6; Start 205; Stop 229
gtcttttctttatctggtcccctta

SEQ ID NO: 424990 - DNA, 25 bp, Artificial
  probe
  misc_feature (1)..(25): SEQ ID NO: 5907; WAN024AD6; Start 154; Stop 178
agtgtgctctcttgtgttgtacgat

SEQ ID NO: 424991 - DNA, 25 bp, Artificial
  probe
  misc_feature (1)..(25): SEQ ID NO: 5907; WAN024AD6; Start 206; Stop 230
tcttttctttatctggtccccttaa

SEQ ID NO: 424992 - DNA, 25 bp, Artificial
  probe
  misc_feature (1)..(25): SEQ ID NO: 5907; WAN024AD6; Start 198; Stop 222
tagcaaggtcttttctttatctggt

SEQ ID NO: 424993 - DNA, 25 bp, Artificial
  probe
  misc_feature (1)..(25): SEQ ID NO: 5907; WAN024AD6; Start 199; Stop 223
agcaaggtcttttctttatctggtc

SEQ ID NO: 424994 - DNA, 25 bp, Artificial
  probe
  misc_feature (1)..(25): SEQ ID NO: 5907; WAN024AD6; Start 194; Stop 218
gcactagcaaggtcttttctttatc

SEQ ID NO: 424995 - DNA, 25 bp, Artificial
  probe
  misc_feature (1)..(25): SEQ ID NO: 5907; WAN024AD6; Start 201; Stop 225
caaggtcttttctttatctggtccc

SEQ ID NO: 424996 - DNA, 25 bp, Artificial
  probe
  misc_feature (1)..(25): SEQ ID NO: 5907; WAN024AD6; Start 159; Stop 183
gctctcttgtgttgtacgattttaa

SEQ ID NO: 424997 - DNA, 25 bp, Artificial
  probe
  misc_feature (1)..(25): SEQ ID NO: 5907; WAN024AD6; Start 197; Stop 221
ctagcaaggtcttttctttatctgg

SEQ ID NO: 424998 - DNA, 25 bp, Artificial
  probe
  misc_feature (1)..(25): SEQ ID NO: 5907; WAN024AD6; Start 158; Stop 182
tgctctcttgtgttgtacgatttta

SEQ ID NO: 424999 - DNA, 25 bp, Artificial
  probe
  misc_feature (1)..(25): SEQ ID NO: 5907; WAN024AD6; Start 165; Stop 189
ttgtgttgtacgattttaactgagg

SEQ ID NO: 425000 - DNA, 25 bp, Artificial
  probe
  misc_feature (1)..(25): SEQ ID NO: 5907; WAN024AD6; Start 207; Stop 231
cttttctttatctggtccccttaaa

SEQ ID NO: 425001 - DNA, 25 bp, Artificial
  probe
  misc_feature (1)..(25): SEQ ID NO: 5907; WAN024AD6; Start 196; Stop 220
actagcaaggtcttttctttatctg

SEQ ID NO: 425002 - DNA, 25 bp, Artificial
  probe
  misc_feature (1)..(25): SEQ ID NO: 5907; WAN024AD6; Start 195; Stop 219
cactagcaaggtcttttctttatct

SEQ ID NO: 425003 - DNA, 25 bp, Artificial
  probe
  misc_feature (1)..(25): SEQ ID NO: 5907; WAN024AD6; Start 200; Stop 224
gcaaggtcttttctttatctggtcc

SEQ ID NO: 425004 - DNA, 25 bp, Artificial
  probe
  misc_feature (1)..(25): SEQ ID NO: 5907; WAN024AD6; Start 4; Stop 28
cgtgcaagttaagtagaatattcgt

SEQ ID NO: 425005 - DNA, 25 bp, Artificial
  probe
  misc_feature (1)..(25): SEQ ID NO: 5907; WAN024AD6; Start 3; Stop 27
tcgtgcaagttaagtagaatattcg

SEQ ID NO: 425006 - DNA, 25 bp, Artificial
  probe
  misc_feature (1)..(25): SEQ ID NO: 5907; WAN024AD6; Start 204; Stop 228
ggtcttttctttatctggtcccctt

SEQ ID NO: 425007 - DNA, 25 bp, Artificial
  probe
  misc_feature (1)..(25): SEQ ID NO: 5907; WAN024AD6; Start 163; Stop 187
tcttgtgttgtacgattttaactga

SEQ ID NO: 425008 - DNA, 25 bp, Artificial
  probe
  misc_feature (1)..(25): SEQ ID NO: 5907; WAN024AD6; Start 100; Stop 124
actcacaaggtgtcagataaaagaa

SEQ ID NO: 425009 - DNA, 25 bp, Artificial
  probe
  misc_feature (1)..(25): SEQ ID NO: 5907; WAN024AD6; Start 164; Stop 188
cttgtgttgtacgattttaactgag

SEQ ID NO: 425010 - DNA, 25 bp, Artificial
  probe
  misc_feature (1)..(25): SEQ ID NO: 5907; WAN024AD6; Start 162; Stop 186
ctcttgtgttgtacgattttaactg

SEQ ID NO: 425011 - DNA, 25 bp, Artificial
  probe
  misc_feature (1)..(25): SEQ ID NO: 5907; WAN024AD6; Start 161; Stop 185
tctcttgtgttgtacgattttaact

SEQ ID NO: 425012 - DNA, 25 bp, Artificial
  probe
  misc_feature (1)..(25): SEQ ID NO: 5907; WAN024AD6; Start 99; Stop 123
gactcacaaggtgtcagataaaaga

SEQ ID NO: 425013 - DNA, 25 bp, Artificial
  probe
  misc_feature (1)..(25): SEQ ID NO: 5907; WAN024AD6; Start 98; Stop 122
agactcacaaggtgtcagataaaag

SEQ ID NO: 425014 - DNA, 25 bp, Artificial
  probe
  misc_feature (1)..(25): SEQ ID NO: 5908; WAN024A7P; Start 157; Stop 181
tcgcaatactaaacacagaaagaga

SEQ ID NO: 425015 - DNA, 25 bp, Artificial
  probe
  misc_feature (1)..(25): SEQ ID NO: 5908; WAN024A7P; Start 158; Stop 182
cgcaatactaaacacagaaagagat

SEQ ID NO: 425016 - DNA, 25 bp, Artificial
  probe
  misc_feature (1)..(25): SEQ ID NO: 5908; WAN024A7P; Start 156; Stop 180
ttcgcaatactaaacacagaaagag

SEQ ID NO: 425017 - DNA, 25 bp, Artificial
  probe
  misc_feature (1)..(25): SEQ ID NO: 5908; WAN024A7P; Start 111; Stop 135
tgcgatactcctatagaattatggt

SEQ ID NO: 425018 - DNA, 25 bp, Artificial
  probe
  misc_feature (1)..(25): SEQ ID NO: 5908; WAN024A7P; Start 155; Stop 179
gttcgcaatactaaacacagaaaga

SEQ ID NO: 425019 - DNA, 25 bp, Artificial
  probe
  misc_feature (1)..(25): SEQ ID NO: 5908; WAN024A7P; Start 110; Stop 134
gtgcgatactcctatagaattatgg

SEQ ID NO: 425020 - DNA, 25 bp, Artificial
  probe
  misc_feature (1)..(25): SEQ ID NO: 5908; WAN024A7P; Start 154; Stop 178
agttcgcaatactaaacacagaaag

SEQ ID NO: 425021 - DNA, 25 bp, Artificial
  probe
  misc_feature (1)..(25): SEQ ID NO: 5908; WAN024A7P; Start 153; Stop 177
gagttcgcaatactaaacacagaaa

SEQ ID NO: 425022 - DNA, 25 bp, Artificial
  probe
  misc_feature (1)..(25): SEQ ID NO: 5908; WAN024A7P; Start 137; Stop 161
aagtagaaataattgtgagttcgca

SEQ ID NO: 425023 - DNA, 25 bp, Artificial
  probe
  misc_feature (1)..(25): SEQ ID NO: 5908; WAN024A7P; Start 152; Stop 176
tgagttcgcaatactaaacacagaa

SEQ ID NO: 425024 - DNA, 25 bp, Artificial
  probe
  misc_feature (1)..(25): SEQ ID NO: 5908; WAN024A7P; Start 138; Stop 162
agtagaaataattgtgagttcgcaa

SEQ ID NO: 425025 - DNA, 25 bp, Artificial
  probe
  misc_feature (1)..(25): SEQ ID NO: 5908; WAN024A7P; Start 109; Stop 133
tgtgcgatactcctatagaattatg

SEQ ID NO: 425026 - DNA, 25 bp, Artificial
  probe
  misc_feature (1)..(25): SEQ ID NO: 5908; WAN024A7P; Start 136; Stop 160
aaagtagaaataattgtgagttcgc

SEQ ID NO: 425027 - DNA, 25 bp, Artificial
  probe
  misc_feature (1)..(25): SEQ ID NO: 5908; WAN024A7P; Start 159; Stop 183
gcaatactaaacacagaaagagatt

SEQ ID NO: 425028 - DNA, 25 bp, Artificial
  probe
  misc_feature (1)..(25): SEQ ID NO: 5908; WAN024A7P; Start 151; Stop 175
gtgagttcgcaatactaaacacaga

SEQ ID NO: 425029 - DNA, 25 bp, Artificial
  probe
  misc_feature (1)..(25): SEQ ID NO: 5908; WAN024A7P; Start 108; Stop 132
ttgtgcgatactcctatagaattat

SEQ ID NO: 425030 - DNA, 25 bp, Artificial
  probe
  misc_feature (1)..(25): SEQ ID NO: 5908; WAN024A7P; Start 112; Stop 136
gcgatactcctatagaattatggta

SEQ ID NO: 425031 - DNA, 25 bp, Artificial
  probe
  misc_feature (1)..(25): SEQ ID NO: 5908; WAN024A7P; Start 148; Stop 172
attgtgagttcgcaatactaaacac

SEQ ID NO: 425032 - DNA, 25 bp, Artificial
  probe
  misc_feature (1)..(25): SEQ ID NO: 5908; WAN024A7P; Start 147; Stop 171
aattgtgagttcgcaatactaaaca

SEQ ID NO: 425033 - DNA, 25 bp, Artificial
  probe
  misc_feature (1)..(25): SEQ ID NO: 5908; WAN024A7P; Start 144; Stop 168
aataattgtgagttcgcaatactaa

SEQ ID NO: 425034 - DNA, 25 bp, Artificial
  probe
  misc_feature (1)..(25): SEQ ID NO: 5908; WAN024A7P; Start 142; Stop 166
gaaataattgtgagttcgcaatact

SEQ ID NO: 425035 - DNA, 25 bp, Artificial
  probe
  misc_feature (1)..(25): SEQ ID NO: 5908; WAN024A7P; Start 141; Stop 165
agaaataattgtgagttcgcaatac

SEQ ID NO: 425036 - DNA, 25 bp, Artificial
  probe
  misc_feature (1)..(25): SEQ ID NO: 5908; WAN024A7P; Start 139; Stop 163
gtagaaataattgtgagttcgcaat

SEQ ID NO: 425037 - DNA, 25 bp, Artificial
  probe
  misc_feature (1)..(25): SEQ ID NO: 5908; WAN024A7P; Start 23; Stop 47
tttccctaagcagcactgataaaat

SEQ ID NO: 425038 - DNA, 25 bp, Artificial
  probe
  misc_feature (1)..(25): SEQ ID NO: 5908; WAN024A7P; Start 146; Stop 170
taattgtgagttcgcaatactaaac

SEQ ID NO: 425039 - DNA, 25 bp, Artificial
  probe
  misc_feature (1)..(25): SEQ ID NO: 5908; WAN024A7P; Start 24; Stop 48
ttccctaagcagcactgataaaatc

SEQ ID NO: 425040 - DNA, 25 bp, Artificial
  probe
  misc_feature (1)..(25): SEQ ID NO: 5908; WAN024A7P; Start 107; Stop 131
tttgtgcgatactcctatagaatta

SEQ ID NO: 425041 - DNA, 25 bp, Artificial
  probe
  misc_feature (1)..(25): SEQ ID NO: 5908; WAN024A7P; Start 132; Stop 156
tggtaaagtagaaataattgtgagt

SEQ ID NO: 425042 - DNA, 25 bp, Artificial
  probe
  misc_feature (1)..(25): SEQ ID NO: 5908; WAN024A7P; Start 22; Stop 46
ttttccctaagcagcactgataaaa

SEQ ID NO: 425043 - DNA, 25 bp, Artificial
  probe
  misc_feature (1)..(25): SEQ ID NO: 5908; WAN024A7P; Start 145; Stop 169
ataattgtgagttcgcaatactaaa

SEQ ID NO: 425044 - DNA, 25 bp, Artificial
  probe
  misc_feature (1)..(25): SEQ ID NO: 5908; WAN024A7P; Start 143; Stop 167
aaataattgtgagttcgcaatacta

SEQ ID NO: 425045 - DNA, 25 bp, Artificial
  probe
  misc_feature (1)..(25): SEQ ID NO: 5908; WAN024A7P; Start 140; Stop 164
tagaaataattgtgagttcgcaata

SEQ ID NO: 425046 - DNA, 25 bp, Artificial
  probe
  misc_feature (1)..(25): SEQ ID NO: 5908; WAN024A7P; Start 160; Stop 184
caatactaaacacagaaagagattt

SEQ ID NO: 425047 - DNA, 25 bp, Artificial
  probe
  misc_feature (1)..(25): SEQ ID NO: 5909; WAN024AKI; Start 2; Stop 26
ttctattctccttgtaagtggttca

SEQ ID NO: 425048 - DNA, 25 bp, Artificial
  probe
  misc_feature (1)..(25): SEQ ID NO: 5909; WAN024AKI; Start 3; Stop 27
tctattctccttgtaagtggttcaa

SEQ ID NO: 425049 - DNA, 25 bp, Artificial
  probe
  misc_feature (1)..(25): SEQ ID NO: 5909; WAN024AKI; Start 6; Stop 30
attctccttgtaagtggttcaatcg

SEQ ID NO: 425050 - DNA, 25 bp, Artificial
  probe
  misc_feature (1)..(25): SEQ ID NO: 5909; WAN024AKI; Start 5; Stop 29
tattctccttgtaagtggttcaatc

SEQ ID NO: 425051 - DNA, 25 bp, Artificial
  probe
  misc_feature (1)..(25): SEQ ID NO: 5909; WAN024AKI; Start 4; Stop 28
ctattctccttgtaagtggttcaat

SEQ ID NO: 425052 - DNA, 25 bp, Artificial
  probe
  misc_feature (1)..(25): SEQ ID NO: 5909; WAN024AKI; Start 167; Stop 191
caactaatagactgctgtgagattt

SEQ ID NO: 425053 - DNA, 25 bp, Artificial
  probe
  misc_feature (1)..(25): SEQ ID NO: 5909; WAN024AKI; Start 1; Stop 25
tttctattctccttgtaagtggttc

SEQ ID NO: 425054 - DNA, 25 bp, Artificial
  probe
  misc_feature (1)..(25): SEQ ID NO: 5909; WAN024AKI; Start 7; Stop 31
ttctccttgtaagtggttcaatcga

SEQ ID NO: 425055 - DNA, 25 bp, Artificial
  probe
  misc_feature (1)..(25): SEQ ID NO: 5909; WAN024AKI; Start 166; Stop 190
gcaactaatagactgctgtgagatt

SEQ ID NO: 425056 - DNA, 25 bp, Artificial
  probe
  misc_feature (1)..(25): SEQ ID NO: 5909; WAN024AKI; Start 140; Stop 164
cctcagtcacttgcctagtatgaaa

SEQ ID NO: 425057 - DNA, 25 bp, Artificial
  probe
  misc_feature (1)..(25): SEQ ID NO: 5909; WAN024AKI; Start 139; Stop 163
gcctcagtcacttgcctagtatgaa

SEQ ID NO: 425058 - DNA, 25 bp, Artificial
  probe
  misc_feature (1)..(25): SEQ ID NO: 5909; WAN024AKI; Start 137; Stop 161
aagcctcagtcacttgcctagtatg

SEQ ID NO: 425059 - DNA, 25 bp, Artificial
  probe
  misc_feature (1)..(25): SEQ ID NO: 5909; WAN024AKI; Start 179; Stop 203
tgctgtgagattttctactgtgtta

SEQ ID NO: 425060 - DNA, 25 bp, Artificial
  probe
  misc_feature (1)..(25): SEQ ID NO: 5909; WAN024AKI; Start 70; Stop 94
ttgcgggttttcagtctactatttt

SEQ ID NO: 425061 - DNA, 25 bp, Artificial
  probe
  misc_feature (1)..(25): SEQ ID NO: 5909; WAN024AKI; Start 169; Stop 193
actaatagactgctgtgagattttc

SEQ ID NO: 425062 - DNA, 25 bp, Artificial
  probe
  misc_feature (1)..(25): SEQ ID NO: 5909; WAN024AKI; Start 180; Stop 204
gctgtgagattttctactgtgttat

SEQ ID NO: 425063 - DNA, 25 bp, Artificial
  probe
  misc_feature (1)..(25): SEQ ID NO: 5909; WAN024AKI; Start 69; Stop 93
cttgcgggttttcagtctactattt

SEQ ID NO: 425064 - DNA, 25 bp, Artificial
  probe
  misc_feature (1)..(25): SEQ ID NO: 5909; WAN024AKI; Start 8; Stop 32
tctccttgtaagtggttcaatcgat

SEQ ID NO: 425065 - DNA, 25 bp, Artificial
  probe
  misc_feature (1)..(25): SEQ ID NO: 5909; WAN024AKI; Start 178; Stop 202
ctgctgtgagattttctactgtgtt

SEQ ID NO: 425066 - DNA, 25 bp, Artificial
  probe
  misc_feature (1)..(25): SEQ ID NO: 5909; WAN024AKI; Start 168; Stop 192
aactaatagactgctgtgagatttt

SEQ ID NO: 425067 - DNA, 25 bp, Artificial
  probe
  misc_feature (1)..(25): SEQ ID NO: 5909; WAN024AKI; Start 142; Stop 166
tcagtcacttgcctagtatgaaaag

SEQ ID NO: 425068 - DNA, 25 bp, Artificial
  probe
  misc_feature (1)..(25): SEQ ID NO: 5909; WAN024AKI; Start 141; Stop 165
ctcagtcacttgcctagtatgaaaa

SEQ ID NO: 425069 - DNA, 25 bp, Artificial
  probe
  misc_feature (1)..(25): SEQ ID NO: 5909; WAN024AKI; Start 176; Stop 200
gactgctgtgagattttctactgtg

SEQ ID NO: 425070 - DNA, 25 bp, Artificial
  probe
  misc_feature (1)..(25): SEQ ID NO: 5909; WAN024AKI; Start 175; Stop 199
agactgctgtgagattttctactgt

SEQ ID NO: 425071 - DNA, 25 bp, Artificial
  probe
  misc_feature (1)..(25): SEQ ID NO: 5909; WAN024AKI; Start 170; Stop 194
ctaatagactgctgtgagattttct

SEQ ID NO: 425072 - DNA, 25 bp, Artificial
  probe
  misc_feature (1)..(25): SEQ ID NO: 5909; WAN024AKI; Start 68; Stop 92
tcttgcgggttttcagtctactatt

SEQ ID NO: 425073 - DNA, 25 bp, Artificial
  probe
  misc_feature (1)..(25): SEQ ID NO: 5909; WAN024AKI; Start 177; Stop 201
actgctgtgagattttctactgtgt

SEQ ID NO: 425074 - DNA, 25 bp, Artificial
  probe
  misc_feature (1)..(25): SEQ ID NO: 5909; WAN024AKI; Start 174; Stop 198
tagactgctgtgagattttctactg

SEQ ID NO: 425075 - DNA, 25 bp, Artificial
  probe
  misc_feature (1)..(25): SEQ ID NO: 5909; WAN024AKI; Start 56; Stop 80
gaaatgatgaagtcttgcgggtttt

SEQ ID NO: 425076 - DNA, 25 bp, Artificial
  probe
  misc_feature (1)..(25): SEQ ID NO: 5909; WAN024AKI; Start 173; Stop 197
atagactgctgtgagattttctact

SEQ ID NO: 425077 - DNA, 25 bp, Artificial
  probe
  misc_feature (1)..(25): SEQ ID NO: 5909; WAN024AKI; Start 138; Stop 162
agcctcagtcacttgcctagtatga

SEQ ID NO: 425078 - DNA, 25 bp, Artificial
  probe
  misc_feature (1)..(25): SEQ ID NO: 5909; WAN024AKI; Start 67; Stop 91
gtcttgcgggttttcagtctactat

SEQ ID NO: 425079 - DNA, 25 bp, Artificial
  probe
  misc_feature (1)..(25): SEQ ID NO: 5909; WAN024AKI; Start 143; Stop 167
cagtcacttgcctagtatgaaaagc

SEQ ID NO: 425080 - DNA, 25 bp, Artificial
  probe
  misc_feature (1)..(25): SEQ ID NO: 5910; WAN024A2E; Start 132; Stop 156
tgaaagcattatggcatttaggatt

SEQ ID NO: 425081 - DNA, 25 bp, Artificial
  probe
  misc_feature (1)..(25): SEQ ID NO: 5910; WAN024A2E; Start 131; Stop 155
ttgaaagcattatggcatttaggat

SEQ ID NO: 425082 - DNA, 25 bp, Artificial
  probe
  misc_feature (1)..(25): SEQ ID NO: 5910; WAN024A2E; Start 130; Stop 154
attgaaagcattatggcatttagga

SEQ ID NO: 425083 - DNA, 25 bp, Artificial
  probe
  misc_feature (1)..(25): SEQ ID NO: 5910; WAN024A2E; Start 124; Stop 148
acaagaattgaaagcattatggcat

SEQ ID NO: 425084 - DNA, 25 bp, Artificial
  probe
  misc_feature (1)..(25): SEQ ID NO: 5910; WAN024A2E; Start 129; Stop 153
aattgaaagcattatggcatttagg

SEQ ID NO: 425085 - DNA, 25 bp, Artificial
  probe
  misc_feature (1)..(25): SEQ ID NO: 5910; WAN024A2E; Start 123; Stop 147
gacaagaattgaaagcattatggca

SEQ ID NO: 425086 - DNA, 25 bp, Artificial
  probe
  misc_feature (1)..(25): SEQ ID NO: 5910; WAN024A2E; Start 122; Stop 146
tgacaagaattgaaagcattatggc

SEQ ID NO: 425087 - DNA, 25 bp, Artificial
  probe
  misc_feature (1)..(25): SEQ ID NO: 5910; WAN024A2E; Start 125; Stop 149
caagaattgaaagcattatggcatt

SEQ ID NO: 425088 - DNA, 25 bp, Artificial
  probe
  misc_feature (1)..(25): SEQ ID NO: 5910; WAN024A2E; Start 133; Stop 157
gaaagcattatggcatttaggattt

SEQ ID NO: 425089 - DNA, 25 bp, Artificial
  probe
  misc_feature (1)..(25): SEQ ID NO: 5910; WAN024A2E; Start 126; Stop 150
aagaattgaaagcattatggcattt

SEQ ID NO: 425090 - DNA, 25 bp, Artificial
  probe
  misc_feature (1)..(25): SEQ ID NO: 5910; WAN024A2E; Start 121; Stop 145
atgacaagaattgaaagcattatgg

SEQ ID NO: 425091 - DNA, 25 bp, Artificial
  probe
  misc_feature (1)..(25): SEQ ID NO: 5910; WAN024A2E; Start 127; Stop 151
agaattgaaagcattatggcattta

SEQ ID NO: 425092 - DNA, 25 bp, Artificial
  probe
  misc_feature (1)..(25): SEQ ID NO: 5910; WAN024A2E; Start 128; Stop 152
gaattgaaagcattatggcatttag

SEQ ID NO: 425093 - DNA, 25 bp, Artificial
  probe
  misc_feature (1)..(25): SEQ ID NO: 5910; WAN024A2E; Start 134; Stop 158
aaagcattatggcatttaggattta

SEQ ID NO: 425094 - DNA, 25 bp, Artificial
  probe
  misc_feature (1)..(25): SEQ ID NO: 5910; WAN024A2E; Start 135; Stop 159
aagcattatggcatttaggatttat

SEQ ID NO: 425095 - DNA, 25 bp, Artificial
  probe
  misc_feature (1)..(25): SEQ ID NO: 5910; WAN024A2E; Start 136; Stop 160
agcattatggcatttaggatttata

SEQ ID NO: 425096 - DNA, 25 bp, Artificial
  probe
  misc_feature (1)..(25): SEQ ID NO: 5910; WAN024A2E; Start 115; Stop 139
cacaaaatgacaagaattgaaagca

SEQ ID NO: 425097 - DNA, 25 bp, Artificial
  probe
  misc_feature (1)..(25): SEQ ID NO: 5910; WAN024A2E; Start 114; Stop 138
tcacaaaatgacaagaattgaaagc

SEQ ID NO: 425098 - DNA, 25 bp, Artificial
  probe
  misc_feature (1)..(25): SEQ ID NO: 5910; WAN024A2E; Start 137; Stop 161
gcattatggcatttaggatttatag

SEQ ID NO: 425099 - DNA, 25 bp, Artificial
  probe
  misc_feature (1)..(25): SEQ ID NO: 5910; WAN024A2E; Start 116; Stop 140
acaaaatgacaagaattgaaagcat

SEQ ID NO: 425100 - DNA, 25 bp, Artificial
  probe
  misc_feature (1)..(25): SEQ ID NO: 5910; WAN024A2E; Start 73; Stop 97
ctgtggattagttcattttctttca

SEQ ID NO: 425101 - DNA, 25 bp, Artificial
  probe
  misc_feature (1)..(25): SEQ ID NO: 5910; WAN024A2E; Start 3; Stop 27
tctctccttatattatgtttagtgc

SEQ ID NO: 425102 - DNA, 25 bp, Artificial
  probe
  misc_feature (1)..(25): SEQ ID NO: 5910; WAN024A2E; Start 71; Stop 95
cactgtggattagttcattttcttt

SEQ ID NO: 425103 - DNA, 25 bp, Artificial
  probe
  misc_feature (1)..(25): SEQ ID NO: 5910; WAN024A2E; Start 72; Stop 96
actgtggattagttcattttctttc

SEQ ID NO: 425104 - DNA, 25 bp, Artificial
  probe
  misc_feature (1)..(25): SEQ ID NO: 5910; WAN024A2E; Start 120; Stop 144
aatgacaagaattgaaagcattatg

SEQ ID NO: 425105 - DNA, 25 bp, Artificial
  probe
  misc_feature (1)..(25): SEQ ID NO: 5910; WAN024A2E; Start 14; Stop 38
attatgtttagtgcagttagctact

SEQ ID NO: 425106 - DNA, 25 bp, Artificial
  probe
  misc_feature (1)..(25): SEQ ID NO: 5910; WAN024A2E; Start 74; Stop 98
tgtggattagttcattttctttcat

SEQ ID NO: 425107 - DNA, 25 bp, Artificial
  probe
  misc_feature (1)..(25): SEQ ID NO: 5910; WAN024A2E; Start 6; Stop 30
ctccttatattatgtttagtgcagt

SEQ ID NO: 425108 - DNA, 25 bp, Artificial
  probe
  misc_feature (1)..(25): SEQ ID NO: 5910; WAN024A2E; Start 113; Stop 137
atcacaaaatgacaagaattgaaag

SEQ ID NO: 425109 - DNA, 25 bp, Artificial
  probe
  misc_feature (1)..(25): SEQ ID NO: 5910; WAN024A2E; Start 5; Stop 29
tctccttatattatgtttagtgcag

SEQ ID NO: 425110 - DNA, 25 bp, Artificial
  probe
  misc_feature (1)..(25): SEQ ID NO: 5910; WAN024A2E; Start 4; Stop 28
ctctccttatattatgtttagtgca

SEQ ID NO: 425111 - DNA, 25 bp, Artificial
  probe
  misc_feature (1)..(25): SEQ ID NO: 5910; WAN024A2E; Start 119; Stop 143
aaatgacaagaattgaaagcattat

SEQ ID NO: 425112 - DNA, 25 bp, Artificial
  probe
  misc_feature (1)..(25): SEQ ID NO: 5910; WAN024A2E; Start 13; Stop 37
tattatgtttagtgcagttagctac

SEQ ID NO: 425113 - DNA, 25 bp, Artificial
  probe
  misc_feature (1)..(25): SEQ ID NO: 5911; WAN0249HW; Start 42; Stop 66
aatggacgagactatagataaagga

SEQ ID NO: 425114 - DNA, 25 bp, Artificial
  probe
  misc_feature (1)..(25): SEQ ID NO: 5911; WAN0249HW; Start 43; Stop 67
atggacgagactatagataaaggat

SEQ ID NO: 425115 - DNA, 25 bp, Artificial
  probe
  misc_feature (1)..(25): SEQ ID NO: 5911; WAN0249HW; Start 44; Stop 68
tggacgagactatagataaaggata

SEQ ID NO: 425116 - DNA, 25 bp, Artificial
  probe
  misc_feature (1)..(25): SEQ ID NO: 5911; WAN0249HW; Start 34; Stop 58
catgatataatggacgagactatag

SEQ ID NO: 425117 - DNA, 25 bp, Artificial
  probe
  misc_feature (1)..(25): SEQ ID NO: 5911; WAN0249HW; Start 36; Stop 60
tgatataatggacgagactatagat

SEQ ID NO: 425118 - DNA, 25 bp, Artificial
  probe
  misc_feature (1)..(25): SEQ ID NO: 5911; WAN0249HW; Start 35; Stop 59
atgatataatggacgagactataga

SEQ ID NO: 425119 - DNA, 25 bp, Artificial
  probe
  misc_feature (1)..(25): SEQ ID NO: 5911; WAN0249HW; Start 41; Stop 65
taatggacgagactatagataaagg

SEQ ID NO: 425120 - DNA, 25 bp, Artificial
  probe
  misc_feature (1)..(25): SEQ ID NO: 5911; WAN0249HW; Start 45; Stop 69
ggacgagactatagataaaggatag

SEQ ID NO: 425121 - DNA, 25 bp, Artificial
  probe
  misc_feature (1)..(25): SEQ ID NO: 5911; WAN0249HW; Start 33; Stop 57
tcatgatataatggacgagactata

SEQ ID NO: 425122 - DNA, 25 bp, Artificial
  probe
  misc_feature (1)..(25): SEQ ID NO: 5911; WAN0249HW; Start 47; Stop 71
acgagactatagataaaggatagag

SEQ ID NO: 425123 - DNA, 25 bp, Artificial
  probe
  misc_feature (1)..(25): SEQ ID NO: 5911; WAN0249HW; Start 46; Stop 70
gacgagactatagataaaggataga

SEQ ID NO: 425124 - DNA, 25 bp, Artificial
  probe
  misc_feature (1)..(25): SEQ ID NO: 5911; WAN0249HW; Start 48; Stop 72
cgagactatagataaaggatagaga

SEQ ID NO: 425125 - DNA, 25 bp, Artificial
  probe
  misc_feature (1)..(25): SEQ ID NO: 5911; WAN0249HW; Start 40; Stop 64
ataatggacgagactatagataaag

SEQ ID NO: 425126 - DNA, 25 bp, Artificial
  probe
  misc_feature (1)..(25): SEQ ID NO: 5911; WAN0249HW; Start 4; Stop 28
ctcttataaagggagaattttctga

SEQ ID NO: 425127 - DNA, 25 bp, Artificial
  probe
  misc_feature (1)..(25): SEQ ID NO: 5911; WAN0249HW; Start 5; Stop 29
tcttataaagggagaattttctgaa

SEQ ID NO: 425128 - DNA, 25 bp, Artificial
  probe
  misc_feature (1)..(25): SEQ ID NO: 5911; WAN0249HW; Start 50; Stop 74
agactatagataaaggatagagagt

SEQ ID NO: 425129 - DNA, 25 bp, Artificial
  probe
  misc_feature (1)..(25): SEQ ID NO: 5911; WAN0249HW; Start 6; Stop 30
cttataaagggagaattttctgaaa

SEQ ID NO: 425130 - DNA, 25 bp, Artificial
  probe
  misc_feature (1)..(25): SEQ ID NO: 5911; WAN0249HW; Start 3; Stop 27
tctcttataaagggagaattttctg

SEQ ID NO: 425131 - DNA, 25 bp, Artificial
  probe
  misc_feature (1)..(25): SEQ ID NO: 5912; WAN0249W3; Start 6; Stop 30
tgaaatcatccattctgagtaaggt

SEQ ID NO: 425132 - DNA, 25 bp, Artificial
  probe
  misc_feature (1)..(25): SEQ ID NO: 5912; WAN0249W3; Start 7; Stop 31
gaaatcatccattctgagtaaggtg

SEQ ID NO: 425133 - DNA, 25 bp, Artificial
  probe
  misc_feature (1)..(25): SEQ ID NO: 5912; WAN0249W3; Start 5; Stop 29
ttgaaatcatccattctgagtaagg

SEQ ID NO: 425134 - DNA, 25 bp, Artificial
  probe
  misc_feature (1)..(25): SEQ ID NO: 5912; WAN0249W3; Start 1; Stop 25
tttcttgaaatcatccattctgagt

SEQ ID NO: 425135 - DNA, 25 bp, Artificial
  probe
  misc_feature (1)..(25): SEQ ID NO: 5912; WAN0249W3; Start 3; Stop 27
tcttgaaatcatccattctgagtaa

SEQ ID NO: 425136 - DNA, 25 bp, Artificial
  probe
  misc_feature (1)..(25): SEQ ID NO: 5912; WAN0249W3; Start 2; Stop 26
ttcttgaaatcatccattctgagta

SEQ ID NO: 425137 - DNA, 25 bp, Artificial
  probe
  misc_feature (1)..(25): SEQ ID NO: 5912; WAN0249W3; Start 8; Stop 32
aaatcatccattctgagtaaggtgg

SEQ ID NO: 425138 - DNA, 25 bp, Artificial
  probe
  misc_feature (1)..(25): SEQ ID NO: 5912; WAN0249W3; Start 4; Stop 28
cttgaaatcatccattctgagtaag

SEQ ID NO: 425139 - DNA, 25 bp, Artificial
  probe
  misc_feature (1)..(25): SEQ ID NO: 5912; WAN0249W3; Start 95; Stop 119
tgtgaaatcaaacaaattgtgagat

SEQ ID NO: 425140 - DNA, 25 bp, Artificial
  probe
  misc_feature (1)..(25): SEQ ID NO: 5912; WAN0249W3; Start 16; Stop 40
cattctgagtaaggtgggtggtttc

SEQ ID NO: 425141 - DNA, 25 bp, Artificial
  probe
  misc_feature (1)..(25): SEQ ID NO: 5912; WAN0249W3; Start 9; Stop 33
aatcatccattctgagtaaggtggg

SEQ ID NO: 425142 - DNA, 25 bp, Artificial
  probe
  misc_feature (1)..(25): SEQ ID NO: 5912; WAN0249W3; Start 17; Stop 41
attctgagtaaggtgggtggtttct

SEQ ID NO: 425143 - DNA, 25 bp, Artificial
  probe
  misc_feature (1)..(25): SEQ ID NO: 5912; WAN0249W3; Start 23; Stop 47
agtaaggtgggtggtttctcagttt

SEQ ID NO: 425144 - DNA, 25 bp, Artificial
  probe
  misc_feature (1)..(25): SEQ ID NO: 5912; WAN0249W3; Start 10; Stop 34
atcatccattctgagtaaggtgggt

SEQ ID NO: 425145 - DNA, 25 bp, Artificial
  probe
  misc_feature (1)..(25): SEQ ID NO: 5912; WAN0249W3; Start 18; Stop 42
ttctgagtaaggtgggtggtttctc

SEQ ID NO: 425146 - DNA, 25 bp, Artificial
  probe
  misc_feature (1)..(25): SEQ ID NO: 5912; WAN0249W3; Start 97; Stop 121
tgaaatcaaacaaattgtgagatac

SEQ ID NO: 425147 - DNA, 25 bp, Artificial
  probe
  misc_feature (1)..(25): SEQ ID NO: 5912; WAN0249W3; Start 96; Stop 120
gtgaaatcaaacaaattgtgagata

SEQ ID NO: 425148 - DNA, 25 bp, Artificial
  probe
  misc_feature (1)..(25): SEQ ID NO: 5912; WAN0249W3; Start 94; Stop 118
ttgtgaaatcaaacaaattgtgaga

SEQ ID NO: 425149 - DNA, 25 bp, Artificial
  probe
  misc_feature (1)..(25): SEQ ID NO: 5912; WAN0249W3; Start 98; Stop 122
gaaatcaaacaaattgtgagatact

SEQ ID NO: 425150 - DNA, 25 bp, Artificial
  probe
  misc_feature (1)..(25): SEQ ID NO: 5912; WAN0249W3; Start 22; Stop 46
gagtaaggtgggtggtttctcagtt

SEQ ID NO: 425151 - DNA, 25 bp, Artificial
  probe
  misc_feature (1)..(25): SEQ ID NO: 5912; WAN0249W3; Start 24; Stop 48
gtaaggtgggtggtttctcagtttt

SEQ ID NO: 425152 - DNA, 25 bp, Artificial
  probe
  misc_feature (1)..(25): SEQ ID NO: 5912; WAN0249W3; Start 11; Stop 35
tcatccattctgagtaaggtgggtg

SEQ ID NO: 425153 - DNA, 25 bp, Artificial
  probe
  misc_feature (1)..(25): SEQ ID NO: 5912; WAN0249W3; Start 100; Stop 124
aatcaaacaaattgtgagatactag

SEQ ID NO: 425154 - DNA, 25 bp, Artificial
  probe
  misc_feature (1)..(25): SEQ ID NO: 5912; WAN0249W3; Start 106; Stop 130
acaaattgtgagatactagtacggt

SEQ ID NO: 425155 - DNA, 25 bp, Artificial
  probe
  misc_feature (1)..(25): SEQ ID NO: 5912; WAN0249W3; Start 15; Stop 39
ccattctgagtaaggtgggtggttt

SEQ ID NO: 425156 - DNA, 25 bp, Artificial
  probe
  misc_feature (1)..(25): SEQ ID NO: 5912; WAN0249W3; Start 107; Stop 131
caaattgtgagatactagtacggta

SEQ ID NO: 425157 - DNA, 25 bp, Artificial
  probe
  misc_feature (1)..(25): SEQ ID NO: 5912; WAN0249W3; Start 105; Stop 129
aacaaattgtgagatactagtacgg

SEQ ID NO: 425158 - DNA, 25 bp, Artificial
  probe
  misc_feature (1)..(25): SEQ ID NO: 5912; WAN0249W3; Start 109; Stop 133
aattgtgagatactagtacggtatt

SEQ ID NO: 425159 - DNA, 25 bp, Artificial
  probe
  misc_feature (1)..(25): SEQ ID NO: 5912; WAN0249W3; Start 12; Stop 36
catccattctgagtaaggtgggtgg

SEQ ID NO: 425160 - DNA, 25 bp, Artificial
  probe
  misc_feature (1)..(25): SEQ ID NO: 5912; WAN0249W3; Start 101; Stop 125
atcaaacaaattgtgagatactagt

SEQ ID NO: 425161 - DNA, 25 bp, Artificial
  probe
  misc_feature (1)..(25): SEQ ID NO: 5912; WAN0249W3; Start 99; Stop 123
aaatcaaacaaattgtgagatacta

SEQ ID NO: 425162 - DNA, 25 bp, Artificial
  probe
  misc_feature (1)..(25): SEQ ID NO: 5912; WAN0249W3; Start 13; Stop 37
atccattctgagtaaggtgggtggt

SEQ ID NO: 425163 - DNA, 25 bp, Artificial
  probe
  misc_feature (1)..(25): SEQ ID NO: 5912; WAN0249W3; Start 112; Stop 136
tgtgagatactagtacggtattatt

SEQ ID NO: 425164 - DNA, 25 bp, Artificial
  probe
  misc_feature (1)..(25): SEQ ID NO: 5913; WAN024A65; Start 23; Stop 47
tctcgtgagtcttctatgtatatca

SEQ ID NO: 425165 - DNA, 25 bp, Artificial
  probe
  misc_feature (1)..(25): SEQ ID NO: 5913; WAN024A65; Start 20; Stop 44
ttctctcgtgagtcttctatgtata

SEQ ID NO: 425166 - DNA, 25 bp, Artificial
  probe
  misc_feature (1)..(25): SEQ ID NO: 5913; WAN024A65; Start 21; Stop 45
tctctcgtgagtcttctatgtatat

SEQ ID NO: 425167 - DNA, 25 bp, Artificial
  probe
  misc_feature (1)..(25): SEQ ID NO: 5913; WAN024A65; Start 24; Stop 48
ctcgtgagtcttctatgtatatcaa

SEQ ID NO: 425168 - DNA, 25 bp, Artificial
  probe
  misc_feature (1)..(25): SEQ ID NO: 5913; WAN024A65; Start 22; Stop 46
ctctcgtgagtcttctatgtatatc

SEQ ID NO: 425169 - DNA, 25 bp, Artificial
  probe
  misc_feature (1)..(25): SEQ ID NO: 5913; WAN024A65; Start 18; Stop 42
gtttctctcgtgagtcttctatgta

SEQ ID NO: 425170 - DNA, 25 bp, Artificial
  probe
  misc_feature (1)..(25): SEQ ID NO: 5913; WAN024A65; Start 39; Stop 63
tgtatatcaaaggaagactgaggtt

SEQ ID NO: 425171 - DNA, 25 bp, Artificial
  probe
  misc_feature (1)..(25): SEQ ID NO: 5913; WAN024A65; Start 38; Stop 62
atgtatatcaaaggaagactgaggt

SEQ ID NO: 425172 - DNA, 25 bp, Artificial
  probe
  misc_feature (1)..(25): SEQ ID NO: 5913; WAN024A65; Start 19; Stop 43
tttctctcgtgagtcttctatgtat

SEQ ID NO: 425173 - DNA, 25 bp, Artificial
  probe
  misc_feature (1)..(25): SEQ ID NO: 5913; WAN024A65; Start 40; Stop 64
gtatatcaaaggaagactgaggttt

SEQ ID NO: 425174 - DNA, 25 bp, Artificial
  probe
  misc_feature (1)..(25): SEQ ID NO: 5913; WAN024A65; Start 15; Stop 39
ctggtttctctcgtgagtcttctat

SEQ ID NO: 425175 - DNA, 25 bp, Artificial
  probe
  misc_feature (1)..(25): SEQ ID NO: 5913; WAN024A65; Start 17; Stop 41
ggtttctctcgtgagtcttctatgt

SEQ ID NO: 425176 - DNA, 25 bp, Artificial
  probe
  misc_feature (1)..(25): SEQ ID NO: 5913; WAN024A65; Start 16; Stop 40
tggtttctctcgtgagtcttctatg

SEQ ID NO: 425177 - DNA, 25 bp, Artificial
  probe
  misc_feature (1)..(25): SEQ ID NO: 5913; WAN024A65; Start 37; Stop 61
tatgtatatcaaaggaagactgagg

SEQ ID NO: 425178 - DNA, 25 bp, Artificial
  probe
  misc_feature (1)..(25): SEQ ID NO: 5913; WAN024A65; Start 25; Stop 49
tcgtgagtcttctatgtatatcaaa

SEQ ID NO: 425179 - DNA, 25 bp, Artificial
  probe
  misc_feature (1)..(25): SEQ ID NO: 5913; WAN024A65; Start 26; Stop 50
cgtgagtcttctatgtatatcaaag

SEQ ID NO: 425180 - DNA, 25 bp, Artificial
  probe
  misc_feature (1)..(25): SEQ ID NO: 5913; WAN024A65; Start 86; Stop 110
attatagtagctaagtcttgacagg

SEQ ID NO: 425181 - DNA, 25 bp, Artificial
  probe
  misc_feature (1)..(25): SEQ ID NO: 5913; WAN024A65; Start 88; Stop 112
tatagtagctaagtcttgacagggt

SEQ ID NO: 425182 - DNA, 25 bp, Artificial
  probe
  misc_feature (1)..(25): SEQ ID NO: 5913; WAN024A65; Start 45; Stop 69
tcaaaggaagactgaggttttaagt

SEQ ID NO: 425183 - DNA, 25 bp, Artificial
  probe
  misc_feature (1)..(25): SEQ ID NO: 5913; WAN024A65; Start 89; Stop 113
atagtagctaagtcttgacagggtt

SEQ ID NO: 425184 - DNA, 25 bp, Artificial
  probe
  misc_feature (1)..(25): SEQ ID NO: 5913; WAN024A65; Start 87; Stop 111
ttatagtagctaagtcttgacaggg

SEQ ID NO: 425185 - DNA, 25 bp, Artificial
  probe
  misc_feature (1)..(25): SEQ ID NO: 5913; WAN024A65; Start 27; Stop 51
gtgagtcttctatgtatatcaaagg

SEQ ID NO: 425186 - DNA, 25 bp, Artificial
  probe
  misc_feature (1)..(25): SEQ ID NO: 5913; WAN024A65; Start 90; Stop 114
tagtagctaagtcttgacagggttc

SEQ ID NO: 425187 - DNA, 25 bp, Artificial
  probe
  misc_feature (1)..(25): SEQ ID NO: 5913; WAN024A65; Start 44; Stop 68
atcaaaggaagactgaggttttaag

SEQ ID NO: 425188 - DNA, 25 bp, Artificial
  probe
  misc_feature (1)..(25): SEQ ID NO: 5913; WAN024A65; Start 35; Stop 59
tctatgtatatcaaaggaagactga

SEQ ID NO: 425189 - DNA, 25 bp, Artificial
  probe
  misc_feature (1)..(25): SEQ ID NO: 5913; WAN024A65; Start 28; Stop 52
tgagtcttctatgtatatcaaagga

SEQ ID NO: 425190 - DNA, 25 bp, Artificial
  probe
  misc_feature (1)..(25): SEQ ID NO: 5913; WAN024A65; Start 46; Stop 70
caaaggaagactgaggttttaagta

SEQ ID NO: 425191 - DNA, 25 bp, Artificial
  probe
  misc_feature (1)..(25): SEQ ID NO: 5913; WAN024A65; Start 36; Stop 60
ctatgtatatcaaaggaagactgag

SEQ ID NO: 425192 - DNA, 25 bp, Artificial
  probe
  misc_feature (1)..(25): SEQ ID NO: 5913; WAN024A65; Start 14; Stop 38
gctggtttctctcgtgagtcttcta

SEQ ID NO: 425193 - DNA, 25 bp, Artificial
  probe
  misc_feature (1)..(25): SEQ ID NO: 5913; WAN024A65; Start 9; Stop 33
gaatagctggtttctctcgtgagtc

SEQ ID NO: 425194 - DNA, 25 bp, Artificial
  probe
  misc_feature (1)..(25): SEQ ID NO: 5913; WAN024A65; Start 47; Stop 71
aaaggaagactgaggttttaagtat

SEQ ID NO: 425195 - DNA, 25 bp, Artificial
  probe
  misc_feature (1)..(25): SEQ ID NO: 5913; WAN024A65; Start 43; Stop 67
tatcaaaggaagactgaggttttaa

SEQ ID NO: 425196 - DNA, 25 bp, Artificial
  probe
  misc_feature (1)..(25): SEQ ID NO: 5913; WAN024A65; Start 34; Stop 58
ttctatgtatatcaaaggaagactg

SEQ ID NO: 425197 - DNA, 25 bp, Artificial
  probe
  misc_feature (1)..(25): SEQ ID NO: 5914; WAN0249FX; Start 100; Stop 124
cgacgagatgatagtttagaataat

SEQ ID NO: 425198 - DNA, 25 bp, Artificial
  probe
  misc_feature (1)..(25): SEQ ID NO: 5914; WAN0249FX; Start 99; Stop 123
tcgacgagatgatagtttagaataa

SEQ ID NO: 425199 - DNA, 25 bp, Artificial
  probe
  misc_feature (1)..(25): SEQ ID NO: 5914; WAN0249FX; Start 101; Stop 125
gacgagatgatagtttagaataatc

SEQ ID NO: 425200 - DNA, 25 bp, Artificial
  probe
  misc_feature (1)..(25): SEQ ID NO: 5914; WAN0249FX; Start 31; Stop 55
cttttctgagtatttaggaagagat

SEQ ID NO: 425201 - DNA, 25 bp, Artificial
  probe
  misc_feature (1)..(25): SEQ ID NO: 5914; WAN0249FX; Start 30; Stop 54
tcttttctgagtatttaggaagaga

SEQ ID NO: 425202 - DNA, 25 bp, Artificial
  probe
  misc_feature (1)..(25): SEQ ID NO: 5914; WAN0249FX; Start 27; Stop 51
gaatcttttctgagtatttaggaag

SEQ ID NO: 425203 - DNA, 25 bp, Artificial
  probe
  misc_feature (1)..(25): SEQ ID NO: 5914; WAN0249FX; Start 102; Stop 126
acgagatgatagtttagaataatca

SEQ ID NO: 425204 - DNA, 25 bp, Artificial
  probe
  misc_feature (1)..(25): SEQ ID NO: 5914; WAN0249FX; Start 103; Stop 127
cgagatgatagtttagaataatcac

SEQ ID NO: 425205 - DNA, 25 bp, Artificial
  probe
  misc_feature (1)..(25): SEQ ID NO: 5914; WAN0249FX; Start 29; Stop 53
atcttttctgagtatttaggaagag

SEQ ID NO: 425206 - DNA, 25 bp, Artificial
  probe
  misc_feature (1)..(25): SEQ ID NO: 5914; WAN0249FX; Start 28; Stop 52
aatcttttctgagtatttaggaaga

SEQ ID NO: 425207 - DNA, 25 bp, Artificial
  probe
  misc_feature (1)..(25): SEQ ID NO: 5914; WAN0249FX; Start 26; Stop 50
agaatcttttctgagtatttaggaa

SEQ ID NO: 425208 - DNA, 25 bp, Artificial
  probe
  misc_feature (1)..(25): SEQ ID NO: 5915; WAN0249OH; Start 33; Stop 57
agtctatcaaaagtaggaaagggtt

SEQ ID NO: 425209 - DNA, 25 bp, Artificial
  probe
  misc_feature (1)..(25): SEQ ID NO: 5915; WAN0249OH; Start 34; Stop 58
gtctatcaaaagtaggaaagggttt

SEQ ID NO: 425210 - DNA, 25 bp, Artificial
  probe
  misc_feature (1)..(25): SEQ ID NO: 5915; WAN0249OH; Start 32; Stop 56
tagtctatcaaaagtaggaaagggt

SEQ ID NO: 425211 - DNA, 25 bp, Artificial
  probe
  misc_feature (1)..(25): SEQ ID NO: 5915; WAN0249OH; Start 31; Stop 55
ctagtctatcaaaagtaggaaaggg

SEQ ID NO: 425212 - DNA, 25 bp, Artificial
  probe
  misc_feature (1)..(25): SEQ ID NO: 5915; WAN0249OH; Start 39; Stop 63
tcaaaagtaggaaagggtttcaaga

SEQ ID NO: 425213 - DNA, 25 bp, Artificial
  probe
  misc_feature (1)..(25): SEQ ID NO: 5915; WAN0249OH; Start 40; Stop 64
caaaagtaggaaagggtttcaagaa

SEQ ID NO: 425214 - DNA, 25 bp, Artificial
  probe
  misc_feature (1)..(25): SEQ ID NO: 5915; WAN0249OH; Start 38; Stop 62
atcaaaagtaggaaagggtttcaag

SEQ ID NO: 425215 - DNA, 25 bp, Artificial
  probe
  misc_feature (1)..(25): SEQ ID NO: 5915; WAN0249OH; Start 42; Stop 66
aaagtaggaaagggtttcaagaaaa

SEQ ID NO: 425216 - DNA, 25 bp, Artificial
  probe
  misc_feature (1)..(25): SEQ ID NO: 5915; WAN0249OH; Start 41; Stop 65
aaaagtaggaaagggtttcaagaaa

SEQ ID NO: 425217 - DNA, 25 bp, Artificial
  probe
  misc_feature (1)..(25): SEQ ID NO: 5915; WAN0249OH; Start 45; Stop 69
gtaggaaagggtttcaagaaaattg

SEQ ID NO: 425218 - DNA, 25 bp, Artificial
  probe
  misc_feature (1)..(25): SEQ ID NO: 5915; WAN0249OH; Start 44; Stop 68
agtaggaaagggtttcaagaaaatt

SEQ ID NO: 425219 - DNA, 25 bp, Artificial
  probe
  misc_feature (1)..(25): SEQ ID NO: 5915; WAN0249OH; Start 43; Stop 67
aagtaggaaagggtttcaagaaaat

SEQ ID NO: 425220 - DNA, 25 bp, Artificial
  probe
  misc_feature (1)..(25): SEQ ID NO: 5915; WAN0249OH; Start 36; Stop 60
ctatcaaaagtaggaaagggtttca

SEQ ID NO: 425221 - DNA, 25 bp, Artificial
  probe
  misc_feature (1)..(25): SEQ ID NO: 5915; WAN0249OH; Start 35; Stop 59
tctatcaaaagtaggaaagggtttc

SEQ ID NO: 425222 - DNA, 25 bp, Artificial
  probe
  misc_feature (1)..(25): SEQ ID NO: 5915; WAN0249OH; Start 37; Stop 61
tatcaaaagtaggaaagggtttcaa

SEQ ID NO: 425223 - DNA, 25 bp, Artificial
  probe
  misc_feature (1)..(25): SEQ ID NO: 5915; WAN0249OH; Start 52; Stop 76
agggtttcaagaaaattgattggaa

SEQ ID NO: 425224 - DNA, 25 bp, Artificial
  probe
  misc_feature (1)..(25): SEQ ID NO: 5915; WAN0249OH; Start 51; Stop 75
aagggtttcaagaaaattgattgga

SEQ ID NO: 425225 - DNA, 25 bp, Artificial
  probe
  misc_feature (1)..(25): SEQ ID NO: 5915; WAN0249OH; Start 47; Stop 71
aggaaagggtttcaagaaaattgat

SEQ ID NO: 425226 - DNA, 25 bp, Artificial
  probe
  misc_feature (1)..(25): SEQ ID NO: 5915; WAN0249OH; Start 53; Stop 77
gggtttcaagaaaattgattggaaa

SEQ ID NO: 425227 - DNA, 25 bp, Artificial
  probe
  misc_feature (1)..(25): SEQ ID NO: 5915; WAN0249OH; Start 50; Stop 74
aaagggtttcaagaaaattgattgg

SEQ ID NO: 425228 - DNA, 25 bp, Artificial
  probe
  misc_feature (1)..(25): SEQ ID NO: 5915; WAN0249OH; Start 46; Stop 70
taggaaagggtttcaagaaaattga

SEQ ID NO: 425229 - DNA, 25 bp, Artificial
  probe
  misc_feature (1)..(25): SEQ ID NO: 5915; WAN0249OH; Start 48; Stop 72
ggaaagggtttcaagaaaattgatt

SEQ ID NO: 425230 - DNA, 25 bp, Artificial
  probe
  misc_feature (1)..(25): SEQ ID NO: 5915; WAN0249OH; Start 49; Stop 73
gaaagggtttcaagaaaattgattg

SEQ ID NO: 425231 - DNA, 25 bp, Artificial
  probe
  misc_feature (1)..(25): SEQ ID NO: 5915; WAN0249OH; Start 54; Stop 78
ggtttcaagaaaattgattggaaat

SEQ ID NO: 425232 - DNA, 25 bp, Artificial
  probe
  misc_feature (1)..(25): SEQ ID NO: 5915; WAN0249OH; Start 30; Stop 54
actagtctatcaaaagtaggaaagg

SEQ ID NO: 425233 - DNA, 25 bp, Artificial
  probe
  misc_feature (1)..(25): SEQ ID NO: 5915; WAN0249OH; Start 55; Stop 79
gtttcaagaaaattgattggaaatt

SEQ ID NO: 425234 - DNA, 25 bp, Artificial
  probe
  misc_feature (1)..(25): SEQ ID NO: 5915; WAN0249OH; Start 26; Stop 50
agatactagtctatcaaaagtagga

SEQ ID NO: 425235 - DNA, 25 bp, Artificial
  probe
  misc_feature (1)..(25): SEQ ID NO: 5915; WAN0249OH; Start 29; Stop 53
tactagtctatcaaaagtaggaaag

SEQ ID NO: 425236 - DNA, 25 bp, Artificial
  probe
  misc_feature (1)..(25): SEQ ID NO: 5915; WAN0249OH; Start 27; Stop 51
gatactagtctatcaaaagtaggaa

SEQ ID NO: 425237 - DNA, 25 bp, Artificial
  probe
  misc_feature (1)..(25): SEQ ID NO: 5915; WAN0249OH; Start 56; Stop 80
tttcaagaaaattgattggaaattt

SEQ ID NO: 425238 - DNA, 25 bp, Artificial
  probe
  misc_feature (1)..(25): SEQ ID NO: 5916; WAN024AKR; Start 87; Stop 111
aatactggaggaaagagagtaggaa

SEQ ID NO: 425239 - DNA, 25 bp, Artificial
  probe
  misc_feature (1)..(25): SEQ ID NO: 5916; WAN024AKR; Start 86; Stop 110
aaatactggaggaaagagagtagga

SEQ ID NO: 425240 - DNA, 25 bp, Artificial
  probe
  misc_feature (1)..(25): SEQ ID NO: 5916; WAN024AKR; Start 85; Stop 109
aaaatactggaggaaagagagtagg

SEQ ID NO: 425241 - DNA, 25 bp, Artificial
  probe
  misc_feature (1)..(25): SEQ ID NO: 5916; WAN024AKR; Start 82; Stop 106
aataaaatactggaggaaagagagt

SEQ ID NO: 425242 - DNA, 25 bp, Artificial
  probe
  misc_feature (1)..(25): SEQ ID NO: 5916; WAN024AKR; Start 59; Stop 83
tcaaacgaaagtagtagaatagtaa

SEQ ID NO: 425243 - DNA, 25 bp, Artificial
  probe
  misc_feature (1)..(25): SEQ ID NO: 5916; WAN024AKR; Start 58; Stop 82
ttcaaacgaaagtagtagaatagta

SEQ ID NO: 425244 - DNA, 25 bp, Artificial
  probe
  misc_feature (1)..(25): SEQ ID NO: 5916; WAN024AKR; Start 42; Stop 66
tgttttcactagacttttcaaacga

SEQ ID NO: 425245 - DNA, 25 bp, Artificial
  probe
  misc_feature (1)..(25): SEQ ID NO: 5916; WAN024AKR; Start 45; Stop 69
tttcactagacttttcaaacgaaag

SEQ ID NO: 425246 - DNA, 25 bp, Artificial
  probe
  misc_feature (1)..(25): SEQ ID NO: 5916; WAN024AKR; Start 41; Stop 65
atgttttcactagacttttcaaacg

SEQ ID NO: 425247 - DNA, 25 bp, Artificial
  probe
  misc_feature (1)..(25): SEQ ID NO: 5916; WAN024AKR; Start 43; Stop 67
gttttcactagacttttcaaacgaa

SEQ ID NO: 425248 - DNA, 25 bp, Artificial
  probe
  misc_feature (1)..(25): SEQ ID NO: 5916; WAN024AKR; Start 57; Stop 81
tttcaaacgaaagtagtagaatagt

SEQ ID NO: 425249 - DNA, 25 bp, Artificial
  probe
  misc_feature (1)..(25): SEQ ID NO: 5916; WAN024AKR; Start 44; Stop 68
ttttcactagacttttcaaacgaaa

SEQ ID NO: 425250 - DNA, 25 bp, Artificial
  probe
  misc_feature (1)..(25): SEQ ID NO: 5916; WAN024AKR; Start 84; Stop 108
taaaatactggaggaaagagagtag

SEQ ID NO: 425251 - DNA, 25 bp, Artificial
  probe
  misc_feature (1)..(25): SEQ ID NO: 5916; WAN024AKR; Start 80; Stop 104
gtaataaaatactggaggaaagaga

SEQ ID NO: 425252 - DNA, 25 bp, Artificial
  probe
  misc_feature (1)..(25): SEQ ID NO: 5916; WAN024AKR; Start 81; Stop 105
taataaaatactggaggaaagagag

SEQ ID NO: 425253 - DNA, 25 bp, Artificial
  probe
  misc_feature (1)..(25): SEQ ID NO: 5916; WAN024AKR; Start 83; Stop 107
ataaaatactggaggaaagagagta

SEQ ID NO: 425254 - DNA, 25 bp, Artificial
  probe
  misc_feature (1)..(25): SEQ ID NO: 5916; WAN024AKR; Start 79; Stop 103
agtaataaaatactggaggaaagag

SEQ ID NO: 425255 - DNA, 25 bp, Artificial
  probe
  misc_feature (1)..(25): SEQ ID NO: 5916; WAN024AKR; Start 38; Stop 62
aatatgttttcactagacttttcaa

SEQ ID NO: 425256 - DNA, 25 bp, Artificial
  probe
  misc_feature (1)..(25): SEQ ID NO: 5916; WAN024AKR; Start 39; Stop 63
atatgttttcactagacttttcaaa

SEQ ID NO: 425257 - DNA, 25 bp, Artificial
  probe
  misc_feature (1)..(25): SEQ ID NO: 5916; WAN024AKR; Start 37; Stop 61
aaatatgttttcactagacttttca

SEQ ID NO: 425258 - DNA, 25 bp, Artificial
  probe
  misc_feature (1)..(25): SEQ ID NO: 5916; WAN024AKR; Start 40; Stop 64
tatgttttcactagacttttcaaac

SEQ ID NO: 425259 - DNA, 25 bp, Artificial
  probe
  misc_feature (1)..(25): SEQ ID NO: 5916; WAN024AKR; Start 56; Stop 80
ttttcaaacgaaagtagtagaatag

SEQ ID NO: 425260 - DNA, 25 bp, Artificial
  probe
  misc_feature (1)..(25): SEQ ID NO: 5916; WAN024AKR; Start 55; Stop 79
cttttcaaacgaaagtagtagaata

SEQ ID NO: 425261 - DNA, 25 bp, Artificial
  probe
  misc_feature (1)..(25): SEQ ID NO: 5916; WAN024AKR; Start 46; Stop 70
ttcactagacttttcaaacgaaagt

SEQ ID NO: 425262 - DNA, 25 bp, Artificial
  probe
  misc_feature (1)..(25): SEQ ID NO: 5916; WAN024AKR; Start 49; Stop 73
actagacttttcaaacgaaagtagt

SEQ ID NO: 425263 - DNA, 25 bp, Artificial
  probe
  misc_feature (1)..(25): SEQ ID NO: 5916; WAN024AKR; Start 47; Stop 71
tcactagacttttcaaacgaaagta

SEQ ID NO: 425264 - DNA, 25 bp, Artificial
  probe
  misc_feature (1)..(25): SEQ ID NO: 5916; WAN024AKR; Start 52; Stop 76
agacttttcaaacgaaagtagtaga

SEQ ID NO: 425265 - DNA, 25 bp, Artificial
  probe
  misc_feature (1)..(25): SEQ ID NO: 5916; WAN024AKR; Start 48; Stop 72
cactagacttttcaaacgaaagtag

SEQ ID NO: 425266 - DNA, 25 bp, Artificial
  probe
  misc_feature (1)..(25): SEQ ID NO: 5916; WAN024AKR; Start 53; Stop 77
gacttttcaaacgaaagtagtagaa

SEQ ID NO: 425267 - DNA, 25 bp, Artificial
  probe
  misc_feature (1)..(25): SEQ ID NO: 5916; WAN024AKR; Start 54; Stop 78
acttttcaaacgaaagtagtagaat

SEQ ID NO: 425268 - DNA, 25 bp, Artificial
  probe
  misc_feature (1)..(25): SEQ ID NO: 5916; WAN024AKR; Start 51; Stop 75
tagacttttcaaacgaaagtagtag

SEQ ID NO: 425269 - DNA, 25 bp, Artificial
  probe
  misc_feature (1)..(25): SEQ ID NO: 5916; WAN024AKR; Start 50; Stop 74
ctagacttttcaaacgaaagtagta

SEQ ID NO: 425270 - DNA, 25 bp, Artificial
  probe
  misc_feature (1)..(25): SEQ ID NO: 5917; WAN024A82; Start 221; Stop 245
actcttccaagtaattgattgcctt

SEQ ID NO: 425271 - DNA, 25 bp, Artificial
  probe
  misc_feature (1)..(25): SEQ ID NO: 5917; WAN024A82; Start 222; Stop 246
ctcttccaagtaattgattgcctta

SEQ ID NO: 425272 - DNA, 25 bp, Artificial
  probe
  misc_feature (1)..(25): SEQ ID NO: 5917; WAN024A82; Start 223; Stop 247
tcttccaagtaattgattgccttaa

SEQ ID NO: 425273 - DNA, 25 bp, Artificial
  probe
  misc_feature (1)..(25): SEQ ID NO: 5917; WAN024A82; Start 220; Stop 244
tactcttccaagtaattgattgcct

SEQ ID NO: 425274 - DNA, 25 bp, Artificial
  probe
  misc_feature (1)..(25): SEQ ID NO: 5917; WAN024A82; Start 219; Stop 243
atactcttccaagtaattgattgcc

SEQ ID NO: 425275 - DNA, 25 bp, Artificial
  probe
  misc_feature (1)..(25): SEQ ID NO: 5917; WAN024A82; Start 91; Stop 115
gaacactttctatacaactgacagc

SEQ ID NO: 425276 - DNA, 25 bp, Artificial
  probe
  misc_feature (1)..(25): SEQ ID NO: 5917; WAN024A82; Start 90; Stop 114
cgaacactttctatacaactgacag

SEQ ID NO: 425277 - DNA, 25 bp, Artificial
  probe
  misc_feature (1)..(25): SEQ ID NO: 5917; WAN024A82; Start 218; Stop 242
catactcttccaagtaattgattgc

SEQ ID NO: 425278 - DNA, 25 bp, Artificial
  probe
  misc_feature (1)..(25): SEQ ID NO: 5917; WAN024A82; Start 206; Stop 230
actaaatgctttcatactcttccaa

SEQ ID NO: 425279 - DNA, 25 bp, Artificial
  probe
  misc_feature (1)..(25): SEQ ID NO: 5917; WAN024A82; Start 205; Stop 229
aactaaatgctttcatactcttcca

SEQ ID NO: 425280 - DNA, 25 bp, Artificial
  probe
  misc_feature (1)..(25): SEQ ID NO: 5917; WAN024A82; Start 208; Stop 232
taaatgctttcatactcttccaagt

SEQ ID NO: 425281 - DNA, 25 bp, Artificial
  probe
  misc_feature (1)..(25): SEQ ID NO: 5917; WAN024A82; Start 207; Stop 231
ctaaatgctttcatactcttccaag

SEQ ID NO: 425282 - DNA, 25 bp, Artificial
  probe
  misc_feature (1)..(25): SEQ ID NO: 5917; WAN024A82; Start 114; Stop 138
gctcaaatctttcagaatagaacaa

SEQ ID NO: 425283 - DNA, 25 bp, Artificial
  probe
  misc_feature (1)..(25): SEQ ID NO: 5917; WAN024A82; Start 92; Stop 116
aacactttctatacaactgacagct

SEQ ID NO: 425284 - DNA, 25 bp, Artificial
  probe
  misc_feature (1)..(25): SEQ ID NO: 5917; WAN024A82; Start 224; Stop 248
cttccaagtaattgattgccttaaa

SEQ ID NO: 425285 - DNA, 25 bp, Artificial
  probe
  misc_feature (1)..(25): SEQ ID NO: 5917; WAN024A82; Start 93; Stop 117
acactttctatacaactgacagctc

SEQ ID NO: 425286 - DNA, 25 bp, Artificial
  probe
  misc_feature (1)..(25): SEQ ID NO: 5917; WAN024A82; Start 204; Stop 228
aaactaaatgctttcatactcttcc

SEQ ID NO: 425287 - DNA, 25 bp, Artificial
  probe
  misc_feature (1)..(25): SEQ ID NO: 5917; WAN024A82; Start 89; Stop 113
tcgaacactttctatacaactgaca

SEQ ID NO: 425288 - DNA, 25 bp, Artificial
  probe
  misc_feature (1)..(25): SEQ ID NO: 5917; WAN024A82; Start 95; Stop 119
actttctatacaactgacagctcaa

SEQ ID NO: 425289 - DNA, 25 bp, Artificial
  probe
  misc_feature (1)..(25): SEQ ID NO: 5917; WAN024A82; Start 102; Stop 126
atacaactgacagctcaaatctttc

SEQ ID NO: 425290 - DNA, 25 bp, Artificial
  probe
  misc_feature (1)..(25): SEQ ID NO: 5917; WAN024A82; Start 99; Stop 123
tctatacaactgacagctcaaatct

SEQ ID NO: 425291 - DNA, 25 bp, Artificial
  probe
  misc_feature (1)..(25): SEQ ID NO: 5917; WAN024A82; Start 103; Stop 127
tacaactgacagctcaaatctttca

SEQ ID NO: 425292 - DNA, 25 bp, Artificial
  probe
  misc_feature (1)..(25): SEQ ID NO: 5917; WAN024A82; Start 94; Stop 118
cactttctatacaactgacagctca

SEQ ID NO: 425293 - DNA, 25 bp, Artificial
  probe
  misc_feature (1)..(25): SEQ ID NO: 5917; WAN024A82; Start 110; Stop 134
gacagctcaaatctttcagaataga

SEQ ID NO: 425294 - DNA, 25 bp, Artificial
  probe
  misc_feature (1)..(25): SEQ ID NO: 5917; WAN024A82; Start 109; Stop 133
tgacagctcaaatctttcagaatag

SEQ ID NO: 425295 - DNA, 25 bp, Artificial
  probe
  misc_feature (1)..(25): SEQ ID NO: 5917; WAN024A82; Start 96; Stop 120
ctttctatacaactgacagctcaaa

SEQ ID NO: 425296 - DNA, 25 bp, Artificial
  probe
  misc_feature (1)..(25): SEQ ID NO: 5917; WAN024A82; Start 217; Stop 241
tcatactcttccaagtaattgattg

SEQ ID NO: 425297 - DNA, 25 bp, Artificial
  probe
  misc_feature (1)..(25): SEQ ID NO: 5917; WAN024A82; Start 225; Stop 249
ttccaagtaattgattgccttaaat

SEQ ID NO: 425298 - DNA, 25 bp, Artificial
  probe
  misc_feature (1)..(25): SEQ ID NO: 5917; WAN024A82; Start 100; Stop 124
ctatacaactgacagctcaaatctt

SEQ ID NO: 425299 - DNA, 25 bp, Artificial
  probe
  misc_feature (1)..(25): SEQ ID NO: 5917; WAN024A82; Start 98; Stop 122
ttctatacaactgacagctcaaatc

SEQ ID NO: 425300 - DNA, 25 bp, Artificial
  probe
  misc_feature (1)..(25): SEQ ID NO: 5917; WAN024A82; Start 113; Stop 137
agctcaaatctttcagaatagaaca

SEQ ID NO: 425301 - DNA, 25 bp, Artificial
  probe
  misc_feature (1)..(25): SEQ ID NO: 5917; WAN024A82; Start 111; Stop 135
acagctcaaatctttcagaatagaa

SEQ ID NO: 425302 - DNA, 25 bp, Artificial
  probe
  misc_feature (1)..(25): SEQ ID NO: 5917; WAN024A82; Start 212; Stop 236
tgctttcatactcttccaagtaatt

SEQ ID NO: 425303 - DNA, 25 bp, Artificial
  probe
  misc_feature (1)..(25): SEQ ID NO: 5918; WAN024AJ4; Start 106; Stop 130
aaatctcctctataagtgcttcaaa

SEQ ID NO: 425304 - DNA, 25 bp, Artificial
  probe
  misc_feature (1)..(25): SEQ ID NO: 5918; WAN024AJ4; Start 105; Stop 129
taaatctcctctataagtgcttcaa

SEQ ID NO: 425305 - DNA, 25 bp, Artificial
  probe
  misc_feature (1)..(25): SEQ ID NO: 5918; WAN024AJ4; Start 104; Stop 128
ttaaatctcctctataagtgcttca

SEQ ID NO: 425306 - DNA, 25 bp, Artificial
  probe
  misc_feature (1)..(25): SEQ ID NO: 5918; WAN024AJ4; Start 25; Stop 49
taacaatagtgctcatactaattgc

SEQ ID NO: 425307 - DNA, 25 bp, Artificial
  probe
  misc_feature (1)..(25): SEQ ID NO: 5918; WAN024AJ4; Start 31; Stop 55
tagtgctcatactaattgcagaagt

SEQ ID NO: 425308 - DNA, 25 bp, Artificial
  probe
  misc_feature (1)..(25): SEQ ID NO: 5918; WAN024AJ4; Start 32; Stop 56
agtgctcatactaattgcagaagtt

SEQ ID NO: 425309 - DNA, 25 bp, Artificial
  probe
  misc_feature (1)..(25): SEQ ID NO: 5918; WAN024AJ4; Start 27; Stop 51
acaatagtgctcatactaattgcag

SEQ ID NO: 425310 - DNA, 25 bp, Artificial
  probe
  misc_feature (1)..(25): SEQ ID NO: 5918; WAN024AJ4; Start 28; Stop 52
caatagtgctcatactaattgcaga

SEQ ID NO: 425311 - DNA, 25 bp, Artificial
  probe
  misc_feature (1)..(25): SEQ ID NO: 5918; WAN024AJ4; Start 30; Stop 54
atagtgctcatactaattgcagaag

SEQ ID NO: 425312 - DNA, 25 bp, Artificial
  probe
  misc_feature (1)..(25): SEQ ID NO: 5918; WAN024AJ4; Start 26; Stop 50
aacaatagtgctcatactaattgca

SEQ ID NO: 425313 - DNA, 25 bp, Artificial
  probe
  misc_feature (1)..(25): SEQ ID NO: 5918; WAN024AJ4; Start 48; Stop 72
gcagaagttttgggtgataagataa

SEQ ID NO: 425314 - DNA, 25 bp, Artificial
  probe
  misc_feature (1)..(25): SEQ ID NO: 5918; WAN024AJ4; Start 29; Stop 53
aatagtgctcatactaattgcagaa

SEQ ID NO: 425315 - DNA, 25 bp, Artificial
  probe
  misc_feature (1)..(25): SEQ ID NO: 5918; WAN024AJ4; Start 136; Stop 160
cttcaaaacctgtcttgtaatccaa

SEQ ID NO: 425316 - DNA, 25 bp, Artificial
  probe
  misc_feature (1)..(25): SEQ ID NO: 5918; WAN024AJ4; Start 133; Stop 157
gtgcttcaaaacctgtcttgtaatc

SEQ ID NO: 425317 - DNA, 25 bp, Artificial
  probe
  misc_feature (1)..(25): SEQ ID NO: 5918; WAN024AJ4; Start 132; Stop 156
agtgcttcaaaacctgtcttgtaat

SEQ ID NO: 425318 - DNA, 25 bp, Artificial
  probe
  misc_feature (1)..(25): SEQ ID NO: 5918; WAN024AJ4; Start 131; Stop 155
aagtgcttcaaaacctgtcttgtaa

SEQ ID NO: 425319 - DNA, 25 bp, Artificial
  probe
  misc_feature (1)..(25): SEQ ID NO: 5918; WAN024AJ4; Start 130; Stop 154
aaagtgcttcaaaacctgtcttgta

SEQ ID NO: 425320 - DNA, 25 bp, Artificial
  probe
  misc_feature (1)..(25): SEQ ID NO: 5918; WAN024AJ4; Start 60; Stop 84
ggtgataagataactgataaattgc

SEQ ID NO: 425321 - DNA, 25 bp, Artificial
  probe
  misc_feature (1)..(25): SEQ ID NO: 5918; WAN024AJ4; Start 135; Stop 159
gcttcaaaacctgtcttgtaatcca

SEQ ID NO: 425322 - DNA, 25 bp, Artificial
  probe
  misc_feature (1)..(25): SEQ ID NO: 5918; WAN024AJ4; Start 134; Stop 158
tgcttcaaaacctgtcttgtaatcc

SEQ ID NO: 425323 - DNA, 25 bp, Artificial
  probe
  misc_feature (1)..(25): SEQ ID NO: 5918; WAN024AJ4; Start 107; Stop 131
aatctcctctataagtgcttcaaaa

SEQ ID NO: 425324 - DNA, 25 bp, Artificial
  probe
  misc_feature (1)..(25): SEQ ID NO: 5918; WAN024AJ4; Start 129; Stop 153
aaaagtgcttcaaaacctgtcttgt

SEQ ID NO: 425325 - DNA, 25 bp, Artificial
  probe
  misc_feature (1)..(25): SEQ ID NO: 5918; WAN024AJ4; Start 49; Stop 73
cagaagttttgggtgataagataac

SEQ ID NO: 425326 - DNA, 25 bp, Artificial
  probe
  misc_feature (1)..(25): SEQ ID NO: 5918; WAN024AJ4; Start 56; Stop 80
tttgggtgataagataactgataaa

SEQ ID NO: 425327 - DNA, 25 bp, Artificial
  probe
  misc_feature (1)..(25): SEQ ID NO: 5918; WAN024AJ4; Start 33; Stop 57
gtgctcatactaattgcagaagttt

SEQ ID NO: 425328 - DNA, 25 bp, Artificial
  probe
  misc_feature (1)..(25): SEQ ID NO: 5918; WAN024AJ4; Start 57; Stop 81
ttgggtgataagataactgataaat

SEQ ID NO: 425329 - DNA, 25 bp, Artificial
  probe
  misc_feature (1)..(25): SEQ ID NO: 5918; WAN024AJ4; Start 47; Stop 71
tgcagaagttttgggtgataagata

SEQ ID NO: 425330 - DNA, 25 bp, Artificial
  probe
  misc_feature (1)..(25): SEQ ID NO: 5918; WAN024AJ4; Start 44; Stop 68
aattgcagaagttttgggtgataag

SEQ ID NO: 425331 - DNA, 25 bp, Artificial
  probe
  misc_feature (1)..(25): SEQ ID NO: 5918; WAN024AJ4; Start 42; Stop 66
ctaattgcagaagttttgggtgata

SEQ ID NO: 425332 - DNA, 25 bp, Artificial
  probe
  misc_feature (1)..(25): SEQ ID NO: 5918; WAN024AJ4; Start 103; Stop 127
tttaaatctcctctataagtgcttc

SEQ ID NO: 425333 - DNA, 25 bp, Artificial
  probe
  misc_feature (1)..(25): SEQ ID NO: 5918; WAN024AJ4; Start 58; Stop 82
tgggtgataagataactgataaatt

SEQ ID NO: 425334 - DNA, 25 bp, Artificial
  probe
  misc_feature (1)..(25): SEQ ID NO: 5918; WAN024AJ4; Start 46; Stop 70
ttgcagaagttttgggtgataagat

SEQ ID NO: 425335 - DNA, 25 bp, Artificial
  probe
  misc_feature (1)..(25): SEQ ID NO: 5918; WAN024AJ4; Start 45; Stop 69
attgcagaagttttgggtgataaga

SEQ ID NO: 425336 - DNA, 25 bp, Artificial
  probe
  misc_feature (1)..(25): SEQ ID NO: 5919; WAN024ABG; Start 36; Stop 60
tagtcacacaataaaggagaagacc

SEQ ID NO: 425337 - DNA, 25 bp, Artificial
  probe
  misc_feature (1)..(25): SEQ ID NO: 5919; WAN024ABG; Start 35; Stop 59
ctagtcacacaataaaggagaagac

SEQ ID NO: 425338 - DNA, 25 bp, Artificial
  probe
  misc_feature (1)..(25): SEQ ID NO: 5919; WAN024ABG; Start 37; Stop 61
agtcacacaataaaggagaagacct

SEQ ID NO: 425339 - DNA, 25 bp, Artificial
  probe
  misc_feature (1)..(25): SEQ ID NO: 5919; WAN024ABG; Start 34; Stop 58
actagtcacacaataaaggagaaga

SEQ ID NO: 425340 - DNA, 25 bp, Artificial
  probe
  misc_feature (1)..(25): SEQ ID NO: 5919; WAN024ABG; Start 14; Stop 38
ttgtaaaatcaaactaatggactag

SEQ ID NO: 425341 - DNA, 25 bp, Artificial
  probe
  misc_feature (1)..(25): SEQ ID NO: 5919; WAN024ABG; Start 15; Stop 39
tgtaaaatcaaactaatggactagt

SEQ ID NO: 425342 - DNA, 25 bp, Artificial
  probe
  misc_feature (1)..(25): SEQ ID NO: 5920; WAN024A7W; Start 30; Stop 54
ctagaactcacattctgctctcatt

SEQ ID NO: 425343 - DNA, 25 bp, Artificial
  probe
  misc_feature (1)..(25): SEQ ID NO: 5920; WAN024A7W; Start 27; Stop 51
gaactagaactcacattctgctctc

SEQ ID NO: 425344 - DNA, 25 bp, Artificial
  probe
  misc_feature (1)..(25): SEQ ID NO: 5920; WAN024A7W; Start 25; Stop 49
gagaactagaactcacattctgctc

SEQ ID NO: 425345 - DNA, 25 bp, Artificial
  probe
  misc_feature (1)..(25): SEQ ID NO: 5920; WAN024A7W; Start 29; Stop 53
actagaactcacattctgctctcat

SEQ ID NO: 425346 - DNA, 25 bp, Artificial
  probe
  misc_feature (1)..(25): SEQ ID NO: 5920; WAN024A7W; Start 26; Stop 50
agaactagaactcacattctgctct

SEQ ID NO: 425347 - DNA, 25 bp, Artificial
  probe
  misc_feature (1)..(25): SEQ ID NO: 5920; WAN024A7W; Start 28; Stop 52
aactagaactcacattctgctctca

SEQ ID NO: 425348 - DNA, 25 bp, Artificial
  probe
  misc_feature (1)..(25): SEQ ID NO: 5920; WAN024A7W; Start 31; Stop 55
tagaactcacattctgctctcattt

SEQ ID NO: 425349 - DNA, 25 bp, Artificial
  probe
  misc_feature (1)..(25): SEQ ID NO: 5920; WAN024A7W; Start 23; Stop 47
atgagaactagaactcacattctgc

SEQ ID NO: 425350 - DNA, 25 bp, Artificial
  probe
  misc_feature (1)..(25): SEQ ID NO: 5920; WAN024A7W; Start 84; Stop 108
ttaggagttagaaaatgctgctacc

SEQ ID NO: 425351 - DNA, 25 bp, Artificial
  probe
  misc_feature (1)..(25): SEQ ID NO: 5920; WAN024A7W; Start 83; Stop 107
tttaggagttagaaaatgctgctac

SEQ ID NO: 425352 - DNA, 25 bp, Artificial
  probe
  misc_feature (1)..(25): SEQ ID NO: 5920; WAN024A7W; Start 24; Stop 48
tgagaactagaactcacattctgct

SEQ ID NO: 425353 - DNA, 25 bp, Artificial
  probe
  misc_feature (1)..(25): SEQ ID NO: 5920; WAN024A7W; Start 22; Stop 46
aatgagaactagaactcacattctg

SEQ ID NO: 425354 - DNA, 25 bp, Artificial
  probe
  misc_feature (1)..(25): SEQ ID NO: 5920; WAN024A7W; Start 60; Stop 84
ttttcccgttctcctatcctgtttt

SEQ ID NO: 425355 - DNA, 25 bp, Artificial
  probe
  misc_feature (1)..(25): SEQ ID NO: 5920; WAN024A7W; Start 85; Stop 109
taggagttagaaaatgctgctacct

SEQ ID NO: 425356 - DNA, 25 bp, Artificial
  probe
  misc_feature (1)..(25): SEQ ID NO: 5920; WAN024A7W; Start 59; Stop 83
gttttcccgttctcctatcctgttt

SEQ ID NO: 425357 - DNA, 25 bp, Artificial
  probe
  misc_feature (1)..(25): SEQ ID NO: 5920; WAN024A7W; Start 82; Stop 106
ttttaggagttagaaaatgctgcta

SEQ ID NO: 425358 - DNA, 25 bp, Artificial
  probe
  misc_feature (1)..(25): SEQ ID NO: 5920; WAN024A7W; Start 54; Stop 78
ttttcgttttcccgttctcctatcc

SEQ ID NO: 425359 - DNA, 25 bp, Artificial
  probe
  misc_feature (1)..(25): SEQ ID NO: 5920; WAN024A7W; Start 32; Stop 56
agaactcacattctgctctcatttt

SEQ ID NO: 425360 - DNA, 25 bp, Artificial
  probe
  misc_feature (1)..(25): SEQ ID NO: 5920; WAN024A7W; Start 21; Stop 45
aaatgagaactagaactcacattct

SEQ ID NO: 425361 - DNA, 25 bp, Artificial
  probe
  misc_feature (1)..(25): SEQ ID NO: 5920; WAN024A7W; Start 55; Stop 79
tttcgttttcccgttctcctatcct

SEQ ID NO: 425362 - DNA, 25 bp, Artificial
  probe
  misc_feature (1)..(25): SEQ ID NO: 5920; WAN024A7W; Start 56; Stop 80
ttcgttttcccgttctcctatcctg

SEQ ID NO: 425363 - DNA, 25 bp, Artificial
  probe
  misc_feature (1)..(25): SEQ ID NO: 5920; WAN024A7W; Start 58; Stop 82
cgttttcccgttctcctatcctgtt

SEQ ID NO: 425364 - DNA, 25 bp, Artificial
  probe
  misc_feature (1)..(25): SEQ ID NO: 5920; WAN024A7W; Start 20; Stop 44
aaaatgagaactagaactcacattc

SEQ ID NO: 425365 - DNA, 25 bp, Artificial
  probe
  misc_feature (1)..(25): SEQ ID NO: 5921; WAN024ARW; Start 20; Stop 44
acactcttgagagaccaaaagtaaa

SEQ ID NO: 425366 - DNA, 25 bp, Artificial
  probe
  misc_feature (1)..(25): SEQ ID NO: 5921; WAN024ARW; Start 18; Stop 42
gtacactcttgagagaccaaaagta

SEQ ID NO: 425367 - DNA, 25 bp, Artificial
  probe
  misc_feature (1)..(25): SEQ ID NO: 5921; WAN024ARW; Start 19; Stop 43
tacactcttgagagaccaaaagtaa

SEQ ID NO: 425368 - DNA, 25 bp, Artificial
  probe
  misc_feature (1)..(25): SEQ ID NO: 5921; WAN024ARW; Start 21; Stop 45
cactcttgagagaccaaaagtaaaa

SEQ ID NO: 425369 - DNA, 25 bp, Artificial
  probe
  misc_feature (1)..(25): SEQ ID NO: 5921; WAN024ARW; Start 16; Stop 40
ctgtacactcttgagagaccaaaag

SEQ ID NO: 425370 - DNA, 25 bp, Artificial
  probe
  misc_feature (1)..(25): SEQ ID NO: 5921; WAN024ARW; Start 14; Stop 38
ccctgtacactcttgagagaccaaa

SEQ ID NO: 425371 - DNA, 25 bp, Artificial
  probe
  misc_feature (1)..(25): SEQ ID NO: 5921; WAN024ARW; Start 17; Stop 41
tgtacactcttgagagaccaaaagt

SEQ ID NO: 425372 - DNA, 25 bp, Artificial
  probe
  misc_feature (1)..(25): SEQ ID NO: 5921; WAN024ARW; Start 15; Stop 39
cctgtacactcttgagagaccaaaa

SEQ ID NO: 425373 - DNA, 25 bp, Artificial
  probe
  misc_feature (1)..(25): SEQ ID NO: 5921; WAN024ARW; Start 13; Stop 37
tccctgtacactcttgagagaccaa

SEQ ID NO: 425374 - DNA, 25 bp, Artificial
  probe
  misc_feature (1)..(25): SEQ ID NO: 5921; WAN024ARW; Start 12; Stop 36
gtccctgtacactcttgagagacca

SEQ ID NO: 425375 - DNA, 25 bp, Artificial
  probe
  misc_feature (1)..(25): SEQ ID NO: 5922; WAN0249OD; Start 259; Stop 283
tattgactattaccacgataccacg

SEQ ID NO: 425376 - DNA, 25 bp, Artificial
  probe
  misc_feature (1)..(25): SEQ ID NO: 5922; WAN0249OD; Start 266; Stop 290
tattaccacgataccacgcttaatc

SEQ ID NO: 425377 - DNA, 25 bp, Artificial
  probe
  misc_feature (1)..(25): SEQ ID NO: 5922; WAN0249OD; Start 265; Stop 289
ctattaccacgataccacgcttaat

SEQ ID NO: 425378 - DNA, 25 bp, Artificial
  probe
  misc_feature (1)..(25): SEQ ID NO: 5922; WAN0249OD; Start 264; Stop 288
actattaccacgataccacgcttaa

SEQ ID NO: 425379 - DNA, 25 bp, Artificial
  probe
  misc_feature (1)..(25): SEQ ID NO: 5922; WAN0249OD; Start 258; Stop 282
ttattgactattaccacgataccac

SEQ ID NO: 425380 - DNA, 25 bp, Artificial
  probe
  misc_feature (1)..(25): SEQ ID NO: 5922; WAN0249OD; Start 263; Stop 287
gactattaccacgataccacgctta

SEQ ID NO: 425381 - DNA, 25 bp, Artificial
  probe
  misc_feature (1)..(25): SEQ ID NO: 5922; WAN0249OD; Start 219; Stop 243
atcaataggcgagtaactagcacaa

SEQ ID NO: 425382 - DNA, 25 bp, Artificial
  probe
  misc_feature (1)..(25): SEQ ID NO: 5922; WAN0249OD; Start 218; Stop 242
aatcaataggcgagtaactagcaca

SEQ ID NO: 425383 - DNA, 25 bp, Artificial
  probe
  misc_feature (1)..(25): SEQ ID NO: 5922; WAN0249OD; Start 260; Stop 284
attgactattaccacgataccacgc

SEQ ID NO: 425384 - DNA, 25 bp, Artificial
  probe
  misc_feature (1)..(25): SEQ ID NO: 5922; WAN0249OD; Start 220; Stop 244
tcaataggcgagtaactagcacaag

SEQ ID NO: 425385 - DNA, 25 bp, Artificial
  probe
  misc_feature (1)..(25): SEQ ID NO: 5922; WAN0249OD; Start 5; Stop 29
tcctctttctatgcgactctttaat

SEQ ID NO: 425386 - DNA, 25 bp, Artificial
  probe
  misc_feature (1)..(25): SEQ ID NO: 5922; WAN0249OD; Start 6; Stop 30
cctctttctatgcgactctttaatc

SEQ ID NO: 425387 - DNA, 25 bp, Artificial
  probe
  misc_feature (1)..(25): SEQ ID NO: 5922; WAN0249OD; Start 222; Stop 246
aataggcgagtaactagcacaagtg

SEQ ID NO: 425388 - DNA, 25 bp, Artificial
  probe
  misc_feature (1)..(25): SEQ ID NO: 5922; WAN0249OD; Start 221; Stop 245
caataggcgagtaactagcacaagt

SEQ ID NO: 425389 - DNA, 25 bp, Artificial
  probe
  misc_feature (1)..(25): SEQ ID NO: 5922; WAN0249OD; Start 217; Stop 241
aaatcaataggcgagtaactagcac

SEQ ID NO: 425390 - DNA, 25 bp, Artificial
  probe
  misc_feature (1)..(25): SEQ ID NO: 5922; WAN0249OD; Start 4; Stop 28
gtcctctttctatgcgactctttaa

SEQ ID NO: 425391 - DNA, 25 bp, Artificial
  probe
  misc_feature (1)..(25): SEQ ID NO: 5922; WAN0249OD; Start 262; Stop 286
tgactattaccacgataccacgctt

SEQ ID NO: 425392 - DNA, 25 bp, Artificial
  probe
  misc_feature (1)..(25): SEQ ID NO: 5922; WAN0249OD; Start 261; Stop 285
ttgactattaccacgataccacgct

SEQ ID NO: 425393 - DNA, 25 bp, Artificial
  probe
  misc_feature (1)..(25): SEQ ID NO: 5922; WAN0249OD; Start 257; Stop 281
tttattgactattaccacgatacca

SEQ ID NO: 425394 - DNA, 25 bp, Artificial
  probe
  misc_feature (1)..(25): SEQ ID NO: 5922; WAN0249OD; Start 3; Stop 27
tgtcctctttctatgcgactcttta

SEQ ID NO: 425395 - DNA, 25 bp, Artificial
  probe
  misc_feature (1)..(25): SEQ ID NO: 5922; WAN0249OD; Start 2; Stop 26
ttgtcctctttctatgcgactcttt

SEQ ID NO: 425396 - DNA, 25 bp, Artificial
  probe
  misc_feature (1)..(25): SEQ ID NO: 5922; WAN0249OD; Start 1; Stop 25
tttgtcctctttctatgcgactctt

SEQ ID NO: 425397 - DNA, 25 bp, Artificial
  probe
  misc_feature (1)..(25): SEQ ID NO: 5922; WAN0249OD; Start 7; Stop 31
ctctttctatgcgactctttaatcg

SEQ ID NO: 425398 - DNA, 25 bp, Artificial
  probe
  misc_feature (1)..(25): SEQ ID NO: 5922; WAN0249OD; Start 104; Stop 128
accatattacctcatttaaaccctt

SEQ ID NO: 425399 - DNA, 25 bp, Artificial
  probe
  misc_feature (1)..(25): SEQ ID NO: 5922; WAN0249OD; Start 106; Stop 130
catattacctcatttaaacccttgg

SEQ ID NO: 425400 - DNA, 25 bp, Artificial
  probe
  misc_feature (1)..(25): SEQ ID NO: 5922; WAN0249OD; Start 105; Stop 129
ccatattacctcatttaaacccttg

SEQ ID NO: 425401 - DNA, 25 bp, Artificial
  probe
  misc_feature (1)..(25): SEQ ID NO: 5922; WAN0249OD; Start 148; Stop 172
aaagtctgatttcttcatttctcat

SEQ ID NO: 425402 - DNA, 25 bp, Artificial
  probe
  misc_feature (1)..(25): SEQ ID NO: 5922; WAN0249OD; Start 57; Stop 81
aatagatactaccatcttaccacaa

SEQ ID NO: 425403 - DNA, 25 bp, Artificial
  probe
  misc_feature (1)..(25): SEQ ID NO: 5922; WAN0249OD; Start 223; Stop 247
ataggcgagtaactagcacaagtgg

SEQ ID NO: 425404 - DNA, 25 bp, Artificial
  probe
  misc_feature (1)..(25): SEQ ID NO: 5922; WAN0249OD; Start 216; Stop 240
aaaatcaataggcgagtaactagca

SEQ ID NO: 425405 - DNA, 25 bp, Artificial
  probe
  misc_feature (1)..(25): SEQ ID NO: 5922; WAN0249OD; Start 38; Stop 62
ttgctcggaaatatgctaaaataga

SEQ ID NO: 425406 - DNA, 25 bp, Artificial
  probe
  misc_feature (1)..(25): SEQ ID NO: 5922; WAN0249OD; Start 39; Stop 63
tgctcggaaatatgctaaaatagat

SEQ ID NO: 425407 - DNA, 25 bp, Artificial
  probe
  misc_feature (1)..(25): SEQ ID NO: 5922; WAN0249OD; Start 215; Stop 239
taaaatcaataggcgagtaactagc

SEQ ID NO: 425408 - DNA, 25 bp, Artificial
  probe
  misc_feature (1)..(25): SEQ ID NO: 5923; WAN0249DT; Start 4; Stop 28
gttctccttcgatatagtcctttca

SEQ ID NO: 425409 - DNA, 25 bp, Artificial
  probe
  misc_feature (1)..(25): SEQ ID NO: 5923; WAN0249DT; Start 3; Stop 27
tgttctccttcgatatagtcctttc

SEQ ID NO: 425410 - DNA, 25 bp, Artificial
  probe
  misc_feature (1)..(25): SEQ ID NO: 5923; WAN0249DT; Start 2; Stop 26
ttgttctccttcgatatagtccttt

SEQ ID NO: 425411 - DNA, 25 bp, Artificial
  probe
  misc_feature (1)..(25): SEQ ID NO: 5923; WAN0249DT; Start 1; Stop 25
tttgttctccttcgatatagtcctt

SEQ ID NO: 425412 - DNA, 25 bp, Artificial
  probe
  misc_feature (1)..(25): SEQ ID NO: 5923; WAN0249DT; Start 5; Stop 29
ttctccttcgatatagtcctttcaa

SEQ ID NO: 425413 - DNA, 25 bp, Artificial
  probe
  misc_feature (1)..(25): SEQ ID NO: 5923; WAN0249DT; Start 6; Stop 30
tctccttcgatatagtcctttcaat

SEQ ID NO: 425414 - DNA, 25 bp, Artificial
  probe
  misc_feature (1)..(25): SEQ ID NO: 5923; WAN0249DT; Start 7; Stop 31
ctccttcgatatagtcctttcaatt

SEQ ID NO: 425415 - DNA, 25 bp, Artificial
  probe
  misc_feature (1)..(25): SEQ ID NO: 5923; WAN0249DT; Start 13; Stop 37
cgatatagtcctttcaattatagca

SEQ ID NO: 425416 - DNA, 25 bp, Artificial
  probe
  misc_feature (1)..(25): SEQ ID NO: 5923; WAN0249DT; Start 91; Stop 115
cagatttgtgtaaaggatactgtaa

SEQ ID NO: 425417 - DNA, 25 bp, Artificial
  probe
  misc_feature (1)..(25): SEQ ID NO: 5923; WAN0249DT; Start 8; Stop 32
tccttcgatatagtcctttcaatta

SEQ ID NO: 425418 - DNA, 25 bp, Artificial
  probe
  misc_feature (1)..(25): SEQ ID NO: 5923; WAN0249DT; Start 92; Stop 116
agatttgtgtaaaggatactgtaaa

SEQ ID NO: 425419 - DNA, 25 bp, Artificial
  probe
  misc_feature (1)..(25): SEQ ID NO: 5923; WAN0249DT; Start 9; Stop 33
ccttcgatatagtcctttcaattat

SEQ ID NO: 425420 - DNA, 25 bp, Artificial
  probe
  misc_feature (1)..(25): SEQ ID NO: 5923; WAN0249DT; Start 12; Stop 36
tcgatatagtcctttcaattatagc

SEQ ID NO: 425421 - DNA, 25 bp, Artificial
  probe
  misc_feature (1)..(25): SEQ ID NO: 5923; WAN0249DT; Start 64; Stop 88
atcaaaataaatcagccttgctttt

SEQ ID NO: 425422 - DNA, 25 bp, Artificial
  probe
  misc_feature (1)..(25): SEQ ID NO: 5923; WAN0249DT; Start 93; Stop 117
gatttgtgtaaaggatactgtaaat

SEQ ID NO: 425423 - DNA, 25 bp, Artificial
  probe
  misc_feature (1)..(25): SEQ ID NO: 5923; WAN0249DT; Start 63; Stop 87
tatcaaaataaatcagccttgcttt

SEQ ID NO: 425424 - DNA, 25 bp, Artificial
  probe
  misc_feature (1)..(25): SEQ ID NO: 5923; WAN0249DT; Start 62; Stop 86
ttatcaaaataaatcagccttgctt

SEQ ID NO: 425425 - DNA, 25 bp, Artificial
  probe
  misc_feature (1)..(25): SEQ ID NO: 5923; WAN0249DT; Start 61; Stop 85
tttatcaaaataaatcagccttgct

SEQ ID NO: 425426 - DNA, 25 bp, Artificial
  probe
  misc_feature (1)..(25): SEQ ID NO: 5923; WAN0249DT; Start 90; Stop 114
acagatttgtgtaaaggatactgta

SEQ ID NO: 425427 - DNA, 25 bp, Artificial
  probe
  misc_feature (1)..(25): SEQ ID NO: 5923; WAN0249DT; Start 89; Stop 113
tacagatttgtgtaaaggatactgt

SEQ ID NO: 425428 - DNA, 25 bp, Artificial
  probe
  misc_feature (1)..(25): SEQ ID NO: 5923; WAN0249DT; Start 88; Stop 112
ttacagatttgtgtaaaggatactg

SEQ ID NO: 425429 - DNA, 25 bp, Artificial
  probe
  misc_feature (1)..(25): SEQ ID NO: 5923; WAN0249DT; Start 60; Stop 84
atttatcaaaataaatcagccttgc

SEQ ID NO: 425430 - DNA, 25 bp, Artificial
  probe
  misc_feature (1)..(25): SEQ ID NO: 5923; WAN0249DT; Start 56; Stop 80
cgtaatttatcaaaataaatcagcc

SEQ ID NO: 425431 - DNA, 25 bp, Artificial
  probe
  misc_feature (1)..(25): SEQ ID NO: 5923; WAN0249DT; Start 55; Stop 79
ccgtaatttatcaaaataaatcagc

SEQ ID NO: 425432 - DNA, 25 bp, Artificial
  probe
  misc_feature (1)..(25): SEQ ID NO: 5924; WAN0249FQ; Start 33; Stop 57
gttgcacttgctagttaatacatga

SEQ ID NO: 425433 - DNA, 25 bp, Artificial
  probe
  misc_feature (1)..(25): SEQ ID NO: 5924; WAN0249FQ; Start 32; Stop 56
agttgcacttgctagttaatacatg

SEQ ID NO: 425434 - DNA, 25 bp, Artificial
  probe
  misc_feature (1)..(25): SEQ ID NO: 5924; WAN0249FQ; Start 36; Stop 60
gcacttgctagttaatacatgatac

SEQ ID NO: 425435 - DNA, 25 bp, Artificial
  probe
  misc_feature (1)..(25): SEQ ID NO: 5924; WAN0249FQ; Start 34; Stop 58
ttgcacttgctagttaatacatgat

SEQ ID NO: 425436 - DNA, 25 bp, Artificial
  probe
  misc_feature (1)..(25): SEQ ID NO: 5924; WAN0249FQ; Start 50; Stop 74
atacatgatacaaagagcgtaacag

SEQ ID NO: 425437 - DNA, 25 bp, Artificial
  probe
  misc_feature (1)..(25): SEQ ID NO: 5924; WAN0249FQ; Start 51; Stop 75
tacatgatacaaagagcgtaacagc

SEQ ID NO: 425438 - DNA, 25 bp, Artificial
  probe
  misc_feature (1)..(25): SEQ ID NO: 5924; WAN0249FQ; Start 35; Stop 59
tgcacttgctagttaatacatgata

SEQ ID NO: 425439 - DNA, 25 bp, Artificial
  probe
  misc_feature (1)..(25): SEQ ID NO: 5924; WAN0249FQ; Start 49; Stop 73
aatacatgatacaaagagcgtaaca

SEQ ID NO: 425440 - DNA, 25 bp, Artificial
  probe
  misc_feature (1)..(25): SEQ ID NO: 5924; WAN0249FQ; Start 45; Stop 69
agttaatacatgatacaaagagcgt

SEQ ID NO: 425441 - DNA, 25 bp, Artificial
  probe
  misc_feature (1)..(25): SEQ ID NO: 5924; WAN0249FQ; Start 37; Stop 61
cacttgctagttaatacatgataca

SEQ ID NO: 425442 - DNA, 25 bp, Artificial
  probe
  misc_feature (1)..(25): SEQ ID NO: 5924; WAN0249FQ; Start 53; Stop 77
catgatacaaagagcgtaacagcac

SEQ ID NO: 425443 - DNA, 25 bp, Artificial
  probe
  misc_feature (1)..(25): SEQ ID NO: 5924; WAN0249FQ; Start 31; Stop 55
aagttgcacttgctagttaatacat

SEQ ID NO: 425444 - DNA, 25 bp, Artificial
  probe
  misc_feature (1)..(25): SEQ ID NO: 5924; WAN0249FQ; Start 52; Stop 76
acatgatacaaagagcgtaacagca

SEQ ID NO: 425445 - DNA, 25 bp, Artificial
  probe
  misc_feature (1)..(25): SEQ ID NO: 5924; WAN0249FQ; Start 48; Stop 72
taatacatgatacaaagagcgtaac

SEQ ID NO: 425446 - DNA, 25 bp, Artificial
  probe
  misc_feature (1)..(25): SEQ ID NO: 5924; WAN0249FQ; Start 46; Stop 70
gttaatacatgatacaaagagcgta

SEQ ID NO: 425447 - DNA, 25 bp, Artificial
  probe
  misc_feature (1)..(25): SEQ ID NO: 5924; WAN0249FQ; Start 38; Stop 62
acttgctagttaatacatgatacaa

SEQ ID NO: 425448 - DNA, 25 bp, Artificial
  probe
  misc_feature (1)..(25): SEQ ID NO: 5924; WAN0249FQ; Start 44; Stop 68
tagttaatacatgatacaaagagcg

SEQ ID NO: 425449 - DNA, 25 bp, Artificial
  probe
  misc_feature (1)..(25): SEQ ID NO: 5924; WAN0249FQ; Start 47; Stop 71
ttaatacatgatacaaagagcgtaa

SEQ ID NO: 425450 - DNA, 25 bp, Artificial
  probe
  misc_feature (1)..(25): SEQ ID NO: 5924; WAN0249FQ; Start 41; Stop 65
tgctagttaatacatgatacaaaga

SEQ ID NO: 425451 - DNA, 25 bp, Artificial
  probe
  misc_feature (1)..(25): SEQ ID NO: 5924; WAN0249FQ; Start 43; Stop 67
ctagttaatacatgatacaaagagc

SEQ ID NO: 425452 - DNA, 25 bp, Artificial
  probe
  misc_feature (1)..(25): SEQ ID NO: 5924; WAN0249FQ; Start 42; Stop 66
gctagttaatacatgatacaaagag

SEQ ID NO: 425453 - DNA, 25 bp, Artificial
  probe
  misc_feature (1)..(25): SEQ ID NO: 5924; WAN0249FQ; Start 10; Stop 34
ctcctcttactagtagtttgcaagt

SEQ ID NO: 425454 - DNA, 25 bp, Artificial
  probe
  misc_feature (1)..(25): SEQ ID NO: 5924; WAN0249FQ; Start 9; Stop 33
tctcctcttactagtagtttgcaag

SEQ ID NO: 425455 - DNA, 25 bp, Artificial
  probe
  misc_feature (1)..(25): SEQ ID NO: 5924; WAN0249FQ; Start 12; Stop 36
cctcttactagtagtttgcaagttg

SEQ ID NO: 425456 - DNA, 25 bp, Artificial
  probe
  misc_feature (1)..(25): SEQ ID NO: 5924; WAN0249FQ; Start 11; Stop 35
tcctcttactagtagtttgcaagtt

SEQ ID NO: 425457 - DNA, 25 bp, Artificial
  probe
  misc_feature (1)..(25): SEQ ID NO: 5924; WAN0249FQ; Start 8; Stop 32
ttctcctcttactagtagtttgcaa

SEQ ID NO: 425458 - DNA, 25 bp, Artificial
  probe
  misc_feature (1)..(25): SEQ ID NO: 5924; WAN0249FQ; Start 7; Stop 31
tttctcctcttactagtagtttgca

SEQ ID NO: 425459 - DNA, 25 bp, Artificial
  probe
  misc_feature (1)..(25): SEQ ID NO: 5924; WAN0249FQ; Start 54; Stop 78
atgatacaaagagcgtaacagcacg

SEQ ID NO: 425460 - DNA, 25 bp, Artificial
  probe
  misc_feature (1)..(25): SEQ ID NO: 5924; WAN0249FQ; Start 40; Stop 64
ttgctagttaatacatgatacaaag

SEQ ID NO: 425461 - DNA, 25 bp, Artificial
  probe
  misc_feature (1)..(25): SEQ ID NO: 5924; WAN0249FQ; Start 39; Stop 63
cttgctagttaatacatgatacaaa

SEQ ID NO: 425462 - DNA, 25 bp, Artificial
  probe
  misc_feature (1)..(25): SEQ ID NO: 5924; WAN0249FQ; Start 56; Stop 80
gatacaaagagcgtaacagcacgag

SEQ ID NO: 425463 - DNA, 25 bp, Artificial
  probe
  misc_feature (1)..(25): SEQ ID NO: 5924; WAN0249FQ; Start 13; Stop 37
ctcttactagtagtttgcaagttgc

SEQ ID NO: 425464 - DNA, 25 bp, Artificial
  probe
  misc_feature (1)..(25): SEQ ID NO: 5924; WAN0249FQ; Start 55; Stop 79
tgatacaaagagcgtaacagcacga

SEQ ID NO: 425465 - DNA, 25 bp, Artificial
  probe
  misc_feature (1)..(25): SEQ ID NO: 5924; WAN0249FQ; Start 6; Stop 30
ttttctcctcttactagtagtttgc

SEQ ID NO: 425466 - DNA, 25 bp, Artificial
  probe
  misc_feature (1)..(25): SEQ ID NO: 5925; WAN0249EP; Start 29; Stop 53
gataatcttcaccaactccctattt

SEQ ID NO: 425467 - DNA, 25 bp, Artificial
  probe
  misc_feature (1)..(25): SEQ ID NO: 5925; WAN0249EP; Start 28; Stop 52
ggataatcttcaccaactccctatt

SEQ ID NO: 425468 - DNA, 25 bp, Artificial
  probe
  misc_feature (1)..(25): SEQ ID NO: 5925; WAN0249EP; Start 24; Stop 48
taaaggataatcttcaccaactccc

SEQ ID NO: 425469 - DNA, 25 bp, Artificial
  probe
  misc_feature (1)..(25): SEQ ID NO: 5925; WAN0249EP; Start 27; Stop 51
aggataatcttcaccaactccctat

SEQ ID NO: 425470 - DNA, 25 bp, Artificial
  probe
  misc_feature (1)..(25): SEQ ID NO: 5925; WAN0249EP; Start 26; Stop 50
aaggataatcttcaccaactcccta

SEQ ID NO: 425471 - DNA, 25 bp, Artificial
  probe
  misc_feature (1)..(25): SEQ ID NO: 5925; WAN0249EP; Start 23; Stop 47
gtaaaggataatcttcaccaactcc

SEQ ID NO: 425472 - DNA, 25 bp, Artificial
  probe
  misc_feature (1)..(25): SEQ ID NO: 5925; WAN0249EP; Start 22; Stop 46
ggtaaaggataatcttcaccaactc

SEQ ID NO: 425473 - DNA, 25 bp, Artificial
  probe
  misc_feature (1)..(25): SEQ ID NO: 5925; WAN0249EP; Start 25; Stop 49
aaaggataatcttcaccaactccct

SEQ ID NO: 425474 - DNA, 25 bp, Artificial
  probe
  misc_feature (1)..(25): SEQ ID NO: 5925; WAN0249EP; Start 30; Stop 54
ataatcttcaccaactccctatttt

SEQ ID NO: 425475 - DNA, 25 bp, Artificial
  probe
  misc_feature (1)..(25): SEQ ID NO: 5925; WAN0249EP; Start 21; Stop 45
tggtaaaggataatcttcaccaact

SEQ ID NO: 425476 - DNA, 25 bp, Artificial
  probe
  misc_feature (1)..(25): SEQ ID NO: 5925; WAN0249EP; Start 20; Stop 44
ctggtaaaggataatcttcaccaac

SEQ ID NO: 425477 - DNA, 25 bp, Artificial
  probe
  misc_feature (1)..(25): SEQ ID NO: 5925; WAN0249EP; Start 19; Stop 43
gctggtaaaggataatcttcaccaa

SEQ ID NO: 425478 - DNA, 25 bp, Artificial
  probe
  misc_feature (1)..(25): SEQ ID NO: 5925; WAN0249EP; Start 16; Stop 40
ggcgctggtaaaggataatcttcac

SEQ ID NO: 425479 - DNA, 25 bp, Artificial
  probe
  misc_feature (1)..(25): SEQ ID NO: 5925; WAN0249EP; Start 18; Stop 42
cgctggtaaaggataatcttcacca

SEQ ID NO: 425480 - DNA, 25 bp, Artificial
  probe
  misc_feature (1)..(25): SEQ ID NO: 5925; WAN0249EP; Start 12; Stop 36
aaagggcgctggtaaaggataatct

SEQ ID NO: 425481 - DNA, 25 bp, Artificial
  probe
  misc_feature (1)..(25): SEQ ID NO: 5925; WAN0249EP; Start 13; Stop 37
aagggcgctggtaaaggataatctt

SEQ ID NO: 425482 - DNA, 25 bp, Artificial
  probe
  misc_feature (1)..(25): SEQ ID NO: 5925; WAN0249EP; Start 17; Stop 41
gcgctggtaaaggataatcttcacc

SEQ ID NO: 425483 - DNA, 25 bp, Artificial
  probe
  misc_feature (1)..(25): SEQ ID NO: 5925; WAN0249EP; Start 14; Stop 38
agggcgctggtaaaggataatcttc

SEQ ID NO: 425484 - DNA, 25 bp, Artificial
  probe
  misc_feature (1)..(25): SEQ ID NO: 5925; WAN0249EP; Start 15; Stop 39
gggcgctggtaaaggataatcttca

SEQ ID NO: 425485 - DNA, 25 bp, Artificial
  probe
  misc_feature (1)..(25): SEQ ID NO: 5925; WAN0249EP; Start 11; Stop 35
aaaagggcgctggtaaaggataatc

SEQ ID NO: 425486 - DNA, 25 bp, Artificial
  probe
  misc_feature (1)..(25): SEQ ID NO: 5926; WAN024AH9; Start 302; Stop 326
tggacttattagcagatgattcact

SEQ ID NO: 425487 - DNA, 25 bp, Artificial
  probe
  misc_feature (1)..(25): SEQ ID NO: 5926; WAN024AH9; Start 313; Stop 337
gcagatgattcactagcaagagata

SEQ ID NO: 425488 - DNA, 25 bp, Artificial
  probe
  misc_feature (1)..(25): SEQ ID NO: 5926; WAN024AH9; Start 309; Stop 333
attagcagatgattcactagcaaga

SEQ ID NO: 425489 - DNA, 25 bp, Artificial
  probe
  misc_feature (1)..(25): SEQ ID NO: 5926; WAN024AH9; Start 310; Stop 334
ttagcagatgattcactagcaagag

SEQ ID NO: 425490 - DNA, 25 bp, Artificial
  probe
  misc_feature (1)..(25): SEQ ID NO: 5926; WAN024AH9; Start 301; Stop 325
atggacttattagcagatgattcac

SEQ ID NO: 425491 - DNA, 25 bp, Artificial
  probe
  misc_feature (1)..(25): SEQ ID NO: 5926; WAN024AH9; Start 251; Stop 275
gagagttggatacttggcttctaag

SEQ ID NO: 425492 - DNA, 25 bp, Artificial
  probe
  misc_feature (1)..(25): SEQ ID NO: 5926; WAN024AH9; Start 311; Stop 335
tagcagatgattcactagcaagaga

SEQ ID NO: 425493 - DNA, 25 bp, Artificial
  probe
  misc_feature (1)..(25): SEQ ID NO: 5926; WAN024AH9; Start 308; Stop 332
tattagcagatgattcactagcaag

SEQ ID NO: 425494 - DNA, 25 bp, Artificial
  probe
  misc_feature (1)..(25): SEQ ID NO: 5926; WAN024AH9; Start 306; Stop 330
cttattagcagatgattcactagca

SEQ ID NO: 425495 - DNA, 25 bp, Artificial
  probe
  misc_feature (1)..(25): SEQ ID NO: 5926; WAN024AH9; Start 305; Stop 329
acttattagcagatgattcactagc

SEQ ID NO: 425496 - DNA, 25 bp, Artificial
  probe
  misc_feature (1)..(25): SEQ ID NO: 5926; WAN024AH9; Start 312; Stop 336
agcagatgattcactagcaagagat

SEQ ID NO: 425497 - DNA, 25 bp, Artificial
  probe
  misc_feature (1)..(25): SEQ ID NO: 5926; WAN024AH9; Start 303; Stop 327
ggacttattagcagatgattcacta

SEQ ID NO: 425498 - DNA, 25 bp, Artificial
  probe
  misc_feature (1)..(25): SEQ ID NO: 5926; WAN024AH9; Start 307; Stop 331
ttattagcagatgattcactagcaa

SEQ ID NO: 425499 - DNA, 25 bp, Artificial
  probe
  misc_feature (1)..(25): SEQ ID NO: 5926; WAN024AH9; Start 250; Stop 274
ggagagttggatacttggcttctaa

SEQ ID NO: 425500 - DNA, 25 bp, Artificial
  probe
  misc_feature (1)..(25): SEQ ID NO: 5926; WAN024AH9; Start 314; Stop 338
cagatgattcactagcaagagatat

SEQ ID NO: 425501 - DNA, 25 bp, Artificial
  probe
  misc_feature (1)..(25): SEQ ID NO: 5926; WAN024AH9; Start 243; Stop 267
gagagttggagagttggatacttgg

SEQ ID NO: 425502 - DNA, 25 bp, Artificial
  probe
  misc_feature (1)..(25): SEQ ID NO: 5926; WAN024AH9; Start 300; Stop 324
tatggacttattagcagatgattca

SEQ ID NO: 425503 - DNA, 25 bp, Artificial
  probe
  misc_feature (1)..(25): SEQ ID NO: 5926; WAN024AH9; Start 239; Stop 263
gaacgagagttggagagttggatac

SEQ ID NO: 425504 - DNA, 25 bp, Artificial
  probe
  misc_feature (1)..(25): SEQ ID NO: 5926; WAN024AH9; Start 163; Stop 187
ttgaaagatgctatccgtgaatact

SEQ ID NO: 425505 - DNA, 25 bp, Artificial
  probe
  misc_feature (1)..(25): SEQ ID NO: 5926; WAN024AH9; Start 157; Stop 181
aaatgtttgaaagatgctatccgtg

SEQ ID NO: 425506 - DNA, 25 bp, Artificial
  probe
  misc_feature (1)..(25): SEQ ID NO: 5926; WAN024AH9; Start 162; Stop 186
tttgaaagatgctatccgtgaatac

SEQ ID NO: 425507 - DNA, 25 bp, Artificial
  probe
  misc_feature (1)..(25): SEQ ID NO: 5926; WAN024AH9; Start 161; Stop 185
gtttgaaagatgctatccgtgaata

SEQ ID NO: 425508 - DNA, 25 bp, Artificial
  probe
  misc_feature (1)..(25): SEQ ID NO: 5926; WAN024AH9; Start 164; Stop 188
tgaaagatgctatccgtgaatacta

SEQ ID NO: 425509 - DNA, 25 bp, Artificial
  probe
  misc_feature (1)..(25): SEQ ID NO: 5926; WAN024AH9; Start 156; Stop 180
taaatgtttgaaagatgctatccgt

SEQ ID NO: 425510 - DNA, 25 bp, Artificial
  probe
  misc_feature (1)..(25): SEQ ID NO: 5926; WAN024AH9; Start 242; Stop 266
cgagagttggagagttggatacttg

SEQ ID NO: 425511 - DNA, 25 bp, Artificial
  probe
  misc_feature (1)..(25): SEQ ID NO: 5926; WAN024AH9; Start 293; Stop 317
agcgaaatatggacttattagcaga

SEQ ID NO: 425512 - DNA, 25 bp, Artificial
  probe
  misc_feature (1)..(25): SEQ ID NO: 5926; WAN024AH9; Start 160; Stop 184
tgtttgaaagatgctatccgtgaat

SEQ ID NO: 425513 - DNA, 25 bp, Artificial
  probe
  misc_feature (1)..(25): SEQ ID NO: 5926; WAN024AH9; Start 159; Stop 183
atgtttgaaagatgctatccgtgaa

SEQ ID NO: 425514 - DNA, 25 bp, Artificial
  probe
  misc_feature (1)..(25): SEQ ID NO: 5926; WAN024AH9; Start 158; Stop 182
aatgtttgaaagatgctatccgtga

SEQ ID NO: 425515 - DNA, 25 bp, Artificial
  probe
  misc_feature (1)..(25): SEQ ID NO: 5926; WAN024AH9; Start 291; Stop 315
caagcgaaatatggacttattagca

SEQ ID NO: 425516 - DNA, 25 bp, Artificial
  probe
  misc_feature (1)..(25): SEQ ID NO: 5926; WAN024AH9; Start 292; Stop 316
aagcgaaatatggacttattagcag

SEQ ID NO: 425517 - DNA, 25 bp, Artificial
  probe
  misc_feature (1)..(25): SEQ ID NO: 5926; WAN024AH9; Start 249; Stop 273
tggagagttggatacttggcttcta

SEQ ID NO: 425518 - DNA, 25 bp, Artificial
  probe
  misc_feature (1)..(25): SEQ ID NO: 5926; WAN024AH9; Start 238; Stop 262
tgaacgagagttggagagttggata

SEQ ID NO: 425519 - DNA, 25 bp, Artificial
  probe
  misc_feature (1)..(25): SEQ ID NO: 5927; WAN024ABX; Start 33; Stop 57
gtgtgcccaaaatttagagaagtaa

SEQ ID NO: 425520 - DNA, 25 bp, Artificial
  probe
  misc_feature (1)..(25): SEQ ID NO: 5927; WAN024ABX; Start 32; Stop 56
agtgtgcccaaaatttagagaagta

SEQ ID NO: 425521 - DNA, 25 bp, Artificial
  probe
  misc_feature (1)..(25): SEQ ID NO: 5927; WAN024ABX; Start 31; Stop 55
tagtgtgcccaaaatttagagaagt

SEQ ID NO: 425522 - DNA, 25 bp, Artificial
  probe
  misc_feature (1)..(25): SEQ ID NO: 5927; WAN024ABX; Start 30; Stop 54
ttagtgtgcccaaaatttagagaag

SEQ ID NO: 425523 - DNA, 25 bp, Artificial
  probe
  misc_feature (1)..(25): SEQ ID NO: 5927; WAN024ABX; Start 29; Stop 53
tttagtgtgcccaaaatttagagaa

SEQ ID NO: 425524 - DNA, 25 bp, Artificial
  probe
  misc_feature (1)..(25): SEQ ID NO: 5927; WAN024ABX; Start 34; Stop 58
tgtgcccaaaatttagagaagtaat

SEQ ID NO: 425525 - DNA, 25 bp, Artificial
  probe
  misc_feature (1)..(25): SEQ ID NO: 5927; WAN024ABX; Start 36; Stop 60
tgcccaaaatttagagaagtaatca

SEQ ID NO: 425526 - DNA, 25 bp, Artificial
  probe
  misc_feature (1)..(25): SEQ ID NO: 5927; WAN024ABX; Start 35; Stop 59
gtgcccaaaatttagagaagtaatc

SEQ ID NO: 425527 - DNA, 25 bp, Artificial
  probe
  misc_feature (1)..(25): SEQ ID NO: 5927; WAN024ABX; Start 37; Stop 61
gcccaaaatttagagaagtaatcaa

SEQ ID NO: 425528 - DNA, 25 bp, Artificial
  probe
  misc_feature (1)..(25): SEQ ID NO: 5927; WAN024ABX; Start 28; Stop 52
ttttagtgtgcccaaaatttagaga

SEQ ID NO: 425529 - DNA, 25 bp, Artificial
  probe
  misc_feature (1)..(25): SEQ ID NO: 5927; WAN024ABX; Start 5; Stop 29
aaagtttaggtgtcaagacctcttt

SEQ ID NO: 425530 - DNA, 25 bp, Artificial
  probe
  misc_feature (1)..(25): SEQ ID NO: 5927; WAN024ABX; Start 4; Stop 28
taaagtttaggtgtcaagacctctt

SEQ ID NO: 425531 - DNA, 25 bp, Artificial
  probe
  misc_feature (1)..(25): SEQ ID NO: 5927; WAN024ABX; Start 3; Stop 27
ttaaagtttaggtgtcaagacctct

SEQ ID NO: 425532 - DNA, 25 bp, Artificial
  probe
  misc_feature (1)..(25): SEQ ID NO: 5927; WAN024ABX; Start 2; Stop 26
tttaaagtttaggtgtcaagacctc

SEQ ID NO: 425533 - DNA, 25 bp, Artificial
  probe
  misc_feature (1)..(25): SEQ ID NO: 5927; WAN024ABX; Start 6; Stop 30
aagtttaggtgtcaagacctctttt

SEQ ID NO: 425534 - DNA, 25 bp, Artificial
  probe
  misc_feature (1)..(25): SEQ ID NO: 5927; WAN024ABX; Start 1; Stop 25
ttttaaagtttaggtgtcaagacct

SEQ ID NO: 425535 - DNA, 25 bp, Artificial
  probe
  misc_feature (1)..(25): SEQ ID NO: 5928; WAN024AQC; Start 3; Stop 27
ttaaccctttctgtgcaaattatgg

SEQ ID NO: 425536 - DNA, 25 bp, Artificial
  probe
  misc_feature (1)..(25): SEQ ID NO: 5928; WAN024AQC; Start 7; Stop 31
ccctttctgtgcaaattatggtata

SEQ ID NO: 425537 - DNA, 25 bp, Artificial
  probe
  misc_feature (1)..(25): SEQ ID NO: 5928; WAN024AQC; Start 2; Stop 26
tttaaccctttctgtgcaaattatg

SEQ ID NO: 425538 - DNA, 25 bp, Artificial
  probe
  misc_feature (1)..(25): SEQ ID NO: 5928; WAN024AQC; Start 6; Stop 30
accctttctgtgcaaattatggtat

SEQ ID NO: 425539 - DNA, 25 bp, Artificial
  probe
  misc_feature (1)..(25): SEQ ID NO: 5928; WAN024AQC; Start 5; Stop 29
aaccctttctgtgcaaattatggta

SEQ ID NO: 425540 - DNA, 25 bp, Artificial
  probe
  misc_feature (1)..(25): SEQ ID NO: 5928; WAN024AQC; Start 4; Stop 28
taaccctttctgtgcaaattatggt

SEQ ID NO: 425541 - DNA, 25 bp, Artificial
  probe
  misc_feature (1)..(25): SEQ ID NO: 5928; WAN024AQC; Start 8; Stop 32
cctttctgtgcaaattatggtataa

SEQ ID NO: 425542 - DNA, 25 bp, Artificial
  probe
  misc_feature (1)..(25): SEQ ID NO: 5928; WAN024AQC; Start 1; Stop 25
ttttaaccctttctgtgcaaattat

SEQ ID NO: 425543 - DNA, 25 bp, Artificial
  probe
  misc_feature (1)..(25): SEQ ID NO: 5928; WAN024AQC; Start 9; Stop 33
ctttctgtgcaaattatggtataat

SEQ ID NO: 425544 - DNA, 25 bp, Artificial
  probe
  misc_feature (1)..(25): SEQ ID NO: 5928; WAN024AQC; Start 31; Stop 55
aataaagtgatgttattgtaccaat

SEQ ID NO: 425545 - DNA, 25 bp, Artificial
  probe
  misc_feature (1)..(25): SEQ ID NO: 5928; WAN024AQC; Start 14; Stop 38
tgtgcaaattatggtataataaagt

SEQ ID NO: 425546 - DNA, 25 bp, Artificial
  probe
  misc_feature (1)..(25): SEQ ID NO: 5929; WAN024A28; Start 89; Stop 113
aaattatgctatgatgggagaaact

SEQ ID NO: 425547 - DNA, 25 bp, Artificial
  probe
  misc_feature (1)..(25): SEQ ID NO: 5929; WAN024A28; Start 91; Stop 115
attatgctatgatgggagaaactag

SEQ ID NO: 425548 - DNA, 25 bp, Artificial
  probe
  misc_feature (1)..(25): SEQ ID NO: 5929; WAN024A28; Start 90; Stop 114
aattatgctatgatgggagaaacta

SEQ ID NO: 425549 - DNA, 25 bp, Artificial
  probe
  misc_feature (1)..(25): SEQ ID NO: 5929; WAN024A28; Start 85; Stop 109
acttaaattatgctatgatgggaga

SEQ ID NO: 425550 - DNA, 25 bp, Artificial
  probe
  misc_feature (1)..(25): SEQ ID NO: 5929; WAN024A28; Start 88; Stop 112
taaattatgctatgatgggagaaac

SEQ ID NO: 425551 - DNA, 25 bp, Artificial
  probe
  misc_feature (1)..(25): SEQ ID NO: 5929; WAN024A28; Start 86; Stop 110
cttaaattatgctatgatgggagaa

SEQ ID NO: 425552 - DNA, 25 bp, Artificial
  probe
  misc_feature (1)..(25): SEQ ID NO: 5929; WAN024A28; Start 93; Stop 117
tatgctatgatgggagaaactagtc

SEQ ID NO: 425553 - DNA, 25 bp, Artificial
  probe
  misc_feature (1)..(25): SEQ ID NO: 5929; WAN024A28; Start 92; Stop 116
ttatgctatgatgggagaaactagt

SEQ ID NO: 425554 - DNA, 25 bp, Artificial
  probe
  misc_feature (1)..(25): SEQ ID NO: 5929; WAN024A28; Start 87; Stop 111
ttaaattatgctatgatgggagaaa

SEQ ID NO: 425555 - DNA, 25 bp, Artificial
  probe
  misc_feature (1)..(25): SEQ ID NO: 5929; WAN024A28; Start 105; Stop 129
ggagaaactagtcagaaatgaggaa

SEQ ID NO: 425556 - DNA, 25 bp, Artificial
  probe
  misc_feature (1)..(25): SEQ ID NO: 5929; WAN024A28; Start 102; Stop 126
atgggagaaactagtcagaaatgag

SEQ ID NO: 425557 - DNA, 25 bp, Artificial
  probe
  misc_feature (1)..(25): SEQ ID NO: 5929; WAN024A28; Start 101; Stop 125
gatgggagaaactagtcagaaatga

SEQ ID NO: 425558 - DNA, 25 bp, Artificial
  probe
  misc_feature (1)..(25): SEQ ID NO: 5929; WAN024A28; Start 100; Stop 124
tgatgggagaaactagtcagaaatg

SEQ ID NO: 425559 - DNA, 25 bp, Artificial
  probe
  misc_feature (1)..(25): SEQ ID NO: 5929; WAN024A28; Start 99; Stop 123
atgatgggagaaactagtcagaaat

SEQ ID NO: 425560 - DNA, 25 bp, Artificial
  probe
  misc_feature (1)..(25): SEQ ID NO: 5929; WAN024A28; Start 97; Stop 121
ctatgatgggagaaactagtcagaa

SEQ ID NO: 425561 - DNA, 25 bp, Artificial
  probe
  misc_feature (1)..(25): SEQ ID NO: 5929; WAN024A28; Start 84; Stop 108
tacttaaattatgctatgatgggag

SEQ ID NO: 425562 - DNA, 25 bp, Artificial
  probe
  misc_feature (1)..(25): SEQ ID NO: 5929; WAN024A28; Start 52; Stop 76
acacaaagtcaagttttaactgctt

SEQ ID NO: 425563 - DNA, 25 bp, Artificial
  probe
  misc_feature (1)..(25): SEQ ID NO: 5929; WAN024A28; Start 51; Stop 75
aacacaaagtcaagttttaactgct

SEQ ID NO: 425564 - DNA, 25 bp, Artificial
  probe
  misc_feature (1)..(25): SEQ ID NO: 5929; WAN024A28; Start 94; Stop 118
atgctatgatgggagaaactagtca

SEQ ID NO: 425565 - DNA, 25 bp, Artificial
  probe
  misc_feature (1)..(25): SEQ ID NO: 5929; WAN024A28; Start 98; Stop 122
tatgatgggagaaactagtcagaaa

SEQ ID NO: 425566 - DNA, 25 bp, Artificial
  probe
  misc_feature (1)..(25): SEQ ID NO: 5929; WAN024A28; Start 96; Stop 120
gctatgatgggagaaactagtcaga

SEQ ID NO: 425567 - DNA, 25 bp, Artificial
  probe
  misc_feature (1)..(25): SEQ ID NO: 5929; WAN024A28; Start 106; Stop 130
gagaaactagtcagaaatgaggaaa

SEQ ID NO: 425568 - DNA, 25 bp, Artificial
  probe
  misc_feature (1)..(25): SEQ ID NO: 5929; WAN024A28; Start 104; Stop 128
gggagaaactagtcagaaatgagga

SEQ ID NO: 425569 - DNA, 25 bp, Artificial
  probe
  misc_feature (1)..(25): SEQ ID NO: 5929; WAN024A28; Start 95; Stop 119
tgctatgatgggagaaactagtcag

SEQ ID NO: 425570 - DNA, 25 bp, Artificial
  probe
  misc_feature (1)..(25): SEQ ID NO: 5929; WAN024A28; Start 103; Stop 127
tgggagaaactagtcagaaatgagg

SEQ ID NO: 425571 - DNA, 25 bp, Artificial
  probe
  misc_feature (1)..(25): SEQ ID NO: 5929; WAN024A28; Start 83; Stop 107
atacttaaattatgctatgatggga

SEQ ID NO: 425572 - DNA, 25 bp, Artificial
  probe
  misc_feature (1)..(25): SEQ ID NO: 5929; WAN024A28; Start 50; Stop 74
aaacacaaagtcaagttttaactgc

SEQ ID NO: 425573 - DNA, 25 bp, Artificial
  probe
  misc_feature (1)..(25): SEQ ID NO: 5929; WAN024A28; Start 69; Stop 93
aactgcttgtagaaatacttaaatt

SEQ ID NO: 425574 - DNA, 25 bp, Artificial
  probe
  misc_feature (1)..(25): SEQ ID NO: 5929; WAN024A28; Start 82; Stop 106
aatacttaaattatgctatgatggg

SEQ ID NO: 425575 - DNA, 25 bp, Artificial
  probe
  misc_feature (1)..(25): SEQ ID NO: 5929; WAN024A28; Start 73; Stop 97
gcttgtagaaatacttaaattatgc

SEQ ID NO: 425576 - DNA, 25 bp, Artificial
  probe
  misc_feature (1)..(25): SEQ ID NO: 5929; WAN024A28; Start 63; Stop 87
agttttaactgcttgtagaaatact

SEQ ID NO: 425577 - DNA, 25 bp, Artificial
  probe
  misc_feature (1)..(25): SEQ ID NO: 5929; WAN024A28; Start 64; Stop 88
gttttaactgcttgtagaaatactt

SEQ ID NO: 425578 - DNA, 25 bp, Artificial
  probe
  misc_feature (1)..(25): SEQ ID NO: 5929; WAN024A28; Start 54; Stop 78
acaaagtcaagttttaactgcttgt

SEQ ID NO: 425579 - DNA, 25 bp, Artificial
  probe
  misc_feature (1)..(25): SEQ ID NO: 5930; WAN0249LW; Start 50; Stop 74
cttcagatccgtaaaacttaattga

SEQ ID NO: 425580 - DNA, 25 bp, Artificial
  probe
  misc_feature (1)..(25): SEQ ID NO: 5930; WAN0249LW; Start 52; Stop 76
tcagatccgtaaaacttaattgaat

SEQ ID NO: 425581 - DNA, 25 bp, Artificial
  probe
  misc_feature (1)..(25): SEQ ID NO: 5930; WAN0249LW; Start 53; Stop 77
cagatccgtaaaacttaattgaatt

SEQ ID NO: 425582 - DNA, 25 bp, Artificial
  probe
  misc_feature (1)..(25): SEQ ID NO: 5930; WAN0249LW; Start 51; Stop 75
ttcagatccgtaaaacttaattgaa

SEQ ID NO: 425583 - DNA, 25 bp, Artificial
  probe
  misc_feature (1)..(25): SEQ ID NO: 5930; WAN0249LW; Start 56; Stop 80
atccgtaaaacttaattgaattact

SEQ ID NO: 425584 - DNA, 25 bp, Artificial
  probe
  misc_feature (1)..(25): SEQ ID NO: 5930; WAN0249LW; Start 55; Stop 79
gatccgtaaaacttaattgaattac

SEQ ID NO: 425585 - DNA, 25 bp, Artificial
  probe
  misc_feature (1)..(25): SEQ ID NO: 5931; WAN024AD3; Start 29; Stop 53
actattcactcaaatcatattcact

SEQ ID NO: 425586 - DNA, 25 bp, Artificial
  probe
  misc_feature (1)..(25): SEQ ID NO: 5931; WAN024AD3; Start 30; Stop 54
ctattcactcaaatcatattcactt

SEQ ID NO: 425587 - DNA, 25 bp, Artificial
  probe
  misc_feature (1)..(25): SEQ ID NO: 5932; WAN0249FT; Start 133; Stop 157
cgcattctattgagtgtgataaagg

SEQ ID NO: 425588 - DNA, 25 bp, Artificial
  probe
  misc_feature (1)..(25): SEQ ID NO: 5932; WAN0249FT; Start 127; Stop 151
tctaaacgcattctattgagtgtga

SEQ ID NO: 425589 - DNA, 25 bp, Artificial
  probe
  misc_feature (1)..(25): SEQ ID NO: 5932; WAN0249FT; Start 132; Stop 156
acgcattctattgagtgtgataaag

SEQ ID NO: 425590 - DNA, 25 bp, Artificial
  probe
  misc_feature (1)..(25): SEQ ID NO: 5932; WAN0249FT; Start 128; Stop 152
ctaaacgcattctattgagtgtgat

SEQ ID NO: 425591 - DNA, 25 bp, Artificial
  probe
  misc_feature (1)..(25): SEQ ID NO: 5932; WAN0249FT; Start 126; Stop 150
atctaaacgcattctattgagtgtg

SEQ ID NO: 425592 - DNA, 25 bp, Artificial
  probe
  misc_feature (1)..(25): SEQ ID NO: 5932; WAN0249FT; Start 131; Stop 155
aacgcattctattgagtgtgataaa

SEQ ID NO: 425593 - DNA, 25 bp, Artificial
  probe
  misc_feature (1)..(25): SEQ ID NO: 5932; WAN0249FT; Start 130; Stop 154
aaacgcattctattgagtgtgataa

SEQ ID NO: 425594 - DNA, 25 bp, Artificial
  probe
  misc_feature (1)..(25): SEQ ID NO: 5932; WAN0249FT; Start 134; Stop 158
gcattctattgagtgtgataaagga

SEQ ID NO: 425595 - DNA, 25 bp, Artificial
  probe
  misc_feature (1)..(25): SEQ ID NO: 5932; WAN0249FT; Start 125; Stop 149
aatctaaacgcattctattgagtgt

SEQ ID NO: 425596 - DNA, 25 bp, Artificial
  probe
  misc_feature (1)..(25): SEQ ID NO: 5932; WAN0249FT; Start 5; Stop 29
agataataaaccgtctaccaacagc

SEQ ID NO: 425597 - DNA, 25 bp, Artificial
  probe
  misc_feature (1)..(25): SEQ ID NO: 5932; WAN0249FT; Start 129; Stop 153
taaacgcattctattgagtgtgata

SEQ ID NO: 425598 - DNA, 25 bp, Artificial
  probe
  misc_feature (1)..(25): SEQ ID NO: 5932; WAN0249FT; Start 124; Stop 148
aaatctaaacgcattctattgagtg

SEQ ID NO: 425599 - DNA, 25 bp, Artificial
  probe
  misc_feature (1)..(25): SEQ ID NO: 5932; WAN0249FT; Start 123; Stop 147
gaaatctaaacgcattctattgagt

SEQ ID NO: 425600 - DNA, 25 bp, Artificial
  probe
  misc_feature (1)..(25): SEQ ID NO: 5932; WAN0249FT; Start 122; Stop 146
tgaaatctaaacgcattctattgag

SEQ ID NO: 425601 - DNA, 25 bp, Artificial
  probe
  misc_feature (1)..(25): SEQ ID NO: 5932; WAN0249FT; Start 8; Stop 32
taataaaccgtctaccaacagctat

SEQ ID NO: 425602 - DNA, 25 bp, Artificial
  probe
  misc_feature (1)..(25): SEQ ID NO: 5932; WAN0249FT; Start 7; Stop 31
ataataaaccgtctaccaacagcta

SEQ ID NO: 425603 - DNA, 25 bp, Artificial
  probe
  misc_feature (1)..(25): SEQ ID NO: 5932; WAN0249FT; Start 6; Stop 30
gataataaaccgtctaccaacagct

SEQ ID NO: 425604 - DNA, 25 bp, Artificial
  probe
  misc_feature (1)..(25): SEQ ID NO: 5932; WAN0249FT; Start 9; Stop 33
aataaaccgtctaccaacagctatg

SEQ ID NO: 425605 - DNA, 25 bp, Artificial
  probe
  misc_feature (1)..(25): SEQ ID NO: 5932; WAN0249FT; Start 135; Stop 159
cattctattgagtgtgataaaggag

SEQ ID NO: 425606 - DNA, 25 bp, Artificial
  probe
  misc_feature (1)..(25): SEQ ID NO: 5932; WAN0249FT; Start 121; Stop 145
ttgaaatctaaacgcattctattga

SEQ ID NO: 425607 - DNA, 25 bp, Artificial
  probe
  misc_feature (1)..(25): SEQ ID NO: 5932; WAN0249FT; Start 10; Stop 34
ataaaccgtctaccaacagctatga

SEQ ID NO: 425608 - DNA, 25 bp, Artificial
  probe
  misc_feature (1)..(25): SEQ ID NO: 5932; WAN0249FT; Start 138; Stop 162
tctattgagtgtgataaaggagaat

SEQ ID NO: 425609 - DNA, 25 bp, Artificial
  probe
  misc_feature (1)..(25): SEQ ID NO: 5932; WAN0249FT; Start 136; Stop 160
attctattgagtgtgataaaggaga

SEQ ID NO: 425610 - DNA, 25 bp, Artificial
  probe
  misc_feature (1)..(25): SEQ ID NO: 5932; WAN0249FT; Start 11; Stop 35
taaaccgtctaccaacagctatgag

SEQ ID NO: 425611 - DNA, 25 bp, Artificial
  probe
  misc_feature (1)..(25): SEQ ID NO: 5932; WAN0249FT; Start 4; Stop 28
tagataataaaccgtctaccaacag

SEQ ID NO: 425612 - DNA, 25 bp, Artificial
  probe
  misc_feature (1)..(25): SEQ ID NO: 5932; WAN0249FT; Start 3; Stop 27
ttagataataaaccgtctaccaaca

SEQ ID NO: 425613 - DNA, 25 bp, Artificial
  probe
  misc_feature (1)..(25): SEQ ID NO: 5932; WAN0249FT; Start 139; Stop 163
ctattgagtgtgataaaggagaatt

SEQ ID NO: 425614 - DNA, 25 bp, Artificial
  probe
  misc_feature (1)..(25): SEQ ID NO: 5932; WAN0249FT; Start 120; Stop 144
attgaaatctaaacgcattctattg

SEQ ID NO: 425615 - DNA, 25 bp, Artificial
  probe
  misc_feature (1)..(25): SEQ ID NO: 5932; WAN0249FT; Start 45; Stop 69
taatagctttagtccggtcctcttt

SEQ ID NO: 425616 - DNA, 25 bp, Artificial
  probe
  misc_feature (1)..(25): SEQ ID NO: 5932; WAN0249FT; Start 140; Stop 164
tattgagtgtgataaaggagaattt

SEQ ID NO: 425617 - DNA, 25 bp, Artificial
  probe
  misc_feature (1)..(25): SEQ ID NO: 5932; WAN0249FT; Start 116; Stop 140
ttaaattgaaatctaaacgcattct

SEQ ID NO: 425618 - DNA, 25 bp, Artificial
  probe
  misc_feature (1)..(25): SEQ ID NO: 5932; WAN0249FT; Start 137; Stop 161
ttctattgagtgtgataaaggagaa

SEQ ID NO: 425619 - DNA, 25 bp, Artificial
  probe
  misc_feature (1)..(25): SEQ ID NO: 5932; WAN0249FT; Start 2; Stop 26
tttagataataaaccgtctaccaac

SEQ ID NO: 425620 - DNA, 25 bp, Artificial
  probe
  misc_feature (1)..(25): SEQ ID NO: 5933; WAN0249H2; Start 10; Stop 34
ttctcctttaaatgttgtaccacag

SEQ ID NO: 425621 - DNA, 25 bp, Artificial
  probe
  misc_feature (1)..(25): SEQ ID NO: 5933; WAN0249H2; Start 11; Stop 35
tctcctttaaatgttgtaccacagc

SEQ ID NO: 425622 - DNA, 25 bp, Artificial
  probe
  misc_feature (1)..(25): SEQ ID NO: 5933; WAN0249H2; Start 9; Stop 33
tttctcctttaaatgttgtaccaca

SEQ ID NO: 425623 - DNA, 25 bp, Artificial
  probe
  misc_feature (1)..(25): SEQ ID NO: 5933; WAN0249H2; Start 12; Stop 36
ctcctttaaatgttgtaccacagcg

SEQ ID NO: 425624 - DNA, 25 bp, Artificial
  probe
  misc_feature (1)..(25): SEQ ID NO: 5933; WAN0249H2; Start 65; Stop 89
ctggcggatttactagttgcttaag

SEQ ID NO: 425625 - DNA, 25 bp, Artificial
  probe
  misc_feature (1)..(25): SEQ ID NO: 5933; WAN0249H2; Start 13; Stop 37
tcctttaaatgttgtaccacagcgg

SEQ ID NO: 425626 - DNA, 25 bp, Artificial
  probe
  misc_feature (1)..(25): SEQ ID NO: 5933; WAN0249H2; Start 8; Stop 32
ttttctcctttaaatgttgtaccac

SEQ ID NO: 425627 - DNA, 25 bp, Artificial
  probe
  misc_feature (1)..(25): SEQ ID NO: 5933; WAN0249H2; Start 16; Stop 40
tttaaatgttgtaccacagcggctt

SEQ ID NO: 425628 - DNA, 25 bp, Artificial
  probe
  misc_feature (1)..(25): SEQ ID NO: 5933; WAN0249H2; Start 17; Stop 41
ttaaatgttgtaccacagcggcttg

SEQ ID NO: 425629 - DNA, 25 bp, Artificial
  probe
  misc_feature (1)..(25): SEQ ID NO: 5933; WAN0249H2; Start 64; Stop 88
gctggcggatttactagttgcttaa

SEQ ID NO: 425630 - DNA, 25 bp, Artificial
  probe
  misc_feature (1)..(25): SEQ ID NO: 5933; WAN0249H2; Start 15; Stop 39
ctttaaatgttgtaccacagcggct

SEQ ID NO: 425631 - DNA, 25 bp, Artificial
  probe
  misc_feature (1)..(25): SEQ ID NO: 5933; WAN0249H2; Start 7; Stop 31
attttctcctttaaatgttgtacca

SEQ ID NO: 425632 - DNA, 25 bp, Artificial
  probe
  misc_feature (1)..(25): SEQ ID NO: 5933; WAN0249H2; Start 14; Stop 38
cctttaaatgttgtaccacagcggc

SEQ ID NO: 425633 - DNA, 25 bp, Artificial
  probe
  misc_feature (1)..(25): SEQ ID NO: 5933; WAN0249H2; Start 63; Stop 87
agctggcggatttactagttgctta

SEQ ID NO: 425634 - DNA, 25 bp, Artificial
  probe
  misc_feature (1)..(25): SEQ ID NO: 5933; WAN0249H2; Start 6; Stop 30
tattttctcctttaaatgttgtacc

SEQ ID NO: 425635 - DNA, 25 bp, Artificial
  probe
  misc_feature (1)..(25): SEQ ID NO: 5934; WAN024CIV; Start 516; Stop 540
atcttgtcttcctatgcttcatctc

SEQ ID NO: 425636 - DNA, 25 bp, Artificial
  probe
  misc_feature (1)..(25): SEQ ID NO: 5934; WAN024CIV; Start 515; Stop 539
aatcttgtcttcctatgcttcatct

SEQ ID NO: 425637 - DNA, 25 bp, Artificial
  probe
  misc_feature (1)..(25): SEQ ID NO: 5934; WAN024CIV; Start 514; Stop 538
caatcttgtcttcctatgcttcatc

SEQ ID NO: 425638 - DNA, 25 bp, Artificial
  probe
  misc_feature (1)..(25): SEQ ID NO: 5934; WAN024CIV; Start 1018; Stop 1042
tacttggtctacttggtggtgtatt

SEQ ID NO: 425639 - DNA, 25 bp, Artificial
  probe
  misc_feature (1)..(25): SEQ ID NO: 5934; WAN024CIV; Start 909; Stop 933
caattcgtatctctagcagtaggtt

SEQ ID NO: 425640 - DNA, 25 bp, Artificial
  probe
  misc_feature (1)..(25): SEQ ID NO: 5934; WAN024CIV; Start 907; Stop 931
cacaattcgtatctctagcagtagg

SEQ ID NO: 425641 - DNA, 25 bp, Artificial
  probe
  misc_feature (1)..(25): SEQ ID NO: 5934; WAN024CIV; Start 519; Stop 543
ttgtcttcctatgcttcatctcaag

SEQ ID NO: 425642 - DNA, 25 bp, Artificial
  probe
  misc_feature (1)..(25): SEQ ID NO: 5934; WAN024CIV; Start 518; Stop 542
cttgtcttcctatgcttcatctcaa

SEQ ID NO: 425643 - DNA, 25 bp, Artificial
  probe
  misc_feature (1)..(25): SEQ ID NO: 5934; WAN024CIV; Start 908; Stop 932
acaattcgtatctctagcagtaggt

SEQ ID NO: 425644 - DNA, 25 bp, Artificial
  probe
  misc_feature (1)..(25): SEQ ID NO: 5934; WAN024CIV; Start 517; Stop 541
tcttgtcttcctatgcttcatctca

SEQ ID NO: 425645 - DNA, 25 bp, Artificial
  probe
  misc_feature (1)..(25): SEQ ID NO: 5934; WAN024CIV; Start 216; Stop 240
tcagtattgacaggaattgacatca

SEQ ID NO: 425646 - DNA, 25 bp, Artificial
  probe
  misc_feature (1)..(25): SEQ ID NO: 5934; WAN024CIV; Start 906; Stop 930
gcacaattcgtatctctagcagtag

SEQ ID NO: 425647 - DNA, 25 bp, Artificial
  probe
  misc_feature (1)..(25): SEQ ID NO: 5934; WAN024CIV; Start 215; Stop 239
atcagtattgacaggaattgacatc

SEQ ID NO: 425648 - DNA, 25 bp, Artificial
  probe
  misc_feature (1)..(25): SEQ ID NO: 5934; WAN024CIV; Start 834; Stop 858
gcaacttcatggacattggatattc

SEQ ID NO: 425649 - DNA, 25 bp, Artificial
  probe
  misc_feature (1)..(25): SEQ ID NO: 5934; WAN024CIV; Start 835; Stop 859
caacttcatggacattggatattca

SEQ ID NO: 425650 - DNA, 25 bp, Artificial
  probe
  misc_feature (1)..(25): SEQ ID NO: 5934; WAN024CIV; Start 1017; Stop 1041
gtacttggtctacttggtggtgtat

SEQ ID NO: 425651 - DNA, 25 bp, Artificial
  probe
  misc_feature (1)..(25): SEQ ID NO: 5934; WAN024CIV; Start 837; Stop 861
acttcatggacattggatattcaag

SEQ ID NO: 425652 - DNA, 25 bp, Artificial
  probe
  misc_feature (1)..(25): SEQ ID NO: 5934; WAN024CIV; Start 513; Stop 537
acaatcttgtcttcctatgcttcat

SEQ ID NO: 425653 - DNA, 25 bp, Artificial
  probe
  misc_feature (1)..(25): SEQ ID NO: 5934; WAN024CIV; Start 840; Stop 864
tcatggacattggatattcaagatg

SEQ ID NO: 425654 - DNA, 25 bp, Artificial
  probe
  misc_feature (1)..(25): SEQ ID NO: 5934; WAN024CIV; Start 838; Stop 862
cttcatggacattggatattcaaga

SEQ ID NO: 425655 - DNA, 25 bp, Artificial
  probe
  misc_feature (1)..(25): SEQ ID NO: 5934; WAN024CIV; Start 512; Stop 536
tacaatcttgtcttcctatgcttca

SEQ ID NO: 425656 - DNA, 25 bp, Artificial
  probe
  misc_feature (1)..(25): SEQ ID NO: 5934; WAN024CIV; Start 836; Stop 860
aacttcatggacattggatattcaa

SEQ ID NO: 425657 - DNA, 25 bp, Artificial
  probe
  misc_feature (1)..(25): SEQ ID NO: 5934; WAN024CIV; Start 213; Stop 237
ttatcagtattgacaggaattgaca

SEQ ID NO: 425658 - DNA, 25 bp, Artificial
  probe
  misc_feature (1)..(25): SEQ ID NO: 5934; WAN024CIV; Start 177; Stop 201
cgtatgtctatcattatgtacctcc

SEQ ID NO: 425659 - DNA, 25 bp, Artificial
  probe
  misc_feature (1)..(25): SEQ ID NO: 5934; WAN024CIV; Start 511; Stop 535
ttacaatcttgtcttcctatgcttc

SEQ ID NO: 425660 - DNA, 25 bp, Artificial
  probe
  misc_feature (1)..(25): SEQ ID NO: 5934; WAN024CIV; Start 214; Stop 238
tatcagtattgacaggaattgacat

SEQ ID NO: 425661 - DNA, 25 bp, Artificial
  probe
  misc_feature (1)..(25): SEQ ID NO: 5934; WAN024CIV; Start 839; Stop 863
ttcatggacattggatattcaagat

SEQ ID NO: 425662 - DNA, 25 bp, Artificial
  probe
  misc_feature (1)..(25): SEQ ID NO: 5934; WAN024CIV; Start 736; Stop 760
ttattgcataccagttaccagtagg

SEQ ID NO: 425663 - DNA, 25 bp, Artificial
  probe
  misc_feature (1)..(25): SEQ ID NO: 5934; WAN024CIV; Start 701; Stop 725
tagcaatatccctcaagaccaaatc

SEQ ID NO: 425664 - DNA, 25 bp, Artificial
  probe
  misc_feature (1)..(25): SEQ ID NO: 5934; WAN024CIV; Start 132; Stop 156
cttcgtattatttcagcactcttgt

SEQ ID NO: 425665 - DNA, 25 bp, Artificial
  probe
  misc_feature (1)..(25): SEQ ID NO: 5934; WAN024CIV; Start 131; Stop 155
acttcgtattatttcagcactcttg

SEQ ID NO: 425666 - DNA, 25 bp, Artificial
  probe
  misc_feature (1)..(25): SEQ ID NO: 5934; WAN024CIV; Start 130; Stop 154
cacttcgtattatttcagcactctt

SEQ ID NO: 425667 - DNA, 25 bp, Artificial
  probe
  misc_feature (1)..(25): SEQ ID NO: 5934; WAN024CIV; Start 126; Stop 150
aaagcacttcgtattatttcagcac

SEQ ID NO: 425668 - DNA, 25 bp, Artificial
  probe
  misc_feature (1)..(25): SEQ ID NO: 5935; WAN0249XP; Start 72; Stop 96
ccttattgacttgcattgacttaca

SEQ ID NO: 425669 - DNA, 25 bp, Artificial
  probe
  misc_feature (1)..(25): SEQ ID NO: 5935; WAN0249XP; Start 71; Stop 95
tccttattgacttgcattgacttac

SEQ ID NO: 425670 - DNA, 25 bp, Artificial
  probe
  misc_feature (1)..(25): SEQ ID NO: 5935; WAN0249XP; Start 69; Stop 93
attccttattgacttgcattgactt

SEQ ID NO: 425671 - DNA, 25 bp, Artificial
  probe
  misc_feature (1)..(25): SEQ ID NO: 5935; WAN0249XP; Start 68; Stop 92
aattccttattgacttgcattgact

SEQ ID NO: 425672 - DNA, 25 bp, Artificial
  probe
  misc_feature (1)..(25): SEQ ID NO: 5935; WAN0249XP; Start 70; Stop 94
ttccttattgacttgcattgactta

SEQ ID NO: 425673 - DNA, 25 bp, Artificial
  probe
  misc_feature (1)..(25): SEQ ID NO: 5935; WAN0249XP; Start 73; Stop 97
cttattgacttgcattgacttacaa

SEQ ID NO: 425674 - DNA, 25 bp, Artificial
  probe
  misc_feature (1)..(25): SEQ ID NO: 5935; WAN0249XP; Start 67; Stop 91
aaattccttattgacttgcattgac

SEQ ID NO: 425675 - DNA, 25 bp, Artificial
  probe
  misc_feature (1)..(25): SEQ ID NO: 5935; WAN0249XP; Start 75; Stop 99
tattgacttgcattgacttacaatt

SEQ ID NO: 425676 - DNA, 25 bp, Artificial
  probe
  misc_feature (1)..(25): SEQ ID NO: 5935; WAN0249XP; Start 74; Stop 98
ttattgacttgcattgacttacaat

SEQ ID NO: 425677 - DNA, 25 bp, Artificial
  probe
  misc_feature (1)..(25): SEQ ID NO: 5935; WAN0249XP; Start 4; Stop 28
tcacctcgaatttaatcgctatcat

SEQ ID NO: 425678 - DNA, 25 bp, Artificial
  probe
  misc_feature (1)..(25): SEQ ID NO: 5935; WAN0249XP; Start 5; Stop 29
cacctcgaatttaatcgctatcatt

SEQ ID NO: 425679 - DNA, 25 bp, Artificial
  probe
  misc_feature (1)..(25): SEQ ID NO: 5935; WAN0249XP; Start 3; Stop 27
ttcacctcgaatttaatcgctatca

SEQ ID NO: 425680 - DNA, 25 bp, Artificial
  probe
  misc_feature (1)..(25): SEQ ID NO: 5935; WAN0249XP; Start 2; Stop 26
tttcacctcgaatttaatcgctatc

SEQ ID NO: 425681 - DNA, 25 bp, Artificial
  probe
  misc_feature (1)..(25): SEQ ID NO: 5935; WAN0249XP; Start 61; Stop 85
atctgaaaattccttattgacttgc

SEQ ID NO: 425682 - DNA, 25 bp, Artificial
  probe
  misc_feature (1)..(25): SEQ ID NO: 5935; WAN0249XP; Start 6; Stop 30
acctcgaatttaatcgctatcatta

SEQ ID NO: 425683 - DNA, 25 bp, Artificial
  probe
  misc_feature (1)..(25): SEQ ID NO: 5935; WAN0249XP; Start 76; Stop 100
attgacttgcattgacttacaattt

SEQ ID NO: 425684 - DNA, 25 bp, Artificial
  probe
  misc_feature (1)..(25): SEQ ID NO: 5935; WAN0249XP; Start 62; Stop 86
tctgaaaattccttattgacttgca

SEQ ID NO: 425685 - DNA, 25 bp, Artificial
  probe
  misc_feature (1)..(25): SEQ ID NO: 5935; WAN0249XP; Start 78; Stop 102
tgacttgcattgacttacaatttaa

SEQ ID NO: 425686 - DNA, 25 bp, Artificial
  probe
  misc_feature (1)..(25): SEQ ID NO: 5935; WAN0249XP; Start 77; Stop 101
ttgacttgcattgacttacaattta

SEQ ID NO: 425687 - DNA, 25 bp, Artificial
  probe
  misc_feature (1)..(25): SEQ ID NO: 5935; WAN0249XP; Start 63; Stop 87
ctgaaaattccttattgacttgcat

SEQ ID NO: 425688 - DNA, 25 bp, Artificial
  probe
  misc_feature (1)..(25): SEQ ID NO: 5935; WAN0249XP; Start 7; Stop 31
cctcgaatttaatcgctatcattat

SEQ ID NO: 425689 - DNA, 25 bp, Artificial
  probe
  misc_feature (1)..(25): SEQ ID NO: 5935; WAN0249XP; Start 66; Stop 90
aaaattccttattgacttgcattga

SEQ ID NO: 425690 - DNA, 25 bp, Artificial
  probe
  misc_feature (1)..(25): SEQ ID NO: 5935; WAN0249XP; Start 64; Stop 88
tgaaaattccttattgacttgcatt

SEQ ID NO: 425691 - DNA, 25 bp, Artificial
  probe
  misc_feature (1)..(25): SEQ ID NO: 5935; WAN0249XP; Start 65; Stop 89
gaaaattccttattgacttgcattg

SEQ ID NO: 425692 - DNA, 25 bp, Artificial
  probe
  misc_feature (1)..(25): SEQ ID NO: 5935; WAN0249XP; Start 79; Stop 103
gacttgcattgacttacaatttaat

SEQ ID NO: 425693 - DNA, 25 bp, Artificial
  probe
  misc_feature (1)..(25): SEQ ID NO: 5935; WAN0249XP; Start 1; Stop 25
ttttcacctcgaatttaatcgctat

SEQ ID NO: 425694 - DNA, 25 bp, Artificial
  probe
  misc_feature (1)..(25): SEQ ID NO: 5935; WAN0249XP; Start 80; Stop 104
acttgcattgacttacaatttaatt

SEQ ID NO: 425695 - DNA, 25 bp, Artificial
  probe
  misc_feature (1)..(25): SEQ ID NO: 5935; WAN0249XP; Start 60; Stop 84
tatctgaaaattccttattgacttg

SEQ ID NO: 425696 - DNA, 25 bp, Artificial
  probe
  misc_feature (1)..(25): SEQ ID NO: 5935; WAN0249XP; Start 128; Stop 152
aattgttccttttctattgacaagt

SEQ ID NO: 425697 - DNA, 25 bp, Artificial
  probe
  misc_feature (1)..(25): SEQ ID NO: 5935; WAN0249XP; Start 125; Stop 149
ttaaattgttccttttctattgaca

SEQ ID NO: 425698 - DNA, 25 bp, Artificial
  probe
  misc_feature (1)..(25): SEQ ID NO: 5935; WAN0249XP; Start 8; Stop 32
ctcgaatttaatcgctatcattata

SEQ ID NO: 425699 - DNA, 25 bp, Artificial
  probe
  misc_feature (1)..(25): SEQ ID NO: 5935; WAN0249XP; Start 127; Stop 151
aaattgttccttttctattgacaag

SEQ ID NO: 425700 - DNA, 25 bp, Artificial
  probe
  misc_feature (1)..(25): SEQ ID NO: 5935; WAN0249XP; Start 126; Stop 150
taaattgttccttttctattgacaa

SEQ ID NO: 425701 - DNA, 25 bp, Artificial
  probe
  misc_feature (1)..(25): SEQ ID NO: 5937; WAN024APA; Start 1; Stop 25
ttttcatatccctccttcttcaaaa

SEQ ID NO: 425702 - DNA, 25 bp, Artificial
  probe
  misc_feature (1)..(25): SEQ ID NO: 5937; WAN024APA; Start 63; Stop 87
atcaaaattcaaagaatgatgcaag

SEQ ID NO: 425703 - DNA, 25 bp, Artificial
  probe
  misc_feature (1)..(25): SEQ ID NO: 5937; WAN024APA; Start 62; Stop 86
tatcaaaattcaaagaatgatgcaa

SEQ ID NO: 425704 - DNA, 25 bp, Artificial
  probe
  misc_feature (1)..(25): SEQ ID NO: 5937; WAN024APA; Start 61; Stop 85
atatcaaaattcaaagaatgatgca

SEQ ID NO: 425705 - DNA, 25 bp, Artificial
  probe
  misc_feature (1)..(25): SEQ ID NO: 5937; WAN024APA; Start 33; Stop 57
acaatcaaaacatttgacagaaaga

SEQ ID NO: 425706 - DNA, 25 bp, Artificial
  probe
  misc_feature (1)..(25): SEQ ID NO: 5937; WAN024APA; Start 38; Stop 62
caaaacatttgacagaaagaattat

SEQ ID NO: 425707 - DNA, 25 bp, Artificial
  probe
  misc_feature (1)..(25): SEQ ID NO: 5937; WAN024APA; Start 34; Stop 58
caatcaaaacatttgacagaaagaa

SEQ ID NO: 425708 - DNA, 25 bp, Artificial
  probe
  misc_feature (1)..(25): SEQ ID NO: 5937; WAN024APA; Start 32; Stop 56
tacaatcaaaacatttgacagaaag

SEQ ID NO: 425709 - DNA, 25 bp, Artificial
  probe
  misc_feature (1)..(25): SEQ ID NO: 5937; WAN024APA; Start 27; Stop 51
acttttacaatcaaaacatttgaca

SEQ ID NO: 425710 - DNA, 25 bp, Artificial
  probe
  misc_feature (1)..(25): SEQ ID NO: 5937; WAN024APA; Start 36; Stop 60
atcaaaacatttgacagaaagaatt

SEQ ID NO: 425711 - DNA, 25 bp, Artificial
  probe
  misc_feature (1)..(25): SEQ ID NO: 5937; WAN024APA; Start 35; Stop 59
aatcaaaacatttgacagaaagaat

SEQ ID NO: 425712 - DNA, 25 bp, Artificial
  probe
  misc_feature (1)..(25): SEQ ID NO: 5937; WAN024APA; Start 31; Stop 55
ttacaatcaaaacatttgacagaaa

SEQ ID NO: 425713 - DNA, 25 bp, Artificial
  probe
  misc_feature (1)..(25): SEQ ID NO: 5937; WAN024APA; Start 30; Stop 54
tttacaatcaaaacatttgacagaa

SEQ ID NO: 425714 - DNA, 25 bp, Artificial
  probe
  misc_feature (1)..(25): SEQ ID NO: 5937; WAN024APA; Start 29; Stop 53
ttttacaatcaaaacatttgacaga

SEQ ID NO: 425715 - DNA, 25 bp, Artificial
  probe
  misc_feature (1)..(25): SEQ ID NO: 5937; WAN024APA; Start 28; Stop 52
cttttacaatcaaaacatttgacag

SEQ ID NO: 425716 - DNA, 25 bp, Artificial
  probe
  misc_feature (1)..(25): SEQ ID NO: 5937; WAN024APA; Start 37; Stop 61
tcaaaacatttgacagaaagaatta

SEQ ID NO: 425717 - DNA, 25 bp, Artificial
  probe
  misc_feature (1)..(25): SEQ ID NO: 5937; WAN024APA; Start 26; Stop 50
aacttttacaatcaaaacatttgac

SEQ ID NO: 425718 - DNA, 25 bp, Artificial
  probe
  misc_feature (1)..(25): SEQ ID NO: 5937; WAN024APA; Start 25; Stop 49
aaacttttacaatcaaaacatttga

SEQ ID NO: 425719 - DNA, 25 bp, Artificial
  probe
  misc_feature (1)..(25): SEQ ID NO: 5938; WAN0249N5; Start 24; Stop 48
aaaggcggtgaaagaaatctgtaat

SEQ ID NO: 425720 - DNA, 25 bp, Artificial
  probe
  misc_feature (1)..(25): SEQ ID NO: 5938; WAN0249N5; Start 25; Stop 49
aaggcggtgaaagaaatctgtaatt

SEQ ID NO: 425721 - DNA, 25 bp, Artificial
  probe
  misc_feature (1)..(25): SEQ ID NO: 5938; WAN0249N5; Start 28; Stop 52
gcggtgaaagaaatctgtaatttga

SEQ ID NO: 425722 - DNA, 25 bp, Artificial
  probe
  misc_feature (1)..(25): SEQ ID NO: 5938; WAN0249N5; Start 27; Stop 51
ggcggtgaaagaaatctgtaatttg

SEQ ID NO: 425723 - DNA, 25 bp, Artificial
  probe
  misc_feature (1)..(25): SEQ ID NO: 5938; WAN0249N5; Start 26; Stop 50
aggcggtgaaagaaatctgtaattt

SEQ ID NO: 425724 - DNA, 25 bp, Artificial
  probe
  misc_feature (1)..(25): SEQ ID NO: 5938; WAN0249N5; Start 29; Stop 53
cggtgaaagaaatctgtaatttgaa

SEQ ID NO: 425725 - DNA, 25 bp, Artificial
  probe
  misc_feature (1)..(25): SEQ ID NO: 5938; WAN0249N5; Start 32; Stop 56
tgaaagaaatctgtaatttgaagga

SEQ ID NO: 425726 - DNA, 25 bp, Artificial
  probe
  misc_feature (1)..(25): SEQ ID NO: 5938; WAN0249N5; Start 31; Stop 55
gtgaaagaaatctgtaatttgaagg

SEQ ID NO: 425727 - DNA, 25 bp, Artificial
  probe
  misc_feature (1)..(25): SEQ ID NO: 5938; WAN0249N5; Start 30; Stop 54
ggtgaaagaaatctgtaatttgaag

SEQ ID NO: 425728 - DNA, 25 bp, Artificial
  probe
  misc_feature (1)..(25): SEQ ID NO: 5938; WAN0249N5; Start 23; Stop 47
aaaaggcggtgaaagaaatctgtaa

SEQ ID NO: 425729 - DNA, 25 bp, Artificial
  probe
  misc_feature (1)..(25): SEQ ID NO: 5938; WAN0249N5; Start 22; Stop 46
gaaaaggcggtgaaagaaatctgta

SEQ ID NO: 425730 - DNA, 25 bp, Artificial
  probe
  misc_feature (1)..(25): SEQ ID NO: 5938; WAN0249N5; Start 17; Stop 41
aaatggaaaaggcggtgaaagaaat

SEQ ID NO: 425731 - DNA, 25 bp, Artificial
  probe
  misc_feature (1)..(25): SEQ ID NO: 5938; WAN0249N5; Start 16; Stop 40
aaaatggaaaaggcggtgaaagaaa

SEQ ID NO: 425732 - DNA, 25 bp, Artificial
  probe
  misc_feature (1)..(25): SEQ ID NO: 5938; WAN0249N5; Start 18; Stop 42
aatggaaaaggcggtgaaagaaatc

SEQ ID NO: 425733 - DNA, 25 bp, Artificial
  probe
  misc_feature (1)..(25): SEQ ID NO: 5938; WAN0249N5; Start 6; Stop 30
attataccacaaaatggaaaaggcg

SEQ ID NO: 425734 - DNA, 25 bp, Artificial
  probe
  misc_feature (1)..(25): SEQ ID NO: 5938; WAN0249N5; Start 15; Stop 39
caaaatggaaaaggcggtgaaagaa

SEQ ID NO: 425735 - DNA, 25 bp, Artificial
  probe
  misc_feature (1)..(25): SEQ ID NO: 5938; WAN0249N5; Start 5; Stop 29
cattataccacaaaatggaaaaggc

SEQ ID NO: 425736 - DNA, 25 bp, Artificial
  probe
  misc_feature (1)..(25): SEQ ID NO: 5938; WAN0249N5; Start 19; Stop 43
atggaaaaggcggtgaaagaaatct

SEQ ID NO: 425737 - DNA, 25 bp, Artificial
  probe
  misc_feature (1)..(25): SEQ ID NO: 5938; WAN0249N5; Start 33; Stop 57
gaaagaaatctgtaatttgaaggat

SEQ ID NO: 425738 - DNA, 25 bp, Artificial
  probe
  misc_feature (1)..(25): SEQ ID NO: 5938; WAN0249N5; Start 7; Stop 31
ttataccacaaaatggaaaaggcgg

SEQ ID NO: 425739 - DNA, 25 bp, Artificial
  probe
  misc_feature (1)..(25): SEQ ID NO: 5938; WAN0249N5; Start 4; Stop 28
tcattataccacaaaatggaaaagg

SEQ ID NO: 425740 - DNA, 25 bp, Artificial
  probe
  misc_feature (1)..(25): SEQ ID NO: 5938; WAN0249N5; Start 14; Stop 38
acaaaatggaaaaggcggtgaaaga

SEQ ID NO: 425741 - DNA, 25 bp, Artificial
  probe
  misc_feature (1)..(25): SEQ ID NO: 5938; WAN0249N5; Start 8; Stop 32
tataccacaaaatggaaaaggcggt

SEQ ID NO: 425742 - DNA, 25 bp, Artificial
  probe
  misc_feature (1)..(25): SEQ ID NO: 5938; WAN0249N5; Start 21; Stop 45
ggaaaaggcggtgaaagaaatctgt

SEQ ID NO: 425743 - DNA, 25 bp, Artificial
  probe
  misc_feature (1)..(25): SEQ ID NO: 5938; WAN0249N5; Start 20; Stop 44
tggaaaaggcggtgaaagaaatctg

SEQ ID NO: 425744 - DNA, 25 bp, Artificial
  probe
  misc_feature (1)..(25): SEQ ID NO: 5938; WAN0249N5; Start 34; Stop 58
aaagaaatctgtaatttgaaggatt

SEQ ID NO: 425745 - DNA, 25 bp, Artificial
  probe
  misc_feature (1)..(25): SEQ ID NO: 5938; WAN0249N5; Start 13; Stop 37
cacaaaatggaaaaggcggtgaaag

SEQ ID NO: 425746 - DNA, 25 bp, Artificial
  probe
  misc_feature (1)..(25): SEQ ID NO: 5938; WAN0249N5; Start 3; Stop 27
ttcattataccacaaaatggaaaag

SEQ ID NO: 425747 - DNA, 25 bp, Artificial
  probe
  misc_feature (1)..(25): SEQ ID NO: 5938; WAN0249N5; Start 38; Stop 62
aaatctgtaatttgaaggatttcct

SEQ ID NO: 425748 - DNA, 25 bp, Artificial
  probe
  misc_feature (1)..(25): SEQ ID NO: 5938; WAN0249N5; Start 39; Stop 63
aatctgtaatttgaaggatttcctt

SEQ ID NO: 425749 - DNA, 25 bp, Artificial
  probe
  misc_feature (1)..(25): SEQ ID NO: 5938; WAN0249N5; Start 9; Stop 33
ataccacaaaatggaaaaggcggtg

SEQ ID NO: 425750 - DNA, 25 bp, Artificial
  probe
  misc_feature (1)..(25): SEQ ID NO: 5938; WAN0249N5; Start 2; Stop 26
tttcattataccacaaaatggaaaa

SEQ ID NO: 425751 - DNA, 25 bp, Artificial
  probe
  misc_feature (1)..(25): SEQ ID NO: 5938; WAN0249N5; Start 1; Stop 25
ttttcattataccacaaaatggaaa

SEQ ID NO: 425752 - DNA, 25 bp, Artificial
  probe
  misc_feature (1)..(25): SEQ ID NO: 5939; WAN024A8W; Start 29; Stop 53
gctcctttcggttttgatacaatag

SEQ ID NO: 425753 - DNA, 25 bp, Artificial
  probe
  misc_feature (1)..(25): SEQ ID NO: 5939; WAN024A8W; Start 30; Stop 54
ctcctttcggttttgatacaatagt

SEQ ID NO: 425754 - DNA, 25 bp, Artificial
  probe
  misc_feature (1)..(25): SEQ ID NO: 5939; WAN024A8W; Start 31; Stop 55
tcctttcggttttgatacaatagtt

SEQ ID NO: 425755 - DNA, 25 bp, Artificial
  probe
  misc_feature (1)..(25): SEQ ID NO: 5939; WAN024A8W; Start 32; Stop 56
cctttcggttttgatacaatagttt

SEQ ID NO: 425756 - DNA, 25 bp, Artificial
  probe
  misc_feature (1)..(25): SEQ ID NO: 5939; WAN024A8W; Start 28; Stop 52
agctcctttcggttttgatacaata

SEQ ID NO: 425757 - DNA, 25 bp, Artificial
  probe
  misc_feature (1)..(25): SEQ ID NO: 5939; WAN024A8W; Start 34; Stop 58
tttcggttttgatacaatagtttca

SEQ ID NO: 425758 - DNA, 25 bp, Artificial
  probe
  misc_feature (1)..(25): SEQ ID NO: 5939; WAN024A8W; Start 27; Stop 51
aagctcctttcggttttgatacaat

SEQ ID NO: 425759 - DNA, 25 bp, Artificial
  probe
  misc_feature (1)..(25): SEQ ID NO: 5939; WAN024A8W; Start 33; Stop 57
ctttcggttttgatacaatagtttc

SEQ ID NO: 425760 - DNA, 25 bp, Artificial
  probe
  misc_feature (1)..(25): SEQ ID NO: 5939; WAN024A8W; Start 26; Stop 50
aaagctcctttcggttttgatacaa

SEQ ID NO: 425761 - DNA, 25 bp, Artificial
  probe
  misc_feature (1)..(25): SEQ ID NO: 5939; WAN024A8W; Start 25; Stop 49
aaaagctcctttcggttttgataca

SEQ ID NO: 425762 - DNA, 25 bp, Artificial
  probe
  misc_feature (1)..(25): SEQ ID NO: 5939; WAN024A8W; Start 52; Stop 76
agtttcaaaatttgagaggagcttt

SEQ ID NO: 425763 - DNA, 25 bp, Artificial
  probe
  misc_feature (1)..(25): SEQ ID NO: 5939; WAN024A8W; Start 51; Stop 75
tagtttcaaaatttgagaggagctt

SEQ ID NO: 425764 - DNA, 25 bp, Artificial
  probe
  misc_feature (1)..(25): SEQ ID NO: 5939; WAN024A8W; Start 50; Stop 74
atagtttcaaaatttgagaggagct

SEQ ID NO: 425765 - DNA, 25 bp, Artificial
  probe
  misc_feature (1)..(25): SEQ ID NO: 5939; WAN024A8W; Start 35; Stop 59
ttcggttttgatacaatagtttcaa

SEQ ID NO: 425766 - DNA, 25 bp, Artificial
  probe
  misc_feature (1)..(25): SEQ ID NO: 5939; WAN024A8W; Start 53; Stop 77
gtttcaaaatttgagaggagcttta

SEQ ID NO: 425767 - DNA, 25 bp, Artificial
  probe
  misc_feature (1)..(25): SEQ ID NO: 5939; WAN024A8W; Start 49; Stop 73
aatagtttcaaaatttgagaggagc

SEQ ID NO: 425768 - DNA, 25 bp, Artificial
  probe
  misc_feature (1)..(25): SEQ ID NO: 5939; WAN024A8W; Start 54; Stop 78
tttcaaaatttgagaggagctttaa

SEQ ID NO: 425769 - DNA, 25 bp, Artificial
  probe
  misc_feature (1)..(25): SEQ ID NO: 5939; WAN024A8W; Start 55; Stop 79
ttcaaaatttgagaggagctttaat

SEQ ID NO: 425770 - DNA, 25 bp, Artificial
  probe
  misc_feature (1)..(25): SEQ ID NO: 5939; WAN024A8W; Start 47; Stop 71
acaatagtttcaaaatttgagagga

SEQ ID NO: 425771 - DNA, 25 bp, Artificial
  probe
  misc_feature (1)..(25): SEQ ID NO: 5939; WAN024A8W; Start 48; Stop 72
caatagtttcaaaatttgagaggag

SEQ ID NO: 425772 - DNA, 25 bp, Artificial
  probe
  misc_feature (1)..(25): SEQ ID NO: 5939; WAN024A8W; Start 46; Stop 70
tacaatagtttcaaaatttgagagg

SEQ ID NO: 425773 - DNA, 25 bp, Artificial
  probe
  misc_feature (1)..(25): SEQ ID NO: 5939; WAN024A8W; Start 36; Stop 60
tcggttttgatacaatagtttcaaa

SEQ ID NO: 425774 - DNA, 25 bp, Artificial
  probe
  misc_feature (1)..(25): SEQ ID NO: 5940; WAN0249XN; Start 26; Stop 50
ttgctctggtcttgtgttatactag

SEQ ID NO: 425775 - DNA, 25 bp, Artificial
  probe
  misc_feature (1)..(25): SEQ ID NO: 5940; WAN0249XN; Start 28; Stop 52
gctctggtcttgtgttatactagat

SEQ ID NO: 425776 - DNA, 25 bp, Artificial
  probe
  misc_feature (1)..(25): SEQ ID NO: 5940; WAN0249XN; Start 27; Stop 51
tgctctggtcttgtgttatactaga

SEQ ID NO: 425777 - DNA, 25 bp, Artificial
  probe
  misc_feature (1)..(25): SEQ ID NO: 5940; WAN0249XN; Start 32; Stop 56
tggtcttgtgttatactagataggt

SEQ ID NO: 425778 - DNA, 25 bp, Artificial
  probe
  misc_feature (1)..(25): SEQ ID NO: 5940; WAN0249XN; Start 35; Stop 59
tcttgtgttatactagataggttgc

SEQ ID NO: 425779 - DNA, 25 bp, Artificial
  probe
  misc_feature (1)..(25): SEQ ID NO: 5940; WAN0249XN; Start 31; Stop 55
ctggtcttgtgttatactagatagg

SEQ ID NO: 425780 - DNA, 25 bp, Artificial
  probe
  misc_feature (1)..(25): SEQ ID NO: 5940; WAN0249XN; Start 25; Stop 49
tttgctctggtcttgtgttatacta

SEQ ID NO: 425781 - DNA, 25 bp, Artificial
  probe
  misc_feature (1)..(25): SEQ ID NO: 5940; WAN0249XN; Start 33; Stop 57
ggtcttgtgttatactagataggtt

SEQ ID NO: 425782 - DNA, 25 bp, Artificial
  probe
  misc_feature (1)..(25): SEQ ID NO: 5940; WAN0249XN; Start 36; Stop 60
cttgtgttatactagataggttgca

SEQ ID NO: 425783 - DNA, 25 bp, Artificial
  probe
  misc_feature (1)..(25): SEQ ID NO: 5940; WAN0249XN; Start 173; Stop 197
gcaccacctttagaaagaagaataa

SEQ ID NO: 425784 - DNA, 25 bp, Artificial
  probe
  misc_feature (1)..(25): SEQ ID NO: 5940; WAN0249XN; Start 172; Stop 196
cgcaccacctttagaaagaagaata

SEQ ID NO: 425785 - DNA, 25 bp, Artificial
  probe
  misc_feature (1)..(25): SEQ ID NO: 5940; WAN0249XN; Start 30; Stop 54
tctggtcttgtgttatactagatag

SEQ ID NO: 425786 - DNA, 25 bp, Artificial
  probe
  misc_feature (1)..(25): SEQ ID NO: 5940; WAN0249XN; Start 29; Stop 53
ctctggtcttgtgttatactagata

SEQ ID NO: 425787 - DNA, 25 bp, Artificial
  probe
  misc_feature (1)..(25): SEQ ID NO: 5940; WAN0249XN; Start 34; Stop 58
gtcttgtgttatactagataggttg

SEQ ID NO: 425788 - DNA, 25 bp, Artificial
  probe
  misc_feature (1)..(25): SEQ ID NO: 5940; WAN0249XN; Start 174; Stop 198
caccacctttagaaagaagaataac

SEQ ID NO: 425789 - DNA, 25 bp, Artificial
  probe
  misc_feature (1)..(25): SEQ ID NO: 5940; WAN0249XN; Start 171; Stop 195
tcgcaccacctttagaaagaagaat

SEQ ID NO: 425790 - DNA, 25 bp, Artificial
  probe
  misc_feature (1)..(25): SEQ ID NO: 5940; WAN0249XN; Start 170; Stop 194
ttcgcaccacctttagaaagaagaa

SEQ ID NO: 425791 - DNA, 25 bp, Artificial
  probe
  misc_feature (1)..(25): SEQ ID NO: 5940; WAN0249XN; Start 23; Stop 47
cttttgctctggtcttgtgttatac

SEQ ID NO: 425792 - DNA, 25 bp, Artificial
  probe
  misc_feature (1)..(25): SEQ ID NO: 5940; WAN0249XN; Start 22; Stop 46
tcttttgctctggtcttgtgttata

SEQ ID NO: 425793 - DNA, 25 bp, Artificial
  probe
  misc_feature (1)..(25): SEQ ID NO: 5940; WAN0249XN; Start 20; Stop 44
tatcttttgctctggtcttgtgtta

SEQ ID NO: 425794 - DNA, 25 bp, Artificial
  probe
  misc_feature (1)..(25): SEQ ID NO: 5940; WAN0249XN; Start 24; Stop 48
ttttgctctggtcttgtgttatact

SEQ ID NO: 425795 - DNA, 25 bp, Artificial
  probe
  misc_feature (1)..(25): SEQ ID NO: 5940; WAN0249XN; Start 21; Stop 45
atcttttgctctggtcttgtgttat

SEQ ID NO: 425796 - DNA, 25 bp, Artificial
  probe
  misc_feature (1)..(25): SEQ ID NO: 5940; WAN0249XN; Start 19; Stop 43
ctatcttttgctctggtcttgtgtt

SEQ ID NO: 425797 - DNA, 25 bp, Artificial
  probe
  misc_feature (1)..(25): SEQ ID NO: 5940; WAN0249XN; Start 4; Stop 28
tctgtagaaatggggctatcttttg

SEQ ID NO: 425798 - DNA, 25 bp, Artificial
  probe
  misc_feature (1)..(25): SEQ ID NO: 5940; WAN0249XN; Start 3; Stop 27
ttctgtagaaatggggctatctttt

SEQ ID NO: 425799 - DNA, 25 bp, Artificial
  probe
  misc_feature (1)..(25): SEQ ID NO: 5940; WAN0249XN; Start 8; Stop 32
tagaaatggggctatcttttgctct

SEQ ID NO: 425800 - DNA, 25 bp, Artificial
  probe
  misc_feature (1)..(25): SEQ ID NO: 5940; WAN0249XN; Start 7; Stop 31
gtagaaatggggctatcttttgctc

SEQ ID NO: 425801 - DNA, 25 bp, Artificial
  probe
  misc_feature (1)..(25): SEQ ID NO: 5940; WAN0249XN; Start 5; Stop 29
ctgtagaaatggggctatcttttgc

SEQ ID NO: 425802 - DNA, 25 bp, Artificial
  probe
  misc_feature (1)..(25): SEQ ID NO: 5940; WAN0249XN; Start 84; Stop 108
tggaaaagaagcaacacgattttat

SEQ ID NO: 425803 - DNA, 25 bp, Artificial
  probe
  misc_feature (1)..(25): SEQ ID NO: 5940; WAN0249XN; Start 83; Stop 107
gtggaaaagaagcaacacgatttta

SEQ ID NO: 425804 - DNA, 25 bp, Artificial
  probe
  misc_feature (1)..(25): SEQ ID NO: 5940; WAN0249XN; Start 6; Stop 30
tgtagaaatggggctatcttttgct

SEQ ID NO: 425805 - DNA, 25 bp, Artificial
  probe
  misc_feature (1)..(25): SEQ ID NO: 5940; WAN0249XN; Start 85; Stop 109
ggaaaagaagcaacacgattttata

SEQ ID NO: 425806 - DNA, 25 bp, Artificial
  probe
  misc_feature (1)..(25): SEQ ID NO: 5940; WAN0249XN; Start 88; Stop 112
aaagaagcaacacgattttatatct

SEQ ID NO: 425807 - DNA, 25 bp, Artificial
  probe
  misc_feature (1)..(25): SEQ ID NO: 5941; WAN024A9G; Start 100; Stop 124
cggataatatgagaacaagggagaa

SEQ ID NO: 425808 - DNA, 25 bp, Artificial
  probe
  misc_feature (1)..(25): SEQ ID NO: 5941; WAN024A9G; Start 19; Stop 43
tcgttgaaagcggatttatggtata

SEQ ID NO: 425809 - DNA, 25 bp, Artificial
  probe
  misc_feature (1)..(25): SEQ ID NO: 5941; WAN024A9G; Start 15; Stop 39
tttatcgttgaaagcggatttatgg

SEQ ID NO: 425810 - DNA, 25 bp, Artificial
  probe
  misc_feature (1)..(25): SEQ ID NO: 5941; WAN024A9G; Start 98; Stop 122
gacggataatatgagaacaagggag

SEQ ID NO: 425811 - DNA, 25 bp, Artificial
  probe
  misc_feature (1)..(25): SEQ ID NO: 5941; WAN024A9G; Start 17; Stop 41
tatcgttgaaagcggatttatggta

SEQ ID NO: 425812 - DNA, 25 bp, Artificial
  probe
  misc_feature (1)..(25): SEQ ID NO: 5941; WAN024A9G; Start 99; Stop 123
acggataatatgagaacaagggaga

SEQ ID NO: 425813 - DNA, 25 bp, Artificial
  probe
  misc_feature (1)..(25): SEQ ID NO: 5941; WAN024A9G; Start 97; Stop 121
tgacggataatatgagaacaaggga

SEQ ID NO: 425814 - DNA, 25 bp, Artificial
  probe
  misc_feature (1)..(25): SEQ ID NO: 5941; WAN024A9G; Start 18; Stop 42
atcgttgaaagcggatttatggtat

SEQ ID NO: 425815 - DNA, 25 bp, Artificial
  probe
  misc_feature (1)..(25): SEQ ID NO: 5941; WAN024A9G; Start 20; Stop 44
cgttgaaagcggatttatggtataa

SEQ ID NO: 425816 - DNA, 25 bp, Artificial
  probe
  misc_feature (1)..(25): SEQ ID NO: 5941; WAN024A9G; Start 16; Stop 40
ttatcgttgaaagcggatttatggt

SEQ ID NO: 425817 - DNA, 25 bp, Artificial
  probe
  misc_feature (1)..(25): SEQ ID NO: 5941; WAN024A9G; Start 96; Stop 120
ttgacggataatatgagaacaaggg

SEQ ID NO: 425818 - DNA, 25 bp, Artificial
  probe
  misc_feature (1)..(25): SEQ ID NO: 5941; WAN024A9G; Start 95; Stop 119
tttgacggataatatgagaacaagg

SEQ ID NO: 425819 - DNA, 25 bp, Artificial
  probe
  misc_feature (1)..(25): SEQ ID NO: 5941; WAN024A9G; Start 26; Stop 50
aagcggatttatggtataataagca

SEQ ID NO: 425820 - DNA, 25 bp, Artificial
  probe
  misc_feature (1)..(25): SEQ ID NO: 5941; WAN024A9G; Start 27; Stop 51
agcggatttatggtataataagcat

SEQ ID NO: 425821 - DNA, 25 bp, Artificial
  probe
  misc_feature (1)..(25): SEQ ID NO: 5941; WAN024A9G; Start 101; Stop 125
ggataatatgagaacaagggagaat

SEQ ID NO: 425822 - DNA, 25 bp, Artificial
  probe
  misc_feature (1)..(25): SEQ ID NO: 5941; WAN024A9G; Start 21; Stop 45
gttgaaagcggatttatggtataat

SEQ ID NO: 425823 - DNA, 25 bp, Artificial
  probe
  misc_feature (1)..(25): SEQ ID NO: 5941; WAN024A9G; Start 28; Stop 52
gcggatttatggtataataagcatt

SEQ ID NO: 425824 - DNA, 25 bp, Artificial
  probe
  misc_feature (1)..(25): SEQ ID NO: 5941; WAN024A9G; Start 25; Stop 49
aaagcggatttatggtataataagc

SEQ ID NO: 425825 - DNA, 25 bp, Artificial
  probe
  misc_feature (1)..(25): SEQ ID NO: 5941; WAN024A9G; Start 14; Stop 38
ttttatcgttgaaagcggatttatg

SEQ ID NO: 425826 - DNA, 25 bp, Artificial
  probe
  misc_feature (1)..(25): SEQ ID NO: 5941; WAN024A9G; Start 23; Stop 47
tgaaagcggatttatggtataataa

SEQ ID NO: 425827 - DNA, 25 bp, Artificial
  probe
  misc_feature (1)..(25): SEQ ID NO: 5941; WAN024A9G; Start 22; Stop 46
ttgaaagcggatttatggtataata

SEQ ID NO: 425828 - DNA, 25 bp, Artificial
  probe
  misc_feature (1)..(25): SEQ ID NO: 5941; WAN024A9G; Start 29; Stop 53
cggatttatggtataataagcattg

SEQ ID NO: 425829 - DNA, 25 bp, Artificial
  probe
  misc_feature (1)..(25): SEQ ID NO: 5941; WAN024A9G; Start 24; Stop 48
gaaagcggatttatggtataataag

SEQ ID NO: 425830 - DNA, 25 bp, Artificial
  probe
  misc_feature (1)..(25): SEQ ID NO: 5941; WAN024A9G; Start 102; Stop 126
gataatatgagaacaagggagaata

SEQ ID NO: 425831 - DNA, 25 bp, Artificial
  probe
  misc_feature (1)..(25): SEQ ID NO: 5941; WAN024A9G; Start 94; Stop 118
ttttgacggataatatgagaacaag

SEQ ID NO: 425832 - DNA, 25 bp, Artificial
  probe
  misc_feature (1)..(25): SEQ ID NO: 5941; WAN024A9G; Start 30; Stop 54
ggatttatggtataataagcattgt

SEQ ID NO: 425833 - DNA, 25 bp, Artificial
  probe
  misc_feature (1)..(25): SEQ ID NO: 5941; WAN024A9G; Start 103; Stop 127
ataatatgagaacaagggagaatat

SEQ ID NO: 425834 - DNA, 25 bp, Artificial
  probe
  misc_feature (1)..(25): SEQ ID NO: 5942; WAN024A2W; Start 12; Stop 36
attcggtcatttctatcctcttgtt

SEQ ID NO: 425835 - DNA, 25 bp, Artificial
  probe
  misc_feature (1)..(25): SEQ ID NO: 5942; WAN024A2W; Start 13; Stop 37
ttcggtcatttctatcctcttgtta

SEQ ID NO: 425836 - DNA, 25 bp, Artificial
  probe
  misc_feature (1)..(25): SEQ ID NO: 5942; WAN024A2W; Start 14; Stop 38
tcggtcatttctatcctcttgttat

SEQ ID NO: 425837 - DNA, 25 bp, Artificial
  probe
  misc_feature (1)..(25): SEQ ID NO: 5942; WAN024A2W; Start 11; Stop 35
aattcggtcatttctatcctcttgt

SEQ ID NO: 425838 - DNA, 25 bp, Artificial
  probe
  misc_feature (1)..(25): SEQ ID NO: 5942; WAN024A2W; Start 8; Stop 32
tctaattcggtcatttctatcctct

SEQ ID NO: 425839 - DNA, 25 bp, Artificial
  probe
  misc_feature (1)..(25): SEQ ID NO: 5942; WAN024A2W; Start 299; Stop 323
aacagagtgggagtagtcatctaag

SEQ ID NO: 425840 - DNA, 25 bp, Artificial
  probe
  misc_feature (1)..(25): SEQ ID NO: 5942; WAN024A2W; Start 298; Stop 322
caacagagtgggagtagtcatctaa

SEQ ID NO: 425841 - DNA, 25 bp, Artificial
  probe
  misc_feature (1)..(25): SEQ ID NO: 5942; WAN024A2W; Start 284; Stop 308
ttccattataggagcaacagagtgg

SEQ ID NO: 425842 - DNA, 25 bp, Artificial
  probe
  misc_feature (1)..(25): SEQ ID NO: 5942; WAN024A2W; Start 10; Stop 34
taattcggtcatttctatcctcttg

SEQ ID NO: 425843 - DNA, 25 bp, Artificial
  probe
  misc_feature (1)..(25): SEQ ID NO: 5942; WAN024A2W; Start 9; Stop 33
ctaattcggtcatttctatcctctt

SEQ ID NO: 425844 - DNA, 25 bp, Artificial
  probe
  misc_feature (1)..(25): SEQ ID NO: 5942; WAN024A2W; Start 7; Stop 31
ttctaattcggtcatttctatcctc

SEQ ID NO: 425845 - DNA, 25 bp, Artificial
  probe
  misc_feature (1)..(25): SEQ ID NO: 5942; WAN024A2W; Start 15; Stop 39
cggtcatttctatcctcttgttata

SEQ ID NO: 425846 - DNA, 25 bp, Artificial
  probe
  misc_feature (1)..(25): SEQ ID NO: 5942; WAN024A2W; Start 289; Stop 313
ttataggagcaacagagtgggagta

SEQ ID NO: 425847 - DNA, 25 bp, Artificial
  probe
  misc_feature (1)..(25): SEQ ID NO: 5942; WAN024A2W; Start 6; Stop 30
tttctaattcggtcatttctatcct

SEQ ID NO: 425848 - DNA, 25 bp, Artificial
  probe
  misc_feature (1)..(25): SEQ ID NO: 5942; WAN024A2W; Start 287; Stop 311
cattataggagcaacagagtgggag

SEQ ID NO: 425849 - DNA, 25 bp, Artificial
  probe
  misc_feature (1)..(25): SEQ ID NO: 5942; WAN024A2W; Start 283; Stop 307
tttccattataggagcaacagagtg

SEQ ID NO: 425850 - DNA, 25 bp, Artificial
  probe
  misc_feature (1)..(25): SEQ ID NO: 5942; WAN024A2W; Start 301; Stop 325
cagagtgggagtagtcatctaagga

SEQ ID NO: 425851 - DNA, 25 bp, Artificial
  probe
  misc_feature (1)..(25): SEQ ID NO: 5942; WAN024A2W; Start 5; Stop 29
ctttctaattcggtcatttctatcc

SEQ ID NO: 425852 - DNA, 25 bp, Artificial
  probe
  misc_feature (1)..(25): SEQ ID NO: 5942; WAN024A2W; Start 290; Stop 314
tataggagcaacagagtgggagtag

SEQ ID NO: 425853 - DNA, 25 bp, Artificial
  probe
  misc_feature (1)..(25): SEQ ID NO: 5942; WAN024A2W; Start 288; Stop 312
attataggagcaacagagtgggagt

SEQ ID NO: 425854 - DNA, 25 bp, Artificial
  probe
  misc_feature (1)..(25): SEQ ID NO: 5942; WAN024A2W; Start 300; Stop 324
acagagtgggagtagtcatctaagg

SEQ ID NO: 425855 - DNA, 25 bp, Artificial
  probe
  misc_feature (1)..(25): SEQ ID NO: 5942; WAN024A2W; Start 257; Stop 281
gcgatattctagactgtatcaatcc

SEQ ID NO: 425856 - DNA, 25 bp, Artificial
  probe
  misc_feature (1)..(25): SEQ ID NO: 5942; WAN024A2W; Start 302; Stop 326
agagtgggagtagtcatctaaggac

SEQ ID NO: 425857 - DNA, 25 bp, Artificial
  probe
  misc_feature (1)..(25): SEQ ID NO: 5942; WAN024A2W; Start 256; Stop 280
agcgatattctagactgtatcaatc

SEQ ID NO: 425858 - DNA, 25 bp, Artificial
  probe
  misc_feature (1)..(25): SEQ ID NO: 5942; WAN024A2W; Start 4; Stop 28
tctttctaattcggtcatttctatc

SEQ ID NO: 425859 - DNA, 25 bp, Artificial
  probe
  misc_feature (1)..(25): SEQ ID NO: 5942; WAN024A2W; Start 297; Stop 321
gcaacagagtgggagtagtcatcta

SEQ ID NO: 425860 - DNA, 25 bp, Artificial
  probe
  misc_feature (1)..(25): SEQ ID NO: 5942; WAN024A2W; Start 255; Stop 279
aagcgatattctagactgtatcaat

SEQ ID NO: 425861 - DNA, 25 bp, Artificial
  probe
  misc_feature (1)..(25): SEQ ID NO: 5942; WAN024A2W; Start 2; Stop 26
tttctttctaattcggtcatttcta

SEQ ID NO: 425862 - DNA, 25 bp, Artificial
  probe
  misc_feature (1)..(25): SEQ ID NO: 5942; WAN024A2W; Start 258; Stop 282
cgatattctagactgtatcaatcct

SEQ ID NO: 425863 - DNA, 25 bp, Artificial
  probe
  misc_feature (1)..(25): SEQ ID NO: 5942; WAN024A2W; Start 3; Stop 27
ttctttctaattcggtcatttctat

SEQ ID NO: 425864 - DNA, 25 bp, Artificial
  probe
  misc_feature (1)..(25): SEQ ID NO: 5942; WAN024A2W; Start 67; Stop 91
acatggtttaataaattctttgagc

SEQ ID NO: 425865 - DNA, 25 bp, Artificial
  probe
  misc_feature (1)..(25): SEQ ID NO: 5942; WAN024A2W; Start 265; Stop 289
ctagactgtatcaatccttttccat

SEQ ID NO: 425866 - DNA, 25 bp, Artificial
  probe
  misc_feature (1)..(25): SEQ ID NO: 5942; WAN024A2W; Start 267; Stop 291
agactgtatcaatccttttccatta

SEQ ID NO: 425867 - DNA, 25 bp, Artificial
  probe
  misc_feature (1)..(25): SEQ ID NO: 5943; WAN0249HJ; Start 267; Stop 291
ttggcgttagttacttagattgctt

SEQ ID NO: 425868 - DNA, 25 bp, Artificial
  probe
  misc_feature (1)..(25): SEQ ID NO: 5943; WAN0249HJ; Start 265; Stop 289
atttggcgttagttacttagattgc

SEQ ID NO: 425869 - DNA, 25 bp, Artificial
  probe
  misc_feature (1)..(25): SEQ ID NO: 5943; WAN0249HJ; Start 262; Stop 286
aggatttggcgttagttacttagat

SEQ ID NO: 425870 - DNA, 25 bp, Artificial
  probe
  misc_feature (1)..(25): SEQ ID NO: 5943; WAN0249HJ; Start 5; Stop 29
gcaggaagtctattatttggttagg

SEQ ID NO: 425871 - DNA, 25 bp, Artificial
  probe
  misc_feature (1)..(25): SEQ ID NO: 5943; WAN0249HJ; Start 269; Stop 293
ggcgttagttacttagattgctttg

SEQ ID NO: 425872 - DNA, 25 bp, Artificial
  probe
  misc_feature (1)..(25): SEQ ID NO: 5943; WAN0249HJ; Start 261; Stop 285
taggatttggcgttagttacttaga

SEQ ID NO: 425873 - DNA, 25 bp, Artificial
  probe
  misc_feature (1)..(25): SEQ ID NO: 5943; WAN0249HJ; Start 268; Stop 292
tggcgttagttacttagattgcttt

SEQ ID NO: 425874 - DNA, 25 bp, Artificial
  probe
  misc_feature (1)..(25): SEQ ID NO: 5943; WAN0249HJ; Start 266; Stop 290
tttggcgttagttacttagattgct

SEQ ID NO: 425875 - DNA, 25 bp, Artificial
  probe
  misc_feature (1)..(25): SEQ ID NO: 5943; WAN0249HJ; Start 263; Stop 287
ggatttggcgttagttacttagatt

SEQ ID NO: 425876 - DNA, 25 bp, Artificial
  probe
  misc_feature (1)..(25): SEQ ID NO: 5943; WAN0249HJ; Start 258; Stop 282
gaataggatttggcgttagttactt

SEQ ID NO: 425877 - DNA, 25 bp, Artificial
  probe
  misc_feature (1)..(25): SEQ ID NO: 5943; WAN0249HJ; Start 257; Stop 281
cgaataggatttggcgttagttact

SEQ ID NO: 425878 - DNA, 25 bp, Artificial
  probe
  misc_feature (1)..(25): SEQ ID NO: 5943; WAN0249HJ; Start 270; Stop 294
gcgttagttacttagattgctttgc

SEQ ID NO: 425879 - DNA, 25 bp, Artificial
  probe
  misc_feature (1)..(25): SEQ ID NO: 5943; WAN0249HJ; Start 260; Stop 284
ataggatttggcgttagttacttag

SEQ ID NO: 425880 - DNA, 25 bp, Artificial
  probe
  misc_feature (1)..(25): SEQ ID NO: 5943; WAN0249HJ; Start 264; Stop 288
gatttggcgttagttacttagattg

SEQ ID NO: 425881 - DNA, 25 bp, Artificial
  probe
  misc_feature (1)..(25): SEQ ID NO: 5943; WAN0249HJ; Start 256; Stop 280
ccgaataggatttggcgttagttac

SEQ ID NO: 425882 - DNA, 25 bp, Artificial
  probe
  misc_feature (1)..(25): SEQ ID NO: 5943; WAN0249HJ; Start 8; Stop 32
ggaagtctattatttggttaggtga

SEQ ID NO: 425883 - DNA, 25 bp, Artificial
  probe
  misc_feature (1)..(25): SEQ ID NO: 5943; WAN0249HJ; Start 7; Stop 31
aggaagtctattatttggttaggtg

SEQ ID NO: 425884 - DNA, 25 bp, Artificial
  probe
  misc_feature (1)..(25): SEQ ID NO: 5943; WAN0249HJ; Start 6; Stop 30
caggaagtctattatttggttaggt

SEQ ID NO: 425885 - DNA, 25 bp, Artificial
  probe
  misc_feature (1)..(25): SEQ ID NO: 5943; WAN0249HJ; Start 259; Stop 283
aataggatttggcgttagttactta

SEQ ID NO: 425886 - DNA, 25 bp, Artificial
  probe
  misc_feature (1)..(25): SEQ ID NO: 5943; WAN0249HJ; Start 147; Stop 171
gcgtctaacaattaggaactttagt

SEQ ID NO: 425887 - DNA, 25 bp, Artificial
  probe
  misc_feature (1)..(25): SEQ ID NO: 5943; WAN0249HJ; Start 146; Stop 170
agcgtctaacaattaggaactttag

SEQ ID NO: 425888 - DNA, 25 bp, Artificial
  probe
  misc_feature (1)..(25): SEQ ID NO: 5943; WAN0249HJ; Start 144; Stop 168
ctagcgtctaacaattaggaacttt

SEQ ID NO: 425889 - DNA, 25 bp, Artificial
  probe
  misc_feature (1)..(25): SEQ ID NO: 5943; WAN0249HJ; Start 171; Stop 195
ttccaataactttaagattacgacg

SEQ ID NO: 425890 - DNA, 25 bp, Artificial
  probe
  misc_feature (1)..(25): SEQ ID NO: 5943; WAN0249HJ; Start 2; Stop 26
tttgcaggaagtctattatttggtt

SEQ ID NO: 425891 - DNA, 25 bp, Artificial
  probe
  misc_feature (1)..(25): SEQ ID NO: 5943; WAN0249HJ; Start 145; Stop 169
tagcgtctaacaattaggaacttta

SEQ ID NO: 425892 - DNA, 25 bp, Artificial
  probe
  misc_feature (1)..(25): SEQ ID NO: 5943; WAN0249HJ; Start 255; Stop 279
tccgaataggatttggcgttagtta

SEQ ID NO: 425893 - DNA, 25 bp, Artificial
  probe
  misc_feature (1)..(25): SEQ ID NO: 5943; WAN0249HJ; Start 4; Stop 28
tgcaggaagtctattatttggttag

SEQ ID NO: 425894 - DNA, 25 bp, Artificial
  probe
  misc_feature (1)..(25): SEQ ID NO: 5943; WAN0249HJ; Start 172; Stop 196
tccaataactttaagattacgacgt

SEQ ID NO: 425895 - DNA, 25 bp, Artificial
  probe
  misc_feature (1)..(25): SEQ ID NO: 5943; WAN0249HJ; Start 3; Stop 27
ttgcaggaagtctattatttggtta

SEQ ID NO: 425896 - DNA, 25 bp, Artificial
  probe
  misc_feature (1)..(25): SEQ ID NO: 5943; WAN0249HJ; Start 18; Stop 42
tatttggttaggtgaattagtgaag

SEQ ID NO: 425897 - DNA, 25 bp, Artificial
  probe
  misc_feature (1)..(25): SEQ ID NO: 5943; WAN0249HJ; Start 9; Stop 33
gaagtctattatttggttaggtgaa

SEQ ID NO: 425898 - DNA, 25 bp, Artificial
  probe
  misc_feature (1)..(25): SEQ ID NO: 5943; WAN0249HJ; Start 251; Stop 275
aaagtccgaataggatttggcgtta

SEQ ID NO: 425899 - DNA, 25 bp, Artificial
  probe
  misc_feature (1)..(25): SEQ ID NO: 5943; WAN0249HJ; Start 44; Stop 68
gtttaggcaagtgtctctggttacg

SEQ ID NO: 425900 - DNA, 25 bp, Artificial
  probe
  misc_feature (1)..(25): SEQ ID NO: 5944; WAN0249G7; Start 21; Stop 45
aatactaagcctacacagactgatt

SEQ ID NO: 425901 - DNA, 25 bp, Artificial
  probe
  misc_feature (1)..(25): SEQ ID NO: 5944; WAN0249G7; Start 17; Stop 41
ttgaaatactaagcctacacagact

SEQ ID NO: 425902 - DNA, 25 bp, Artificial
  probe
  misc_feature (1)..(25): SEQ ID NO: 5944; WAN0249G7; Start 26; Stop 50
taagcctacacagactgatttcaat

SEQ ID NO: 425903 - DNA, 25 bp, Artificial
  probe
  misc_feature (1)..(25): SEQ ID NO: 5944; WAN0249G7; Start 23; Stop 47
tactaagcctacacagactgatttc

SEQ ID NO: 425904 - DNA, 25 bp, Artificial
  probe
  misc_feature (1)..(25): SEQ ID NO: 5944; WAN0249G7; Start 19; Stop 43
gaaatactaagcctacacagactga

SEQ ID NO: 425905 - DNA, 25 bp, Artificial
  probe
  misc_feature (1)..(25): SEQ ID NO: 5944; WAN0249G7; Start 18; Stop 42
tgaaatactaagcctacacagactg

SEQ ID NO: 425906 - DNA, 25 bp, Artificial
  probe
  misc_feature (1)..(25): SEQ ID NO: 5944; WAN0249G7; Start 25; Stop 49
ctaagcctacacagactgatttcaa

SEQ ID NO: 425907 - DNA, 25 bp, Artificial
  probe
  misc_feature (1)..(25): SEQ ID NO: 5944; WAN0249G7; Start 27; Stop 51
aagcctacacagactgatttcaatt

SEQ ID NO: 425908 - DNA, 25 bp, Artificial
  probe
  misc_feature (1)..(25): SEQ ID NO: 5944; WAN0249G7; Start 22; Stop 46
atactaagcctacacagactgattt

SEQ ID NO: 425909 - DNA, 25 bp, Artificial
  probe
  misc_feature (1)..(25): SEQ ID NO: 5944; WAN0249G7; Start 20; Stop 44
aaatactaagcctacacagactgat

SEQ ID NO: 425910 - DNA, 25 bp, Artificial
  probe
  misc_feature (1)..(25): SEQ ID NO: 5944; WAN0249G7; Start 16; Stop 40
attgaaatactaagcctacacagac

SEQ ID NO: 425911 - DNA, 25 bp, Artificial
  probe
  misc_feature (1)..(25): SEQ ID NO: 5944; WAN0249G7; Start 24; Stop 48
actaagcctacacagactgatttca

SEQ ID NO: 425912 - DNA, 25 bp, Artificial
  probe
  misc_feature (1)..(25): SEQ ID NO: 5944; WAN0249G7; Start 8; Stop 32
ggaagtctattgaaatactaagcct

SEQ ID NO: 425913 - DNA, 25 bp, Artificial
  probe
  misc_feature (1)..(25): SEQ ID NO: 5944; WAN0249G7; Start 7; Stop 31
aggaagtctattgaaatactaagcc

SEQ ID NO: 425914 - DNA, 25 bp, Artificial
  probe
  misc_feature (1)..(25): SEQ ID NO: 5944; WAN0249G7; Start 15; Stop 39
tattgaaatactaagcctacacaga

SEQ ID NO: 425915 - DNA, 25 bp, Artificial
  probe
  misc_feature (1)..(25): SEQ ID NO: 5944; WAN0249G7; Start 13; Stop 37
tctattgaaatactaagcctacaca

SEQ ID NO: 425916 - DNA, 25 bp, Artificial
  probe
  misc_feature (1)..(25): SEQ ID NO: 5944; WAN0249G7; Start 14; Stop 38
ctattgaaatactaagcctacacag

SEQ ID NO: 425917 - DNA, 25 bp, Artificial
  probe
  misc_feature (1)..(25): SEQ ID NO: 5944; WAN0249G7; Start 12; Stop 36
gtctattgaaatactaagcctacac

SEQ ID NO: 425918 - DNA, 25 bp, Artificial
  probe
  misc_feature (1)..(25): SEQ ID NO: 5944; WAN0249G7; Start 6; Stop 30
caggaagtctattgaaatactaagc

SEQ ID NO: 425919 - DNA, 25 bp, Artificial
  probe
  misc_feature (1)..(25): SEQ ID NO: 5944; WAN0249G7; Start 5; Stop 29
gcaggaagtctattgaaatactaag

SEQ ID NO: 425920 - DNA, 25 bp, Artificial
  probe
  misc_feature (1)..(25): SEQ ID NO: 5944; WAN0249G7; Start 11; Stop 35
agtctattgaaatactaagcctaca

SEQ ID NO: 425921 - DNA, 25 bp, Artificial
  probe
  misc_feature (1)..(25): SEQ ID NO: 5944; WAN0249G7; Start 2; Stop 26
tttgcaggaagtctattgaaatact

SEQ ID NO: 425922 - DNA, 25 bp, Artificial
  probe
  misc_feature (1)..(25): SEQ ID NO: 5944; WAN0249G7; Start 4; Stop 28
tgcaggaagtctattgaaatactaa

SEQ ID NO: 425923 - DNA, 25 bp, Artificial
  probe
  misc_feature (1)..(25): SEQ ID NO: 5944; WAN0249G7; Start 3; Stop 27
ttgcaggaagtctattgaaatacta

SEQ ID NO: 425924 - DNA, 25 bp, Artificial
  probe
  misc_feature (1)..(25): SEQ ID NO: 5944; WAN0249G7; Start 10; Stop 34
aagtctattgaaatactaagcctac

SEQ ID NO: 425925 - DNA, 25 bp, Artificial
  probe
  misc_feature (1)..(25): SEQ ID NO: 5944; WAN0249G7; Start 9; Stop 33
gaagtctattgaaatactaagccta

SEQ ID NO: 425926 - DNA, 25 bp, Artificial
  probe
  misc_feature (1)..(25): SEQ ID NO: 5944; WAN0249G7; Start 1; Stop 25
ttttgcaggaagtctattgaaatac

SEQ ID NO: 425927 - DNA, 25 bp, Artificial
  probe
  misc_feature (1)..(25): SEQ ID NO: 5945; WAN024A9K; Start 6; Stop 30
caggaagtctattgaggtattgagc

SEQ ID NO: 425928 - DNA, 25 bp, Artificial
  probe
  misc_feature (1)..(25): SEQ ID NO: 5945; WAN024A9K; Start 5; Stop 29
gcaggaagtctattgaggtattgag

SEQ ID NO: 425929 - DNA, 25 bp, Artificial
  probe
  misc_feature (1)..(25): SEQ ID NO: 5945; WAN024A9K; Start 8; Stop 32
ggaagtctattgaggtattgagcta

SEQ ID NO: 425930 - DNA, 25 bp, Artificial
  probe
  misc_feature (1)..(25): SEQ ID NO: 5945; WAN024A9K; Start 7; Stop 31
aggaagtctattgaggtattgagct

SEQ ID NO: 425931 - DNA, 25 bp, Artificial
  probe
  misc_feature (1)..(25): SEQ ID NO: 5945; WAN024A9K; Start 11; Stop 35
agtctattgaggtattgagctagtt

SEQ ID NO: 425932 - DNA, 25 bp, Artificial
  probe
  misc_feature (1)..(25): SEQ ID NO: 5945; WAN024A9K; Start 10; Stop 34
aagtctattgaggtattgagctagt

SEQ ID NO: 425933 - DNA, 25 bp, Artificial
  probe
  misc_feature (1)..(25): SEQ ID NO: 5945; WAN024A9K; Start 3; Stop 27
ttgcaggaagtctattgaggtattg

SEQ ID NO: 425934 - DNA, 25 bp, Artificial
  probe
  misc_feature (1)..(25): SEQ ID NO: 5945; WAN024A9K; Start 9; Stop 33
gaagtctattgaggtattgagctag

SEQ ID NO: 425935 - DNA, 25 bp, Artificial
  probe
  misc_feature (1)..(25): SEQ ID NO: 5945; WAN024A9K; Start 4; Stop 28
tgcaggaagtctattgaggtattga

SEQ ID NO: 425936 - DNA, 25 bp, Artificial
  probe
  misc_feature (1)..(25): SEQ ID NO: 5945; WAN024A9K; Start 74; Stop 98
cccacagtgtagtattctagtttca

SEQ ID NO: 425937 - DNA, 25 bp, Artificial
  probe
  misc_feature (1)..(25): SEQ ID NO: 5945; WAN024A9K; Start 73; Stop 97
acccacagtgtagtattctagtttc

SEQ ID NO: 425938 - DNA, 25 bp, Artificial
  probe
  misc_feature (1)..(25): SEQ ID NO: 5945; WAN024A9K; Start 70; Stop 94
gaaacccacagtgtagtattctagt

SEQ ID NO: 425939 - DNA, 25 bp, Artificial
  probe
  misc_feature (1)..(25): SEQ ID NO: 5945; WAN024A9K; Start 72; Stop 96
aacccacagtgtagtattctagttt

SEQ ID NO: 425940 - DNA, 25 bp, Artificial
  probe
  misc_feature (1)..(25): SEQ ID NO: 5945; WAN024A9K; Start 71; Stop 95
aaacccacagtgtagtattctagtt

SEQ ID NO: 425941 - DNA, 25 bp, Artificial
  probe
  misc_feature (1)..(25): SEQ ID NO: 5945; WAN024A9K; Start 66; Stop 90
tttagaaacccacagtgtagtattc

SEQ ID NO: 425942 - DNA, 25 bp, Artificial
  probe
  misc_feature (1)..(25): SEQ ID NO: 5945; WAN024A9K; Start 75; Stop 99
ccacagtgtagtattctagtttcaa

SEQ ID NO: 425943 - DNA, 25 bp, Artificial
  probe
  misc_feature (1)..(25): SEQ ID NO: 5945; WAN024A9K; Start 166; Stop 190
tgacttcaagagtaaggaagagaag

SEQ ID NO: 425944 - DNA, 25 bp, Artificial
  probe
  misc_feature (1)..(25): SEQ ID NO: 5945; WAN024A9K; Start 165; Stop 189
ttgacttcaagagtaaggaagagaa

SEQ ID NO: 425945 - DNA, 25 bp, Artificial
  probe
  misc_feature (1)..(25): SEQ ID NO: 5945; WAN024A9K; Start 164; Stop 188
attgacttcaagagtaaggaagaga

SEQ ID NO: 425946 - DNA, 25 bp, Artificial
  probe
  misc_feature (1)..(25): SEQ ID NO: 5945; WAN024A9K; Start 2; Stop 26
tttgcaggaagtctattgaggtatt

SEQ ID NO: 425947 - DNA, 25 bp, Artificial
  probe
  misc_feature (1)..(25): SEQ ID NO: 5945; WAN024A9K; Start 79; Stop 103
agtgtagtattctagtttcaatcca

SEQ ID NO: 425948 - DNA, 25 bp, Artificial
  probe
  misc_feature (1)..(25): SEQ ID NO: 5945; WAN024A9K; Start 12; Stop 36
gtctattgaggtattgagctagttt

SEQ ID NO: 425949 - DNA, 25 bp, Artificial
  probe
  misc_feature (1)..(25): SEQ ID NO: 5945; WAN024A9K; Start 69; Stop 93
agaaacccacagtgtagtattctag

SEQ ID NO: 425950 - DNA, 25 bp, Artificial
  probe
  misc_feature (1)..(25): SEQ ID NO: 5945; WAN024A9K; Start 78; Stop 102
cagtgtagtattctagtttcaatcc

SEQ ID NO: 425951 - DNA, 25 bp, Artificial
  probe
  misc_feature (1)..(25): SEQ ID NO: 5945; WAN024A9K; Start 163; Stop 187
tattgacttcaagagtaaggaagag

SEQ ID NO: 425952 - DNA, 25 bp, Artificial
  probe
  misc_feature (1)..(25): SEQ ID NO: 5945; WAN024A9K; Start 67; Stop 91
ttagaaacccacagtgtagtattct

SEQ ID NO: 425953 - DNA, 25 bp, Artificial
  probe
  misc_feature (1)..(25): SEQ ID NO: 5945; WAN024A9K; Start 98; Stop 122
aatccactatattttgctactcccc

SEQ ID NO: 425954 - DNA, 25 bp, Artificial
  probe
  misc_feature (1)..(25): SEQ ID NO: 5945; WAN024A9K; Start 17; Stop 41
ttgaggtattgagctagtttatgaa

SEQ ID NO: 425955 - DNA, 25 bp, Artificial
  probe
  misc_feature (1)..(25): SEQ ID NO: 5945; WAN024A9K; Start 102; Stop 126
cactatattttgctactccccgtaa

SEQ ID NO: 425956 - DNA, 25 bp, Artificial
  probe
  misc_feature (1)..(25): SEQ ID NO: 5945; WAN024A9K; Start 81; Stop 105
tgtagtattctagtttcaatccact

SEQ ID NO: 425957 - DNA, 25 bp, Artificial
  probe
  misc_feature (1)..(25): SEQ ID NO: 5945; WAN024A9K; Start 18; Stop 42
tgaggtattgagctagtttatgaaa

SEQ ID NO: 425958 - DNA, 25 bp, Artificial
  probe
  misc_feature (1)..(25): SEQ ID NO: 5945; WAN024A9K; Start 103; Stop 127
actatattttgctactccccgtaaa

SEQ ID NO: 425959 - DNA, 25 bp, Artificial
  probe
  misc_feature (1)..(25): SEQ ID NO: 5945; WAN024A9K; Start 120; Stop 144
cccgtaaagtttctattttccctga

SEQ ID NO: 425960 - DNA, 25 bp, Artificial
  probe
  misc_feature (1)..(25): SEQ ID NO: 5946; WAN024AI3; Start 9; Stop 33
ttccttctttcaatttattcttctt

SEQ ID NO: 425961 - DNA, 25 bp, Artificial
  probe
  misc_feature (1)..(25): SEQ ID NO: 5947; WAN0249XH; Start 6; Stop 30
gttgttagtagtatcgcggtctatc

SEQ ID NO: 425962 - DNA, 25 bp, Artificial
  probe
  misc_feature (1)..(25): SEQ ID NO: 5947; WAN0249XH; Start 40; Stop 64
agattcccatttgaacttaagaagg

SEQ ID NO: 425963 - DNA, 25 bp, Artificial
  probe
  misc_feature (1)..(25): SEQ ID NO: 5947; WAN0249XH; Start 10; Stop 34
ttagtagtatcgcggtctatccttg

SEQ ID NO: 425964 - DNA, 25 bp, Artificial
  probe
  misc_feature (1)..(25): SEQ ID NO: 5947; WAN0249XH; Start 9; Stop 33
gttagtagtatcgcggtctatcctt

SEQ ID NO: 425965 - DNA, 25 bp, Artificial
  probe
  misc_feature (1)..(25): SEQ ID NO: 5947; WAN0249XH; Start 7; Stop 31
ttgttagtagtatcgcggtctatcc

SEQ ID NO: 425966 - DNA, 25 bp, Artificial
  probe
  misc_feature (1)..(25): SEQ ID NO: 5947; WAN0249XH; Start 5; Stop 29
ggttgttagtagtatcgcggtctat

SEQ ID NO: 425967 - DNA, 25 bp, Artificial
  probe
  misc_feature (1)..(25): SEQ ID NO: 5947; WAN0249XH; Start 43; Stop 67
ttcccatttgaacttaagaaggagt

SEQ ID NO: 425968 - DNA, 25 bp, Artificial
  probe
  misc_feature (1)..(25): SEQ ID NO: 5947; WAN0249XH; Start 8; Stop 32
tgttagtagtatcgcggtctatcct

SEQ ID NO: 425969 - DNA, 25 bp, Artificial
  probe
  misc_feature (1)..(25): SEQ ID NO: 5947; WAN0249XH; Start 42; Stop 66
attcccatttgaacttaagaaggag

SEQ ID NO: 425970 - DNA, 25 bp, Artificial
  probe
  misc_feature (1)..(25): SEQ ID NO: 5947; WAN0249XH; Start 41; Stop 65
gattcccatttgaacttaagaagga

SEQ ID NO: 425971 - DNA, 25 bp, Artificial
  probe
  misc_feature (1)..(25): SEQ ID NO: 5947; WAN0249XH; Start 39; Stop 63
aagattcccatttgaacttaagaag

SEQ ID NO: 425972 - DNA, 25 bp, Artificial
  probe
  misc_feature (1)..(25): SEQ ID NO: 5947; WAN0249XH; Start 37; Stop 61
gaaagattcccatttgaacttaaga

SEQ ID NO: 425973 - DNA, 25 bp, Artificial
  probe
  misc_feature (1)..(25): SEQ ID NO: 5947; WAN0249XH; Start 11; Stop 35
tagtagtatcgcggtctatccttgg

SEQ ID NO: 425974 - DNA, 25 bp, Artificial
  probe
  misc_feature (1)..(25): SEQ ID NO: 5947; WAN0249XH; Start 4; Stop 28
tggttgttagtagtatcgcggtcta

SEQ ID NO: 425975 - DNA, 25 bp, Artificial
  probe
  misc_feature (1)..(25): SEQ ID NO: 5947; WAN0249XH; Start 38; Stop 62
aaagattcccatttgaacttaagaa

SEQ ID NO: 425976 - DNA, 25 bp, Artificial
  probe
  misc_feature (1)..(25): SEQ ID NO: 5947; WAN0249XH; Start 45; Stop 69
cccatttgaacttaagaaggagttg

SEQ ID NO: 425977 - DNA, 25 bp, Artificial
  probe
  misc_feature (1)..(25): SEQ ID NO: 5947; WAN0249XH; Start 44; Stop 68
tcccatttgaacttaagaaggagtt

SEQ ID NO: 425978 - DNA, 25 bp, Artificial
  probe
  misc_feature (1)..(25): SEQ ID NO: 5947; WAN0249XH; Start 46; Stop 70
ccatttgaacttaagaaggagttgt

SEQ ID NO: 425979 - DNA, 25 bp, Artificial
  probe
  misc_feature (1)..(25): SEQ ID NO: 5947; WAN0249XH; Start 47; Stop 71
catttgaacttaagaaggagttgtg

SEQ ID NO: 425980 - DNA, 25 bp, Artificial
  probe
  misc_feature (1)..(25): SEQ ID NO: 5947; WAN0249XH; Start 3; Stop 27
ttggttgttagtagtatcgcggtct

SEQ ID NO: 425981 - DNA, 25 bp, Artificial
  probe
  misc_feature (1)..(25): SEQ ID NO: 5947; WAN0249XH; Start 2; Stop 26
tttggttgttagtagtatcgcggtc

SEQ ID NO: 425982 - DNA, 25 bp, Artificial
  probe
  misc_feature (1)..(25): SEQ ID NO: 5947; WAN0249XH; Start 36; Stop 60
ggaaagattcccatttgaacttaag

SEQ ID NO: 425983 - DNA, 25 bp, Artificial
  probe
  misc_feature (1)..(25): SEQ ID NO: 5947; WAN0249XH; Start 1; Stop 25
ttttggttgttagtagtatcgcggt

SEQ ID NO: 425984 - DNA, 25 bp, Artificial
  probe
  misc_feature (1)..(25): SEQ ID NO: 5947; WAN0249XH; Start 21; Stop 45
gcggtctatccttggggaaagattc

SEQ ID NO: 425985 - DNA, 25 bp, Artificial
  probe
  misc_feature (1)..(25): SEQ ID NO: 5947; WAN0249XH; Start 12; Stop 36
agtagtatcgcggtctatccttggg

SEQ ID NO: 425986 - DNA, 25 bp, Artificial
  probe
  misc_feature (1)..(25): SEQ ID NO: 5947; WAN0249XH; Start 22; Stop 46
cggtctatccttggggaaagattcc

SEQ ID NO: 425987 - DNA, 25 bp, Artificial
  probe
  misc_feature (1)..(25): SEQ ID NO: 5948; WAN0249I9; Start 82; Stop 106
gtaggaactgtcacgaactatgtat

SEQ ID NO: 425988 - DNA, 25 bp, Artificial
  probe
  misc_feature (1)..(25): SEQ ID NO: 5948; WAN0249I9; Start 84; Stop 108
aggaactgtcacgaactatgtataa

SEQ ID NO: 425989 - DNA, 25 bp, Artificial
  probe
  misc_feature (1)..(25): SEQ ID NO: 5948; WAN0249I9; Start 85; Stop 109
ggaactgtcacgaactatgtataag

SEQ ID NO: 425990 - DNA, 25 bp, Artificial
  probe
  misc_feature (1)..(25): SEQ ID NO: 5948; WAN0249I9; Start 83; Stop 107
taggaactgtcacgaactatgtata

SEQ ID NO: 425991 - DNA, 25 bp, Artificial
  probe
  misc_feature (1)..(25): SEQ ID NO: 5948; WAN0249I9; Start 88; Stop 112
actgtcacgaactatgtataagaac

SEQ ID NO: 425992 - DNA, 25 bp, Artificial
  probe
  misc_feature (1)..(25): SEQ ID NO: 5948; WAN0249I9; Start 81; Stop 105
agtaggaactgtcacgaactatgta

SEQ ID NO: 425993 - DNA, 25 bp, Artificial
  probe
  misc_feature (1)..(25): SEQ ID NO: 5948; WAN0249I9; Start 89; Stop 113
ctgtcacgaactatgtataagaact

SEQ ID NO: 425994 - DNA, 25 bp, Artificial
  probe
  misc_feature (1)..(25): SEQ ID NO: 5948; WAN0249I9; Start 86; Stop 110
gaactgtcacgaactatgtataaga

SEQ ID NO: 425995 - DNA, 25 bp, Artificial
  probe
  misc_feature (1)..(25): SEQ ID NO: 5948; WAN0249I9; Start 80; Stop 104
aagtaggaactgtcacgaactatgt

SEQ ID NO: 425996 - DNA, 25 bp, Artificial
  probe
  misc_feature (1)..(25): SEQ ID NO: 5948; WAN0249I9; Start 87; Stop 111
aactgtcacgaactatgtataagaa

SEQ ID NO: 425997 - DNA, 25 bp, Artificial
  probe
  misc_feature (1)..(25): SEQ ID NO: 5948; WAN0249I9; Start 94; Stop 118
acgaactatgtataagaactatggt

SEQ ID NO: 425998 - DNA, 25 bp, Artificial
  probe
  misc_feature (1)..(25): SEQ ID NO: 5948; WAN0249I9; Start 90; Stop 114
tgtcacgaactatgtataagaacta

SEQ ID NO: 425999 - DNA, 25 bp, Artificial
  probe
  misc_feature (1)..(25): SEQ ID NO: 5948; WAN0249I9; Start 93; Stop 117
cacgaactatgtataagaactatgg

SEQ ID NO: 426000 - DNA, 25 bp, Artificial
  probe
  misc_feature (1)..(25): SEQ ID NO: 5948; WAN0249I9; Start 79; Stop 103
aaagtaggaactgtcacgaactatg

SEQ ID NO: 426001 - DNA, 25 bp, Artificial
  probe
  misc_feature (1)..(25): SEQ ID NO: 5948; WAN0249I9; Start 20; Stop 44
gaaagacagtcccagttcatacagt

SEQ ID NO: 426002 - DNA, 25 bp, Artificial
  probe
  misc_feature (1)..(25): SEQ ID NO: 5948; WAN0249I9; Start 21; Stop 45
aaagacagtcccagttcatacagtg

SEQ ID NO: 426003 - DNA, 25 bp, Artificial
  probe
  misc_feature (1)..(25): SEQ ID NO: 5948; WAN0249I9; Start 92; Stop 116
tcacgaactatgtataagaactatg

SEQ ID NO: 426004 - DNA, 25 bp, Artificial
  probe
  misc_feature (1)..(25): SEQ ID NO: 5948; WAN0249I9; Start 91; Stop 115
gtcacgaactatgtataagaactat

SEQ ID NO: 426005 - DNA, 25 bp, Artificial
  probe
  misc_feature (1)..(25): SEQ ID NO: 5948; WAN0249I9; Start 95; Stop 119
cgaactatgtataagaactatggta

SEQ ID NO: 426006 - DNA, 25 bp, Artificial
  probe
  misc_feature (1)..(25): SEQ ID NO: 5948; WAN0249I9; Start 78; Stop 102
aaaagtaggaactgtcacgaactat

SEQ ID NO: 426007 - DNA, 25 bp, Artificial
  probe
  misc_feature (1)..(25): SEQ ID NO: 5948; WAN0249I9; Start 19; Stop 43
ggaaagacagtcccagttcatacag

SEQ ID NO: 426008 - DNA, 25 bp, Artificial
  probe
  misc_feature (1)..(25): SEQ ID NO: 5948; WAN0249I9; Start 22; Stop 46
aagacagtcccagttcatacagtgt

SEQ ID NO: 426009 - DNA, 25 bp, Artificial
  probe
  misc_feature (1)..(25): SEQ ID NO: 5948; WAN0249I9; Start 48; Stop 72
cccaaggacacactgtatgatttta

SEQ ID NO: 426010 - DNA, 25 bp, Artificial
  probe
  misc_feature (1)..(25): SEQ ID NO: 5948; WAN0249I9; Start 49; Stop 73
ccaaggacacactgtatgattttat

SEQ ID NO: 426011 - DNA, 25 bp, Artificial
  probe
  misc_feature (1)..(25): SEQ ID NO: 5948; WAN0249I9; Start 50; Stop 74
caaggacacactgtatgattttatc

SEQ ID NO: 426012 - DNA, 25 bp, Artificial
  probe
  misc_feature (1)..(25): SEQ ID NO: 5948; WAN0249I9; Start 23; Stop 47
agacagtcccagttcatacagtgtg

SEQ ID NO: 426013 - DNA, 25 bp, Artificial
  probe
  misc_feature (1)..(25): SEQ ID NO: 5948; WAN0249I9; Start 46; Stop 70
tgcccaaggacacactgtatgattt

SEQ ID NO: 426014 - DNA, 25 bp, Artificial
  probe
  misc_feature (1)..(25): SEQ ID NO: 5948; WAN0249I9; Start 52; Stop 76
aggacacactgtatgattttatcaa

SEQ ID NO: 426015 - DNA, 25 bp, Artificial
  probe
  misc_feature (1)..(25): SEQ ID NO: 5948; WAN0249I9; Start 51; Stop 75
aaggacacactgtatgattttatca

SEQ ID NO: 426016 - DNA, 25 bp, Artificial
  probe
  misc_feature (1)..(25): SEQ ID NO: 5948; WAN0249I9; Start 47; Stop 71
gcccaaggacacactgtatgatttt

SEQ ID NO: 426017 - DNA, 25 bp, Artificial
  probe
  misc_feature (1)..(25): SEQ ID NO: 5948; WAN0249I9; Start 53; Stop 77
ggacacactgtatgattttatcaaa

SEQ ID NO: 426018 - DNA, 25 bp, Artificial
  probe
  misc_feature (1)..(25): SEQ ID NO: 5948; WAN0249I9; Start 45; Stop 69
gtgcccaaggacacactgtatgatt

SEQ ID NO: 426019 - DNA, 25 bp, Artificial
  probe
  misc_feature (1)..(25): SEQ ID NO: 5948; WAN0249I9; Start 54; Stop 78
gacacactgtatgattttatcaaaa

SEQ ID NO: 426020 - DNA, 25 bp, Artificial
  probe
  misc_feature (1)..(25): SEQ ID NO: 5948; WAN0249I9; Start 2; Stop 26
ttttacctccgaagctgggaaagac

SEQ ID NO: 426021 - DNA, 25 bp, Artificial
  probe
  misc_feature (1)..(25): SEQ ID NO: 5949; WAN024A8I; Start 110; Stop 134
agtaatcgctttcttttgtctgttt

SEQ ID NO: 426022 - DNA, 25 bp, Artificial
  probe
  misc_feature (1)..(25): SEQ ID NO: 5949; WAN024A8I; Start 111; Stop 135
gtaatcgctttcttttgtctgtttt

SEQ ID NO: 426023 - DNA, 25 bp, Artificial
  probe
  misc_feature (1)..(25): SEQ ID NO: 5949; WAN024A8I; Start 109; Stop 133
aagtaatcgctttcttttgtctgtt

SEQ ID NO: 426024 - DNA, 25 bp, Artificial
  probe
  misc_feature (1)..(25): SEQ ID NO: 5949; WAN024A8I; Start 115; Stop 139
tcgctttcttttgtctgttttattc

SEQ ID NO: 426025 - DNA, 25 bp, Artificial
  probe
  misc_feature (1)..(25): SEQ ID NO: 5949; WAN024A8I; Start 116; Stop 140
cgctttcttttgtctgttttattct

SEQ ID NO: 426026 - DNA, 25 bp, Artificial
  probe
  misc_feature (1)..(25): SEQ ID NO: 5949; WAN024A8I; Start 32; Stop 56
cacctctataataccttaaaacccc

SEQ ID NO: 426027 - DNA, 25 bp, Artificial
  probe
  misc_feature (1)..(25): SEQ ID NO: 5949; WAN024A8I; Start 114; Stop 138
atcgctttcttttgtctgttttatt

SEQ ID NO: 426028 - DNA, 25 bp, Artificial
  probe
  misc_feature (1)..(25): SEQ ID NO: 5949; WAN024A8I; Start 113; Stop 137
aatcgctttcttttgtctgttttat

SEQ ID NO: 426029 - DNA, 25 bp, Artificial
  probe
  misc_feature (1)..(25): SEQ ID NO: 5949; WAN024A8I; Start 33; Stop 57
acctctataataccttaaaacccct

SEQ ID NO: 426030 - DNA, 25 bp, Artificial
  probe
  misc_feature (1)..(25): SEQ ID NO: 5949; WAN024A8I; Start 36; Stop 60
tctataataccttaaaacccctcct

SEQ ID NO: 426031 - DNA, 25 bp, Artificial
  probe
  misc_feature (1)..(25): SEQ ID NO: 5949; WAN024A8I; Start 35; Stop 59
ctctataataccttaaaacccctcc

SEQ ID NO: 426032 - DNA, 25 bp, Artificial
  probe
  misc_feature (1)..(25): SEQ ID NO: 5949; WAN024A8I; Start 34; Stop 58
cctctataataccttaaaacccctc

SEQ ID NO: 426033 - DNA, 25 bp, Artificial
  probe
  misc_feature (1)..(25): SEQ ID NO: 5949; WAN024A8I; Start 112; Stop 136
taatcgctttcttttgtctgtttta

SEQ ID NO: 426034 - DNA, 25 bp, Artificial
  probe
  misc_feature (1)..(25): SEQ ID NO: 5949; WAN024A8I; Start 31; Stop 55
acacctctataataccttaaaaccc

SEQ ID NO: 426035 - DNA, 25 bp, Artificial
  probe
  misc_feature (1)..(25): SEQ ID NO: 5949; WAN024A8I; Start 37; Stop 61
ctataataccttaaaacccctcctt

SEQ ID NO: 426036 - DNA, 25 bp, Artificial
  probe
  misc_feature (1)..(25): SEQ ID NO: 5949; WAN024A8I; Start 80; Stop 104
tctttgtgcaacttttccttaactt

SEQ ID NO: 426037 - DNA, 25 bp, Artificial
  probe
  misc_feature (1)..(25): SEQ ID NO: 5949; WAN024A8I; Start 79; Stop 103
atctttgtgcaacttttccttaact

SEQ ID NO: 426038 - DNA, 25 bp, Artificial
  probe
  misc_feature (1)..(25): SEQ ID NO: 5949; WAN024A8I; Start 81; Stop 105
ctttgtgcaacttttccttaacttt

SEQ ID NO: 426039 - DNA, 25 bp, Artificial
  probe
  misc_feature (1)..(25): SEQ ID NO: 5949; WAN024A8I; Start 108; Stop 132
aaagtaatcgctttcttttgtctgt

SEQ ID NO: 426040 - DNA, 25 bp, Artificial
  probe
  misc_feature (1)..(25): SEQ ID NO: 5949; WAN024A8I; Start 75; Stop 99
cgttatctttgtgcaacttttcctt

SEQ ID NO: 426041 - DNA, 25 bp, Artificial
  probe
  misc_feature (1)..(25): SEQ ID NO: 5949; WAN024A8I; Start 38; Stop 62
tataataccttaaaacccctccttt

SEQ ID NO: 426042 - DNA, 25 bp, Artificial
  probe
  misc_feature (1)..(25): SEQ ID NO: 5949; WAN024A8I; Start 39; Stop 63
ataataccttaaaacccctcctttt

SEQ ID NO: 426043 - DNA, 25 bp, Artificial
  probe
  misc_feature (1)..(25): SEQ ID NO: 5949; WAN024A8I; Start 78; Stop 102
tatctttgtgcaacttttccttaac

SEQ ID NO: 426044 - DNA, 25 bp, Artificial
  probe
  misc_feature (1)..(25): SEQ ID NO: 5949; WAN024A8I; Start 74; Stop 98
acgttatctttgtgcaacttttcct

SEQ ID NO: 426045 - DNA, 25 bp, Artificial
  probe
  misc_feature (1)..(25): SEQ ID NO: 5949; WAN024A8I; Start 76; Stop 100
gttatctttgtgcaacttttcctta

SEQ ID NO: 426046 - DNA, 25 bp, Artificial
  probe
  misc_feature (1)..(25): SEQ ID NO: 5949; WAN024A8I; Start 82; Stop 106
tttgtgcaacttttccttaacttta

SEQ ID NO: 426047 - DNA, 25 bp, Artificial
  probe
  misc_feature (1)..(25): SEQ ID NO: 5949; WAN024A8I; Start 107; Stop 131
taaagtaatcgctttcttttgtctg

SEQ ID NO: 426048 - DNA, 25 bp, Artificial
  probe
  misc_feature (1)..(25): SEQ ID NO: 5949; WAN024A8I; Start 83; Stop 107
ttgtgcaacttttccttaactttat

SEQ ID NO: 426049 - DNA, 25 bp, Artificial
  probe
  misc_feature (1)..(25): SEQ ID NO: 5949; WAN024A8I; Start 77; Stop 101
ttatctttgtgcaacttttccttaa

SEQ ID NO: 426050 - DNA, 25 bp, Artificial
  probe
  misc_feature (1)..(25): SEQ ID NO: 5949; WAN024A8I; Start 117; Stop 141
gctttcttttgtctgttttattcta

SEQ ID NO: 426051 - DNA, 25 bp, Artificial
  probe
  misc_feature (1)..(25): SEQ ID NO: 5949; WAN024A8I; Start 84; Stop 108
tgtgcaacttttccttaactttata

SEQ ID NO: 426052 - DNA, 25 bp, Artificial
  probe
  misc_feature (1)..(25): SEQ ID NO: 5949; WAN024A8I; Start 106; Stop 130
ataaagtaatcgctttcttttgtct

SEQ ID NO: 426053 - DNA, 25 bp, Artificial
  probe
  misc_feature (1)..(25): SEQ ID NO: 5949; WAN024A8I; Start 30; Stop 54
tacacctctataataccttaaaacc

SEQ ID NO: 426054 - DNA, 25 bp, Artificial
  probe
  misc_feature (1)..(25): SEQ ID NO: 5950; WAN024AQY; Start 21; Stop 45
tcggatggaagatattgttgaagaa

SEQ ID NO: 426055 - DNA, 25 bp, Artificial
  probe
  misc_feature (1)..(25): SEQ ID NO: 5950; WAN024AQY; Start 20; Stop 44
gtcggatggaagatattgttgaaga

SEQ ID NO: 426056 - DNA, 25 bp, Artificial
  probe
  misc_feature (1)..(25): SEQ ID NO: 5950; WAN024AQY; Start 19; Stop 43
agtcggatggaagatattgttgaag

SEQ ID NO: 426057 - DNA, 25 bp, Artificial
  probe
  misc_feature (1)..(25): SEQ ID NO: 5950; WAN024AQY; Start 18; Stop 42
gagtcggatggaagatattgttgaa

SEQ ID NO: 426058 - DNA, 25 bp, Artificial
  probe
  misc_feature (1)..(25): SEQ ID NO: 5950; WAN024AQY; Start 22; Stop 46
cggatggaagatattgttgaagaat

SEQ ID NO: 426059 - DNA, 25 bp, Artificial
  probe
  misc_feature (1)..(25): SEQ ID NO: 5950; WAN024AQY; Start 27; Stop 51
ggaagatattgttgaagaataagcc

SEQ ID NO: 426060 - DNA, 25 bp, Artificial
  probe
  misc_feature (1)..(25): SEQ ID NO: 5950; WAN024AQY; Start 17; Stop 41
cgagtcggatggaagatattgttga

SEQ ID NO: 426061 - DNA, 25 bp, Artificial
  probe
  misc_feature (1)..(25): SEQ ID NO: 5950; WAN024AQY; Start 26; Stop 50
tggaagatattgttgaagaataagc

SEQ ID NO: 426062 - DNA, 25 bp, Artificial
  probe
  misc_feature (1)..(25): SEQ ID NO: 5950; WAN024AQY; Start 16; Stop 40
tcgagtcggatggaagatattgttg

SEQ ID NO: 426063 - DNA, 25 bp, Artificial
  probe
  misc_feature (1)..(25): SEQ ID NO: 5950; WAN024AQY; Start 15; Stop 39
gtcgagtcggatggaagatattgtt

SEQ ID NO: 426064 - DNA, 25 bp, Artificial
  probe
  misc_feature (1)..(25): SEQ ID NO: 5950; WAN024AQY; Start 23; Stop 47
ggatggaagatattgttgaagaata

SEQ ID NO: 426065 - DNA, 25 bp, Artificial
  probe
  misc_feature (1)..(25): SEQ ID NO: 5950; WAN024AQY; Start 12; Stop 36
ttcgtcgagtcggatggaagatatt

SEQ ID NO: 426066 - DNA, 25 bp, Artificial
  probe
  misc_feature (1)..(25): SEQ ID NO: 5950; WAN024AQY; Start 59; Stop 83
tgatagaaaccgtttacaaataact

SEQ ID NO: 426067 - DNA, 25 bp, Artificial
  probe
  misc_feature (1)..(25): SEQ ID NO: 5950; WAN024AQY; Start 13; Stop 37
tcgtcgagtcggatggaagatattg

SEQ ID NO: 426068 - DNA, 25 bp, Artificial
  probe
  misc_feature (1)..(25): SEQ ID NO: 5950; WAN024AQY; Start 53; Stop 77
tcaatatgatagaaaccgtttacaa

SEQ ID NO: 426069 - DNA, 25 bp, Artificial
  probe
  misc_feature (1)..(25): SEQ ID NO: 5950; WAN024AQY; Start 14; Stop 38
cgtcgagtcggatggaagatattgt

SEQ ID NO: 426070 - DNA, 25 bp, Artificial
  probe
  misc_feature (1)..(25): SEQ ID NO: 5950; WAN024AQY; Start 25; Stop 49
atggaagatattgttgaagaataag

SEQ ID NO: 426071 - DNA, 25 bp, Artificial
  probe
  misc_feature (1)..(25): SEQ ID NO: 5950; WAN024AQY; Start 24; Stop 48
gatggaagatattgttgaagaataa

SEQ ID NO: 426072 - DNA, 25 bp, Artificial
  probe
  misc_feature (1)..(25): SEQ ID NO: 5950; WAN024AQY; Start 54; Stop 78
caatatgatagaaaccgtttacaaa

SEQ ID NO: 426073 - DNA, 25 bp, Artificial
  probe
  misc_feature (1)..(25): SEQ ID NO: 5950; WAN024AQY; Start 11; Stop 35
tttcgtcgagtcggatggaagatat

SEQ ID NO: 426074 - DNA, 25 bp, Artificial
  probe
  misc_feature (1)..(25): SEQ ID NO: 5950; WAN024AQY; Start 58; Stop 82
atgatagaaaccgtttacaaataac

SEQ ID NO: 426075 - DNA, 25 bp, Artificial
  probe
  misc_feature (1)..(25): SEQ ID NO: 5950; WAN024AQY; Start 60; Stop 84
gatagaaaccgtttacaaataactt

SEQ ID NO: 426076 - DNA, 25 bp, Artificial
  probe
  misc_feature (1)..(25): SEQ ID NO: 5950; WAN024AQY; Start 63; Stop 87
agaaaccgtttacaaataactttaa

SEQ ID NO: 426077 - DNA, 25 bp, Artificial
  probe
  misc_feature (1)..(25): SEQ ID NO: 5950; WAN024AQY; Start 61; Stop 85
atagaaaccgtttacaaataacttt

SEQ ID NO: 426078 - DNA, 25 bp, Artificial
  probe
  misc_feature (1)..(25): SEQ ID NO: 5950; WAN024AQY; Start 55; Stop 79
aatatgatagaaaccgtttacaaat

SEQ ID NO: 426079 - DNA, 25 bp, Artificial
  probe
  misc_feature (1)..(25): SEQ ID NO: 5950; WAN024AQY; Start 62; Stop 86
tagaaaccgtttacaaataacttta

SEQ ID NO: 426080 - DNA, 25 bp, Artificial
  probe
  misc_feature (1)..(25): SEQ ID NO: 5950; WAN024AQY; Start 10; Stop 34
ttttcgtcgagtcggatggaagata

SEQ ID NO: 426081 - DNA, 25 bp, Artificial
  probe
  misc_feature (1)..(25): SEQ ID NO: 5950; WAN024AQY; Start 64; Stop 88
gaaaccgtttacaaataactttaaa

SEQ ID NO: 426082 - DNA, 25 bp, Artificial
  probe
  misc_feature (1)..(25): SEQ ID NO: 5950; WAN024AQY; Start 121; Stop 145
gttgctataaatctctaatttgaga

SEQ ID NO: 426083 - DNA, 25 bp, Artificial
  probe
  misc_feature (1)..(25): SEQ ID NO: 5951; WAN0249GF; Start 2; Stop 26
ttttaggaacaaactagtcccctag

SEQ ID NO: 426084 - DNA, 25 bp, Artificial
  probe
  misc_feature (1)..(25): SEQ ID NO: 5951; WAN0249GF; Start 9; Stop 33
aacaaactagtcccctagcttcaag

SEQ ID NO: 426085 - DNA, 25 bp, Artificial
  probe
  misc_feature (1)..(25): SEQ ID NO: 5951; WAN0249GF; Start 8; Stop 32
gaacaaactagtcccctagcttcaa

SEQ ID NO: 426086 - DNA, 25 bp, Artificial
  probe
  misc_feature (1)..(25): SEQ ID NO: 5951; WAN0249GF; Start 3; Stop 27
tttaggaacaaactagtcccctagc

SEQ ID NO: 426087 - DNA, 25 bp, Artificial
  probe
  misc_feature (1)..(25): SEQ ID NO: 5951; WAN0249GF; Start 5; Stop 29
taggaacaaactagtcccctagctt

SEQ ID NO: 426088 - DNA, 25 bp, Artificial
  probe
  misc_feature (1)..(25): SEQ ID NO: 5951; WAN0249GF; Start 4; Stop 28
ttaggaacaaactagtcccctagct

SEQ ID NO: 426089 - DNA, 25 bp, Artificial
  probe
  misc_feature (1)..(25): SEQ ID NO: 5951; WAN0249GF; Start 6; Stop 30
aggaacaaactagtcccctagcttc

SEQ ID NO: 426090 - DNA, 25 bp, Artificial
  probe
  misc_feature (1)..(25): SEQ ID NO: 5951; WAN0249GF; Start 7; Stop 31
ggaacaaactagtcccctagcttca

SEQ ID NO: 426091 - DNA, 25 bp, Artificial
  probe
  misc_feature (1)..(25): SEQ ID NO: 5951; WAN0249GF; Start 10; Stop 34
acaaactagtcccctagcttcaagc

SEQ ID NO: 426092 - DNA, 25 bp, Artificial
  probe
  misc_feature (1)..(25): SEQ ID NO: 5951; WAN0249GF; Start 11; Stop 35
caaactagtcccctagcttcaagct

SEQ ID NO: 426093 - DNA, 25 bp, Artificial
  probe
  misc_feature (1)..(25): SEQ ID NO: 5952; WAN0249X5; Start 42; Stop 66
ttgtgacactcttaataatcaatgt

SEQ ID NO: 426094 - DNA, 25 bp, Artificial
  probe
  misc_feature (1)..(25): SEQ ID NO: 5952; WAN0249X5; Start 41; Stop 65
attgtgacactcttaataatcaatg

SEQ ID NO: 426095 - DNA, 25 bp, Artificial
  probe
  misc_feature (1)..(25): SEQ ID NO: 5952; WAN0249X5; Start 43; Stop 67
tgtgacactcttaataatcaatgtc

SEQ ID NO: 426096 - DNA, 25 bp, Artificial
  probe
  misc_feature (1)..(25): SEQ ID NO: 5952; WAN0249X5; Start 40; Stop 64
aattgtgacactcttaataatcaat

SEQ ID NO: 426097 - DNA, 25 bp, Artificial
  probe
  misc_feature (1)..(25): SEQ ID NO: 5952; WAN0249X5; Start 46; Stop 70
gacactcttaataatcaatgtcaat

SEQ ID NO: 426098 - DNA, 25 bp, Artificial
  probe
  misc_feature (1)..(25): SEQ ID NO: 5952; WAN0249X5; Start 9; Stop 33
cctctcttgttgtaattattttagt

SEQ ID NO: 426099 - DNA, 25 bp, Artificial
  probe
  misc_feature (1)..(25): SEQ ID NO: 5952; WAN0249X5; Start 8; Stop 32
acctctcttgttgtaattattttag

SEQ ID NO: 426100 - DNA, 25 bp, Artificial
  probe
  misc_feature (1)..(25): SEQ ID NO: 5953; WAN024A8R; Start 48; Stop 72
tgtcaatctcgtctcaattaacaga

SEQ ID NO: 426101 - DNA, 25 bp, Artificial
  probe
  misc_feature (1)..(25): SEQ ID NO: 5953; WAN024A8R; Start 47; Stop 71
ttgtcaatctcgtctcaattaacag

SEQ ID NO: 426102 - DNA, 25 bp, Artificial
  probe
  misc_feature (1)..(25): SEQ ID NO: 5953; WAN024A8R; Start 46; Stop 70
tttgtcaatctcgtctcaattaaca

SEQ ID NO: 426103 - DNA, 25 bp, Artificial
  probe
  misc_feature (1)..(25): SEQ ID NO: 5953; WAN024A8R; Start 50; Stop 74
tcaatctcgtctcaattaacagaca

SEQ ID NO: 426104 - DNA, 25 bp, Artificial
  probe
  misc_feature (1)..(25): SEQ ID NO: 5953; WAN024A8R; Start 49; Stop 73
gtcaatctcgtctcaattaacagac

SEQ ID NO: 426105 - DNA, 25 bp, Artificial
  probe
  misc_feature (1)..(25): SEQ ID NO: 5953; WAN024A8R; Start 56; Stop 80
tcgtctcaattaacagacatagtca

SEQ ID NO: 426106 - DNA, 25 bp, Artificial
  probe
  misc_feature (1)..(25): SEQ ID NO: 5953; WAN024A8R; Start 54; Stop 78
tctcgtctcaattaacagacatagt

SEQ ID NO: 426107 - DNA, 25 bp, Artificial
  probe
  misc_feature (1)..(25): SEQ ID NO: 5953; WAN024A8R; Start 51; Stop 75
caatctcgtctcaattaacagacat

SEQ ID NO: 426108 - DNA, 25 bp, Artificial
  probe
  misc_feature (1)..(25): SEQ ID NO: 5953; WAN024A8R; Start 55; Stop 79
ctcgtctcaattaacagacatagtc

SEQ ID NO: 426109 - DNA, 25 bp, Artificial
  probe
  misc_feature (1)..(25): SEQ ID NO: 5953; WAN024A8R; Start 57; Stop 81
cgtctcaattaacagacatagtcat

SEQ ID NO: 426110 - DNA, 25 bp, Artificial
  probe
  misc_feature (1)..(25): SEQ ID NO: 5953; WAN024A8R; Start 53; Stop 77
atctcgtctcaattaacagacatag

SEQ ID NO: 426111 - DNA, 25 bp, Artificial
  probe
  misc_feature (1)..(25): SEQ ID NO: 5953; WAN024A8R; Start 52; Stop 76
aatctcgtctcaattaacagacata

SEQ ID NO: 426112 - DNA, 25 bp, Artificial
  probe
  misc_feature (1)..(25): SEQ ID NO: 5953; WAN024A8R; Start 45; Stop 69
ttttgtcaatctcgtctcaattaac

SEQ ID NO: 426113 - DNA, 25 bp, Artificial
  probe
  misc_feature (1)..(25): SEQ ID NO: 5953; WAN024A8R; Start 59; Stop 83
tctcaattaacagacatagtcatat

SEQ ID NO: 426114 - DNA, 25 bp, Artificial
  probe
  misc_feature (1)..(25): SEQ ID NO: 5953; WAN024A8R; Start 68; Stop 92
acagacatagtcatattctctaaac

SEQ ID NO: 426115 - DNA, 25 bp, Artificial
  probe
  misc_feature (1)..(25): SEQ ID NO: 5953; WAN024A8R; Start 73; Stop 97
catagtcatattctctaaactctgt

SEQ ID NO: 426116 - DNA, 25 bp, Artificial
  probe
  misc_feature (1)..(25): SEQ ID NO: 5953; WAN024A8R; Start 72; Stop 96
acatagtcatattctctaaactctg

SEQ ID NO: 426117 - DNA, 25 bp, Artificial
  probe
  misc_feature (1)..(25): SEQ ID NO: 5953; WAN024A8R; Start 64; Stop 88
attaacagacatagtcatattctct

SEQ ID NO: 426118 - DNA, 25 bp, Artificial
  probe
  misc_feature (1)..(25): SEQ ID NO: 5953; WAN024A8R; Start 69; Stop 93
cagacatagtcatattctctaaact

SEQ ID NO: 426119 - DNA, 25 bp, Artificial
  probe
  misc_feature (1)..(25): SEQ ID NO: 5953; WAN024A8R; Start 71; Stop 95
gacatagtcatattctctaaactct

SEQ ID NO: 426120 - DNA, 25 bp, Artificial
  probe
  misc_feature (1)..(25): SEQ ID NO: 5953; WAN024A8R; Start 70; Stop 94
agacatagtcatattctctaaactc

SEQ ID NO: 426121 - DNA, 25 bp, Artificial
  probe
  misc_feature (1)..(25): SEQ ID NO: 5953; WAN024A8R; Start 58; Stop 82
gtctcaattaacagacatagtcata

SEQ ID NO: 426122 - DNA, 25 bp, Artificial
  probe
  misc_feature (1)..(25): SEQ ID NO: 5953; WAN024A8R; Start 67; Stop 91
aacagacatagtcatattctctaaa

SEQ ID NO: 426123 - DNA, 25 bp, Artificial
  probe
  misc_feature (1)..(25): SEQ ID NO: 5953; WAN024A8R; Start 74; Stop 98
atagtcatattctctaaactctgtt

SEQ ID NO: 426124 - DNA, 25 bp, Artificial
  probe
  misc_feature (1)..(25): SEQ ID NO: 5953; WAN024A8R; Start 75; Stop 99
tagtcatattctctaaactctgttt

SEQ ID NO: 426125 - DNA, 25 bp, Artificial
  probe
  misc_feature (1)..(25): SEQ ID NO: 5953; WAN024A8R; Start 76; Stop 100
agtcatattctctaaactctgtttt

SEQ ID NO: 426126 - DNA, 25 bp, Artificial
  probe
  misc_feature (1)..(25): SEQ ID NO: 5954; WAN024A9V; Start 4; Stop 28
ttctctccttcgttacattctattt

SEQ ID NO: 426127 - DNA, 25 bp, Artificial
  probe
  misc_feature (1)..(25): SEQ ID NO: 5954; WAN024A9V; Start 3; Stop 27
tttctctccttcgttacattctatt

SEQ ID NO: 426128 - DNA, 25 bp, Artificial
  probe
  misc_feature (1)..(25): SEQ ID NO: 5954; WAN024A9V; Start 29; Stop 53
tctattatcttagcatgaattgagc

SEQ ID NO: 426129 - DNA, 25 bp, Artificial
  probe
  misc_feature (1)..(25): SEQ ID NO: 5954; WAN024A9V; Start 7; Stop 31
tctccttcgttacattctattttct

SEQ ID NO: 426130 - DNA, 25 bp, Artificial
  probe
  misc_feature (1)..(25): SEQ ID NO: 5954; WAN024A9V; Start 5; Stop 29
tctctccttcgttacattctatttt

SEQ ID NO: 426131 - DNA, 25 bp, Artificial
  probe
  misc_feature (1)..(25): SEQ ID NO: 5954; WAN024A9V; Start 2; Stop 26
ttttctctccttcgttacattctat

SEQ ID NO: 426132 - DNA, 25 bp, Artificial
  probe
  misc_feature (1)..(25): SEQ ID NO: 5954; WAN024A9V; Start 30; Stop 54
ctattatcttagcatgaattgagct

SEQ ID NO: 426133 - DNA, 25 bp, Artificial
  probe
  misc_feature (1)..(25): SEQ ID NO: 5954; WAN024A9V; Start 6; Stop 30
ctctccttcgttacattctattttc

SEQ ID NO: 426134 - DNA, 25 bp, Artificial
  probe
  misc_feature (1)..(25): SEQ ID NO: 5954; WAN024A9V; Start 34; Stop 58
tatcttagcatgaattgagctagtt

SEQ ID NO: 426135 - DNA, 25 bp, Artificial
  probe
  misc_feature (1)..(25): SEQ ID NO: 5954; WAN024A9V; Start 33; Stop 57
ttatcttagcatgaattgagctagt

SEQ ID NO: 426136 - DNA, 25 bp, Artificial
  probe
  misc_feature (1)..(25): SEQ ID NO: 5954; WAN024A9V; Start 8; Stop 32
ctccttcgttacattctattttcta

SEQ ID NO: 426137 - DNA, 25 bp, Artificial
  probe
  misc_feature (1)..(25): SEQ ID NO: 5954; WAN024A9V; Start 35; Stop 59
atcttagcatgaattgagctagttt

SEQ ID NO: 426138 - DNA, 25 bp, Artificial
  probe
  misc_feature (1)..(25): SEQ ID NO: 5954; WAN024A9V; Start 32; Stop 56
attatcttagcatgaattgagctag

SEQ ID NO: 426139 - DNA, 25 bp, Artificial
  probe
  misc_feature (1)..(25): SEQ ID NO: 5954; WAN024A9V; Start 9; Stop 33
tccttcgttacattctattttctat

SEQ ID NO: 426140 - DNA, 25 bp, Artificial
  probe
  misc_feature (1)..(25): SEQ ID NO: 5954; WAN024A9V; Start 31; Stop 55
tattatcttagcatgaattgagcta

SEQ ID NO: 426141 - DNA, 25 bp, Artificial
  probe
  misc_feature (1)..(25): SEQ ID NO: 5954; WAN024A9V; Start 10; Stop 34
ccttcgttacattctattttctatt

SEQ ID NO: 426142 - DNA, 25 bp, Artificial
  probe
  misc_feature (1)..(25): SEQ ID NO: 5955; WAN024F7M; Start 111; Stop 135
gtacagctttgaggttgcagataaa

SEQ ID NO: 426143 - DNA, 25 bp, Artificial
  probe
  misc_feature (1)..(25): SEQ ID NO: 5955; WAN024F7M; Start 110; Stop 134
agtacagctttgaggttgcagataa

SEQ ID NO: 426144 - DNA, 25 bp, Artificial
  probe
  misc_feature (1)..(25): SEQ ID NO: 5955; WAN024F7M; Start 19; Stop 43
agactattgctgtgtaaaatatggc

SEQ ID NO: 426145 - DNA, 25 bp, Artificial
  probe
  misc_feature (1)..(25): SEQ ID NO: 5955; WAN024F7M; Start 109; Stop 133
aagtacagctttgaggttgcagata

SEQ ID NO: 426146 - DNA, 25 bp, Artificial
  probe
  misc_feature (1)..(25): SEQ ID NO: 5955; WAN024F7M; Start 43; Stop 67
cctggagcacttttatactcaatga

SEQ ID NO: 426147 - DNA, 25 bp, Artificial
  probe
  misc_feature (1)..(25): SEQ ID NO: 5955; WAN024F7M; Start 44; Stop 68
ctggagcacttttatactcaatgaa

SEQ ID NO: 426148 - DNA, 25 bp, Artificial
  probe
  misc_feature (1)..(25): SEQ ID NO: 5955; WAN024F7M; Start 45; Stop 69
tggagcacttttatactcaatgaaa

SEQ ID NO: 426149 - DNA, 25 bp, Artificial
  probe
  misc_feature (1)..(25): SEQ ID NO: 5955; WAN024F7M; Start 42; Stop 66
gcctggagcacttttatactcaatg

SEQ ID NO: 426150 - DNA, 25 bp, Artificial
  probe
  misc_feature (1)..(25): SEQ ID NO: 5955; WAN024F7M; Start 18; Stop 42
aagactattgctgtgtaaaatatgg

SEQ ID NO: 426151 - DNA, 25 bp, Artificial
  probe
  misc_feature (1)..(25): SEQ ID NO: 5955; WAN024F7M; Start 112; Stop 136
tacagctttgaggttgcagataaaa

SEQ ID NO: 426152 - DNA, 25 bp, Artificial
  probe
  misc_feature (1)..(25): SEQ ID NO: 5955; WAN024F7M; Start 46; Stop 70
ggagcacttttatactcaatgaaaa

SEQ ID NO: 426153 - DNA, 25 bp, Artificial
  probe
  misc_feature (1)..(25): SEQ ID NO: 5955; WAN024F7M; Start 108; Stop 132
aaagtacagctttgaggttgcagat

SEQ ID NO: 426154 - DNA, 25 bp, Artificial
  probe
  misc_feature (1)..(25): SEQ ID NO: 5955; WAN024F7M; Start 14; Stop 38
ttagaagactattgctgtgtaaaat

SEQ ID NO: 426155 - DNA, 25 bp, Artificial
  probe
  misc_feature (1)..(25): SEQ ID NO: 5955; WAN024F7M; Start 114; Stop 138
cagctttgaggttgcagataaaact

SEQ ID NO: 426156 - DNA, 25 bp, Artificial
  probe
  misc_feature (1)..(25): SEQ ID NO: 5955; WAN024F7M; Start 13; Stop 37
tttagaagactattgctgtgtaaaa

SEQ ID NO: 426157 - DNA, 25 bp, Artificial
  probe
  misc_feature (1)..(25): SEQ ID NO: 5955; WAN024F7M; Start 12; Stop 36
ttttagaagactattgctgtgtaaa

SEQ ID NO: 426158 - DNA, 25 bp, Artificial
  probe
  misc_feature (1)..(25): SEQ ID NO: 5955; WAN024F7M; Start 35; Stop 59
aaatatggcctggagcacttttata

SEQ ID NO: 426159 - DNA, 25 bp, Artificial
  probe
  misc_feature (1)..(25): SEQ ID NO: 5955; WAN024F7M; Start 113; Stop 137
acagctttgaggttgcagataaaac

SEQ ID NO: 426160 - DNA, 25 bp, Artificial
  probe
  misc_feature (1)..(25): SEQ ID NO: 5955; WAN024F7M; Start 36; Stop 60
aatatggcctggagcacttttatac

SEQ ID NO: 426161 - DNA, 25 bp, Artificial
  probe
  misc_feature (1)..(25): SEQ ID NO: 5955; WAN024F7M; Start 22; Stop 46
ctattgctgtgtaaaatatggcctg

SEQ ID NO: 426162 - DNA, 25 bp, Artificial
  probe
  misc_feature (1)..(25): SEQ ID NO: 5955; WAN024F7M; Start 20; Stop 44
gactattgctgtgtaaaatatggcc

SEQ ID NO: 426163 - DNA, 25 bp, Artificial
  probe
  misc_feature (1)..(25): SEQ ID NO: 5955; WAN024F7M; Start 21; Stop 45
actattgctgtgtaaaatatggcct

SEQ ID NO: 426164 - DNA, 25 bp, Artificial
  probe
  misc_feature (1)..(25): SEQ ID NO: 5955; WAN024F7M; Start 17; Stop 41
gaagactattgctgtgtaaaatatg

SEQ ID NO: 426165 - DNA, 25 bp, Artificial
  probe
  misc_feature (1)..(25): SEQ ID NO: 5955; WAN024F7M; Start 116; Stop 140
gctttgaggttgcagataaaactga

SEQ ID NO: 426166 - DNA, 25 bp, Artificial
  probe
  misc_feature (1)..(25): SEQ ID NO: 5955; WAN024F7M; Start 115; Stop 139
agctttgaggttgcagataaaactg

SEQ ID NO: 426167 - DNA, 25 bp, Artificial
  probe
  misc_feature (1)..(25): SEQ ID NO: 5955; WAN024F7M; Start 16; Stop 40
agaagactattgctgtgtaaaatat

SEQ ID NO: 426168 - DNA, 25 bp, Artificial
  probe
  misc_feature (1)..(25): SEQ ID NO: 5955; WAN024F7M; Start 37; Stop 61
atatggcctggagcacttttatact

SEQ ID NO: 426169 - DNA, 25 bp, Artificial
  probe
  misc_feature (1)..(25): SEQ ID NO: 5955; WAN024F7M; Start 121; Stop 145
gaggttgcagataaaactgacgaag

SEQ ID NO: 426170 - DNA, 25 bp, Artificial
  probe
  misc_feature (1)..(25): SEQ ID NO: 5955; WAN024F7M; Start 23; Stop 47
tattgctgtgtaaaatatggcctgg

SEQ ID NO: 426171 - DNA, 25 bp, Artificial
  probe
  misc_feature (1)..(25): SEQ ID NO: 5955; WAN024F7M; Start 123; Stop 147
ggttgcagataaaactgacgaagtc

SEQ ID NO: 426172 - DNA, 25 bp, Artificial
  probe
  misc_feature (1)..(25): SEQ ID NO: 5955; WAN024F7M; Start 122; Stop 146
aggttgcagataaaactgacgaagt

SEQ ID NO: 426173 - DNA, 25 bp, Artificial
  probe
  misc_feature (1)..(25): SEQ ID NO: 5955; WAN024F7M; Start 34; Stop 58
aaaatatggcctggagcacttttat

SEQ ID NO: 426174 - DNA, 25 bp, Artificial
  probe
  misc_feature (1)..(25): SEQ ID NO: 5955; WAN024F7M; Start 15; Stop 39
tagaagactattgctgtgtaaaata

SEQ ID NO: 426175 - DNA, 25 bp, Artificial
  probe
  misc_feature (1)..(25): SEQ ID NO: 5956; WAN024AQJ; Start 83; Stop 107
caaacgcttgcacaaaattttaaaa

SEQ ID NO: 426176 - DNA, 25 bp, Artificial
  probe
  misc_feature (1)..(25): SEQ ID NO: 5956; WAN024AQJ; Start 82; Stop 106
gcaaacgcttgcacaaaattttaaa

SEQ ID NO: 426177 - DNA, 25 bp, Artificial
  probe
  misc_feature (1)..(25): SEQ ID NO: 5957; WAN024ALK; Start 193; Stop 217
ctaacaagcagaagtaagataggtc

SEQ ID NO: 426178 - DNA, 25 bp, Artificial
  probe
  misc_feature (1)..(25): SEQ ID NO: 5957; WAN024ALK; Start 194; Stop 218
taacaagcagaagtaagataggtct

SEQ ID NO: 426179 - DNA, 25 bp, Artificial
  probe
  misc_feature (1)..(25): SEQ ID NO: 5957; WAN024ALK; Start 19; Stop 43
ctattatcacggttaaggtggcatt

SEQ ID NO: 426180 - DNA, 25 bp, Artificial
  probe
  misc_feature (1)..(25): SEQ ID NO: 5957; WAN024ALK; Start 54; Stop 78
tggaataaagaagtttggaagacat

SEQ ID NO: 426181 - DNA, 25 bp, Artificial
  probe
  misc_feature (1)..(25): SEQ ID NO: 5957; WAN024ALK; Start 53; Stop 77
atggaataaagaagtttggaagaca

SEQ ID NO: 426182 - DNA, 25 bp, Artificial
  probe
  misc_feature (1)..(25): SEQ ID NO: 5957; WAN024ALK; Start 192; Stop 216
gctaacaagcagaagtaagataggt

SEQ ID NO: 426183 - DNA, 25 bp, Artificial
  probe
  misc_feature (1)..(25): SEQ ID NO: 5957; WAN024ALK; Start 195; Stop 219
aacaagcagaagtaagataggtctt

SEQ ID NO: 426184 - DNA, 25 bp, Artificial
  probe
  misc_feature (1)..(25): SEQ ID NO: 5957; WAN024ALK; Start 277; Stop 301
tagtagcccaagggaagtatatcag

SEQ ID NO: 426185 - DNA, 25 bp, Artificial
  probe
  misc_feature (1)..(25): SEQ ID NO: 5957; WAN024ALK; Start 276; Stop 300
ctagtagcccaagggaagtatatca

SEQ ID NO: 426186 - DNA, 25 bp, Artificial
  probe
  misc_feature (1)..(25): SEQ ID NO: 5957; WAN024ALK; Start 28; Stop 52
cggttaaggtggcatttcattaaat

SEQ ID NO: 426187 - DNA, 25 bp, Artificial
  probe
  misc_feature (1)..(25): SEQ ID NO: 5957; WAN024ALK; Start 27; Stop 51
acggttaaggtggcatttcattaaa

SEQ ID NO: 426188 - DNA, 25 bp, Artificial
  probe
  misc_feature (1)..(25): SEQ ID NO: 5957; WAN024ALK; Start 286; Stop 310
aagggaagtatatcagggaggagag

SEQ ID NO: 426189 - DNA, 25 bp, Artificial
  probe
  misc_feature (1)..(25): SEQ ID NO: 5957; WAN024ALK; Start 34; Stop 58
aggtggcatttcattaaatatggaa

SEQ ID NO: 426190 - DNA, 25 bp, Artificial
  probe
  misc_feature (1)..(25): SEQ ID NO: 5957; WAN024ALK; Start 33; Stop 57
aaggtggcatttcattaaatatgga

SEQ ID NO: 426191 - DNA, 25 bp, Artificial
  probe
  misc_feature (1)..(25): SEQ ID NO: 5957; WAN024ALK; Start 13; Stop 37
gactagctattatcacggttaaggt

SEQ ID NO: 426192 - DNA, 25 bp, Artificial
  probe
  misc_feature (1)..(25): SEQ ID NO: 5957; WAN024ALK; Start 20; Stop 44
tattatcacggttaaggtggcattt

SEQ ID NO: 426193 - DNA, 25 bp, Artificial
  probe
  misc_feature (1)..(25): SEQ ID NO: 5957; WAN024ALK; Start 55; Stop 79
ggaataaagaagtttggaagacatt

SEQ ID NO: 426194 - DNA, 25 bp, Artificial
  probe
  misc_feature (1)..(25): SEQ ID NO: 5957; WAN024ALK; Start 285; Stop 309
caagggaagtatatcagggaggaga

SEQ ID NO: 426195 - DNA, 25 bp, Artificial
  probe
  misc_feature (1)..(25): SEQ ID NO: 5957; WAN024ALK; Start 18; Stop 42
gctattatcacggttaaggtggcat

SEQ ID NO: 426196 - DNA, 25 bp, Artificial
  probe
  misc_feature (1)..(25): SEQ ID NO: 5957; WAN024ALK; Start 324; Stop 348
ctctctatatgaaagctgggtgaat

SEQ ID NO: 426197 - DNA, 25 bp, Artificial
  probe
  misc_feature (1)..(25): SEQ ID NO: 5957; WAN024ALK; Start 312; Stop 336
cgtgactgcaagctctctatatgaa

SEQ ID NO: 426198 - DNA, 25 bp, Artificial
  probe
  misc_feature (1)..(25): SEQ ID NO: 5957; WAN024ALK; Start 325; Stop 349
tctctatatgaaagctgggtgaatt

SEQ ID NO: 426199 - DNA, 25 bp, Artificial
  probe
  misc_feature (1)..(25): SEQ ID NO: 5957; WAN024ALK; Start 191; Stop 215
agctaacaagcagaagtaagatagg

SEQ ID NO: 426200 - DNA, 25 bp, Artificial
  probe
  misc_feature (1)..(25): SEQ ID NO: 5957; WAN024ALK; Start 35; Stop 59
ggtggcatttcattaaatatggaat

SEQ ID NO: 426201 - DNA, 25 bp, Artificial
  probe
  misc_feature (1)..(25): SEQ ID NO: 5957; WAN024ALK; Start 12; Stop 36
tgactagctattatcacggttaagg

SEQ ID NO: 426202 - DNA, 25 bp, Artificial
  probe
  misc_feature (1)..(25): SEQ ID NO: 5957; WAN024ALK; Start 21; Stop 45
attatcacggttaaggtggcatttc

SEQ ID NO: 426203 - DNA, 25 bp, Artificial
  probe
  misc_feature (1)..(25): SEQ ID NO: 5957; WAN024ALK; Start 314; Stop 338
tgactgcaagctctctatatgaaag

SEQ ID NO: 426204 - DNA, 25 bp, Artificial
  probe
  misc_feature (1)..(25): SEQ ID NO: 5957; WAN024ALK; Start 190; Stop 214
aagctaacaagcagaagtaagatag

SEQ ID NO: 426205 - DNA, 25 bp, Artificial
  probe
  misc_feature (1)..(25): SEQ ID NO: 5957; WAN024ALK; Start 313; Stop 337
gtgactgcaagctctctatatgaaa

SEQ ID NO: 426206 - DNA, 25 bp, Artificial
  probe
  misc_feature (1)..(25): SEQ ID NO: 5957; WAN024ALK; Start 29; Stop 53
ggttaaggtggcatttcattaaata

SEQ ID NO: 426207 - DNA, 25 bp, Artificial
  probe
  misc_feature (1)..(25): SEQ ID NO: 5957; WAN024ALK; Start 52; Stop 76
tatggaataaagaagtttggaagac

SEQ ID NO: 426208 - DNA, 25 bp, Artificial
  probe
  misc_feature (1)..(25): SEQ ID NO: 5957; WAN024ALK; Start 26; Stop 50
cacggttaaggtggcatttcattaa

SEQ ID NO: 426209 - DNA, 25 bp, Artificial
  probe
  misc_feature (1)..(25): SEQ ID NO: 5957; WAN024ALK; Start 14; Stop 38
actagctattatcacggttaaggtg

SEQ ID NO: 426210 - DNA, 25 bp, Artificial
  probe
  misc_feature (1)..(25): SEQ ID NO: 5958; WAN024A7N; Start 62; Stop 86
atccttctccatctcacttcttgta

SEQ ID NO: 426211 - DNA, 25 bp, Artificial
  probe
  misc_feature (1)..(25): SEQ ID NO: 5958; WAN024A7N; Start 61; Stop 85
catccttctccatctcacttcttgt

SEQ ID NO: 426212 - DNA, 25 bp, Artificial
  probe
  misc_feature (1)..(25): SEQ ID NO: 5958; WAN024A7N; Start 63; Stop 87
tccttctccatctcacttcttgtac

SEQ ID NO: 426213 - DNA, 25 bp, Artificial
  probe
  misc_feature (1)..(25): SEQ ID NO: 5958; WAN024A7N; Start 65; Stop 89
cttctccatctcacttcttgtacca

SEQ ID NO: 426214 - DNA, 25 bp, Artificial
  probe
  misc_feature (1)..(25): SEQ ID NO: 5958; WAN024A7N; Start 66; Stop 90
ttctccatctcacttcttgtaccaa

SEQ ID NO: 426215 - DNA, 25 bp, Artificial
  probe
  misc_feature (1)..(25): SEQ ID NO: 5958; WAN024A7N; Start 60; Stop 84
ccatccttctccatctcacttcttg

SEQ ID NO: 426216 - DNA, 25 bp, Artificial
  probe
  misc_feature (1)..(25): SEQ ID NO: 5958; WAN024A7N; Start 64; Stop 88
ccttctccatctcacttcttgtacc

SEQ ID NO: 426217 - DNA, 25 bp, Artificial
  probe
  misc_feature (1)..(25): SEQ ID NO: 5958; WAN024A7N; Start 143; Stop 167
ttaataataggaaattcgccatagc

SEQ ID NO: 426218 - DNA, 25 bp, Artificial
  probe
  misc_feature (1)..(25): SEQ ID NO: 5958; WAN024A7N; Start 59; Stop 83
gccatccttctccatctcacttctt

SEQ ID NO: 426219 - DNA, 25 bp, Artificial
  probe
  misc_feature (1)..(25): SEQ ID NO: 5958; WAN024A7N; Start 71; Stop 95
catctcacttcttgtaccaagtcac

SEQ ID NO: 426220 - DNA, 25 bp, Artificial
  probe
  misc_feature (1)..(25): SEQ ID NO: 5958; WAN024A7N; Start 95; Stop 119
ccgaattgtgacatgaggaggtaaa

SEQ ID NO: 426221 - DNA, 25 bp, Artificial
  probe
  misc_feature (1)..(25): SEQ ID NO: 5958; WAN024A7N; Start 28; Stop 52
aaagtaaaagtgagaggagaggagt

SEQ ID NO: 426222 - DNA, 25 bp, Artificial
  probe
  misc_feature (1)..(25): SEQ ID NO: 5958; WAN024A7N; Start 27; Stop 51
taaagtaaaagtgagaggagaggag

SEQ ID NO: 426223 - DNA, 25 bp, Artificial
  probe
  misc_feature (1)..(25): SEQ ID NO: 5958; WAN024A7N; Start 67; Stop 91
tctccatctcacttcttgtaccaag

SEQ ID NO: 426224 - DNA, 25 bp, Artificial
  probe
  misc_feature (1)..(25): SEQ ID NO: 5958; WAN024A7N; Start 29; Stop 53
aagtaaaagtgagaggagaggagtc

SEQ ID NO: 426225 - DNA, 25 bp, Artificial
  probe
  misc_feature (1)..(25): SEQ ID NO: 5958; WAN024A7N; Start 69; Stop 93
tccatctcacttcttgtaccaagtc

SEQ ID NO: 426226 - DNA, 25 bp, Artificial
  probe
  misc_feature (1)..(25): SEQ ID NO: 5958; WAN024A7N; Start 68; Stop 92
ctccatctcacttcttgtaccaagt

SEQ ID NO: 426227 - DNA, 25 bp, Artificial
  probe
  misc_feature (1)..(25): SEQ ID NO: 5958; WAN024A7N; Start 26; Stop 50
ataaagtaaaagtgagaggagagga

SEQ ID NO: 426228 - DNA, 25 bp, Artificial
  probe
  misc_feature (1)..(25): SEQ ID NO: 5958; WAN024A7N; Start 78; Stop 102
cttcttgtaccaagtcaccgaattg

SEQ ID NO: 426229 - DNA, 25 bp, Artificial
  probe
  misc_feature (1)..(25): SEQ ID NO: 5958; WAN024A7N; Start 35; Stop 59
aagtgagaggagaggagtcagtgag

SEQ ID NO: 426230 - DNA, 25 bp, Artificial
  probe
  misc_feature (1)..(25): SEQ ID NO: 5958; WAN024A7N; Start 72; Stop 96
atctcacttcttgtaccaagtcacc

SEQ ID NO: 426231 - DNA, 25 bp, Artificial
  probe
  misc_feature (1)..(25): SEQ ID NO: 5958; WAN024A7N; Start 70; Stop 94
ccatctcacttcttgtaccaagtca

SEQ ID NO: 426232 - DNA, 25 bp, Artificial
  probe
  misc_feature (1)..(25): SEQ ID NO: 5958; WAN024A7N; Start 77; Stop 101
acttcttgtaccaagtcaccgaatt

SEQ ID NO: 426233 - DNA, 25 bp, Artificial
  probe
  misc_feature (1)..(25): SEQ ID NO: 5958; WAN024A7N; Start 58; Stop 82
agccatccttctccatctcacttct

SEQ ID NO: 426234 - DNA, 25 bp, Artificial
  probe
  misc_feature (1)..(25): SEQ ID NO: 5958; WAN024A7N; Start 57; Stop 81
gagccatccttctccatctcacttc

SEQ ID NO: 426235 - DNA, 25 bp, Artificial
  probe
  misc_feature (1)..(25): SEQ ID NO: 5958; WAN024A7N; Start 94; Stop 118
accgaattgtgacatgaggaggtaa

SEQ ID NO: 426236 - DNA, 25 bp, Artificial
  probe
  misc_feature (1)..(25): SEQ ID NO: 5958; WAN024A7N; Start 25; Stop 49
aataaagtaaaagtgagaggagagg

SEQ ID NO: 426237 - DNA, 25 bp, Artificial
  probe
  misc_feature (1)..(25): SEQ ID NO: 5958; WAN024A7N; Start 79; Stop 103
ttcttgtaccaagtcaccgaattgt

SEQ ID NO: 426238 - DNA, 25 bp, Artificial
  probe
  misc_feature (1)..(25): SEQ ID NO: 5958; WAN024A7N; Start 96; Stop 120
cgaattgtgacatgaggaggtaaaa

SEQ ID NO: 426239 - DNA, 25 bp, Artificial
  probe
  misc_feature (1)..(25): SEQ ID NO: 5958; WAN024A7N; Start 31; Stop 55
gtaaaagtgagaggagaggagtcag

SEQ ID NO: 426240 - DNA, 25 bp, Artificial
  probe
  misc_feature (1)..(25): SEQ ID NO: 5958; WAN024A7N; Start 76; Stop 100
cacttcttgtaccaagtcaccgaat

SEQ ID NO: 426241 - DNA, 25 bp, Artificial
  probe
  misc_feature (1)..(25): SEQ ID NO: 5958; WAN024A7N; Start 32; Stop 56
taaaagtgagaggagaggagtcagt

SEQ ID NO: 426242 - DNA, 25 bp, Artificial
  probe
  misc_feature (1)..(25): SEQ ID NO: 5958; WAN024A7N; Start 30; Stop 54
agtaaaagtgagaggagaggagtca

SEQ ID NO: 426243 - DNA, 25 bp, Artificial
  probe
  misc_feature (1)..(25): SEQ ID NO: 5959; WAN024DWS; Start 46; Stop 70
tgtgttatcctagtatggttgatga

SEQ ID NO: 426244 - DNA, 25 bp, Artificial
  probe
  misc_feature (1)..(25): SEQ ID NO: 5959; WAN024DWS; Start 45; Stop 69
atgtgttatcctagtatggttgatg

SEQ ID NO: 426245 - DNA, 25 bp, Artificial
  probe
  misc_feature (1)..(25): SEQ ID NO: 5959; WAN024DWS; Start 47; Stop 71
gtgttatcctagtatggttgatgaa

SEQ ID NO: 426246 - DNA, 25 bp, Artificial
  probe
  misc_feature (1)..(25): SEQ ID NO: 5959; WAN024DWS; Start 44; Stop 68
aatgtgttatcctagtatggttgat

SEQ ID NO: 426247 - DNA, 25 bp, Artificial
  probe
  misc_feature (1)..(25): SEQ ID NO: 5959; WAN024DWS; Start 43; Stop 67
aaatgtgttatcctagtatggttga

SEQ ID NO: 426248 - DNA, 25 bp, Artificial
  probe
  misc_feature (1)..(25): SEQ ID NO: 5959; WAN024DWS; Start 48; Stop 72
tgttatcctagtatggttgatgaaa

SEQ ID NO: 426249 - DNA, 25 bp, Artificial
  probe
  misc_feature (1)..(25): SEQ ID NO: 5959; WAN024DWS; Start 42; Stop 66
aaaatgtgttatcctagtatggttg

SEQ ID NO: 426250 - DNA, 25 bp, Artificial
  probe
  misc_feature (1)..(25): SEQ ID NO: 5959; WAN024DWS; Start 54; Stop 78
cctagtatggttgatgaaaatcagt

SEQ ID NO: 426251 - DNA, 25 bp, Artificial
  probe
  misc_feature (1)..(25): SEQ ID NO: 5959; WAN024DWS; Start 49; Stop 73
gttatcctagtatggttgatgaaaa

SEQ ID NO: 426252 - DNA, 25 bp, Artificial
  probe
  misc_feature (1)..(25): SEQ ID NO: 5959; WAN024DWS; Start 61; Stop 85
tggttgatgaaaatcagtagattga

SEQ ID NO: 426253 - DNA, 25 bp, Artificial
  probe
  misc_feature (1)..(25): SEQ ID NO: 5959; WAN024DWS; Start 53; Stop 77
tcctagtatggttgatgaaaatcag

SEQ ID NO: 426254 - DNA, 25 bp, Artificial
  probe
  misc_feature (1)..(25): SEQ ID NO: 5959; WAN024DWS; Start 51; Stop 75
tatcctagtatggttgatgaaaatc

SEQ ID NO: 426255 - DNA, 25 bp, Artificial
  probe
  misc_feature (1)..(25): SEQ ID NO: 5959; WAN024DWS; Start 57; Stop 81
agtatggttgatgaaaatcagtaga

SEQ ID NO: 426256 - DNA, 25 bp, Artificial
  probe
  misc_feature (1)..(25): SEQ ID NO: 5959; WAN024DWS; Start 52; Stop 76
atcctagtatggttgatgaaaatca

SEQ ID NO: 426257 - DNA, 25 bp, Artificial
  probe
  misc_feature (1)..(25): SEQ ID NO: 5959; WAN024DWS; Start 62; Stop 86
ggttgatgaaaatcagtagattgaa

SEQ ID NO: 426258 - DNA, 25 bp, Artificial
  probe
  misc_feature (1)..(25): SEQ ID NO: 5959; WAN024DWS; Start 60; Stop 84
atggttgatgaaaatcagtagattg

SEQ ID NO: 426259 - DNA, 25 bp, Artificial
  probe
  misc_feature (1)..(25): SEQ ID NO: 5959; WAN024DWS; Start 65; Stop 89
tgatgaaaatcagtagattgaatcg

SEQ ID NO: 426260 - DNA, 25 bp, Artificial
  probe
  misc_feature (1)..(25): SEQ ID NO: 5959; WAN024DWS; Start 66; Stop 90
gatgaaaatcagtagattgaatcga

SEQ ID NO: 426261 - DNA, 25 bp, Artificial
  probe
  misc_feature (1)..(25): SEQ ID NO: 5959; WAN024DWS; Start 50; Stop 74
ttatcctagtatggttgatgaaaat

SEQ ID NO: 426262 - DNA, 25 bp, Artificial
  probe
  misc_feature (1)..(25): SEQ ID NO: 5959; WAN024DWS; Start 58; Stop 82
gtatggttgatgaaaatcagtagat

SEQ ID NO: 426263 - DNA, 25 bp, Artificial
  probe
  misc_feature (1)..(25): SEQ ID NO: 5959; WAN024DWS; Start 68; Stop 92
tgaaaatcagtagattgaatcgaat

SEQ ID NO: 426264 - DNA, 25 bp, Artificial
  probe
  misc_feature (1)..(25): SEQ ID NO: 5959; WAN024DWS; Start 67; Stop 91
atgaaaatcagtagattgaatcgaa

SEQ ID NO: 426265 - DNA, 25 bp, Artificial
  probe
  misc_feature (1)..(25): SEQ ID NO: 5959; WAN024DWS; Start 56; Stop 80
tagtatggttgatgaaaatcagtag

SEQ ID NO: 426266 - DNA, 25 bp, Artificial
  probe
  misc_feature (1)..(25): SEQ ID NO: 5959; WAN024DWS; Start 55; Stop 79
ctagtatggttgatgaaaatcagta

SEQ ID NO: 426267 - DNA, 25 bp, Artificial
  probe
  misc_feature (1)..(25): SEQ ID NO: 5959; WAN024DWS; Start 59; Stop 83
tatggttgatgaaaatcagtagatt

SEQ ID NO: 426268 - DNA, 25 bp, Artificial
  probe
  misc_feature (1)..(25): SEQ ID NO: 5959; WAN024DWS; Start 63; Stop 87
gttgatgaaaatcagtagattgaat

SEQ ID NO: 426269 - DNA, 25 bp, Artificial
  probe
  misc_feature (1)..(25): SEQ ID NO: 5959; WAN024DWS; Start 64; Stop 88
ttgatgaaaatcagtagattgaatc

SEQ ID NO: 426270 - DNA, 25 bp, Artificial
  probe
  misc_feature (1)..(25): SEQ ID NO: 5959; WAN024DWS; Start 69; Stop 93
gaaaatcagtagattgaatcgaata

SEQ ID NO: 426271 - DNA, 25 bp, Artificial
  probe
  misc_feature (1)..(25): SEQ ID NO: 5959; WAN024DWS; Start 16; Stop 40
ttgtcaagtaactttactttacaaa

SEQ ID NO: 426272 - DNA, 25 bp, Artificial
  probe
  misc_feature (1)..(25): SEQ ID NO: 5959; WAN024DWS; Start 15; Stop 39
tttgtcaagtaactttactttacaa

SEQ ID NO: 426273 - DNA, 25 bp, Artificial
  probe
  misc_feature (1)..(25): SEQ ID NO: 5959; WAN024DWS; Start 17; Stop 41
tgtcaagtaactttactttacaaaa

SEQ ID NO: 426274 - DNA, 25 bp, Artificial
  probe
  misc_feature (1)..(25): SEQ ID NO: 5959; WAN024DWS; Start 14; Stop 38
ttttgtcaagtaactttactttaca

SEQ ID NO: 426275 - DNA, 25 bp, Artificial
  probe
  misc_feature (1)..(25): SEQ ID NO: 5960; WAN024ARD; Start 30; Stop 54
ggaattgtcattggaaacgctttat

SEQ ID NO: 426276 - DNA, 25 bp, Artificial
  probe
  misc_feature (1)..(25): SEQ ID NO: 5960; WAN024ARD; Start 31; Stop 55
gaattgtcattggaaacgctttatt

SEQ ID NO: 426277 - DNA, 25 bp, Artificial
  probe
  misc_feature (1)..(25): SEQ ID NO: 5960; WAN024ARD; Start 32; Stop 56
aattgtcattggaaacgctttattt

SEQ ID NO: 426278 - DNA, 25 bp, Artificial
  probe
  misc_feature (1)..(25): SEQ ID NO: 5960; WAN024ARD; Start 72; Stop 96
taacaaataagccaacttagcacag

SEQ ID NO: 426279 - DNA, 25 bp, Artificial
  probe
  misc_feature (1)..(25): SEQ ID NO: 5960; WAN024ARD; Start 71; Stop 95
ataacaaataagccaacttagcaca

SEQ ID NO: 426280 - DNA, 25 bp, Artificial
  probe
  misc_feature (1)..(25): SEQ ID NO: 5960; WAN024ARD; Start 70; Stop 94
gataacaaataagccaacttagcac

SEQ ID NO: 426281 - DNA, 25 bp, Artificial
  probe
  misc_feature (1)..(25): SEQ ID NO: 5960; WAN024ARD; Start 69; Stop 93
agataacaaataagccaacttagca

SEQ ID NO: 426282 - DNA, 25 bp, Artificial
  probe
  misc_feature (1)..(25): SEQ ID NO: 5960; WAN024ARD; Start 29; Stop 53
gggaattgtcattggaaacgcttta

SEQ ID NO: 426283 - DNA, 25 bp, Artificial
  probe
  misc_feature (1)..(25): SEQ ID NO: 5960; WAN024ARD; Start 73; Stop 97
aacaaataagccaacttagcacagc

SEQ ID NO: 426284 - DNA, 25 bp, Artificial
  probe
  misc_feature (1)..(25): SEQ ID NO: 5960; WAN024ARD; Start 68; Stop 92
tagataacaaataagccaacttagc

SEQ ID NO: 426285 - DNA, 25 bp, Artificial
  probe
  misc_feature (1)..(25): SEQ ID NO: 5960; WAN024ARD; Start 33; Stop 57
attgtcattggaaacgctttatttt

SEQ ID NO: 426286 - DNA, 25 bp, Artificial
  probe
  misc_feature (1)..(25): SEQ ID NO: 5960; WAN024ARD; Start 28; Stop 52
agggaattgtcattggaaacgcttt

SEQ ID NO: 426287 - DNA, 25 bp, Artificial
  probe
  misc_feature (1)..(25): SEQ ID NO: 5960; WAN024ARD; Start 34; Stop 58
ttgtcattggaaacgctttatttta

SEQ ID NO: 426288 - DNA, 25 bp, Artificial
  probe
  misc_feature (1)..(25): SEQ ID NO: 5960; WAN024ARD; Start 35; Stop 59
tgtcattggaaacgctttattttat

SEQ ID NO: 426289 - DNA, 25 bp, Artificial
  probe
  misc_feature (1)..(25): SEQ ID NO: 5960; WAN024ARD; Start 15; Stop 39
atttaggaaaatgagggaattgtca

SEQ ID NO: 426290 - DNA, 25 bp, Artificial
  probe
  misc_feature (1)..(25): SEQ ID NO: 5960; WAN024ARD; Start 27; Stop 51
gagggaattgtcattggaaacgctt

SEQ ID NO: 426291 - DNA, 25 bp, Artificial
  probe
  misc_feature (1)..(25): SEQ ID NO: 5960; WAN024ARD; Start 36; Stop 60
gtcattggaaacgctttattttata

SEQ ID NO: 426292 - DNA, 25 bp, Artificial
  probe
  misc_feature (1)..(25): SEQ ID NO: 5960; WAN024ARD; Start 65; Stop 89
aaatagataacaaataagccaactt

SEQ ID NO: 426293 - DNA, 25 bp, Artificial
  probe
  misc_feature (1)..(25): SEQ ID NO: 5960; WAN024ARD; Start 74; Stop 98
acaaataagccaacttagcacagct

SEQ ID NO: 426294 - DNA, 25 bp, Artificial
  probe
  misc_feature (1)..(25): SEQ ID NO: 5960; WAN024ARD; Start 16; Stop 40
tttaggaaaatgagggaattgtcat

SEQ ID NO: 426295 - DNA, 25 bp, Artificial
  probe
  misc_feature (1)..(25): SEQ ID NO: 5960; WAN024ARD; Start 26; Stop 50
tgagggaattgtcattggaaacgct

SEQ ID NO: 426296 - DNA, 25 bp, Artificial
  probe
  misc_feature (1)..(25): SEQ ID NO: 5960; WAN024ARD; Start 25; Stop 49
atgagggaattgtcattggaaacgc

SEQ ID NO: 426297 - DNA, 25 bp, Artificial
  probe
  misc_feature (1)..(25): SEQ ID NO: 5960; WAN024ARD; Start 23; Stop 47
aaatgagggaattgtcattggaaac

SEQ ID NO: 426298 - DNA, 25 bp, Artificial
  probe
  misc_feature (1)..(25): SEQ ID NO: 5960; WAN024ARD; Start 76; Stop 100
aaataagccaacttagcacagcttt

SEQ ID NO: 426299 - DNA, 25 bp, Artificial
  probe
  misc_feature (1)..(25): SEQ ID NO: 5960; WAN024ARD; Start 77; Stop 101
aataagccaacttagcacagctttg

SEQ ID NO: 426300 - DNA, 25 bp, Artificial
  probe
  misc_feature (1)..(25): SEQ ID NO: 5960; WAN024ARD; Start 75; Stop 99
caaataagccaacttagcacagctt

SEQ ID NO: 426301 - DNA, 25 bp, Artificial
  probe
  misc_feature (1)..(25): SEQ ID NO: 5960; WAN024ARD; Start 24; Stop 48
aatgagggaattgtcattggaaacg

SEQ ID NO: 426302 - DNA, 25 bp, Artificial
  probe
  misc_feature (1)..(25): SEQ ID NO: 5960; WAN024ARD; Start 37; Stop 61
tcattggaaacgctttattttataa

SEQ ID NO: 426303 - DNA, 25 bp, Artificial
  probe
  misc_feature (1)..(25): SEQ ID NO: 5960; WAN024ARD; Start 64; Stop 88
aaaatagataacaaataagccaact

SEQ ID NO: 426304 - DNA, 25 bp, Artificial
  probe
  misc_feature (1)..(25): SEQ ID NO: 5960; WAN024ARD; Start 79; Stop 103
taagccaacttagcacagctttgat

SEQ ID NO: 426305 - DNA, 25 bp, Artificial
  probe
  misc_feature (1)..(25): SEQ ID NO: 5960; WAN024ARD; Start 78; Stop 102
ataagccaacttagcacagctttga

SEQ ID NO: 426306 - DNA, 25 bp, Artificial
  probe
  misc_feature (1)..(25): SEQ ID NO: 5960; WAN024ARD; Start 14; Stop 38
catttaggaaaatgagggaattgtc

SEQ ID NO: 426307 - DNA, 25 bp, Artificial
  probe
  misc_feature (1)..(25): SEQ ID NO: 5960; WAN024ARD; Start 38; Stop 62
cattggaaacgctttattttataat

SEQ ID NO: 426308 - DNA, 25 bp, Artificial
  probe
  misc_feature (1)..(25): SEQ ID NO: 5961; WAN0249SQ; Start 25; Stop 49
gccattgcattttcctcattatcta

SEQ ID NO: 426309 - DNA, 25 bp, Artificial
  probe
  misc_feature (1)..(25): SEQ ID NO: 5961; WAN0249SQ; Start 31; Stop 55
gcattttcctcattatctagtatcg

SEQ ID NO: 426310 - DNA, 25 bp, Artificial
  probe
  misc_feature (1)..(25): SEQ ID NO: 5961; WAN0249SQ; Start 26; Stop 50
ccattgcattttcctcattatctag

SEQ ID NO: 426311 - DNA, 25 bp, Artificial
  probe
  misc_feature (1)..(25): SEQ ID NO: 5961; WAN0249SQ; Start 27; Stop 51
cattgcattttcctcattatctagt

SEQ ID NO: 426312 - DNA, 25 bp, Artificial
  probe
  misc_feature (1)..(25): SEQ ID NO: 5961; WAN0249SQ; Start 32; Stop 56
cattttcctcattatctagtatcgt

SEQ ID NO: 426313 - DNA, 25 bp, Artificial
  probe
  misc_feature (1)..(25): SEQ ID NO: 5961; WAN0249SQ; Start 22; Stop 46
tttgccattgcattttcctcattat

SEQ ID NO: 426314 - DNA, 25 bp, Artificial
  probe
  misc_feature (1)..(25): SEQ ID NO: 5961; WAN0249SQ; Start 23; Stop 47
ttgccattgcattttcctcattatc

SEQ ID NO: 426315 - DNA, 25 bp, Artificial
  probe
  misc_feature (1)..(25): SEQ ID NO: 5961; WAN0249SQ; Start 21; Stop 45
gtttgccattgcattttcctcatta

SEQ ID NO: 426316 - DNA, 25 bp, Artificial
  probe
  misc_feature (1)..(25): SEQ ID NO: 5961; WAN0249SQ; Start 24; Stop 48
tgccattgcattttcctcattatct

SEQ ID NO: 426317 - DNA, 25 bp, Artificial
  probe
  misc_feature (1)..(25): SEQ ID NO: 5961; WAN0249SQ; Start 12; Stop 36
gaaagttgggtttgccattgcattt

SEQ ID NO: 426318 - DNA, 25 bp, Artificial
  probe
  misc_feature (1)..(25): SEQ ID NO: 5961; WAN0249SQ; Start 30; Stop 54
tgcattttcctcattatctagtatc

SEQ ID NO: 426319 - DNA, 25 bp, Artificial
  probe
  misc_feature (1)..(25): SEQ ID NO: 5961; WAN0249SQ; Start 33; Stop 57
attttcctcattatctagtatcgtt

SEQ ID NO: 426320 - DNA, 25 bp, Artificial
  probe
  misc_feature (1)..(25): SEQ ID NO: 5961; WAN0249SQ; Start 29; Stop 53
ttgcattttcctcattatctagtat

SEQ ID NO: 426321 - DNA, 25 bp, Artificial
  probe
  misc_feature (1)..(25): SEQ ID NO: 5961; WAN0249SQ; Start 28; Stop 52
attgcattttcctcattatctagta

SEQ ID NO: 426322 - DNA, 25 bp, Artificial
  probe
  misc_feature (1)..(25): SEQ ID NO: 5961; WAN0249SQ; Start 34; Stop 58
ttttcctcattatctagtatcgtta

SEQ ID NO: 426323 - DNA, 25 bp, Artificial
  probe
  misc_feature (1)..(25): SEQ ID NO: 5961; WAN0249SQ; Start 20; Stop 44
ggtttgccattgcattttcctcatt

SEQ ID NO: 426324 - DNA, 25 bp, Artificial
  probe
  misc_feature (1)..(25): SEQ ID NO: 5961; WAN0249SQ; Start 13; Stop 37
aaagttgggtttgccattgcatttt

SEQ ID NO: 426325 - DNA, 25 bp, Artificial
  probe
  misc_feature (1)..(25): SEQ ID NO: 5961; WAN0249SQ; Start 14; Stop 38
aagttgggtttgccattgcattttc

SEQ ID NO: 426326 - DNA, 25 bp, Artificial
  probe
  misc_feature (1)..(25): SEQ ID NO: 5961; WAN0249SQ; Start 19; Stop 43
gggtttgccattgcattttcctcat

SEQ ID NO: 426327 - DNA, 25 bp, Artificial
  probe
  misc_feature (1)..(25): SEQ ID NO: 5961; WAN0249SQ; Start 17; Stop 41
ttgggtttgccattgcattttcctc

SEQ ID NO: 426328 - DNA, 25 bp, Artificial
  probe
  misc_feature (1)..(25): SEQ ID NO: 5962; WAN024ADM; Start 53; Stop 77
aaataggtaggatgaaagaaggaga

SEQ ID NO: 426329 - DNA, 25 bp, Artificial
  probe
  misc_feature (1)..(25): SEQ ID NO: 5962; WAN024ADM; Start 52; Stop 76
aaaataggtaggatgaaagaaggag

SEQ ID NO: 426330 - DNA, 25 bp, Artificial
  probe
  misc_feature (1)..(25): SEQ ID NO: 5962; WAN024ADM; Start 51; Stop 75
taaaataggtaggatgaaagaagga

SEQ ID NO: 426331 - DNA, 25 bp, Artificial
  probe
  misc_feature (1)..(25): SEQ ID NO: 5962; WAN024ADM; Start 46; Stop 70
tgtgataaaataggtaggatgaaag

SEQ ID NO: 426332 - DNA, 25 bp, Artificial
  probe
  misc_feature (1)..(25): SEQ ID NO: 5962; WAN024ADM; Start 47; Stop 71
gtgataaaataggtaggatgaaaga

SEQ ID NO: 426333 - DNA, 25 bp, Artificial
  probe
  misc_feature (1)..(25): SEQ ID NO: 5962; WAN024ADM; Start 50; Stop 74
ataaaataggtaggatgaaagaagg

SEQ ID NO: 426334 - DNA, 25 bp, Artificial
  probe
  misc_feature (1)..(25): SEQ ID NO: 5962; WAN024ADM; Start 5; Stop 29
tttgaaagaattgctcatgatacta

SEQ ID NO: 426335 - DNA, 25 bp, Artificial
  probe
  misc_feature (1)..(25): SEQ ID NO: 5962; WAN024ADM; Start 45; Stop 69
ttgtgataaaataggtaggatgaaa

SEQ ID NO: 426336 - DNA, 25 bp, Artificial
  probe
  misc_feature (1)..(25): SEQ ID NO: 5962; WAN024ADM; Start 6; Stop 30
ttgaaagaattgctcatgatactat

SEQ ID NO: 426337 - DNA, 25 bp, Artificial
  probe
  misc_feature (1)..(25): SEQ ID NO: 5962; WAN024ADM; Start 44; Stop 68
attgtgataaaataggtaggatgaa

SEQ ID NO: 426338 - DNA, 25 bp, Artificial
  probe
  misc_feature (1)..(25): SEQ ID NO: 5962; WAN024ADM; Start 43; Stop 67
aattgtgataaaataggtaggatga

SEQ ID NO: 426339 - DNA, 25 bp, Artificial
  probe
  misc_feature (1)..(25): SEQ ID NO: 5962; WAN024ADM; Start 40; Stop 64
agaaattgtgataaaataggtagga

SEQ ID NO: 426340 - DNA, 25 bp, Artificial
  probe
  misc_feature (1)..(25): SEQ ID NO: 5962; WAN024ADM; Start 48; Stop 72
tgataaaataggtaggatgaaagaa

SEQ ID NO: 426341 - DNA, 25 bp, Artificial
  probe
  misc_feature (1)..(25): SEQ ID NO: 5962; WAN024ADM; Start 7; Stop 31
tgaaagaattgctcatgatactata

SEQ ID NO: 426342 - DNA, 25 bp, Artificial
  probe
  misc_feature (1)..(25): SEQ ID NO: 5962; WAN024ADM; Start 4; Stop 28
ttttgaaagaattgctcatgatact

SEQ ID NO: 426343 - DNA, 25 bp, Artificial
  probe
  misc_feature (1)..(25): SEQ ID NO: 5962; WAN024ADM; Start 42; Stop 66
aaattgtgataaaataggtaggatg

SEQ ID NO: 426344 - DNA, 25 bp, Artificial
  probe
  misc_feature (1)..(25): SEQ ID NO: 5962; WAN024ADM; Start 49; Stop 73
gataaaataggtaggatgaaagaag

SEQ ID NO: 426345 - DNA, 25 bp, Artificial
  probe
  misc_feature (1)..(25): SEQ ID NO: 5962; WAN024ADM; Start 8; Stop 32
gaaagaattgctcatgatactataa

SEQ ID NO: 426346 - DNA, 25 bp, Artificial
  probe
  misc_feature (1)..(25): SEQ ID NO: 5963; WAN024AA8; Start 233; Stop 257
cttagtaacgcaattccaattagca

SEQ ID NO: 426347 - DNA, 25 bp, Artificial
  probe
  misc_feature (1)..(25): SEQ ID NO: 5963; WAN024AA8; Start 232; Stop 256
acttagtaacgcaattccaattagc

SEQ ID NO: 426348 - DNA, 25 bp, Artificial
  probe
  misc_feature (1)..(25): SEQ ID NO: 5963; WAN024AA8; Start 242; Stop 266
gcaattccaattagcaatacaccta

SEQ ID NO: 426349 - DNA, 25 bp, Artificial
  probe
  misc_feature (1)..(25): SEQ ID NO: 5963; WAN024AA8; Start 238; Stop 262
taacgcaattccaattagcaataca

SEQ ID NO: 426350 - DNA, 25 bp, Artificial
  probe
  misc_feature (1)..(25): SEQ ID NO: 5963; WAN024AA8; Start 234; Stop 258
ttagtaacgcaattccaattagcaa

SEQ ID NO: 426351 - DNA, 25 bp, Artificial
  probe
  misc_feature (1)..(25): SEQ ID NO: 5963; WAN024AA8; Start 236; Stop 260
agtaacgcaattccaattagcaata

SEQ ID NO: 426352 - DNA, 25 bp, Artificial
  probe
  misc_feature (1)..(25): SEQ ID NO: 5963; WAN024AA8; Start 235; Stop 259
tagtaacgcaattccaattagcaat

SEQ ID NO: 426353 - DNA, 25 bp, Artificial
  probe
  misc_feature (1)..(25): SEQ ID NO: 5963; WAN024AA8; Start 237; Stop 261
gtaacgcaattccaattagcaatac

SEQ ID NO: 426354 - DNA, 25 bp, Artificial
  probe
  misc_feature (1)..(25): SEQ ID NO: 5963; WAN024AA8; Start 239; Stop 263
aacgcaattccaattagcaatacac

SEQ ID NO: 426355 - DNA, 25 bp, Artificial
  probe
  misc_feature (1)..(25): SEQ ID NO: 5963; WAN024AA8; Start 230; Stop 254
tgacttagtaacgcaattccaatta

SEQ ID NO: 426356 - DNA, 25 bp, Artificial
  probe
  misc_feature (1)..(25): SEQ ID NO: 5963; WAN024AA8; Start 229; Stop 253
ttgacttagtaacgcaattccaatt

SEQ ID NO: 426357 - DNA, 25 bp, Artificial
  probe
  misc_feature (1)..(25): SEQ ID NO: 5963; WAN024AA8; Start 231; Stop 255
gacttagtaacgcaattccaattag

SEQ ID NO: 426358 - DNA, 25 bp, Artificial
  probe
  misc_feature (1)..(25): SEQ ID NO: 5963; WAN024AA8; Start 188; Stop 212
tgattgcgaactcactaatactatt

SEQ ID NO: 426359 - DNA, 25 bp, Artificial
  probe
  misc_feature (1)..(25): SEQ ID NO: 5963; WAN024AA8; Start 186; Stop 210
aatgattgcgaactcactaatacta

SEQ ID NO: 426360 - DNA, 25 bp, Artificial
  probe
  misc_feature (1)..(25): SEQ ID NO: 5963; WAN024AA8; Start 241; Stop 265
cgcaattccaattagcaatacacct

SEQ ID NO: 426361 - DNA, 25 bp, Artificial
  probe
  misc_feature (1)..(25): SEQ ID NO: 5963; WAN024AA8; Start 187; Stop 211
atgattgcgaactcactaatactat

SEQ ID NO: 426362 - DNA, 25 bp, Artificial
  probe
  misc_feature (1)..(25): SEQ ID NO: 5963; WAN024AA8; Start 240; Stop 264
acgcaattccaattagcaatacacc

SEQ ID NO: 426363 - DNA, 25 bp, Artificial
  probe
  misc_feature (1)..(25): SEQ ID NO: 5963; WAN024AA8; Start 243; Stop 267
caattccaattagcaatacacctaa

SEQ ID NO: 426364 - DNA, 25 bp, Artificial
  probe
  misc_feature (1)..(25): SEQ ID NO: 5963; WAN024AA8; Start 228; Stop 252
tttgacttagtaacgcaattccaat

SEQ ID NO: 426365 - DNA, 25 bp, Artificial
  probe
  misc_feature (1)..(25): SEQ ID NO: 5963; WAN024AA8; Start 158; Stop 182
acttaacagttctaaaccactagca

SEQ ID NO: 426366 - DNA, 25 bp, Artificial
  probe
  misc_feature (1)..(25): SEQ ID NO: 5963; WAN024AA8; Start 310; Stop 334
aagtggaataagatacatactgact

SEQ ID NO: 426367 - DNA, 25 bp, Artificial
  probe
  misc_feature (1)..(25): SEQ ID NO: 5963; WAN024AA8; Start 185; Stop 209
aaatgattgcgaactcactaatact

SEQ ID NO: 426368 - DNA, 25 bp, Artificial
  probe
  misc_feature (1)..(25): SEQ ID NO: 5963; WAN024AA8; Start 192; Stop 216
tgcgaactcactaatactatttcaa

SEQ ID NO: 426369 - DNA, 25 bp, Artificial
  probe
  misc_feature (1)..(25): SEQ ID NO: 5963; WAN024AA8; Start 191; Stop 215
ttgcgaactcactaatactatttca

SEQ ID NO: 426370 - DNA, 25 bp, Artificial
  probe
  misc_feature (1)..(25): SEQ ID NO: 5963; WAN024AA8; Start 159; Stop 183
cttaacagttctaaaccactagcaa

SEQ ID NO: 426371 - DNA, 25 bp, Artificial
  probe
  misc_feature (1)..(25): SEQ ID NO: 5963; WAN024AA8; Start 163; Stop 187
acagttctaaaccactagcaataaa

SEQ ID NO: 426372 - DNA, 25 bp, Artificial
  probe
  misc_feature (1)..(25): SEQ ID NO: 5963; WAN024AA8; Start 162; Stop 186
aacagttctaaaccactagcaataa

SEQ ID NO: 426373 - DNA, 25 bp, Artificial
  probe
  misc_feature (1)..(25): SEQ ID NO: 5963; WAN024AA8; Start 160; Stop 184
ttaacagttctaaaccactagcaat

SEQ ID NO: 426374 - DNA, 25 bp, Artificial
  probe
  misc_feature (1)..(25): SEQ ID NO: 5963; WAN024AA8; Start 193; Stop 217
gcgaactcactaatactatttcaaa

SEQ ID NO: 426375 - DNA, 25 bp, Artificial
  probe
  misc_feature (1)..(25): SEQ ID NO: 5963; WAN024AA8; Start 189; Stop 213
gattgcgaactcactaatactattt

SEQ ID NO: 426376 - DNA, 25 bp, Artificial
  probe
  misc_feature (1)..(25): SEQ ID NO: 5963; WAN024AA8; Start 184; Stop 208
taaatgattgcgaactcactaatac

SEQ ID NO: 426377 - DNA, 25 bp, Artificial
  probe
  misc_feature (1)..(25): SEQ ID NO: 5963; WAN024AA8; Start 311; Stop 335
agtggaataagatacatactgacta

SEQ ID NO: 426378 - DNA, 25 bp, Artificial
  probe
  misc_feature (1)..(25): SEQ ID NO: 5963; WAN024AA8; Start 190; Stop 214
attgcgaactcactaatactatttc

SEQ ID NO: 426379 - DNA, 25 bp, Artificial
  probe
  misc_feature (1)..(25): SEQ ID NO: 5964; WAN0249TL; Start 24; Stop 48
gaaacaaatcaagtgactagaggat

SEQ ID NO: 426380 - DNA, 25 bp, Artificial
  probe
  misc_feature (1)..(25): SEQ ID NO: 5964; WAN0249TL; Start 23; Stop 47
tgaaacaaatcaagtgactagagga

SEQ ID NO: 426381 - DNA, 25 bp, Artificial
  probe
  misc_feature (1)..(25): SEQ ID NO: 5964; WAN0249TL; Start 20; Stop 44
acctgaaacaaatcaagtgactaga

SEQ ID NO: 426382 - DNA, 25 bp, Artificial
  probe
  misc_feature (1)..(25): SEQ ID NO: 5964; WAN0249TL; Start 22; Stop 46
ctgaaacaaatcaagtgactagagg

SEQ ID NO: 426383 - DNA, 25 bp, Artificial
  probe
  misc_feature (1)..(25): SEQ ID NO: 5964; WAN0249TL; Start 21; Stop 45
cctgaaacaaatcaagtgactagag

SEQ ID NO: 426384 - DNA, 25 bp, Artificial
  probe
  misc_feature (1)..(25): SEQ ID NO: 5964; WAN0249TL; Start 19; Stop 43
cacctgaaacaaatcaagtgactag

SEQ ID NO: 426385 - DNA, 25 bp, Artificial
  probe
  misc_feature (1)..(25): SEQ ID NO: 5964; WAN0249TL; Start 18; Stop 42
ccacctgaaacaaatcaagtgacta

SEQ ID NO: 426386 - DNA, 25 bp, Artificial
  probe
  misc_feature (1)..(25): SEQ ID NO: 5964; WAN0249TL; Start 15; Stop 39
aaaccacctgaaacaaatcaagtga

SEQ ID NO: 426387 - DNA, 25 bp, Artificial
  probe
  misc_feature (1)..(25): SEQ ID NO: 5964; WAN0249TL; Start 27; Stop 51
acaaatcaagtgactagaggataaa

SEQ ID NO: 426388 - DNA, 25 bp, Artificial
  probe
  misc_feature (1)..(25): SEQ ID NO: 5964; WAN0249TL; Start 26; Stop 50
aacaaatcaagtgactagaggataa

SEQ ID NO: 426389 - DNA, 25 bp, Artificial
  probe
  misc_feature (1)..(25): SEQ ID NO: 5964; WAN0249TL; Start 25; Stop 49
aaacaaatcaagtgactagaggata

SEQ ID NO: 426390 - DNA, 25 bp, Artificial
  probe
  misc_feature (1)..(25): SEQ ID NO: 5964; WAN0249TL; Start 16; Stop 40
aaccacctgaaacaaatcaagtgac

SEQ ID NO: 426391 - DNA, 25 bp, Artificial
  probe
  misc_feature (1)..(25): SEQ ID NO: 5964; WAN0249TL; Start 121; Stop 145
tgcgttttactatgggaagatttac

SEQ ID NO: 426392 - DNA, 25 bp, Artificial
  probe
  misc_feature (1)..(25): SEQ ID NO: 5964; WAN0249TL; Start 122; Stop 146
gcgttttactatgggaagatttact

SEQ ID NO: 426393 - DNA, 25 bp, Artificial
  probe
  misc_feature (1)..(25): SEQ ID NO: 5964; WAN0249TL; Start 17; Stop 41
accacctgaaacaaatcaagtgact

SEQ ID NO: 426394 - DNA, 25 bp, Artificial
  probe
  misc_feature (1)..(25): SEQ ID NO: 5964; WAN0249TL; Start 120; Stop 144
atgcgttttactatgggaagattta

SEQ ID NO: 426395 - DNA, 25 bp, Artificial
  probe
  misc_feature (1)..(25): SEQ ID NO: 5964; WAN0249TL; Start 119; Stop 143
tatgcgttttactatgggaagattt

SEQ ID NO: 426396 - DNA, 25 bp, Artificial
  probe
  misc_feature (1)..(25): SEQ ID NO: 5964; WAN0249TL; Start 118; Stop 142
ttatgcgttttactatgggaagatt

SEQ ID NO: 426397 - DNA, 25 bp, Artificial
  probe
  misc_feature (1)..(25): SEQ ID NO: 5964; WAN0249TL; Start 117; Stop 141
attatgcgttttactatgggaagat

SEQ ID NO: 426398 - DNA, 25 bp, Artificial
  probe
  misc_feature (1)..(25): SEQ ID NO: 5964; WAN0249TL; Start 116; Stop 140
tattatgcgttttactatgggaaga

SEQ ID NO: 426399 - DNA, 25 bp, Artificial
  probe
  misc_feature (1)..(25): SEQ ID NO: 5964; WAN0249TL; Start 113; Stop 137
tgatattatgcgttttactatggga

SEQ ID NO: 426400 - DNA, 25 bp, Artificial
  probe
  misc_feature (1)..(25): SEQ ID NO: 5964; WAN0249TL; Start 14; Stop 38
aaaaccacctgaaacaaatcaagtg

SEQ ID NO: 426401 - DNA, 25 bp, Artificial
  probe
  misc_feature (1)..(25): SEQ ID NO: 5964; WAN0249TL; Start 112; Stop 136
ttgatattatgcgttttactatggg

SEQ ID NO: 426402 - DNA, 25 bp, Artificial
  probe
  misc_feature (1)..(25): SEQ ID NO: 5964; WAN0249TL; Start 115; Stop 139
atattatgcgttttactatgggaag

SEQ ID NO: 426403 - DNA, 25 bp, Artificial
  probe
  misc_feature (1)..(25): SEQ ID NO: 5964; WAN0249TL; Start 114; Stop 138
gatattatgcgttttactatgggaa

SEQ ID NO: 426404 - DNA, 25 bp, Artificial
  probe
  misc_feature (1)..(25): SEQ ID NO: 5964; WAN0249TL; Start 123; Stop 147
cgttttactatgggaagatttactt

SEQ ID NO: 426405 - DNA, 25 bp, Artificial
  probe
  misc_feature (1)..(25): SEQ ID NO: 5964; WAN0249TL; Start 28; Stop 52
caaatcaagtgactagaggataaaa

SEQ ID NO: 426406 - DNA, 25 bp, Artificial
  probe
  misc_feature (1)..(25): SEQ ID NO: 5964; WAN0249TL; Start 111; Stop 135
cttgatattatgcgttttactatgg

SEQ ID NO: 426407 - DNA, 25 bp, Artificial
  probe
  misc_feature (1)..(25): SEQ ID NO: 5964; WAN0249TL; Start 169; Stop 193
ttttgccccacctatctgctatgtt

SEQ ID NO: 426408 - DNA, 25 bp, Artificial
  probe
  misc_feature (1)..(25): SEQ ID NO: 5964; WAN0249TL; Start 110; Stop 134
acttgatattatgcgttttactatg

SEQ ID NO: 426409 - DNA, 25 bp, Artificial
  probe
  misc_feature (1)..(25): SEQ ID NO: 5964; WAN0249TL; Start 127; Stop 151
ttactatgggaagatttacttcttt

SEQ ID NO: 426410 - DNA, 25 bp, Artificial
  probe
  misc_feature (1)..(25): SEQ ID NO: 5964; WAN0249TL; Start 126; Stop 150
tttactatgggaagatttacttctt

SEQ ID NO: 426411 - DNA, 25 bp, Artificial
  probe
  misc_feature (1)..(25): SEQ ID NO: 5964; WAN0249TL; Start 170; Stop 194
tttgccccacctatctgctatgttg

SEQ ID NO: 426412 - DNA, 25 bp, Artificial
  probe
  misc_feature (1)..(25): SEQ ID NO: 5965; WAN024AQ6; Start 4; Stop 28
atatatcctcctaaaacgattgtag

SEQ ID NO: 426413 - DNA, 25 bp, Artificial
  probe
  misc_feature (1)..(25): SEQ ID NO: 5966; WAN024F3P; Start 214; Stop 238
ctagataagcaaatcactcagcatt

SEQ ID NO: 426414 - DNA, 25 bp, Artificial
  probe
  misc_feature (1)..(25): SEQ ID NO: 5966; WAN024F3P; Start 309; Stop 333
aatcacttcatttgacactcctcag

SEQ ID NO: 426415 - DNA, 25 bp, Artificial
  probe
  misc_feature (1)..(25): SEQ ID NO: 5966; WAN024F3P; Start 307; Stop 331
gaaatcacttcatttgacactcctc

SEQ ID NO: 426416 - DNA, 25 bp, Artificial
  probe
  misc_feature (1)..(25): SEQ ID NO: 5966; WAN024F3P; Start 308; Stop 332
aaatcacttcatttgacactcctca

SEQ ID NO: 426417 - DNA, 25 bp, Artificial
  probe
  misc_feature (1)..(25): SEQ ID NO: 5966; WAN024F3P; Start 29; Stop 53
cactattagaatctagacgccaact

SEQ ID NO: 426418 - DNA, 25 bp, Artificial
  probe
  misc_feature (1)..(25): SEQ ID NO: 5966; WAN024F3P; Start 31; Stop 55
ctattagaatctagacgccaactcc

SEQ ID NO: 426419 - DNA, 25 bp, Artificial
  probe
  misc_feature (1)..(25): SEQ ID NO: 5966; WAN024F3P; Start 30; Stop 54
actattagaatctagacgccaactc

SEQ ID NO: 426420 - DNA, 25 bp, Artificial
  probe
  misc_feature (1)..(25): SEQ ID NO: 5966; WAN024F3P; Start 28; Stop 52
ccactattagaatctagacgccaac

SEQ ID NO: 426421 - DNA, 25 bp, Artificial
  probe
  misc_feature (1)..(25): SEQ ID NO: 5966; WAN024F3P; Start 27; Stop 51
tccactattagaatctagacgccaa

SEQ ID NO: 426422 - DNA, 25 bp, Artificial
  probe
  misc_feature (1)..(25): SEQ ID NO: 5966; WAN024F3P; Start 216; Stop 240
agataagcaaatcactcagcattta

SEQ ID NO: 426423 - DNA, 25 bp, Artificial
  probe
  misc_feature (1)..(25): SEQ ID NO: 5966; WAN024F3P; Start 215; Stop 239
tagataagcaaatcactcagcattt

SEQ ID NO: 426424 - DNA, 25 bp, Artificial
  probe
  misc_feature (1)..(25): SEQ ID NO: 5966; WAN024F3P; Start 412; Stop 436
ctcagccagtttgtaacagaagaac

SEQ ID NO: 426425 - DNA, 25 bp, Artificial
  probe
  misc_feature (1)..(25): SEQ ID NO: 5966; WAN024F3P; Start 217; Stop 241
gataagcaaatcactcagcatttaa

SEQ ID NO: 426426 - DNA, 25 bp, Artificial
  probe
  misc_feature (1)..(25): SEQ ID NO: 5966; WAN024F3P; Start 32; Stop 56
tattagaatctagacgccaactccg

SEQ ID NO: 426427 - DNA, 25 bp, Artificial
  probe
  misc_feature (1)..(25): SEQ ID NO: 5966; WAN024F3P; Start 293; Stop 317
gcttgggagtctttgaaatcacttc

SEQ ID NO: 426428 - DNA, 25 bp, Artificial
  probe
  misc_feature (1)..(25): SEQ ID NO: 5966; WAN024F3P; Start 24; Stop 48
tagtccactattagaatctagacgc

SEQ ID NO: 426429 - DNA, 25 bp, Artificial
  probe
  misc_feature (1)..(25): SEQ ID NO: 5966; WAN024F3P; Start 25; Stop 49
agtccactattagaatctagacgcc

SEQ ID NO: 426430 - DNA, 25 bp, Artificial
  probe
  misc_feature (1)..(25): SEQ ID NO: 5966; WAN024F3P; Start 26; Stop 50
gtccactattagaatctagacgcca

SEQ ID NO: 426431 - DNA, 25 bp, Artificial
  probe
  misc_feature (1)..(25): SEQ ID NO: 5966; WAN024F3P; Start 413; Stop 437
tcagccagtttgtaacagaagaaca

SEQ ID NO: 426432 - DNA, 25 bp, Artificial
  probe
  misc_feature (1)..(25): SEQ ID NO: 5966; WAN024F3P; Start 336; Stop 360
ggttgctgttaatgaagctatcgag

SEQ ID NO: 426433 - DNA, 25 bp, Artificial
  probe
  misc_feature (1)..(25): SEQ ID NO: 5966; WAN024F3P; Start 310; Stop 334
atcacttcatttgacactcctcagc

SEQ ID NO: 426434 - DNA, 25 bp, Artificial
  probe
  misc_feature (1)..(25): SEQ ID NO: 5966; WAN024F3P; Start 171; Stop 195
tttgatagacctcgtttctggtgtt

SEQ ID NO: 426435 - DNA, 25 bp, Artificial
  probe
  misc_feature (1)..(25): SEQ ID NO: 5966; WAN024F3P; Start 305; Stop 329
ttgaaatcacttcatttgacactcc

SEQ ID NO: 426436 - DNA, 25 bp, Artificial
  probe
  misc_feature (1)..(25): SEQ ID NO: 5966; WAN024F3P; Start 297; Stop 321
gggagtctttgaaatcacttcattt

SEQ ID NO: 426437 - DNA, 25 bp, Artificial
  probe
  misc_feature (1)..(25): SEQ ID NO: 5966; WAN024F3P; Start 306; Stop 330
tgaaatcacttcatttgacactcct

SEQ ID NO: 426438 - DNA, 25 bp, Artificial
  probe
  misc_feature (1)..(25): SEQ ID NO: 5966; WAN024F3P; Start 296; Stop 320
tgggagtctttgaaatcacttcatt

SEQ ID NO: 426439 - DNA, 25 bp, Artificial
  probe
  misc_feature (1)..(25): SEQ ID NO: 5966; WAN024F3P; Start 295; Stop 319
ttgggagtctttgaaatcacttcat

SEQ ID NO: 426440 - DNA, 25 bp, Artificial
  probe
  misc_feature (1)..(25): SEQ ID NO: 5966; WAN024F3P; Start 175; Stop 199
atagacctcgtttctggtgttcaag

SEQ ID NO: 426441 - DNA, 25 bp, Artificial
  probe
  misc_feature (1)..(25): SEQ ID NO: 5966; WAN024F3P; Start 174; Stop 198
gatagacctcgtttctggtgttcaa

SEQ ID NO: 426442 - DNA, 25 bp, Artificial
  probe
  misc_feature (1)..(25): SEQ ID NO: 5966; WAN024F3P; Start 172; Stop 196
ttgatagacctcgtttctggtgttc

SEQ ID NO: 426443 - DNA, 25 bp, Artificial
  probe
  misc_feature (1)..(25): SEQ ID NO: 5966; WAN024F3P; Start 337; Stop 361
gttgctgttaatgaagctatcgagc

SEQ ID NO: 426444 - DNA, 25 bp, Artificial
  probe
  misc_feature (1)..(25): SEQ ID NO: 5966; WAN024F3P; Start 289; Stop 313
cttcgcttgggagtctttgaaatca

SEQ ID NO: 426445 - DNA, 25 bp, Artificial
  probe
  misc_feature (1)..(25): SEQ ID NO: 5966; WAN024F3P; Start 218; Stop 242
ataagcaaatcactcagcatttaaa

SEQ ID NO: 426446 - DNA, 25 bp, Artificial
  probe
  misc_feature (1)..(25): SEQ ID NO: 5967; WAN024D5P; Start 107; Stop 131
tgtccagtgtagtcaatattctagc

SEQ ID NO: 426447 - DNA, 25 bp, Artificial
  probe
  misc_feature (1)..(25): SEQ ID NO: 5967; WAN024D5P; Start 104; Stop 128
cgatgtccagtgtagtcaatattct

SEQ ID NO: 426448 - DNA, 25 bp, Artificial
  probe
  misc_feature (1)..(25): SEQ ID NO: 5967; WAN024D5P; Start 103; Stop 127
ccgatgtccagtgtagtcaatattc

SEQ ID NO: 426449 - DNA, 25 bp, Artificial
  probe
  misc_feature (1)..(25): SEQ ID NO: 5967; WAN024D5P; Start 102; Stop 126
accgatgtccagtgtagtcaatatt

SEQ ID NO: 426450 - DNA, 25 bp, Artificial
  probe
  misc_feature (1)..(25): SEQ ID NO: 5967; WAN024D5P; Start 57; Stop 81
ccttgatgtagtccttacacctatc

SEQ ID NO: 426451 - DNA, 25 bp, Artificial
  probe
  misc_feature (1)..(25): SEQ ID NO: 5967; WAN024D5P; Start 101; Stop 125
caccgatgtccagtgtagtcaatat

SEQ ID NO: 426452 - DNA, 25 bp, Artificial
  probe
  misc_feature (1)..(25): SEQ ID NO: 5967; WAN024D5P; Start 58; Stop 82
cttgatgtagtccttacacctatct

SEQ ID NO: 426453 - DNA, 25 bp, Artificial
  probe
  misc_feature (1)..(25): SEQ ID NO: 5967; WAN024D5P; Start 106; Stop 130
atgtccagtgtagtcaatattctag

SEQ ID NO: 426454 - DNA, 25 bp, Artificial
  probe
  misc_feature (1)..(25): SEQ ID NO: 5967; WAN024D5P; Start 105; Stop 129
gatgtccagtgtagtcaatattcta

SEQ ID NO: 426455 - DNA, 25 bp, Artificial
  probe
  misc_feature (1)..(25): SEQ ID NO: 5967; WAN024D5P; Start 427; Stop 451
attggtacagcgatttcctttattg

SEQ ID NO: 426456 - DNA, 25 bp, Artificial
  probe
  misc_feature (1)..(25): SEQ ID NO: 5967; WAN024D5P; Start 426; Stop 450
gattggtacagcgatttcctttatt

SEQ ID NO: 426457 - DNA, 25 bp, Artificial
  probe
  misc_feature (1)..(25): SEQ ID NO: 5967; WAN024D5P; Start 425; Stop 449
tgattggtacagcgatttcctttat

SEQ ID NO: 426458 - DNA, 25 bp, Artificial
  probe
  misc_feature (1)..(25): SEQ ID NO: 5967; WAN024D5P; Start 59; Stop 83
ttgatgtagtccttacacctatctt

SEQ ID NO: 426459 - DNA, 25 bp, Artificial
  probe
  misc_feature (1)..(25): SEQ ID NO: 5967; WAN024D5P; Start 424; Stop 448
ttgattggtacagcgatttccttta

SEQ ID NO: 426460 - DNA, 25 bp, Artificial
  probe
  misc_feature (1)..(25): SEQ ID NO: 5967; WAN024D5P; Start 423; Stop 447
cttgattggtacagcgatttccttt

SEQ ID NO: 426461 - DNA, 25 bp, Artificial
  probe
  misc_feature (1)..(25): SEQ ID NO: 5967; WAN024D5P; Start 428; Stop 452
ttggtacagcgatttcctttattgc

SEQ ID NO: 426462 - DNA, 25 bp, Artificial
  probe
  misc_feature (1)..(25): SEQ ID NO: 5967; WAN024D5P; Start 62; Stop 86
atgtagtccttacacctatctttcg

SEQ ID NO: 426463 - DNA, 25 bp, Artificial
  probe
  misc_feature (1)..(25): SEQ ID NO: 5967; WAN024D5P; Start 56; Stop 80
cccttgatgtagtccttacacctat

SEQ ID NO: 426464 - DNA, 25 bp, Artificial
  probe
  misc_feature (1)..(25): SEQ ID NO: 5967; WAN024D5P; Start 60; Stop 84
tgatgtagtccttacacctatcttt

SEQ ID NO: 426465 - DNA, 25 bp, Artificial
  probe
  misc_feature (1)..(25): SEQ ID NO: 5967; WAN024D5P; Start 61; Stop 85
gatgtagtccttacacctatctttc

SEQ ID NO: 426466 - DNA, 25 bp, Artificial
  probe
  misc_feature (1)..(25): SEQ ID NO: 5967; WAN024D5P; Start 422; Stop 446
ccttgattggtacagcgatttcctt

SEQ ID NO: 426467 - DNA, 25 bp, Artificial
  probe
  misc_feature (1)..(25): SEQ ID NO: 5967; WAN024D5P; Start 419; Stop 443
caaccttgattggtacagcgatttc

SEQ ID NO: 426468 - DNA, 25 bp, Artificial
  probe
  misc_feature (1)..(25): SEQ ID NO: 5967; WAN024D5P; Start 251; Stop 275
tagcaggtctcttttataagtacgg

SEQ ID NO: 426469 - DNA, 25 bp, Artificial
  probe
  misc_feature (1)..(25): SEQ ID NO: 5967; WAN024D5P; Start 100; Stop 124
gcaccgatgtccagtgtagtcaata

SEQ ID NO: 426470 - DNA, 25 bp, Artificial
  probe
  misc_feature (1)..(25): SEQ ID NO: 5967; WAN024D5P; Start 254; Stop 278
caggtctcttttataagtacggtcg

SEQ ID NO: 426471 - DNA, 25 bp, Artificial
  probe
  misc_feature (1)..(25): SEQ ID NO: 5967; WAN024D5P; Start 253; Stop 277
gcaggtctcttttataagtacggtc

SEQ ID NO: 426472 - DNA, 25 bp, Artificial
  probe
  misc_feature (1)..(25): SEQ ID NO: 5967; WAN024D5P; Start 252; Stop 276
agcaggtctcttttataagtacggt

SEQ ID NO: 426473 - DNA, 25 bp, Artificial
  probe
  misc_feature (1)..(25): SEQ ID NO: 5967; WAN024D5P; Start 250; Stop 274
ctagcaggtctcttttataagtacg

SEQ ID NO: 426474 - DNA, 25 bp, Artificial
  probe
  misc_feature (1)..(25): SEQ ID NO: 5967; WAN024D5P; Start 256; Stop 280
ggtctcttttataagtacggtcgaa

SEQ ID NO: 426475 - DNA, 25 bp, Artificial
  probe
  misc_feature (1)..(25): SEQ ID NO: 5967; WAN024D5P; Start 255; Stop 279
aggtctcttttataagtacggtcga

SEQ ID NO: 426476 - DNA, 25 bp, Artificial
  probe
  misc_feature (1)..(25): SEQ ID NO: 5967; WAN024D5P; Start 244; Stop 268
gcccttctagcaggtctcttttata

SEQ ID NO: 426477 - DNA, 25 bp, Artificial
  probe
  misc_feature (1)..(25): SEQ ID NO: 5967; WAN024D5P; Start 245; Stop 269
cccttctagcaggtctcttttataa

SEQ ID NO: 426478 - DNA, 25 bp, Artificial
  probe
  misc_feature (1)..(25): SEQ ID NO: 5967; WAN024D5P; Start 138; Stop 162
catgatgggacctgtttatgccttg

SEQ ID NO: 426479 - DNA, 25 bp, Artificial
  probe
  misc_feature (1)..(25): SEQ ID NO: 5968; WAN024CB3; Start 442; Stop 466
gataaggagaattggtggataggtc

SEQ ID NO: 426480 - DNA, 25 bp, Artificial
  probe
  misc_feature (1)..(25): SEQ ID NO: 5968; WAN024CB3; Start 444; Stop 468
taaggagaattggtggataggtcta

SEQ ID NO: 426481 - DNA, 25 bp, Artificial
  probe
  misc_feature (1)..(25): SEQ ID NO: 5968; WAN024CB3; Start 445; Stop 469
aaggagaattggtggataggtctat

SEQ ID NO: 426482 - DNA, 25 bp, Artificial
  probe
  misc_feature (1)..(25): SEQ ID NO: 5968; WAN024CB3; Start 443; Stop 467
ataaggagaattggtggataggtct

SEQ ID NO: 426483 - DNA, 25 bp, Artificial
  probe
  misc_feature (1)..(25): SEQ ID NO: 5968; WAN024CB3; Start 441; Stop 465
ggataaggagaattggtggataggt

SEQ ID NO: 426484 - DNA, 25 bp, Artificial
  probe
  misc_feature (1)..(25): SEQ ID NO: 5968; WAN024CB3; Start 876; Stop 900
aaccattcatgctattcaatccttc

SEQ ID NO: 426485 - DNA, 25 bp, Artificial
  probe
  misc_feature (1)..(25): SEQ ID NO: 5968; WAN024CB3; Start 20; Stop 44
tagatgatgagtacatggtgacaga

SEQ ID NO: 426486 - DNA, 25 bp, Artificial
  probe
  misc_feature (1)..(25): SEQ ID NO: 5968; WAN024CB3; Start 19; Stop 43
gtagatgatgagtacatggtgacag

SEQ ID NO: 426487 - DNA, 25 bp, Artificial
  probe
  misc_feature (1)..(25): SEQ ID NO: 5968; WAN024CB3; Start 18; Stop 42
agtagatgatgagtacatggtgaca

SEQ ID NO: 426488 - DNA, 25 bp, Artificial
  probe
  misc_feature (1)..(25): SEQ ID NO: 5968; WAN024CB3; Start 17; Stop 41
tagtagatgatgagtacatggtgac

SEQ ID NO: 426489 - DNA, 25 bp, Artificial
  probe
  misc_feature (1)..(25): SEQ ID NO: 5968; WAN024CB3; Start 22; Stop 46
gatgatgagtacatggtgacagaag

SEQ ID NO: 426490 - DNA, 25 bp, Artificial
  probe
  misc_feature (1)..(25): SEQ ID NO: 5968; WAN024CB3; Start 397; Stop 421
cttagtcaagaattagacgaggctg

SEQ ID NO: 426491 - DNA, 25 bp, Artificial
  probe
  misc_feature (1)..(25): SEQ ID NO: 5968; WAN024CB3; Start 21; Stop 45
agatgatgagtacatggtgacagaa

SEQ ID NO: 426492 - DNA, 25 bp, Artificial
  probe
  misc_feature (1)..(25): SEQ ID NO: 5968; WAN024CB3; Start 877; Stop 901
accattcatgctattcaatccttcg

SEQ ID NO: 426493 - DNA, 25 bp, Artificial
  probe
  misc_feature (1)..(25): SEQ ID NO: 5968; WAN024CB3; Start 879; Stop 903
cattcatgctattcaatccttcgat

SEQ ID NO: 426494 - DNA, 25 bp, Artificial
  probe
  misc_feature (1)..(25): SEQ ID NO: 5968; WAN024CB3; Start 880; Stop 904
attcatgctattcaatccttcgatg

SEQ ID NO: 426495 - DNA, 25 bp, Artificial
  probe
  misc_feature (1)..(25): SEQ ID NO: 5968; WAN024CB3; Start 878; Stop 902
ccattcatgctattcaatccttcga

SEQ ID NO: 426496 - DNA, 25 bp, Artificial
  probe
  misc_feature (1)..(25): SEQ ID NO: 5968; WAN024CB3; Start 446; Stop 470
aggagaattggtggataggtctatc

SEQ ID NO: 426497 - DNA, 25 bp, Artificial
  probe
  misc_feature (1)..(25): SEQ ID NO: 5968; WAN024CB3; Start 709; Stop 733
cagggaaatctcaatcaaatcgtag

SEQ ID NO: 426498 - DNA, 25 bp, Artificial
  probe
  misc_feature (1)..(25): SEQ ID NO: 5968; WAN024CB3; Start 708; Stop 732
tcagggaaatctcaatcaaatcgta

SEQ ID NO: 426499 - DNA, 25 bp, Artificial
  probe
  misc_feature (1)..(25): SEQ ID NO: 5968; WAN024CB3; Start 417; Stop 441
ggctggatttgttagttatttaggg

SEQ ID NO: 426500 - DNA, 25 bp, Artificial
  probe
  misc_feature (1)..(25): SEQ ID NO: 5968; WAN024CB3; Start 671; Stop 695
tctttgcctattacgaaccgattta

SEQ ID NO: 426501 - DNA, 25 bp, Artificial
  probe
  misc_feature (1)..(25): SEQ ID NO: 5968; WAN024CB3; Start 672; Stop 696
ctttgcctattacgaaccgatttat

SEQ ID NO: 426502 - DNA, 25 bp, Artificial
  probe
  misc_feature (1)..(25): SEQ ID NO: 5968; WAN024CB3; Start 413; Stop 437
acgaggctggatttgttagttattt

SEQ ID NO: 426503 - DNA, 25 bp, Artificial
  probe
  misc_feature (1)..(25): SEQ ID NO: 5968; WAN024CB3; Start 414; Stop 438
cgaggctggatttgttagttattta

SEQ ID NO: 426504 - DNA, 25 bp, Artificial
  probe
  misc_feature (1)..(25): SEQ ID NO: 5968; WAN024CB3; Start 23; Stop 47
atgatgagtacatggtgacagaagg

SEQ ID NO: 426505 - DNA, 25 bp, Artificial
  probe
  misc_feature (1)..(25): SEQ ID NO: 5968; WAN024CB3; Start 398; Stop 422
ttagtcaagaattagacgaggctgg

SEQ ID NO: 426506 - DNA, 25 bp, Artificial
  probe
  misc_feature (1)..(25): SEQ ID NO: 5968; WAN024CB3; Start 192; Stop 216
tgatatgattcgggagatgaaagag

SEQ ID NO: 426507 - DNA, 25 bp, Artificial
  probe
  misc_feature (1)..(25): SEQ ID NO: 5968; WAN024CB3; Start 706; Stop 730
attcagggaaatctcaatcaaatcg

SEQ ID NO: 426508 - DNA, 25 bp, Artificial
  probe
  misc_feature (1)..(25): SEQ ID NO: 5968; WAN024CB3; Start 193; Stop 217
gatatgattcgggagatgaaagaga

SEQ ID NO: 426509 - DNA, 25 bp, Artificial
  probe
  misc_feature (1)..(25): SEQ ID NO: 5968; WAN024CB3; Start 696; Stop 720
tagggttatcattcagggaaatctc

SEQ ID NO: 426510 - DNA, 25 bp, Artificial
  probe
  misc_feature (1)..(25): SEQ ID NO: 5968; WAN024CB3; Start 191; Stop 215
ttgatatgattcgggagatgaaaga

SEQ ID NO: 426511 - DNA, 25 bp, Artificial
  probe
  misc_feature (1)..(25): SEQ ID NO: 5968; WAN024CB3; Start 66; Stop 90
ctttgataagtgggatatggaggtc

SEQ ID NO: 426512 - DNA, 25 bp, Artificial
  probe
  misc_feature (1)..(25): SEQ ID NO: 5969; WAN024CDP; Start 810; Stop 834
taaccgtcgtatcttgacatcagaa

SEQ ID NO: 426513 - DNA, 25 bp, Artificial
  probe
  misc_feature (1)..(25): SEQ ID NO: 5969; WAN024CDP; Start 805; Stop 829
ttctgtaaccgtcgtatcttgacat

SEQ ID NO: 426514 - DNA, 25 bp, Artificial
  probe
  misc_feature (1)..(25): SEQ ID NO: 5969; WAN024CDP; Start 410; Stop 434
ttgacacacgtaacgattatgagta

SEQ ID NO: 426515 - DNA, 25 bp, Artificial
  probe
  misc_feature (1)..(25): SEQ ID NO: 5969; WAN024CDP; Start 411; Stop 435
tgacacacgtaacgattatgagtac

SEQ ID NO: 426516 - DNA, 25 bp, Artificial
  probe
  misc_feature (1)..(25): SEQ ID NO: 5969; WAN024CDP; Start 389; Stop 413
ttgataaagataccgttgtccttga

SEQ ID NO: 426517 - DNA, 25 bp, Artificial
  probe
  misc_feature (1)..(25): SEQ ID NO: 5969; WAN024CDP; Start 388; Stop 412
cttgataaagataccgttgtccttg

SEQ ID NO: 426518 - DNA, 25 bp, Artificial
  probe
  misc_feature (1)..(25): SEQ ID NO: 5969; WAN024CDP; Start 409; Stop 433
cttgacacacgtaacgattatgagt

SEQ ID NO: 426519 - DNA, 25 bp, Artificial
  probe
  misc_feature (1)..(25): SEQ ID NO: 5969; WAN024CDP; Start 809; Stop 833
gtaaccgtcgtatcttgacatcaga

SEQ ID NO: 426520 - DNA, 25 bp, Artificial
  probe
  misc_feature (1)..(25): SEQ ID NO: 5969; WAN024CDP; Start 806; Stop 830
tctgtaaccgtcgtatcttgacatc

SEQ ID NO: 426521 - DNA, 25 bp, Artificial
  probe
  misc_feature (1)..(25): SEQ ID NO: 5969; WAN024CDP; Start 808; Stop 832
tgtaaccgtcgtatcttgacatcag

SEQ ID NO: 426522 - DNA, 25 bp, Artificial
  probe
  misc_feature (1)..(25): SEQ ID NO: 5969; WAN024CDP; Start 807; Stop 831
ctgtaaccgtcgtatcttgacatca

SEQ ID NO: 426523 - DNA, 25 bp, Artificial
  probe
  misc_feature (1)..(25): SEQ ID NO: 5969; WAN024CDP; Start 151; Stop 175
tcaggtgactatgaaacaactcaaa

SEQ ID NO: 426524 - DNA, 25 bp, Artificial
  probe
  misc_feature (1)..(25): SEQ ID NO: 5969; WAN024CDP; Start 76; Stop 100
cacttggctttctgtaaatcaatcg

SEQ ID NO: 426525 - DNA, 25 bp, Artificial
  probe
  misc_feature (1)..(25): SEQ ID NO: 5969; WAN024CDP; Start 408; Stop 432
ccttgacacacgtaacgattatgag

SEQ ID NO: 426526 - DNA, 25 bp, Artificial
  probe
  misc_feature (1)..(25): SEQ ID NO: 5969; WAN024CDP; Start 811; Stop 835
aaccgtcgtatcttgacatcagaag

SEQ ID NO: 426527 - DNA, 25 bp, Artificial
  probe
  misc_feature (1)..(25): SEQ ID NO: 5969; WAN024CDP; Start 75; Stop 99
ccacttggctttctgtaaatcaatc

SEQ ID NO: 426528 - DNA, 25 bp, Artificial
  probe
  misc_feature (1)..(25): SEQ ID NO: 5969; WAN024CDP; Start 305; Stop 329
aagacaacgactttgacaatgacat

SEQ ID NO: 426529 - DNA, 25 bp, Artificial
  probe
  misc_feature (1)..(25): SEQ ID NO: 5969; WAN024CDP; Start 407; Stop 431
tccttgacacacgtaacgattatga

SEQ ID NO: 426530 - DNA, 25 bp, Artificial
  probe
  misc_feature (1)..(25): SEQ ID NO: 5969; WAN024CDP; Start 134; Stop 158
gaattaacggaacagtttcaggtga

SEQ ID NO: 426531 - DNA, 25 bp, Artificial
  probe
  misc_feature (1)..(25): SEQ ID NO: 5969; WAN024CDP; Start 74; Stop 98
accacttggctttctgtaaatcaat

SEQ ID NO: 426532 - DNA, 25 bp, Artificial
  probe
  misc_feature (1)..(25): SEQ ID NO: 5969; WAN024CDP; Start 300; Stop 324
tttggaagacaacgactttgacaat

SEQ ID NO: 426533 - DNA, 25 bp, Artificial
  probe
  misc_feature (1)..(25): SEQ ID NO: 5969; WAN024CDP; Start 13; Stop 37
attcgtgtcttactttactaccttt

SEQ ID NO: 426534 - DNA, 25 bp, Artificial
  probe
  misc_feature (1)..(25): SEQ ID NO: 5969; WAN024CDP; Start 390; Stop 414
tgataaagataccgttgtccttgac

SEQ ID NO: 426535 - DNA, 25 bp, Artificial
  probe
  misc_feature (1)..(25): SEQ ID NO: 5969; WAN024CDP; Start 135; Stop 159
aattaacggaacagtttcaggtgac

SEQ ID NO: 426536 - DNA, 25 bp, Artificial
  probe
  misc_feature (1)..(25): SEQ ID NO: 5969; WAN024CDP; Start 252; Stop 276
cttcaagaagatgtttgttcgctac

SEQ ID NO: 426537 - DNA, 25 bp, Artificial
  probe
  misc_feature (1)..(25): SEQ ID NO: 5969; WAN024CDP; Start 138; Stop 162
taacggaacagtttcaggtgactat

SEQ ID NO: 426538 - DNA, 25 bp, Artificial
  probe
  misc_feature (1)..(25): SEQ ID NO: 5969; WAN024CDP; Start 306; Stop 330
agacaacgactttgacaatgacatc

SEQ ID NO: 426539 - DNA, 25 bp, Artificial
  probe
  misc_feature (1)..(25): SEQ ID NO: 5969; WAN024CDP; Start 253; Stop 277
ttcaagaagatgtttgttcgctaca

SEQ ID NO: 426540 - DNA, 25 bp, Artificial
  probe
  misc_feature (1)..(25): SEQ ID NO: 5969; WAN024CDP; Start 130; Stop 154
gagggaattaacggaacagtttcag

SEQ ID NO: 426541 - DNA, 25 bp, Artificial
  probe
  misc_feature (1)..(25): SEQ ID NO: 5969; WAN024CDP; Start 77; Stop 101
acttggctttctgtaaatcaatcgg

SEQ ID NO: 426542 - DNA, 25 bp, Artificial
  probe
  misc_feature (1)..(25): SEQ ID NO: 5969; WAN024CDP; Start 247; Stop 271
caagccttcaagaagatgtttgttc

SEQ ID NO: 426543 - DNA, 25 bp, Artificial
  probe
  misc_feature (1)..(25): SEQ ID NO: 5969; WAN024CDP; Start 137; Stop 161
ttaacggaacagtttcaggtgacta

SEQ ID NO: 426544 - DNA, 25 bp, Artificial
  probe
  misc_feature (1)..(25): SEQ ID NO: 5969; WAN024CDP; Start 73; Stop 97
gaccacttggctttctgtaaatcaa

SEQ ID NO: 426545 - DNA, 25 bp, Artificial
  probe
  misc_feature (1)..(25): SEQ ID NO: 5970; WAN024AF5; Start 6; Stop 30
cacctcctgttatcgtttacactat

SEQ ID NO: 426546 - DNA, 25 bp, Artificial
  probe
  misc_feature (1)..(25): SEQ ID NO: 5970; WAN024AF5; Start 7; Stop 31
acctcctgttatcgtttacactatt

SEQ ID NO: 426547 - DNA, 25 bp, Artificial
  probe
  misc_feature (1)..(25): SEQ ID NO: 5970; WAN024AF5; Start 2; Stop 26
gaatcacctcctgttatcgtttaca

SEQ ID NO: 426548 - DNA, 25 bp, Artificial
  probe
  misc_feature (1)..(25): SEQ ID NO: 5970; WAN024AF5; Start 3; Stop 27
aatcacctcctgttatcgtttacac

SEQ ID NO: 426549 - DNA, 25 bp, Artificial
  probe
  misc_feature (1)..(25): SEQ ID NO: 5970; WAN024AF5; Start 8; Stop 32
cctcctgttatcgtttacactattc

SEQ ID NO: 426550 - DNA, 25 bp, Artificial
  probe
  misc_feature (1)..(25): SEQ ID NO: 5970; WAN024AF5; Start 5; Stop 29
tcacctcctgttatcgtttacacta

SEQ ID NO: 426551 - DNA, 25 bp, Artificial
  probe
  misc_feature (1)..(25): SEQ ID NO: 5970; WAN024AF5; Start 4; Stop 28
atcacctcctgttatcgtttacact

SEQ ID NO: 426552 - DNA, 25 bp, Artificial
  probe
  misc_feature (1)..(25): SEQ ID NO: 5970; WAN024AF5; Start 9; Stop 33
ctcctgttatcgtttacactattca

SEQ ID NO: 426553 - DNA, 25 bp, Artificial
  probe
  misc_feature (1)..(25): SEQ ID NO: 5970; WAN024AF5; Start 10; Stop 34
tcctgttatcgtttacactattcat

SEQ ID NO: 426554 - DNA, 25 bp, Artificial
  probe
  misc_feature (1)..(25): SEQ ID NO: 5970; WAN024AF5; Start 11; Stop 35
cctgttatcgtttacactattcatt

SEQ ID NO: 426555 - DNA, 25 bp, Artificial
  probe
  misc_feature (1)..(25): SEQ ID NO: 5970; WAN024AF5; Start 13; Stop 37
tgttatcgtttacactattcattct

SEQ ID NO: 426556 - DNA, 25 bp, Artificial
  probe
  misc_feature (1)..(25): SEQ ID NO: 5970; WAN024AF5; Start 18; Stop 42
tcgtttacactattcattctatcat

SEQ ID NO: 426557 - DNA, 25 bp, Artificial
  probe
  misc_feature (1)..(25): SEQ ID NO: 5970; WAN024AF5; Start 17; Stop 41
atcgtttacactattcattctatca

SEQ ID NO: 426558 - DNA, 25 bp, Artificial
  probe
  misc_feature (1)..(25): SEQ ID NO: 5970; WAN024AF5; Start 12; Stop 36
ctgttatcgtttacactattcattc

SEQ ID NO: 426559 - DNA, 25 bp, Artificial
  probe
  misc_feature (1)..(25): SEQ ID NO: 5971; WAN024GMD; Start 26; Stop 50
tgaatcagcatactttctccttaaa

SEQ ID NO: 426560 - DNA, 25 bp, Artificial
  probe
  misc_feature (1)..(25): SEQ ID NO: 5971; WAN024GMD; Start 23; Stop 47
ttctgaatcagcatactttctcctt

SEQ ID NO: 426561 - DNA, 25 bp, Artificial
  probe
  misc_feature (1)..(25): SEQ ID NO: 5971; WAN024GMD; Start 22; Stop 46
tttctgaatcagcatactttctcct

SEQ ID NO: 426562 - DNA, 25 bp, Artificial
  probe
  misc_feature (1)..(25): SEQ ID NO: 5971; WAN024GMD; Start 24; Stop 48
tctgaatcagcatactttctcctta

SEQ ID NO: 426563 - DNA, 25 bp, Artificial
  probe
  misc_feature (1)..(25): SEQ ID NO: 5971; WAN024GMD; Start 25; Stop 49
ctgaatcagcatactttctccttaa

SEQ ID NO: 426564 - DNA, 25 bp, Artificial
  probe
  misc_feature (1)..(25): SEQ ID NO: 5971; WAN024GMD; Start 50; Stop 74
aaaatagacaaaagggagcgacaat

SEQ ID NO: 426565 - DNA, 25 bp, Artificial
  probe
  misc_feature (1)..(25): SEQ ID NO: 5971; WAN024GMD; Start 51; Stop 75
aaatagacaaaagggagcgacaatg

SEQ ID NO: 426566 - DNA, 25 bp, Artificial
  probe
  misc_feature (1)..(25): SEQ ID NO: 5971; WAN024GMD; Start 21; Stop 45
ttttctgaatcagcatactttctcc

SEQ ID NO: 426567 - DNA, 25 bp, Artificial
  probe
  misc_feature (1)..(25): SEQ ID NO: 5971; WAN024GMD; Start 27; Stop 51
gaatcagcatactttctccttaaaa

SEQ ID NO: 426568 - DNA, 25 bp, Artificial
  probe
  misc_feature (1)..(25): SEQ ID NO: 5971; WAN024GMD; Start 20; Stop 44
attttctgaatcagcatactttctc

SEQ ID NO: 426569 - DNA, 25 bp, Artificial
  probe
  misc_feature (1)..(25): SEQ ID NO: 5971; WAN024GMD; Start 78; Stop 102
tcagctccttttcattctgtttgtg

SEQ ID NO: 426570 - DNA, 25 bp, Artificial
  probe
  misc_feature (1)..(25): SEQ ID NO: 5971; WAN024GMD; Start 77; Stop 101
gtcagctccttttcattctgtttgt

SEQ ID NO: 426571 - DNA, 25 bp, Artificial
  probe
  misc_feature (1)..(25): SEQ ID NO: 5971; WAN024GMD; Start 52; Stop 76
aatagacaaaagggagcgacaatgc

SEQ ID NO: 426572 - DNA, 25 bp, Artificial
  probe
  misc_feature (1)..(25): SEQ ID NO: 5971; WAN024GMD; Start 76; Stop 100
cgtcagctccttttcattctgtttg

SEQ ID NO: 426573 - DNA, 25 bp, Artificial
  probe
  misc_feature (1)..(25): SEQ ID NO: 5971; WAN024GMD; Start 19; Stop 43
tattttctgaatcagcatactttct

SEQ ID NO: 426574 - DNA, 25 bp, Artificial
  probe
  misc_feature (1)..(25): SEQ ID NO: 5971; WAN024GMD; Start 18; Stop 42
ttattttctgaatcagcatactttc

SEQ ID NO: 426575 - DNA, 25 bp, Artificial
  probe
  misc_feature (1)..(25): SEQ ID NO: 5971; WAN024GMD; Start 75; Stop 99
gcgtcagctccttttcattctgttt

SEQ ID NO: 426576 - DNA, 25 bp, Artificial
  probe
  misc_feature (1)..(25): SEQ ID NO: 5971; WAN024GMD; Start 17; Stop 41
tttattttctgaatcagcatacttt

SEQ ID NO: 426577 - DNA, 25 bp, Artificial
  probe
  misc_feature (1)..(25): SEQ ID NO: 5971; WAN024GMD; Start 16; Stop 40
ttttattttctgaatcagcatactt

SEQ ID NO: 426578 - DNA, 25 bp, Artificial
  probe
  misc_feature (1)..(25): SEQ ID NO: 5971; WAN024GMD; Start 72; Stop 96
aatgcgtcagctccttttcattctg

SEQ ID NO: 426579 - DNA, 25 bp, Artificial
  probe
  misc_feature (1)..(25): SEQ ID NO: 5971; WAN024GMD; Start 71; Stop 95
caatgcgtcagctccttttcattct

SEQ ID NO: 426580 - DNA, 25 bp, Artificial
  probe
  misc_feature (1)..(25): SEQ ID NO: 5971; WAN024GMD; Start 70; Stop 94
acaatgcgtcagctccttttcattc

SEQ ID NO: 426581 - DNA, 25 bp, Artificial
  probe
  misc_feature (1)..(25): SEQ ID NO: 5971; WAN024GMD; Start 69; Stop 93
gacaatgcgtcagctccttttcatt

SEQ ID NO: 426582 - DNA, 25 bp, Artificial
  probe
  misc_feature (1)..(25): SEQ ID NO: 5971; WAN024GMD; Start 73; Stop 97
atgcgtcagctccttttcattctgt

SEQ ID NO: 426583 - DNA, 25 bp, Artificial
  probe
  misc_feature (1)..(25): SEQ ID NO: 5972; WAN024DTB; Start 23; Stop 47
ctttgaactcattcgtaagaagccg

SEQ ID NO: 426584 - DNA, 25 bp, Artificial
  probe
  misc_feature (1)..(25): SEQ ID NO: 5972; WAN024DTB; Start 25; Stop 49
ttgaactcattcgtaagaagccgac

SEQ ID NO: 426585 - DNA, 25 bp, Artificial
  probe
  misc_feature (1)..(25): SEQ ID NO: 5972; WAN024DTB; Start 24; Stop 48
tttgaactcattcgtaagaagccga

SEQ ID NO: 426586 - DNA, 25 bp, Artificial
  probe
  misc_feature (1)..(25): SEQ ID NO: 5972; WAN024DTB; Start 37; Stop 61
gtaagaagccgacgacgtatcattt

SEQ ID NO: 426587 - DNA, 25 bp, Artificial
  probe
  misc_feature (1)..(25): SEQ ID NO: 5972; WAN024DTB; Start 20; Stop 44
aagctttgaactcattcgtaagaag

SEQ ID NO: 426588 - DNA, 25 bp, Artificial
  probe
  misc_feature (1)..(25): SEQ ID NO: 5972; WAN024DTB; Start 19; Stop 43
caagctttgaactcattcgtaagaa

SEQ ID NO: 426589 - DNA, 25 bp, Artificial
  probe
  misc_feature (1)..(25): SEQ ID NO: 5972; WAN024DTB; Start 18; Stop 42
ccaagctttgaactcattcgtaaga

SEQ ID NO: 426590 - DNA, 25 bp, Artificial
  probe
  misc_feature (1)..(25): SEQ ID NO: 5972; WAN024DTB; Start 38; Stop 62
taagaagccgacgacgtatcatttt

SEQ ID NO: 426591 - DNA, 25 bp, Artificial
  probe
  misc_feature (1)..(25): SEQ ID NO: 5972; WAN024DTB; Start 17; Stop 41
gccaagctttgaactcattcgtaag

SEQ ID NO: 426592 - DNA, 25 bp, Artificial
  probe
  misc_feature (1)..(25): SEQ ID NO: 5972; WAN024DTB; Start 21; Stop 45
agctttgaactcattcgtaagaagc

SEQ ID NO: 426593 - DNA, 25 bp, Artificial
  probe
  misc_feature (1)..(25): SEQ ID NO: 5972; WAN024DTB; Start 39; Stop 63
aagaagccgacgacgtatcattttg

SEQ ID NO: 426594 - DNA, 25 bp, Artificial
  probe
  misc_feature (1)..(25): SEQ ID NO: 5972; WAN024DTB; Start 36; Stop 60
cgtaagaagccgacgacgtatcatt

SEQ ID NO: 426595 - DNA, 25 bp, Artificial
  probe
  misc_feature (1)..(25): SEQ ID NO: 5972; WAN024DTB; Start 22; Stop 46
gctttgaactcattcgtaagaagcc

SEQ ID NO: 426596 - DNA, 25 bp, Artificial
  probe
  misc_feature (1)..(25): SEQ ID NO: 5972; WAN024DTB; Start 44; Stop 68
gccgacgacgtatcattttgatttt

SEQ ID NO: 426597 - DNA, 25 bp, Artificial
  probe
  misc_feature (1)..(25): SEQ ID NO: 5972; WAN024DTB; Start 16; Stop 40
agccaagctttgaactcattcgtaa

SEQ ID NO: 426598 - DNA, 25 bp, Artificial
  probe
  misc_feature (1)..(25): SEQ ID NO: 5972; WAN024DTB; Start 43; Stop 67
agccgacgacgtatcattttgattt

SEQ ID NO: 426599 - DNA, 25 bp, Artificial
  probe
  misc_feature (1)..(25): SEQ ID NO: 5972; WAN024DTB; Start 42; Stop 66
aagccgacgacgtatcattttgatt

SEQ ID NO: 426600 - DNA, 25 bp, Artificial
  probe
  misc_feature (1)..(25): SEQ ID NO: 5972; WAN024DTB; Start 40; Stop 64
agaagccgacgacgtatcattttga

SEQ ID NO: 426601 - DNA, 25 bp, Artificial
  probe
  misc_feature (1)..(25): SEQ ID NO: 5972; WAN024DTB; Start 41; Stop 65
gaagccgacgacgtatcattttgat

SEQ ID NO: 426602 - DNA, 25 bp, Artificial
  probe
  misc_feature (1)..(25): SEQ ID NO: 5972; WAN024DTB; Start 15; Stop 39
aagccaagctttgaactcattcgta

SEQ ID NO: 426603 - DNA, 25 bp, Artificial
  probe
  misc_feature (1)..(25): SEQ ID NO: 5973; WAN024BGY; Start 496; Stop 520
tcaagggagattgtttctttggata

SEQ ID NO: 426604 - DNA, 25 bp, Artificial
  probe
  misc_feature (1)..(25): SEQ ID NO: 5973; WAN024BGY; Start 492; Stop 516
caagtcaagggagattgtttctttg

SEQ ID NO: 426605 - DNA, 25 bp, Artificial
  probe
  misc_feature (1)..(25): SEQ ID NO: 5973; WAN024BGY; Start 497; Stop 521
caagggagattgtttctttggatat

SEQ ID NO: 426606 - DNA, 25 bp, Artificial
  probe
  misc_feature (1)..(25): SEQ ID NO: 5973; WAN024BGY; Start 495; Stop 519
gtcaagggagattgtttctttggat

SEQ ID NO: 426607 - DNA, 25 bp, Artificial
  probe
  misc_feature (1)..(25): SEQ ID NO: 5973; WAN024BGY; Start 493; Stop 517
aagtcaagggagattgtttctttgg

SEQ ID NO: 426608 - DNA, 25 bp, Artificial
  probe
  misc_feature (1)..(25): SEQ ID NO: 5973; WAN024BGY; Start 494; Stop 518
agtcaagggagattgtttctttgga

SEQ ID NO: 426609 - DNA, 25 bp, Artificial
  probe
  misc_feature (1)..(25): SEQ ID NO: 5973; WAN024BGY; Start 484; Stop 508
gattgtcacaagtcaagggagattg

SEQ ID NO: 426610 - DNA, 25 bp, Artificial
  probe
  misc_feature (1)..(25): SEQ ID NO: 5973; WAN024BGY; Start 500; Stop 524
gggagattgtttctttggatatcac

SEQ ID NO: 426611 - DNA, 25 bp, Artificial
  probe
  misc_feature (1)..(25): SEQ ID NO: 5973; WAN024BGY; Start 499; Stop 523
agggagattgtttctttggatatca

SEQ ID NO: 426612 - DNA, 25 bp, Artificial
  probe
  misc_feature (1)..(25): SEQ ID NO: 5973; WAN024BGY; Start 501; Stop 525
ggagattgtttctttggatatcact

SEQ ID NO: 426613 - DNA, 25 bp, Artificial
  probe
  misc_feature (1)..(25): SEQ ID NO: 5973; WAN024BGY; Start 498; Stop 522
aagggagattgtttctttggatatc

SEQ ID NO: 426614 - DNA, 25 bp, Artificial
  probe
  misc_feature (1)..(25): SEQ ID NO: 5973; WAN024BGY; Start 483; Stop 507
cgattgtcacaagtcaagggagatt

SEQ ID NO: 426615 - DNA, 25 bp, Artificial
  probe
  misc_feature (1)..(25): SEQ ID NO: 5973; WAN024BGY; Start 502; Stop 526
gagattgtttctttggatatcactg

SEQ ID NO: 426616 - DNA, 25 bp, Artificial
  probe
  misc_feature (1)..(25): SEQ ID NO: 5973; WAN024BGY; Start 491; Stop 515
acaagtcaagggagattgtttcttt

SEQ ID NO: 426617 - DNA, 25 bp, Artificial
  probe
  misc_feature (1)..(25): SEQ ID NO: 5973; WAN024BGY; Start 490; Stop 514
cacaagtcaagggagattgtttctt

SEQ ID NO: 426618 - DNA, 25 bp, Artificial
  probe
  misc_feature (1)..(25): SEQ ID NO: 5973; WAN024BGY; Start 489; Stop 513
tcacaagtcaagggagattgtttct

SEQ ID NO: 426619 - DNA, 25 bp, Artificial
  probe
  misc_feature (1)..(25): SEQ ID NO: 5973; WAN024BGY; Start 488; Stop 512
gtcacaagtcaagggagattgtttc

SEQ ID NO: 426620 - DNA, 25 bp, Artificial
  probe
  misc_feature (1)..(25): SEQ ID NO: 5973; WAN024BGY; Start 485; Stop 509
attgtcacaagtcaagggagattgt

SEQ ID NO: 426621 - DNA, 25 bp, Artificial
  probe
  misc_feature (1)..(25): SEQ ID NO: 5973; WAN024BGY; Start 487; Stop 511
tgtcacaagtcaagggagattgttt

SEQ ID NO: 426622 - DNA, 25 bp, Artificial
  probe
  misc_feature (1)..(25): SEQ ID NO: 5973; WAN024BGY; Start 486; Stop 510
ttgtcacaagtcaagggagattgtt

SEQ ID NO: 426623 - DNA, 25 bp, Artificial
  probe
  misc_feature (1)..(25): SEQ ID NO: 5973; WAN024BGY; Start 482; Stop 506
gcgattgtcacaagtcaagggagat

SEQ ID NO: 426624 - DNA, 25 bp, Artificial
  probe
  misc_feature (1)..(25): SEQ ID NO: 5974; WAN02QE91; Start 443; Stop 467
cagcgaggaatatagcattagagaa

SEQ ID NO: 426625 - DNA, 25 bp, Artificial
  probe
  misc_feature (1)..(25): SEQ ID NO: 5974; WAN02QE91; Start 444; Stop 468
agcgaggaatatagcattagagaag

SEQ ID NO: 426626 - DNA, 25 bp, Artificial
  probe
  misc_feature (1)..(25): SEQ ID NO: 5974; WAN02QE91; Start 140; Stop 164
tcaatacagaattaccagcatcaca

SEQ ID NO: 426627 - DNA, 25 bp, Artificial
  probe
  misc_feature (1)..(25): SEQ ID NO: 5974; WAN02QE91; Start 141; Stop 165
caatacagaattaccagcatcacaa

SEQ ID NO: 426628 - DNA, 25 bp, Artificial
  probe
  misc_feature (1)..(25): SEQ ID NO: 5974; WAN02QE91; Start 139; Stop 163
ttcaatacagaattaccagcatcac

SEQ ID NO: 426629 - DNA, 25 bp, Artificial
  probe
  misc_feature (1)..(25): SEQ ID NO: 5974; WAN02QE91; Start 442; Stop 466
ccagcgaggaatatagcattagaga

SEQ ID NO: 426630 - DNA, 25 bp, Artificial
  probe
  misc_feature (1)..(25): SEQ ID NO: 5974; WAN02QE91; Start 236; Stop 260
ataatgttgtgataagacagcaggt

SEQ ID NO: 426631 - DNA, 25 bp, Artificial
  probe
  misc_feature (1)..(25): SEQ ID NO: 5974; WAN02QE91; Start 238; Stop 262
aatgttgtgataagacagcaggtta

SEQ ID NO: 426632 - DNA, 25 bp, Artificial
  probe
  misc_feature (1)..(25): SEQ ID NO: 5974; WAN02QE91; Start 237; Stop 261
taatgttgtgataagacagcaggtt

SEQ ID NO: 426633 - DNA, 25 bp, Artificial
  probe
  misc_feature (1)..(25): SEQ ID NO: 5974; WAN02QE91; Start 235; Stop 259
aataatgttgtgataagacagcagg

SEQ ID NO: 426634 - DNA, 25 bp, Artificial
  probe
  misc_feature (1)..(25): SEQ ID NO: 5974; WAN02QE91; Start 233; Stop 257
ggaataatgttgtgataagacagca

SEQ ID NO: 426635 - DNA, 25 bp, Artificial
  probe
  misc_feature (1)..(25): SEQ ID NO: 5974; WAN02QE91; Start 244; Stop 268
gtgataagacagcaggttaccattg

SEQ ID NO: 426636 - DNA, 25 bp, Artificial
  probe
  misc_feature (1)..(25): SEQ ID NO: 5974; WAN02QE91; Start 239; Stop 263
atgttgtgataagacagcaggttac

SEQ ID NO: 426637 - DNA, 25 bp, Artificial
  probe
  misc_feature (1)..(25): SEQ ID NO: 5974; WAN02QE91; Start 234; Stop 258
gaataatgttgtgataagacagcag

SEQ ID NO: 426638 - DNA, 25 bp, Artificial
  probe
  misc_feature (1)..(25): SEQ ID NO: 5974; WAN02QE91; Start 245; Stop 269
tgataagacagcaggttaccattgg

SEQ ID NO: 426639 - DNA, 25 bp, Artificial
  probe
  misc_feature (1)..(25): SEQ ID NO: 5974; WAN02QE91; Start 243; Stop 267
tgtgataagacagcaggttaccatt

SEQ ID NO: 426640 - DNA, 25 bp, Artificial
  probe
  misc_feature (1)..(25): SEQ ID NO: 5974; WAN02QE91; Start 242; Stop 266
ttgtgataagacagcaggttaccat

SEQ ID NO: 426641 - DNA, 25 bp, Artificial
  probe
  misc_feature (1)..(25): SEQ ID NO: 5974; WAN02QE91; Start 217; Stop 241
ggcgatgtaactttagggaataatg

SEQ ID NO: 426642 - DNA, 25 bp, Artificial
  probe
  misc_feature (1)..(25): SEQ ID NO: 5974; WAN02QE91; Start 216; Stop 240
tggcgatgtaactttagggaataat

SEQ ID NO: 426643 - DNA, 25 bp, Artificial
  probe
  misc_feature (1)..(25): SEQ ID NO: 5974; WAN02QE91; Start 215; Stop 239
atggcgatgtaactttagggaataa

SEQ ID NO: 426644 - DNA, 25 bp, Artificial
  probe
  misc_feature (1)..(25): SEQ ID NO: 5974; WAN02QE91; Start 214; Stop 238
aatggcgatgtaactttagggaata

SEQ ID NO: 426645 - DNA, 25 bp, Artificial
  probe
  misc_feature (1)..(25): SEQ ID NO: 5974; WAN02QE91; Start 213; Stop 237
taatggcgatgtaactttagggaat

SEQ ID NO: 426646 - DNA, 25 bp, Artificial
  probe
  misc_feature (1)..(25): SEQ ID NO: 5974; WAN02QE91; Start 265; Stop 289
attggtaataaagggatggaaaggg

SEQ ID NO: 426647 - DNA, 25 bp, Artificial
  probe
  misc_feature (1)..(25): SEQ ID NO: 5974; WAN02QE91; Start 200; Stop 224
atgggataatagttaatggcgatgt

SEQ ID NO: 426648 - DNA, 25 bp, Artificial
  probe
  misc_feature (1)..(25): SEQ ID NO: 5974; WAN02QE91; Start 212; Stop 236
ttaatggcgatgtaactttagggaa

SEQ ID NO: 426649 - DNA, 25 bp, Artificial
  probe
  misc_feature (1)..(25): SEQ ID NO: 5974; WAN02QE91; Start 441; Stop 465
tccagcgaggaatatagcattagag

SEQ ID NO: 426650 - DNA, 25 bp, Artificial
  probe
  misc_feature (1)..(25): SEQ ID NO: 5974; WAN02QE91; Start 218; Stop 242
gcgatgtaactttagggaataatgt

SEQ ID NO: 426651 - DNA, 25 bp, Artificial
  probe
  misc_feature (1)..(25): SEQ ID NO: 5974; WAN02QE91; Start 201; Stop 225
tgggataatagttaatggcgatgta

SEQ ID NO: 426652 - DNA, 25 bp, Artificial
  probe
  misc_feature (1)..(25): SEQ ID NO: 5974; WAN02QE91; Start 348; Stop 372
tataggagggataacgattggtgag

SEQ ID NO: 426653 - DNA, 25 bp, Artificial
  probe
  misc_feature (1)..(25): SEQ ID NO: 5974; WAN02QE91; Start 264; Stop 288
cattggtaataaagggatggaaagg

SEQ ID NO: 426654 - DNA, 25 bp, Artificial
  probe
  misc_feature (1)..(25): SEQ ID NO: 5974; WAN02QE91; Start 346; Stop 370
attataggagggataacgattggtg

SEQ ID NO: 426655 - DNA, 25 bp, Artificial
  probe
  misc_feature (1)..(25): SEQ ID NO: 5974; WAN02QE91; Start 347; Stop 371
ttataggagggataacgattggtga

SEQ ID NO: 426656 - DNA, 25 bp, Artificial
  probe
  misc_feature (1)..(25): SEQ ID NO: 5974; WAN02QE91; Start 307; Stop 331
attatcgaagcaggtgttgatattg

SEQ ID NO: 426657 - DNA, 25 bp, Artificial
  probe
  misc_feature (1)..(25): SEQ ID NO: 5975; WAN02QE90; Start 248; Stop 272
caggaactaagataccatacgacaa

SEQ ID NO: 426658 - DNA, 25 bp, Artificial
  probe
  misc_feature (1)..(25): SEQ ID NO: 5975; WAN02QE90; Start 247; Stop 271
acaggaactaagataccatacgaca

SEQ ID NO: 426659 - DNA, 25 bp, Artificial
  probe
  misc_feature (1)..(25): SEQ ID NO: 5975; WAN02QE90; Start 246; Stop 270
tacaggaactaagataccatacgac

SEQ ID NO: 426660 - DNA, 25 bp, Artificial
  probe
  misc_feature (1)..(25): SEQ ID NO: 5975; WAN02QE90; Start 249; Stop 273
aggaactaagataccatacgacaat

SEQ ID NO: 426661 - DNA, 25 bp, Artificial
  probe
  misc_feature (1)..(25): SEQ ID NO: 5975; WAN02QE90; Start 351; Stop 375
tatcggagaaggagcagttattcaa

SEQ ID NO: 426662 - DNA, 25 bp, Artificial
  probe
  misc_feature (1)..(25): SEQ ID NO: 5975; WAN02QE90; Start 245; Stop 269
atacaggaactaagataccatacga

SEQ ID NO: 426663 - DNA, 25 bp, Artificial
  probe
  misc_feature (1)..(25): SEQ ID NO: 5975; WAN02QE90; Start 244; Stop 268
gatacaggaactaagataccatacg

SEQ ID NO: 426664 - DNA, 25 bp, Artificial
  probe
  misc_feature (1)..(25): SEQ ID NO: 5975; WAN02QE90; Start 350; Stop 374
gtatcggagaaggagcagttattca

SEQ ID NO: 426665 - DNA, 25 bp, Artificial
  probe
  misc_feature (1)..(25): SEQ ID NO: 5975; WAN02QE90; Start 250; Stop 274
ggaactaagataccatacgacaata

SEQ ID NO: 426666 - DNA, 25 bp, Artificial
  probe
  misc_feature (1)..(25): SEQ ID NO: 5975; WAN02QE90; Start 352; Stop 376
atcggagaaggagcagttattcaag

SEQ ID NO: 426667 - DNA, 25 bp, Artificial
  probe
  misc_feature (1)..(25): SEQ ID NO: 5975; WAN02QE90; Start 300; Stop 324
tgatgataatgtgtggattgggaat

SEQ ID NO: 426668 - DNA, 25 bp, Artificial
  probe
  misc_feature (1)..(25): SEQ ID NO: 5975; WAN02QE90; Start 298; Stop 322
attgatgataatgtgtggattggga

SEQ ID NO: 426669 - DNA, 25 bp, Artificial
  probe
  misc_feature (1)..(25): SEQ ID NO: 5975; WAN02QE90; Start 243; Stop 267
tgatacaggaactaagataccatac

SEQ ID NO: 426670 - DNA, 25 bp, Artificial
  probe
  misc_feature (1)..(25): SEQ ID NO: 5975; WAN02QE90; Start 299; Stop 323
ttgatgataatgtgtggattgggaa

SEQ ID NO: 426671 - DNA, 25 bp, Artificial
  probe
  misc_feature (1)..(25): SEQ ID NO: 5975; WAN02QE90; Start 296; Stop 320
ttattgatgataatgtgtggattgg

SEQ ID NO: 426672 - DNA, 25 bp, Artificial
  probe
  misc_feature (1)..(25): SEQ ID NO: 5975; WAN02QE90; Start 261; Stop 285
accatacgacaataagtacatacat

SEQ ID NO: 426673 - DNA, 25 bp, Artificial
  probe
  misc_feature (1)..(25): SEQ ID NO: 5975; WAN02QE90; Start 321; Stop 345
gaataatgttattatcctcggcgga

SEQ ID NO: 426674 - DNA, 25 bp, Artificial
  probe
  misc_feature (1)..(25): SEQ ID NO: 5975; WAN02QE90; Start 349; Stop 373
cgtatcggagaaggagcagttattc

SEQ ID NO: 426675 - DNA, 25 bp, Artificial
  probe
  misc_feature (1)..(25): SEQ ID NO: 5975; WAN02QE90; Start 297; Stop 321
tattgatgataatgtgtggattggg

SEQ ID NO: 426676 - DNA, 25 bp, Artificial
  probe
  misc_feature (1)..(25): SEQ ID NO: 5975; WAN02QE90; Start 256; Stop 280
aagataccatacgacaataagtaca

SEQ ID NO: 426677 - DNA, 25 bp, Artificial
  probe
  misc_feature (1)..(25): SEQ ID NO: 5975; WAN02QE90; Start 159; Stop 183
aatgtttggagaaggtagaatttcg

SEQ ID NO: 426678 - DNA, 25 bp, Artificial
  probe
  misc_feature (1)..(25): SEQ ID NO: 5975; WAN02QE90; Start 307; Stop 331
aatgtgtggattgggaataatgtta

SEQ ID NO: 426679 - DNA, 25 bp, Artificial
  probe
  misc_feature (1)..(25): SEQ ID NO: 5975; WAN02QE90; Start 306; Stop 330
taatgtgtggattgggaataatgtt

SEQ ID NO: 426680 - DNA, 25 bp, Artificial
  probe
  misc_feature (1)..(25): SEQ ID NO: 5975; WAN02QE90; Start 301; Stop 325
gatgataatgtgtggattgggaata

SEQ ID NO: 426681 - DNA, 25 bp, Artificial
  probe
  misc_feature (1)..(25): SEQ ID NO: 5975; WAN02QE90; Start 155; Stop 179
tgtcaatgtttggagaaggtagaat

SEQ ID NO: 426682 - DNA, 25 bp, Artificial
  probe
  misc_feature (1)..(25): SEQ ID NO: 5975; WAN02QE90; Start 154; Stop 178
atgtcaatgtttggagaaggtagaa

SEQ ID NO: 426683 - DNA, 25 bp, Artificial
  probe
  misc_feature (1)..(25): SEQ ID NO: 5975; WAN02QE90; Start 348; Stop 372
tcgtatcggagaaggagcagttatt

SEQ ID NO: 426684 - DNA, 25 bp, Artificial
  probe
  misc_feature (1)..(25): SEQ ID NO: 5975; WAN02QE90; Start 240; Stop 264
ctatgatacaggaactaagatacca

SEQ ID NO: 426685 - DNA, 25 bp, Artificial
  probe
  misc_feature (1)..(25): SEQ ID NO: 5975; WAN02QE90; Start 239; Stop 263
actatgatacaggaactaagatacc

SEQ ID NO: 426686 - DNA, 25 bp, Artificial
  probe
  misc_feature (1)..(25): SEQ ID NO: 5975; WAN02QE90; Start 305; Stop 329
ataatgtgtggattgggaataatgt

SEQ ID NO: 426687 - DNA, 25 bp, Artificial
  probe
  misc_feature (1)..(25): SEQ ID NO: 5975; WAN02QE90; Start 320; Stop 344
ggaataatgttattatcctcggcgg

SEQ ID NO: 426688 - DNA, 25 bp, Artificial
  probe
  misc_feature (1)..(25): SEQ ID NO: 5975; WAN02QE90; Start 308; Stop 332
atgtgtggattgggaataatgttat

SEQ ID NO: 426689 - DNA, 25 bp, Artificial
  probe
  misc_feature (1)..(25): SEQ ID NO: 5975; WAN02QE90; Start 257; Stop 281
agataccatacgacaataagtacat

SEQ ID NO: 426690 - DNA, 25 bp, Artificial
  probe
  misc_feature (1)..(25): SEQ ID NO: 5976; WAN02QCQ9; Start 404; Stop 428
aagttcagcaagttagttctcataa

SEQ ID NO: 426691 - DNA, 25 bp, Artificial
  probe
  misc_feature (1)..(25): SEQ ID NO: 5976; WAN02QCQ9; Start 338; Stop 362
gcgaaggatacgatctagttgtaat

SEQ ID NO: 426692 - DNA, 25 bp, Artificial
  probe
  misc_feature (1)..(25): SEQ ID NO: 5976; WAN02QCQ9; Start 252; Stop 276
gaagagaccgattgtagtacctaga

SEQ ID NO: 426693 - DNA, 25 bp, Artificial
  probe
  misc_feature (1)..(25): SEQ ID NO: 5976; WAN02QCQ9; Start 405; Stop 429
agttcagcaagttagttctcataat

SEQ ID NO: 426694 - DNA, 25 bp, Artificial
  probe
  misc_feature (1)..(25): SEQ ID NO: 5976; WAN02QCQ9; Start 253; Stop 277
aagagaccgattgtagtacctagac

SEQ ID NO: 426695 - DNA, 25 bp, Artificial
  probe
  misc_feature (1)..(25): SEQ ID NO: 5976; WAN02QCQ9; Start 330; Stop 354
gttactaggcgaaggatacgatcta

SEQ ID NO: 426696 - DNA, 25 bp, Artificial
  probe
  misc_feature (1)..(25): SEQ ID NO: 5976; WAN02QCQ9; Start 339; Stop 363
cgaaggatacgatctagttgtaatc

SEQ ID NO: 426697 - DNA, 25 bp, Artificial
  probe
  misc_feature (1)..(25): SEQ ID NO: 5976; WAN02QCQ9; Start 251; Stop 275
ggaagagaccgattgtagtacctag

SEQ ID NO: 426698 - DNA, 25 bp, Artificial
  probe
  misc_feature (1)..(25): SEQ ID NO: 5976; WAN02QCQ9; Start 189; Stop 213
tgaagcagatattgtcattacacat

SEQ ID NO: 426699 - DNA, 25 bp, Artificial
  probe
  misc_feature (1)..(25): SEQ ID NO: 5976; WAN02QCQ9; Start 328; Stop 352
aagttactaggcgaaggatacgatc

SEQ ID NO: 426700 - DNA, 25 bp, Artificial
  probe
  misc_feature (1)..(25): SEQ ID NO: 5976; WAN02QCQ9; Start 408; Stop 432
tcagcaagttagttctcataatagt

SEQ ID NO: 426701 - DNA, 25 bp, Artificial
  probe
  misc_feature (1)..(25): SEQ ID NO: 5976; WAN02QCQ9; Start 192; Stop 216
agcagatattgtcattacacatggt

SEQ ID NO: 426702 - DNA, 25 bp, Artificial
  probe
  misc_feature (1)..(25): SEQ ID NO: 5976; WAN02QCQ9; Start 191; Stop 215
aagcagatattgtcattacacatgg

SEQ ID NO: 426703 - DNA, 25 bp, Artificial
  probe
  misc_feature (1)..(25): SEQ ID NO: 5976; WAN02QCQ9; Start 337; Stop 361
ggcgaaggatacgatctagttgtaa

SEQ ID NO: 426704 - DNA, 25 bp, Artificial
  probe
  misc_feature (1)..(25): SEQ ID NO: 5976; WAN02QCQ9; Start 194; Stop 218
cagatattgtcattacacatggtgg

SEQ ID NO: 426705 - DNA, 25 bp, Artificial
  probe
  misc_feature (1)..(25): SEQ ID NO: 5976; WAN02QCQ9; Start 193; Stop 217
gcagatattgtcattacacatggtg

SEQ ID NO: 426706 - DNA, 25 bp, Artificial
  probe
  misc_feature (1)..(25): SEQ ID NO: 5976; WAN02QCQ9; Start 254; Stop 278
agagaccgattgtagtacctagaca

SEQ ID NO: 426707 - DNA, 25 bp, Artificial
  probe
  misc_feature (1)..(25): SEQ ID NO: 5976; WAN02QCQ9; Start 223; Stop 247
gcaacatttatgggagtgatttcta

SEQ ID NO: 426708 - DNA, 25 bp, Artificial
  probe
  misc_feature (1)..(25): SEQ ID NO: 5976; WAN02QCQ9; Start 222; Stop 246
agcaacatttatgggagtgatttct

SEQ ID NO: 426709 - DNA, 25 bp, Artificial
  probe
  misc_feature (1)..(25): SEQ ID NO: 5976; WAN02QCQ9; Start 221; Stop 245
cagcaacatttatgggagtgatttc

SEQ ID NO: 426710 - DNA, 25 bp, Artificial
  probe
  misc_feature (1)..(25): SEQ ID NO: 5976; WAN02QCQ9; Start 329; Stop 353
agttactaggcgaaggatacgatct

SEQ ID NO: 426711 - DNA, 25 bp, Artificial
  probe
  misc_feature (1)..(25): SEQ ID NO: 5976; WAN02QCQ9; Start 227; Stop 251
catttatgggagtgatttctaaggg

SEQ ID NO: 426712 - DNA, 25 bp, Artificial
  probe
  misc_feature (1)..(25): SEQ ID NO: 5976; WAN02QCQ9; Start 195; Stop 219
agatattgtcattacacatggtggc

SEQ ID NO: 426713 - DNA, 25 bp, Artificial
  probe
  misc_feature (1)..(25): SEQ ID NO: 5976; WAN02QCQ9; Start 190; Stop 214
gaagcagatattgtcattacacatg

SEQ ID NO: 426714 - DNA, 25 bp, Artificial
  probe
  misc_feature (1)..(25): SEQ ID NO: 5976; WAN02QCQ9; Start 181; Stop 205
tatatggatgaagcagatattgtca

SEQ ID NO: 426715 - DNA, 25 bp, Artificial
  probe
  misc_feature (1)..(25): SEQ ID NO: 5976; WAN02QCQ9; Start 173; Stop 197
tgaatcaatatatggatgaagcaga

SEQ ID NO: 426716 - DNA, 25 bp, Artificial
  probe
  misc_feature (1)..(25): SEQ ID NO: 5976; WAN02QCQ9; Start 331; Stop 355
ttactaggcgaaggatacgatctag

SEQ ID NO: 426717 - DNA, 25 bp, Artificial
  probe
  misc_feature (1)..(25): SEQ ID NO: 5976; WAN02QCQ9; Start 325; Stop 349
ttaaagttactaggcgaaggatacg

SEQ ID NO: 426718 - DNA, 25 bp, Artificial
  probe
  misc_feature (1)..(25): SEQ ID NO: 5976; WAN02QCQ9; Start 336; Stop 360
aggcgaaggatacgatctagttgta

SEQ ID NO: 426719 - DNA, 25 bp, Artificial
  probe
  misc_feature (1)..(25): SEQ ID NO: 5976; WAN02QCQ9; Start 335; Stop 359
taggcgaaggatacgatctagttgt

SEQ ID NO: 426720 - DNA, 25 bp, Artificial
  probe
  misc_feature (1)..(25): SEQ ID NO: 5976; WAN02QCQ9; Start 406; Stop 430
gttcagcaagttagttctcataata

SEQ ID NO: 426721 - DNA, 25 bp, Artificial
  probe
  misc_feature (1)..(25): SEQ ID NO: 5976; WAN02QCQ9; Start 323; Stop 347
gcttaaagttactaggcgaaggata

SEQ ID NO: 426722 - DNA, 25 bp, Artificial
  probe
  misc_feature (1)..(25): SEQ ID NO: 5976; WAN02QCQ9; Start 326; Stop 350
taaagttactaggcgaaggatacga

SEQ ID NO: 426723 - DNA, 25 bp, Artificial
  probe
  misc_feature (1)..(25): SEQ ID NO: 5977; WAN02QCQA; Start 132; Stop 156
tattgtcattgaatgtcacacagac

SEQ ID NO: 426724 - DNA, 25 bp, Artificial
  probe
  misc_feature (1)..(25): SEQ ID NO: 5977; WAN02QCQA; Start 131; Stop 155
ttattgtcattgaatgtcacacaga

SEQ ID NO: 426725 - DNA, 25 bp, Artificial
  probe
  misc_feature (1)..(25): SEQ ID NO: 5977; WAN02QCQA; Start 133; Stop 157
attgtcattgaatgtcacacagact

SEQ ID NO: 426726 - DNA, 25 bp, Artificial
  probe
  misc_feature (1)..(25): SEQ ID NO: 5977; WAN02QCQA; Start 134; Stop 158
ttgtcattgaatgtcacacagactt

SEQ ID NO: 426727 - DNA, 25 bp, Artificial
  probe
  misc_feature (1)..(25): SEQ ID NO: 5977; WAN02QCQA; Start 130; Stop 154
attattgtcattgaatgtcacacag

SEQ ID NO: 426728 - DNA, 25 bp, Artificial
  probe
  misc_feature (1)..(25): SEQ ID NO: 5977; WAN02QCQA; Start 152; Stop 176
cagactttgataataatggaggagc

SEQ ID NO: 426729 - DNA, 25 bp, Artificial
  probe
  misc_feature (1)..(25): SEQ ID NO: 5977; WAN02QCQA; Start 149; Stop 173
acacagactttgataataatggagg

SEQ ID NO: 426730 - DNA, 25 bp, Artificial
  probe
  misc_feature (1)..(25): SEQ ID NO: 5977; WAN02QCQA; Start 150; Stop 174
cacagactttgataataatggagga

SEQ ID NO: 426731 - DNA, 25 bp, Artificial
  probe
  misc_feature (1)..(25): SEQ ID NO: 5977; WAN02QCQA; Start 151; Stop 175
acagactttgataataatggaggag

SEQ ID NO: 426732 - DNA, 25 bp, Artificial
  probe
  misc_feature (1)..(25): SEQ ID NO: 5977; WAN02QCQA; Start 148; Stop 172
cacacagactttgataataatggag

SEQ ID NO: 426733 - DNA, 25 bp, Artificial
  probe
  misc_feature (1)..(25): SEQ ID NO: 5977; WAN02QCQA; Start 138; Stop 162
cattgaatgtcacacagactttgat

SEQ ID NO: 426734 - DNA, 25 bp, Artificial
  probe
  misc_feature (1)..(25): SEQ ID NO: 5977; WAN02QCQA; Start 140; Stop 164
ttgaatgtcacacagactttgataa

SEQ ID NO: 426735 - DNA, 25 bp, Artificial
  probe
  misc_feature (1)..(25): SEQ ID NO: 5977; WAN02QCQA; Start 129; Stop 153
tattattgtcattgaatgtcacaca

SEQ ID NO: 426736 - DNA, 25 bp, Artificial
  probe
  misc_feature (1)..(25): SEQ ID NO: 5977; WAN02QCQA; Start 746; Stop 770
aacgggatattgtcctgattgtaaa

SEQ ID NO: 426737 - DNA, 25 bp, Artificial
  probe
  misc_feature (1)..(25): SEQ ID NO: 5977; WAN02QCQA; Start 141; Stop 165
tgaatgtcacacagactttgataat

SEQ ID NO: 426738 - DNA, 25 bp, Artificial
  probe
  misc_feature (1)..(25): SEQ ID NO: 5977; WAN02QCQA; Start 139; Stop 163
attgaatgtcacacagactttgata

SEQ ID NO: 426739 - DNA, 25 bp, Artificial
  probe
  misc_feature (1)..(25): SEQ ID NO: 5977; WAN02QCQA; Start 137; Stop 161
tcattgaatgtcacacagactttga

SEQ ID NO: 426740 - DNA, 25 bp, Artificial
  probe
  misc_feature (1)..(25): SEQ ID NO: 5977; WAN02QCQA; Start 136; Stop 160
gtcattgaatgtcacacagactttg

SEQ ID NO: 426741 - DNA, 25 bp, Artificial
  probe
  misc_feature (1)..(25): SEQ ID NO: 5977; WAN02QCQA; Start 748; Stop 772
cgggatattgtcctgattgtaaagt

SEQ ID NO: 426742 - DNA, 25 bp, Artificial
  probe
  misc_feature (1)..(25): SEQ ID NO: 5977; WAN02QCQA; Start 747; Stop 771
acgggatattgtcctgattgtaaag

SEQ ID NO: 426743 - DNA, 25 bp, Artificial
  probe
  misc_feature (1)..(25): SEQ ID NO: 5977; WAN02QCQA; Start 147; Stop 171
tcacacagactttgataataatgga

SEQ ID NO: 426744 - DNA, 25 bp, Artificial
  probe
  misc_feature (1)..(25): SEQ ID NO: 5977; WAN02QCQA; Start 135; Stop 159
tgtcattgaatgtcacacagacttt

SEQ ID NO: 426745 - DNA, 25 bp, Artificial
  probe
  misc_feature (1)..(25): SEQ ID NO: 5977; WAN02QCQA; Start 153; Stop 177
agactttgataataatggaggagct

SEQ ID NO: 426746 - DNA, 25 bp, Artificial
  probe
  misc_feature (1)..(25): SEQ ID NO: 5977; WAN02QCQA; Start 745; Stop 769
caacgggatattgtcctgattgtaa

SEQ ID NO: 426747 - DNA, 25 bp, Artificial
  probe
  misc_feature (1)..(25): SEQ ID NO: 5977; WAN02QCQA; Start 1141; Stop 1165
caggatggagaatcgtgtgaaagat

SEQ ID NO: 426748 - DNA, 25 bp, Artificial
  probe
  misc_feature (1)..(25): SEQ ID NO: 5977; WAN02QCQA; Start 749; Stop 773
gggatattgtcctgattgtaaagtt

SEQ ID NO: 426749 - DNA, 25 bp, Artificial
  probe
  misc_feature (1)..(25): SEQ ID NO: 5977; WAN02QCQA; Start 1052; Stop 1076
acttgctgcactttattgataacat

SEQ ID NO: 426750 - DNA, 25 bp, Artificial
  probe
  misc_feature (1)..(25): SEQ ID NO: 5977; WAN02QCQA; Start 295; Stop 319
cctagtttgaggaagtcatatttgt

SEQ ID NO: 426751 - DNA, 25 bp, Artificial
  probe
  misc_feature (1)..(25): SEQ ID NO: 5977; WAN02QCQA; Start 294; Stop 318
acctagtttgaggaagtcatatttg

SEQ ID NO: 426752 - DNA, 25 bp, Artificial
  probe
  misc_feature (1)..(25): SEQ ID NO: 5977; WAN02QCQA; Start 154; Stop 178
gactttgataataatggaggagctt

SEQ ID NO: 426753 - DNA, 25 bp, Artificial
  probe
  misc_feature (1)..(25): SEQ ID NO: 5977; WAN02QCQA; Start 146; Stop 170
gtcacacagactttgataataatgg

SEQ ID NO: 426754 - DNA, 25 bp, Artificial
  probe
  misc_feature (1)..(25): SEQ ID NO: 5977; WAN02QCQA; Start 155; Stop 179
actttgataataatggaggagcttt

SEQ ID NO: 426755 - DNA, 25 bp, Artificial
  probe
  misc_feature (1)..(25): SEQ ID NO: 5977; WAN02QCQA; Start 1053; Stop 1077
cttgctgcactttattgataacatt

SEQ ID NO: 426756 - DNA, 25 bp, Artificial
  probe
  misc_feature (1)..(25): SEQ ID NO: 5978; WAN02QDE8; Start 189; Stop 213
tcagagactacacctagcatcatat

SEQ ID NO: 426757 - DNA, 25 bp, Artificial
  probe
  misc_feature (1)..(25): SEQ ID NO: 5978; WAN02QDE8; Start 188; Stop 212
atcagagactacacctagcatcata

SEQ ID NO: 426758 - DNA, 25 bp, Artificial
  probe
  misc_feature (1)..(25): SEQ ID NO: 5978; WAN02QDE8; Start 187; Stop 211
tatcagagactacacctagcatcat

SEQ ID NO: 426759 - DNA, 25 bp, Artificial
  probe
  misc_feature (1)..(25): SEQ ID NO: 5978; WAN02QDE8; Start 186; Stop 210
atatcagagactacacctagcatca

SEQ ID NO: 426760 - DNA, 25 bp, Artificial
  probe
  misc_feature (1)..(25): SEQ ID NO: 5978; WAN02QDE8; Start 143; Stop 167
tcaccatcgcagccagtataatata

SEQ ID NO: 426761 - DNA, 25 bp, Artificial
  probe
  misc_feature (1)..(25): SEQ ID NO: 5978; WAN02QDE8; Start 144; Stop 168
caccatcgcagccagtataatatat

SEQ ID NO: 426762 - DNA, 25 bp, Artificial
  probe
  misc_feature (1)..(25): SEQ ID NO: 5978; WAN02QDE8; Start 190; Stop 214
cagagactacacctagcatcatata

SEQ ID NO: 426763 - DNA, 25 bp, Artificial
  probe
  misc_feature (1)..(25): SEQ ID NO: 5978; WAN02QDE8; Start 949; Stop 973
aatggagtaattggtatcgtctctt

SEQ ID NO: 426764 - DNA, 25 bp, Artificial
  probe
  misc_feature (1)..(25): SEQ ID NO: 5978; WAN02QDE8; Start 192; Stop 216
gagactacacctagcatcatatact

SEQ ID NO: 426765 - DNA, 25 bp, Artificial
  probe
  misc_feature (1)..(25): SEQ ID NO: 5978; WAN02QDE8; Start 191; Stop 215
agagactacacctagcatcatatac

SEQ ID NO: 426766 - DNA, 25 bp, Artificial
  probe
  misc_feature (1)..(25): SEQ ID NO: 5978; WAN02QDE8; Start 145; Stop 169
accatcgcagccagtataatatata

SEQ ID NO: 426767 - DNA, 25 bp, Artificial
  probe
  misc_feature (1)..(25): SEQ ID NO: 5978; WAN02QDE8; Start 541; Stop 565
aatcgcaagatagccttcctattac

SEQ ID NO: 426768 - DNA, 25 bp, Artificial
  probe
  misc_feature (1)..(25): SEQ ID NO: 5978; WAN02QDE8; Start 142; Stop 166
ttcaccatcgcagccagtataatat

SEQ ID NO: 426769 - DNA, 25 bp, Artificial
  probe
  misc_feature (1)..(25): SEQ ID NO: 5978; WAN02QDE8; Start 185; Stop 209
tatatcagagactacacctagcatc

SEQ ID NO: 426770 - DNA, 25 bp, Artificial
  probe
  misc_feature (1)..(25): SEQ ID NO: 5978; WAN02QDE8; Start 948; Stop 972
taatggagtaattggtatcgtctct

SEQ ID NO: 426771 - DNA, 25 bp, Artificial
  probe
  misc_feature (1)..(25): SEQ ID NO: 5978; WAN02QDE8; Start 193; Stop 217
agactacacctagcatcatatactt

SEQ ID NO: 426772 - DNA, 25 bp, Artificial
  probe
  misc_feature (1)..(25): SEQ ID NO: 5978; WAN02QDE8; Start 184; Stop 208
ttatatcagagactacacctagcat

SEQ ID NO: 426773 - DNA, 25 bp, Artificial
  probe
  misc_feature (1)..(25): SEQ ID NO: 5978; WAN02QDE8; Start 183; Stop 207
attatatcagagactacacctagca

SEQ ID NO: 426774 - DNA, 25 bp, Artificial
  probe
  misc_feature (1)..(25): SEQ ID NO: 5978; WAN02QDE8; Start 542; Stop 566
atcgcaagatagccttcctattaca

SEQ ID NO: 426775 - DNA, 25 bp, Artificial
  probe
  misc_feature (1)..(25): SEQ ID NO: 5978; WAN02QDE8; Start 543; Stop 567
tcgcaagatagccttcctattacaa

SEQ ID NO: 426776 - DNA, 25 bp, Artificial
  probe
  misc_feature (1)..(25): SEQ ID NO: 5978; WAN02QDE8; Start 947; Stop 971
ataatggagtaattggtatcgtctc

SEQ ID NO: 426777 - DNA, 25 bp, Artificial
  probe
  misc_feature (1)..(25): SEQ ID NO: 5978; WAN02QDE8; Start 946; Stop 970
gataatggagtaattggtatcgtct

SEQ ID NO: 426778 - DNA, 25 bp, Artificial
  probe
  misc_feature (1)..(25): SEQ ID NO: 5978; WAN02QDE8; Start 945; Stop 969
agataatggagtaattggtatcgtc

SEQ ID NO: 426779 - DNA, 25 bp, Artificial
  probe
  misc_feature (1)..(25): SEQ ID NO: 5978; WAN02QDE8; Start 1135; Stop 1159
ttatatgaaaggttagagcaggtgg

SEQ ID NO: 426780 - DNA, 25 bp, Artificial
  probe
  misc_feature (1)..(25): SEQ ID NO: 5978; WAN02QDE8; Start 131; Stop 155
tttgtttatatttcaccatcgcagc

SEQ ID NO: 426781 - DNA, 25 bp, Artificial
  probe
  misc_feature (1)..(25): SEQ ID NO: 5978; WAN02QDE8; Start 534; Stop 558
aaatagaaatcgcaagatagccttc

SEQ ID NO: 426782 - DNA, 25 bp, Artificial
  probe
  misc_feature (1)..(25): SEQ ID NO: 5978; WAN02QDE8; Start 533; Stop 557
gaaatagaaatcgcaagatagcctt

SEQ ID NO: 426783 - DNA, 25 bp, Artificial
  probe
  misc_feature (1)..(25): SEQ ID NO: 5978; WAN02QDE8; Start 532; Stop 556
ggaaatagaaatcgcaagatagcct

SEQ ID NO: 426784 - DNA, 25 bp, Artificial
  probe
  misc_feature (1)..(25): SEQ ID NO: 5978; WAN02QDE8; Start 531; Stop 555
aggaaatagaaatcgcaagatagcc

SEQ ID NO: 426785 - DNA, 25 bp, Artificial
  probe
  misc_feature (1)..(25): SEQ ID NO: 5978; WAN02QDE8; Start 530; Stop 554
taggaaatagaaatcgcaagatagc

SEQ ID NO: 426786 - DNA, 25 bp, Artificial
  probe
  misc_feature (1)..(25): SEQ ID NO: 5978; WAN02QDE8; Start 535; Stop 559
aatagaaatcgcaagatagccttcc

SEQ ID NO: 426787 - DNA, 25 bp, Artificial
  probe
  misc_feature (1)..(25): SEQ ID NO: 5978; WAN02QDE8; Start 537; Stop 561
tagaaatcgcaagatagccttccta

SEQ ID NO: 426788 - DNA, 25 bp, Artificial
  probe
  misc_feature (1)..(25): SEQ ID NO: 5978; WAN02QDE8; Start 80; Stop 104
ttacattaacttattctccatctgc

SEQ ID NO: 426789 - DNA, 25 bp, Artificial
  probe
  misc_feature (1)..(25): SEQ ID NO: 5979; WAN02QDE9; Start 777; Stop 801
tgtgtctgctatggatataatgctt

SEQ ID NO: 426790 - DNA, 25 bp, Artificial
  probe
  misc_feature (1)..(25): SEQ ID NO: 5979; WAN02QDE9; Start 776; Stop 800
ttgtgtctgctatggatataatgct

SEQ ID NO: 426791 - DNA, 25 bp, Artificial
  probe
  misc_feature (1)..(25): SEQ ID NO: 5979; WAN02QDE9; Start 779; Stop 803
tgtctgctatggatataatgcttct

SEQ ID NO: 426792 - DNA, 25 bp, Artificial
  probe
  misc_feature (1)..(25): SEQ ID NO: 5979; WAN02QDE9; Start 778; Stop 802
gtgtctgctatggatataatgcttc

SEQ ID NO: 426793 - DNA, 25 bp, Artificial
  probe
  misc_feature (1)..(25): SEQ ID NO: 5979; WAN02QDE9; Start 780; Stop 804
gtctgctatggatataatgcttctc

SEQ ID NO: 426794 - DNA, 25 bp, Artificial
  probe
  misc_feature (1)..(25): SEQ ID NO: 5979; WAN02QDE9; Start 1024; Stop 1048
gctggttatgatattgaactggaat

SEQ ID NO: 426795 - DNA, 25 bp, Artificial
  probe
  misc_feature (1)..(25): SEQ ID NO: 5979; WAN02QDE9; Start 781; Stop 805
tctgctatggatataatgcttctcc

SEQ ID NO: 426796 - DNA, 25 bp, Artificial
  probe
  misc_feature (1)..(25): SEQ ID NO: 5979; WAN02QDE9; Start 1016; Stop 1040
cgagagaagctggttatgatattga

SEQ ID NO: 426797 - DNA, 25 bp, Artificial
  probe
  misc_feature (1)..(25): SEQ ID NO: 5979; WAN02QDE9; Start 194; Stop 218
ctgcgattattcactatatgtgtca

SEQ ID NO: 426798 - DNA, 25 bp, Artificial
  probe
  misc_feature (1)..(25): SEQ ID NO: 5979; WAN02QDE9; Start 193; Stop 217
actgcgattattcactatatgtgtc

SEQ ID NO: 426799 - DNA, 25 bp, Artificial
  probe
  misc_feature (1)..(25): SEQ ID NO: 5979; WAN02QDE9; Start 157; Stop 181
ttaggtatccaggtagtagttctag

SEQ ID NO: 426800 - DNA, 25 bp, Artificial
  probe
  misc_feature (1)..(25): SEQ ID NO: 5979; WAN02QDE9; Start 1023; Stop 1047
agctggttatgatattgaactggaa

SEQ ID NO: 426801 - DNA, 25 bp, Artificial
  probe
  misc_feature (1)..(25): SEQ ID NO: 5979; WAN02QDE9; Start 1022; Stop 1046
aagctggttatgatattgaactgga

SEQ ID NO: 426802 - DNA, 25 bp, Artificial
  probe
  misc_feature (1)..(25): SEQ ID NO: 5979; WAN02QDE9; Start 1021; Stop 1045
gaagctggttatgatattgaactgg

SEQ ID NO: 426803 - DNA, 25 bp, Artificial
  probe
  misc_feature (1)..(25): SEQ ID NO: 5979; WAN02QDE9; Start 195; Stop 219
tgcgattattcactatatgtgtcaa

SEQ ID NO: 426804 - DNA, 25 bp, Artificial
  probe
  misc_feature (1)..(25): SEQ ID NO: 5979; WAN02QDE9; Start 192; Stop 216
aactgcgattattcactatatgtgt

SEQ ID NO: 426805 - DNA, 25 bp, Artificial
  probe
  misc_feature (1)..(25): SEQ ID NO: 5979; WAN02QDE9; Start 323; Stop 347
cagtaaggattgcccatagtcataa

SEQ ID NO: 426806 - DNA, 25 bp, Artificial
  probe
  misc_feature (1)..(25): SEQ ID NO: 5979; WAN02QDE9; Start 833; Stop 857
tgtcagtagaatggcaaataaatgg

SEQ ID NO: 426807 - DNA, 25 bp, Artificial
  probe
  misc_feature (1)..(25): SEQ ID NO: 5979; WAN02QDE9; Start 831; Stop 855
ggtgtcagtagaatggcaaataaat

SEQ ID NO: 426808 - DNA, 25 bp, Artificial
  probe
  misc_feature (1)..(25): SEQ ID NO: 5979; WAN02QDE9; Start 1020; Stop 1044
agaagctggttatgatattgaactg

SEQ ID NO: 426809 - DNA, 25 bp, Artificial
  probe
  misc_feature (1)..(25): SEQ ID NO: 5979; WAN02QDE9; Start 280; Stop 304
ttaatgtcaatcgagctatctgttg

SEQ ID NO: 426810 - DNA, 25 bp, Artificial
  probe
  misc_feature (1)..(25): SEQ ID NO: 5979; WAN02QDE9; Start 834; Stop 858
gtcagtagaatggcaaataaatgga

SEQ ID NO: 426811 - DNA, 25 bp, Artificial
  probe
  misc_feature (1)..(25): SEQ ID NO: 5979; WAN02QDE9; Start 830; Stop 854
tggtgtcagtagaatggcaaataaa

SEQ ID NO: 426812 - DNA, 25 bp, Artificial
  probe
  misc_feature (1)..(25): SEQ ID NO: 5979; WAN02QDE9; Start 324; Stop 348
agtaaggattgcccatagtcataat

SEQ ID NO: 426813 - DNA, 25 bp, Artificial
  probe
  misc_feature (1)..(25): SEQ ID NO: 5979; WAN02QDE9; Start 1017; Stop 1041
gagagaagctggttatgatattgaa

SEQ ID NO: 426814 - DNA, 25 bp, Artificial
  probe
  misc_feature (1)..(25): SEQ ID NO: 5979; WAN02QDE9; Start 1015; Stop 1039
gcgagagaagctggttatgatattg

SEQ ID NO: 426815 - DNA, 25 bp, Artificial
  probe
  misc_feature (1)..(25): SEQ ID NO: 5979; WAN02QDE9; Start 775; Stop 799
tttgtgtctgctatggatataatgc

SEQ ID NO: 426816 - DNA, 25 bp, Artificial
  probe
  misc_feature (1)..(25): SEQ ID NO: 5979; WAN02QDE9; Start 256; Stop 280
attcatgttcatggtagtagttctt

SEQ ID NO: 426817 - DNA, 25 bp, Artificial
  probe
  misc_feature (1)..(25): SEQ ID NO: 5979; WAN02QDE9; Start 255; Stop 279
aattcatgttcatggtagtagttct

SEQ ID NO: 426818 - DNA, 25 bp, Artificial
  probe
  misc_feature (1)..(25): SEQ ID NO: 5979; WAN02QDE9; Start 1019; Stop 1043
gagaagctggttatgatattgaact

SEQ ID NO: 426819 - DNA, 25 bp, Artificial
  probe
  misc_feature (1)..(25): SEQ ID NO: 5979; WAN02QDE9; Start 1018; Stop 1042
agagaagctggttatgatattgaac

SEQ ID NO: 426820 - DNA, 25 bp, Artificial
  probe
  misc_feature (1)..(25): SEQ ID NO: 5979; WAN02QDE9; Start 912; Stop 936
agtgacttctttaccaattaggacc

SEQ ID NO: 426821 - DNA, 25 bp, Artificial
  probe
  misc_feature (1)..(25): SEQ ID NO: 5979; WAN02QDE9; Start 832; Stop 856
gtgtcagtagaatggcaaataaatg

SEQ ID NO: 426822 - DNA, 25 bp, Artificial
  probe
  misc_feature (1)..(25): SEQ ID NO: 5980; WAN02QDEA; Start 596; Stop 620
attcaattcatcattacagtgcctc

SEQ ID NO: 426823 - DNA, 25 bp, Artificial
  probe
  misc_feature (1)..(25): SEQ ID NO: 5980; WAN02QDEA; Start 598; Stop 622
tcaattcatcattacagtgcctctt

SEQ ID NO: 426824 - DNA, 25 bp, Artificial
  probe
  misc_feature (1)..(25): SEQ ID NO: 5980; WAN02QDEA; Start 597; Stop 621
ttcaattcatcattacagtgcctct

SEQ ID NO: 426825 - DNA, 25 bp, Artificial
  probe
  misc_feature (1)..(25): SEQ ID NO: 5980; WAN02QDEA; Start 599; Stop 623
caattcatcattacagtgcctcttg

SEQ ID NO: 426826 - DNA, 25 bp, Artificial
  probe
  misc_feature (1)..(25): SEQ ID NO: 5980; WAN02QDEA; Start 600; Stop 624
aattcatcattacagtgcctcttgg

SEQ ID NO: 426827 - DNA, 25 bp, Artificial
  probe
  misc_feature (1)..(25): SEQ ID NO: 5980; WAN02QDEA; Start 595; Stop 619
tattcaattcatcattacagtgcct

SEQ ID NO: 426828 - DNA, 25 bp, Artificial
  probe
  misc_feature (1)..(25): SEQ ID NO: 5980; WAN02QDEA; Start 601; Stop 625
attcatcattacagtgcctcttgga

SEQ ID NO: 426829 - DNA, 25 bp, Artificial
  probe
  misc_feature (1)..(25): SEQ ID NO: 5980; WAN02QDEA; Start 482; Stop 506
atcagccttcttctaacattgttca

SEQ ID NO: 426830 - DNA, 25 bp, Artificial
  probe
  misc_feature (1)..(25): SEQ ID NO: 5980; WAN02QDEA; Start 483; Stop 507
tcagccttcttctaacattgttcaa

SEQ ID NO: 426831 - DNA, 25 bp, Artificial
  probe
  misc_feature (1)..(25): SEQ ID NO: 5980; WAN02QDEA; Start 481; Stop 505
tatcagccttcttctaacattgttc

SEQ ID NO: 426832 - DNA, 25 bp, Artificial
  probe
  misc_feature (1)..(25): SEQ ID NO: 5980; WAN02QDEA; Start 480; Stop 504
ctatcagccttcttctaacattgtt

SEQ ID NO: 426833 - DNA, 25 bp, Artificial
  probe
  misc_feature (1)..(25): SEQ ID NO: 5980; WAN02QDEA; Start 594; Stop 618
atattcaattcatcattacagtgcc

SEQ ID NO: 426834 - DNA, 25 bp, Artificial
  probe
  misc_feature (1)..(25): SEQ ID NO: 5980; WAN02QDEA; Start 93; Stop 117
tccgaactatgagattattagatgg

SEQ ID NO: 426835 - DNA, 25 bp, Artificial
  probe
  misc_feature (1)..(25): SEQ ID NO: 5980; WAN02QDEA; Start 602; Stop 626
ttcatcattacagtgcctcttggac

SEQ ID NO: 426836 - DNA, 25 bp, Artificial
  probe
  misc_feature (1)..(25): SEQ ID NO: 5980; WAN02QDEA; Start 90; Stop 114
ttgtccgaactatgagattattaga

SEQ ID NO: 426837 - DNA, 25 bp, Artificial
  probe
  misc_feature (1)..(25): SEQ ID NO: 5980; WAN02QDEA; Start 442; Stop 466
tgtcccatacttaattcgtttgtct

SEQ ID NO: 426838 - DNA, 25 bp, Artificial
  probe
  misc_feature (1)..(25): SEQ ID NO: 5980; WAN02QDEA; Start 443; Stop 467
gtcccatacttaattcgtttgtctt

SEQ ID NO: 426839 - DNA, 25 bp, Artificial
  probe
  misc_feature (1)..(25): SEQ ID NO: 5980; WAN02QDEA; Start 14; Stop 38
aaatacattattgctggtttggtgg

SEQ ID NO: 426840 - DNA, 25 bp, Artificial
  probe
  misc_feature (1)..(25): SEQ ID NO: 5980; WAN02QDEA; Start 545; Stop 569
atcctatatatgttggagccaatgc

SEQ ID NO: 426841 - DNA, 25 bp, Artificial
  probe
  misc_feature (1)..(25): SEQ ID NO: 5980; WAN02QDEA; Start 229; Stop 253
aatggtggcatctatttggatacag

SEQ ID NO: 426842 - DNA, 25 bp, Artificial
  probe
  misc_feature (1)..(25): SEQ ID NO: 5980; WAN02QDEA; Start 16; Stop 40
atacattattgctggtttggtggag

SEQ ID NO: 426843 - DNA, 25 bp, Artificial
  probe
  misc_feature (1)..(25): SEQ ID NO: 5980; WAN02QDEA; Start 542; Stop 566
ttgatcctatatatgttggagccaa

SEQ ID NO: 426844 - DNA, 25 bp, Artificial
  probe
  misc_feature (1)..(25): SEQ ID NO: 5980; WAN02QDEA; Start 441; Stop 465
atgtcccatacttaattcgtttgtc

SEQ ID NO: 426845 - DNA, 25 bp, Artificial
  probe
  misc_feature (1)..(25): SEQ ID NO: 5980; WAN02QDEA; Start 91; Stop 115
tgtccgaactatgagattattagat

SEQ ID NO: 426846 - DNA, 25 bp, Artificial
  probe
  misc_feature (1)..(25): SEQ ID NO: 5980; WAN02QDEA; Start 593; Stop 617
catattcaattcatcattacagtgc

SEQ ID NO: 426847 - DNA, 25 bp, Artificial
  probe
  misc_feature (1)..(25): SEQ ID NO: 5980; WAN02QDEA; Start 543; Stop 567
tgatcctatatatgttggagccaat

SEQ ID NO: 426848 - DNA, 25 bp, Artificial
  probe
  misc_feature (1)..(25): SEQ ID NO: 5980; WAN02QDEA; Start 15; Stop 39
aatacattattgctggtttggtgga

SEQ ID NO: 426849 - DNA, 25 bp, Artificial
  probe
  misc_feature (1)..(25): SEQ ID NO: 5980; WAN02QDEA; Start 268; Stop 292
agaaatcttgatgaattgcttgagc

SEQ ID NO: 426850 - DNA, 25 bp, Artificial
  probe
  misc_feature (1)..(25): SEQ ID NO: 5980; WAN02QDEA; Start 103; Stop 127
gagattattagatgggatgaaagca

SEQ ID NO: 426851 - DNA, 25 bp, Artificial
  probe
  misc_feature (1)..(25): SEQ ID NO: 5980; WAN02QDEA; Start 102; Stop 126
tgagattattagatgggatgaaagc

SEQ ID NO: 426852 - DNA, 25 bp, Artificial
  probe
  misc_feature (1)..(25): SEQ ID NO: 5980; WAN02QDEA; Start 444; Stop 468
tcccatacttaattcgtttgtcttt

SEQ ID NO: 426853 - DNA, 25 bp, Artificial
  probe
  misc_feature (1)..(25): SEQ ID NO: 5980; WAN02QDEA; Start 544; Stop 568
gatcctatatatgttggagccaatg

SEQ ID NO: 426854 - DNA, 25 bp, Artificial
  probe
  misc_feature (1)..(25): SEQ ID NO: 5980; WAN02QDEA; Start 245; Stop 269
tggatacagatgttgaattgattag

SEQ ID NO: 426855 - DNA, 25 bp, Artificial
  probe
  misc_feature (1)..(25): SEQ ID NO: 5981; WAN02499D; Start 141; Stop 165
tggttagtactggttgcatattatt

SEQ ID NO: 426856 - DNA, 25 bp, Artificial
  probe
  misc_feature (1)..(25): SEQ ID NO: 5981; WAN02499D; Start 140; Stop 164
ttggttagtactggttgcatattat

SEQ ID NO: 426857 - DNA, 25 bp, Artificial
  probe
  misc_feature (1)..(25): SEQ ID NO: 5981; WAN02499D; Start 138; Stop 162
atttggttagtactggttgcatatt

SEQ ID NO: 426858 - DNA, 25 bp, Artificial
  probe
  misc_feature (1)..(25): SEQ ID NO: 5981; WAN02499D; Start 139; Stop 163
tttggttagtactggttgcatatta

SEQ ID NO: 426859 - DNA, 25 bp, Artificial
  probe
  misc_feature (1)..(25): SEQ ID NO: 5981; WAN02499D; Start 134; Stop 158
ttatatttggttagtactggttgca

SEQ ID NO: 426860 - DNA, 25 bp, Artificial
  probe
  misc_feature (1)..(25): SEQ ID NO: 5981; WAN02499D; Start 137; Stop 161
tatttggttagtactggttgcatat

SEQ ID NO: 426861 - DNA, 25 bp, Artificial
  probe
  misc_feature (1)..(25): SEQ ID NO: 5981; WAN02499D; Start 136; Stop 160
atatttggttagtactggttgcata

SEQ ID NO: 426862 - DNA, 25 bp, Artificial
  probe
  misc_feature (1)..(25): SEQ ID NO: 5981; WAN02499D; Start 135; Stop 159
tatatttggttagtactggttgcat

SEQ ID NO: 426863 - DNA, 25 bp, Artificial
  probe
  misc_feature (1)..(25): SEQ ID NO: 5981; WAN02499D; Start 133; Stop 157
tttatatttggttagtactggttgc

SEQ ID NO: 426864 - DNA, 25 bp, Artificial
  probe
  misc_feature (1)..(25): SEQ ID NO: 5981; WAN02499D; Start 65; Stop 89
acaccatctcttttacttgtatagt

SEQ ID NO: 426865 - DNA, 25 bp, Artificial
  probe
  misc_feature (1)..(25): SEQ ID NO: 5981; WAN02499D; Start 142; Stop 166
ggttagtactggttgcatattattt

SEQ ID NO: 426866 - DNA, 25 bp, Artificial
  probe
  misc_feature (1)..(25): SEQ ID NO: 5981; WAN02499D; Start 103; Stop 127
acttgaataaaattcgttaatggca

SEQ ID NO: 426867 - DNA, 25 bp, Artificial
  probe
  misc_feature (1)..(25): SEQ ID NO: 5981; WAN02499D; Start 106; Stop 130
tgaataaaattcgttaatggcatct

SEQ ID NO: 426868 - DNA, 25 bp, Artificial
  probe
  misc_feature (1)..(25): SEQ ID NO: 5981; WAN02499D; Start 25; Stop 49
tgctaggaattttacaatagtttga

SEQ ID NO: 426869 - DNA, 25 bp, Artificial
  probe
  misc_feature (1)..(25): SEQ ID NO: 5981; WAN02499D; Start 102; Stop 126
aacttgaataaaattcgttaatggc

SEQ ID NO: 426870 - DNA, 25 bp, Artificial
  probe
  misc_feature (1)..(25): SEQ ID NO: 5981; WAN02499D; Start 64; Stop 88
aacaccatctcttttacttgtatag

SEQ ID NO: 426871 - DNA, 25 bp, Artificial
  probe
  misc_feature (1)..(25): SEQ ID NO: 5981; WAN02499D; Start 105; Stop 129
ttgaataaaattcgttaatggcatc

SEQ ID NO: 426872 - DNA, 25 bp, Artificial
  probe
  misc_feature (1)..(25): SEQ ID NO: 5981; WAN02499D; Start 104; Stop 128
cttgaataaaattcgttaatggcat

SEQ ID NO: 426873 - DNA, 25 bp, Artificial
  probe
  misc_feature (1)..(25): SEQ ID NO: 5981; WAN02499D; Start 77; Stop 101
ttacttgtatagtatgaatgggaaa

SEQ ID NO: 426874 - DNA, 25 bp, Artificial
  probe
  misc_feature (1)..(25): SEQ ID NO: 5981; WAN02499D; Start 76; Stop 100
tttacttgtatagtatgaatgggaa

SEQ ID NO: 426875 - DNA, 25 bp, Artificial
  probe
  misc_feature (1)..(25): SEQ ID NO: 5981; WAN02499D; Start 60; Stop 84
agttaacaccatctcttttacttgt

SEQ ID NO: 426876 - DNA, 25 bp, Artificial
  probe
  misc_feature (1)..(25): SEQ ID NO: 5981; WAN02499D; Start 24; Stop 48
ttgctaggaattttacaatagtttg

SEQ ID NO: 426877 - DNA, 25 bp, Artificial
  probe
  misc_feature (1)..(25): SEQ ID NO: 5981; WAN02499D; Start 62; Stop 86
ttaacaccatctcttttacttgtat

SEQ ID NO: 426878 - DNA, 25 bp, Artificial
  probe
  misc_feature (1)..(25): SEQ ID NO: 5981; WAN02499D; Start 26; Stop 50
gctaggaattttacaatagtttgaa

SEQ ID NO: 426879 - DNA, 25 bp, Artificial
  probe
  misc_feature (1)..(25): SEQ ID NO: 5981; WAN02499D; Start 147; Stop 171
gtactggttgcatattattttgaaa

SEQ ID NO: 426880 - DNA, 25 bp, Artificial
  probe
  misc_feature (1)..(25): SEQ ID NO: 5981; WAN02499D; Start 146; Stop 170
agtactggttgcatattattttgaa

SEQ ID NO: 426881 - DNA, 25 bp, Artificial
  probe
  misc_feature (1)..(25): SEQ ID NO: 5981; WAN02499D; Start 113; Stop 137
aattcgttaatggcatctattttat

SEQ ID NO: 426882 - DNA, 25 bp, Artificial
  probe
  misc_feature (1)..(25): SEQ ID NO: 5981; WAN02499D; Start 109; Stop 133
ataaaattcgttaatggcatctatt

SEQ ID NO: 426883 - DNA, 25 bp, Artificial
  probe
  misc_feature (1)..(25): SEQ ID NO: 5981; WAN02499D; Start 108; Stop 132
aataaaattcgttaatggcatctat

SEQ ID NO: 426884 - DNA, 25 bp, Artificial
  probe
  misc_feature (1)..(25): SEQ ID NO: 5981; WAN02499D; Start 107; Stop 131
gaataaaattcgttaatggcatcta

SEQ ID NO: 426885 - DNA, 25 bp, Artificial
  probe
  misc_feature (1)..(25): SEQ ID NO: 5981; WAN02499D; Start 121; Stop 145
aatggcatctattttatatttggtt

SEQ ID NO: 426886 - DNA, 25 bp, Artificial
  probe
  misc_feature (1)..(25): SEQ ID NO: 5981; WAN02499D; Start 112; Stop 136
aaattcgttaatggcatctatttta

SEQ ID NO: 426887 - DNA, 25 bp, Artificial
  probe
  misc_feature (1)..(25): SEQ ID NO: 5981; WAN02499D; Start 110; Stop 134
taaaattcgttaatggcatctattt

SEQ ID NO: 426888 - DNA, 25 bp, Artificial
  probe
  misc_feature (1)..(25): SEQ ID NO: 5982; WAN02496L; Start 104; Stop 128
cccaaagtgcttatttcaaaggctt

SEQ ID NO: 426889 - DNA, 25 bp, Artificial
  probe
  misc_feature (1)..(25): SEQ ID NO: 5982; WAN02496L; Start 109; Stop 133
agtgcttatttcaaaggctttatag

SEQ ID NO: 426890 - DNA, 25 bp, Artificial
  probe
  misc_feature (1)..(25): SEQ ID NO: 5982; WAN02496L; Start 105; Stop 129
ccaaagtgcttatttcaaaggcttt

SEQ ID NO: 426891 - DNA, 25 bp, Artificial
  probe
  misc_feature (1)..(25): SEQ ID NO: 5982; WAN02496L; Start 108; Stop 132
aagtgcttatttcaaaggctttata

SEQ ID NO: 426892 - DNA, 25 bp, Artificial
  probe
  misc_feature (1)..(25): SEQ ID NO: 5982; WAN02496L; Start 106; Stop 130
caaagtgcttatttcaaaggcttta

SEQ ID NO: 426893 - DNA, 25 bp, Artificial
  probe
  misc_feature (1)..(25): SEQ ID NO: 5982; WAN02496L; Start 110; Stop 134
gtgcttatttcaaaggctttatagc

SEQ ID NO: 426894 - DNA, 25 bp, Artificial
  probe
  misc_feature (1)..(25): SEQ ID NO: 5982; WAN02496L; Start 107; Stop 131
aaagtgcttatttcaaaggctttat

SEQ ID NO: 426895 - DNA, 25 bp, Artificial
  probe
  misc_feature (1)..(25): SEQ ID NO: 5982; WAN02496L; Start 22; Stop 46
cgggctaccctcttactataccaaa

SEQ ID NO: 426896 - DNA, 25 bp, Artificial
  probe
  misc_feature (1)..(25): SEQ ID NO: 5982; WAN02496L; Start 23; Stop 47
gggctaccctcttactataccaaaa

SEQ ID NO: 426897 - DNA, 25 bp, Artificial
  probe
  misc_feature (1)..(25): SEQ ID NO: 5982; WAN02496L; Start 17; Stop 41
atttccgggctaccctcttactata

SEQ ID NO: 426898 - DNA, 25 bp, Artificial
  probe
  misc_feature (1)..(25): SEQ ID NO: 5982; WAN02496L; Start 103; Stop 127
ccccaaagtgcttatttcaaaggct

SEQ ID NO: 426899 - DNA, 25 bp, Artificial
  probe
  misc_feature (1)..(25): SEQ ID NO: 5982; WAN02496L; Start 18; Stop 42
tttccgggctaccctcttactatac

SEQ ID NO: 426900 - DNA, 25 bp, Artificial
  probe
  misc_feature (1)..(25): SEQ ID NO: 5982; WAN02496L; Start 16; Stop 40
catttccgggctaccctcttactat

SEQ ID NO: 426901 - DNA, 25 bp, Artificial
  probe
  misc_feature (1)..(25): SEQ ID NO: 5982; WAN02496L; Start 101; Stop 125
cgccccaaagtgcttatttcaaagg

SEQ ID NO: 426902 - DNA, 25 bp, Artificial
  probe
  misc_feature (1)..(25): SEQ ID NO: 5982; WAN02496L; Start 19; Stop 43
ttccgggctaccctcttactatacc

SEQ ID NO: 426903 - DNA, 25 bp, Artificial
  probe
  misc_feature (1)..(25): SEQ ID NO: 5982; WAN02496L; Start 21; Stop 45
ccgggctaccctcttactataccaa

SEQ ID NO: 426904 - DNA, 25 bp, Artificial
  probe
  misc_feature (1)..(25): SEQ ID NO: 5982; WAN02496L; Start 15; Stop 39
ccatttccgggctaccctcttacta

SEQ ID NO: 426905 - DNA, 25 bp, Artificial
  probe
  misc_feature (1)..(25): SEQ ID NO: 5982; WAN02496L; Start 1; Stop 25
aaaataagggtgacccatttccggg

SEQ ID NO: 426906 - DNA, 25 bp, Artificial
  probe
  misc_feature (1)..(25): SEQ ID NO: 5983; WAN02498P; Start 31; Stop 55
ccaaatttctaagaaggattaacca

SEQ ID NO: 426907 - DNA, 25 bp, Artificial
  probe
  misc_feature (1)..(25): SEQ ID NO: 5983; WAN02498P; Start 37; Stop 61
ttctaagaaggattaaccaatttca

SEQ ID NO: 426908 - DNA, 25 bp, Artificial
  probe
  misc_feature (1)..(25): SEQ ID NO: 5983; WAN02498P; Start 38; Stop 62
tctaagaaggattaaccaatttcat

SEQ ID NO: 426909 - DNA, 25 bp, Artificial
  probe
  misc_feature (1)..(25): SEQ ID NO: 5983; WAN02498P; Start 39; Stop 63
ctaagaaggattaaccaatttcatc

SEQ ID NO: 426910 - DNA, 25 bp, Artificial
  probe
  misc_feature (1)..(25): SEQ ID NO: 5983; WAN02498P; Start 23; Stop 47
ggaatactccaaatttctaagaagg

SEQ ID NO: 426911 - DNA, 25 bp, Artificial
  probe
  misc_feature (1)..(25): SEQ ID NO: 5983; WAN02498P; Start 30; Stop 54
tccaaatttctaagaaggattaacc

SEQ ID NO: 426912 - DNA, 25 bp, Artificial
  probe
  misc_feature (1)..(25): SEQ ID NO: 5983; WAN02498P; Start 36; Stop 60
tttctaagaaggattaaccaatttc

SEQ ID NO: 426913 - DNA, 25 bp, Artificial
  probe
  misc_feature (1)..(25): SEQ ID NO: 5983; WAN02498P; Start 24; Stop 48
gaatactccaaatttctaagaagga

SEQ ID NO: 426914 - DNA, 25 bp, Artificial
  probe
  misc_feature (1)..(25): SEQ ID NO: 5983; WAN02498P; Start 40; Stop 64
taagaaggattaaccaatttcatcc

SEQ ID NO: 426915 - DNA, 25 bp, Artificial
  probe
  misc_feature (1)..(25): SEQ ID NO: 5983; WAN02498P; Start 32; Stop 56
caaatttctaagaaggattaaccaa

SEQ ID NO: 426916 - DNA, 25 bp, Artificial
  probe
  misc_feature (1)..(25): SEQ ID NO: 5983; WAN02498P; Start 28; Stop 52
actccaaatttctaagaaggattaa

SEQ ID NO: 426917 - DNA, 25 bp, Artificial
  probe
  misc_feature (1)..(25): SEQ ID NO: 5983; WAN02498P; Start 29; Stop 53
ctccaaatttctaagaaggattaac

SEQ ID NO: 426918 - DNA, 25 bp, Artificial
  probe
  misc_feature (1)..(25): SEQ ID NO: 5983; WAN02498P; Start 26; Stop 50
atactccaaatttctaagaaggatt

SEQ ID NO: 426919 - DNA, 25 bp, Artificial
  probe
  misc_feature (1)..(25): SEQ ID NO: 5983; WAN02498P; Start 25; Stop 49
aatactccaaatttctaagaaggat

SEQ ID NO: 426920 - DNA, 25 bp, Artificial
  probe
  misc_feature (1)..(25): SEQ ID NO: 5983; WAN02498P; Start 27; Stop 51
tactccaaatttctaagaaggatta

SEQ ID NO: 426921 - DNA, 25 bp, Artificial
  probe
  misc_feature (1)..(25): SEQ ID NO: 5983; WAN02498P; Start 22; Stop 46
tggaatactccaaatttctaagaag

SEQ ID NO: 426922 - DNA, 25 bp, Artificial
  probe
  misc_feature (1)..(25): SEQ ID NO: 5984; WAN0249C4; Start 19; Stop 43
aagtctaaatcaattatagccacct

SEQ ID NO: 426923 - DNA, 25 bp, Artificial
  probe
  misc_feature (1)..(25): SEQ ID NO: 5984; WAN0249C4; Start 18; Stop 42
aaagtctaaatcaattatagccacc

SEQ ID NO: 426924 - DNA, 25 bp, Artificial
  probe
  misc_feature (1)..(25): SEQ ID NO: 5984; WAN0249C4; Start 20; Stop 44
agtctaaatcaattatagccaccta

SEQ ID NO: 426925 - DNA, 25 bp, Artificial
  probe
  misc_feature (1)..(25): SEQ ID NO: 5984; WAN0249C4; Start 26; Stop 50
aatcaattatagccacctaataggg

SEQ ID NO: 426926 - DNA, 25 bp, Artificial
  probe
  misc_feature (1)..(25): SEQ ID NO: 5984; WAN0249C4; Start 21; Stop 45
gtctaaatcaattatagccacctaa

SEQ ID NO: 426927 - DNA, 25 bp, Artificial
  probe
  misc_feature (1)..(25): SEQ ID NO: 5984; WAN0249C4; Start 17; Stop 41
gaaagtctaaatcaattatagccac

SEQ ID NO: 426928 - DNA, 25 bp, Artificial
  probe
  misc_feature (1)..(25): SEQ ID NO: 5984; WAN0249C4; Start 16; Stop 40
agaaagtctaaatcaattatagcca

SEQ ID NO: 426929 - DNA, 25 bp, Artificial
  probe
  misc_feature (1)..(25): SEQ ID NO: 5984; WAN0249C4; Start 25; Stop 49
aaatcaattatagccacctaatagg

SEQ ID NO: 426930 - DNA, 25 bp, Artificial
  probe
  misc_feature (1)..(25): SEQ ID NO: 5984; WAN0249C4; Start 22; Stop 46
tctaaatcaattatagccacctaat

SEQ ID NO: 426931 - DNA, 25 bp, Artificial
  probe
  misc_feature (1)..(25): SEQ ID NO: 5985; WAN0249AG; Start 24; Stop 48
gcgctgttataatataatcaacaaa

SEQ ID NO: 426932 - DNA, 25 bp, Artificial
  probe
  misc_feature (1)..(25): SEQ ID NO: 5985; WAN0249AG; Start 62; Stop 86
aaataggctagaagcttgtttaaaa

SEQ ID NO: 426933 - DNA, 25 bp, Artificial
  probe
  misc_feature (1)..(25): SEQ ID NO: 5985; WAN0249AG; Start 61; Stop 85
aaaataggctagaagcttgtttaaa

SEQ ID NO: 426934 - DNA, 25 bp, Artificial
  probe
  misc_feature (1)..(25): SEQ ID NO: 5986; WAN024982; Start 28; Stop 52
agcgacaagaaacagcaaactatat

SEQ ID NO: 426935 - DNA, 25 bp, Artificial
  probe
  misc_feature (1)..(25): SEQ ID NO: 5986; WAN024982; Start 29; Stop 53
gcgacaagaaacagcaaactatata

SEQ ID NO: 426936 - DNA, 25 bp, Artificial
  probe
  misc_feature (1)..(25): SEQ ID NO: 5986; WAN024982; Start 27; Stop 51
gagcgacaagaaacagcaaactata

SEQ ID NO: 426937 - DNA, 25 bp, Artificial
  probe
  misc_feature (1)..(25): SEQ ID NO: 5986; WAN024982; Start 30; Stop 54
cgacaagaaacagcaaactatatat

SEQ ID NO: 426938 - DNA, 25 bp, Artificial
  probe
  misc_feature (1)..(25): SEQ ID NO: 5986; WAN024982; Start 26; Stop 50
ggagcgacaagaaacagcaaactat

SEQ ID NO: 426939 - DNA, 25 bp, Artificial
  probe
  misc_feature (1)..(25): SEQ ID NO: 5986; WAN024982; Start 25; Stop 49
aggagcgacaagaaacagcaaacta

SEQ ID NO: 426940 - DNA, 25 bp, Artificial
  probe
  misc_feature (1)..(25): SEQ ID NO: 5986; WAN024982; Start 31; Stop 55
gacaagaaacagcaaactatatata

SEQ ID NO: 426941 - DNA, 25 bp, Artificial
  probe
  misc_feature (1)..(25): SEQ ID NO: 5987; WAN024997; Start 33; Stop 57
atgtggtataatcagtaagaatgtt

SEQ ID NO: 426942 - DNA, 25 bp, Artificial
  probe
  misc_feature (1)..(25): SEQ ID NO: 5987; WAN024997; Start 32; Stop 56
aatgtggtataatcagtaagaatgt

SEQ ID NO: 426943 - DNA, 25 bp, Artificial
  probe
  misc_feature (1)..(25): SEQ ID NO: 5987; WAN024997; Start 24; Stop 48
tcaacgtaaatgtggtataatcagt

SEQ ID NO: 426944 - DNA, 25 bp, Artificial
  probe
  misc_feature (1)..(25): SEQ ID NO: 5987; WAN024997; Start 28; Stop 52
cgtaaatgtggtataatcagtaaga

SEQ ID NO: 426945 - DNA, 25 bp, Artificial
  probe
  misc_feature (1)..(25): SEQ ID NO: 5987; WAN024997; Start 34; Stop 58
tgtggtataatcagtaagaatgtta

SEQ ID NO: 426946 - DNA, 25 bp, Artificial
  probe
  misc_feature (1)..(25): SEQ ID NO: 5987; WAN024997; Start 23; Stop 47
ttcaacgtaaatgtggtataatcag

SEQ ID NO: 426947 - DNA, 25 bp, Artificial
  probe
  misc_feature (1)..(25): SEQ ID NO: 5987; WAN024997; Start 22; Stop 46
tttcaacgtaaatgtggtataatca

SEQ ID NO: 426948 - DNA, 25 bp, Artificial
  probe
  misc_feature (1)..(25): SEQ ID NO: 5987; WAN024997; Start 25; Stop 49
caacgtaaatgtggtataatcagta

SEQ ID NO: 426949 - DNA, 25 bp, Artificial
  probe
  misc_feature (1)..(25): SEQ ID NO: 5987; WAN024997; Start 27; Stop 51
acgtaaatgtggtataatcagtaag

SEQ ID NO: 426950 - DNA, 25 bp, Artificial
  probe
  misc_feature (1)..(25): SEQ ID NO: 5987; WAN024997; Start 26; Stop 50
aacgtaaatgtggtataatcagtaa

SEQ ID NO: 426951 - DNA, 25 bp, Artificial
  probe
  misc_feature (1)..(25): SEQ ID NO: 5987; WAN024997; Start 15; Stop 39
gaagaattttcaacgtaaatgtggt

SEQ ID NO: 426952 - DNA, 25 bp, Artificial
  probe
  misc_feature (1)..(25): SEQ ID NO: 5987; WAN024997; Start 31; Stop 55
aaatgtggtataatcagtaagaatg

SEQ ID NO: 426953 - DNA, 25 bp, Artificial
  probe
  misc_feature (1)..(25): SEQ ID NO: 5987; WAN024997; Start 14; Stop 38
agaagaattttcaacgtaaatgtgg

SEQ ID NO: 426954 - DNA, 25 bp, Artificial
  probe
  misc_feature (1)..(25): SEQ ID NO: 5987; WAN024997; Start 16; Stop 40
aagaattttcaacgtaaatgtggta

SEQ ID NO: 426955 - DNA, 25 bp, Artificial
  probe
  misc_feature (1)..(25): SEQ ID NO: 5987; WAN024997; Start 17; Stop 41
agaattttcaacgtaaatgtggtat

SEQ ID NO: 426956 - DNA, 25 bp, Artificial
  probe
  misc_feature (1)..(25): SEQ ID NO: 5987; WAN024997; Start 21; Stop 45
ttttcaacgtaaatgtggtataatc

SEQ ID NO: 426957 - DNA, 25 bp, Artificial
  probe
  misc_feature (1)..(25): SEQ ID NO: 5987; WAN024997; Start 13; Stop 37
tagaagaattttcaacgtaaatgtg

SEQ ID NO: 426958 - DNA, 25 bp, Artificial
  probe
  misc_feature (1)..(25): SEQ ID NO: 5987; WAN024997; Start 18; Stop 42
gaattttcaacgtaaatgtggtata

SEQ ID NO: 426959 - DNA, 25 bp, Artificial
  probe
  misc_feature (1)..(25): SEQ ID NO: 5987; WAN024997; Start 19; Stop 43
aattttcaacgtaaatgtggtataa

SEQ ID NO: 426960 - DNA, 25 bp, Artificial
  probe
  misc_feature (1)..(25): SEQ ID NO: 5987; WAN024997; Start 20; Stop 44
attttcaacgtaaatgtggtataat

SEQ ID NO: 426961 - DNA, 25 bp, Artificial
  probe
  misc_feature (1)..(25): SEQ ID NO: 5987; WAN024997; Start 12; Stop 36
atagaagaattttcaacgtaaatgt

SEQ ID NO: 426962 - DNA, 25 bp, Artificial
  probe
  misc_feature (1)..(25): SEQ ID NO: 5988; WAN02497R; Start 46; Stop 70
ataacttccctcaagaaagtcaagc

SEQ ID NO: 426963 - DNA, 25 bp, Artificial
  probe
  misc_feature (1)..(25): SEQ ID NO: 5988; WAN02497R; Start 55; Stop 79
ctcaagaaagtcaagccagacaact

SEQ ID NO: 426964 - DNA, 25 bp, Artificial
  probe
  misc_feature (1)..(25): SEQ ID NO: 5988; WAN02497R; Start 45; Stop 69
tataacttccctcaagaaagtcaag

SEQ ID NO: 426965 - DNA, 25 bp, Artificial
  probe
  misc_feature (1)..(25): SEQ ID NO: 5988; WAN02497R; Start 44; Stop 68
atataacttccctcaagaaagtcaa

SEQ ID NO: 426966 - DNA, 25 bp, Artificial
  probe
  misc_feature (1)..(25): SEQ ID NO: 5988; WAN02497R; Start 47; Stop 71
taacttccctcaagaaagtcaagcc

SEQ ID NO: 426967 - DNA, 25 bp, Artificial
  probe
  misc_feature (1)..(25): SEQ ID NO: 5988; WAN02497R; Start 54; Stop 78
cctcaagaaagtcaagccagacaac

SEQ ID NO: 426968 - DNA, 25 bp, Artificial
  probe
  misc_feature (1)..(25): SEQ ID NO: 5988; WAN02497R; Start 56; Stop 80
tcaagaaagtcaagccagacaactt

SEQ ID NO: 426969 - DNA, 25 bp, Artificial
  probe
  misc_feature (1)..(25): SEQ ID NO: 5988; WAN02497R; Start 50; Stop 74
cttccctcaagaaagtcaagccaga

SEQ ID NO: 426970 - DNA, 25 bp, Artificial
  probe
  misc_feature (1)..(25): SEQ ID NO: 5988; WAN02497R; Start 43; Stop 67
tatataacttccctcaagaaagtca

SEQ ID NO: 426971 - DNA, 25 bp, Artificial
  probe
  misc_feature (1)..(25): SEQ ID NO: 5988; WAN02497R; Start 57; Stop 81
caagaaagtcaagccagacaacttg

SEQ ID NO: 426972 - DNA, 25 bp, Artificial
  probe
  misc_feature (1)..(25): SEQ ID NO: 5988; WAN02497R; Start 72; Stop 96
agacaacttgaagcatcccactcag

SEQ ID NO: 426973 - DNA, 25 bp, Artificial
  probe
  misc_feature (1)..(25): SEQ ID NO: 5988; WAN02497R; Start 51; Stop 75
ttccctcaagaaagtcaagccagac

SEQ ID NO: 426974 - DNA, 25 bp, Artificial
  probe
  misc_feature (1)..(25): SEQ ID NO: 5988; WAN02497R; Start 71; Stop 95
cagacaacttgaagcatcccactca

SEQ ID NO: 426975 - DNA, 25 bp, Artificial
  probe
  misc_feature (1)..(25): SEQ ID NO: 5988; WAN02497R; Start 76; Stop 100
aacttgaagcatcccactcagcaaa

SEQ ID NO: 426976 - DNA, 25 bp, Artificial
  probe
  misc_feature (1)..(25): SEQ ID NO: 5988; WAN02497R; Start 53; Stop 77
ccctcaagaaagtcaagccagacaa

SEQ ID NO: 426977 - DNA, 25 bp, Artificial
  probe
  misc_feature (1)..(25): SEQ ID NO: 5988; WAN02497R; Start 48; Stop 72
aacttccctcaagaaagtcaagcca

SEQ ID NO: 426978 - DNA, 25 bp, Artificial
  probe
  misc_feature (1)..(25): SEQ ID NO: 5988; WAN02497R; Start 49; Stop 73
acttccctcaagaaagtcaagccag

SEQ ID NO: 426979 - DNA, 25 bp, Artificial
  probe
  misc_feature (1)..(25): SEQ ID NO: 5988; WAN02497R; Start 35; Stop 59
acaactattatataacttccctcaa

SEQ ID NO: 426980 - DNA, 25 bp, Artificial
  probe
  misc_feature (1)..(25): SEQ ID NO: 5988; WAN02497R; Start 42; Stop 66
ttatataacttccctcaagaaagtc

SEQ ID NO: 426981 - DNA, 25 bp, Artificial
  probe
  misc_feature (1)..(25): SEQ ID NO: 5988; WAN02497R; Start 77; Stop 101
acttgaagcatcccactcagcaaaa

SEQ ID NO: 426982 - DNA, 25 bp, Artificial
  probe
  misc_feature (1)..(25): SEQ ID NO: 5988; WAN02497R; Start 41; Stop 65
attatataacttccctcaagaaagt

SEQ ID NO: 426983 - DNA, 25 bp, Artificial
  probe
  misc_feature (1)..(25): SEQ ID NO: 5989; WAN0249AP; Start 6; Stop 30
agataagagaaaagtcagcacgatt

SEQ ID NO: 426984 - DNA, 25 bp, Artificial
  probe
  misc_feature (1)..(25): SEQ ID NO: 5989; WAN0249AP; Start 9; Stop 33
taagagaaaagtcagcacgattatg

SEQ ID NO: 426985 - DNA, 25 bp, Artificial
  probe
  misc_feature (1)..(25): SEQ ID NO: 5989; WAN0249AP; Start 5; Stop 29
cagataagagaaaagtcagcacgat

SEQ ID NO: 426986 - DNA, 25 bp, Artificial
  probe
  misc_feature (1)..(25): SEQ ID NO: 5989; WAN0249AP; Start 3; Stop 27
atcagataagagaaaagtcagcacg

SEQ ID NO: 426987 - DNA, 25 bp, Artificial
  probe
  misc_feature (1)..(25): SEQ ID NO: 5989; WAN0249AP; Start 2; Stop 26
aatcagataagagaaaagtcagcac

SEQ ID NO: 426988 - DNA, 25 bp, Artificial
  probe
  misc_feature (1)..(25): SEQ ID NO: 5989; WAN0249AP; Start 7; Stop 31
gataagagaaaagtcagcacgatta

SEQ ID NO: 426989 - DNA, 25 bp, Artificial
  probe
  misc_feature (1)..(25): SEQ ID NO: 5989; WAN0249AP; Start 1; Stop 25
aaatcagataagagaaaagtcagca

SEQ ID NO: 426990 - DNA, 25 bp, Artificial
  probe
  misc_feature (1)..(25): SEQ ID NO: 5989; WAN0249AP; Start 4; Stop 28
tcagataagagaaaagtcagcacga

SEQ ID NO: 426991 - DNA, 25 bp, Artificial
  probe
  misc_feature (1)..(25): SEQ ID NO: 5989; WAN0249AP; Start 8; Stop 32
ataagagaaaagtcagcacgattat

SEQ ID NO: 426992 - DNA, 25 bp, Artificial
  probe
  misc_feature (1)..(25): SEQ ID NO: 5989; WAN0249AP; Start 10; Stop 34
aagagaaaagtcagcacgattatgc

SEQ ID NO: 426993 - DNA, 25 bp, Artificial
  probe
  misc_feature (1)..(25): SEQ ID NO: 5990; WAN024963; Start 35; Stop 59
aatggattcataaaggaggtgtatc

SEQ ID NO: 426994 - DNA, 25 bp, Artificial
  probe
  misc_feature (1)..(25): SEQ ID NO: 5990; WAN024963; Start 27; Stop 51
agcgatataatggattcataaagga

SEQ ID NO: 426995 - DNA, 25 bp, Artificial
  probe
  misc_feature (1)..(25): SEQ ID NO: 5990; WAN024963; Start 28; Stop 52
gcgatataatggattcataaaggag

SEQ ID NO: 426996 - DNA, 25 bp, Artificial
  probe
  misc_feature (1)..(25): SEQ ID NO: 5990; WAN024963; Start 34; Stop 58
taatggattcataaaggaggtgtat

SEQ ID NO: 426997 - DNA, 25 bp, Artificial
  probe
  misc_feature (1)..(25): SEQ ID NO: 5990; WAN024963; Start 33; Stop 57
ataatggattcataaaggaggtgta

SEQ ID NO: 426998 - DNA, 25 bp, Artificial
  probe
  misc_feature (1)..(25): SEQ ID NO: 5990; WAN024963; Start 32; Stop 56
tataatggattcataaaggaggtgt

SEQ ID NO: 426999 - DNA, 25 bp, Artificial
  probe
  misc_feature (1)..(25): SEQ ID NO: 5990; WAN024963; Start 26; Stop 50
aagcgatataatggattcataaagg

SEQ ID NO: 427000 - DNA, 25 bp, Artificial
  probe
  misc_feature (1)..(25): SEQ ID NO: 5990; WAN024963; Start 29; Stop 53
cgatataatggattcataaaggagg

SEQ ID NO: 427001 - DNA, 25 bp, Artificial
  probe
  misc_feature (1)..(25): SEQ ID NO: 5990; WAN024963; Start 31; Stop 55
atataatggattcataaaggaggtg

SEQ ID NO: 427002 - DNA, 25 bp, Artificial
  probe
  misc_feature (1)..(25): SEQ ID NO: 5990; WAN024963; Start 30; Stop 54
gatataatggattcataaaggaggt

SEQ ID NO: 427003 - DNA, 25 bp, Artificial
  probe
  misc_feature (1)..(25): SEQ ID NO: 5990; WAN024963; Start 24; Stop 48
gaaagcgatataatggattcataaa

SEQ ID NO: 427004 - DNA, 25 bp, Artificial
  probe
  misc_feature (1)..(25): SEQ ID NO: 5990; WAN024963; Start 25; Stop 49
aaagcgatataatggattcataaag

SEQ ID NO: 427005 - DNA, 25 bp, Artificial
  probe
  misc_feature (1)..(25): SEQ ID NO: 5990; WAN024963; Start 21; Stop 45
tttgaaagcgatataatggattcat

SEQ ID NO: 427006 - DNA, 25 bp, Artificial
  probe
  misc_feature (1)..(25): SEQ ID NO: 5990; WAN024963; Start 23; Stop 47
tgaaagcgatataatggattcataa

SEQ ID NO: 427007 - DNA, 25 bp, Artificial
  probe
  misc_feature (1)..(25): SEQ ID NO: 5990; WAN024963; Start 22; Stop 46
ttgaaagcgatataatggattcata

SEQ ID NO: 427008 - DNA, 25 bp, Artificial
  probe
  misc_feature (1)..(25): SEQ ID NO: 5990; WAN024963; Start 20; Stop 44
ttttgaaagcgatataatggattca

SEQ ID NO: 427009 - DNA, 25 bp, Artificial
  probe
  misc_feature (1)..(25): SEQ ID NO: 5991; WAN0249CR; Start 14; Stop 38
aattcaaggttgtatgataatgtgc

SEQ ID NO: 427010 - DNA, 25 bp, Artificial
  probe
  misc_feature (1)..(25): SEQ ID NO: 5991; WAN0249CR; Start 18; Stop 42
caaggttgtatgataatgtgcagaa

SEQ ID NO: 427011 - DNA, 25 bp, Artificial
  probe
  misc_feature (1)..(25): SEQ ID NO: 5991; WAN0249CR; Start 19; Stop 43
aaggttgtatgataatgtgcagaag

SEQ ID NO: 427012 - DNA, 25 bp, Artificial
  probe
  misc_feature (1)..(25): SEQ ID NO: 5991; WAN0249CR; Start 20; Stop 44
aggttgtatgataatgtgcagaagg

SEQ ID NO: 427013 - DNA, 25 bp, Artificial
  probe
  misc_feature (1)..(25): SEQ ID NO: 5991; WAN0249CR; Start 17; Stop 41
tcaaggttgtatgataatgtgcaga

SEQ ID NO: 427014 - DNA, 25 bp, Artificial
  probe
  misc_feature (1)..(25): SEQ ID NO: 5991; WAN0249CR; Start 16; Stop 40
ttcaaggttgtatgataatgtgcag

SEQ ID NO: 427015 - DNA, 25 bp, Artificial
  probe
  misc_feature (1)..(25): SEQ ID NO: 5991; WAN0249CR; Start 15; Stop 39
attcaaggttgtatgataatgtgca

SEQ ID NO: 427016 - DNA, 25 bp, Artificial
  probe
  misc_feature (1)..(25): SEQ ID NO: 5991; WAN0249CR; Start 37; Stop 61
gcagaaggcatatggaatagttgtt

SEQ ID NO: 427017 - DNA, 25 bp, Artificial
  probe
  misc_feature (1)..(25): SEQ ID NO: 5991; WAN0249CR; Start 21; Stop 45
ggttgtatgataatgtgcagaaggc

SEQ ID NO: 427018 - DNA, 25 bp, Artificial
  probe
  misc_feature (1)..(25): SEQ ID NO: 5991; WAN0249CR; Start 24; Stop 48
tgtatgataatgtgcagaaggcata

SEQ ID NO: 427019 - DNA, 25 bp, Artificial
  probe
  misc_feature (1)..(25): SEQ ID NO: 5991; WAN0249CR; Start 10; Stop 34
gggaaattcaaggttgtatgataat

SEQ ID NO: 427020 - DNA, 25 bp, Artificial
  probe
  misc_feature (1)..(25): SEQ ID NO: 5991; WAN0249CR; Start 23; Stop 47
ttgtatgataatgtgcagaaggcat

SEQ ID NO: 427021 - DNA, 25 bp, Artificial
  probe
  misc_feature (1)..(25): SEQ ID NO: 5991; WAN0249CR; Start 38; Stop 62
cagaaggcatatggaatagttgttt

SEQ ID NO: 427022 - DNA, 25 bp, Artificial
  probe
  misc_feature (1)..(25): SEQ ID NO: 5991; WAN0249CR; Start 25; Stop 49
gtatgataatgtgcagaaggcatat

SEQ ID NO: 427023 - DNA, 25 bp, Artificial
  probe
  misc_feature (1)..(25): SEQ ID NO: 5991; WAN0249CR; Start 31; Stop 55
taatgtgcagaaggcatatggaata

SEQ ID NO: 427024 - DNA, 25 bp, Artificial
  probe
  misc_feature (1)..(25): SEQ ID NO: 5991; WAN0249CR; Start 22; Stop 46
gttgtatgataatgtgcagaaggca

SEQ ID NO: 427025 - DNA, 25 bp, Artificial
  probe
  misc_feature (1)..(25): SEQ ID NO: 5991; WAN0249CR; Start 30; Stop 54
ataatgtgcagaaggcatatggaat

SEQ ID NO: 427026 - DNA, 25 bp, Artificial
  probe
  misc_feature (1)..(25): SEQ ID NO: 5991; WAN0249CR; Start 26; Stop 50
tatgataatgtgcagaaggcatatg

SEQ ID NO: 427027 - DNA, 25 bp, Artificial
  probe
  misc_feature (1)..(25): SEQ ID NO: 5991; WAN0249CR; Start 8; Stop 32
tggggaaattcaaggttgtatgata

SEQ ID NO: 427028 - DNA, 25 bp, Artificial
  probe
  misc_feature (1)..(25): SEQ ID NO: 5991; WAN0249CR; Start 7; Stop 31
atggggaaattcaaggttgtatgat

SEQ ID NO: 427029 - DNA, 25 bp, Artificial
  probe
  misc_feature (1)..(25): SEQ ID NO: 5991; WAN0249CR; Start 32; Stop 56
aatgtgcagaaggcatatggaatag

SEQ ID NO: 427030 - DNA, 25 bp, Artificial
  probe
  misc_feature (1)..(25): SEQ ID NO: 5991; WAN0249CR; Start 29; Stop 53
gataatgtgcagaaggcatatggaa

SEQ ID NO: 427031 - DNA, 25 bp, Artificial
  probe
  misc_feature (1)..(25): SEQ ID NO: 5991; WAN0249CR; Start 27; Stop 51
atgataatgtgcagaaggcatatgg

SEQ ID NO: 427032 - DNA, 25 bp, Artificial
  probe
  misc_feature (1)..(25): SEQ ID NO: 5991; WAN0249CR; Start 9; Stop 33
ggggaaattcaaggttgtatgataa

SEQ ID NO: 427033 - DNA, 25 bp, Artificial
  probe
  misc_feature (1)..(25): SEQ ID NO: 5991; WAN0249CR; Start 6; Stop 30
gatggggaaattcaaggttgtatga

SEQ ID NO: 427034 - DNA, 25 bp, Artificial
  probe
  misc_feature (1)..(25): SEQ ID NO: 5991; WAN0249CR; Start 11; Stop 35
ggaaattcaaggttgtatgataatg

SEQ ID NO: 427035 - DNA, 25 bp, Artificial
  probe
  misc_feature (1)..(25): SEQ ID NO: 5991; WAN0249CR; Start 5; Stop 29
ggatggggaaattcaaggttgtatg

SEQ ID NO: 427036 - DNA, 25 bp, Artificial
  probe
  misc_feature (1)..(25): SEQ ID NO: 5991; WAN0249CR; Start 1; Stop 25
aaatggatggggaaattcaaggttg

SEQ ID NO: 427037 - DNA, 25 bp, Artificial
  probe
  misc_feature (1)..(25): SEQ ID NO: 5991; WAN0249CR; Start 4; Stop 28
tggatggggaaattcaaggttgtat

SEQ ID NO: 427038 - DNA, 25 bp, Artificial
  probe
  misc_feature (1)..(25): SEQ ID NO: 5991; WAN0249CR; Start 3; Stop 27
atggatggggaaattcaaggttgta

SEQ ID NO: 427039 - DNA, 25 bp, Artificial
  probe
  misc_feature (1)..(25): SEQ ID NO: 5991; WAN0249CR; Start 35; Stop 59
gtgcagaaggcatatggaatagttg

SEQ ID NO: 427040 - DNA, 25 bp, Artificial
  probe
  misc_feature (1)..(25): SEQ ID NO: 5991; WAN0249CR; Start 33; Stop 57
atgtgcagaaggcatatggaatagt

SEQ ID NO: 427041 - DNA, 25 bp, Artificial
  probe
  misc_feature (1)..(25): SEQ ID NO: 5991; WAN0249CR; Start 28; Stop 52
tgataatgtgcagaaggcatatgga

SEQ ID NO: 427042 - DNA, 25 bp, Artificial
  probe
  misc_feature (1)..(25): SEQ ID NO: 5992; WAN0249CS; Start 214; Stop 238
attaaaggattatggacaagtagcg

SEQ ID NO: 427043 - DNA, 25 bp, Artificial
  probe
  misc_feature (1)..(25): SEQ ID NO: 5992; WAN0249CS; Start 146; Stop 170
gcagtaggcattgtctaggataaat

SEQ ID NO: 427044 - DNA, 25 bp, Artificial
  probe
  misc_feature (1)..(25): SEQ ID NO: 5992; WAN0249CS; Start 268; Stop 292
ggcttggtgttagcagtagtattat

SEQ ID NO: 427045 - DNA, 25 bp, Artificial
  probe
  misc_feature (1)..(25): SEQ ID NO: 5992; WAN0249CS; Start 255; Stop 279
aatgtgctaagttggcttggtgtta

SEQ ID NO: 427046 - DNA, 25 bp, Artificial
  probe
  misc_feature (1)..(25): SEQ ID NO: 5992; WAN0249CS; Start 269; Stop 293
gcttggtgttagcagtagtattatt

SEQ ID NO: 427047 - DNA, 25 bp, Artificial
  probe
  misc_feature (1)..(25): SEQ ID NO: 5992; WAN0249CS; Start 76; Stop 100
actagaaatatcattaggctaccca

SEQ ID NO: 427048 - DNA, 25 bp, Artificial
  probe
  misc_feature (1)..(25): SEQ ID NO: 5992; WAN0249CS; Start 267; Stop 291
tggcttggtgttagcagtagtatta

SEQ ID NO: 427049 - DNA, 25 bp, Artificial
  probe
  misc_feature (1)..(25): SEQ ID NO: 5992; WAN0249CS; Start 150; Stop 174
taggcattgtctaggataaataagc

SEQ ID NO: 427050 - DNA, 25 bp, Artificial
  probe
  misc_feature (1)..(25): SEQ ID NO: 5992; WAN0249CS; Start 213; Stop 237
cattaaaggattatggacaagtagc

SEQ ID NO: 427051 - DNA, 25 bp, Artificial
  probe
  misc_feature (1)..(25): SEQ ID NO: 5992; WAN0249CS; Start 151; Stop 175
aggcattgtctaggataaataagct

SEQ ID NO: 427052 - DNA, 25 bp, Artificial
  probe
  misc_feature (1)..(25): SEQ ID NO: 5992; WAN0249CS; Start 147; Stop 171
cagtaggcattgtctaggataaata

SEQ ID NO: 427053 - DNA, 25 bp, Artificial
  probe
  misc_feature (1)..(25): SEQ ID NO: 5992; WAN0249CS; Start 266; Stop 290
ttggcttggtgttagcagtagtatt

SEQ ID NO: 427054 - DNA, 25 bp, Artificial
  probe
  misc_feature (1)..(25): SEQ ID NO: 5992; WAN0249CS; Start 10; Stop 34
acatttggattaacaagtgtcctag

SEQ ID NO: 427055 - DNA, 25 bp, Artificial
  probe
  misc_feature (1)..(25): SEQ ID NO: 5992; WAN0249CS; Start 75; Stop 99
aactagaaatatcattaggctaccc

SEQ ID NO: 427056 - DNA, 25 bp, Artificial
  probe
  misc_feature (1)..(25): SEQ ID NO: 5992; WAN0249CS; Start 77; Stop 101
ctagaaatatcattaggctacccat

SEQ ID NO: 427057 - DNA, 25 bp, Artificial
  probe
  misc_feature (1)..(25): SEQ ID NO: 5992; WAN0249CS; Start 8; Stop 32
ttacatttggattaacaagtgtcct

SEQ ID NO: 427058 - DNA, 25 bp, Artificial
  probe
  misc_feature (1)..(25): SEQ ID NO: 5992; WAN0249CS; Start 7; Stop 31
gttacatttggattaacaagtgtcc

SEQ ID NO: 427059 - DNA, 25 bp, Artificial
  probe
  misc_feature (1)..(25): SEQ ID NO: 5992; WAN0249CS; Start 256; Stop 280
atgtgctaagttggcttggtgttag

SEQ ID NO: 427060 - DNA, 25 bp, Artificial
  probe
  misc_feature (1)..(25): SEQ ID NO: 5992; WAN0249CS; Start 152; Stop 176
ggcattgtctaggataaataagcta

SEQ ID NO: 427061 - DNA, 25 bp, Artificial
  probe
  misc_feature (1)..(25): SEQ ID NO: 5992; WAN0249CS; Start 262; Stop 286
taagttggcttggtgttagcagtag

SEQ ID NO: 427062 - DNA, 25 bp, Artificial
  probe
  misc_feature (1)..(25): SEQ ID NO: 5992; WAN0249CS; Start 261; Stop 285
ctaagttggcttggtgttagcagta

SEQ ID NO: 427063 - DNA, 25 bp, Artificial
  probe
  misc_feature (1)..(25): SEQ ID NO: 5992; WAN0249CS; Start 270; Stop 294
cttggtgttagcagtagtattattt

SEQ ID NO: 427064 - DNA, 25 bp, Artificial
  probe
  misc_feature (1)..(25): SEQ ID NO: 5992; WAN0249CS; Start 265; Stop 289
gttggcttggtgttagcagtagtat

SEQ ID NO: 427065 - DNA, 25 bp, Artificial
  probe
  misc_feature (1)..(25): SEQ ID NO: 5992; WAN0249CS; Start 9; Stop 33
tacatttggattaacaagtgtccta

SEQ ID NO: 427066 - DNA, 25 bp, Artificial
  probe
  misc_feature (1)..(25): SEQ ID NO: 5992; WAN0249CS; Start 148; Stop 172
agtaggcattgtctaggataaataa

SEQ ID NO: 427067 - DNA, 25 bp, Artificial
  probe
  misc_feature (1)..(25): SEQ ID NO: 5992; WAN0249CS; Start 210; Stop 234
aaacattaaaggattatggacaagt

SEQ ID NO: 427068 - DNA, 25 bp, Artificial
  probe
  misc_feature (1)..(25): SEQ ID NO: 5992; WAN0249CS; Start 243; Stop 267
attaggtgatgcaatgtgctaagtt

SEQ ID NO: 427069 - DNA, 25 bp, Artificial
  probe
  misc_feature (1)..(25): SEQ ID NO: 5992; WAN0249CS; Start 79; Stop 103
agaaatatcattaggctacccatat

SEQ ID NO: 427070 - DNA, 25 bp, Artificial
  probe
  misc_feature (1)..(25): SEQ ID NO: 5992; WAN0249CS; Start 120; Stop 144
ggctgatgaatcttatttatactgt

SEQ ID NO: 427071 - DNA, 25 bp, Artificial
  probe
  misc_feature (1)..(25): SEQ ID NO: 5992; WAN0249CS; Start 119; Stop 143
tggctgatgaatcttatttatactg

SEQ ID NO: 427072 - DNA, 25 bp, Artificial
  probe
  misc_feature (1)..(25): SEQ ID NO: 5992; WAN0249CS; Start 149; Stop 173
gtaggcattgtctaggataaataag

SEQ ID NO: 427073 - DNA, 25 bp, Artificial
  probe
  misc_feature (1)..(25): SEQ ID NO: 5992; WAN0249CS; Start 242; Stop 266
gattaggtgatgcaatgtgctaagt

SEQ ID NO: 427074 - DNA, 25 bp, Artificial
  probe
  misc_feature (1)..(25): SEQ ID NO: 5992; WAN0249CS; Start 144; Stop 168
ttgcagtaggcattgtctaggataa

SEQ ID NO: 427075 - DNA, 25 bp, Artificial
  probe
  misc_feature (1)..(25): SEQ ID NO: 5993; WAN024965; Start 36; Stop 60
cagcactagcctattccgtaagtaa

SEQ ID NO: 427076 - DNA, 25 bp, Artificial
  probe
  misc_feature (1)..(25): SEQ ID NO: 5993; WAN024965; Start 35; Stop 59
acagcactagcctattccgtaagta

SEQ ID NO: 427077 - DNA, 25 bp, Artificial
  probe
  misc_feature (1)..(25): SEQ ID NO: 5993; WAN024965; Start 28; Stop 52
tagagacacagcactagcctattcc

SEQ ID NO: 427078 - DNA, 25 bp, Artificial
  probe
  misc_feature (1)..(25): SEQ ID NO: 5993; WAN024965; Start 27; Stop 51
ctagagacacagcactagcctattc

SEQ ID NO: 427079 - DNA, 25 bp, Artificial
  probe
  misc_feature (1)..(25): SEQ ID NO: 5993; WAN024965; Start 39; Stop 63
cactagcctattccgtaagtaaagc

SEQ ID NO: 427080 - DNA, 25 bp, Artificial
  probe
  misc_feature (1)..(25): SEQ ID NO: 5993; WAN024965; Start 38; Stop 62
gcactagcctattccgtaagtaaag

SEQ ID NO: 427081 - DNA, 25 bp, Artificial
  probe
  misc_feature (1)..(25): SEQ ID NO: 5993; WAN024965; Start 37; Stop 61
agcactagcctattccgtaagtaaa

SEQ ID NO: 427082 - DNA, 25 bp, Artificial
  probe
  misc_feature (1)..(25): SEQ ID NO: 5993; WAN024965; Start 33; Stop 57
acacagcactagcctattccgtaag

SEQ ID NO: 427083 - DNA, 25 bp, Artificial
  probe
  misc_feature (1)..(25): SEQ ID NO: 5993; WAN024965; Start 32; Stop 56
gacacagcactagcctattccgtaa

SEQ ID NO: 427084 - DNA, 25 bp, Artificial
  probe
  misc_feature (1)..(25): SEQ ID NO: 5993; WAN024965; Start 34; Stop 58
cacagcactagcctattccgtaagt

SEQ ID NO: 427085 - DNA, 25 bp, Artificial
  probe
  misc_feature (1)..(25): SEQ ID NO: 5993; WAN024965; Start 20; Stop 44
aaataggctagagacacagcactag

SEQ ID NO: 427086 - DNA, 25 bp, Artificial
  probe
  misc_feature (1)..(25): SEQ ID NO: 5993; WAN024965; Start 43; Stop 67
agcctattccgtaagtaaagctact

SEQ ID NO: 427087 - DNA, 25 bp, Artificial
  probe
  misc_feature (1)..(25): SEQ ID NO: 5993; WAN024965; Start 40; Stop 64
actagcctattccgtaagtaaagct

SEQ ID NO: 427088 - DNA, 25 bp, Artificial
  probe
  misc_feature (1)..(25): SEQ ID NO: 5993; WAN024965; Start 31; Stop 55
agacacagcactagcctattccgta

SEQ ID NO: 427089 - DNA, 25 bp, Artificial
  probe
  misc_feature (1)..(25): SEQ ID NO: 5993; WAN024965; Start 16; Stop 40
attaaaataggctagagacacagca

SEQ ID NO: 427090 - DNA, 25 bp, Artificial
  probe
  misc_feature (1)..(25): SEQ ID NO: 5993; WAN024965; Start 17; Stop 41
ttaaaataggctagagacacagcac

SEQ ID NO: 427091 - DNA, 25 bp, Artificial
  probe
  misc_feature (1)..(25): SEQ ID NO: 5993; WAN024965; Start 42; Stop 66
tagcctattccgtaagtaaagctac

SEQ ID NO: 427092 - DNA, 25 bp, Artificial
  probe
  misc_feature (1)..(25): SEQ ID NO: 5993; WAN024965; Start 41; Stop 65
ctagcctattccgtaagtaaagcta

SEQ ID NO: 427093 - DNA, 25 bp, Artificial
  probe
  misc_feature (1)..(25): SEQ ID NO: 5993; WAN024965; Start 19; Stop 43
aaaataggctagagacacagcacta

SEQ ID NO: 427094 - DNA, 25 bp, Artificial
  probe
  misc_feature (1)..(25): SEQ ID NO: 5993; WAN024965; Start 18; Stop 42
taaaataggctagagacacagcact

SEQ ID NO: 427095 - DNA, 25 bp, Artificial
  probe
  misc_feature (1)..(25): SEQ ID NO: 5993; WAN024965; Start 44; Stop 68
gcctattccgtaagtaaagctactt

SEQ ID NO: 427096 - DNA, 25 bp, Artificial
  probe
  misc_feature (1)..(25): SEQ ID NO: 5993; WAN024965; Start 15; Stop 39
tattaaaataggctagagacacagc

SEQ ID NO: 427097 - DNA, 25 bp, Artificial
  probe
  misc_feature (1)..(25): SEQ ID NO: 5993; WAN024965; Start 14; Stop 38
ttattaaaataggctagagacacag

SEQ ID NO: 427098 - DNA, 25 bp, Artificial
  probe
  misc_feature (1)..(25): SEQ ID NO: 5993; WAN024965; Start 13; Stop 37
attattaaaataggctagagacaca

SEQ ID NO: 427099 - DNA, 25 bp, Artificial
  probe
  misc_feature (1)..(25): SEQ ID NO: 5994; WAN0249BB; Start 139; Stop 163
cagtcattggtctaagagttgtcta

SEQ ID NO: 427100 - DNA, 25 bp, Artificial
  probe
  misc_feature (1)..(25): SEQ ID NO: 5994; WAN0249BB; Start 140; Stop 164
agtcattggtctaagagttgtctat

SEQ ID NO: 427101 - DNA, 25 bp, Artificial
  probe
  misc_feature (1)..(25): SEQ ID NO: 5994; WAN0249BB; Start 141; Stop 165
gtcattggtctaagagttgtctatt

SEQ ID NO: 427102 - DNA, 25 bp, Artificial
  probe
  misc_feature (1)..(25): SEQ ID NO: 5994; WAN0249BB; Start 8; Stop 32
tcaaccagtttactcagtcatttct

SEQ ID NO: 427103 - DNA, 25 bp, Artificial
  probe
  misc_feature (1)..(25): SEQ ID NO: 5994; WAN0249BB; Start 13; Stop 37
cagtttactcagtcatttcttagcc

SEQ ID NO: 427104 - DNA, 25 bp, Artificial
  probe
  misc_feature (1)..(25): SEQ ID NO: 5994; WAN0249BB; Start 12; Stop 36
ccagtttactcagtcatttcttagc

SEQ ID NO: 427105 - DNA, 25 bp, Artificial
  probe
  misc_feature (1)..(25): SEQ ID NO: 5994; WAN0249BB; Start 5; Stop 29
acatcaaccagtttactcagtcatt

SEQ ID NO: 427106 - DNA, 25 bp, Artificial
  probe
  misc_feature (1)..(25): SEQ ID NO: 5994; WAN0249BB; Start 14; Stop 38
agtttactcagtcatttcttagccc

SEQ ID NO: 427107 - DNA, 25 bp, Artificial
  probe
  misc_feature (1)..(25): SEQ ID NO: 5994; WAN0249BB; Start 6; Stop 30
catcaaccagtttactcagtcattt

SEQ ID NO: 427108 - DNA, 25 bp, Artificial
  probe
  misc_feature (1)..(25): SEQ ID NO: 5994; WAN0249BB; Start 9; Stop 33
caaccagtttactcagtcatttctt

SEQ ID NO: 427109 - DNA, 25 bp, Artificial
  probe
  misc_feature (1)..(25): SEQ ID NO: 5994; WAN0249BB; Start 136; Stop 160
atccagtcattggtctaagagttgt

SEQ ID NO: 427110 - DNA, 25 bp, Artificial
  probe
  misc_feature (1)..(25): SEQ ID NO: 5994; WAN0249BB; Start 135; Stop 159
gatccagtcattggtctaagagttg

SEQ ID NO: 427111 - DNA, 25 bp, Artificial
  probe
  misc_feature (1)..(25): SEQ ID NO: 5994; WAN0249BB; Start 7; Stop 31
atcaaccagtttactcagtcatttc

SEQ ID NO: 427112 - DNA, 25 bp, Artificial
  probe
  misc_feature (1)..(25): SEQ ID NO: 5994; WAN0249BB; Start 4; Stop 28
aacatcaaccagtttactcagtcat

SEQ ID NO: 427113 - DNA, 25 bp, Artificial
  probe
  misc_feature (1)..(25): SEQ ID NO: 5994; WAN0249BB; Start 1; Stop 25
aacaacatcaaccagtttactcagt

SEQ ID NO: 427114 - DNA, 25 bp, Artificial
  probe
  misc_feature (1)..(25): SEQ ID NO: 5994; WAN0249BB; Start 138; Stop 162
ccagtcattggtctaagagttgtct

SEQ ID NO: 427115 - DNA, 25 bp, Artificial
  probe
  misc_feature (1)..(25): SEQ ID NO: 5994; WAN0249BB; Start 137; Stop 161
tccagtcattggtctaagagttgtc

SEQ ID NO: 427116 - DNA, 25 bp, Artificial
  probe
  misc_feature (1)..(25): SEQ ID NO: 5994; WAN0249BB; Start 11; Stop 35
accagtttactcagtcatttcttag

SEQ ID NO: 427117 - DNA, 25 bp, Artificial
  probe
  misc_feature (1)..(25): SEQ ID NO: 5994; WAN0249BB; Start 3; Stop 27
caacatcaaccagtttactcagtca

SEQ ID NO: 427118 - DNA, 25 bp, Artificial
  probe
  misc_feature (1)..(25): SEQ ID NO: 5994; WAN0249BB; Start 2; Stop 26
acaacatcaaccagtttactcagtc

SEQ ID NO: 427119 - DNA, 25 bp, Artificial
  probe
  misc_feature (1)..(25): SEQ ID NO: 5994; WAN0249BB; Start 146; Stop 170
tggtctaagagttgtctattatgaa

SEQ ID NO: 427120 - DNA, 25 bp, Artificial
  probe
  misc_feature (1)..(25): SEQ ID NO: 5994; WAN0249BB; Start 145; Stop 169
ttggtctaagagttgtctattatga

SEQ ID NO: 427121 - DNA, 25 bp, Artificial
  probe
  misc_feature (1)..(25): SEQ ID NO: 5994; WAN0249BB; Start 142; Stop 166
tcattggtctaagagttgtctatta

SEQ ID NO: 427122 - DNA, 25 bp, Artificial
  probe
  misc_feature (1)..(25): SEQ ID NO: 5994; WAN0249BB; Start 147; Stop 171
ggtctaagagttgtctattatgaac

SEQ ID NO: 427123 - DNA, 25 bp, Artificial
  probe
  misc_feature (1)..(25): SEQ ID NO: 5994; WAN0249BB; Start 10; Stop 34
aaccagtttactcagtcatttctta

SEQ ID NO: 427124 - DNA, 25 bp, Artificial
  probe
  misc_feature (1)..(25): SEQ ID NO: 5994; WAN0249BB; Start 52; Stop 76
gacatagcctattaccctttcacga

SEQ ID NO: 427125 - DNA, 25 bp, Artificial
  probe
  misc_feature (1)..(25): SEQ ID NO: 5994; WAN0249BB; Start 134; Stop 158
cgatccagtcattggtctaagagtt

SEQ ID NO: 427126 - DNA, 25 bp, Artificial
  probe
  misc_feature (1)..(25): SEQ ID NO: 5994; WAN0249BB; Start 132; Stop 156
aacgatccagtcattggtctaagag

SEQ ID NO: 427127 - DNA, 25 bp, Artificial
  probe
  misc_feature (1)..(25): SEQ ID NO: 5994; WAN0249BB; Start 53; Stop 77
acatagcctattaccctttcacgac

SEQ ID NO: 427128 - DNA, 25 bp, Artificial
  probe
  misc_feature (1)..(25): SEQ ID NO: 5994; WAN0249BB; Start 191; Stop 215
ttacgttcagagataagagcagcac

SEQ ID NO: 427129 - DNA, 25 bp, Artificial
  probe
  misc_feature (1)..(25): SEQ ID NO: 5994; WAN0249BB; Start 123; Stop 147
aacactttaaacgatccagtcattg

SEQ ID NO: 427130 - DNA, 25 bp, Artificial
  probe
  misc_feature (1)..(25): SEQ ID NO: 5994; WAN0249BB; Start 129; Stop 153
ttaaacgatccagtcattggtctaa

SEQ ID NO: 427131 - DNA, 25 bp, Artificial
  probe
  misc_feature (1)..(25): SEQ ID NO: 5994; WAN0249BB; Start 122; Stop 146
aaacactttaaacgatccagtcatt

SEQ ID NO: 427132 - DNA, 25 bp, Artificial
  probe
  misc_feature (1)..(25): SEQ ID NO: 5995; WAN02496Z; Start 42; Stop 66
cgacctaaaactttgggctctataa

SEQ ID NO: 427133 - DNA, 25 bp, Artificial
  probe
  misc_feature (1)..(25): SEQ ID NO: 5995; WAN02496Z; Start 29; Stop 53
gcatattatcaagcgacctaaaact

SEQ ID NO: 427134 - DNA, 25 bp, Artificial
  probe
  misc_feature (1)..(25): SEQ ID NO: 5995; WAN02496Z; Start 33; Stop 57
attatcaagcgacctaaaactttgg

SEQ ID NO: 427135 - DNA, 25 bp, Artificial
  probe
  misc_feature (1)..(25): SEQ ID NO: 5995; WAN02496Z; Start 43; Stop 67
gacctaaaactttgggctctataat

SEQ ID NO: 427136 - DNA, 25 bp, Artificial
  probe
  misc_feature (1)..(25): SEQ ID NO: 5995; WAN02496Z; Start 34; Stop 58
ttatcaagcgacctaaaactttggg

SEQ ID NO: 427137 - DNA, 25 bp, Artificial
  probe
  misc_feature (1)..(25): SEQ ID NO: 5995; WAN02496Z; Start 44; Stop 68
acctaaaactttgggctctataata

SEQ ID NO: 427138 - DNA, 25 bp, Artificial
  probe
  misc_feature (1)..(25): SEQ ID NO: 5995; WAN02496Z; Start 41; Stop 65
gcgacctaaaactttgggctctata

SEQ ID NO: 427139 - DNA, 25 bp, Artificial
  probe
  misc_feature (1)..(25): SEQ ID NO: 5995; WAN02496Z; Start 32; Stop 56
tattatcaagcgacctaaaactttg

SEQ ID NO: 427140 - DNA, 25 bp, Artificial
  probe
  misc_feature (1)..(25): SEQ ID NO: 5995; WAN02496Z; Start 1; Stop 25
aacgagcagtctataaaattcaaaa

SEQ ID NO: 427141 - DNA, 25 bp, Artificial
  probe
  misc_feature (1)..(25): SEQ ID NO: 5995; WAN02496Z; Start 30; Stop 54
catattatcaagcgacctaaaactt

SEQ ID NO: 427142 - DNA, 25 bp, Artificial
  probe
  misc_feature (1)..(25): SEQ ID NO: 5995; WAN02496Z; Start 31; Stop 55
atattatcaagcgacctaaaacttt

SEQ ID NO: 427143 - DNA, 25 bp, Artificial
  probe
  misc_feature (1)..(25): SEQ ID NO: 5995; WAN02496Z; Start 45; Stop 69
cctaaaactttgggctctataatat

SEQ ID NO: 427144 - DNA, 25 bp, Artificial
  probe
  misc_feature (1)..(25): SEQ ID NO: 5995; WAN02496Z; Start 35; Stop 59
tatcaagcgacctaaaactttgggc

SEQ ID NO: 427145 - DNA, 25 bp, Artificial
  probe
  misc_feature (1)..(25): SEQ ID NO: 5995; WAN02496Z; Start 26; Stop 50
aacgcatattatcaagcgacctaaa

SEQ ID NO: 427146 - DNA, 25 bp, Artificial
  probe
  misc_feature (1)..(25): SEQ ID NO: 5995; WAN02496Z; Start 25; Stop 49
aaacgcatattatcaagcgacctaa

SEQ ID NO: 427147 - DNA, 25 bp, Artificial
  probe
  misc_feature (1)..(25): SEQ ID NO: 5995; WAN02496Z; Start 48; Stop 72
aaaactttgggctctataatatttg

SEQ ID NO: 427148 - DNA, 25 bp, Artificial
  probe
  misc_feature (1)..(25): SEQ ID NO: 5995; WAN02496Z; Start 40; Stop 64
agcgacctaaaactttgggctctat

SEQ ID NO: 427149 - DNA, 25 bp, Artificial
  probe
  misc_feature (1)..(25): SEQ ID NO: 5995; WAN02496Z; Start 39; Stop 63
aagcgacctaaaactttgggctcta

SEQ ID NO: 427150 - DNA, 25 bp, Artificial
  probe
  misc_feature (1)..(25): SEQ ID NO: 5995; WAN02496Z; Start 28; Stop 52
cgcatattatcaagcgacctaaaac

SEQ ID NO: 427151 - DNA, 25 bp, Artificial
  probe
  misc_feature (1)..(25): SEQ ID NO: 5995; WAN02496Z; Start 27; Stop 51
acgcatattatcaagcgacctaaaa

SEQ ID NO: 427152 - DNA, 25 bp, Artificial
  probe
  misc_feature (1)..(25): SEQ ID NO: 5995; WAN02496Z; Start 24; Stop 48
aaaacgcatattatcaagcgaccta

SEQ ID NO: 427153 - DNA, 25 bp, Artificial
  probe
  misc_feature (1)..(25): SEQ ID NO: 5995; WAN02496Z; Start 36; Stop 60
atcaagcgacctaaaactttgggct

SEQ ID NO: 427154 - DNA, 25 bp, Artificial
  probe
  misc_feature (1)..(25): SEQ ID NO: 5996; WAN0249CO; Start 32; Stop 56
ttcctacacgagcaataatttcatt

SEQ ID NO: 427155 - DNA, 25 bp, Artificial
  probe
  misc_feature (1)..(25): SEQ ID NO: 5996; WAN0249CO; Start 31; Stop 55
tttcctacacgagcaataatttcat

SEQ ID NO: 427156 - DNA, 25 bp, Artificial
  probe
  misc_feature (1)..(25): SEQ ID NO: 5996; WAN0249CO; Start 7; Stop 31
tcgtggatgttaagattaaactgtt

SEQ ID NO: 427157 - DNA, 25 bp, Artificial
  probe
  misc_feature (1)..(25): SEQ ID NO: 5996; WAN0249CO; Start 6; Stop 30
ttcgtggatgttaagattaaactgt

SEQ ID NO: 427158 - DNA, 25 bp, Artificial
  probe
  misc_feature (1)..(25): SEQ ID NO: 5996; WAN0249CO; Start 108; Stop 132
accatgatattctaagacataacca

SEQ ID NO: 427159 - DNA, 25 bp, Artificial
  probe
  misc_feature (1)..(25): SEQ ID NO: 5996; WAN0249CO; Start 5; Stop 29
cttcgtggatgttaagattaaactg

SEQ ID NO: 427160 - DNA, 25 bp, Artificial
  probe
  misc_feature (1)..(25): SEQ ID NO: 5996; WAN0249CO; Start 1; Stop 25
aactcttcgtggatgttaagattaa

SEQ ID NO: 427161 - DNA, 25 bp, Artificial
  probe
  misc_feature (1)..(25): SEQ ID NO: 5996; WAN0249CO; Start 8; Stop 32
cgtggatgttaagattaaactgttt

SEQ ID NO: 427162 - DNA, 25 bp, Artificial
  probe
  misc_feature (1)..(25): SEQ ID NO: 5996; WAN0249CO; Start 99; Stop 123
ggcacgtaaaccatgatattctaag

SEQ ID NO: 427163 - DNA, 25 bp, Artificial
  probe
  misc_feature (1)..(25): SEQ ID NO: 5996; WAN0249CO; Start 100; Stop 124
gcacgtaaaccatgatattctaaga

SEQ ID NO: 427164 - DNA, 25 bp, Artificial
  probe
  misc_feature (1)..(25): SEQ ID NO: 5996; WAN0249CO; Start 34; Stop 58
cctacacgagcaataatttcattga

SEQ ID NO: 427165 - DNA, 25 bp, Artificial
  probe
  misc_feature (1)..(25): SEQ ID NO: 5996; WAN0249CO; Start 33; Stop 57
tcctacacgagcaataatttcattg

SEQ ID NO: 427166 - DNA, 25 bp, Artificial
  probe
  misc_feature (1)..(25): SEQ ID NO: 5996; WAN0249CO; Start 107; Stop 131
aaccatgatattctaagacataacc

SEQ ID NO: 427167 - DNA, 25 bp, Artificial
  probe
  misc_feature (1)..(25): SEQ ID NO: 5996; WAN0249CO; Start 161; Stop 185
taatttcttatttagggcttggaag

SEQ ID NO: 427168 - DNA, 25 bp, Artificial
  probe
  misc_feature (1)..(25): SEQ ID NO: 5996; WAN0249CO; Start 164; Stop 188
tttcttatttagggcttggaagacc

SEQ ID NO: 427169 - DNA, 25 bp, Artificial
  probe
  misc_feature (1)..(25): SEQ ID NO: 5996; WAN0249CO; Start 109; Stop 133
ccatgatattctaagacataaccat

SEQ ID NO: 427170 - DNA, 25 bp, Artificial
  probe
  misc_feature (1)..(25): SEQ ID NO: 5996; WAN0249CO; Start 163; Stop 187
atttcttatttagggcttggaagac

SEQ ID NO: 427171 - DNA, 25 bp, Artificial
  probe
  misc_feature (1)..(25): SEQ ID NO: 5996; WAN0249CO; Start 37; Stop 61
acacgagcaataatttcattgattt

SEQ ID NO: 427172 - DNA, 25 bp, Artificial
  probe
  misc_feature (1)..(25): SEQ ID NO: 5996; WAN0249CO; Start 30; Stop 54
ttttcctacacgagcaataatttca

SEQ ID NO: 427173 - DNA, 25 bp, Artificial
  probe
  misc_feature (1)..(25): SEQ ID NO: 5996; WAN0249CO; Start 102; Stop 126
acgtaaaccatgatattctaagaca

SEQ ID NO: 427174 - DNA, 25 bp, Artificial
  probe
  misc_feature (1)..(25): SEQ ID NO: 5996; WAN0249CO; Start 29; Stop 53
gttttcctacacgagcaataatttc

SEQ ID NO: 427175 - DNA, 25 bp, Artificial
  probe
  misc_feature (1)..(25): SEQ ID NO: 5996; WAN0249CO; Start 35; Stop 59
ctacacgagcaataatttcattgat

SEQ ID NO: 427176 - DNA, 25 bp, Artificial
  probe
  misc_feature (1)..(25): SEQ ID NO: 5996; WAN0249CO; Start 162; Stop 186
aatttcttatttagggcttggaaga

SEQ ID NO: 427177 - DNA, 25 bp, Artificial
  probe
  misc_feature (1)..(25): SEQ ID NO: 5996; WAN0249CO; Start 101; Stop 125
cacgtaaaccatgatattctaagac

SEQ ID NO: 427178 - DNA, 25 bp, Artificial
  probe
  misc_feature (1)..(25): SEQ ID NO: 5996; WAN0249CO; Start 160; Stop 184
ttaatttcttatttagggcttggaa

SEQ ID NO: 427179 - DNA, 25 bp, Artificial
  probe
  misc_feature (1)..(25): SEQ ID NO: 5996; WAN0249CO; Start 98; Stop 122
tggcacgtaaaccatgatattctaa

SEQ ID NO: 427180 - DNA, 25 bp, Artificial
  probe
  misc_feature (1)..(25): SEQ ID NO: 5996; WAN0249CO; Start 4; Stop 28
tcttcgtggatgttaagattaaact

SEQ ID NO: 427181 - DNA, 25 bp, Artificial
  probe
  misc_feature (1)..(25): SEQ ID NO: 5996; WAN0249CO; Start 2; Stop 26
actcttcgtggatgttaagattaaa

SEQ ID NO: 427182 - DNA, 25 bp, Artificial
  probe
  misc_feature (1)..(25): SEQ ID NO: 5996; WAN0249CO; Start 3; Stop 27
ctcttcgtggatgttaagattaaac

SEQ ID NO: 427183 - DNA, 25 bp, Artificial
  probe
  misc_feature (1)..(25): SEQ ID NO: 5996; WAN0249CO; Start 97; Stop 121
gtggcacgtaaaccatgatattcta

SEQ ID NO: 427184 - DNA, 25 bp, Artificial
  probe
  misc_feature (1)..(25): SEQ ID NO: 5996; WAN0249CO; Start 36; Stop 60
tacacgagcaataatttcattgatt

SEQ ID NO: 427185 - DNA, 25 bp, Artificial
  probe
  misc_feature (1)..(25): SEQ ID NO: 5996; WAN0249CO; Start 103; Stop 127
cgtaaaccatgatattctaagacat

SEQ ID NO: 427186 - DNA, 25 bp, Artificial
  probe
  misc_feature (1)..(25): SEQ ID NO: 5996; WAN0249CO; Start 27; Stop 51
ctgttttcctacacgagcaataatt

SEQ ID NO: 427187 - DNA, 25 bp, Artificial
  probe
  misc_feature (1)..(25): SEQ ID NO: 5998; WAN0249B9; Start 24; Stop 48
actattccagattcattccactaga

SEQ ID NO: 427188 - DNA, 25 bp, Artificial
  probe
  misc_feature (1)..(25): SEQ ID NO: 5998; WAN0249B9; Start 23; Stop 47
gactattccagattcattccactag

SEQ ID NO: 427189 - DNA, 25 bp, Artificial
  probe
  misc_feature (1)..(25): SEQ ID NO: 5998; WAN0249B9; Start 22; Stop 46
ggactattccagattcattccacta

SEQ ID NO: 427190 - DNA, 25 bp, Artificial
  probe
  misc_feature (1)..(25): SEQ ID NO: 5998; WAN0249B9; Start 25; Stop 49
ctattccagattcattccactagat

SEQ ID NO: 427191 - DNA, 25 bp, Artificial
  probe
  misc_feature (1)..(25): SEQ ID NO: 5998; WAN0249B9; Start 26; Stop 50
tattccagattcattccactagatt

SEQ ID NO: 427192 - DNA, 25 bp, Artificial
  probe
  misc_feature (1)..(25): SEQ ID NO: 5998; WAN0249B9; Start 29; Stop 53
tccagattcattccactagatttcg

SEQ ID NO: 427193 - DNA, 25 bp, Artificial
  probe
  misc_feature (1)..(25): SEQ ID NO: 5998; WAN0249B9; Start 28; Stop 52
ttccagattcattccactagatttc

SEQ ID NO: 427194 - DNA, 25 bp, Artificial
  probe
  misc_feature (1)..(25): SEQ ID NO: 5998; WAN0249B9; Start 27; Stop 51
attccagattcattccactagattt

SEQ ID NO: 427195 - DNA, 25 bp, Artificial
  probe
  misc_feature (1)..(25): SEQ ID NO: 5998; WAN0249B9; Start 30; Stop 54
ccagattcattccactagatttcga

SEQ ID NO: 427196 - DNA, 25 bp, Artificial
  probe
  misc_feature (1)..(25): SEQ ID NO: 5998; WAN0249B9; Start 1; Stop 25
aagagtattagaaagctcgatggac

SEQ ID NO: 427197 - DNA, 25 bp, Artificial
  probe
  misc_feature (1)..(25): SEQ ID NO: 5998; WAN0249B9; Start 3; Stop 27
gagtattagaaagctcgatggacta

SEQ ID NO: 427198 - DNA, 25 bp, Artificial
  probe
  misc_feature (1)..(25): SEQ ID NO: 5998; WAN0249B9; Start 5; Stop 29
gtattagaaagctcgatggactatt

SEQ ID NO: 427199 - DNA, 25 bp, Artificial
  probe
  misc_feature (1)..(25): SEQ ID NO: 5998; WAN0249B9; Start 2; Stop 26
agagtattagaaagctcgatggact

SEQ ID NO: 427200 - DNA, 25 bp, Artificial
  probe
  misc_feature (1)..(25): SEQ ID NO: 5998; WAN0249B9; Start 4; Stop 28
agtattagaaagctcgatggactat

SEQ ID NO: 427201 - DNA, 25 bp, Artificial
  probe
  misc_feature (1)..(25): SEQ ID NO: 5998; WAN0249B9; Start 6; Stop 30
tattagaaagctcgatggactattc

SEQ ID NO: 427202 - DNA, 25 bp, Artificial
  probe
  misc_feature (1)..(25): SEQ ID NO: 5998; WAN0249B9; Start 7; Stop 31
attagaaagctcgatggactattcc

SEQ ID NO: 427203 - DNA, 25 bp, Artificial
  probe
  misc_feature (1)..(25): SEQ ID NO: 5998; WAN0249B9; Start 19; Stop 43
gatggactattccagattcattcca

SEQ ID NO: 427204 - DNA, 25 bp, Artificial
  probe
  misc_feature (1)..(25): SEQ ID NO: 5998; WAN0249B9; Start 20; Stop 44
atggactattccagattcattccac

SEQ ID NO: 427205 - DNA, 25 bp, Artificial
  probe
  misc_feature (1)..(25): SEQ ID NO: 5998; WAN0249B9; Start 18; Stop 42
cgatggactattccagattcattcc

SEQ ID NO: 427206 - DNA, 25 bp, Artificial
  probe
  misc_feature (1)..(25): SEQ ID NO: 5998; WAN0249B9; Start 17; Stop 41
tcgatggactattccagattcattc

SEQ ID NO: 427207 - DNA, 25 bp, Artificial
  probe
  misc_feature (1)..(25): SEQ ID NO: 5998; WAN0249B9; Start 16; Stop 40
ctcgatggactattccagattcatt

SEQ ID NO: 427208 - DNA, 25 bp, Artificial
  probe
  misc_feature (1)..(25): SEQ ID NO: 5998; WAN0249B9; Start 21; Stop 45
tggactattccagattcattccact

SEQ ID NO: 427209 - DNA, 25 bp, Artificial
  probe
  misc_feature (1)..(25): SEQ ID NO: 5998; WAN0249B9; Start 31; Stop 55
cagattcattccactagatttcgaa

SEQ ID NO: 427210 - DNA, 25 bp, Artificial
  probe
  misc_feature (1)..(25): SEQ ID NO: 5998; WAN0249B9; Start 15; Stop 39
gctcgatggactattccagattcat

SEQ ID NO: 427211 - DNA, 25 bp, Artificial
  probe
  misc_feature (1)..(25): SEQ ID NO: 5998; WAN0249B9; Start 13; Stop 37
aagctcgatggactattccagattc

SEQ ID NO: 427212 - DNA, 25 bp, Artificial
  probe
  misc_feature (1)..(25): SEQ ID NO: 5998; WAN0249B9; Start 8; Stop 32
ttagaaagctcgatggactattcca

SEQ ID NO: 427213 - DNA, 25 bp, Artificial
  probe
  misc_feature (1)..(25): SEQ ID NO: 5998; WAN0249B9; Start 14; Stop 38
agctcgatggactattccagattca

SEQ ID NO: 427214 - DNA, 25 bp, Artificial
  probe
  misc_feature (1)..(25): SEQ ID NO: 5998; WAN0249B9; Start 9; Stop 33
tagaaagctcgatggactattccag

SEQ ID NO: 427215 - DNA, 25 bp, Artificial
  probe
  misc_feature (1)..(25): SEQ ID NO: 5998; WAN0249B9; Start 12; Stop 36
aaagctcgatggactattccagatt

SEQ ID NO: 427216 - DNA, 25 bp, Artificial
  probe
  misc_feature (1)..(25): SEQ ID NO: 5998; WAN0249B9; Start 11; Stop 35
gaaagctcgatggactattccagat

SEQ ID NO: 427217 - DNA, 25 bp, Artificial
  probe
  misc_feature (1)..(25): SEQ ID NO: 5998; WAN0249B9; Start 10; Stop 34
agaaagctcgatggactattccaga

SEQ ID NO: 427218 - DNA, 25 bp, Artificial
  probe
  misc_feature (1)..(25): SEQ ID NO: 5999; WAN0249AB; Start 119; Stop 143
aaggagtaagaaagaaacgaagaaa

SEQ ID NO: 427219 - DNA, 25 bp, Artificial
  probe
  misc_feature (1)..(25): SEQ ID NO: 5999; WAN0249AB; Start 32; Stop 56
gaataggtacgcagagacaaatagt

SEQ ID NO: 427220 - DNA, 25 bp, Artificial
  probe
  misc_feature (1)..(25): SEQ ID NO: 5999; WAN0249AB; Start 38; Stop 62
gtacgcagagacaaatagtaggaaa

SEQ ID NO: 427221 - DNA, 25 bp, Artificial
  probe
  misc_feature (1)..(25): SEQ ID NO: 5999; WAN0249AB; Start 34; Stop 58
ataggtacgcagagacaaatagtag

SEQ ID NO: 427222 - DNA, 25 bp, Artificial
  probe
  misc_feature (1)..(25): SEQ ID NO: 5999; WAN0249AB; Start 31; Stop 55
ggaataggtacgcagagacaaatag

SEQ ID NO: 427223 - DNA, 25 bp, Artificial
  probe
  misc_feature (1)..(25): SEQ ID NO: 5999; WAN0249AB; Start 114; Stop 138
acaataaggagtaagaaagaaacga

SEQ ID NO: 427224 - DNA, 25 bp, Artificial
  probe
  misc_feature (1)..(25): SEQ ID NO: 5999; WAN0249AB; Start 33; Stop 57
aataggtacgcagagacaaatagta

SEQ ID NO: 427225 - DNA, 25 bp, Artificial
  probe
  misc_feature (1)..(25): SEQ ID NO: 5999; WAN0249AB; Start 30; Stop 54
aggaataggtacgcagagacaaata

SEQ ID NO: 427226 - DNA, 25 bp, Artificial
  probe
  misc_feature (1)..(25): SEQ ID NO: 5999; WAN0249AB; Start 29; Stop 53
taggaataggtacgcagagacaaat

SEQ ID NO: 427227 - DNA, 25 bp, Artificial
  probe
  misc_feature (1)..(25): SEQ ID NO: 5999; WAN0249AB; Start 35; Stop 59
taggtacgcagagacaaatagtagg

SEQ ID NO: 427228 - DNA, 25 bp, Artificial
  probe
  misc_feature (1)..(25): SEQ ID NO: 5999; WAN0249AB; Start 118; Stop 142
taaggagtaagaaagaaacgaagaa

SEQ ID NO: 427229 - DNA, 25 bp, Artificial
  probe
  misc_feature (1)..(25): SEQ ID NO: 5999; WAN0249AB; Start 28; Stop 52
ctaggaataggtacgcagagacaaa

SEQ ID NO: 427230 - DNA, 25 bp, Artificial
  probe
  misc_feature (1)..(25): SEQ ID NO: 5999; WAN0249AB; Start 117; Stop 141
ataaggagtaagaaagaaacgaaga

SEQ ID NO: 427231 - DNA, 25 bp, Artificial
  probe
  misc_feature (1)..(25): SEQ ID NO: 5999; WAN0249AB; Start 37; Stop 61
ggtacgcagagacaaatagtaggaa

SEQ ID NO: 427232 - DNA, 25 bp, Artificial
  probe
  misc_feature (1)..(25): SEQ ID NO: 5999; WAN0249AB; Start 115; Stop 139
caataaggagtaagaaagaaacgaa

SEQ ID NO: 427233 - DNA, 25 bp, Artificial
  probe
  misc_feature (1)..(25): SEQ ID NO: 5999; WAN0249AB; Start 27; Stop 51
gctaggaataggtacgcagagacaa

SEQ ID NO: 427234 - DNA, 25 bp, Artificial
  probe
  misc_feature (1)..(25): SEQ ID NO: 5999; WAN0249AB; Start 64; Stop 88
tatgatataactaagcgttgaaagc

SEQ ID NO: 427235 - DNA, 25 bp, Artificial
  probe
  misc_feature (1)..(25): SEQ ID NO: 5999; WAN0249AB; Start 116; Stop 140
aataaggagtaagaaagaaacgaag

SEQ ID NO: 427236 - DNA, 25 bp, Artificial
  probe
  misc_feature (1)..(25): SEQ ID NO: 5999; WAN0249AB; Start 36; Stop 60
aggtacgcagagacaaatagtagga

SEQ ID NO: 427237 - DNA, 25 bp, Artificial
  probe
  misc_feature (1)..(25): SEQ ID NO: 5999; WAN0249AB; Start 113; Stop 137
tacaataaggagtaagaaagaaacg

SEQ ID NO: 427238 - DNA, 25 bp, Artificial
  probe
  misc_feature (1)..(25): SEQ ID NO: 5999; WAN0249AB; Start 40; Stop 64
acgcagagacaaatagtaggaaaat

SEQ ID NO: 427239 - DNA, 25 bp, Artificial
  probe
  misc_feature (1)..(25): SEQ ID NO: 5999; WAN0249AB; Start 39; Stop 63
tacgcagagacaaatagtaggaaaa

SEQ ID NO: 427240 - DNA, 25 bp, Artificial
  probe
  misc_feature (1)..(25): SEQ ID NO: 5999; WAN0249AB; Start 25; Stop 49
gagctaggaataggtacgcagagac

SEQ ID NO: 427241 - DNA, 25 bp, Artificial
  probe
  misc_feature (1)..(25): SEQ ID NO: 5999; WAN0249AB; Start 78; Stop 102
gcgttgaaagctatctgttaatata

SEQ ID NO: 427242 - DNA, 25 bp, Artificial
  probe
  misc_feature (1)..(25): SEQ ID NO: 5999; WAN0249AB; Start 41; Stop 65
cgcagagacaaatagtaggaaaata

SEQ ID NO: 427243 - DNA, 25 bp, Artificial
  probe
  misc_feature (1)..(25): SEQ ID NO: 5999; WAN0249AB; Start 120; Stop 144
aggagtaagaaagaaacgaagaaaa

SEQ ID NO: 427244 - DNA, 25 bp, Artificial
  probe
  misc_feature (1)..(25): SEQ ID NO: 5999; WAN0249AB; Start 73; Stop 97
actaagcgttgaaagctatctgtta

SEQ ID NO: 427245 - DNA, 25 bp, Artificial
  probe
  misc_feature (1)..(25): SEQ ID NO: 5999; WAN0249AB; Start 71; Stop 95
taactaagcgttgaaagctatctgt

SEQ ID NO: 427246 - DNA, 25 bp, Artificial
  probe
  misc_feature (1)..(25): SEQ ID NO: 5999; WAN0249AB; Start 74; Stop 98
ctaagcgttgaaagctatctgttaa

SEQ ID NO: 427247 - DNA, 25 bp, Artificial
  probe
  misc_feature (1)..(25): SEQ ID NO: 5999; WAN0249AB; Start 70; Stop 94
ataactaagcgttgaaagctatctg

SEQ ID NO: 427248 - DNA, 25 bp, Artificial
  probe
  misc_feature (1)..(25): SEQ ID NO: 5999; WAN0249AB; Start 72; Stop 96
aactaagcgttgaaagctatctgtt

SEQ ID NO: 427249 - DNA, 25 bp, Artificial
  probe
  misc_feature (1)..(25): SEQ ID NO: 5999; WAN0249AB; Start 76; Stop 100
aagcgttgaaagctatctgttaata

SEQ ID NO: 427250 - DNA, 25 bp, Artificial
  probe
  misc_feature (1)..(25): SEQ ID NO: 5999; WAN0249AB; Start 75; Stop 99
taagcgttgaaagctatctgttaat

SEQ ID NO: 427251 - DNA, 25 bp, Artificial
  probe
  misc_feature (1)..(25): SEQ ID NO: 6000; WAN02499S; Start 207; Stop 231
ggataagaatagagatggcttagga

SEQ ID NO: 427252 - DNA, 25 bp, Artificial
  probe
  misc_feature (1)..(25): SEQ ID NO: 6000; WAN02499S; Start 101; Stop 125
ccactacagaaattatagagccaga

SEQ ID NO: 427253 - DNA, 25 bp, Artificial
  probe
  misc_feature (1)..(25): SEQ ID NO: 6000; WAN02499S; Start 100; Stop 124
cccactacagaaattatagagccag

SEQ ID NO: 427254 - DNA, 25 bp, Artificial
  probe
  misc_feature (1)..(25): SEQ ID NO: 6000; WAN02499S; Start 209; Stop 233
ataagaatagagatggcttaggaag

SEQ ID NO: 427255 - DNA, 25 bp, Artificial
  probe
  misc_feature (1)..(25): SEQ ID NO: 6000; WAN02499S; Start 208; Stop 232
gataagaatagagatggcttaggaa

SEQ ID NO: 427256 - DNA, 25 bp, Artificial
  probe
  misc_feature (1)..(25): SEQ ID NO: 6000; WAN02499S; Start 206; Stop 230
gggataagaatagagatggcttagg

SEQ ID NO: 427257 - DNA, 25 bp, Artificial
  probe
  misc_feature (1)..(25): SEQ ID NO: 6000; WAN02499S; Start 102; Stop 126
cactacagaaattatagagccagaa

SEQ ID NO: 427258 - DNA, 25 bp, Artificial
  probe
  misc_feature (1)..(25): SEQ ID NO: 6000; WAN02499S; Start 5; Stop 29
tactttctaatgagttgtttaggcg

SEQ ID NO: 427259 - DNA, 25 bp, Artificial
  probe
  misc_feature (1)..(25): SEQ ID NO: 6000; WAN02499S; Start 240; Stop 264
tttgtgtgtagacagtacgatgaac

SEQ ID NO: 427260 - DNA, 25 bp, Artificial
  probe
  misc_feature (1)..(25): SEQ ID NO: 6000; WAN02499S; Start 144; Stop 168
tagcagaaactagagagcagaagtg

SEQ ID NO: 427261 - DNA, 25 bp, Artificial
  probe
  misc_feature (1)..(25): SEQ ID NO: 6000; WAN02499S; Start 103; Stop 127
actacagaaattatagagccagaaa

SEQ ID NO: 427262 - DNA, 25 bp, Artificial
  probe
  misc_feature (1)..(25): SEQ ID NO: 6000; WAN02499S; Start 136; Stop 160
ttgttcactagcagaaactagagag

SEQ ID NO: 427263 - DNA, 25 bp, Artificial
  probe
  misc_feature (1)..(25): SEQ ID NO: 6000; WAN02499S; Start 135; Stop 159
tttgttcactagcagaaactagaga

SEQ ID NO: 427264 - DNA, 25 bp, Artificial
  probe
  misc_feature (1)..(25): SEQ ID NO: 6000; WAN02499S; Start 143; Stop 167
ctagcagaaactagagagcagaagt

SEQ ID NO: 427265 - DNA, 25 bp, Artificial
  probe
  misc_feature (1)..(25): SEQ ID NO: 6000; WAN02499S; Start 142; Stop 166
actagcagaaactagagagcagaag

SEQ ID NO: 427266 - DNA, 25 bp, Artificial
  probe
  misc_feature (1)..(25): SEQ ID NO: 6000; WAN02499S; Start 147; Stop 171
cagaaactagagagcagaagtgttt

SEQ ID NO: 427267 - DNA, 25 bp, Artificial
  probe
  misc_feature (1)..(25): SEQ ID NO: 6000; WAN02499S; Start 146; Stop 170
gcagaaactagagagcagaagtgtt

SEQ ID NO: 427268 - DNA, 25 bp, Artificial
  probe
  misc_feature (1)..(25): SEQ ID NO: 6000; WAN02499S; Start 202; Stop 226
tatggggataagaatagagatggct

SEQ ID NO: 427269 - DNA, 25 bp, Artificial
  probe
  misc_feature (1)..(25): SEQ ID NO: 6000; WAN02499S; Start 141; Stop 165
cactagcagaaactagagagcagaa

SEQ ID NO: 427270 - DNA, 25 bp, Artificial
  probe
  misc_feature (1)..(25): SEQ ID NO: 6000; WAN02499S; Start 139; Stop 163
ttcactagcagaaactagagagcag

SEQ ID NO: 427271 - DNA, 25 bp, Artificial
  probe
  misc_feature (1)..(25): SEQ ID NO: 6000; WAN02499S; Start 191; Stop 215
aaactgggaaatatggggataagaa

SEQ ID NO: 427272 - DNA, 25 bp, Artificial
  probe
  misc_feature (1)..(25): SEQ ID NO: 6000; WAN02499S; Start 190; Stop 214
aaaactgggaaatatggggataaga

SEQ ID NO: 427273 - DNA, 25 bp, Artificial
  probe
  misc_feature (1)..(25): SEQ ID NO: 6000; WAN02499S; Start 189; Stop 213
caaaactgggaaatatggggataag

SEQ ID NO: 427274 - DNA, 25 bp, Artificial
  probe
  misc_feature (1)..(25): SEQ ID NO: 6000; WAN02499S; Start 192; Stop 216
aactgggaaatatggggataagaat

SEQ ID NO: 427275 - DNA, 25 bp, Artificial
  probe
  misc_feature (1)..(25): SEQ ID NO: 6000; WAN02499S; Start 201; Stop 225
atatggggataagaatagagatggc

SEQ ID NO: 427276 - DNA, 25 bp, Artificial
  probe
  misc_feature (1)..(25): SEQ ID NO: 6000; WAN02499S; Start 138; Stop 162
gttcactagcagaaactagagagca

SEQ ID NO: 427277 - DNA, 25 bp, Artificial
  probe
  misc_feature (1)..(25): SEQ ID NO: 6000; WAN02499S; Start 137; Stop 161
tgttcactagcagaaactagagagc

SEQ ID NO: 427278 - DNA, 25 bp, Artificial
  probe
  misc_feature (1)..(25): SEQ ID NO: 6000; WAN02499S; Start 77; Stop 101
tataatctccacagtgggatttacc

SEQ ID NO: 427279 - DNA, 25 bp, Artificial
  probe
  misc_feature (1)..(25): SEQ ID NO: 6000; WAN02499S; Start 203; Stop 227
atggggataagaatagagatggctt

SEQ ID NO: 427280 - DNA, 25 bp, Artificial
  probe
  misc_feature (1)..(25): SEQ ID NO: 6000; WAN02499S; Start 75; Stop 99
cctataatctccacagtgggattta

SEQ ID NO: 427281 - DNA, 25 bp, Artificial
  probe
  misc_feature (1)..(25): SEQ ID NO: 6000; WAN02499S; Start 4; Stop 28
atactttctaatgagttgtttaggc

SEQ ID NO: 427282 - DNA, 25 bp, Artificial
  probe
  misc_feature (1)..(25): SEQ ID NO: 6000; WAN02499S; Start 193; Stop 217
actgggaaatatggggataagaata

SEQ ID NO: 427283 - DNA, 25 bp, Artificial
  probe
  misc_feature (1)..(25): SEQ ID NO: 6000; WAN02499S; Start 195; Stop 219
tgggaaatatggggataagaataga

SEQ ID NO: 427284 - DNA, 25 bp, Artificial
  probe
  misc_feature (1)..(25): SEQ ID NO: 6001; WAN02495Q; Start 8; Stop 32
gtggagttaattacactagaaatct

SEQ ID NO: 427285 - DNA, 25 bp, Artificial
  probe
  misc_feature (1)..(25): SEQ ID NO: 6001; WAN02495Q; Start 9; Stop 33
tggagttaattacactagaaatctt

SEQ ID NO: 427286 - DNA, 25 bp, Artificial
  probe
  misc_feature (1)..(25): SEQ ID NO: 6001; WAN02495Q; Start 10; Stop 34
ggagttaattacactagaaatcttc

SEQ ID NO: 427287 - DNA, 25 bp, Artificial
  probe
  misc_feature (1)..(25): SEQ ID NO: 6001; WAN02495Q; Start 7; Stop 31
agtggagttaattacactagaaatc

SEQ ID NO: 427288 - DNA, 25 bp, Artificial
  probe
  misc_feature (1)..(25): SEQ ID NO: 6002; WAN0249CA; Start 4; Stop 28
gaaagaatagactaaaaccgctcag

SEQ ID NO: 427289 - DNA, 25 bp, Artificial
  probe
  misc_feature (1)..(25): SEQ ID NO: 6002; WAN0249CA; Start 1; Stop 25
aaggaaagaatagactaaaaccgct

SEQ ID NO: 427290 - DNA, 25 bp, Artificial
  probe
  misc_feature (1)..(25): SEQ ID NO: 6002; WAN0249CA; Start 2; Stop 26
aggaaagaatagactaaaaccgctc

SEQ ID NO: 427291 - DNA, 25 bp, Artificial
  probe
  misc_feature (1)..(25): SEQ ID NO: 6002; WAN0249CA; Start 3; Stop 27
ggaaagaatagactaaaaccgctca

SEQ ID NO: 427292 - DNA, 25 bp, Artificial
  probe
  misc_feature (1)..(25): SEQ ID NO: 6002; WAN0249CA; Start 5; Stop 29
aaagaatagactaaaaccgctcagc

SEQ ID NO: 427293 - DNA, 25 bp, Artificial
  probe
  misc_feature (1)..(25): SEQ ID NO: 6002; WAN0249CA; Start 6; Stop 30
aagaatagactaaaaccgctcagct

SEQ ID NO: 427294 - DNA, 25 bp, Artificial
  probe
  misc_feature (1)..(25): SEQ ID NO: 6003; WAN02496A; Start 278; Stop 302
tgttgttctgttatgaaacgaaaga

SEQ ID NO: 427295 - DNA, 25 bp, Artificial
  probe
  misc_feature (1)..(25): SEQ ID NO: 6003; WAN02496A; Start 277; Stop 301
ttgttgttctgttatgaaacgaaag

SEQ ID NO: 427296 - DNA, 25 bp, Artificial
  probe
  misc_feature (1)..(25): SEQ ID NO: 6003; WAN02496A; Start 276; Stop 300
tttgttgttctgttatgaaacgaaa

SEQ ID NO: 427297 - DNA, 25 bp, Artificial
  probe
  misc_feature (1)..(25): SEQ ID NO: 6003; WAN02496A; Start 285; Stop 309
ctgttatgaaacgaaagaaattgga

SEQ ID NO: 427298 - DNA, 25 bp, Artificial
  probe
  misc_feature (1)..(25): SEQ ID NO: 6003; WAN02496A; Start 284; Stop 308
tctgttatgaaacgaaagaaattgg

SEQ ID NO: 427299 - DNA, 25 bp, Artificial
  probe
  misc_feature (1)..(25): SEQ ID NO: 6003; WAN02496A; Start 291; Stop 315
tgaaacgaaagaaattggaaactag

SEQ ID NO: 427300 - DNA, 25 bp, Artificial
  probe
  misc_feature (1)..(25): SEQ ID NO: 6003; WAN02496A; Start 290; Stop 314
atgaaacgaaagaaattggaaacta

SEQ ID NO: 427301 - DNA, 25 bp, Artificial
  probe
  misc_feature (1)..(25): SEQ ID NO: 6003; WAN02496A; Start 289; Stop 313
tatgaaacgaaagaaattggaaact

SEQ ID NO: 427302 - DNA, 25 bp, Artificial
  probe
  misc_feature (1)..(25): SEQ ID NO: 6003; WAN02496A; Start 286; Stop 310
tgttatgaaacgaaagaaattggaa

SEQ ID NO: 427303 - DNA, 25 bp, Artificial
  probe
  misc_feature (1)..(25): SEQ ID NO: 6003; WAN02496A; Start 288; Stop 312
ttatgaaacgaaagaaattggaaac

SEQ ID NO: 427304 - DNA, 25 bp, Artificial
  probe
  misc_feature (1)..(25): SEQ ID NO: 6003; WAN02496A; Start 287; Stop 311
gttatgaaacgaaagaaattggaaa

SEQ ID NO: 427305 - DNA, 25 bp, Artificial
  probe
  misc_feature (1)..(25): SEQ ID NO: 6003; WAN02496A; Start 274; Stop 298
tgtttgttgttctgttatgaaacga

SEQ ID NO: 427306 - DNA, 25 bp, Artificial
  probe
  misc_feature (1)..(25): SEQ ID NO: 6003; WAN02496A; Start 273; Stop 297
atgtttgttgttctgttatgaaacg

SEQ ID NO: 427307 - DNA, 25 bp, Artificial
  probe
  misc_feature (1)..(25): SEQ ID NO: 6003; WAN02496A; Start 275; Stop 299
gtttgttgttctgttatgaaacgaa

SEQ ID NO: 427308 - DNA, 25 bp, Artificial
  probe
  misc_feature (1)..(25): SEQ ID NO: 6003; WAN02496A; Start 279; Stop 303
gttgttctgttatgaaacgaaagaa

SEQ ID NO: 427309 - DNA, 25 bp, Artificial
  probe
  misc_feature (1)..(25): SEQ ID NO: 6003; WAN02496A; Start 280; Stop 304
ttgttctgttatgaaacgaaagaaa

SEQ ID NO: 427310 - DNA, 25 bp, Artificial
  probe
  misc_feature (1)..(25): SEQ ID NO: 6003; WAN02496A; Start 281; Stop 305
tgttctgttatgaaacgaaagaaat

SEQ ID NO: 427311 - DNA, 25 bp, Artificial
  probe
  misc_feature (1)..(25): SEQ ID NO: 6003; WAN02496A; Start 292; Stop 316
gaaacgaaagaaattggaaactagt

SEQ ID NO: 427312 - DNA, 25 bp, Artificial
  probe
  misc_feature (1)..(25): SEQ ID NO: 6003; WAN02496A; Start 271; Stop 295
ttatgtttgttgttctgttatgaaa

SEQ ID NO: 427313 - DNA, 25 bp, Artificial
  probe
  misc_feature (1)..(25): SEQ ID NO: 6003; WAN02496A; Start 270; Stop 294
tttatgtttgttgttctgttatgaa

SEQ ID NO: 427314 - DNA, 25 bp, Artificial
  probe
  misc_feature (1)..(25): SEQ ID NO: 6003; WAN02496A; Start 283; Stop 307
ttctgttatgaaacgaaagaaattg

SEQ ID NO: 427315 - DNA, 25 bp, Artificial
  probe
  misc_feature (1)..(25): SEQ ID NO: 6003; WAN02496A; Start 282; Stop 306
gttctgttatgaaacgaaagaaatt

SEQ ID NO: 427316 - DNA, 25 bp, Artificial
  probe
  misc_feature (1)..(25): SEQ ID NO: 6003; WAN02496A; Start 2; Stop 26
ataggtgacctgatttatctcataa

SEQ ID NO: 427317 - DNA, 25 bp, Artificial
  probe
  misc_feature (1)..(25): SEQ ID NO: 6003; WAN02496A; Start 1; Stop 25
aataggtgacctgatttatctcata

SEQ ID NO: 427318 - DNA, 25 bp, Artificial
  probe
  misc_feature (1)..(25): SEQ ID NO: 6003; WAN02496A; Start 272; Stop 296
tatgtttgttgttctgttatgaaac

SEQ ID NO: 427319 - DNA, 25 bp, Artificial
  probe
  misc_feature (1)..(25): SEQ ID NO: 6003; WAN02496A; Start 3; Stop 27
taggtgacctgatttatctcataaa

SEQ ID NO: 427320 - DNA, 25 bp, Artificial
  probe
  misc_feature (1)..(25): SEQ ID NO: 6003; WAN02496A; Start 374; Stop 398
cgtttacttcaactaaggagctcat

SEQ ID NO: 427321 - DNA, 25 bp, Artificial
  probe
  misc_feature (1)..(25): SEQ ID NO: 6003; WAN02496A; Start 372; Stop 396
aacgtttacttcaactaaggagctc

SEQ ID NO: 427322 - DNA, 25 bp, Artificial
  probe
  misc_feature (1)..(25): SEQ ID NO: 6003; WAN02496A; Start 269; Stop 293
ttttatgtttgttgttctgttatga

SEQ ID NO: 427323 - DNA, 25 bp, Artificial
  probe
  misc_feature (1)..(25): SEQ ID NO: 6003; WAN02496A; Start 145; Stop 169
tccgaaaagaaataataaaaccaaa

SEQ ID NO: 427324 - DNA, 25 bp, Artificial
  probe
  misc_feature (1)..(25): SEQ ID NO: 6003; WAN02496A; Start 144; Stop 168
ttccgaaaagaaataataaaaccaa

SEQ ID NO: 427325 - DNA, 25 bp, Artificial
  probe
  misc_feature (1)..(25): SEQ ID NO: 6003; WAN02496A; Start 373; Stop 397
acgtttacttcaactaaggagctca

SEQ ID NO: 427326 - DNA, 25 bp, Artificial
  probe
  misc_feature (1)..(25): SEQ ID NO: 6003; WAN02496A; Start 4; Stop 28
aggtgacctgatttatctcataaat

SEQ ID NO: 427327 - DNA, 25 bp, Artificial
  probe
  misc_feature (1)..(25): SEQ ID NO: 6004; WAN024999; Start 130; Stop 154
agagttgatttggtttacatccgta

SEQ ID NO: 427328 - DNA, 25 bp, Artificial
  probe
  misc_feature (1)..(25): SEQ ID NO: 6004; WAN024999; Start 129; Stop 153
tagagttgatttggtttacatccgt

SEQ ID NO: 427329 - DNA, 25 bp, Artificial
  probe
  misc_feature (1)..(25): SEQ ID NO: 6004; WAN024999; Start 128; Stop 152
ttagagttgatttggtttacatccg

SEQ ID NO: 427330 - DNA, 25 bp, Artificial
  probe
  misc_feature (1)..(25): SEQ ID NO: 6004; WAN024999; Start 133; Stop 157
gttgatttggtttacatccgtactt

SEQ ID NO: 427331 - DNA, 25 bp, Artificial
  probe
  misc_feature (1)..(25): SEQ ID NO: 6004; WAN024999; Start 131; Stop 155
gagttgatttggtttacatccgtac

SEQ ID NO: 427332 - DNA, 25 bp, Artificial
  probe
  misc_feature (1)..(25): SEQ ID NO: 6004; WAN024999; Start 127; Stop 151
gttagagttgatttggtttacatcc

SEQ ID NO: 427333 - DNA, 25 bp, Artificial
  probe
  misc_feature (1)..(25): SEQ ID NO: 6004; WAN024999; Start 132; Stop 156
agttgatttggtttacatccgtact

SEQ ID NO: 427334 - DNA, 25 bp, Artificial
  probe
  misc_feature (1)..(25): SEQ ID NO: 6004; WAN024999; Start 135; Stop 159
tgatttggtttacatccgtacttaa

SEQ ID NO: 427335 - DNA, 25 bp, Artificial
  probe
  misc_feature (1)..(25): SEQ ID NO: 6004; WAN024999; Start 134; Stop 158
ttgatttggtttacatccgtactta

SEQ ID NO: 427336 - DNA, 25 bp, Artificial
  probe
  misc_feature (1)..(25): SEQ ID NO: 6004; WAN024999; Start 140; Stop 164
tggtttacatccgtacttaaattga

SEQ ID NO: 427337 - DNA, 25 bp, Artificial
  probe
  misc_feature (1)..(25): SEQ ID NO: 6004; WAN024999; Start 139; Stop 163
ttggtttacatccgtacttaaattg

SEQ ID NO: 427338 - DNA, 25 bp, Artificial
  probe
  misc_feature (1)..(25): SEQ ID NO: 6004; WAN024999; Start 273; Stop 297
gtagctctttaatggaggtgtttga

SEQ ID NO: 427339 - DNA, 25 bp, Artificial
  probe
  misc_feature (1)..(25): SEQ ID NO: 6004; WAN024999; Start 250; Stop 274
agcctttacatggtataatagaggt

SEQ ID NO: 427340 - DNA, 25 bp, Artificial
  probe
  misc_feature (1)..(25): SEQ ID NO: 6004; WAN024999; Start 255; Stop 279
ttacatggtataatagaggtagctc

SEQ ID NO: 427341 - DNA, 25 bp, Artificial
  probe
  misc_feature (1)..(25): SEQ ID NO: 6004; WAN024999; Start 136; Stop 160
gatttggtttacatccgtacttaaa

SEQ ID NO: 427342 - DNA, 25 bp, Artificial
  probe
  misc_feature (1)..(25): SEQ ID NO: 6004; WAN024999; Start 126; Stop 150
tgttagagttgatttggtttacatc

SEQ ID NO: 427343 - DNA, 25 bp, Artificial
  probe
  misc_feature (1)..(25): SEQ ID NO: 6004; WAN024999; Start 141; Stop 165
ggtttacatccgtacttaaattgat

SEQ ID NO: 427344 - DNA, 25 bp, Artificial
  probe
  misc_feature (1)..(25): SEQ ID NO: 6004; WAN024999; Start 272; Stop 296
ggtagctctttaatggaggtgtttg

SEQ ID NO: 427345 - DNA, 25 bp, Artificial
  probe
  misc_feature (1)..(25): SEQ ID NO: 6004; WAN024999; Start 271; Stop 295
aggtagctctttaatggaggtgttt

SEQ ID NO: 427346 - DNA, 25 bp, Artificial
  probe
  misc_feature (1)..(25): SEQ ID NO: 6004; WAN024999; Start 124; Stop 148
tttgttagagttgatttggtttaca

SEQ ID NO: 427347 - DNA, 25 bp, Artificial
  probe
  misc_feature (1)..(25): SEQ ID NO: 6004; WAN024999; Start 146; Stop 170
acatccgtacttaaattgatttgtt

SEQ ID NO: 427348 - DNA, 25 bp, Artificial
  probe
  misc_feature (1)..(25): SEQ ID NO: 6004; WAN024999; Start 138; Stop 162
tttggtttacatccgtacttaaatt

SEQ ID NO: 427349 - DNA, 25 bp, Artificial
  probe
  misc_feature (1)..(25): SEQ ID NO: 6004; WAN024999; Start 249; Stop 273
aagcctttacatggtataatagagg

SEQ ID NO: 427350 - DNA, 25 bp, Artificial
  probe
  misc_feature (1)..(25): SEQ ID NO: 6004; WAN024999; Start 125; Stop 149
ttgttagagttgatttggtttacat

SEQ ID NO: 427351 - DNA, 25 bp, Artificial
  probe
  misc_feature (1)..(25): SEQ ID NO: 6004; WAN024999; Start 270; Stop 294
gaggtagctctttaatggaggtgtt

SEQ ID NO: 427352 - DNA, 25 bp, Artificial
  probe
  misc_feature (1)..(25): SEQ ID NO: 6004; WAN024999; Start 151; Stop 175
cgtacttaaattgatttgttagagc

SEQ ID NO: 427353 - DNA, 25 bp, Artificial
  probe
  misc_feature (1)..(25): SEQ ID NO: 6004; WAN024999; Start 77; Stop 101
tgctaagaaactaaatttgttcgtt

SEQ ID NO: 427354 - DNA, 25 bp, Artificial
  probe
  misc_feature (1)..(25): SEQ ID NO: 6004; WAN024999; Start 76; Stop 100
ttgctaagaaactaaatttgttcgt

SEQ ID NO: 427355 - DNA, 25 bp, Artificial
  probe
  misc_feature (1)..(25): SEQ ID NO: 6004; WAN024999; Start 196; Stop 220
tcaatttcaaggataaataagcagt

SEQ ID NO: 427356 - DNA, 25 bp, Artificial
  probe
  misc_feature (1)..(25): SEQ ID NO: 6004; WAN024999; Start 257; Stop 281
acatggtataatagaggtagctctt

SEQ ID NO: 427357 - DNA, 25 bp, Artificial
  probe
  misc_feature (1)..(25): SEQ ID NO: 6004; WAN024999; Start 75; Stop 99
cttgctaagaaactaaatttgttcg

SEQ ID NO: 427358 - DNA, 25 bp, Artificial
  probe
  misc_feature (1)..(25): SEQ ID NO: 6004; WAN024999; Start 251; Stop 275
gcctttacatggtataatagaggta

SEQ ID NO: 427359 - DNA, 25 bp, Artificial
  probe
  misc_feature (1)..(25): SEQ ID NO: 6004; WAN024999; Start 137; Stop 161
atttggtttacatccgtacttaaat

SEQ ID NO: 427360 - DNA, 25 bp, Artificial
  probe
  misc_feature (1)..(25): SEQ ID NO: 6005; WAN0249AX; Start 40; Stop 64
ttaggagtgtagagatgctggttta

SEQ ID NO: 427361 - DNA, 25 bp, Artificial
  probe
  misc_feature (1)..(25): SEQ ID NO: 6005; WAN0249AX; Start 39; Stop 63
tttaggagtgtagagatgctggttt

SEQ ID NO: 427362 - DNA, 25 bp, Artificial
  probe
  misc_feature (1)..(25): SEQ ID NO: 6005; WAN0249AX; Start 38; Stop 62
ttttaggagtgtagagatgctggtt

SEQ ID NO: 427363 - DNA, 25 bp, Artificial
  probe
  misc_feature (1)..(25): SEQ ID NO: 6005; WAN0249AX; Start 37; Stop 61
cttttaggagtgtagagatgctggt

SEQ ID NO: 427364 - DNA, 25 bp, Artificial
  probe
  misc_feature (1)..(25): SEQ ID NO: 6005; WAN0249AX; Start 36; Stop 60
tcttttaggagtgtagagatgctgg

SEQ ID NO: 427365 - DNA, 25 bp, Artificial
  probe
  misc_feature (1)..(25): SEQ ID NO: 6005; WAN0249AX; Start 35; Stop 59
atcttttaggagtgtagagatgctg

SEQ ID NO: 427366 - DNA, 25 bp, Artificial
  probe
  misc_feature (1)..(25): SEQ ID NO: 6005; WAN0249AX; Start 34; Stop 58
aatcttttaggagtgtagagatgct

SEQ ID NO: 427367 - DNA, 25 bp, Artificial
  probe
  misc_feature (1)..(25): SEQ ID NO: 6005; WAN0249AX; Start 33; Stop 57
taatcttttaggagtgtagagatgc

SEQ ID NO: 427368 - DNA, 25 bp, Artificial
  probe
  misc_feature (1)..(25): SEQ ID NO: 6005; WAN0249AX; Start 25; Stop 49
aagtttgataatcttttaggagtgt

SEQ ID NO: 427369 - DNA, 25 bp, Artificial
  probe
  misc_feature (1)..(25): SEQ ID NO: 6005; WAN0249AX; Start 30; Stop 54
tgataatcttttaggagtgtagaga

SEQ ID NO: 427370 - DNA, 25 bp, Artificial
  probe
  misc_feature (1)..(25): SEQ ID NO: 6005; WAN0249AX; Start 29; Stop 53
ttgataatcttttaggagtgtagag

SEQ ID NO: 427371 - DNA, 25 bp, Artificial
  probe
  misc_feature (1)..(25): SEQ ID NO: 6005; WAN0249AX; Start 26; Stop 50
agtttgataatcttttaggagtgta

SEQ ID NO: 427372 - DNA, 25 bp, Artificial
  probe
  misc_feature (1)..(25): SEQ ID NO: 6005; WAN0249AX; Start 27; Stop 51
gtttgataatcttttaggagtgtag

SEQ ID NO: 427373 - DNA, 25 bp, Artificial
  probe
  misc_feature (1)..(25): SEQ ID NO: 6005; WAN0249AX; Start 28; Stop 52
tttgataatcttttaggagtgtaga

SEQ ID NO: 427374 - DNA, 25 bp, Artificial
  probe
  misc_feature (1)..(25): SEQ ID NO: 6005; WAN0249AX; Start 32; Stop 56
ataatcttttaggagtgtagagatg

SEQ ID NO: 427375 - DNA, 25 bp, Artificial
  probe
  misc_feature (1)..(25): SEQ ID NO: 6005; WAN0249AX; Start 31; Stop 55
gataatcttttaggagtgtagagat

SEQ ID NO: 427376 - DNA, 25 bp, Artificial
  probe
  misc_feature (1)..(25): SEQ ID NO: 6006; WAN0249BW; Start 96; Stop 120
aattagtcgtgcaggataggatacc

SEQ ID NO: 427377 - DNA, 25 bp, Artificial
  probe
  misc_feature (1)..(25): SEQ ID NO: 6006; WAN0249BW; Start 106; Stop 130
gcaggataggatacccttcataaac

SEQ ID NO: 427378 - DNA, 25 bp, Artificial
  probe
  misc_feature (1)..(25): SEQ ID NO: 6006; WAN0249BW; Start 25; Stop 49
acaaacatactatcgttaaatgctg

SEQ ID NO: 427379 - DNA, 25 bp, Artificial
  probe
  misc_feature (1)..(25): SEQ ID NO: 6006; WAN0249BW; Start 23; Stop 47
tgacaaacatactatcgttaaatgc

SEQ ID NO: 427380 - DNA, 25 bp, Artificial
  probe
  misc_feature (1)..(25): SEQ ID NO: 6006; WAN0249BW; Start 107; Stop 131
caggataggatacccttcataaact

SEQ ID NO: 427381 - DNA, 25 bp, Artificial
  probe
  misc_feature (1)..(25): SEQ ID NO: 6006; WAN0249BW; Start 26; Stop 50
caaacatactatcgttaaatgctga

SEQ ID NO: 427382 - DNA, 25 bp, Artificial
  probe
  misc_feature (1)..(25): SEQ ID NO: 6006; WAN0249BW; Start 24; Stop 48
gacaaacatactatcgttaaatgct

SEQ ID NO: 427383 - DNA, 25 bp, Artificial
  probe
  misc_feature (1)..(25): SEQ ID NO: 6006; WAN0249BW; Start 108; Stop 132
aggataggatacccttcataaactt

SEQ ID NO: 427384 - DNA, 25 bp, Artificial
  probe
  misc_feature (1)..(25): SEQ ID NO: 6006; WAN0249BW; Start 95; Stop 119
aaattagtcgtgcaggataggatac

SEQ ID NO: 427385 - DNA, 25 bp, Artificial
  probe
  misc_feature (1)..(25): SEQ ID NO: 6006; WAN0249BW; Start 28; Stop 52
aacatactatcgttaaatgctgatt

SEQ ID NO: 427386 - DNA, 25 bp, Artificial
  probe
  misc_feature (1)..(25): SEQ ID NO: 6006; WAN0249BW; Start 27; Stop 51
aaacatactatcgttaaatgctgat

SEQ ID NO: 427387 - DNA, 25 bp, Artificial
  probe
  misc_feature (1)..(25): SEQ ID NO: 6006; WAN0249BW; Start 105; Stop 129
tgcaggataggatacccttcataaa

SEQ ID NO: 427388 - DNA, 25 bp, Artificial
  probe
  misc_feature (1)..(25): SEQ ID NO: 6006; WAN0249BW; Start 29; Stop 53
acatactatcgttaaatgctgattt

SEQ ID NO: 427389 - DNA, 25 bp, Artificial
  probe
  misc_feature (1)..(25): SEQ ID NO: 6006; WAN0249BW; Start 109; Stop 133
ggataggatacccttcataaactta

SEQ ID NO: 427390 - DNA, 25 bp, Artificial
  probe
  misc_feature (1)..(25): SEQ ID NO: 6006; WAN0249BW; Start 104; Stop 128
gtgcaggataggatacccttcataa

SEQ ID NO: 427391 - DNA, 25 bp, Artificial
  probe
  misc_feature (1)..(25): SEQ ID NO: 6006; WAN0249BW; Start 97; Stop 121
attagtcgtgcaggataggataccc

SEQ ID NO: 427392 - DNA, 25 bp, Artificial
  probe
  misc_feature (1)..(25): SEQ ID NO: 6006; WAN0249BW; Start 94; Stop 118
aaaattagtcgtgcaggataggata

SEQ ID NO: 427393 - DNA, 25 bp, Artificial
  probe
  misc_feature (1)..(25): SEQ ID NO: 6006; WAN0249BW; Start 22; Stop 46
atgacaaacatactatcgttaaatg

SEQ ID NO: 427394 - DNA, 25 bp, Artificial
  probe
  misc_feature (1)..(25): SEQ ID NO: 6006; WAN0249BW; Start 93; Stop 117
caaaattagtcgtgcaggataggat

SEQ ID NO: 427395 - DNA, 25 bp, Artificial
  probe
  misc_feature (1)..(25): SEQ ID NO: 6006; WAN0249BW; Start 89; Stop 113
aactcaaaattagtcgtgcaggata

SEQ ID NO: 427396 - DNA, 25 bp, Artificial
  probe
  misc_feature (1)..(25): SEQ ID NO: 6006; WAN0249BW; Start 91; Stop 115
ctcaaaattagtcgtgcaggatagg

SEQ ID NO: 427397 - DNA, 25 bp, Artificial
  probe
  misc_feature (1)..(25): SEQ ID NO: 6006; WAN0249BW; Start 90; Stop 114
actcaaaattagtcgtgcaggatag

SEQ ID NO: 427398 - DNA, 25 bp, Artificial
  probe
  misc_feature (1)..(25): SEQ ID NO: 6006; WAN0249BW; Start 103; Stop 127
cgtgcaggataggatacccttcata

SEQ ID NO: 427399 - DNA, 25 bp, Artificial
  probe
  misc_feature (1)..(25): SEQ ID NO: 6006; WAN0249BW; Start 92; Stop 116
tcaaaattagtcgtgcaggatagga

SEQ ID NO: 427400 - DNA, 25 bp, Artificial
  probe
  misc_feature (1)..(25): SEQ ID NO: 6006; WAN0249BW; Start 88; Stop 112
gaactcaaaattagtcgtgcaggat

SEQ ID NO: 427401 - DNA, 25 bp, Artificial
  probe
  misc_feature (1)..(25): SEQ ID NO: 6006; WAN0249BW; Start 45; Stop 69
tgctgatttaatcgaaattttgagt

SEQ ID NO: 427402 - DNA, 25 bp, Artificial
  probe
  misc_feature (1)..(25): SEQ ID NO: 6006; WAN0249BW; Start 110; Stop 134
gataggatacccttcataaacttat

SEQ ID NO: 427403 - DNA, 25 bp, Artificial
  probe
  misc_feature (1)..(25): SEQ ID NO: 6006; WAN0249BW; Start 99; Stop 123
tagtcgtgcaggataggataccctt

SEQ ID NO: 427404 - DNA, 25 bp, Artificial
  probe
  misc_feature (1)..(25): SEQ ID NO: 6006; WAN0249BW; Start 98; Stop 122
ttagtcgtgcaggataggataccct

SEQ ID NO: 427405 - DNA, 25 bp, Artificial
  probe
  misc_feature (1)..(25): SEQ ID NO: 6006; WAN0249BW; Start 46; Stop 70
gctgatttaatcgaaattttgagtt

SEQ ID NO: 427406 - DNA, 25 bp, Artificial
  probe
  misc_feature (1)..(25): SEQ ID NO: 6006; WAN0249BW; Start 44; Stop 68
atgctgatttaatcgaaattttgag

SEQ ID NO: 427407 - DNA, 25 bp, Artificial
  probe
  misc_feature (1)..(25): SEQ ID NO: 6006; WAN0249BW; Start 30; Stop 54
catactatcgttaaatgctgattta

SEQ ID NO: 427408 - DNA, 25 bp, Artificial
  probe
  misc_feature (1)..(25): SEQ ID NO: 6006; WAN0249BW; Start 37; Stop 61
tcgttaaatgctgatttaatcgaaa

SEQ ID NO: 427409 - DNA, 25 bp, Artificial
  probe
  misc_feature (1)..(25): SEQ ID NO: 6007; WAN02498I; Start 263; Stop 287
atttgctctatgctttctggaattt

SEQ ID NO: 427410 - DNA, 25 bp, Artificial
  probe
  misc_feature (1)..(25): SEQ ID NO: 6007; WAN02498I; Start 267; Stop 291
gctctatgctttctggaatttatca

SEQ ID NO: 427411 - DNA, 25 bp, Artificial
  probe
  misc_feature (1)..(25): SEQ ID NO: 6007; WAN02498I; Start 266; Stop 290
tgctctatgctttctggaatttatc

SEQ ID NO: 427412 - DNA, 25 bp, Artificial
  probe
  misc_feature (1)..(25): SEQ ID NO: 6007; WAN02498I; Start 261; Stop 285
gaatttgctctatgctttctggaat

SEQ ID NO: 427413 - DNA, 25 bp, Artificial
  probe
  misc_feature (1)..(25): SEQ ID NO: 6007; WAN02498I; Start 264; Stop 288
tttgctctatgctttctggaattta

SEQ ID NO: 427414 - DNA, 25 bp, Artificial
  probe
  misc_feature (1)..(25): SEQ ID NO: 6007; WAN02498I; Start 242; Stop 266
atttagtcagacgaaccacgaattt

SEQ ID NO: 427415 - DNA, 25 bp, Artificial
  probe
  misc_feature (1)..(25): SEQ ID NO: 6007; WAN02498I; Start 220; Stop 244
gaaggtggtgttcagataagaaatt

SEQ ID NO: 427416 - DNA, 25 bp, Artificial
  probe
  misc_feature (1)..(25): SEQ ID NO: 6007; WAN02498I; Start 265; Stop 289
ttgctctatgctttctggaatttat

SEQ ID NO: 427417 - DNA, 25 bp, Artificial
  probe
  misc_feature (1)..(25): SEQ ID NO: 6007; WAN02498I; Start 15; Stop 39
cagtaatataagcacctctggcgaa

SEQ ID NO: 427418 - DNA, 25 bp, Artificial
  probe
  misc_feature (1)..(25): SEQ ID NO: 6007; WAN02498I; Start 8; Stop 32
aacttcccagtaatataagcacctc

SEQ ID NO: 427419 - DNA, 25 bp, Artificial
  probe
  misc_feature (1)..(25): SEQ ID NO: 6007; WAN02498I; Start 7; Stop 31
caacttcccagtaatataagcacct

SEQ ID NO: 427420 - DNA, 25 bp, Artificial
  probe
  misc_feature (1)..(25): SEQ ID NO: 6007; WAN02498I; Start 6; Stop 30
tcaacttcccagtaatataagcacc

SEQ ID NO: 427421 - DNA, 25 bp, Artificial
  probe
  misc_feature (1)..(25): SEQ ID NO: 6007; WAN02498I; Start 17; Stop 41
gtaatataagcacctctggcgaaag

SEQ ID NO: 427422 - DNA, 25 bp, Artificial
  probe
  misc_feature (1)..(25): SEQ ID NO: 6007; WAN02498I; Start 9; Stop 33
acttcccagtaatataagcacctct

SEQ ID NO: 427423 - DNA, 25 bp, Artificial
  probe
  misc_feature (1)..(25): SEQ ID NO: 6007; WAN02498I; Start 16; Stop 40
agtaatataagcacctctggcgaaa

SEQ ID NO: 427424 - DNA, 25 bp, Artificial
  probe
  misc_feature (1)..(25): SEQ ID NO: 6007; WAN02498I; Start 262; Stop 286
aatttgctctatgctttctggaatt

SEQ ID NO: 427425 - DNA, 25 bp, Artificial
  probe
  misc_feature (1)..(25): SEQ ID NO: 6007; WAN02498I; Start 5; Stop 29
ttcaacttcccagtaatataagcac

SEQ ID NO: 427426 - DNA, 25 bp, Artificial
  probe
  misc_feature (1)..(25): SEQ ID NO: 6007; WAN02498I; Start 18; Stop 42
taatataagcacctctggcgaaaga

SEQ ID NO: 427427 - DNA, 25 bp, Artificial
  probe
  misc_feature (1)..(25): SEQ ID NO: 6007; WAN02498I; Start 243; Stop 267
tttagtcagacgaaccacgaatttg

SEQ ID NO: 427428 - DNA, 25 bp, Artificial
  probe
  misc_feature (1)..(25): SEQ ID NO: 6007; WAN02498I; Start 4; Stop 28
cttcaacttcccagtaatataagca

SEQ ID NO: 427429 - DNA, 25 bp, Artificial
  probe
  misc_feature (1)..(25): SEQ ID NO: 6007; WAN02498I; Start 10; Stop 34
cttcccagtaatataagcacctctg

SEQ ID NO: 427430 - DNA, 25 bp, Artificial
  probe
  misc_feature (1)..(25): SEQ ID NO: 6007; WAN02498I; Start 241; Stop 265
aatttagtcagacgaaccacgaatt

SEQ ID NO: 427431 - DNA, 25 bp, Artificial
  probe
  misc_feature (1)..(25): SEQ ID NO: 6007; WAN02498I; Start 3; Stop 27
tcttcaacttcccagtaatataagc

SEQ ID NO: 427432 - DNA, 25 bp, Artificial
  probe
  misc_feature (1)..(25): SEQ ID NO: 6007; WAN02498I; Start 260; Stop 284
cgaatttgctctatgctttctggaa

SEQ ID NO: 427433 - DNA, 25 bp, Artificial
  probe
  misc_feature (1)..(25): SEQ ID NO: 6007; WAN02498I; Start 278; Stop 302
tctggaatttatcataacaggagga

SEQ ID NO: 427434 - DNA, 25 bp, Artificial
  probe
  misc_feature (1)..(25): SEQ ID NO: 6007; WAN02498I; Start 254; Stop 278
gaaccacgaatttgctctatgcttt

SEQ ID NO: 427435 - DNA, 25 bp, Artificial
  probe
  misc_feature (1)..(25): SEQ ID NO: 6007; WAN02498I; Start 19; Stop 43
aatataagcacctctggcgaaagaa

SEQ ID NO: 427436 - DNA, 25 bp, Artificial
  probe
  misc_feature (1)..(25): SEQ ID NO: 6007; WAN02498I; Start 255; Stop 279
aaccacgaatttgctctatgctttc

SEQ ID NO: 427437 - DNA, 25 bp, Artificial
  probe
  misc_feature (1)..(25): SEQ ID NO: 6007; WAN02498I; Start 51; Stop 75
tgtcctaaagtaataagtgaatcca

SEQ ID NO: 427438 - DNA, 25 bp, Artificial
  probe
  misc_feature (1)..(25): SEQ ID NO: 6007; WAN02498I; Start 277; Stop 301
ttctggaatttatcataacaggagg

SEQ ID NO: 427439 - DNA, 25 bp, Artificial
  probe
  misc_feature (1)..(25): SEQ ID NO: 6007; WAN02498I; Start 274; Stop 298
gctttctggaatttatcataacagg

SEQ ID NO: 427440 - DNA, 25 bp, Artificial
  probe
  misc_feature (1)..(25): SEQ ID NO: 6007; WAN02498I; Start 279; Stop 303
ctggaatttatcataacaggaggat

SEQ ID NO: 427441 - DNA, 25 bp, Artificial
  probe
  misc_feature (1)..(25): SEQ ID NO: 6007; WAN02498I; Start 236; Stop 260
taagaaatttagtcagacgaaccac

SEQ ID NO: 427442 - DNA, 25 bp, Artificial
  probe
  misc_feature (1)..(25): SEQ ID NO: 6008; WAN02499W; Start 40; Stop 64
tgtatcatgtattgtcgagagagtt

SEQ ID NO: 427443 - DNA, 25 bp, Artificial
  probe
  misc_feature (1)..(25): SEQ ID NO: 6008; WAN02499W; Start 39; Stop 63
atgtatcatgtattgtcgagagagt

SEQ ID NO: 427444 - DNA, 25 bp, Artificial
  probe
  misc_feature (1)..(25): SEQ ID NO: 6008; WAN02499W; Start 38; Stop 62
aatgtatcatgtattgtcgagagag

SEQ ID NO: 427445 - DNA, 25 bp, Artificial
  probe
  misc_feature (1)..(25): SEQ ID NO: 6008; WAN02499W; Start 41; Stop 65
gtatcatgtattgtcgagagagtta

SEQ ID NO: 427446 - DNA, 25 bp, Artificial
  probe
  misc_feature (1)..(25): SEQ ID NO: 6008; WAN02499W; Start 43; Stop 67
atcatgtattgtcgagagagttaac

SEQ ID NO: 427447 - DNA, 25 bp, Artificial
  probe
  misc_feature (1)..(25): SEQ ID NO: 6008; WAN02499W; Start 42; Stop 66
tatcatgtattgtcgagagagttaa

SEQ ID NO: 427448 - DNA, 25 bp, Artificial
  probe
  misc_feature (1)..(25): SEQ ID NO: 6008; WAN02499W; Start 37; Stop 61
taatgtatcatgtattgtcgagaga

SEQ ID NO: 427449 - DNA, 25 bp, Artificial
  probe
  misc_feature (1)..(25): SEQ ID NO: 6008; WAN02499W; Start 36; Stop 60
ataatgtatcatgtattgtcgagag

SEQ ID NO: 427450 - DNA, 25 bp, Artificial
  probe
  misc_feature (1)..(25): SEQ ID NO: 6008; WAN02499W; Start 73; Stop 97
aaacagcatataaaataaggagggg

SEQ ID NO: 427451 - DNA, 25 bp, Artificial
  probe
  misc_feature (1)..(25): SEQ ID NO: 6008; WAN02499W; Start 72; Stop 96
aaaacagcatataaaataaggaggg

SEQ ID NO: 427452 - DNA, 25 bp, Artificial
  probe
  misc_feature (1)..(25): SEQ ID NO: 6008; WAN02499W; Start 35; Stop 59
tataatgtatcatgtattgtcgaga

SEQ ID NO: 427453 - DNA, 25 bp, Artificial
  probe
  misc_feature (1)..(25): SEQ ID NO: 6008; WAN02499W; Start 71; Stop 95
taaaacagcatataaaataaggagg

SEQ ID NO: 427454 - DNA, 25 bp, Artificial
  probe
  misc_feature (1)..(25): SEQ ID NO: 6009; WAN0249BD; Start 143; Stop 167
atgaaattattgctcgtgtaggaaa

SEQ ID NO: 427455 - DNA, 25 bp, Artificial
  probe
  misc_feature (1)..(25): SEQ ID NO: 6009; WAN0249BD; Start 142; Stop 166
aatgaaattattgctcgtgtaggaa

SEQ ID NO: 427456 - DNA, 25 bp, Artificial
  probe
  misc_feature (1)..(25): SEQ ID NO: 6009; WAN0249BD; Start 168; Stop 192
acagtttaatcttaacatccacgaa

SEQ ID NO: 427457 - DNA, 25 bp, Artificial
  probe
  misc_feature (1)..(25): SEQ ID NO: 6009; WAN0249BD; Start 167; Stop 191
aacagtttaatcttaacatccacga

SEQ ID NO: 427458 - DNA, 25 bp, Artificial
  probe
  misc_feature (1)..(25): SEQ ID NO: 6009; WAN0249BD; Start 169; Stop 193
cagtttaatcttaacatccacgaag

SEQ ID NO: 427459 - DNA, 25 bp, Artificial
  probe
  misc_feature (1)..(25): SEQ ID NO: 6009; WAN0249BD; Start 173; Stop 197
ttaatcttaacatccacgaagagtt

SEQ ID NO: 427460 - DNA, 25 bp, Artificial
  probe
  misc_feature (1)..(25): SEQ ID NO: 6009; WAN0249BD; Start 166; Stop 190
aaacagtttaatcttaacatccacg

SEQ ID NO: 427461 - DNA, 25 bp, Artificial
  probe
  misc_feature (1)..(25): SEQ ID NO: 6009; WAN0249BD; Start 141; Stop 165
caatgaaattattgctcgtgtagga

SEQ ID NO: 427462 - DNA, 25 bp, Artificial
  probe
  misc_feature (1)..(25): SEQ ID NO: 6009; WAN0249BD; Start 140; Stop 164
tcaatgaaattattgctcgtgtagg

SEQ ID NO: 427463 - DNA, 25 bp, Artificial
  probe
  misc_feature (1)..(25): SEQ ID NO: 6009; WAN0249BD; Start 13; Stop 37
cttccaagccctaaataagaaatta

SEQ ID NO: 427464 - DNA, 25 bp, Artificial
  probe
  misc_feature (1)..(25): SEQ ID NO: 6009; WAN0249BD; Start 10; Stop 34
ggtcttccaagccctaaataagaaa

SEQ ID NO: 427465 - DNA, 25 bp, Artificial
  probe
  misc_feature (1)..(25): SEQ ID NO: 6009; WAN0249BD; Start 65; Stop 89
atggttatgtcttagaatatcatgg

SEQ ID NO: 427466 - DNA, 25 bp, Artificial
  probe
  misc_feature (1)..(25): SEQ ID NO: 6009; WAN0249BD; Start 11; Stop 35
gtcttccaagccctaaataagaaat

SEQ ID NO: 427467 - DNA, 25 bp, Artificial
  probe
  misc_feature (1)..(25): SEQ ID NO: 6009; WAN0249BD; Start 137; Stop 161
aaatcaatgaaattattgctcgtgt

SEQ ID NO: 427468 - DNA, 25 bp, Artificial
  probe
  misc_feature (1)..(25): SEQ ID NO: 6009; WAN0249BD; Start 144; Stop 168
tgaaattattgctcgtgtaggaaaa

SEQ ID NO: 427469 - DNA, 25 bp, Artificial
  probe
  misc_feature (1)..(25): SEQ ID NO: 6009; WAN0249BD; Start 145; Stop 169
gaaattattgctcgtgtaggaaaac

SEQ ID NO: 427470 - DNA, 25 bp, Artificial
  probe
  misc_feature (1)..(25): SEQ ID NO: 6009; WAN0249BD; Start 139; Stop 163
atcaatgaaattattgctcgtgtag

SEQ ID NO: 427471 - DNA, 25 bp, Artificial
  probe
  misc_feature (1)..(25): SEQ ID NO: 6009; WAN0249BD; Start 12; Stop 36
tcttccaagccctaaataagaaatt

SEQ ID NO: 427472 - DNA, 25 bp, Artificial
  probe
  misc_feature (1)..(25): SEQ ID NO: 6009; WAN0249BD; Start 14; Stop 38
ttccaagccctaaataagaaattaa

SEQ ID NO: 427473 - DNA, 25 bp, Artificial
  probe
  misc_feature (1)..(25): SEQ ID NO: 6009; WAN0249BD; Start 172; Stop 196
tttaatcttaacatccacgaagagt

SEQ ID NO: 427474 - DNA, 25 bp, Artificial
  probe
  misc_feature (1)..(25): SEQ ID NO: 6009; WAN0249BD; Start 170; Stop 194
agtttaatcttaacatccacgaaga

SEQ ID NO: 427475 - DNA, 25 bp, Artificial
  probe
  misc_feature (1)..(25): SEQ ID NO: 6009; WAN0249BD; Start 171; Stop 195
gtttaatcttaacatccacgaagag

SEQ ID NO: 427476 - DNA, 25 bp, Artificial
  probe
  misc_feature (1)..(25): SEQ ID NO: 6009; WAN0249BD; Start 138; Stop 162
aatcaatgaaattattgctcgtgta

SEQ ID NO: 427477 - DNA, 25 bp, Artificial
  probe
  misc_feature (1)..(25): SEQ ID NO: 6009; WAN0249BD; Start 147; Stop 171
aattattgctcgtgtaggaaaacag

SEQ ID NO: 427478 - DNA, 25 bp, Artificial
  probe
  misc_feature (1)..(25): SEQ ID NO: 6009; WAN0249BD; Start 146; Stop 170
aaattattgctcgtgtaggaaaaca

SEQ ID NO: 427479 - DNA, 25 bp, Artificial
  probe
  misc_feature (1)..(25): SEQ ID NO: 6009; WAN0249BD; Start 148; Stop 172
attattgctcgtgtaggaaaacagt

SEQ ID NO: 427480 - DNA, 25 bp, Artificial
  probe
  misc_feature (1)..(25): SEQ ID NO: 6009; WAN0249BD; Start 149; Stop 173
ttattgctcgtgtaggaaaacagtt

SEQ ID NO: 427481 - DNA, 25 bp, Artificial
  probe
  misc_feature (1)..(25): SEQ ID NO: 6009; WAN0249BD; Start 154; Stop 178
gctcgtgtaggaaaacagtttaatc

SEQ ID NO: 427482 - DNA, 25 bp, Artificial
  probe
  misc_feature (1)..(25): SEQ ID NO: 6009; WAN0249BD; Start 9; Stop 33
cggtcttccaagccctaaataagaa

SEQ ID NO: 427483 - DNA, 25 bp, Artificial
  probe
  misc_feature (1)..(25): SEQ ID NO: 6009; WAN0249BD; Start 155; Stop 179
ctcgtgtaggaaaacagtttaatct

SEQ ID NO: 427484 - DNA, 25 bp, Artificial
  probe
  misc_feature (1)..(25): SEQ ID NO: 6009; WAN0249BD; Start 153; Stop 177
tgctcgtgtaggaaaacagtttaat

SEQ ID NO: 427485 - DNA, 25 bp, Artificial
  probe
  misc_feature (1)..(25): SEQ ID NO: 6009; WAN0249BD; Start 151; Stop 175
attgctcgtgtaggaaaacagttta

SEQ ID NO: 427486 - DNA, 25 bp, Artificial
  probe
  misc_feature (1)..(25): SEQ ID NO: 6009; WAN0249BD; Start 150; Stop 174
tattgctcgtgtaggaaaacagttt

SEQ ID NO: 427487 - DNA, 25 bp, Artificial
  probe
  misc_feature (1)..(25): SEQ ID NO: 6010; WAN0249BF; Start 52; Stop 76
tacactaagtatccgttcaatcacc

SEQ ID NO: 427488 - DNA, 25 bp, Artificial
  probe
  misc_feature (1)..(25): SEQ ID NO: 6010; WAN0249BF; Start 51; Stop 75
ctacactaagtatccgttcaatcac

SEQ ID NO: 427489 - DNA, 25 bp, Artificial
  probe
  misc_feature (1)..(25): SEQ ID NO: 6010; WAN0249BF; Start 50; Stop 74
actacactaagtatccgttcaatca

SEQ ID NO: 427490 - DNA, 25 bp, Artificial
  probe
  misc_feature (1)..(25): SEQ ID NO: 6010; WAN0249BF; Start 53; Stop 77
acactaagtatccgttcaatcacca

SEQ ID NO: 427491 - DNA, 25 bp, Artificial
  probe
  misc_feature (1)..(25): SEQ ID NO: 6010; WAN0249BF; Start 44; Stop 68
tcctctactacactaagtatccgtt

SEQ ID NO: 427492 - DNA, 25 bp, Artificial
  probe
  misc_feature (1)..(25): SEQ ID NO: 6010; WAN0249BF; Start 43; Stop 67
ttcctctactacactaagtatccgt

SEQ ID NO: 427493 - DNA, 25 bp, Artificial
  probe
  misc_feature (1)..(25): SEQ ID NO: 6010; WAN0249BF; Start 45; Stop 69
cctctactacactaagtatccgttc

SEQ ID NO: 427494 - DNA, 25 bp, Artificial
  probe
  misc_feature (1)..(25): SEQ ID NO: 6010; WAN0249BF; Start 42; Stop 66
cttcctctactacactaagtatccg

SEQ ID NO: 427495 - DNA, 25 bp, Artificial
  probe
  misc_feature (1)..(25): SEQ ID NO: 6010; WAN0249BF; Start 46; Stop 70
ctctactacactaagtatccgttca

SEQ ID NO: 427496 - DNA, 25 bp, Artificial
  probe
  misc_feature (1)..(25): SEQ ID NO: 6010; WAN0249BF; Start 47; Stop 71
tctactacactaagtatccgttcaa

SEQ ID NO: 427497 - DNA, 25 bp, Artificial
  probe
  misc_feature (1)..(25): SEQ ID NO: 6010; WAN0249BF; Start 41; Stop 65
tcttcctctactacactaagtatcc

SEQ ID NO: 427498 - DNA, 25 bp, Artificial
  probe
  misc_feature (1)..(25): SEQ ID NO: 6010; WAN0249BF; Start 49; Stop 73
tactacactaagtatccgttcaatc

SEQ ID NO: 427499 - DNA, 25 bp, Artificial
  probe
  misc_feature (1)..(25): SEQ ID NO: 6010; WAN0249BF; Start 48; Stop 72
ctactacactaagtatccgttcaat

SEQ ID NO: 427500 - DNA, 25 bp, Artificial
  probe
  misc_feature (1)..(25): SEQ ID NO: 6010; WAN0249BF; Start 40; Stop 64
ttcttcctctactacactaagtatc

SEQ ID NO: 427501 - DNA, 25 bp, Artificial
  probe
  misc_feature (1)..(25): SEQ ID NO: 6010; WAN0249BF; Start 37; Stop 61
aaattcttcctctactacactaagt

SEQ ID NO: 427502 - DNA, 25 bp, Artificial
  probe
  misc_feature (1)..(25): SEQ ID NO: 6010; WAN0249BF; Start 2; Stop 26
atgaaataacctttcttcgttgttt

SEQ ID NO: 427503 - DNA, 25 bp, Artificial
  probe
  misc_feature (1)..(25): SEQ ID NO: 6010; WAN0249BF; Start 1; Stop 25
aatgaaataacctttcttcgttgtt

SEQ ID NO: 427504 - DNA, 25 bp, Artificial
  probe
  misc_feature (1)..(25): SEQ ID NO: 6010; WAN0249BF; Start 38; Stop 62
aattcttcctctactacactaagta

SEQ ID NO: 427505 - DNA, 25 bp, Artificial
  probe
  misc_feature (1)..(25): SEQ ID NO: 6010; WAN0249BF; Start 39; Stop 63
attcttcctctactacactaagtat

SEQ ID NO: 427506 - DNA, 25 bp, Artificial
  probe
  misc_feature (1)..(25): SEQ ID NO: 6010; WAN0249BF; Start 34; Stop 58
actaaattcttcctctactacacta

SEQ ID NO: 427507 - DNA, 25 bp, Artificial
  probe
  misc_feature (1)..(25): SEQ ID NO: 6010; WAN0249BF; Start 33; Stop 57
tactaaattcttcctctactacact

SEQ ID NO: 427508 - DNA, 25 bp, Artificial
  probe
  misc_feature (1)..(25): SEQ ID NO: 6010; WAN0249BF; Start 32; Stop 56
ttactaaattcttcctctactacac

SEQ ID NO: 427509 - DNA, 25 bp, Artificial
  probe
  misc_feature (1)..(25): SEQ ID NO: 6010; WAN0249BF; Start 35; Stop 59
ctaaattcttcctctactacactaa

SEQ ID NO: 427510 - DNA, 25 bp, Artificial
  probe
  misc_feature (1)..(25): SEQ ID NO: 6010; WAN0249BF; Start 36; Stop 60
taaattcttcctctactacactaag

SEQ ID NO: 427511 - DNA, 25 bp, Artificial
  probe
  misc_feature (1)..(25): SEQ ID NO: 6010; WAN0249BF; Start 3; Stop 27
tgaaataacctttcttcgttgtttt

SEQ ID NO: 427512 - DNA, 25 bp, Artificial
  probe
  misc_feature (1)..(25): SEQ ID NO: 6011; WAN02499X; Start 132; Stop 156
ttggaagaataattgaactggacct

SEQ ID NO: 427513 - DNA, 25 bp, Artificial
  probe
  misc_feature (1)..(25): SEQ ID NO: 6011; WAN02499X; Start 21; Stop 45
ggactacaatataactctggcattc

SEQ ID NO: 427514 - DNA, 25 bp, Artificial
  probe
  misc_feature (1)..(25): SEQ ID NO: 6011; WAN02499X; Start 38; Stop 62
tggcattcttacagagcatacttat

SEQ ID NO: 427515 - DNA, 25 bp, Artificial
  probe
  misc_feature (1)..(25): SEQ ID NO: 6011; WAN02499X; Start 133; Stop 157
tggaagaataattgaactggacctt

SEQ ID NO: 427516 - DNA, 25 bp, Artificial
  probe
  misc_feature (1)..(25): SEQ ID NO: 6011; WAN02499X; Start 39; Stop 63
ggcattcttacagagcatacttatc

SEQ ID NO: 427517 - DNA, 25 bp, Artificial
  probe
  misc_feature (1)..(25): SEQ ID NO: 6011; WAN02499X; Start 40; Stop 64
gcattcttacagagcatacttatca

SEQ ID NO: 427518 - DNA, 25 bp, Artificial
  probe
  misc_feature (1)..(25): SEQ ID NO: 6011; WAN02499X; Start 22; Stop 46
gactacaatataactctggcattct

SEQ ID NO: 427519 - DNA, 25 bp, Artificial
  probe
  misc_feature (1)..(25): SEQ ID NO: 6011; WAN02499X; Start 37; Stop 61
ctggcattcttacagagcatactta

SEQ ID NO: 427520 - DNA, 25 bp, Artificial
  probe
  misc_feature (1)..(25): SEQ ID NO: 6011; WAN02499X; Start 23; Stop 47
actacaatataactctggcattctt

SEQ ID NO: 427521 - DNA, 25 bp, Artificial
  probe
  misc_feature (1)..(25): SEQ ID NO: 6011; WAN02499X; Start 148; Stop 172
actggaccttctaattcattattga

SEQ ID NO: 427522 - DNA, 25 bp, Artificial
  probe
  misc_feature (1)..(25): SEQ ID NO: 6011; WAN02499X; Start 20; Stop 44
gggactacaatataactctggcatt

SEQ ID NO: 427523 - DNA, 25 bp, Artificial
  probe
  misc_feature (1)..(25): SEQ ID NO: 6011; WAN02499X; Start 43; Stop 67
ttcttacagagcatacttatcagtt

SEQ ID NO: 427524 - DNA, 25 bp, Artificial
  probe
  misc_feature (1)..(25): SEQ ID NO: 6011; WAN02499X; Start 131; Stop 155
tttggaagaataattgaactggacc

SEQ ID NO: 427525 - DNA, 25 bp, Artificial
  probe
  misc_feature (1)..(25): SEQ ID NO: 6011; WAN02499X; Start 147; Stop 171
aactggaccttctaattcattattg

SEQ ID NO: 427526 - DNA, 25 bp, Artificial
  probe
  misc_feature (1)..(25): SEQ ID NO: 6011; WAN02499X; Start 41; Stop 65
cattcttacagagcatacttatcag

SEQ ID NO: 427527 - DNA, 25 bp, Artificial
  probe
  misc_feature (1)..(25): SEQ ID NO: 6011; WAN02499X; Start 150; Stop 174
tggaccttctaattcattattgaga

SEQ ID NO: 427528 - DNA, 25 bp, Artificial
  probe
  misc_feature (1)..(25): SEQ ID NO: 6011; WAN02499X; Start 42; Stop 66
attcttacagagcatacttatcagt

SEQ ID NO: 427529 - DNA, 25 bp, Artificial
  probe
  misc_feature (1)..(25): SEQ ID NO: 6011; WAN02499X; Start 149; Stop 173
ctggaccttctaattcattattgag

SEQ ID NO: 427530 - DNA, 25 bp, Artificial
  probe
  misc_feature (1)..(25): SEQ ID NO: 6011; WAN02499X; Start 93; Stop 117
ttcagaaaccgatatgtcttcaaat

SEQ ID NO: 427531 - DNA, 25 bp, Artificial
  probe
  misc_feature (1)..(25): SEQ ID NO: 6011; WAN02499X; Start 88; Stop 112
gcaatttcagaaaccgatatgtctt

SEQ ID NO: 427532 - DNA, 25 bp, Artificial
  probe
  misc_feature (1)..(25): SEQ ID NO: 6011; WAN02499X; Start 146; Stop 170
gaactggaccttctaattcattatt

SEQ ID NO: 427533 - DNA, 25 bp, Artificial
  probe
  misc_feature (1)..(25): SEQ ID NO: 6011; WAN02499X; Start 138; Stop 162
gaataattgaactggaccttctaat

SEQ ID NO: 427534 - DNA, 25 bp, Artificial
  probe
  misc_feature (1)..(25): SEQ ID NO: 6011; WAN02499X; Start 92; Stop 116
tttcagaaaccgatatgtcttcaaa

SEQ ID NO: 427535 - DNA, 25 bp, Artificial
  probe
  misc_feature (1)..(25): SEQ ID NO: 6011; WAN02499X; Start 91; Stop 115
atttcagaaaccgatatgtcttcaa

SEQ ID NO: 427536 - DNA, 25 bp, Artificial
  probe
  misc_feature (1)..(25): SEQ ID NO: 6011; WAN02499X; Start 90; Stop 114
aatttcagaaaccgatatgtcttca

SEQ ID NO: 427537 - DNA, 25 bp, Artificial
  probe
  misc_feature (1)..(25): SEQ ID NO: 6011; WAN02499X; Start 89; Stop 113
caatttcagaaaccgatatgtcttc

SEQ ID NO: 427538 - DNA, 25 bp, Artificial
  probe
  misc_feature (1)..(25): SEQ ID NO: 6011; WAN02499X; Start 303; Stop 327
catgtactgcctgatttaatttgtc

SEQ ID NO: 427539 - DNA, 25 bp, Artificial
  probe
  misc_feature (1)..(25): SEQ ID NO: 6011; WAN02499X; Start 305; Stop 329
tgtactgcctgatttaatttgtcaa

SEQ ID NO: 427540 - DNA, 25 bp, Artificial
  probe
  misc_feature (1)..(25): SEQ ID NO: 6011; WAN02499X; Start 94; Stop 118
tcagaaaccgatatgtcttcaaata

SEQ ID NO: 427541 - DNA, 25 bp, Artificial
  probe
  misc_feature (1)..(25): SEQ ID NO: 6011; WAN02499X; Start 304; Stop 328
atgtactgcctgatttaatttgtca

SEQ ID NO: 427542 - DNA, 25 bp, Artificial
  probe
  misc_feature (1)..(25): SEQ ID NO: 6011; WAN02499X; Start 130; Stop 154
atttggaagaataattgaactggac

SEQ ID NO: 427543 - DNA, 25 bp, Artificial
  probe
  misc_feature (1)..(25): SEQ ID NO: 6011; WAN02499X; Start 123; Stop 147
tcggtctatttggaagaataattga

SEQ ID NO: 427544 - DNA, 25 bp, Artificial
  probe
  misc_feature (1)..(25): SEQ ID NO: 6011; WAN02499X; Start 140; Stop 164
ataattgaactggaccttctaattc

SEQ ID NO: 427545 - DNA, 25 bp, Artificial
  probe
  misc_feature (1)..(25): SEQ ID NO: 6013; WAN0249CX; Start 44; Stop 68
tttgaacggtctttggtaacagaac

SEQ ID NO: 427546 - DNA, 25 bp, Artificial
  probe
  misc_feature (1)..(25): SEQ ID NO: 6013; WAN0249CX; Start 45; Stop 69
ttgaacggtctttggtaacagaact

SEQ ID NO: 427547 - DNA, 25 bp, Artificial
  probe
  misc_feature (1)..(25): SEQ ID NO: 6013; WAN0249CX; Start 93; Stop 117
tttgacaaagaagctgattagagat

SEQ ID NO: 427548 - DNA, 25 bp, Artificial
  probe
  misc_feature (1)..(25): SEQ ID NO: 6013; WAN0249CX; Start 94; Stop 118
ttgacaaagaagctgattagagata

SEQ ID NO: 427549 - DNA, 25 bp, Artificial
  probe
  misc_feature (1)..(25): SEQ ID NO: 6013; WAN0249CX; Start 46; Stop 70
tgaacggtctttggtaacagaactg

SEQ ID NO: 427550 - DNA, 25 bp, Artificial
  probe
  misc_feature (1)..(25): SEQ ID NO: 6013; WAN0249CX; Start 95; Stop 119
tgacaaagaagctgattagagatat

SEQ ID NO: 427551 - DNA, 25 bp, Artificial
  probe
  misc_feature (1)..(25): SEQ ID NO: 6013; WAN0249CX; Start 81; Stop 105
atgggtgagaattttgacaaagaag

SEQ ID NO: 427552 - DNA, 25 bp, Artificial
  probe
  misc_feature (1)..(25): SEQ ID NO: 6013; WAN0249CX; Start 80; Stop 104
gatgggtgagaattttgacaaagaa

SEQ ID NO: 427553 - DNA, 25 bp, Artificial
  probe
  misc_feature (1)..(25): SEQ ID NO: 6013; WAN0249CX; Start 43; Stop 67
ttttgaacggtctttggtaacagaa

SEQ ID NO: 427554 - DNA, 25 bp, Artificial
  probe
  misc_feature (1)..(25): SEQ ID NO: 6013; WAN0249CX; Start 79; Stop 103
ggatgggtgagaattttgacaaaga

SEQ ID NO: 427555 - DNA, 25 bp, Artificial
  probe
  misc_feature (1)..(25): SEQ ID NO: 6013; WAN0249CX; Start 78; Stop 102
tggatgggtgagaattttgacaaag

SEQ ID NO: 427556 - DNA, 25 bp, Artificial
  probe
  misc_feature (1)..(25): SEQ ID NO: 6013; WAN0249CX; Start 77; Stop 101
ctggatgggtgagaattttgacaaa

SEQ ID NO: 427557 - DNA, 25 bp, Artificial
  probe
  misc_feature (1)..(25): SEQ ID NO: 6013; WAN0249CX; Start 18; Stop 42
aagttataagtattgctagtttgct

SEQ ID NO: 427558 - DNA, 25 bp, Artificial
  probe
  misc_feature (1)..(25): SEQ ID NO: 6013; WAN0249CX; Start 85; Stop 109
gtgagaattttgacaaagaagctga

SEQ ID NO: 427559 - DNA, 25 bp, Artificial
  probe
  misc_feature (1)..(25): SEQ ID NO: 6013; WAN0249CX; Start 19; Stop 43
agttataagtattgctagtttgctt

SEQ ID NO: 427560 - DNA, 25 bp, Artificial
  probe
  misc_feature (1)..(25): SEQ ID NO: 6013; WAN0249CX; Start 86; Stop 110
tgagaattttgacaaagaagctgat

SEQ ID NO: 427561 - DNA, 25 bp, Artificial
  probe
  misc_feature (1)..(25): SEQ ID NO: 6013; WAN0249CX; Start 82; Stop 106
tgggtgagaattttgacaaagaagc

SEQ ID NO: 427562 - DNA, 25 bp, Artificial
  probe
  misc_feature (1)..(25): SEQ ID NO: 6013; WAN0249CX; Start 52; Stop 76
gtctttggtaacagaactgcgtgag

SEQ ID NO: 427563 - DNA, 25 bp, Artificial
  probe
  misc_feature (1)..(25): SEQ ID NO: 6013; WAN0249CX; Start 84; Stop 108
ggtgagaattttgacaaagaagctg

SEQ ID NO: 427564 - DNA, 25 bp, Artificial
  probe
  misc_feature (1)..(25): SEQ ID NO: 6013; WAN0249CX; Start 92; Stop 116
ttttgacaaagaagctgattagaga

SEQ ID NO: 427565 - DNA, 25 bp, Artificial
  probe
  misc_feature (1)..(25): SEQ ID NO: 6013; WAN0249CX; Start 87; Stop 111
gagaattttgacaaagaagctgatt

SEQ ID NO: 427566 - DNA, 25 bp, Artificial
  probe
  misc_feature (1)..(25): SEQ ID NO: 6013; WAN0249CX; Start 47; Stop 71
gaacggtctttggtaacagaactgc

SEQ ID NO: 427567 - DNA, 25 bp, Artificial
  probe
  misc_feature (1)..(25): SEQ ID NO: 6013; WAN0249CX; Start 83; Stop 107
gggtgagaattttgacaaagaagct

SEQ ID NO: 427568 - DNA, 25 bp, Artificial
  probe
  misc_feature (1)..(25): SEQ ID NO: 6013; WAN0249CX; Start 20; Stop 44
gttataagtattgctagtttgcttt

SEQ ID NO: 427569 - DNA, 25 bp, Artificial
  probe
  misc_feature (1)..(25): SEQ ID NO: 6013; WAN0249CX; Start 91; Stop 115
attttgacaaagaagctgattagag

SEQ ID NO: 427570 - DNA, 25 bp, Artificial
  probe
  misc_feature (1)..(25): SEQ ID NO: 6013; WAN0249CX; Start 96; Stop 120
gacaaagaagctgattagagatata

SEQ ID NO: 427571 - DNA, 25 bp, Artificial
  probe
  misc_feature (1)..(25): SEQ ID NO: 6013; WAN0249CX; Start 104; Stop 128
agctgattagagatataatgaagaa

SEQ ID NO: 427572 - DNA, 25 bp, Artificial
  probe
  misc_feature (1)..(25): SEQ ID NO: 6013; WAN0249CX; Start 103; Stop 127
aagctgattagagatataatgaaga

SEQ ID NO: 427573 - DNA, 25 bp, Artificial
  probe
  misc_feature (1)..(25): SEQ ID NO: 6013; WAN0249CX; Start 101; Stop 125
agaagctgattagagatataatgaa

SEQ ID NO: 427574 - DNA, 25 bp, Artificial
  probe
  misc_feature (1)..(25): SEQ ID NO: 6013; WAN0249CX; Start 100; Stop 124
aagaagctgattagagatataatga

SEQ ID NO: 427575 - DNA, 25 bp, Artificial
  probe
  misc_feature (1)..(25): SEQ ID NO: 6013; WAN0249CX; Start 90; Stop 114
aattttgacaaagaagctgattaga

SEQ ID NO: 427576 - DNA, 25 bp, Artificial
  probe
  misc_feature (1)..(25): SEQ ID NO: 6013; WAN0249CX; Start 88; Stop 112
agaattttgacaaagaagctgatta

SEQ ID NO: 427577 - DNA, 25 bp, Artificial
  probe
  misc_feature (1)..(25): SEQ ID NO: 6013; WAN0249CX; Start 102; Stop 126
gaagctgattagagatataatgaag

SEQ ID NO: 427578 - DNA, 25 bp, Artificial
  probe
  misc_feature (1)..(25): SEQ ID NO: 6014; WAN02496M; Start 87; Stop 111
tgagagtttaaccaatacatcagcc

SEQ ID NO: 427579 - DNA, 25 bp, Artificial
  probe
  misc_feature (1)..(25): SEQ ID NO: 6014; WAN02496M; Start 88; Stop 112
gagagtttaaccaatacatcagccg

SEQ ID NO: 427580 - DNA, 25 bp, Artificial
  probe
  misc_feature (1)..(25): SEQ ID NO: 6014; WAN02496M; Start 93; Stop 117
tttaaccaatacatcagccgtcaac

SEQ ID NO: 427581 - DNA, 25 bp, Artificial
  probe
  misc_feature (1)..(25): SEQ ID NO: 6014; WAN02496M; Start 92; Stop 116
gtttaaccaatacatcagccgtcaa

SEQ ID NO: 427582 - DNA, 25 bp, Artificial
  probe
  misc_feature (1)..(25): SEQ ID NO: 6014; WAN02496M; Start 90; Stop 114
gagtttaaccaatacatcagccgtc

SEQ ID NO: 427583 - DNA, 25 bp, Artificial
  probe
  misc_feature (1)..(25): SEQ ID NO: 6014; WAN02496M; Start 148; Stop 172
gctgaatttgtaaacgaaagtattg

SEQ ID NO: 427584 - DNA, 25 bp, Artificial
  probe
  misc_feature (1)..(25): SEQ ID NO: 6014; WAN02496M; Start 89; Stop 113
agagtttaaccaatacatcagccgt

SEQ ID NO: 427585 - DNA, 25 bp, Artificial
  probe
  misc_feature (1)..(25): SEQ ID NO: 6014; WAN02496M; Start 198; Stop 222
atgatcctccctcaaatctctcaaa

SEQ ID NO: 427586 - DNA, 25 bp, Artificial
  probe
  misc_feature (1)..(25): SEQ ID NO: 6014; WAN02496M; Start 51; Stop 75
tcccaataaatagtctgtactgacg

SEQ ID NO: 427587 - DNA, 25 bp, Artificial
  probe
  misc_feature (1)..(25): SEQ ID NO: 6014; WAN02496M; Start 141; Stop 165
ggcataagctgaatttgtaaacgaa

SEQ ID NO: 427588 - DNA, 25 bp, Artificial
  probe
  misc_feature (1)..(25): SEQ ID NO: 6014; WAN02496M; Start 142; Stop 166
gcataagctgaatttgtaaacgaaa

SEQ ID NO: 427589 - DNA, 25 bp, Artificial
  probe
  misc_feature (1)..(25): SEQ ID NO: 6014; WAN02496M; Start 91; Stop 115
agtttaaccaatacatcagccgtca

SEQ ID NO: 427590 - DNA, 25 bp, Artificial
  probe
  misc_feature (1)..(25): SEQ ID NO: 6014; WAN02496M; Start 139; Stop 163
ttggcataagctgaatttgtaaacg

SEQ ID NO: 427591 - DNA, 25 bp, Artificial
  probe
  misc_feature (1)..(25): SEQ ID NO: 6014; WAN02496M; Start 138; Stop 162
tttggcataagctgaatttgtaaac

SEQ ID NO: 427592 - DNA, 25 bp, Artificial
  probe
  misc_feature (1)..(25): SEQ ID NO: 6014; WAN02496M; Start 84; Stop 108
atctgagagtttaaccaatacatca

SEQ ID NO: 427593 - DNA, 25 bp, Artificial
  probe
  misc_feature (1)..(25): SEQ ID NO: 6014; WAN02496M; Start 94; Stop 118
ttaaccaatacatcagccgtcaacg

SEQ ID NO: 427594 - DNA, 25 bp, Artificial
  probe
  misc_feature (1)..(25): SEQ ID NO: 6014; WAN02496M; Start 74; Stop 98
cgtcatagaaatctgagagtttaac

SEQ ID NO: 427595 - DNA, 25 bp, Artificial
  probe
  misc_feature (1)..(25): SEQ ID NO: 6014; WAN02496M; Start 140; Stop 164
tggcataagctgaatttgtaaacga

SEQ ID NO: 427596 - DNA, 25 bp, Artificial
  probe
  misc_feature (1)..(25): SEQ ID NO: 6014; WAN02496M; Start 199; Stop 223
tgatcctccctcaaatctctcaaac

SEQ ID NO: 427597 - DNA, 25 bp, Artificial
  probe
  misc_feature (1)..(25): SEQ ID NO: 6014; WAN02496M; Start 197; Stop 221
catgatcctccctcaaatctctcaa

SEQ ID NO: 427598 - DNA, 25 bp, Artificial
  probe
  misc_feature (1)..(25): SEQ ID NO: 6014; WAN02496M; Start 81; Stop 105
gaaatctgagagtttaaccaataca

SEQ ID NO: 427599 - DNA, 25 bp, Artificial
  probe
  misc_feature (1)..(25): SEQ ID NO: 6014; WAN02496M; Start 76; Stop 100
tcatagaaatctgagagtttaacca

SEQ ID NO: 427600 - DNA, 25 bp, Artificial
  probe
  misc_feature (1)..(25): SEQ ID NO: 6014; WAN02496M; Start 207; Stop 231
cctcaaatctctcaaacgtctgtac

SEQ ID NO: 427601 - DNA, 25 bp, Artificial
  probe
  misc_feature (1)..(25): SEQ ID NO: 6014; WAN02496M; Start 75; Stop 99
gtcatagaaatctgagagtttaacc

SEQ ID NO: 427602 - DNA, 25 bp, Artificial
  probe
  misc_feature (1)..(25): SEQ ID NO: 6014; WAN02496M; Start 83; Stop 107
aatctgagagtttaaccaatacatc

SEQ ID NO: 427603 - DNA, 25 bp, Artificial
  probe
  misc_feature (1)..(25): SEQ ID NO: 6014; WAN02496M; Start 50; Stop 74
atcccaataaatagtctgtactgac

SEQ ID NO: 427604 - DNA, 25 bp, Artificial
  probe
  misc_feature (1)..(25): SEQ ID NO: 6014; WAN02496M; Start 80; Stop 104
agaaatctgagagtttaaccaatac

SEQ ID NO: 427605 - DNA, 25 bp, Artificial
  probe
  misc_feature (1)..(25): SEQ ID NO: 6014; WAN02496M; Start 77; Stop 101
catagaaatctgagagtttaaccaa

SEQ ID NO: 427606 - DNA, 25 bp, Artificial
  probe
  misc_feature (1)..(25): SEQ ID NO: 6014; WAN02496M; Start 147; Stop 171
agctgaatttgtaaacgaaagtatt

SEQ ID NO: 427607 - DNA, 25 bp, Artificial
  probe
  misc_feature (1)..(25): SEQ ID NO: 6014; WAN02496M; Start 146; Stop 170
aagctgaatttgtaaacgaaagtat

SEQ ID NO: 427608 - DNA, 25 bp, Artificial
  probe
  misc_feature (1)..(25): SEQ ID NO: 6014; WAN02496M; Start 144; Stop 168
ataagctgaatttgtaaacgaaagt

SEQ ID NO: 427609 - DNA, 25 bp, Artificial
  probe
  misc_feature (1)..(25): SEQ ID NO: 6014; WAN02496M; Start 52; Stop 76
cccaataaatagtctgtactgacgt

SEQ ID NO: 427610 - DNA, 25 bp, Artificial
  probe
  misc_feature (1)..(25): SEQ ID NO: 6014; WAN02496M; Start 200; Stop 224
gatcctccctcaaatctctcaaacg

SEQ ID NO: 427611 - DNA, 25 bp, Artificial
  probe
  misc_feature (1)..(25): SEQ ID NO: 6015; WAN0249BR; Start 185; Stop 209
caaattcagacaaccctttcctttc

SEQ ID NO: 427612 - DNA, 25 bp, Artificial
  probe
  misc_feature (1)..(25): SEQ ID NO: 6015; WAN0249BR; Start 186; Stop 210
aaattcagacaaccctttcctttct

SEQ ID NO: 427613 - DNA, 25 bp, Artificial
  probe
  misc_feature (1)..(25): SEQ ID NO: 6015; WAN0249BR; Start 122; Stop 146
aatcacttgtaccaacttacaccac

SEQ ID NO: 427614 - DNA, 25 bp, Artificial
  probe
  misc_feature (1)..(25): SEQ ID NO: 6015; WAN0249BR; Start 121; Stop 145
caatcacttgtaccaacttacacca

SEQ ID NO: 427615 - DNA, 25 bp, Artificial
  probe
  misc_feature (1)..(25): SEQ ID NO: 6015; WAN0249BR; Start 184; Stop 208
ccaaattcagacaaccctttccttt

SEQ ID NO: 427616 - DNA, 25 bp, Artificial
  probe
  misc_feature (1)..(25): SEQ ID NO: 6015; WAN0249BR; Start 123; Stop 147
atcacttgtaccaacttacaccaca

SEQ ID NO: 427617 - DNA, 25 bp, Artificial
  probe
  misc_feature (1)..(25): SEQ ID NO: 6015; WAN0249BR; Start 124; Stop 148
tcacttgtaccaacttacaccacag

SEQ ID NO: 427618 - DNA, 25 bp, Artificial
  probe
  misc_feature (1)..(25): SEQ ID NO: 6015; WAN0249BR; Start 120; Stop 144
acaatcacttgtaccaacttacacc

SEQ ID NO: 427619 - DNA, 25 bp, Artificial
  probe
  misc_feature (1)..(25): SEQ ID NO: 6015; WAN0249BR; Start 183; Stop 207
cccaaattcagacaaccctttcctt

SEQ ID NO: 427620 - DNA, 25 bp, Artificial
  probe
  misc_feature (1)..(25): SEQ ID NO: 6015; WAN0249BR; Start 142; Stop 166
accacagcgaaaagtattctctatg

SEQ ID NO: 427621 - DNA, 25 bp, Artificial
  probe
  misc_feature (1)..(25): SEQ ID NO: 6015; WAN0249BR; Start 141; Stop 165
caccacagcgaaaagtattctctat

SEQ ID NO: 427622 - DNA, 25 bp, Artificial
  probe
  misc_feature (1)..(25): SEQ ID NO: 6015; WAN0249BR; Start 138; Stop 162
ttacaccacagcgaaaagtattctc

SEQ ID NO: 427623 - DNA, 25 bp, Artificial
  probe
  misc_feature (1)..(25): SEQ ID NO: 6015; WAN0249BR; Start 137; Stop 161
cttacaccacagcgaaaagtattct

SEQ ID NO: 427624 - DNA, 25 bp, Artificial
  probe
  misc_feature (1)..(25): SEQ ID NO: 6015; WAN0249BR; Start 144; Stop 168
cacagcgaaaagtattctctatggg

SEQ ID NO: 427625 - DNA, 25 bp, Artificial
  probe
  misc_feature (1)..(25): SEQ ID NO: 6015; WAN0249BR; Start 140; Stop 164
acaccacagcgaaaagtattctcta

SEQ ID NO: 427626 - DNA, 25 bp, Artificial
  probe
  misc_feature (1)..(25): SEQ ID NO: 6015; WAN0249BR; Start 139; Stop 163
tacaccacagcgaaaagtattctct

SEQ ID NO: 427627 - DNA, 25 bp, Artificial
  probe
  misc_feature (1)..(25): SEQ ID NO: 6015; WAN0249BR; Start 125; Stop 149
cacttgtaccaacttacaccacagc

SEQ ID NO: 427628 - DNA, 25 bp, Artificial
  probe
  misc_feature (1)..(25): SEQ ID NO: 6015; WAN0249BR; Start 145; Stop 169
acagcgaaaagtattctctatgggg

SEQ ID NO: 427629 - DNA, 25 bp, Artificial
  probe
  misc_feature (1)..(25): SEQ ID NO: 6015; WAN0249BR; Start 119; Stop 143
tacaatcacttgtaccaacttacac

SEQ ID NO: 427630 - DNA, 25 bp, Artificial
  probe
  misc_feature (1)..(25): SEQ ID NO: 6015; WAN0249BR; Start 74; Stop 98
catgactaaaatttgagcctaaggt

SEQ ID NO: 427631 - DNA, 25 bp, Artificial
  probe
  misc_feature (1)..(25): SEQ ID NO: 6015; WAN0249BR; Start 106; Stop 130
tttccgcagttggtacaatcacttg

SEQ ID NO: 427632 - DNA, 25 bp, Artificial
  probe
  misc_feature (1)..(25): SEQ ID NO: 6015; WAN0249BR; Start 143; Stop 167
ccacagcgaaaagtattctctatgg

SEQ ID NO: 427633 - DNA, 25 bp, Artificial
  probe
  misc_feature (1)..(25): SEQ ID NO: 6015; WAN0249BR; Start 187; Stop 211
aattcagacaaccctttcctttctg

SEQ ID NO: 427634 - DNA, 25 bp, Artificial
  probe
  misc_feature (1)..(25): SEQ ID NO: 6015; WAN0249BR; Start 103; Stop 127
aattttccgcagttggtacaatcac

SEQ ID NO: 427635 - DNA, 25 bp, Artificial
  probe
  misc_feature (1)..(25): SEQ ID NO: 6015; WAN0249BR; Start 92; Stop 116
ctaaggtctcaaattttccgcagtt

SEQ ID NO: 427636 - DNA, 25 bp, Artificial
  probe
  misc_feature (1)..(25): SEQ ID NO: 6015; WAN0249BR; Start 76; Stop 100
tgactaaaatttgagcctaaggtct

SEQ ID NO: 427637 - DNA, 25 bp, Artificial
  probe
  misc_feature (1)..(25): SEQ ID NO: 6015; WAN0249BR; Start 77; Stop 101
gactaaaatttgagcctaaggtctc

SEQ ID NO: 427638 - DNA, 25 bp, Artificial
  probe
  misc_feature (1)..(25): SEQ ID NO: 6015; WAN0249BR; Start 150; Stop 174
gaaaagtattctctatggggctcgc

SEQ ID NO: 427639 - DNA, 25 bp, Artificial
  probe
  misc_feature (1)..(25): SEQ ID NO: 6015; WAN0249BR; Start 148; Stop 172
gcgaaaagtattctctatggggctc

SEQ ID NO: 427640 - DNA, 25 bp, Artificial
  probe
  misc_feature (1)..(25): SEQ ID NO: 6015; WAN0249BR; Start 128; Stop 152
ttgtaccaacttacaccacagcgaa

SEQ ID NO: 427641 - DNA, 25 bp, Artificial
  probe
  misc_feature (1)..(25): SEQ ID NO: 6015; WAN0249BR; Start 101; Stop 125
caaattttccgcagttggtacaatc

SEQ ID NO: 427642 - DNA, 25 bp, Artificial
  probe
  misc_feature (1)..(25): SEQ ID NO: 6015; WAN0249BR; Start 75; Stop 99
atgactaaaatttgagcctaaggtc

SEQ ID NO: 427643 - DNA, 25 bp, Artificial
  probe
  misc_feature (1)..(25): SEQ ID NO: 6015; WAN0249BR; Start 102; Stop 126
aaattttccgcagttggtacaatca

SEQ ID NO: 427644 - DNA, 25 bp, Artificial
  probe
  misc_feature (1)..(25): SEQ ID NO: 6016; WAN0249B2; Start 10; Stop 34
aaaagagaataaaaggtagacgacg

SEQ ID NO: 427645 - DNA, 25 bp, Artificial
  probe
  misc_feature (1)..(25): SEQ ID NO: 6016; WAN0249B2; Start 11; Stop 35
aaagagaataaaaggtagacgacgc

SEQ ID NO: 427646 - DNA, 25 bp, Artificial
  probe
  misc_feature (1)..(25): SEQ ID NO: 6016; WAN0249B2; Start 12; Stop 36
aagagaataaaaggtagacgacgcc

SEQ ID NO: 427647 - DNA, 25 bp, Artificial
  probe
  misc_feature (1)..(25): SEQ ID NO: 6016; WAN0249B2; Start 18; Stop 42
ataaaaggtagacgacgcctcagta

SEQ ID NO: 427648 - DNA, 25 bp, Artificial
  probe
  misc_feature (1)..(25): SEQ ID NO: 6016; WAN0249B2; Start 14; Stop 38
gagaataaaaggtagacgacgcctc

SEQ ID NO: 427649 - DNA, 25 bp, Artificial
  probe
  misc_feature (1)..(25): SEQ ID NO: 6016; WAN0249B2; Start 19; Stop 43
taaaaggtagacgacgcctcagtaa

SEQ ID NO: 427650 - DNA, 25 bp, Artificial
  probe
  misc_feature (1)..(25): SEQ ID NO: 6016; WAN0249B2; Start 16; Stop 40
gaataaaaggtagacgacgcctcag

SEQ ID NO: 427651 - DNA, 25 bp, Artificial
  probe
  misc_feature (1)..(25): SEQ ID NO: 6016; WAN0249B2; Start 13; Stop 37
agagaataaaaggtagacgacgcct

SEQ ID NO: 427652 - DNA, 25 bp, Artificial
  probe
  misc_feature (1)..(25): SEQ ID NO: 6016; WAN0249B2; Start 15; Stop 39
agaataaaaggtagacgacgcctca

SEQ ID NO: 427653 - DNA, 25 bp, Artificial
  probe
  misc_feature (1)..(25): SEQ ID NO: 6016; WAN0249B2; Start 17; Stop 41
aataaaaggtagacgacgcctcagt

SEQ ID NO: 427654 - DNA, 25 bp, Artificial
  probe
  misc_feature (1)..(25): SEQ ID NO: 6016; WAN0249B2; Start 21; Stop 45
aaaggtagacgacgcctcagtaaaa

SEQ ID NO: 427655 - DNA, 25 bp, Artificial
  probe
  misc_feature (1)..(25): SEQ ID NO: 6016; WAN0249B2; Start 20; Stop 44
aaaaggtagacgacgcctcagtaaa

SEQ ID NO: 427656 - DNA, 25 bp, Artificial
  probe
  misc_feature (1)..(25): SEQ ID NO: 6017; WAN02495P; Start 1; Stop 25
accatgactactccaacagttaagt

SEQ ID NO: 427657 - DNA, 25 bp, Artificial
  probe
  misc_feature (1)..(25): SEQ ID NO: 6017; WAN02495P; Start 51; Stop 75
ggaaccattagaaacaacatagcaa

SEQ ID NO: 427658 - DNA, 25 bp, Artificial
  probe
  misc_feature (1)..(25): SEQ ID NO: 6017; WAN02495P; Start 54; Stop 78
accattagaaacaacatagcaaagt

SEQ ID NO: 427659 - DNA, 25 bp, Artificial
  probe
  misc_feature (1)..(25): SEQ ID NO: 6017; WAN02495P; Start 50; Stop 74
tggaaccattagaaacaacatagca

SEQ ID NO: 427660 - DNA, 25 bp, Artificial
  probe
  misc_feature (1)..(25): SEQ ID NO: 6017; WAN02495P; Start 49; Stop 73
ttggaaccattagaaacaacatagc

SEQ ID NO: 427661 - DNA, 25 bp, Artificial
  probe
  misc_feature (1)..(25): SEQ ID NO: 6017; WAN02495P; Start 53; Stop 77
aaccattagaaacaacatagcaaag

SEQ ID NO: 427662 - DNA, 25 bp, Artificial
  probe
  misc_feature (1)..(25): SEQ ID NO: 6017; WAN02495P; Start 52; Stop 76
gaaccattagaaacaacatagcaaa

SEQ ID NO: 427663 - DNA, 25 bp, Artificial
  probe
  misc_feature (1)..(25): SEQ ID NO: 6017; WAN02495P; Start 55; Stop 79
ccattagaaacaacatagcaaagtt

SEQ ID NO: 427664 - DNA, 25 bp, Artificial
  probe
  misc_feature (1)..(25): SEQ ID NO: 6017; WAN02495P; Start 7; Stop 31
actactccaacagttaagtcaaatt

SEQ ID NO: 427665 - DNA, 25 bp, Artificial
  probe
  misc_feature (1)..(25): SEQ ID NO: 6017; WAN02495P; Start 48; Stop 72
tttggaaccattagaaacaacatag

SEQ ID NO: 427666 - DNA, 25 bp, Artificial
  probe
  misc_feature (1)..(25): SEQ ID NO: 6017; WAN02495P; Start 2; Stop 26
ccatgactactccaacagttaagtc

SEQ ID NO: 427667 - DNA, 25 bp, Artificial
  probe
  misc_feature (1)..(25): SEQ ID NO: 6017; WAN02495P; Start 245; Stop 269
acttaatttatgtgtggctaatctt

SEQ ID NO: 427668 - DNA, 25 bp, Artificial
  probe
  misc_feature (1)..(25): SEQ ID NO: 6017; WAN02495P; Start 75; Stop 99
aagttaaaataaggctttgtccgta

SEQ ID NO: 427669 - DNA, 25 bp, Artificial
  probe
  misc_feature (1)..(25): SEQ ID NO: 6017; WAN02495P; Start 76; Stop 100
agttaaaataaggctttgtccgtac

SEQ ID NO: 427670 - DNA, 25 bp, Artificial
  probe
  misc_feature (1)..(25): SEQ ID NO: 6017; WAN02495P; Start 8; Stop 32
ctactccaacagttaagtcaaattt

SEQ ID NO: 427671 - DNA, 25 bp, Artificial
  probe
  misc_feature (1)..(25): SEQ ID NO: 6017; WAN02495P; Start 56; Stop 80
cattagaaacaacatagcaaagtta

SEQ ID NO: 427672 - DNA, 25 bp, Artificial
  probe
  misc_feature (1)..(25): SEQ ID NO: 6017; WAN02495P; Start 78; Stop 102
ttaaaataaggctttgtccgtacac

SEQ ID NO: 427673 - DNA, 25 bp, Artificial
  probe
  misc_feature (1)..(25): SEQ ID NO: 6017; WAN02495P; Start 77; Stop 101
gttaaaataaggctttgtccgtaca

SEQ ID NO: 427674 - DNA, 25 bp, Artificial
  probe
  misc_feature (1)..(25): SEQ ID NO: 6017; WAN02495P; Start 244; Stop 268
tacttaatttatgtgtggctaatct

SEQ ID NO: 427675 - DNA, 25 bp, Artificial
  probe
  misc_feature (1)..(25): SEQ ID NO: 6017; WAN02495P; Start 79; Stop 103
taaaataaggctttgtccgtacaca

SEQ ID NO: 427676 - DNA, 25 bp, Artificial
  probe
  misc_feature (1)..(25): SEQ ID NO: 6017; WAN02495P; Start 10; Stop 34
actccaacagttaagtcaaatttaa

SEQ ID NO: 427677 - DNA, 25 bp, Artificial
  probe
  misc_feature (1)..(25): SEQ ID NO: 6017; WAN02495P; Start 246; Stop 270
cttaatttatgtgtggctaatcttt

SEQ ID NO: 427678 - DNA, 25 bp, Artificial
  probe
  misc_feature (1)..(25): SEQ ID NO: 6017; WAN02495P; Start 239; Stop 263
gaatttacttaatttatgtgtggct

SEQ ID NO: 427679 - DNA, 25 bp, Artificial
  probe
  misc_feature (1)..(25): SEQ ID NO: 6017; WAN02495P; Start 238; Stop 262
agaatttacttaatttatgtgtggc

SEQ ID NO: 427680 - DNA, 25 bp, Artificial
  probe
  misc_feature (1)..(25): SEQ ID NO: 6017; WAN02495P; Start 188; Stop 212
acaagtatagcgttttcattagttt

SEQ ID NO: 427681 - DNA, 25 bp, Artificial
  probe
  misc_feature (1)..(25): SEQ ID NO: 6017; WAN02495P; Start 65; Stop 89
caacatagcaaagttaaaataaggc

SEQ ID NO: 427682 - DNA, 25 bp, Artificial
  probe
  misc_feature (1)..(25): SEQ ID NO: 6017; WAN02495P; Start 46; Stop 70
attttggaaccattagaaacaacat

SEQ ID NO: 427683 - DNA, 25 bp, Artificial
  probe
  misc_feature (1)..(25): SEQ ID NO: 6017; WAN02495P; Start 182; Stop 206
acaaatacaagtatagcgttttcat

SEQ ID NO: 427684 - DNA, 25 bp, Artificial
  probe
  misc_feature (1)..(25): SEQ ID NO: 6017; WAN02495P; Start 181; Stop 205
aacaaatacaagtatagcgttttca

SEQ ID NO: 427685 - DNA, 25 bp, Artificial
  probe
  misc_feature (1)..(25): SEQ ID NO: 6017; WAN02495P; Start 81; Stop 105
aaataaggctttgtccgtacacaac

SEQ ID NO: 427686 - DNA, 25 bp, Artificial
  probe
  misc_feature (1)..(25): SEQ ID NO: 6017; WAN02495P; Start 58; Stop 82
ttagaaacaacatagcaaagttaaa

SEQ ID NO: 427687 - DNA, 25 bp, Artificial
  probe
  misc_feature (1)..(25): SEQ ID NO: 6017; WAN02495P; Start 74; Stop 98
aaagttaaaataaggctttgtccgt

SEQ ID NO: 427688 - DNA, 25 bp, Artificial
  probe
  misc_feature (1)..(25): SEQ ID NO: 6017; WAN02495P; Start 6; Stop 30
gactactccaacagttaagtcaaat

SEQ ID NO: 427689 - DNA, 25 bp, Artificial
  probe
  misc_feature (1)..(25): SEQ ID NO: 6018; WAN0249B8; Start 26; Stop 50
gatacagacaaagctgatctacctt

SEQ ID NO: 427690 - DNA, 25 bp, Artificial
  probe
  misc_feature (1)..(25): SEQ ID NO: 6018; WAN0249B8; Start 27; Stop 51
atacagacaaagctgatctaccttt

SEQ ID NO: 427691 - DNA, 25 bp, Artificial
  probe
  misc_feature (1)..(25): SEQ ID NO: 6018; WAN0249B8; Start 25; Stop 49
agatacagacaaagctgatctacct

SEQ ID NO: 427692 - DNA, 25 bp, Artificial
  probe
  misc_feature (1)..(25): SEQ ID NO: 6018; WAN0249B8; Start 24; Stop 48
cagatacagacaaagctgatctacc

SEQ ID NO: 427693 - DNA, 25 bp, Artificial
  probe
  misc_feature (1)..(25): SEQ ID NO: 6018; WAN0249B8; Start 23; Stop 47
gcagatacagacaaagctgatctac

SEQ ID NO: 427694 - DNA, 25 bp, Artificial
  probe
  misc_feature (1)..(25): SEQ ID NO: 6018; WAN0249B8; Start 19; Stop 43
aaaggcagatacagacaaagctgat

SEQ ID NO: 427695 - DNA, 25 bp, Artificial
  probe
  misc_feature (1)..(25): SEQ ID NO: 6018; WAN0249B8; Start 20; Stop 44
aaggcagatacagacaaagctgatc

SEQ ID NO: 427696 - DNA, 25 bp, Artificial
  probe
  misc_feature (1)..(25): SEQ ID NO: 6018; WAN0249B8; Start 22; Stop 46
ggcagatacagacaaagctgatcta

SEQ ID NO: 427697 - DNA, 25 bp, Artificial
  probe
  misc_feature (1)..(25): SEQ ID NO: 6018; WAN0249B8; Start 28; Stop 52
tacagacaaagctgatctacctttt

SEQ ID NO: 427698 - DNA, 25 bp, Artificial
  probe
  misc_feature (1)..(25): SEQ ID NO: 6018; WAN0249B8; Start 21; Stop 45
aggcagatacagacaaagctgatct

SEQ ID NO: 427699 - DNA, 25 bp, Artificial
  probe
  misc_feature (1)..(25): SEQ ID NO: 6018; WAN0249B8; Start 18; Stop 42
aaaaggcagatacagacaaagctga

SEQ ID NO: 427700 - DNA, 25 bp, Artificial
  probe
  misc_feature (1)..(25): SEQ ID NO: 6019; WAN02499M; Start 13; Stop 37
gtactgctacctttaagaagatagt

SEQ ID NO: 427701 - DNA, 25 bp, Artificial
  probe
  misc_feature (1)..(25): SEQ ID NO: 6019; WAN02499M; Start 18; Stop 42
gctacctttaagaagatagtagacg

SEQ ID NO: 427702 - DNA, 25 bp, Artificial
  probe
  misc_feature (1)..(25): SEQ ID NO: 6019; WAN02499M; Start 17; Stop 41
tgctacctttaagaagatagtagac

SEQ ID NO: 427703 - DNA, 25 bp, Artificial
  probe
  misc_feature (1)..(25): SEQ ID NO: 6019; WAN02499M; Start 15; Stop 39
actgctacctttaagaagatagtag

SEQ ID NO: 427704 - DNA, 25 bp, Artificial
  probe
  misc_feature (1)..(25): SEQ ID NO: 6019; WAN02499M; Start 16; Stop 40
ctgctacctttaagaagatagtaga

SEQ ID NO: 427705 - DNA, 25 bp, Artificial
  probe
  misc_feature (1)..(25): SEQ ID NO: 6019; WAN02499M; Start 12; Stop 36
ggtactgctacctttaagaagatag

SEQ ID NO: 427706 - DNA, 25 bp, Artificial
  probe
  misc_feature (1)..(25): SEQ ID NO: 6019; WAN02499M; Start 21; Stop 45
acctttaagaagatagtagacgtat

SEQ ID NO: 427707 - DNA, 25 bp, Artificial
  probe
  misc_feature (1)..(25): SEQ ID NO: 6019; WAN02499M; Start 90; Stop 114
tgtttattgaatttaagactttggt

SEQ ID NO: 427708 - DNA, 25 bp, Artificial
  probe
  misc_feature (1)..(25): SEQ ID NO: 6019; WAN02499M; Start 14; Stop 38
tactgctacctttaagaagatagta

SEQ ID NO: 427709 - DNA, 25 bp, Artificial
  probe
  misc_feature (1)..(25): SEQ ID NO: 6019; WAN02499M; Start 95; Stop 119
attgaatttaagactttggtaacaa

SEQ ID NO: 427710 - DNA, 25 bp, Artificial
  probe
  misc_feature (1)..(25): SEQ ID NO: 6019; WAN02499M; Start 19; Stop 43
ctacctttaagaagatagtagacgt

SEQ ID NO: 427711 - DNA, 25 bp, Artificial
  probe
  misc_feature (1)..(25): SEQ ID NO: 6019; WAN02499M; Start 20; Stop 44
tacctttaagaagatagtagacgta

SEQ ID NO: 427712 - DNA, 25 bp, Artificial
  probe
  misc_feature (1)..(25): SEQ ID NO: 6019; WAN02499M; Start 102; Stop 126
ttaagactttggtaacaaattgaaa

SEQ ID NO: 427713 - DNA, 25 bp, Artificial
  probe
  misc_feature (1)..(25): SEQ ID NO: 6019; WAN02499M; Start 101; Stop 125
tttaagactttggtaacaaattgaa

SEQ ID NO: 427714 - DNA, 25 bp, Artificial
  probe
  misc_feature (1)..(25): SEQ ID NO: 6019; WAN02499M; Start 96; Stop 120
ttgaatttaagactttggtaacaaa

SEQ ID NO: 427715 - DNA, 25 bp, Artificial
  probe
  misc_feature (1)..(25): SEQ ID NO: 6019; WAN02499M; Start 100; Stop 124
atttaagactttggtaacaaattga

SEQ ID NO: 427716 - DNA, 25 bp, Artificial
  probe
  misc_feature (1)..(25): SEQ ID NO: 6019; WAN02499M; Start 97; Stop 121
tgaatttaagactttggtaacaaat

SEQ ID NO: 427717 - DNA, 25 bp, Artificial
  probe
  misc_feature (1)..(25): SEQ ID NO: 6019; WAN02499M; Start 22; Stop 46
cctttaagaagatagtagacgtata

SEQ ID NO: 427718 - DNA, 25 bp, Artificial
  probe
  misc_feature (1)..(25): SEQ ID NO: 6019; WAN02499M; Start 104; Stop 128
aagactttggtaacaaattgaaaat

SEQ ID NO: 427719 - DNA, 25 bp, Artificial
  probe
  misc_feature (1)..(25): SEQ ID NO: 6019; WAN02499M; Start 103; Stop 127
taagactttggtaacaaattgaaaa

SEQ ID NO: 427720 - DNA, 25 bp, Artificial
  probe
  misc_feature (1)..(25): SEQ ID NO: 6019; WAN02499M; Start 99; Stop 123
aatttaagactttggtaacaaattg

SEQ ID NO: 427721 - DNA, 25 bp, Artificial
  probe
  misc_feature (1)..(25): SEQ ID NO: 6019; WAN02499M; Start 105; Stop 129
agactttggtaacaaattgaaaata

SEQ ID NO: 427722 - DNA, 25 bp, Artificial
  probe
  misc_feature (1)..(25): SEQ ID NO: 6019; WAN02499M; Start 106; Stop 130
gactttggtaacaaattgaaaataa

SEQ ID NO: 427723 - DNA, 25 bp, Artificial
  probe
  misc_feature (1)..(25): SEQ ID NO: 6020; WAN0249BA; Start 15; Stop 39
tttcagatatggtttgacaagaaca

SEQ ID NO: 427724 - DNA, 25 bp, Artificial
  probe
  misc_feature (1)..(25): SEQ ID NO: 6020; WAN0249BA; Start 18; Stop 42
cagatatggtttgacaagaacattc

SEQ ID NO: 427725 - DNA, 25 bp, Artificial
  probe
  misc_feature (1)..(25): SEQ ID NO: 6020; WAN0249BA; Start 17; Stop 41
tcagatatggtttgacaagaacatt

SEQ ID NO: 427726 - DNA, 25 bp, Artificial
  probe
  misc_feature (1)..(25): SEQ ID NO: 6020; WAN0249BA; Start 16; Stop 40
ttcagatatggtttgacaagaacat

SEQ ID NO: 427727 - DNA, 25 bp, Artificial
  probe
  misc_feature (1)..(25): SEQ ID NO: 6020; WAN0249BA; Start 19; Stop 43
agatatggtttgacaagaacattct

SEQ ID NO: 427728 - DNA, 25 bp, Artificial
  probe
  misc_feature (1)..(25): SEQ ID NO: 6020; WAN0249BA; Start 41; Stop 65
tctttcactgtagaatcgtgttata

SEQ ID NO: 427729 - DNA, 25 bp, Artificial
  probe
  misc_feature (1)..(25): SEQ ID NO: 6020; WAN0249BA; Start 40; Stop 64
ttctttcactgtagaatcgtgttat

SEQ ID NO: 427730 - DNA, 25 bp, Artificial
  probe
  misc_feature (1)..(25): SEQ ID NO: 6020; WAN0249BA; Start 25; Stop 49
ggtttgacaagaacattctttcact

SEQ ID NO: 427731 - DNA, 25 bp, Artificial
  probe
  misc_feature (1)..(25): SEQ ID NO: 6020; WAN0249BA; Start 24; Stop 48
tggtttgacaagaacattctttcac

SEQ ID NO: 427732 - DNA, 25 bp, Artificial
  probe
  misc_feature (1)..(25): SEQ ID NO: 6020; WAN0249BA; Start 23; Stop 47
atggtttgacaagaacattctttca

SEQ ID NO: 427733 - DNA, 25 bp, Artificial
  probe
  misc_feature (1)..(25): SEQ ID NO: 6020; WAN0249BA; Start 27; Stop 51
tttgacaagaacattctttcactgt

SEQ ID NO: 427734 - DNA, 25 bp, Artificial
  probe
  misc_feature (1)..(25): SEQ ID NO: 6020; WAN0249BA; Start 26; Stop 50
gtttgacaagaacattctttcactg

SEQ ID NO: 427735 - DNA, 25 bp, Artificial
  probe
  misc_feature (1)..(25): SEQ ID NO: 6020; WAN0249BA; Start 29; Stop 53
tgacaagaacattctttcactgtag

SEQ ID NO: 427736 - DNA, 25 bp, Artificial
  probe
  misc_feature (1)..(25): SEQ ID NO: 6020; WAN0249BA; Start 30; Stop 54
gacaagaacattctttcactgtaga

SEQ ID NO: 427737 - DNA, 25 bp, Artificial
  probe
  misc_feature (1)..(25): SEQ ID NO: 6020; WAN0249BA; Start 28; Stop 52
ttgacaagaacattctttcactgta

SEQ ID NO: 427738 - DNA, 25 bp, Artificial
  probe
  misc_feature (1)..(25): SEQ ID NO: 6020; WAN0249BA; Start 31; Stop 55
acaagaacattctttcactgtagaa

SEQ ID NO: 427739 - DNA, 25 bp, Artificial
  probe
  misc_feature (1)..(25): SEQ ID NO: 6020; WAN0249BA; Start 42; Stop 66
ctttcactgtagaatcgtgttataa

SEQ ID NO: 427740 - DNA, 25 bp, Artificial
  probe
  misc_feature (1)..(25): SEQ ID NO: 6020; WAN0249BA; Start 14; Stop 38
ttttcagatatggtttgacaagaac

SEQ ID NO: 427741 - DNA, 25 bp, Artificial
  probe
  misc_feature (1)..(25): SEQ ID NO: 6020; WAN0249BA; Start 22; Stop 46
tatggtttgacaagaacattctttc

SEQ ID NO: 427742 - DNA, 25 bp, Artificial
  probe
  misc_feature (1)..(25): SEQ ID NO: 6020; WAN0249BA; Start 20; Stop 44
gatatggtttgacaagaacattctt

SEQ ID NO: 427743 - DNA, 25 bp, Artificial
  probe
  misc_feature (1)..(25): SEQ ID NO: 6020; WAN0249BA; Start 43; Stop 67
tttcactgtagaatcgtgttataaa

SEQ ID NO: 427744 - DNA, 25 bp, Artificial
  probe
  misc_feature (1)..(25): SEQ ID NO: 6020; WAN0249BA; Start 21; Stop 45
atatggtttgacaagaacattcttt

SEQ ID NO: 427745 - DNA, 25 bp, Artificial
  probe
  misc_feature (1)..(25): SEQ ID NO: 6020; WAN0249BA; Start 38; Stop 62
cattctttcactgtagaatcgtgtt

SEQ ID NO: 427746 - DNA, 25 bp, Artificial
  probe
  misc_feature (1)..(25): SEQ ID NO: 6020; WAN0249BA; Start 36; Stop 60
aacattctttcactgtagaatcgtg

SEQ ID NO: 427747 - DNA, 25 bp, Artificial
  probe
  misc_feature (1)..(25): SEQ ID NO: 6020; WAN0249BA; Start 37; Stop 61
acattctttcactgtagaatcgtgt

SEQ ID NO: 427748 - DNA, 25 bp, Artificial
  probe
  misc_feature (1)..(25): SEQ ID NO: 6020; WAN0249BA; Start 35; Stop 59
gaacattctttcactgtagaatcgt

SEQ ID NO: 427749 - DNA, 25 bp, Artificial
  probe
  misc_feature (1)..(25): SEQ ID NO: 6020; WAN0249BA; Start 34; Stop 58
agaacattctttcactgtagaatcg

SEQ ID NO: 427750 - DNA, 25 bp, Artificial
  probe
  misc_feature (1)..(25): SEQ ID NO: 6020; WAN0249BA; Start 39; Stop 63
attctttcactgtagaatcgtgtta

SEQ ID NO: 427751 - DNA, 25 bp, Artificial
  probe
  misc_feature (1)..(25): SEQ ID NO: 6020; WAN0249BA; Start 44; Stop 68
ttcactgtagaatcgtgttataaaa

SEQ ID NO: 427752 - DNA, 25 bp, Artificial
  probe
  misc_feature (1)..(25): SEQ ID NO: 6020; WAN0249BA; Start 47; Stop 71
actgtagaatcgtgttataaaatct

SEQ ID NO: 427753 - DNA, 25 bp, Artificial
  probe
  misc_feature (1)..(25): SEQ ID NO: 6020; WAN0249BA; Start 32; Stop 56
caagaacattctttcactgtagaat

SEQ ID NO: 427754 - DNA, 25 bp, Artificial
  probe
  misc_feature (1)..(25): SEQ ID NO: 6020; WAN0249BA; Start 45; Stop 69
tcactgtagaatcgtgttataaaat

SEQ ID NO: 427755 - DNA, 25 bp, Artificial
  probe
  misc_feature (1)..(25): SEQ ID NO: 6020; WAN0249BA; Start 33; Stop 57
aagaacattctttcactgtagaatc

SEQ ID NO: 427756 - DNA, 25 bp, Artificial
  probe
  misc_feature (1)..(25): SEQ ID NO: 6021; WAN024972; Start 109; Stop 133
tacttcatcttaatagtgagcaagc

SEQ ID NO: 427757 - DNA, 25 bp, Artificial
  probe
  misc_feature (1)..(25): SEQ ID NO: 6021; WAN024972; Start 110; Stop 134
acttcatcttaatagtgagcaagct

SEQ ID NO: 427758 - DNA, 25 bp, Artificial
  probe
  misc_feature (1)..(25): SEQ ID NO: 6021; WAN024972; Start 40; Stop 64
attgtgaaataggtatggaattggc

SEQ ID NO: 427759 - DNA, 25 bp, Artificial
  probe
  misc_feature (1)..(25): SEQ ID NO: 6021; WAN024972; Start 44; Stop 68
tgaaataggtatggaattggcgaaa

SEQ ID NO: 427760 - DNA, 25 bp, Artificial
  probe
  misc_feature (1)..(25): SEQ ID NO: 6021; WAN024972; Start 34; Stop 58
cggtaaattgtgaaataggtatgga

SEQ ID NO: 427761 - DNA, 25 bp, Artificial
  probe
  misc_feature (1)..(25): SEQ ID NO: 6021; WAN024972; Start 33; Stop 57
tcggtaaattgtgaaataggtatgg

SEQ ID NO: 427762 - DNA, 25 bp, Artificial
  probe
  misc_feature (1)..(25): SEQ ID NO: 6021; WAN024972; Start 111; Stop 135
cttcatcttaatagtgagcaagcta

SEQ ID NO: 427763 - DNA, 25 bp, Artificial
  probe
  misc_feature (1)..(25): SEQ ID NO: 6021; WAN024972; Start 25; Stop 49
ctgtgtcatcggtaaattgtgaaat

SEQ ID NO: 427764 - DNA, 25 bp, Artificial
  probe
  misc_feature (1)..(25): SEQ ID NO: 6021; WAN024972; Start 43; Stop 67
gtgaaataggtatggaattggcgaa

SEQ ID NO: 427765 - DNA, 25 bp, Artificial
  probe
  misc_feature (1)..(25): SEQ ID NO: 6021; WAN024972; Start 29; Stop 53
gtcatcggtaaattgtgaaataggt

SEQ ID NO: 427766 - DNA, 25 bp, Artificial
  probe
  misc_feature (1)..(25): SEQ ID NO: 6021; WAN024972; Start 28; Stop 52
tgtcatcggtaaattgtgaaatagg

SEQ ID NO: 427767 - DNA, 25 bp, Artificial
  probe
  misc_feature (1)..(25): SEQ ID NO: 6021; WAN024972; Start 41; Stop 65
ttgtgaaataggtatggaattggcg

SEQ ID NO: 427768 - DNA, 25 bp, Artificial
  probe
  misc_feature (1)..(25): SEQ ID NO: 6021; WAN024972; Start 24; Stop 48
tctgtgtcatcggtaaattgtgaaa

SEQ ID NO: 427769 - DNA, 25 bp, Artificial
  probe
  misc_feature (1)..(25): SEQ ID NO: 6021; WAN024972; Start 23; Stop 47
ttctgtgtcatcggtaaattgtgaa

SEQ ID NO: 427770 - DNA, 25 bp, Artificial
  probe
  misc_feature (1)..(25): SEQ ID NO: 6021; WAN024972; Start 22; Stop 46
tttctgtgtcatcggtaaattgtga

SEQ ID NO: 427771 - DNA, 25 bp, Artificial
  probe
  misc_feature (1)..(25): SEQ ID NO: 6021; WAN024972; Start 112; Stop 136
ttcatcttaatagtgagcaagctaa

SEQ ID NO: 427772 - DNA, 25 bp, Artificial
  probe
  misc_feature (1)..(25): SEQ ID NO: 6021; WAN024972; Start 26; Stop 50
tgtgtcatcggtaaattgtgaaata

SEQ ID NO: 427773 - DNA, 25 bp, Artificial
  probe
  misc_feature (1)..(25): SEQ ID NO: 6021; WAN024972; Start 27; Stop 51
gtgtcatcggtaaattgtgaaatag

SEQ ID NO: 427774 - DNA, 25 bp, Artificial
  probe
  misc_feature (1)..(25): SEQ ID NO: 6021; WAN024972; Start 42; Stop 66
tgtgaaataggtatggaattggcga

SEQ ID NO: 427775 - DNA, 25 bp, Artificial
  probe
  misc_feature (1)..(25): SEQ ID NO: 6021; WAN024972; Start 30; Stop 54
tcatcggtaaattgtgaaataggta

SEQ ID NO: 427776 - DNA, 25 bp, Artificial
  probe
  misc_feature (1)..(25): SEQ ID NO: 6021; WAN024972; Start 108; Stop 132
atacttcatcttaatagtgagcaag

SEQ ID NO: 427777 - DNA, 25 bp, Artificial
  probe
  misc_feature (1)..(25): SEQ ID NO: 6021; WAN024972; Start 32; Stop 56
atcggtaaattgtgaaataggtatg

SEQ ID NO: 427778 - DNA, 25 bp, Artificial
  probe
  misc_feature (1)..(25): SEQ ID NO: 6021; WAN024972; Start 31; Stop 55
catcggtaaattgtgaaataggtat

SEQ ID NO: 427779 - DNA, 25 bp, Artificial
  probe
  misc_feature (1)..(25): SEQ ID NO: 6021; WAN024972; Start 35; Stop 59
ggtaaattgtgaaataggtatggaa

SEQ ID NO: 427780 - DNA, 25 bp, Artificial
  probe
  misc_feature (1)..(25): SEQ ID NO: 6021; WAN024972; Start 39; Stop 63
aattgtgaaataggtatggaattgg

SEQ ID NO: 427781 - DNA, 25 bp, Artificial
  probe
  misc_feature (1)..(25): SEQ ID NO: 6021; WAN024972; Start 77; Stop 101
aatccttcacaataggttctatgaa

SEQ ID NO: 427782 - DNA, 25 bp, Artificial
  probe
  misc_feature (1)..(25): SEQ ID NO: 6021; WAN024972; Start 114; Stop 138
catcttaatagtgagcaagctaaac

SEQ ID NO: 427783 - DNA, 25 bp, Artificial
  probe
  misc_feature (1)..(25): SEQ ID NO: 6021; WAN024972; Start 76; Stop 100
aaatccttcacaataggttctatga

SEQ ID NO: 427784 - DNA, 25 bp, Artificial
  probe
  misc_feature (1)..(25): SEQ ID NO: 6021; WAN024972; Start 116; Stop 140
tcttaatagtgagcaagctaaactt

SEQ ID NO: 427785 - DNA, 25 bp, Artificial
  probe
  misc_feature (1)..(25): SEQ ID NO: 6021; WAN024972; Start 113; Stop 137
tcatcttaatagtgagcaagctaaa

SEQ ID NO: 427786 - DNA, 25 bp, Artificial
  probe
  misc_feature (1)..(25): SEQ ID NO: 6021; WAN024972; Start 115; Stop 139
atcttaatagtgagcaagctaaact

SEQ ID NO: 427787 - DNA, 25 bp, Artificial
  probe
  misc_feature (1)..(25): SEQ ID NO: 6021; WAN024972; Start 45; Stop 69
gaaataggtatggaattggcgaaaa

SEQ ID NO: 427788 - DNA, 25 bp, Artificial
  probe
  misc_feature (1)..(25): SEQ ID NO: 6021; WAN024972; Start 153; Stop 177
cctcatatgggatgttctttgacta

SEQ ID NO: 427789 - DNA, 25 bp, Artificial
  probe
  misc_feature (1)..(25): SEQ ID NO: 6022; WAN024975; Start 2; Stop 26
gaaatcctccctactatgacctcac

SEQ ID NO: 427790 - DNA, 25 bp, Artificial
  probe
  misc_feature (1)..(25): SEQ ID NO: 6022; WAN024975; Start 1; Stop 25
agaaatcctccctactatgacctca

SEQ ID NO: 427791 - DNA, 25 bp, Artificial
  probe
  misc_feature (1)..(25): SEQ ID NO: 6022; WAN024975; Start 3; Stop 27
aaatcctccctactatgacctcacc

SEQ ID NO: 427792 - DNA, 25 bp, Artificial
  probe
  misc_feature (1)..(25): SEQ ID NO: 6022; WAN024975; Start 27; Stop 51
cttgtcaggctctactgctgtaaga

SEQ ID NO: 427793 - DNA, 25 bp, Artificial
  probe
  misc_feature (1)..(25): SEQ ID NO: 6022; WAN024975; Start 5; Stop 29
atcctccctactatgacctcacctt

SEQ ID NO: 427794 - DNA, 25 bp, Artificial
  probe
  misc_feature (1)..(25): SEQ ID NO: 6022; WAN024975; Start 4; Stop 28
aatcctccctactatgacctcacct

SEQ ID NO: 427795 - DNA, 25 bp, Artificial
  probe
  misc_feature (1)..(25): SEQ ID NO: 6022; WAN024975; Start 8; Stop 32
ctccctactatgacctcaccttgtc

SEQ ID NO: 427796 - DNA, 25 bp, Artificial
  probe
  misc_feature (1)..(25): SEQ ID NO: 6022; WAN024975; Start 26; Stop 50
ccttgtcaggctctactgctgtaag

SEQ ID NO: 427797 - DNA, 25 bp, Artificial
  probe
  misc_feature (1)..(25): SEQ ID NO: 6022; WAN024975; Start 6; Stop 30
tcctccctactatgacctcaccttg

SEQ ID NO: 427798 - DNA, 25 bp, Artificial
  probe
  misc_feature (1)..(25): SEQ ID NO: 6022; WAN024975; Start 7; Stop 31
cctccctactatgacctcaccttgt

SEQ ID NO: 427799 - DNA, 25 bp, Artificial
  probe
  misc_feature (1)..(25): SEQ ID NO: 6022; WAN024975; Start 11; Stop 35
cctactatgacctcaccttgtcagg

SEQ ID NO: 427800 - DNA, 25 bp, Artificial
  probe
  misc_feature (1)..(25): SEQ ID NO: 6022; WAN024975; Start 12; Stop 36
ctactatgacctcaccttgtcaggc

SEQ ID NO: 427801 - DNA, 25 bp, Artificial
  probe
  misc_feature (1)..(25): SEQ ID NO: 6022; WAN024975; Start 16; Stop 40
tatgacctcaccttgtcaggctcta

SEQ ID NO: 427802 - DNA, 25 bp, Artificial
  probe
  misc_feature (1)..(25): SEQ ID NO: 6022; WAN024975; Start 13; Stop 37
tactatgacctcaccttgtcaggct

SEQ ID NO: 427803 - DNA, 25 bp, Artificial
  probe
  misc_feature (1)..(25): SEQ ID NO: 6022; WAN024975; Start 10; Stop 34
ccctactatgacctcaccttgtcag

SEQ ID NO: 427804 - DNA, 25 bp, Artificial
  probe
  misc_feature (1)..(25): SEQ ID NO: 6022; WAN024975; Start 9; Stop 33
tccctactatgacctcaccttgtca

SEQ ID NO: 427805 - DNA, 25 bp, Artificial
  probe
  misc_feature (1)..(25): SEQ ID NO: 6023; WAN02497K; Start 92; Stop 116
acaagtagacggagagtttatagcc

SEQ ID NO: 427806 - DNA, 25 bp, Artificial
  probe
  misc_feature (1)..(25): SEQ ID NO: 6023; WAN02497K; Start 93; Stop 117
caagtagacggagagtttatagccc

SEQ ID NO: 427807 - DNA, 25 bp, Artificial
  probe
  misc_feature (1)..(25): SEQ ID NO: 6023; WAN02497K; Start 5; Stop 29
caaactagaaagctaggctcctaaa

SEQ ID NO: 427808 - DNA, 25 bp, Artificial
  probe
  misc_feature (1)..(25): SEQ ID NO: 6023; WAN02497K; Start 4; Stop 28
acaaactagaaagctaggctcctaa

SEQ ID NO: 427809 - DNA, 25 bp, Artificial
  probe
  misc_feature (1)..(25): SEQ ID NO: 6023; WAN02497K; Start 3; Stop 27
aacaaactagaaagctaggctccta

SEQ ID NO: 427810 - DNA, 25 bp, Artificial
  probe
  misc_feature (1)..(25): SEQ ID NO: 6023; WAN02497K; Start 27; Stop 51
aaaagggagaaagtctatgaaaaga

SEQ ID NO: 427811 - DNA, 25 bp, Artificial
  probe
  misc_feature (1)..(25): SEQ ID NO: 6023; WAN02497K; Start 29; Stop 53
aagggagaaagtctatgaaaagatt

SEQ ID NO: 427812 - DNA, 25 bp, Artificial
  probe
  misc_feature (1)..(25): SEQ ID NO: 6023; WAN02497K; Start 28; Stop 52
aaagggagaaagtctatgaaaagat

SEQ ID NO: 427813 - DNA, 25 bp, Artificial
  probe
  misc_feature (1)..(25): SEQ ID NO: 6023; WAN02497K; Start 23; Stop 47
tcctaaaagggagaaagtctatgaa

SEQ ID NO: 427814 - DNA, 25 bp, Artificial
  probe
  misc_feature (1)..(25): SEQ ID NO: 6023; WAN02497K; Start 2; Stop 26
gaacaaactagaaagctaggctcct

SEQ ID NO: 427815 - DNA, 25 bp, Artificial
  probe
  misc_feature (1)..(25): SEQ ID NO: 6023; WAN02497K; Start 1; Stop 25
agaacaaactagaaagctaggctcc

SEQ ID NO: 427816 - DNA, 25 bp, Artificial
  probe
  misc_feature (1)..(25): SEQ ID NO: 6023; WAN02497K; Start 24; Stop 48
cctaaaagggagaaagtctatgaaa

SEQ ID NO: 427817 - DNA, 25 bp, Artificial
  probe
  misc_feature (1)..(25): SEQ ID NO: 6023; WAN02497K; Start 30; Stop 54
agggagaaagtctatgaaaagatta

SEQ ID NO: 427818 - DNA, 25 bp, Artificial
  probe
  misc_feature (1)..(25): SEQ ID NO: 6023; WAN02497K; Start 74; Stop 98
gacttcaattgttgcaggacaagta

SEQ ID NO: 427819 - DNA, 25 bp, Artificial
  probe
  misc_feature (1)..(25): SEQ ID NO: 6023; WAN02497K; Start 38; Stop 62
agtctatgaaaagattagcggacgg

SEQ ID NO: 427820 - DNA, 25 bp, Artificial
  probe
  misc_feature (1)..(25): SEQ ID NO: 6023; WAN02497K; Start 26; Stop 50
taaaagggagaaagtctatgaaaag

SEQ ID NO: 427821 - DNA, 25 bp, Artificial
  probe
  misc_feature (1)..(25): SEQ ID NO: 6023; WAN02497K; Start 25; Stop 49
ctaaaagggagaaagtctatgaaaa

SEQ ID NO: 427822 - DNA, 25 bp, Artificial
  probe
  misc_feature (1)..(25): SEQ ID NO: 6023; WAN02497K; Start 7; Stop 31
aactagaaagctaggctcctaaaag

SEQ ID NO: 427823 - DNA, 25 bp, Artificial
  probe
  misc_feature (1)..(25): SEQ ID NO: 6023; WAN02497K; Start 6; Stop 30
aaactagaaagctaggctcctaaaa

SEQ ID NO: 427824 - DNA, 25 bp, Artificial
  probe
  misc_feature (1)..(25): SEQ ID NO: 6023; WAN02497K; Start 72; Stop 96
cagacttcaattgttgcaggacaag

SEQ ID NO: 427825 - DNA, 25 bp, Artificial
  probe
  misc_feature (1)..(25): SEQ ID NO: 6023; WAN02497K; Start 73; Stop 97
agacttcaattgttgcaggacaagt

SEQ ID NO: 427826 - DNA, 25 bp, Artificial
  probe
  misc_feature (1)..(25): SEQ ID NO: 6023; WAN02497K; Start 8; Stop 32
actagaaagctaggctcctaaaagg

SEQ ID NO: 427827 - DNA, 25 bp, Artificial
  probe
  misc_feature (1)..(25): SEQ ID NO: 6023; WAN02497K; Start 9; Stop 33
ctagaaagctaggctcctaaaaggg

SEQ ID NO: 427828 - DNA, 25 bp, Artificial
  probe
  misc_feature (1)..(25): SEQ ID NO: 6023; WAN02497K; Start 39; Stop 63
gtctatgaaaagattagcggacggc

SEQ ID NO: 427829 - DNA, 25 bp, Artificial
  probe
  misc_feature (1)..(25): SEQ ID NO: 6023; WAN02497K; Start 10; Stop 34
tagaaagctaggctcctaaaaggga

SEQ ID NO: 427830 - DNA, 25 bp, Artificial
  probe
  misc_feature (1)..(25): SEQ ID NO: 6023; WAN02497K; Start 66; Stop 90
tttgagcagacttcaattgttgcag

SEQ ID NO: 427831 - DNA, 25 bp, Artificial
  probe
  misc_feature (1)..(25): SEQ ID NO: 6023; WAN02497K; Start 67; Stop 91
ttgagcagacttcaattgttgcagg

SEQ ID NO: 427832 - DNA, 25 bp, Artificial
  probe
  misc_feature (1)..(25): SEQ ID NO: 6023; WAN02497K; Start 69; Stop 93
gagcagacttcaattgttgcaggac

SEQ ID NO: 427833 - DNA, 25 bp, Artificial
  probe
  misc_feature (1)..(25): SEQ ID NO: 6023; WAN02497K; Start 40; Stop 64
tctatgaaaagattagcggacggcg

SEQ ID NO: 427834 - DNA, 25 bp, Artificial
  probe
  misc_feature (1)..(25): SEQ ID NO: 6023; WAN02497K; Start 42; Stop 66
tatgaaaagattagcggacggcgtt

SEQ ID NO: 427835 - DNA, 25 bp, Artificial
  probe
  misc_feature (1)..(25): SEQ ID NO: 6023; WAN02497K; Start 71; Stop 95
gcagacttcaattgttgcaggacaa

SEQ ID NO: 427836 - DNA, 25 bp, Artificial
  probe
  misc_feature (1)..(25): SEQ ID NO: 6023; WAN02497K; Start 63; Stop 87
cgttttgagcagacttcaattgttg

SEQ ID NO: 427837 - DNA, 25 bp, Artificial
  probe
  misc_feature (1)..(25): SEQ ID NO: 6023; WAN02497K; Start 64; Stop 88
gttttgagcagacttcaattgttgc

SEQ ID NO: 427838 - DNA, 25 bp, Artificial
  probe
  misc_feature (1)..(25): SEQ ID NO: 6024; WAN0249CF; Start 34; Stop 58
tcatcgcatgtcagtaatctcataa

SEQ ID NO: 427839 - DNA, 25 bp, Artificial
  probe
  misc_feature (1)..(25): SEQ ID NO: 6024; WAN0249CF; Start 33; Stop 57
ttcatcgcatgtcagtaatctcata

SEQ ID NO: 427840 - DNA, 25 bp, Artificial
  probe
  misc_feature (1)..(25): SEQ ID NO: 6024; WAN0249CF; Start 35; Stop 59
catcgcatgtcagtaatctcataag

SEQ ID NO: 427841 - DNA, 25 bp, Artificial
  probe
  misc_feature (1)..(25): SEQ ID NO: 6024; WAN0249CF; Start 36; Stop 60
atcgcatgtcagtaatctcataagg

SEQ ID NO: 427842 - DNA, 25 bp, Artificial
  probe
  misc_feature (1)..(25): SEQ ID NO: 6024; WAN0249CF; Start 38; Stop 62
cgcatgtcagtaatctcataaggaa

SEQ ID NO: 427843 - DNA, 25 bp, Artificial
  probe
  misc_feature (1)..(25): SEQ ID NO: 6024; WAN0249CF; Start 39; Stop 63
gcatgtcagtaatctcataaggaat

SEQ ID NO: 427844 - DNA, 25 bp, Artificial
  probe
  misc_feature (1)..(25): SEQ ID NO: 6024; WAN0249CF; Start 37; Stop 61
tcgcatgtcagtaatctcataagga

SEQ ID NO: 427845 - DNA, 25 bp, Artificial
  probe
  misc_feature (1)..(25): SEQ ID NO: 6024; WAN0249CF; Start 28; Stop 52
taagtttcatcgcatgtcagtaatc

SEQ ID NO: 427846 - DNA, 25 bp, Artificial
  probe
  misc_feature (1)..(25): SEQ ID NO: 6024; WAN0249CF; Start 32; Stop 56
tttcatcgcatgtcagtaatctcat

SEQ ID NO: 427847 - DNA, 25 bp, Artificial
  probe
  misc_feature (1)..(25): SEQ ID NO: 6024; WAN0249CF; Start 3; Stop 27
agaaactcttcattgccatataact

SEQ ID NO: 427848 - DNA, 25 bp, Artificial
  probe
  misc_feature (1)..(25): SEQ ID NO: 6024; WAN0249CF; Start 29; Stop 53
aagtttcatcgcatgtcagtaatct

SEQ ID NO: 427849 - DNA, 25 bp, Artificial
  probe
  misc_feature (1)..(25): SEQ ID NO: 6024; WAN0249CF; Start 6; Stop 30
aactcttcattgccatataacttaa

SEQ ID NO: 427850 - DNA, 25 bp, Artificial
  probe
  misc_feature (1)..(25): SEQ ID NO: 6024; WAN0249CF; Start 27; Stop 51
ttaagtttcatcgcatgtcagtaat

SEQ ID NO: 427851 - DNA, 25 bp, Artificial
  probe
  misc_feature (1)..(25): SEQ ID NO: 6024; WAN0249CF; Start 294; Stop 318
tatgaatgaactaagatgaggatca

SEQ ID NO: 427852 - DNA, 25 bp, Artificial
  probe
  misc_feature (1)..(25): SEQ ID NO: 6024; WAN0249CF; Start 30; Stop 54
agtttcatcgcatgtcagtaatctc

SEQ ID NO: 427853 - DNA, 25 bp, Artificial
  probe
  misc_feature (1)..(25): SEQ ID NO: 6024; WAN0249CF; Start 31; Stop 55
gtttcatcgcatgtcagtaatctca

SEQ ID NO: 427854 - DNA, 25 bp, Artificial
  probe
  misc_feature (1)..(25): SEQ ID NO: 6024; WAN0249CF; Start 2; Stop 26
gagaaactcttcattgccatataac

SEQ ID NO: 427855 - DNA, 25 bp, Artificial
  probe
  misc_feature (1)..(25): SEQ ID NO: 6024; WAN0249CF; Start 4; Stop 28
gaaactcttcattgccatataactt

SEQ ID NO: 427856 - DNA, 25 bp, Artificial
  probe
  misc_feature (1)..(25): SEQ ID NO: 6024; WAN0249CF; Start 40; Stop 64
catgtcagtaatctcataaggaatt

SEQ ID NO: 427857 - DNA, 25 bp, Artificial
  probe
  misc_feature (1)..(25): SEQ ID NO: 6024; WAN0249CF; Start 293; Stop 317
ttatgaatgaactaagatgaggatc

SEQ ID NO: 427858 - DNA, 25 bp, Artificial
  probe
  misc_feature (1)..(25): SEQ ID NO: 6024; WAN0249CF; Start 295; Stop 319
atgaatgaactaagatgaggatcat

SEQ ID NO: 427859 - DNA, 25 bp, Artificial
  probe
  misc_feature (1)..(25): SEQ ID NO: 6024; WAN0249CF; Start 134; Stop 158
acatttcgacactgtaattatgaca

SEQ ID NO: 427860 - DNA, 25 bp, Artificial
  probe
  misc_feature (1)..(25): SEQ ID NO: 6024; WAN0249CF; Start 43; Stop 67
gtcagtaatctcataaggaattagt

SEQ ID NO: 427861 - DNA, 25 bp, Artificial
  probe
  misc_feature (1)..(25): SEQ ID NO: 6024; WAN0249CF; Start 42; Stop 66
tgtcagtaatctcataaggaattag

SEQ ID NO: 427862 - DNA, 25 bp, Artificial
  probe
  misc_feature (1)..(25): SEQ ID NO: 6024; WAN0249CF; Start 26; Stop 50
cttaagtttcatcgcatgtcagtaa

SEQ ID NO: 427863 - DNA, 25 bp, Artificial
  probe
  misc_feature (1)..(25): SEQ ID NO: 6024; WAN0249CF; Start 158; Stop 182
agaagtattttgggatagttggctc

SEQ ID NO: 427864 - DNA, 25 bp, Artificial
  probe
  misc_feature (1)..(25): SEQ ID NO: 6024; WAN0249CF; Start 155; Stop 179
gacagaagtattttgggatagttgg

SEQ ID NO: 427865 - DNA, 25 bp, Artificial
  probe
  misc_feature (1)..(25): SEQ ID NO: 6024; WAN0249CF; Start 159; Stop 183
gaagtattttgggatagttggctca

SEQ ID NO: 427866 - DNA, 25 bp, Artificial
  probe
  misc_feature (1)..(25): SEQ ID NO: 6024; WAN0249CF; Start 157; Stop 181
cagaagtattttgggatagttggct

SEQ ID NO: 427867 - DNA, 25 bp, Artificial
  probe
  misc_feature (1)..(25): SEQ ID NO: 6024; WAN0249CF; Start 156; Stop 180
acagaagtattttgggatagttggc

SEQ ID NO: 427868 - DNA, 25 bp, Artificial
  probe
  misc_feature (1)..(25): SEQ ID NO: 6024; WAN0249CF; Start 154; Stop 178
tgacagaagtattttgggatagttg

SEQ ID NO: 427869 - DNA, 25 bp, Artificial
  probe
  misc_feature (1)..(25): SEQ ID NO: 6024; WAN0249CF; Start 5; Stop 29
aaactcttcattgccatataactta

SEQ ID NO: 427870 - DNA, 25 bp, Artificial
  probe
  misc_feature (1)..(25): SEQ ID NO: 6024; WAN0249CF; Start 7; Stop 31
actcttcattgccatataacttaag

SEQ ID NO: 427871 - DNA, 25 bp, Artificial
  probe
  misc_feature (1)..(25): SEQ ID NO: 6025; WAN0249BJ; Start 1; Stop 25
agagatacctcccgtgaagaaactc

SEQ ID NO: 427872 - DNA, 25 bp, Artificial
  probe
  misc_feature (1)..(25): SEQ ID NO: 6025; WAN0249BJ; Start 30; Stop 54
tccaaaaggggagggagaattttaa

SEQ ID NO: 427873 - DNA, 25 bp, Artificial
  probe
  misc_feature (1)..(25): SEQ ID NO: 6025; WAN0249BJ; Start 2; Stop 26
gagatacctcccgtgaagaaactcc

SEQ ID NO: 427874 - DNA, 25 bp, Artificial
  probe
  misc_feature (1)..(25): SEQ ID NO: 6025; WAN0249BJ; Start 13; Stop 37
cgtgaagaaactccctctccaaaag

SEQ ID NO: 427875 - DNA, 25 bp, Artificial
  probe
  misc_feature (1)..(25): SEQ ID NO: 6025; WAN0249BJ; Start 14; Stop 38
gtgaagaaactccctctccaaaagg

SEQ ID NO: 427876 - DNA, 25 bp, Artificial
  probe
  misc_feature (1)..(25): SEQ ID NO: 6025; WAN0249BJ; Start 12; Stop 36
ccgtgaagaaactccctctccaaaa

SEQ ID NO: 427877 - DNA, 25 bp, Artificial
  probe
  misc_feature (1)..(25): SEQ ID NO: 6025; WAN0249BJ; Start 29; Stop 53
ctccaaaaggggagggagaatttta

SEQ ID NO: 427878 - DNA, 25 bp, Artificial
  probe
  misc_feature (1)..(25): SEQ ID NO: 6026; WAN02499C; Start 25; Stop 49
ccatatcggacttattagtgttagt

SEQ ID NO: 427879 - DNA, 25 bp, Artificial
  probe
  misc_feature (1)..(25): SEQ ID NO: 6026; WAN02499C; Start 24; Stop 48
accatatcggacttattagtgttag

SEQ ID NO: 427880 - DNA, 25 bp, Artificial
  probe
  misc_feature (1)..(25): SEQ ID NO: 6026; WAN02499C; Start 22; Stop 46
ttaccatatcggacttattagtgtt

SEQ ID NO: 427881 - DNA, 25 bp, Artificial
  probe
  misc_feature (1)..(25): SEQ ID NO: 6026; WAN02499C; Start 30; Stop 54
tcggacttattagtgttagtaggga

SEQ ID NO: 427882 - DNA, 25 bp, Artificial
  probe
  misc_feature (1)..(25): SEQ ID NO: 6026; WAN02499C; Start 31; Stop 55
cggacttattagtgttagtagggaa

SEQ ID NO: 427883 - DNA, 25 bp, Artificial
  probe
  misc_feature (1)..(25): SEQ ID NO: 6026; WAN02499C; Start 29; Stop 53
atcggacttattagtgttagtaggg

SEQ ID NO: 427884 - DNA, 25 bp, Artificial
  probe
  misc_feature (1)..(25): SEQ ID NO: 6026; WAN02499C; Start 28; Stop 52
tatcggacttattagtgttagtagg

SEQ ID NO: 427885 - DNA, 25 bp, Artificial
  probe
  misc_feature (1)..(25): SEQ ID NO: 6026; WAN02499C; Start 13; Stop 37
gtcaagaatttaccatatcggactt

SEQ ID NO: 427886 - DNA, 25 bp, Artificial
  probe
  misc_feature (1)..(25): SEQ ID NO: 6026; WAN02499C; Start 23; Stop 47
taccatatcggacttattagtgtta

SEQ ID NO: 427887 - DNA, 25 bp, Artificial
  probe
  misc_feature (1)..(25): SEQ ID NO: 6026; WAN02499C; Start 32; Stop 56
ggacttattagtgttagtagggaag

SEQ ID NO: 427888 - DNA, 25 bp, Artificial
  probe
  misc_feature (1)..(25): SEQ ID NO: 6026; WAN02499C; Start 12; Stop 36
ggtcaagaatttaccatatcggact

SEQ ID NO: 427889 - DNA, 25 bp, Artificial
  probe
  misc_feature (1)..(25): SEQ ID NO: 6026; WAN02499C; Start 11; Stop 35
aggtcaagaatttaccatatcggac

SEQ ID NO: 427890 - DNA, 25 bp, Artificial
  probe
  misc_feature (1)..(25): SEQ ID NO: 6026; WAN02499C; Start 14; Stop 38
tcaagaatttaccatatcggactta

SEQ ID NO: 427891 - DNA, 25 bp, Artificial
  probe
  misc_feature (1)..(25): SEQ ID NO: 6026; WAN02499C; Start 10; Stop 34
taggtcaagaatttaccatatcgga

SEQ ID NO: 427892 - DNA, 25 bp, Artificial
  probe
  misc_feature (1)..(25): SEQ ID NO: 6026; WAN02499C; Start 1; Stop 25
agcaactaataggtcaagaatttac

SEQ ID NO: 427893 - DNA, 25 bp, Artificial
  probe
  misc_feature (1)..(25): SEQ ID NO: 6026; WAN02499C; Start 21; Stop 45
tttaccatatcggacttattagtgt

SEQ ID NO: 427894 - DNA, 25 bp, Artificial
  probe
  misc_feature (1)..(25): SEQ ID NO: 6026; WAN02499C; Start 9; Stop 33
ataggtcaagaatttaccatatcgg

SEQ ID NO: 427895 - DNA, 25 bp, Artificial
  probe
  misc_feature (1)..(25): SEQ ID NO: 6026; WAN02499C; Start 2; Stop 26
gcaactaataggtcaagaatttacc

SEQ ID NO: 427896 - DNA, 25 bp, Artificial
  probe
  misc_feature (1)..(25): SEQ ID NO: 6026; WAN02499C; Start 33; Stop 57
gacttattagtgttagtagggaaga

SEQ ID NO: 427897 - DNA, 25 bp, Artificial
  probe
  misc_feature (1)..(25): SEQ ID NO: 6026; WAN02499C; Start 15; Stop 39
caagaatttaccatatcggacttat

SEQ ID NO: 427898 - DNA, 25 bp, Artificial
  probe
  misc_feature (1)..(25): SEQ ID NO: 6026; WAN02499C; Start 26; Stop 50
catatcggacttattagtgttagta

SEQ ID NO: 427899 - DNA, 25 bp, Artificial
  probe
  misc_feature (1)..(25): SEQ ID NO: 6026; WAN02499C; Start 20; Stop 44
atttaccatatcggacttattagtg

SEQ ID NO: 427900 - DNA, 25 bp, Artificial
  probe
  misc_feature (1)..(25): SEQ ID NO: 6026; WAN02499C; Start 27; Stop 51
atatcggacttattagtgttagtag

SEQ ID NO: 427901 - DNA, 25 bp, Artificial
  probe
  misc_feature (1)..(25): SEQ ID NO: 6026; WAN02499C; Start 16; Stop 40
aagaatttaccatatcggacttatt

SEQ ID NO: 427902 - DNA, 25 bp, Artificial
  probe
  misc_feature (1)..(25): SEQ ID NO: 6026; WAN02499C; Start 8; Stop 32
aataggtcaagaatttaccatatcg

SEQ ID NO: 427903 - DNA, 25 bp, Artificial
  probe
  misc_feature (1)..(25): SEQ ID NO: 6026; WAN02499C; Start 3; Stop 27
caactaataggtcaagaatttacca

SEQ ID NO: 427904 - DNA, 25 bp, Artificial
  probe
  misc_feature (1)..(25): SEQ ID NO: 6026; WAN02499C; Start 19; Stop 43
aatttaccatatcggacttattagt

SEQ ID NO: 427905 - DNA, 25 bp, Artificial
  probe
  misc_feature (1)..(25): SEQ ID NO: 6026; WAN02499C; Start 17; Stop 41
agaatttaccatatcggacttatta

SEQ ID NO: 427906 - DNA, 25 bp, Artificial
  probe
  misc_feature (1)..(25): SEQ ID NO: 6026; WAN02499C; Start 4; Stop 28
aactaataggtcaagaatttaccat

SEQ ID NO: 427907 - DNA, 25 bp, Artificial
  probe
  misc_feature (1)..(25): SEQ ID NO: 6026; WAN02499C; Start 18; Stop 42
gaatttaccatatcggacttattag

SEQ ID NO: 427908 - DNA, 25 bp, Artificial
  probe
  misc_feature (1)..(25): SEQ ID NO: 6026; WAN02499C; Start 5; Stop 29
actaataggtcaagaatttaccata

SEQ ID NO: 427909 - DNA, 25 bp, Artificial
  probe
  misc_feature (1)..(25): SEQ ID NO: 6027; WAN02497P; Start 102; Stop 126
tatgagtattcagtcggtcaaatga

SEQ ID NO: 427910 - DNA, 25 bp, Artificial
  probe
  misc_feature (1)..(25): SEQ ID NO: 6027; WAN02497P; Start 73; Stop 97
gcctatttatgctatttctctctga

SEQ ID NO: 427911 - DNA, 25 bp, Artificial
  probe
  misc_feature (1)..(25): SEQ ID NO: 6027; WAN02497P; Start 101; Stop 125
atatgagtattcagtcggtcaaatg

SEQ ID NO: 427912 - DNA, 25 bp, Artificial
  probe
  misc_feature (1)..(25): SEQ ID NO: 6027; WAN02497P; Start 99; Stop 123
aaatatgagtattcagtcggtcaaa

SEQ ID NO: 427913 - DNA, 25 bp, Artificial
  probe
  misc_feature (1)..(25): SEQ ID NO: 6027; WAN02497P; Start 100; Stop 124
aatatgagtattcagtcggtcaaat

SEQ ID NO: 427914 - DNA, 25 bp, Artificial
  probe
  misc_feature (1)..(25): SEQ ID NO: 6027; WAN02497P; Start 103; Stop 127
atgagtattcagtcggtcaaatgaa

SEQ ID NO: 427915 - DNA, 25 bp, Artificial
  probe
  misc_feature (1)..(25): SEQ ID NO: 6027; WAN02497P; Start 104; Stop 128
tgagtattcagtcggtcaaatgaag

SEQ ID NO: 427916 - DNA, 25 bp, Artificial
  probe
  misc_feature (1)..(25): SEQ ID NO: 6027; WAN02497P; Start 72; Stop 96
ggcctatttatgctatttctctctg

SEQ ID NO: 427917 - DNA, 25 bp, Artificial
  probe
  misc_feature (1)..(25): SEQ ID NO: 6027; WAN02497P; Start 74; Stop 98
cctatttatgctatttctctctgaa

SEQ ID NO: 427918 - DNA, 25 bp, Artificial
  probe
  misc_feature (1)..(25): SEQ ID NO: 6027; WAN02497P; Start 98; Stop 122
aaaatatgagtattcagtcggtcaa

SEQ ID NO: 427919 - DNA, 25 bp, Artificial
  probe
  misc_feature (1)..(25): SEQ ID NO: 6027; WAN02497P; Start 105; Stop 129
gagtattcagtcggtcaaatgaagc

SEQ ID NO: 427920 - DNA, 25 bp, Artificial
  probe
  misc_feature (1)..(25): SEQ ID NO: 6027; WAN02497P; Start 107; Stop 131
gtattcagtcggtcaaatgaagctg

SEQ ID NO: 427921 - DNA, 25 bp, Artificial
  probe
  misc_feature (1)..(25): SEQ ID NO: 6027; WAN02497P; Start 106; Stop 130
agtattcagtcggtcaaatgaagct

SEQ ID NO: 427922 - DNA, 25 bp, Artificial
  probe
  misc_feature (1)..(25): SEQ ID NO: 6027; WAN02497P; Start 108; Stop 132
tattcagtcggtcaaatgaagctga

SEQ ID NO: 427923 - DNA, 25 bp, Artificial
  probe
  misc_feature (1)..(25): SEQ ID NO: 6027; WAN02497P; Start 114; Stop 138
gtcggtcaaatgaagctgaacgaac

SEQ ID NO: 427924 - DNA, 25 bp, Artificial
  probe
  misc_feature (1)..(25): SEQ ID NO: 6027; WAN02497P; Start 113; Stop 137
agtcggtcaaatgaagctgaacgaa

SEQ ID NO: 427925 - DNA, 25 bp, Artificial
  probe
  misc_feature (1)..(25): SEQ ID NO: 6028; WAN02499B; Start 27; Stop 51
gagatgatggtcacctcttgtcaag

SEQ ID NO: 427926 - DNA, 25 bp, Artificial
  probe
  misc_feature (1)..(25): SEQ ID NO: 6028; WAN02499B; Start 30; Stop 54
atgatggtcacctcttgtcaagaat

SEQ ID NO: 427927 - DNA, 25 bp, Artificial
  probe
  misc_feature (1)..(25): SEQ ID NO: 6028; WAN02499B; Start 29; Stop 53
gatgatggtcacctcttgtcaagaa

SEQ ID NO: 427928 - DNA, 25 bp, Artificial
  probe
  misc_feature (1)..(25): SEQ ID NO: 6028; WAN02499B; Start 31; Stop 55
tgatggtcacctcttgtcaagaatg

SEQ ID NO: 427929 - DNA, 25 bp, Artificial
  probe
  misc_feature (1)..(25): SEQ ID NO: 6028; WAN02499B; Start 26; Stop 50
agagatgatggtcacctcttgtcaa

SEQ ID NO: 427930 - DNA, 25 bp, Artificial
  probe
  misc_feature (1)..(25): SEQ ID NO: 6028; WAN02499B; Start 28; Stop 52
agatgatggtcacctcttgtcaaga

SEQ ID NO: 427931 - DNA, 25 bp, Artificial
  probe
  misc_feature (1)..(25): SEQ ID NO: 6028; WAN02499B; Start 32; Stop 56
gatggtcacctcttgtcaagaatgc

SEQ ID NO: 427932 - DNA, 25 bp, Artificial
  probe
  misc_feature (1)..(25): SEQ ID NO: 6028; WAN02499B; Start 33; Stop 57
atggtcacctcttgtcaagaatgca

SEQ ID NO: 427933 - DNA, 25 bp, Artificial
  probe
  misc_feature (1)..(25): SEQ ID NO: 6028; WAN02499B; Start 34; Stop 58
tggtcacctcttgtcaagaatgcaa

SEQ ID NO: 427934 - DNA, 25 bp, Artificial
  probe
  misc_feature (1)..(25): SEQ ID NO: 6028; WAN02499B; Start 20; Stop 44
aaaacaagagatgatggtcacctct

SEQ ID NO: 427935 - DNA, 25 bp, Artificial
  probe
  misc_feature (1)..(25): SEQ ID NO: 6029; WAN02496G; Start 10; Stop 34
ccttctatactatcccttgtgcttt

SEQ ID NO: 427936 - DNA, 25 bp, Artificial
  probe
  misc_feature (1)..(25): SEQ ID NO: 6029; WAN02496G; Start 9; Stop 33
tccttctatactatcccttgtgctt

SEQ ID NO: 427937 - DNA, 25 bp, Artificial
  probe
  misc_feature (1)..(25): SEQ ID NO: 6029; WAN02496G; Start 8; Stop 32
ctccttctatactatcccttgtgct

SEQ ID NO: 427938 - DNA, 25 bp, Artificial
  probe
  misc_feature (1)..(25): SEQ ID NO: 6029; WAN02496G; Start 7; Stop 31
actccttctatactatcccttgtgc

SEQ ID NO: 427939 - DNA, 25 bp, Artificial
  probe
  misc_feature (1)..(25): SEQ ID NO: 6029; WAN02496G; Start 2; Stop 26
ggtgtactccttctatactatccct

SEQ ID NO: 427940 - DNA, 25 bp, Artificial
  probe
  misc_feature (1)..(25): SEQ ID NO: 6029; WAN02496G; Start 6; Stop 30
tactccttctatactatcccttgtg

SEQ ID NO: 427941 - DNA, 25 bp, Artificial
  probe
  misc_feature (1)..(25): SEQ ID NO: 6029; WAN02496G; Start 5; Stop 29
gtactccttctatactatcccttgt

SEQ ID NO: 427942 - DNA, 25 bp, Artificial
  probe
  misc_feature (1)..(25): SEQ ID NO: 6029; WAN02496G; Start 4; Stop 28
tgtactccttctatactatcccttg

SEQ ID NO: 427943 - DNA, 25 bp, Artificial
  probe
  misc_feature (1)..(25): SEQ ID NO: 6029; WAN02496G; Start 3; Stop 27
gtgtactccttctatactatccctt

SEQ ID NO: 427944 - DNA, 25 bp, Artificial
  probe
  misc_feature (1)..(25): SEQ ID NO: 6029; WAN02496G; Start 14; Stop 38
ctatactatcccttgtgctttagaa

SEQ ID NO: 427945 - DNA, 25 bp, Artificial
  probe
  misc_feature (1)..(25): SEQ ID NO: 6029; WAN02496G; Start 12; Stop 36
ttctatactatcccttgtgctttag

SEQ ID NO: 427946 - DNA, 25 bp, Artificial
  probe
  misc_feature (1)..(25): SEQ ID NO: 6029; WAN02496G; Start 11; Stop 35
cttctatactatcccttgtgcttta

SEQ ID NO: 427947 - DNA, 25 bp, Artificial
  probe
  misc_feature (1)..(25): SEQ ID NO: 6029; WAN02496G; Start 1; Stop 25
aggtgtactccttctatactatccc

SEQ ID NO: 427948 - DNA, 25 bp, Artificial
  probe
  misc_feature (1)..(25): SEQ ID NO: 6029; WAN02496G; Start 16; Stop 40
atactatcccttgtgctttagaata

SEQ ID NO: 427949 - DNA, 25 bp, Artificial
  probe
  misc_feature (1)..(25): SEQ ID NO: 6029; WAN02496G; Start 15; Stop 39
tatactatcccttgtgctttagaat

SEQ ID NO: 427950 - DNA, 25 bp, Artificial
  probe
  misc_feature (1)..(25): SEQ ID NO: 6029; WAN02496G; Start 17; Stop 41
tactatcccttgtgctttagaatat

SEQ ID NO: 427951 - DNA, 25 bp, Artificial
  probe
  misc_feature (1)..(25): SEQ ID NO: 6029; WAN02496G; Start 13; Stop 37
tctatactatcccttgtgctttaga

SEQ ID NO: 427952 - DNA, 25 bp, Artificial
  probe
  misc_feature (1)..(25): SEQ ID NO: 6029; WAN02496G; Start 18; Stop 42
actatcccttgtgctttagaatatt

SEQ ID NO: 427953 - DNA, 25 bp, Artificial
  probe
  misc_feature (1)..(25): SEQ ID NO: 6029; WAN02496G; Start 23; Stop 47
cccttgtgctttagaatattatacc

SEQ ID NO: 427954 - DNA, 25 bp, Artificial
  probe
  misc_feature (1)..(25): SEQ ID NO: 6029; WAN02496G; Start 24; Stop 48
ccttgtgctttagaatattatacca

SEQ ID NO: 427955 - DNA, 25 bp, Artificial
  probe
  misc_feature (1)..(25): SEQ ID NO: 6029; WAN02496G; Start 28; Stop 52
gtgctttagaatattataccacaca

SEQ ID NO: 427956 - DNA, 25 bp, Artificial
  probe
  misc_feature (1)..(25): SEQ ID NO: 6029; WAN02496G; Start 22; Stop 46
tcccttgtgctttagaatattatac

SEQ ID NO: 427957 - DNA, 25 bp, Artificial
  probe
  misc_feature (1)..(25): SEQ ID NO: 6029; WAN02496G; Start 29; Stop 53
tgctttagaatattataccacacaa

SEQ ID NO: 427958 - DNA, 25 bp, Artificial
  probe
  misc_feature (1)..(25): SEQ ID NO: 6029; WAN02496G; Start 19; Stop 43
ctatcccttgtgctttagaatatta

SEQ ID NO: 427959 - DNA, 25 bp, Artificial
  probe
  misc_feature (1)..(25): SEQ ID NO: 6029; WAN02496G; Start 21; Stop 45
atcccttgtgctttagaatattata

SEQ ID NO: 427960 - DNA, 25 bp, Artificial
  probe
  misc_feature (1)..(25): SEQ ID NO: 6029; WAN02496G; Start 20; Stop 44
tatcccttgtgctttagaatattat

SEQ ID NO: 427961 - DNA, 25 bp, Artificial
  probe
  misc_feature (1)..(25): SEQ ID NO: 6029; WAN02496G; Start 25; Stop 49
cttgtgctttagaatattataccac

SEQ ID NO: 427962 - DNA, 25 bp, Artificial
  probe
  misc_feature (1)..(25): SEQ ID NO: 6029; WAN02496G; Start 30; Stop 54
gctttagaatattataccacacaat

SEQ ID NO: 427963 - DNA, 25 bp, Artificial
  probe
  misc_feature (1)..(25): SEQ ID NO: 6029; WAN02496G; Start 27; Stop 51
tgtgctttagaatattataccacac

SEQ ID NO: 427964 - DNA, 25 bp, Artificial
  probe
  misc_feature (1)..(25): SEQ ID NO: 6029; WAN02496G; Start 26; Stop 50
ttgtgctttagaatattataccaca

SEQ ID NO: 427965 - DNA, 25 bp, Artificial
  probe
  misc_feature (1)..(25): SEQ ID NO: 6030; WAN02499K; Start 33; Stop 57
tgacaggatatttgagtagaaggct

SEQ ID NO: 427966 - DNA, 25 bp, Artificial
  probe
  misc_feature (1)..(25): SEQ ID NO: 6030; WAN02499K; Start 32; Stop 56
ctgacaggatatttgagtagaaggc

SEQ ID NO: 427967 - DNA, 25 bp, Artificial
  probe
  misc_feature (1)..(25): SEQ ID NO: 6030; WAN02499K; Start 31; Stop 55
tctgacaggatatttgagtagaagg

SEQ ID NO: 427968 - DNA, 25 bp, Artificial
  probe
  misc_feature (1)..(25): SEQ ID NO: 6030; WAN02499K; Start 34; Stop 58
gacaggatatttgagtagaaggctc

SEQ ID NO: 427969 - DNA, 25 bp, Artificial
  probe
  misc_feature (1)..(25): SEQ ID NO: 6030; WAN02499K; Start 35; Stop 59
acaggatatttgagtagaaggctct

SEQ ID NO: 427970 - DNA, 25 bp, Artificial
  probe
  misc_feature (1)..(25): SEQ ID NO: 6030; WAN02499K; Start 36; Stop 60
caggatatttgagtagaaggctcta

SEQ ID NO: 427971 - DNA, 25 bp, Artificial
  probe
  misc_feature (1)..(25): SEQ ID NO: 6030; WAN02499K; Start 37; Stop 61
aggatatttgagtagaaggctctat

SEQ ID NO: 427972 - DNA, 25 bp, Artificial
  probe
  misc_feature (1)..(25): SEQ ID NO: 6030; WAN02499K; Start 51; Stop 75
gaaggctctattaaattgttagtga

SEQ ID NO: 427973 - DNA, 25 bp, Artificial
  probe
  misc_feature (1)..(25): SEQ ID NO: 6030; WAN02499K; Start 38; Stop 62
ggatatttgagtagaaggctctatt

SEQ ID NO: 427974 - DNA, 25 bp, Artificial
  probe
  misc_feature (1)..(25): SEQ ID NO: 6030; WAN02499K; Start 50; Stop 74
agaaggctctattaaattgttagtg

SEQ ID NO: 427975 - DNA, 25 bp, Artificial
  probe
  misc_feature (1)..(25): SEQ ID NO: 6030; WAN02499K; Start 45; Stop 69
tgagtagaaggctctattaaattgt

SEQ ID NO: 427976 - DNA, 25 bp, Artificial
  probe
  misc_feature (1)..(25): SEQ ID NO: 6030; WAN02499K; Start 53; Stop 77
aggctctattaaattgttagtgaaa

SEQ ID NO: 427977 - DNA, 25 bp, Artificial
  probe
  misc_feature (1)..(25): SEQ ID NO: 6030; WAN02499K; Start 52; Stop 76
aaggctctattaaattgttagtgaa

SEQ ID NO: 427978 - DNA, 25 bp, Artificial
  probe
  misc_feature (1)..(25): SEQ ID NO: 6030; WAN02499K; Start 30; Stop 54
ttctgacaggatatttgagtagaag

SEQ ID NO: 427979 - DNA, 25 bp, Artificial
  probe
  misc_feature (1)..(25): SEQ ID NO: 6030; WAN02499K; Start 29; Stop 53
tttctgacaggatatttgagtagaa

SEQ ID NO: 427980 - DNA, 25 bp, Artificial
  probe
  misc_feature (1)..(25): SEQ ID NO: 6030; WAN02499K; Start 13; Stop 37
agtagctttctatccttttctgaca

SEQ ID NO: 427981 - DNA, 25 bp, Artificial
  probe
  misc_feature (1)..(25): SEQ ID NO: 6030; WAN02499K; Start 46; Stop 70
gagtagaaggctctattaaattgtt

SEQ ID NO: 427982 - DNA, 25 bp, Artificial
  probe
  misc_feature (1)..(25): SEQ ID NO: 6030; WAN02499K; Start 44; Stop 68
ttgagtagaaggctctattaaattg

SEQ ID NO: 427983 - DNA, 25 bp, Artificial
  probe
  misc_feature (1)..(25): SEQ ID NO: 6030; WAN02499K; Start 14; Stop 38
gtagctttctatccttttctgacag

SEQ ID NO: 427984 - DNA, 25 bp, Artificial
  probe
  misc_feature (1)..(25): SEQ ID NO: 6030; WAN02499K; Start 26; Stop 50
ccttttctgacaggatatttgagta

SEQ ID NO: 427985 - DNA, 25 bp, Artificial
  probe
  misc_feature (1)..(25): SEQ ID NO: 6030; WAN02499K; Start 54; Stop 78
ggctctattaaattgttagtgaaat

SEQ ID NO: 427986 - DNA, 25 bp, Artificial
  probe
  misc_feature (1)..(25): SEQ ID NO: 6030; WAN02499K; Start 28; Stop 52
ttttctgacaggatatttgagtaga

SEQ ID NO: 427987 - DNA, 25 bp, Artificial
  probe
  misc_feature (1)..(25): SEQ ID NO: 6030; WAN02499K; Start 27; Stop 51
cttttctgacaggatatttgagtag

SEQ ID NO: 427988 - DNA, 25 bp, Artificial
  probe
  misc_feature (1)..(25): SEQ ID NO: 6030; WAN02499K; Start 12; Stop 36
aagtagctttctatccttttctgac

SEQ ID NO: 427989 - DNA, 25 bp, Artificial
  probe
  misc_feature (1)..(25): SEQ ID NO: 6030; WAN02499K; Start 15; Stop 39
tagctttctatccttttctgacagg

SEQ ID NO: 427990 - DNA, 25 bp, Artificial
  probe
  misc_feature (1)..(25): SEQ ID NO: 6030; WAN02499K; Start 43; Stop 67
tttgagtagaaggctctattaaatt

SEQ ID NO: 427991 - DNA, 25 bp, Artificial
  probe
  misc_feature (1)..(25): SEQ ID NO: 6030; WAN02499K; Start 42; Stop 66
atttgagtagaaggctctattaaat

SEQ ID NO: 427992 - DNA, 25 bp, Artificial
  probe
  misc_feature (1)..(25): SEQ ID NO: 6030; WAN02499K; Start 49; Stop 73
tagaaggctctattaaattgttagt

SEQ ID NO: 427993 - DNA, 25 bp, Artificial
  probe
  misc_feature (1)..(25): SEQ ID NO: 6030; WAN02499K; Start 47; Stop 71
agtagaaggctctattaaattgtta

SEQ ID NO: 427994 - DNA, 25 bp, Artificial
  probe
  misc_feature (1)..(25): SEQ ID NO: 6030; WAN02499K; Start 39; Stop 63
gatatttgagtagaaggctctatta

SEQ ID NO: 427995 - DNA, 25 bp, Artificial
  probe
  misc_feature (1)..(25): SEQ ID NO: 6030; WAN02499K; Start 48; Stop 72
gtagaaggctctattaaattgttag

SEQ ID NO: 427996 - DNA, 25 bp, Artificial
  probe
  misc_feature (1)..(25): SEQ ID NO: 6030; WAN02499K; Start 11; Stop 35
aaagtagctttctatccttttctga

SEQ ID NO: 427997 - DNA, 25 bp, Artificial
  probe
  misc_feature (1)..(25): SEQ ID NO: 6030; WAN02499K; Start 41; Stop 65
tatttgagtagaaggctctattaaa

SEQ ID NO: 427998 - DNA, 25 bp, Artificial
  probe
  misc_feature (1)..(25): SEQ ID NO: 6031; WAN02499Q; Start 173; Stop 197
ttcattacattgctcacagttgatt

SEQ ID NO: 427999 - DNA, 25 bp, Artificial
  probe
  misc_feature (1)..(25): SEQ ID NO: 6031; WAN02499Q; Start 172; Stop 196
attcattacattgctcacagttgat

SEQ ID NO: 428000 - DNA, 25 bp, Artificial
  probe
  misc_feature (1)..(25): SEQ ID NO: 6031; WAN02499Q; Start 171; Stop 195
aattcattacattgctcacagttga

SEQ ID NO: 428001 - DNA, 25 bp, Artificial
  probe
  misc_feature (1)..(25): SEQ ID NO: 6031; WAN02499Q; Start 42; Stop 66
aagaagtagcactcaagaagagatt

SEQ ID NO: 428002 - DNA, 25 bp, Artificial
  probe
  misc_feature (1)..(25): SEQ ID NO: 6031; WAN02499Q; Start 40; Stop 64
ttaagaagtagcactcaagaagaga

SEQ ID NO: 428003 - DNA, 25 bp, Artificial
  probe
  misc_feature (1)..(25): SEQ ID NO: 6031; WAN02499Q; Start 41; Stop 65
taagaagtagcactcaagaagagat

SEQ ID NO: 428004 - DNA, 25 bp, Artificial
  probe
  misc_feature (1)..(25): SEQ ID NO: 6031; WAN02499Q; Start 170; Stop 194
taattcattacattgctcacagttg

SEQ ID NO: 428005 - DNA, 25 bp, Artificial
  probe
  misc_feature (1)..(25): SEQ ID NO: 6031; WAN02499Q; Start 174; Stop 198
tcattacattgctcacagttgattt

SEQ ID NO: 428006 - DNA, 25 bp, Artificial
  probe
  misc_feature (1)..(25): SEQ ID NO: 6031; WAN02499Q; Start 43; Stop 67
agaagtagcactcaagaagagattt

SEQ ID NO: 428007 - DNA, 25 bp, Artificial
  probe
  misc_feature (1)..(25): SEQ ID NO: 6031; WAN02499Q; Start 169; Stop 193
gtaattcattacattgctcacagtt

SEQ ID NO: 428008 - DNA, 25 bp, Artificial
  probe
  misc_feature (1)..(25): SEQ ID NO: 6031; WAN02499Q; Start 49; Stop 73
agcactcaagaagagatttaagttt

SEQ ID NO: 428009 - DNA, 25 bp, Artificial
  probe
  misc_feature (1)..(25): SEQ ID NO: 6031; WAN02499Q; Start 47; Stop 71
gtagcactcaagaagagatttaagt

SEQ ID NO: 428010 - DNA, 25 bp, Artificial
  probe
  misc_feature (1)..(25): SEQ ID NO: 6031; WAN02499Q; Start 39; Stop 63
tttaagaagtagcactcaagaagag

SEQ ID NO: 428011 - DNA, 25 bp, Artificial
  probe
  misc_feature (1)..(25): SEQ ID NO: 6031; WAN02499Q; Start 96; Stop 120
cgtaagtaaactatcattgaaaggg

SEQ ID NO: 428012 - DNA, 25 bp, Artificial
  probe
  misc_feature (1)..(25): SEQ ID NO: 6031; WAN02499Q; Start 44; Stop 68
gaagtagcactcaagaagagattta

SEQ ID NO: 428013 - DNA, 25 bp, Artificial
  probe
  misc_feature (1)..(25): SEQ ID NO: 6031; WAN02499Q; Start 46; Stop 70
agtagcactcaagaagagatttaag

SEQ ID NO: 428014 - DNA, 25 bp, Artificial
  probe
  misc_feature (1)..(25): SEQ ID NO: 6031; WAN02499Q; Start 48; Stop 72
tagcactcaagaagagatttaagtt

SEQ ID NO: 428015 - DNA, 25 bp, Artificial
  probe
  misc_feature (1)..(25): SEQ ID NO: 6031; WAN02499Q; Start 45; Stop 69
aagtagcactcaagaagagatttaa

SEQ ID NO: 428016 - DNA, 25 bp, Artificial
  probe
  misc_feature (1)..(25): SEQ ID NO: 6031; WAN02499Q; Start 95; Stop 119
tcgtaagtaaactatcattgaaagg

SEQ ID NO: 428017 - DNA, 25 bp, Artificial
  probe
  misc_feature (1)..(25): SEQ ID NO: 6031; WAN02499Q; Start 50; Stop 74
gcactcaagaagagatttaagttta

SEQ ID NO: 428018 - DNA, 25 bp, Artificial
  probe
  misc_feature (1)..(25): SEQ ID NO: 6031; WAN02499Q; Start 67; Stop 91
taagtttacttggtgaaacctgttt

SEQ ID NO: 428019 - DNA, 25 bp, Artificial
  probe
  misc_feature (1)..(25): SEQ ID NO: 6031; WAN02499Q; Start 66; Stop 90
ttaagtttacttggtgaaacctgtt

SEQ ID NO: 428020 - DNA, 25 bp, Artificial
  probe
  misc_feature (1)..(25): SEQ ID NO: 6031; WAN02499Q; Start 65; Stop 89
tttaagtttacttggtgaaacctgt

SEQ ID NO: 428021 - DNA, 25 bp, Artificial
  probe
  misc_feature (1)..(25): SEQ ID NO: 6031; WAN02499Q; Start 105; Stop 129
actatcattgaaaggggagatgttt

SEQ ID NO: 428022 - DNA, 25 bp, Artificial
  probe
  misc_feature (1)..(25): SEQ ID NO: 6031; WAN02499Q; Start 103; Stop 127
aaactatcattgaaaggggagatgt

SEQ ID NO: 428023 - DNA, 25 bp, Artificial
  probe
  misc_feature (1)..(25): SEQ ID NO: 6031; WAN02499Q; Start 100; Stop 124
agtaaactatcattgaaaggggaga

SEQ ID NO: 428024 - DNA, 25 bp, Artificial
  probe
  misc_feature (1)..(25): SEQ ID NO: 6031; WAN02499Q; Start 58; Stop 82
gaagagatttaagtttacttggtga

SEQ ID NO: 428025 - DNA, 25 bp, Artificial
  probe
  misc_feature (1)..(25): SEQ ID NO: 6031; WAN02499Q; Start 57; Stop 81
agaagagatttaagtttacttggtg

SEQ ID NO: 428026 - DNA, 25 bp, Artificial
  probe
  misc_feature (1)..(25): SEQ ID NO: 6031; WAN02499Q; Start 104; Stop 128
aactatcattgaaaggggagatgtt

SEQ ID NO: 428027 - DNA, 25 bp, Artificial
  probe
  misc_feature (1)..(25): SEQ ID NO: 6031; WAN02499Q; Start 106; Stop 130
ctatcattgaaaggggagatgtttt

SEQ ID NO: 428028 - DNA, 25 bp, Artificial
  probe
  misc_feature (1)..(25): SEQ ID NO: 6031; WAN02499Q; Start 179; Stop 203
acattgctcacagttgattttaaga

SEQ ID NO: 428029 - DNA, 25 bp, Artificial
  probe
  misc_feature (1)..(25): SEQ ID NO: 6031; WAN02499Q; Start 99; Stop 123
aagtaaactatcattgaaaggggag

SEQ ID NO: 428030 - DNA, 25 bp, Artificial
  probe
  misc_feature (1)..(25): SEQ ID NO: 6031; WAN02499Q; Start 175; Stop 199
cattacattgctcacagttgatttt

SEQ ID NO: 428031 - DNA, 25 bp, Artificial
  probe
  misc_feature (1)..(25): SEQ ID NO: 6032; WAN0249A3; Start 34; Stop 58
gatcacttcctgtatatccttatta

SEQ ID NO: 428032 - DNA, 25 bp, Artificial
  probe
  misc_feature (1)..(25): SEQ ID NO: 6032; WAN0249A3; Start 33; Stop 57
tgatcacttcctgtatatccttatt

SEQ ID NO: 428033 - DNA, 25 bp, Artificial
  probe
  misc_feature (1)..(25): SEQ ID NO: 6032; WAN0249A3; Start 2; Stop 26
gttttctctccttttcagttataca

SEQ ID NO: 428034 - DNA, 25 bp, Artificial
  probe
  misc_feature (1)..(25): SEQ ID NO: 6032; WAN0249A3; Start 14; Stop 38
tttcagttatacaaggttgtgatca

SEQ ID NO: 428035 - DNA, 25 bp, Artificial
  probe
  misc_feature (1)..(25): SEQ ID NO: 6032; WAN0249A3; Start 1; Stop 25
agttttctctccttttcagttatac

SEQ ID NO: 428036 - DNA, 25 bp, Artificial
  probe
  misc_feature (1)..(25): SEQ ID NO: 6032; WAN0249A3; Start 4; Stop 28
tttctctccttttcagttatacaag

SEQ ID NO: 428037 - DNA, 25 bp, Artificial
  probe
  misc_feature (1)..(25): SEQ ID NO: 6032; WAN0249A3; Start 13; Stop 37
ttttcagttatacaaggttgtgatc

SEQ ID NO: 428038 - DNA, 25 bp, Artificial
  probe
  misc_feature (1)..(25): SEQ ID NO: 6032; WAN0249A3; Start 12; Stop 36
cttttcagttatacaaggttgtgat

SEQ ID NO: 428039 - DNA, 25 bp, Artificial
  probe
  misc_feature (1)..(25): SEQ ID NO: 6032; WAN0249A3; Start 37; Stop 61
cacttcctgtatatccttattaaac

SEQ ID NO: 428040 - DNA, 25 bp, Artificial
  probe
  misc_feature (1)..(25): SEQ ID NO: 6032; WAN0249A3; Start 3; Stop 27
ttttctctccttttcagttatacaa

SEQ ID NO: 428041 - DNA, 25 bp, Artificial
  probe
  misc_feature (1)..(25): SEQ ID NO: 6032; WAN0249A3; Start 40; Stop 64
ttcctgtatatccttattaaacact

SEQ ID NO: 428042 - DNA, 25 bp, Artificial
  probe
  misc_feature (1)..(25): SEQ ID NO: 6032; WAN0249A3; Start 38; Stop 62
acttcctgtatatccttattaaaca

SEQ ID NO: 428043 - DNA, 25 bp, Artificial
  probe
  misc_feature (1)..(25): SEQ ID NO: 6032; WAN0249A3; Start 39; Stop 63
cttcctgtatatccttattaaacac

SEQ ID NO: 428044 - DNA, 25 bp, Artificial
  probe
  misc_feature (1)..(25): SEQ ID NO: 6032; WAN0249A3; Start 11; Stop 35
ccttttcagttatacaaggttgtga

SEQ ID NO: 428045 - DNA, 25 bp, Artificial
  probe
  misc_feature (1)..(25): SEQ ID NO: 6032; WAN0249A3; Start 10; Stop 34
tccttttcagttatacaaggttgtg

SEQ ID NO: 428046 - DNA, 25 bp, Artificial
  probe
  misc_feature (1)..(25): SEQ ID NO: 6032; WAN0249A3; Start 6; Stop 30
tctctccttttcagttatacaaggt

SEQ ID NO: 428047 - DNA, 25 bp, Artificial
  probe
  misc_feature (1)..(25): SEQ ID NO: 6032; WAN0249A3; Start 9; Stop 33
ctccttttcagttatacaaggttgt

SEQ ID NO: 428048 - DNA, 25 bp, Artificial
  probe
  misc_feature (1)..(25): SEQ ID NO: 6032; WAN0249A3; Start 8; Stop 32
tctccttttcagttatacaaggttg

SEQ ID NO: 428049 - DNA, 25 bp, Artificial
  probe
  misc_feature (1)..(25): SEQ ID NO: 6032; WAN0249A3; Start 7; Stop 31
ctctccttttcagttatacaaggtt

SEQ ID NO: 428050 - DNA, 25 bp, Artificial
  probe
  misc_feature (1)..(25): SEQ ID NO: 6032; WAN0249A3; Start 5; Stop 29
ttctctccttttcagttatacaagg

SEQ ID NO: 428051 - DNA, 25 bp, Artificial
  probe
  misc_feature (1)..(25): SEQ ID NO: 6032; WAN0249A3; Start 55; Stop 79
attaaacactattttatagcccatg

SEQ ID NO: 428052 - DNA, 25 bp, Artificial
  probe
  misc_feature (1)..(25): SEQ ID NO: 6032; WAN0249A3; Start 56; Stop 80
ttaaacactattttatagcccatgg

SEQ ID NO: 428053 - DNA, 25 bp, Artificial
  probe
  misc_feature (1)..(25): SEQ ID NO: 6032; WAN0249A3; Start 59; Stop 83
aacactattttatagcccatggcaa

SEQ ID NO: 428054 - DNA, 25 bp, Artificial
  probe
  misc_feature (1)..(25): SEQ ID NO: 6032; WAN0249A3; Start 58; Stop 82
aaacactattttatagcccatggca

SEQ ID NO: 428055 - DNA, 25 bp, Artificial
  probe
  misc_feature (1)..(25): SEQ ID NO: 6032; WAN0249A3; Start 57; Stop 81
taaacactattttatagcccatggc

SEQ ID NO: 428056 - DNA, 25 bp, Artificial
  probe
  misc_feature (1)..(25): SEQ ID NO: 6032; WAN0249A3; Start 63; Stop 87
ctattttatagcccatggcaaggaa

SEQ ID NO: 428057 - DNA, 25 bp, Artificial
  probe
  misc_feature (1)..(25): SEQ ID NO: 6032; WAN0249A3; Start 64; Stop 88
tattttatagcccatggcaaggaac

SEQ ID NO: 428058 - DNA, 25 bp, Artificial
  probe
  misc_feature (1)..(25): SEQ ID NO: 6032; WAN0249A3; Start 60; Stop 84
acactattttatagcccatggcaag

SEQ ID NO: 428059 - DNA, 25 bp, Artificial
  probe
  misc_feature (1)..(25): SEQ ID NO: 6032; WAN0249A3; Start 61; Stop 85
cactattttatagcccatggcaagg

SEQ ID NO: 428060 - DNA, 25 bp, Artificial
  probe
  misc_feature (1)..(25): SEQ ID NO: 6032; WAN0249A3; Start 62; Stop 86
actattttatagcccatggcaagga

SEQ ID NO: 428061 - DNA, 25 bp, Artificial
  probe
  misc_feature (1)..(25): SEQ ID NO: 6032; WAN0249A3; Start 65; Stop 89
attttatagcccatggcaaggaacc

SEQ ID NO: 428062 - DNA, 25 bp, Artificial
  probe
  misc_feature (1)..(25): SEQ ID NO: 6033; WAN02497O; Start 12; Stop 36
aatcagactagaaggctaagcgaaa

SEQ ID NO: 428063 - DNA, 25 bp, Artificial
  probe
  misc_feature (1)..(25): SEQ ID NO: 6033; WAN02497O; Start 11; Stop 35
aaatcagactagaaggctaagcgaa

SEQ ID NO: 428064 - DNA, 25 bp, Artificial
  probe
  misc_feature (1)..(25): SEQ ID NO: 6033; WAN02497O; Start 7; Stop 31
atcgaaatcagactagaaggctaag

SEQ ID NO: 428065 - DNA, 25 bp, Artificial
  probe
  misc_feature (1)..(25): SEQ ID NO: 6033; WAN02497O; Start 13; Stop 37
atcagactagaaggctaagcgaaag

SEQ ID NO: 428066 - DNA, 25 bp, Artificial
  probe
  misc_feature (1)..(25): SEQ ID NO: 6033; WAN02497O; Start 6; Stop 30
aatcgaaatcagactagaaggctaa

SEQ ID NO: 428067 - DNA, 25 bp, Artificial
  probe
  misc_feature (1)..(25): SEQ ID NO: 6033; WAN02497O; Start 5; Stop 29
aaatcgaaatcagactagaaggcta

SEQ ID NO: 428068 - DNA, 25 bp, Artificial
  probe
  misc_feature (1)..(25): SEQ ID NO: 6033; WAN02497O; Start 10; Stop 34
gaaatcagactagaaggctaagcga

SEQ ID NO: 428069 - DNA, 25 bp, Artificial
  probe
  misc_feature (1)..(25): SEQ ID NO: 6033; WAN02497O; Start 28; Stop 52
taagcgaaagcataacttgagttag

SEQ ID NO: 428070 - DNA, 25 bp, Artificial
  probe
  misc_feature (1)..(25): SEQ ID NO: 6033; WAN02497O; Start 27; Stop 51
ctaagcgaaagcataacttgagtta

SEQ ID NO: 428071 - DNA, 25 bp, Artificial
  probe
  misc_feature (1)..(25): SEQ ID NO: 6033; WAN02497O; Start 38; Stop 62
cataacttgagttagctcccatagt

SEQ ID NO: 428072 - DNA, 25 bp, Artificial
  probe
  misc_feature (1)..(25): SEQ ID NO: 6033; WAN02497O; Start 8; Stop 32
tcgaaatcagactagaaggctaagc

SEQ ID NO: 428073 - DNA, 25 bp, Artificial
  probe
  misc_feature (1)..(25): SEQ ID NO: 6033; WAN02497O; Start 37; Stop 61
gcataacttgagttagctcccatag

SEQ ID NO: 428074 - DNA, 25 bp, Artificial
  probe
  misc_feature (1)..(25): SEQ ID NO: 6033; WAN02497O; Start 9; Stop 33
cgaaatcagactagaaggctaagcg

SEQ ID NO: 428075 - DNA, 25 bp, Artificial
  probe
  misc_feature (1)..(25): SEQ ID NO: 6033; WAN02497O; Start 19; Stop 43
ctagaaggctaagcgaaagcataac

SEQ ID NO: 428076 - DNA, 25 bp, Artificial
  probe
  misc_feature (1)..(25): SEQ ID NO: 6033; WAN02497O; Start 29; Stop 53
aagcgaaagcataacttgagttagc

SEQ ID NO: 428077 - DNA, 25 bp, Artificial
  probe
  misc_feature (1)..(25): SEQ ID NO: 6033; WAN02497O; Start 20; Stop 44
tagaaggctaagcgaaagcataact

SEQ ID NO: 428078 - DNA, 25 bp, Artificial
  probe
  misc_feature (1)..(25): SEQ ID NO: 6033; WAN02497O; Start 18; Stop 42
actagaaggctaagcgaaagcataa

SEQ ID NO: 428079 - DNA, 25 bp, Artificial
  probe
  misc_feature (1)..(25): SEQ ID NO: 6033; WAN02497O; Start 26; Stop 50
gctaagcgaaagcataacttgagtt

SEQ ID NO: 428080 - DNA, 25 bp, Artificial
  probe
  misc_feature (1)..(25): SEQ ID NO: 6033; WAN02497O; Start 36; Stop 60
agcataacttgagttagctcccata

SEQ ID NO: 428081 - DNA, 25 bp, Artificial
  probe
  misc_feature (1)..(25): SEQ ID NO: 6033; WAN02497O; Start 17; Stop 41
gactagaaggctaagcgaaagcata

SEQ ID NO: 428082 - DNA, 25 bp, Artificial
  probe
  misc_feature (1)..(25): SEQ ID NO: 6033; WAN02497O; Start 40; Stop 64
taacttgagttagctcccatagttc

SEQ ID NO: 428083 - DNA, 25 bp, Artificial
  probe
  misc_feature (1)..(25): SEQ ID NO: 6033; WAN02497O; Start 39; Stop 63
ataacttgagttagctcccatagtt

SEQ ID NO: 428084 - DNA, 25 bp, Artificial
  probe
  misc_feature (1)..(25): SEQ ID NO: 6033; WAN02497O; Start 33; Stop 57
gaaagcataacttgagttagctccc

SEQ ID NO: 428085 - DNA, 25 bp, Artificial
  probe
  misc_feature (1)..(25): SEQ ID NO: 6033; WAN02497O; Start 4; Stop 28
aaaatcgaaatcagactagaaggct

SEQ ID NO: 428086 - DNA, 25 bp, Artificial
  probe
  misc_feature (1)..(25): SEQ ID NO: 6033; WAN02497O; Start 22; Stop 46
gaaggctaagcgaaagcataacttg

SEQ ID NO: 428087 - DNA, 25 bp, Artificial
  probe
  misc_feature (1)..(25): SEQ ID NO: 6033; WAN02497O; Start 35; Stop 59
aagcataacttgagttagctcccat

SEQ ID NO: 428088 - DNA, 25 bp, Artificial
  probe
  misc_feature (1)..(25): SEQ ID NO: 6033; WAN02497O; Start 32; Stop 56
cgaaagcataacttgagttagctcc

SEQ ID NO: 428089 - DNA, 25 bp, Artificial
  probe
  misc_feature (1)..(25): SEQ ID NO: 6033; WAN02497O; Start 21; Stop 45
agaaggctaagcgaaagcataactt

SEQ ID NO: 428090 - DNA, 25 bp, Artificial
  probe
  misc_feature (1)..(25): SEQ ID NO: 6033; WAN02497O; Start 34; Stop 58
aaagcataacttgagttagctccca

SEQ ID NO: 428091 - DNA, 25 bp, Artificial
  probe
  misc_feature (1)..(25): SEQ ID NO: 6033; WAN02497O; Start 23; Stop 47
aaggctaagcgaaagcataacttga

SEQ ID NO: 428092 - DNA, 25 bp, Artificial
  probe
  misc_feature (1)..(25): SEQ ID NO: 6033; WAN02497O; Start 31; Stop 55
gcgaaagcataacttgagttagctc

SEQ ID NO: 428093 - DNA, 25 bp, Artificial
  probe
  misc_feature (1)..(25): SEQ ID NO: 6033; WAN02497O; Start 41; Stop 65
aacttgagttagctcccatagttcg

SEQ ID NO: 428094 - DNA, 25 bp, Artificial
  probe
  misc_feature (1)..(25): SEQ ID NO: 6033; WAN02497O; Start 30; Stop 54
agcgaaagcataacttgagttagct

SEQ ID NO: 428095 - DNA, 25 bp, Artificial
  probe
  misc_feature (1)..(25): SEQ ID NO: 6034; WAN0249AU; Start 173; Stop 197
aattgaatccactccgtcttgatta

SEQ ID NO: 428096 - DNA, 25 bp, Artificial
  probe
  misc_feature (1)..(25): SEQ ID NO: 6034; WAN0249AU; Start 174; Stop 198
attgaatccactccgtcttgattag

SEQ ID NO: 428097 - DNA, 25 bp, Artificial
  probe
  misc_feature (1)..(25): SEQ ID NO: 6034; WAN0249AU; Start 191; Stop 215
ttgattagcgtgcctgtgtaagtag

SEQ ID NO: 428098 - DNA, 25 bp, Artificial
  probe
  misc_feature (1)..(25): SEQ ID NO: 6034; WAN0249AU; Start 190; Stop 214
cttgattagcgtgcctgtgtaagta

SEQ ID NO: 428099 - DNA, 25 bp, Artificial
  probe
  misc_feature (1)..(25): SEQ ID NO: 6034; WAN0249AU; Start 306; Stop 330
aaacgatgcgacaaactagataaag

SEQ ID NO: 428100 - DNA, 25 bp, Artificial
  probe
  misc_feature (1)..(25): SEQ ID NO: 6034; WAN0249AU; Start 305; Stop 329
caaacgatgcgacaaactagataaa

SEQ ID NO: 428101 - DNA, 25 bp, Artificial
  probe
  misc_feature (1)..(25): SEQ ID NO: 6034; WAN0249AU; Start 270; Stop 294
tttctaacagacacggagtttatcg

SEQ ID NO: 428102 - DNA, 25 bp, Artificial
  probe
  misc_feature (1)..(25): SEQ ID NO: 6034; WAN0249AU; Start 205; Stop 229
tgtgtaagtagggactgagagtatt

SEQ ID NO: 428103 - DNA, 25 bp, Artificial
  probe
  misc_feature (1)..(25): SEQ ID NO: 6034; WAN0249AU; Start 304; Stop 328
tcaaacgatgcgacaaactagataa

SEQ ID NO: 428104 - DNA, 25 bp, Artificial
  probe
  misc_feature (1)..(25): SEQ ID NO: 6034; WAN0249AU; Start 204; Stop 228
ctgtgtaagtagggactgagagtat

SEQ ID NO: 428105 - DNA, 25 bp, Artificial
  probe
  misc_feature (1)..(25): SEQ ID NO: 6034; WAN0249AU; Start 206; Stop 230
gtgtaagtagggactgagagtattt

SEQ ID NO: 428106 - DNA, 25 bp, Artificial
  probe
  misc_feature (1)..(25): SEQ ID NO: 6034; WAN0249AU; Start 303; Stop 327
ctcaaacgatgcgacaaactagata

SEQ ID NO: 428107 - DNA, 25 bp, Artificial
  probe
  misc_feature (1)..(25): SEQ ID NO: 6034; WAN0249AU; Start 207; Stop 231
tgtaagtagggactgagagtatttc

SEQ ID NO: 428108 - DNA, 25 bp, Artificial
  probe
  misc_feature (1)..(25): SEQ ID NO: 6034; WAN0249AU; Start 307; Stop 331
aacgatgcgacaaactagataaagg

SEQ ID NO: 428109 - DNA, 25 bp, Artificial
  probe
  misc_feature (1)..(25): SEQ ID NO: 6034; WAN0249AU; Start 310; Stop 334
gatgcgacaaactagataaaggagt

SEQ ID NO: 428110 - DNA, 25 bp, Artificial
  probe
  misc_feature (1)..(25): SEQ ID NO: 6034; WAN0249AU; Start 309; Stop 333
cgatgcgacaaactagataaaggag

SEQ ID NO: 428111 - DNA, 25 bp, Artificial
  probe
  misc_feature (1)..(25): SEQ ID NO: 6034; WAN0249AU; Start 308; Stop 332
acgatgcgacaaactagataaagga

SEQ ID NO: 428112 - DNA, 25 bp, Artificial
  probe
  misc_feature (1)..(25): SEQ ID NO: 6034; WAN0249AU; Start 208; Stop 232
gtaagtagggactgagagtatttcc

SEQ ID NO: 428113 - DNA, 25 bp, Artificial
  probe
  misc_feature (1)..(25): SEQ ID NO: 6034; WAN0249AU; Start 175; Stop 199
ttgaatccactccgtcttgattagc

SEQ ID NO: 428114 - DNA, 25 bp, Artificial
  probe
  misc_feature (1)..(25): SEQ ID NO: 6034; WAN0249AU; Start 172; Stop 196
aaattgaatccactccgtcttgatt

SEQ ID NO: 428115 - DNA, 25 bp, Artificial
  probe
  misc_feature (1)..(25): SEQ ID NO: 6034; WAN0249AU; Start 188; Stop 212
gtcttgattagcgtgcctgtgtaag

SEQ ID NO: 428116 - DNA, 25 bp, Artificial
  probe
  misc_feature (1)..(25): SEQ ID NO: 6034; WAN0249AU; Start 302; Stop 326
actcaaacgatgcgacaaactagat

SEQ ID NO: 428117 - DNA, 25 bp, Artificial
  probe
  misc_feature (1)..(25): SEQ ID NO: 6034; WAN0249AU; Start 203; Stop 227
cctgtgtaagtagggactgagagta

SEQ ID NO: 428118 - DNA, 25 bp, Artificial
  probe
  misc_feature (1)..(25): SEQ ID NO: 6034; WAN0249AU; Start 217; Stop 241
gactgagagtatttccctgtgaagg

SEQ ID NO: 428119 - DNA, 25 bp, Artificial
  probe
  misc_feature (1)..(25): SEQ ID NO: 6034; WAN0249AU; Start 189; Stop 213
tcttgattagcgtgcctgtgtaagt

SEQ ID NO: 428120 - DNA, 25 bp, Artificial
  probe
  misc_feature (1)..(25): SEQ ID NO: 6034; WAN0249AU; Start 216; Stop 240
ggactgagagtatttccctgtgaag

SEQ ID NO: 428121 - DNA, 25 bp, Artificial
  probe
  misc_feature (1)..(25): SEQ ID NO: 6034; WAN0249AU; Start 299; Stop 323
cagactcaaacgatgcgacaaacta

SEQ ID NO: 428122 - DNA, 25 bp, Artificial
  probe
  misc_feature (1)..(25): SEQ ID NO: 6034; WAN0249AU; Start 301; Stop 325
gactcaaacgatgcgacaaactaga

SEQ ID NO: 428123 - DNA, 25 bp, Artificial
  probe
  misc_feature (1)..(25): SEQ ID NO: 6034; WAN0249AU; Start 300; Stop 324
agactcaaacgatgcgacaaactag

SEQ ID NO: 428124 - DNA, 25 bp, Artificial
  probe
  misc_feature (1)..(25): SEQ ID NO: 6034; WAN0249AU; Start 166; Stop 190
ctttgaaaattgaatccactccgtc

SEQ ID NO: 428125 - DNA, 25 bp, Artificial
  probe
  misc_feature (1)..(25): SEQ ID NO: 6034; WAN0249AU; Start 164; Stop 188
ttctttgaaaattgaatccactccg

SEQ ID NO: 428126 - DNA, 25 bp, Artificial
  probe
  misc_feature (1)..(25): SEQ ID NO: 6034; WAN0249AU; Start 312; Stop 336
tgcgacaaactagataaaggagtta

SEQ ID NO: 428127 - DNA, 25 bp, Artificial
  probe
  misc_feature (1)..(25): SEQ ID NO: 6034; WAN0249AU; Start 311; Stop 335
atgcgacaaactagataaaggagtt

SEQ ID NO: 428128 - DNA, 25 bp, Artificial
  probe
  misc_feature (1)..(25): SEQ ID NO: 6035; WAN02495Y; Start 31; Stop 55
gttgttcaaacatcagagtgcttta

SEQ ID NO: 428129 - DNA, 25 bp, Artificial
  probe
  misc_feature (1)..(25): SEQ ID NO: 6035; WAN02495Y; Start 32; Stop 56
ttgttcaaacatcagagtgctttat

SEQ ID NO: 428130 - DNA, 25 bp, Artificial
  probe
  misc_feature (1)..(25): SEQ ID NO: 6035; WAN02495Y; Start 33; Stop 57
tgttcaaacatcagagtgctttata

SEQ ID NO: 428131 - DNA, 25 bp, Artificial
  probe
  misc_feature (1)..(25): SEQ ID NO: 6035; WAN02495Y; Start 27; Stop 51
gaaagttgttcaaacatcagagtgc

SEQ ID NO: 428132 - DNA, 25 bp, Artificial
  probe
  misc_feature (1)..(25): SEQ ID NO: 6035; WAN02495Y; Start 30; Stop 54
agttgttcaaacatcagagtgcttt

SEQ ID NO: 428133 - DNA, 25 bp, Artificial
  probe
  misc_feature (1)..(25): SEQ ID NO: 6035; WAN02495Y; Start 29; Stop 53
aagttgttcaaacatcagagtgctt

SEQ ID NO: 428134 - DNA, 25 bp, Artificial
  probe
  misc_feature (1)..(25): SEQ ID NO: 6035; WAN02495Y; Start 28; Stop 52
aaagttgttcaaacatcagagtgct

SEQ ID NO: 428135 - DNA, 25 bp, Artificial
  probe
  misc_feature (1)..(25): SEQ ID NO: 6035; WAN02495Y; Start 34; Stop 58
gttcaaacatcagagtgctttataa

SEQ ID NO: 428136 - DNA, 25 bp, Artificial
  probe
  misc_feature (1)..(25): SEQ ID NO: 6035; WAN02495Y; Start 26; Stop 50
tgaaagttgttcaaacatcagagtg

SEQ ID NO: 428137 - DNA, 25 bp, Artificial
  probe
  misc_feature (1)..(25): SEQ ID NO: 6035; WAN02495Y; Start 25; Stop 49
atgaaagttgttcaaacatcagagt

SEQ ID NO: 428138 - DNA, 25 bp, Artificial
  probe
  misc_feature (1)..(25): SEQ ID NO: 6035; WAN02495Y; Start 24; Stop 48
tatgaaagttgttcaaacatcagag

SEQ ID NO: 428139 - DNA, 25 bp, Artificial
  probe
  misc_feature (1)..(25): SEQ ID NO: 6035; WAN02495Y; Start 23; Stop 47
atatgaaagttgttcaaacatcaga

SEQ ID NO: 428140 - DNA, 25 bp, Artificial
  probe
  misc_feature (1)..(25): SEQ ID NO: 6035; WAN02495Y; Start 35; Stop 59
ttcaaacatcagagtgctttataaa

SEQ ID NO: 428141 - DNA, 25 bp, Artificial
  probe
  misc_feature (1)..(25): SEQ ID NO: 6035; WAN02495Y; Start 22; Stop 46
tatatgaaagttgttcaaacatcag

SEQ ID NO: 428142 - DNA, 25 bp, Artificial
  probe
  misc_feature (1)..(25): SEQ ID NO: 6035; WAN02495Y; Start 36; Stop 60
tcaaacatcagagtgctttataaaa

SEQ ID NO: 428143 - DNA, 25 bp, Artificial
  probe
  misc_feature (1)..(25): SEQ ID NO: 6035; WAN02495Y; Start 21; Stop 45
atatatgaaagttgttcaaacatca

SEQ ID NO: 428144 - DNA, 25 bp, Artificial
  probe
  misc_feature (1)..(25): SEQ ID NO: 6035; WAN02495Y; Start 37; Stop 61
caaacatcagagtgctttataaaat

SEQ ID NO: 428145 - DNA, 25 bp, Artificial
  probe
  misc_feature (1)..(25): SEQ ID NO: 6035; WAN02495Y; Start 3; Stop 27
aaaatttctccgttcatcatatatg

SEQ ID NO: 428146 - DNA, 25 bp, Artificial
  probe
  misc_feature (1)..(25): SEQ ID NO: 6035; WAN02495Y; Start 38; Stop 62
aaacatcagagtgctttataaaata

SEQ ID NO: 428147 - DNA, 25 bp, Artificial
  probe
  misc_feature (1)..(25): SEQ ID NO: 6035; WAN02495Y; Start 20; Stop 44
catatatgaaagttgttcaaacatc

SEQ ID NO: 428148 - DNA, 25 bp, Artificial
  probe
  misc_feature (1)..(25): SEQ ID NO: 6036; WAN0249AK; Start 37; Stop 61
aggaatttgtatgatataccatcgt

SEQ ID NO: 428149 - DNA, 25 bp, Artificial
  probe
  misc_feature (1)..(25): SEQ ID NO: 6036; WAN0249AK; Start 36; Stop 60
gaggaatttgtatgatataccatcg

SEQ ID NO: 428150 - DNA, 25 bp, Artificial
  probe
  misc_feature (1)..(25): SEQ ID NO: 6036; WAN0249AK; Start 33; Stop 57
aaggaggaatttgtatgatatacca

SEQ ID NO: 428151 - DNA, 25 bp, Artificial
  probe
  misc_feature (1)..(25): SEQ ID NO: 6036; WAN0249AK; Start 38; Stop 62
ggaatttgtatgatataccatcgtt

SEQ ID NO: 428152 - DNA, 25 bp, Artificial
  probe
  misc_feature (1)..(25): SEQ ID NO: 6036; WAN0249AK; Start 34; Stop 58
aggaggaatttgtatgatataccat

SEQ ID NO: 428153 - DNA, 25 bp, Artificial
  probe
  misc_feature (1)..(25): SEQ ID NO: 6036; WAN0249AK; Start 35; Stop 59
ggaggaatttgtatgatataccatc

SEQ ID NO: 428154 - DNA, 25 bp, Artificial
  probe
  misc_feature (1)..(25): SEQ ID NO: 6036; WAN0249AK; Start 32; Stop 56
aaaggaggaatttgtatgatatacc

SEQ ID NO: 428155 - DNA, 25 bp, Artificial
  probe
  misc_feature (1)..(25): SEQ ID NO: 6036; WAN0249AK; Start 28; Stop 52
aagtaaaggaggaatttgtatgata

SEQ ID NO: 428156 - DNA, 25 bp, Artificial
  probe
  misc_feature (1)..(25): SEQ ID NO: 6036; WAN0249AK; Start 27; Stop 51
taagtaaaggaggaatttgtatgat

SEQ ID NO: 428157 - DNA, 25 bp, Artificial
  probe
  misc_feature (1)..(25): SEQ ID NO: 6036; WAN0249AK; Start 26; Stop 50
ataagtaaaggaggaatttgtatga

SEQ ID NO: 428158 - DNA, 25 bp, Artificial
  probe
  misc_feature (1)..(25): SEQ ID NO: 6036; WAN0249AK; Start 48; Stop 72
tgatataccatcgtttagaataagt

SEQ ID NO: 428159 - DNA, 25 bp, Artificial
  probe
  misc_feature (1)..(25): SEQ ID NO: 6036; WAN0249AK; Start 29; Stop 53
agtaaaggaggaatttgtatgatat

SEQ ID NO: 428160 - DNA, 25 bp, Artificial
  probe
  misc_feature (1)..(25): SEQ ID NO: 6036; WAN0249AK; Start 43; Stop 67
ttgtatgatataccatcgtttagaa

SEQ ID NO: 428161 - DNA, 25 bp, Artificial
  probe
  misc_feature (1)..(25): SEQ ID NO: 6036; WAN0249AK; Start 42; Stop 66
tttgtatgatataccatcgtttaga

SEQ ID NO: 428162 - DNA, 25 bp, Artificial
  probe
  misc_feature (1)..(25): SEQ ID NO: 6036; WAN0249AK; Start 49; Stop 73
gatataccatcgtttagaataagtc

SEQ ID NO: 428163 - DNA, 25 bp, Artificial
  probe
  misc_feature (1)..(25): SEQ ID NO: 6036; WAN0249AK; Start 39; Stop 63
gaatttgtatgatataccatcgttt

SEQ ID NO: 428164 - DNA, 25 bp, Artificial
  probe
  misc_feature (1)..(25): SEQ ID NO: 6036; WAN0249AK; Start 25; Stop 49
aataagtaaaggaggaatttgtatg

SEQ ID NO: 428165 - DNA, 25 bp, Artificial
  probe
  misc_feature (1)..(25): SEQ ID NO: 6036; WAN0249AK; Start 22; Stop 46
cataataagtaaaggaggaatttgt

SEQ ID NO: 428166 - DNA, 25 bp, Artificial
  probe
  misc_feature (1)..(25): SEQ ID NO: 6036; WAN0249AK; Start 21; Stop 45
acataataagtaaaggaggaatttg

SEQ ID NO: 428167 - DNA, 25 bp, Artificial
  probe
  misc_feature (1)..(25): SEQ ID NO: 6036; WAN0249AK; Start 50; Stop 74
atataccatcgtttagaataagtct

SEQ ID NO: 428168 - DNA, 25 bp, Artificial
  probe
  misc_feature (1)..(25): SEQ ID NO: 6036; WAN0249AK; Start 44; Stop 68
tgtatgatataccatcgtttagaat

SEQ ID NO: 428169 - DNA, 25 bp, Artificial
  probe
  misc_feature (1)..(25): SEQ ID NO: 6036; WAN0249AK; Start 54; Stop 78
accatcgtttagaataagtctatat

SEQ ID NO: 428170 - DNA, 25 bp, Artificial
  probe
  misc_feature (1)..(25): SEQ ID NO: 6036; WAN0249AK; Start 52; Stop 76
ataccatcgtttagaataagtctat

SEQ ID NO: 428171 - DNA, 25 bp, Artificial
  probe
  misc_feature (1)..(25): SEQ ID NO: 6037; WAN02497S; Start 25; Stop 49
atctgactcctcatccttacaagaa

SEQ ID NO: 428172 - DNA, 25 bp, Artificial
  probe
  misc_feature (1)..(25): SEQ ID NO: 6037; WAN02497S; Start 24; Stop 48
catctgactcctcatccttacaaga

SEQ ID NO: 428173 - DNA, 25 bp, Artificial
  probe
  misc_feature (1)..(25): SEQ ID NO: 6037; WAN02497S; Start 23; Stop 47
tcatctgactcctcatccttacaag

SEQ ID NO: 428174 - DNA, 25 bp, Artificial
  probe
  misc_feature (1)..(25): SEQ ID NO: 6037; WAN02497S; Start 38; Stop 62
tccttacaagaaacactactcaaca

SEQ ID NO: 428175 - DNA, 25 bp, Artificial
  probe
  misc_feature (1)..(25): SEQ ID NO: 6037; WAN02497S; Start 33; Stop 57
cctcatccttacaagaaacactact

SEQ ID NO: 428176 - DNA, 25 bp, Artificial
  probe
  misc_feature (1)..(25): SEQ ID NO: 6037; WAN02497S; Start 32; Stop 56
tcctcatccttacaagaaacactac

SEQ ID NO: 428177 - DNA, 25 bp, Artificial
  probe
  misc_feature (1)..(25): SEQ ID NO: 6037; WAN02497S; Start 31; Stop 55
ctcctcatccttacaagaaacacta

SEQ ID NO: 428178 - DNA, 25 bp, Artificial
  probe
  misc_feature (1)..(25): SEQ ID NO: 6037; WAN02497S; Start 35; Stop 59
tcatccttacaagaaacactactca

SEQ ID NO: 428179 - DNA, 25 bp, Artificial
  probe
  misc_feature (1)..(25): SEQ ID NO: 6037; WAN02497S; Start 39; Stop 63
ccttacaagaaacactactcaacaa

SEQ ID NO: 428180 - DNA, 25 bp, Artificial
  probe
  misc_feature (1)..(25): SEQ ID NO: 6037; WAN02497S; Start 34; Stop 58
ctcatccttacaagaaacactactc

SEQ ID NO: 428181 - DNA, 25 bp, Artificial
  probe
  misc_feature (1)..(25): SEQ ID NO: 6037; WAN02497S; Start 29; Stop 53
gactcctcatccttacaagaaacac

SEQ ID NO: 428182 - DNA, 25 bp, Artificial
  probe
  misc_feature (1)..(25): SEQ ID NO: 6037; WAN02497S; Start 37; Stop 61
atccttacaagaaacactactcaac

SEQ ID NO: 428183 - DNA, 25 bp, Artificial
  probe
  misc_feature (1)..(25): SEQ ID NO: 6037; WAN02497S; Start 36; Stop 60
catccttacaagaaacactactcaa

SEQ ID NO: 428184 - DNA, 25 bp, Artificial
  probe
  misc_feature (1)..(25): SEQ ID NO: 6037; WAN02497S; Start 30; Stop 54
actcctcatccttacaagaaacact

SEQ ID NO: 428185 - DNA, 25 bp, Artificial
  probe
  misc_feature (1)..(25): SEQ ID NO: 6037; WAN02497S; Start 22; Stop 46
gtcatctgactcctcatccttacaa

SEQ ID NO: 428186 - DNA, 25 bp, Artificial
  probe
  misc_feature (1)..(25): SEQ ID NO: 6037; WAN02497S; Start 20; Stop 44
ttgtcatctgactcctcatccttac

SEQ ID NO: 428187 - DNA, 25 bp, Artificial
  probe
  misc_feature (1)..(25): SEQ ID NO: 6037; WAN02497S; Start 27; Stop 51
ctgactcctcatccttacaagaaac

SEQ ID NO: 428188 - DNA, 25 bp, Artificial
  probe
  misc_feature (1)..(25): SEQ ID NO: 6037; WAN02497S; Start 26; Stop 50
tctgactcctcatccttacaagaaa

SEQ ID NO: 428189 - DNA, 25 bp, Artificial
  probe
  misc_feature (1)..(25): SEQ ID NO: 6037; WAN02497S; Start 43; Stop 67
acaagaaacactactcaacaatgaa

SEQ ID NO: 428190 - DNA, 25 bp, Artificial
  probe
  misc_feature (1)..(25): SEQ ID NO: 6037; WAN02497S; Start 51; Stop 75
cactactcaacaatgaaactctaca

SEQ ID NO: 428191 - DNA, 25 bp, Artificial
  probe
  misc_feature (1)..(25): SEQ ID NO: 6037; WAN02497S; Start 50; Stop 74
acactactcaacaatgaaactctac

SEQ ID NO: 428192 - DNA, 25 bp, Artificial
  probe
  misc_feature (1)..(25): SEQ ID NO: 6037; WAN02497S; Start 48; Stop 72
aaacactactcaacaatgaaactct

SEQ ID NO: 428193 - DNA, 25 bp, Artificial
  probe
  misc_feature (1)..(25): SEQ ID NO: 6037; WAN02497S; Start 46; Stop 70
agaaacactactcaacaatgaaact

SEQ ID NO: 428194 - DNA, 25 bp, Artificial
  probe
  misc_feature (1)..(25): SEQ ID NO: 6037; WAN02497S; Start 28; Stop 52
tgactcctcatccttacaagaaaca

SEQ ID NO: 428195 - DNA, 25 bp, Artificial
  probe
  misc_feature (1)..(25): SEQ ID NO: 6037; WAN02497S; Start 47; Stop 71
gaaacactactcaacaatgaaactc

SEQ ID NO: 428196 - DNA, 25 bp, Artificial
  probe
  misc_feature (1)..(25): SEQ ID NO: 6037; WAN02497S; Start 42; Stop 66
tacaagaaacactactcaacaatga

SEQ ID NO: 428197 - DNA, 25 bp, Artificial
  probe
  misc_feature (1)..(25): SEQ ID NO: 6037; WAN02497S; Start 41; Stop 65
ttacaagaaacactactcaacaatg

SEQ ID NO: 428198 - DNA, 25 bp, Artificial
  probe
  misc_feature (1)..(25): SEQ ID NO: 6037; WAN02497S; Start 45; Stop 69
aagaaacactactcaacaatgaaac

SEQ ID NO: 428199 - DNA, 25 bp, Artificial
  probe
  misc_feature (1)..(25): SEQ ID NO: 6037; WAN02497S; Start 44; Stop 68
caagaaacactactcaacaatgaaa

SEQ ID NO: 428200 - DNA, 25 bp, Artificial
  probe
  misc_feature (1)..(25): SEQ ID NO: 6037; WAN02497S; Start 21; Stop 45
tgtcatctgactcctcatccttaca

SEQ ID NO: 428201 - DNA, 25 bp, Artificial
  probe
  misc_feature (1)..(25): SEQ ID NO: 6037; WAN02497S; Start 52; Stop 76
actactcaacaatgaaactctacaa

SEQ ID NO: 428202 - DNA, 25 bp, Artificial
  probe
  misc_feature (1)..(25): SEQ ID NO: 6037; WAN02497S; Start 49; Stop 73
aacactactcaacaatgaaactcta

SEQ ID NO: 428203 - DNA, 25 bp, Artificial
  probe
  misc_feature (1)..(25): SEQ ID NO: 6037; WAN02497S; Start 40; Stop 64
cttacaagaaacactactcaacaat

SEQ ID NO: 428204 - DNA, 25 bp, Artificial
  probe
  misc_feature (1)..(25): SEQ ID NO: 6038; WAN02496X; Start 30; Stop 54
ataatatgcaaccagtactaaccaa

SEQ ID NO: 428205 - DNA, 25 bp, Artificial
  probe
  misc_feature (1)..(25): SEQ ID NO: 6038; WAN02496X; Start 29; Stop 53
aataatatgcaaccagtactaacca

SEQ ID NO: 428206 - DNA, 25 bp, Artificial
  probe
  misc_feature (1)..(25): SEQ ID NO: 6038; WAN02496X; Start 32; Stop 56
aatatgcaaccagtactaaccaaat

SEQ ID NO: 428207 - DNA, 25 bp, Artificial
  probe
  misc_feature (1)..(25): SEQ ID NO: 6038; WAN02496X; Start 31; Stop 55
taatatgcaaccagtactaaccaaa

SEQ ID NO: 428208 - DNA, 25 bp, Artificial
  probe
  misc_feature (1)..(25): SEQ ID NO: 6038; WAN02496X; Start 34; Stop 58
tatgcaaccagtactaaccaaatat

SEQ ID NO: 428209 - DNA, 25 bp, Artificial
  probe
  misc_feature (1)..(25): SEQ ID NO: 6038; WAN02496X; Start 33; Stop 57
atatgcaaccagtactaaccaaata

SEQ ID NO: 428210 - DNA, 25 bp, Artificial
  probe
  misc_feature (1)..(25): SEQ ID NO: 6038; WAN02496X; Start 105; Stop 129
actatacaagtaaaagagatggtgt

SEQ ID NO: 428211 - DNA, 25 bp, Artificial
  probe
  misc_feature (1)..(25): SEQ ID NO: 6038; WAN02496X; Start 28; Stop 52
aaataatatgcaaccagtactaacc

SEQ ID NO: 428212 - DNA, 25 bp, Artificial
  probe
  misc_feature (1)..(25): SEQ ID NO: 6038; WAN02496X; Start 67; Stop 91
tgccattaacgaattttattcaagt

SEQ ID NO: 428213 - DNA, 25 bp, Artificial
  probe
  misc_feature (1)..(25): SEQ ID NO: 6038; WAN02496X; Start 64; Stop 88
agatgccattaacgaattttattca

SEQ ID NO: 428214 - DNA, 25 bp, Artificial
  probe
  misc_feature (1)..(25): SEQ ID NO: 6038; WAN02496X; Start 145; Stop 169
tcaaactattgtaaaattcctagca

SEQ ID NO: 428215 - DNA, 25 bp, Artificial
  probe
  misc_feature (1)..(25): SEQ ID NO: 6038; WAN02496X; Start 68; Stop 92
gccattaacgaattttattcaagtt

SEQ ID NO: 428216 - DNA, 25 bp, Artificial
  probe
  misc_feature (1)..(25): SEQ ID NO: 6038; WAN02496X; Start 106; Stop 130
ctatacaagtaaaagagatggtgtt

SEQ ID NO: 428217 - DNA, 25 bp, Artificial
  probe
  misc_feature (1)..(25): SEQ ID NO: 6038; WAN02496X; Start 66; Stop 90
atgccattaacgaattttattcaag

SEQ ID NO: 428218 - DNA, 25 bp, Artificial
  probe
  misc_feature (1)..(25): SEQ ID NO: 6038; WAN02496X; Start 65; Stop 89
gatgccattaacgaattttattcaa

SEQ ID NO: 428219 - DNA, 25 bp, Artificial
  probe
  misc_feature (1)..(25): SEQ ID NO: 6038; WAN02496X; Start 94; Stop 118
ttcccattcatactatacaagtaaa

SEQ ID NO: 428220 - DNA, 25 bp, Artificial
  probe
  misc_feature (1)..(25): SEQ ID NO: 6038; WAN02496X; Start 93; Stop 117
tttcccattcatactatacaagtaa

SEQ ID NO: 428221 - DNA, 25 bp, Artificial
  probe
  misc_feature (1)..(25): SEQ ID NO: 6038; WAN02496X; Start 110; Stop 134
acaagtaaaagagatggtgttaact

SEQ ID NO: 428222 - DNA, 25 bp, Artificial
  probe
  misc_feature (1)..(25): SEQ ID NO: 6038; WAN02496X; Start 146; Stop 170
caaactattgtaaaattcctagcaa

SEQ ID NO: 428223 - DNA, 25 bp, Artificial
  probe
  misc_feature (1)..(25): SEQ ID NO: 6038; WAN02496X; Start 108; Stop 132
atacaagtaaaagagatggtgttaa

SEQ ID NO: 428224 - DNA, 25 bp, Artificial
  probe
  misc_feature (1)..(25): SEQ ID NO: 6038; WAN02496X; Start 144; Stop 168
ttcaaactattgtaaaattcctagc

SEQ ID NO: 428225 - DNA, 25 bp, Artificial
  probe
  misc_feature (1)..(25): SEQ ID NO: 6038; WAN02496X; Start 23; Stop 47
tttcaaaataatatgcaaccagtac

SEQ ID NO: 428226 - DNA, 25 bp, Artificial
  probe
  misc_feature (1)..(25): SEQ ID NO: 6038; WAN02496X; Start 62; Stop 86
atagatgccattaacgaattttatt

SEQ ID NO: 428227 - DNA, 25 bp, Artificial
  probe
  misc_feature (1)..(25): SEQ ID NO: 6038; WAN02496X; Start 61; Stop 85
aatagatgccattaacgaattttat

SEQ ID NO: 428228 - DNA, 25 bp, Artificial
  probe
  misc_feature (1)..(25): SEQ ID NO: 6038; WAN02496X; Start 57; Stop 81
ataaaatagatgccattaacgaatt

SEQ ID NO: 428229 - DNA, 25 bp, Artificial
  probe
  misc_feature (1)..(25): SEQ ID NO: 6038; WAN02496X; Start 24; Stop 48
ttcaaaataatatgcaaccagtact

SEQ ID NO: 428230 - DNA, 25 bp, Artificial
  probe
  misc_feature (1)..(25): SEQ ID NO: 6038; WAN02496X; Start 63; Stop 87
tagatgccattaacgaattttattc

SEQ ID NO: 428231 - DNA, 25 bp, Artificial
  probe
  misc_feature (1)..(25): SEQ ID NO: 6038; WAN02496X; Start 60; Stop 84
aaatagatgccattaacgaatttta

SEQ ID NO: 428232 - DNA, 25 bp, Artificial
  probe
  misc_feature (1)..(25): SEQ ID NO: 6038; WAN02496X; Start 58; Stop 82
taaaatagatgccattaacgaattt

SEQ ID NO: 428233 - DNA, 25 bp, Artificial
  probe
  misc_feature (1)..(25): SEQ ID NO: 6038; WAN02496X; Start 109; Stop 133
tacaagtaaaagagatggtgttaac

SEQ ID NO: 428234 - DNA, 25 bp, Artificial
  probe
  misc_feature (1)..(25): SEQ ID NO: 6038; WAN02496X; Start 111; Stop 135
caagtaaaagagatggtgttaacta

SEQ ID NO: 428235 - DNA, 25 bp, Artificial
  probe
  misc_feature (1)..(25): SEQ ID NO: 6038; WAN02496X; Start 104; Stop 128
tactatacaagtaaaagagatggtg

SEQ ID NO: 428236 - DNA, 25 bp, Artificial
  probe
  misc_feature (1)..(25): SEQ ID NO: 6038; WAN02496X; Start 148; Stop 172
aactattgtaaaattcctagcaaaa

SEQ ID NO: 428237 - DNA, 25 bp, Artificial
  probe
  misc_feature (1)..(25): SEQ ID NO: 6039; WAN0249BK; Start 33; Stop 57
tcatgagaagatgaagtaatactca

SEQ ID NO: 428238 - DNA, 25 bp, Artificial
  probe
  misc_feature (1)..(25): SEQ ID NO: 6039; WAN0249BK; Start 25; Stop 49
actcaatttcatgagaagatgaagt

SEQ ID NO: 428239 - DNA, 25 bp, Artificial
  probe
  misc_feature (1)..(25): SEQ ID NO: 6039; WAN0249BK; Start 24; Stop 48
aactcaatttcatgagaagatgaag

SEQ ID NO: 428240 - DNA, 25 bp, Artificial
  probe
  misc_feature (1)..(25): SEQ ID NO: 6039; WAN0249BK; Start 32; Stop 56
ttcatgagaagatgaagtaatactc

SEQ ID NO: 428241 - DNA, 25 bp, Artificial
  probe
  misc_feature (1)..(25): SEQ ID NO: 6039; WAN0249BK; Start 23; Stop 47
aaactcaatttcatgagaagatgaa

SEQ ID NO: 428242 - DNA, 25 bp, Artificial
  probe
  misc_feature (1)..(25): SEQ ID NO: 6039; WAN0249BK; Start 26; Stop 50
ctcaatttcatgagaagatgaagta

SEQ ID NO: 428243 - DNA, 25 bp, Artificial
  probe
  misc_feature (1)..(25): SEQ ID NO: 6039; WAN0249BK; Start 22; Stop 46
aaaactcaatttcatgagaagatga

SEQ ID NO: 428244 - DNA, 25 bp, Artificial
  probe
  misc_feature (1)..(25): SEQ ID NO: 6039; WAN0249BK; Start 27; Stop 51
tcaatttcatgagaagatgaagtaa

SEQ ID NO: 428245 - DNA, 25 bp, Artificial
  probe
  misc_feature (1)..(25): SEQ ID NO: 6039; WAN0249BK; Start 31; Stop 55
tttcatgagaagatgaagtaatact

SEQ ID NO: 428246 - DNA, 25 bp, Artificial
  probe
  misc_feature (1)..(25): SEQ ID NO: 6039; WAN0249BK; Start 28; Stop 52
caatttcatgagaagatgaagtaat

SEQ ID NO: 428247 - DNA, 25 bp, Artificial
  probe
  misc_feature (1)..(25): SEQ ID NO: 6039; WAN0249BK; Start 30; Stop 54
atttcatgagaagatgaagtaatac

SEQ ID NO: 428248 - DNA, 25 bp, Artificial
  probe
  misc_feature (1)..(25): SEQ ID NO: 6040; WAN0249A8; Start 70; Stop 94
gcttgactttcttgagggaagttat

SEQ ID NO: 428249 - DNA, 25 bp, Artificial
  probe
  misc_feature (1)..(25): SEQ ID NO: 6040; WAN0249A8; Start 61; Stop 85
agttgtctggcttgactttcttgag

SEQ ID NO: 428250 - DNA, 25 bp, Artificial
  probe
  misc_feature (1)..(25): SEQ ID NO: 6040; WAN0249A8; Start 71; Stop 95
cttgactttcttgagggaagttata

SEQ ID NO: 428251 - DNA, 25 bp, Artificial
  probe
  misc_feature (1)..(25): SEQ ID NO: 6040; WAN0249A8; Start 72; Stop 96
ttgactttcttgagggaagttatat

SEQ ID NO: 428252 - DNA, 25 bp, Artificial
  probe
  misc_feature (1)..(25): SEQ ID NO: 6040; WAN0249A8; Start 69; Stop 93
ggcttgactttcttgagggaagtta

SEQ ID NO: 428253 - DNA, 25 bp, Artificial
  probe
  misc_feature (1)..(25): SEQ ID NO: 6040; WAN0249A8; Start 62; Stop 86
gttgtctggcttgactttcttgagg

SEQ ID NO: 428254 - DNA, 25 bp, Artificial
  probe
  misc_feature (1)..(25): SEQ ID NO: 6040; WAN0249A8; Start 60; Stop 84
aagttgtctggcttgactttcttga

SEQ ID NO: 428255 - DNA, 25 bp, Artificial
  probe
  misc_feature (1)..(25): SEQ ID NO: 6040; WAN0249A8; Start 66; Stop 90
tctggcttgactttcttgagggaag

SEQ ID NO: 428256 - DNA, 25 bp, Artificial
  probe
  misc_feature (1)..(25): SEQ ID NO: 6040; WAN0249A8; Start 73; Stop 97
tgactttcttgagggaagttatata

SEQ ID NO: 428257 - DNA, 25 bp, Artificial
  probe
  misc_feature (1)..(25): SEQ ID NO: 6040; WAN0249A8; Start 59; Stop 83
caagttgtctggcttgactttcttg

SEQ ID NO: 428258 - DNA, 25 bp, Artificial
  probe
  misc_feature (1)..(25): SEQ ID NO: 6040; WAN0249A8; Start 44; Stop 68
ctgagtgggatgcttcaagttgtct

SEQ ID NO: 428259 - DNA, 25 bp, Artificial
  probe
  misc_feature (1)..(25): SEQ ID NO: 6040; WAN0249A8; Start 65; Stop 89
gtctggcttgactttcttgagggaa

SEQ ID NO: 428260 - DNA, 25 bp, Artificial
  probe
  misc_feature (1)..(25): SEQ ID NO: 6040; WAN0249A8; Start 45; Stop 69
tgagtgggatgcttcaagttgtctg

SEQ ID NO: 428261 - DNA, 25 bp, Artificial
  probe
  misc_feature (1)..(25): SEQ ID NO: 6040; WAN0249A8; Start 63; Stop 87
ttgtctggcttgactttcttgaggg

SEQ ID NO: 428262 - DNA, 25 bp, Artificial
  probe
  misc_feature (1)..(25): SEQ ID NO: 6040; WAN0249A8; Start 40; Stop 64
tttgctgagtgggatgcttcaagtt

SEQ ID NO: 428263 - DNA, 25 bp, Artificial
  probe
  misc_feature (1)..(25): SEQ ID NO: 6040; WAN0249A8; Start 68; Stop 92
tggcttgactttcttgagggaagtt

SEQ ID NO: 428264 - DNA, 25 bp, Artificial
  probe
  misc_feature (1)..(25): SEQ ID NO: 6040; WAN0249A8; Start 67; Stop 91
ctggcttgactttcttgagggaagt

SEQ ID NO: 428265 - DNA, 25 bp, Artificial
  probe
  misc_feature (1)..(25): SEQ ID NO: 6040; WAN0249A8; Start 81; Stop 105
ttgagggaagttatataatagttgt

SEQ ID NO: 428266 - DNA, 25 bp, Artificial
  probe
  misc_feature (1)..(25): SEQ ID NO: 6040; WAN0249A8; Start 74; Stop 98
gactttcttgagggaagttatataa

SEQ ID NO: 428267 - DNA, 25 bp, Artificial
  probe
  misc_feature (1)..(25): SEQ ID NO: 6040; WAN0249A8; Start 39; Stop 63
ttttgctgagtgggatgcttcaagt

SEQ ID NO: 428268 - DNA, 25 bp, Artificial
  probe
  misc_feature (1)..(25): SEQ ID NO: 6040; WAN0249A8; Start 75; Stop 99
actttcttgagggaagttatataat

SEQ ID NO: 428269 - DNA, 25 bp, Artificial
  probe
  misc_feature (1)..(25): SEQ ID NO: 6041; WAN0249AN; Start 8; Stop 32
caatattaatgcggagtgtaatgct

SEQ ID NO: 428270 - DNA, 25 bp, Artificial
  probe
  misc_feature (1)..(25): SEQ ID NO: 6041; WAN0249AN; Start 7; Stop 31
tcaatattaatgcggagtgtaatgc

SEQ ID NO: 428271 - DNA, 25 bp, Artificial
  probe
  misc_feature (1)..(25): SEQ ID NO: 6041; WAN0249AN; Start 9; Stop 33
aatattaatgcggagtgtaatgctc

SEQ ID NO: 428272 - DNA, 25 bp, Artificial
  probe
  misc_feature (1)..(25): SEQ ID NO: 6041; WAN0249AN; Start 85; Stop 109
aaagaggaacgaatgaagatgaaag

SEQ ID NO: 428273 - DNA, 25 bp, Artificial
  probe
  misc_feature (1)..(25): SEQ ID NO: 6041; WAN0249AN; Start 84; Stop 108
gaaagaggaacgaatgaagatgaaa

SEQ ID NO: 428274 - DNA, 25 bp, Artificial
  probe
  misc_feature (1)..(25): SEQ ID NO: 6041; WAN0249AN; Start 75; Stop 99
tttaggatggaaagaggaacgaatg

SEQ ID NO: 428275 - DNA, 25 bp, Artificial
  probe
  misc_feature (1)..(25): SEQ ID NO: 6041; WAN0249AN; Start 80; Stop 104
gatggaaagaggaacgaatgaagat

SEQ ID NO: 428276 - DNA, 25 bp, Artificial
  probe
  misc_feature (1)..(25): SEQ ID NO: 6041; WAN0249AN; Start 83; Stop 107
ggaaagaggaacgaatgaagatgaa

SEQ ID NO: 428277 - DNA, 25 bp, Artificial
  probe
  misc_feature (1)..(25): SEQ ID NO: 6041; WAN0249AN; Start 81; Stop 105
atggaaagaggaacgaatgaagatg

SEQ ID NO: 428278 - DNA, 25 bp, Artificial
  probe
  misc_feature (1)..(25): SEQ ID NO: 6041; WAN0249AN; Start 74; Stop 98
gtttaggatggaaagaggaacgaat

SEQ ID NO: 428279 - DNA, 25 bp, Artificial
  probe
  misc_feature (1)..(25): SEQ ID NO: 6041; WAN0249AN; Start 77; Stop 101
taggatggaaagaggaacgaatgaa

SEQ ID NO: 428280 - DNA, 25 bp, Artificial
  probe
  misc_feature (1)..(25): SEQ ID NO: 6041; WAN0249AN; Start 76; Stop 100
ttaggatggaaagaggaacgaatga

SEQ ID NO: 428281 - DNA, 25 bp, Artificial
  probe
  misc_feature (1)..(25): SEQ ID NO: 6041; WAN0249AN; Start 86; Stop 110
aagaggaacgaatgaagatgaaagc

SEQ ID NO: 428282 - DNA, 25 bp, Artificial
  probe
  misc_feature (1)..(25): SEQ ID NO: 6041; WAN0249AN; Start 71; Stop 95
tttgtttaggatggaaagaggaacg

SEQ ID NO: 428283 - DNA, 25 bp, Artificial
  probe
  misc_feature (1)..(25): SEQ ID NO: 6041; WAN0249AN; Start 82; Stop 106
tggaaagaggaacgaatgaagatga

SEQ ID NO: 428284 - DNA, 25 bp, Artificial
  probe
  misc_feature (1)..(25): SEQ ID NO: 6041; WAN0249AN; Start 6; Stop 30
atcaatattaatgcggagtgtaatg

SEQ ID NO: 428285 - DNA, 25 bp, Artificial
  probe
  misc_feature (1)..(25): SEQ ID NO: 6041; WAN0249AN; Start 3; Stop 27
actatcaatattaatgcggagtgta

SEQ ID NO: 428286 - DNA, 25 bp, Artificial
  probe
  misc_feature (1)..(25): SEQ ID NO: 6041; WAN0249AN; Start 2; Stop 26
tactatcaatattaatgcggagtgt

SEQ ID NO: 428287 - DNA, 25 bp, Artificial
  probe
  misc_feature (1)..(25): SEQ ID NO: 6041; WAN0249AN; Start 73; Stop 97
tgtttaggatggaaagaggaacgaa

SEQ ID NO: 428288 - DNA, 25 bp, Artificial
  probe
  misc_feature (1)..(25): SEQ ID NO: 6041; WAN0249AN; Start 72; Stop 96
ttgtttaggatggaaagaggaacga

SEQ ID NO: 428289 - DNA, 25 bp, Artificial
  probe
  misc_feature (1)..(25): SEQ ID NO: 6041; WAN0249AN; Start 93; Stop 117
acgaatgaagatgaaagctagagat

SEQ ID NO: 428290 - DNA, 25 bp, Artificial
  probe
  misc_feature (1)..(25): SEQ ID NO: 6041; WAN0249AN; Start 92; Stop 116
aacgaatgaagatgaaagctagaga

SEQ ID NO: 428291 - DNA, 25 bp, Artificial
  probe
  misc_feature (1)..(25): SEQ ID NO: 6041; WAN0249AN; Start 91; Stop 115
gaacgaatgaagatgaaagctagag

SEQ ID NO: 428292 - DNA, 25 bp, Artificial
  probe
  misc_feature (1)..(25): SEQ ID NO: 6041; WAN0249AN; Start 79; Stop 103
ggatggaaagaggaacgaatgaaga

SEQ ID NO: 428293 - DNA, 25 bp, Artificial
  probe
  misc_feature (1)..(25): SEQ ID NO: 6041; WAN0249AN; Start 78; Stop 102
aggatggaaagaggaacgaatgaag

SEQ ID NO: 428294 - DNA, 25 bp, Artificial
  probe
  misc_feature (1)..(25): SEQ ID NO: 6041; WAN0249AN; Start 4; Stop 28
ctatcaatattaatgcggagtgtaa

SEQ ID NO: 428295 - DNA, 25 bp, Artificial
  probe
  misc_feature (1)..(25): SEQ ID NO: 6041; WAN0249AN; Start 90; Stop 114
ggaacgaatgaagatgaaagctaga

SEQ ID NO: 428296 - DNA, 25 bp, Artificial
  probe
  misc_feature (1)..(25): SEQ ID NO: 6041; WAN0249AN; Start 89; Stop 113
aggaacgaatgaagatgaaagctag

SEQ ID NO: 428297 - DNA, 25 bp, Artificial
  probe
  misc_feature (1)..(25): SEQ ID NO: 6041; WAN0249AN; Start 88; Stop 112
gaggaacgaatgaagatgaaagcta

SEQ ID NO: 428298 - DNA, 25 bp, Artificial
  probe
  misc_feature (1)..(25): SEQ ID NO: 6041; WAN0249AN; Start 94; Stop 118
cgaatgaagatgaaagctagagatt

SEQ ID NO: 428299 - DNA, 25 bp, Artificial
  probe
  misc_feature (1)..(25): SEQ ID NO: 6041; WAN0249AN; Start 70; Stop 94
ctttgtttaggatggaaagaggaac

SEQ ID NO: 428300 - DNA, 25 bp, Artificial
  probe
  misc_feature (1)..(25): SEQ ID NO: 6041; WAN0249AN; Start 69; Stop 93
actttgtttaggatggaaagaggaa

SEQ ID NO: 428301 - DNA, 25 bp, Artificial
  probe
  misc_feature (1)..(25): SEQ ID NO: 6041; WAN0249AN; Start 68; Stop 92
tactttgtttaggatggaaagagga

SEQ ID NO: 428302 - DNA, 25 bp, Artificial
  probe
  misc_feature (1)..(25): SEQ ID NO: 6042; WAN0249BL; Start 70; Stop 94
gttaatagacctttgcacatatcgt

SEQ ID NO: 428303 - DNA, 25 bp, Artificial
  probe
  misc_feature (1)..(25): SEQ ID NO: 6042; WAN0249BL; Start 69; Stop 93
agttaatagacctttgcacatatcg

SEQ ID NO: 428304 - DNA, 25 bp, Artificial
  probe
  misc_feature (1)..(25): SEQ ID NO: 6042; WAN0249BL; Start 84; Stop 108
gcacatatcgtctcaaaacattcat

SEQ ID NO: 428305 - DNA, 25 bp, Artificial
  probe
  misc_feature (1)..(25): SEQ ID NO: 6042; WAN0249BL; Start 71; Stop 95
ttaatagacctttgcacatatcgtc

SEQ ID NO: 428306 - DNA, 25 bp, Artificial
  probe
  misc_feature (1)..(25): SEQ ID NO: 6042; WAN0249BL; Start 64; Stop 88
ctaatagttaatagacctttgcaca

SEQ ID NO: 428307 - DNA, 25 bp, Artificial
  probe
  misc_feature (1)..(25): SEQ ID NO: 6042; WAN0249BL; Start 34; Stop 58
acaacttcttttgactcacattaaa

SEQ ID NO: 428308 - DNA, 25 bp, Artificial
  probe
  misc_feature (1)..(25): SEQ ID NO: 6042; WAN0249BL; Start 31; Stop 55
tttacaacttcttttgactcacatt

SEQ ID NO: 428309 - DNA, 25 bp, Artificial
  probe
  misc_feature (1)..(25): SEQ ID NO: 6042; WAN0249BL; Start 30; Stop 54
ttttacaacttcttttgactcacat

SEQ ID NO: 428310 - DNA, 25 bp, Artificial
  probe
  misc_feature (1)..(25): SEQ ID NO: 6042; WAN0249BL; Start 36; Stop 60
aacttcttttgactcacattaaact

SEQ ID NO: 428311 - DNA, 25 bp, Artificial
  probe
  misc_feature (1)..(25): SEQ ID NO: 6042; WAN0249BL; Start 35; Stop 59
caacttcttttgactcacattaaac

SEQ ID NO: 428312 - DNA, 25 bp, Artificial
  probe
  misc_feature (1)..(25): SEQ ID NO: 6042; WAN0249BL; Start 68; Stop 92
tagttaatagacctttgcacatatc

SEQ ID NO: 428313 - DNA, 25 bp, Artificial
  probe
  misc_feature (1)..(25): SEQ ID NO: 6042; WAN0249BL; Start 82; Stop 106
ttgcacatatcgtctcaaaacattc

SEQ ID NO: 428314 - DNA, 25 bp, Artificial
  probe
  misc_feature (1)..(25): SEQ ID NO: 6042; WAN0249BL; Start 83; Stop 107
tgcacatatcgtctcaaaacattca

SEQ ID NO: 428315 - DNA, 25 bp, Artificial
  probe
  misc_feature (1)..(25): SEQ ID NO: 6042; WAN0249BL; Start 72; Stop 96
taatagacctttgcacatatcgtct

SEQ ID NO: 428316 - DNA, 25 bp, Artificial
  probe
  misc_feature (1)..(25): SEQ ID NO: 6042; WAN0249BL; Start 33; Stop 57
tacaacttcttttgactcacattaa

SEQ ID NO: 428317 - DNA, 25 bp, Artificial
  probe
  misc_feature (1)..(25): SEQ ID NO: 6042; WAN0249BL; Start 32; Stop 56
ttacaacttcttttgactcacatta

SEQ ID NO: 428318 - DNA, 25 bp, Artificial
  probe
  misc_feature (1)..(25): SEQ ID NO: 6042; WAN0249BL; Start 73; Stop 97
aatagacctttgcacatatcgtctc

SEQ ID NO: 428319 - DNA, 25 bp, Artificial
  probe
  misc_feature (1)..(25): SEQ ID NO: 6042; WAN0249BL; Start 37; Stop 61
acttcttttgactcacattaaacta

SEQ ID NO: 428320 - DNA, 25 bp, Artificial
  probe
  misc_feature (1)..(25): SEQ ID NO: 6042; WAN0249BL; Start 66; Stop 90
aatagttaatagacctttgcacata

SEQ ID NO: 428321 - DNA, 25 bp, Artificial
  probe
  misc_feature (1)..(25): SEQ ID NO: 6042; WAN0249BL; Start 65; Stop 89
taatagttaatagacctttgcacat

SEQ ID NO: 428322 - DNA, 25 bp, Artificial
  probe
  misc_feature (1)..(25): SEQ ID NO: 6042; WAN0249BL; Start 74; Stop 98
atagacctttgcacatatcgtctca

SEQ ID NO: 428323 - DNA, 25 bp, Artificial
  probe
  misc_feature (1)..(25): SEQ ID NO: 6042; WAN0249BL; Start 67; Stop 91
atagttaatagacctttgcacatat

SEQ ID NO: 428324 - DNA, 25 bp, Artificial
  probe
  misc_feature (1)..(25): SEQ ID NO: 6042; WAN0249BL; Start 63; Stop 87
tctaatagttaatagacctttgcac

SEQ ID NO: 428325 - DNA, 25 bp, Artificial
  probe
  misc_feature (1)..(25): SEQ ID NO: 6042; WAN0249BL; Start 75; Stop 99
tagacctttgcacatatcgtctcaa

SEQ ID NO: 428326 - DNA, 25 bp, Artificial
  probe
  misc_feature (1)..(25): SEQ ID NO: 6042; WAN0249BL; Start 81; Stop 105
tttgcacatatcgtctcaaaacatt

SEQ ID NO: 428327 - DNA, 25 bp, Artificial
  probe
  misc_feature (1)..(25): SEQ ID NO: 6042; WAN0249BL; Start 80; Stop 104
ctttgcacatatcgtctcaaaacat

SEQ ID NO: 428328 - DNA, 25 bp, Artificial
  probe
  misc_feature (1)..(25): SEQ ID NO: 6042; WAN0249BL; Start 76; Stop 100
agacctttgcacatatcgtctcaaa

SEQ ID NO: 428329 - DNA, 25 bp, Artificial
  probe
  misc_feature (1)..(25): SEQ ID NO: 6042; WAN0249BL; Start 77; Stop 101
gacctttgcacatatcgtctcaaaa

SEQ ID NO: 428330 - DNA, 25 bp, Artificial
  probe
  misc_feature (1)..(25): SEQ ID NO: 6042; WAN0249BL; Start 62; Stop 86
ttctaatagttaatagacctttgca

SEQ ID NO: 428331 - DNA, 25 bp, Artificial
  probe
  misc_feature (1)..(25): SEQ ID NO: 6042; WAN0249BL; Start 41; Stop 65
cttttgactcacattaaactattct

SEQ ID NO: 428332 - DNA, 25 bp, Artificial
  probe
  misc_feature (1)..(25): SEQ ID NO: 6042; WAN0249BL; Start 40; Stop 64
tcttttgactcacattaaactattc

SEQ ID NO: 428333 - DNA, 25 bp, Artificial
  probe
  misc_feature (1)..(25): SEQ ID NO: 6042; WAN0249BL; Start 38; Stop 62
cttcttttgactcacattaaactat

SEQ ID NO: 428334 - DNA, 25 bp, Artificial
  probe
  misc_feature (1)..(25): SEQ ID NO: 6042; WAN0249BL; Start 79; Stop 103
cctttgcacatatcgtctcaaaaca

SEQ ID NO: 428335 - DNA, 25 bp, Artificial
  probe
  misc_feature (1)..(25): SEQ ID NO: 6043; WAN0249AE; Start 43; Stop 67
acaccccaaaagttagatttattct

SEQ ID NO: 428336 - DNA, 25 bp, Artificial
  probe
  misc_feature (1)..(25): SEQ ID NO: 6043; WAN0249AE; Start 26; Stop 50
ctcaatttcataataaaacacccca

SEQ ID NO: 428337 - DNA, 25 bp, Artificial
  probe
  misc_feature (1)..(25): SEQ ID NO: 6043; WAN0249AE; Start 25; Stop 49
actcaatttcataataaaacacccc

SEQ ID NO: 428338 - DNA, 25 bp, Artificial
  probe
  misc_feature (1)..(25): SEQ ID NO: 6043; WAN0249AE; Start 31; Stop 55
tttcataataaaacaccccaaaagt

SEQ ID NO: 428339 - DNA, 25 bp, Artificial
  probe
  misc_feature (1)..(25): SEQ ID NO: 6043; WAN0249AE; Start 42; Stop 66
aacaccccaaaagttagatttattc

SEQ ID NO: 428340 - DNA, 25 bp, Artificial
  probe
  misc_feature (1)..(25): SEQ ID NO: 6043; WAN0249AE; Start 32; Stop 56
ttcataataaaacaccccaaaagtt

SEQ ID NO: 428341 - DNA, 25 bp, Artificial
  probe
  misc_feature (1)..(25): SEQ ID NO: 6043; WAN0249AE; Start 27; Stop 51
tcaatttcataataaaacaccccaa

SEQ ID NO: 428342 - DNA, 25 bp, Artificial
  probe
  misc_feature (1)..(25): SEQ ID NO: 6043; WAN0249AE; Start 41; Stop 65
aaacaccccaaaagttagatttatt

SEQ ID NO: 428343 - DNA, 25 bp, Artificial
  probe
  misc_feature (1)..(25): SEQ ID NO: 6043; WAN0249AE; Start 40; Stop 64
aaaacaccccaaaagttagatttat

SEQ ID NO: 428344 - DNA, 25 bp, Artificial
  probe
  misc_feature (1)..(25): SEQ ID NO: 6043; WAN0249AE; Start 38; Stop 62
ataaaacaccccaaaagttagattt

SEQ ID NO: 428345 - DNA, 25 bp, Artificial
  probe
  misc_feature (1)..(25): SEQ ID NO: 6043; WAN0249AE; Start 37; Stop 61
aataaaacaccccaaaagttagatt

SEQ ID NO: 428346 - DNA, 25 bp, Artificial
  probe
  misc_feature (1)..(25): SEQ ID NO: 6043; WAN0249AE; Start 82; Stop 106
gtgcagttcattaatcggtcgattt

SEQ ID NO: 428347 - DNA, 25 bp, Artificial
  probe
  misc_feature (1)..(25): SEQ ID NO: 6043; WAN0249AE; Start 81; Stop 105
ggtgcagttcattaatcggtcgatt

SEQ ID NO: 428348 - DNA, 25 bp, Artificial
  probe
  misc_feature (1)..(25): SEQ ID NO: 6043; WAN0249AE; Start 33; Stop 57
tcataataaaacaccccaaaagtta

SEQ ID NO: 428349 - DNA, 25 bp, Artificial
  probe
  misc_feature (1)..(25): SEQ ID NO: 6043; WAN0249AE; Start 28; Stop 52
caatttcataataaaacaccccaaa

SEQ ID NO: 428350 - DNA, 25 bp, Artificial
  probe
  misc_feature (1)..(25): SEQ ID NO: 6043; WAN0249AE; Start 30; Stop 54
atttcataataaaacaccccaaaag

SEQ ID NO: 428351 - DNA, 25 bp, Artificial
  probe
  misc_feature (1)..(25): SEQ ID NO: 6043; WAN0249AE; Start 39; Stop 63
taaaacaccccaaaagttagattta

SEQ ID NO: 428352 - DNA, 25 bp, Artificial
  probe
  misc_feature (1)..(25): SEQ ID NO: 6043; WAN0249AE; Start 34; Stop 58
cataataaaacaccccaaaagttag

SEQ ID NO: 428353 - DNA, 25 bp, Artificial
  probe
  misc_feature (1)..(25): SEQ ID NO: 6043; WAN0249AE; Start 73; Stop 97
acttttggggtgcagttcattaatc

SEQ ID NO: 428354 - DNA, 25 bp, Artificial
  probe
  misc_feature (1)..(25): SEQ ID NO: 6043; WAN0249AE; Start 36; Stop 60
taataaaacaccccaaaagttagat

SEQ ID NO: 428355 - DNA, 25 bp, Artificial
  probe
  misc_feature (1)..(25): SEQ ID NO: 6043; WAN0249AE; Start 35; Stop 59
ataataaaacaccccaaaagttaga

SEQ ID NO: 428356 - DNA, 25 bp, Artificial
  probe
  misc_feature (1)..(25): SEQ ID NO: 6043; WAN0249AE; Start 24; Stop 48
aactcaatttcataataaaacaccc

SEQ ID NO: 428357 - DNA, 25 bp, Artificial
  probe
  misc_feature (1)..(25): SEQ ID NO: 6043; WAN0249AE; Start 74; Stop 98
cttttggggtgcagttcattaatcg

SEQ ID NO: 428358 - DNA, 25 bp, Artificial
  probe
  misc_feature (1)..(25): SEQ ID NO: 6043; WAN0249AE; Start 29; Stop 53
aatttcataataaaacaccccaaaa

SEQ ID NO: 428359 - DNA, 25 bp, Artificial
  probe
  misc_feature (1)..(25): SEQ ID NO: 6043; WAN0249AE; Start 83; Stop 107
tgcagttcattaatcggtcgatttt

SEQ ID NO: 428360 - DNA, 25 bp, Artificial
  probe
  misc_feature (1)..(25): SEQ ID NO: 6043; WAN0249AE; Start 71; Stop 95
taacttttggggtgcagttcattaa

SEQ ID NO: 428361 - DNA, 25 bp, Artificial
  probe
  misc_feature (1)..(25): SEQ ID NO: 6043; WAN0249AE; Start 70; Stop 94
ctaacttttggggtgcagttcatta

SEQ ID NO: 428362 - DNA, 25 bp, Artificial
  probe
  misc_feature (1)..(25): SEQ ID NO: 6043; WAN0249AE; Start 72; Stop 96
aacttttggggtgcagttcattaat

SEQ ID NO: 428363 - DNA, 25 bp, Artificial
  probe
  misc_feature (1)..(25): SEQ ID NO: 6043; WAN0249AE; Start 75; Stop 99
ttttggggtgcagttcattaatcgg

SEQ ID NO: 428364 - DNA, 25 bp, Artificial
  probe
  misc_feature (1)..(25): SEQ ID NO: 6043; WAN0249AE; Start 76; Stop 100
tttggggtgcagttcattaatcggt

SEQ ID NO: 428365 - DNA, 25 bp, Artificial
  probe
  misc_feature (1)..(25): SEQ ID NO: 6044; WAN024988; Start 72; Stop 96
cgaatgtgataaggagttagaaatt

SEQ ID NO: 428366 - DNA, 25 bp, Artificial
  probe
  misc_feature (1)..(25): SEQ ID NO: 6044; WAN024988; Start 71; Stop 95
tcgaatgtgataaggagttagaaat

SEQ ID NO: 428367 - DNA, 25 bp, Artificial
  probe
  misc_feature (1)..(25): SEQ ID NO: 6044; WAN024988; Start 76; Stop 100
tgtgataaggagttagaaattgaaa

SEQ ID NO: 428368 - DNA, 25 bp, Artificial
  probe
  misc_feature (1)..(25): SEQ ID NO: 6044; WAN024988; Start 78; Stop 102
tgataaggagttagaaattgaaaca

SEQ ID NO: 428369 - DNA, 25 bp, Artificial
  probe
  misc_feature (1)..(25): SEQ ID NO: 6044; WAN024988; Start 75; Stop 99
atgtgataaggagttagaaattgaa

SEQ ID NO: 428370 - DNA, 25 bp, Artificial
  probe
  misc_feature (1)..(25): SEQ ID NO: 6044; WAN024988; Start 74; Stop 98
aatgtgataaggagttagaaattga

SEQ ID NO: 428371 - DNA, 25 bp, Artificial
  probe
  misc_feature (1)..(25): SEQ ID NO: 6044; WAN024988; Start 73; Stop 97
gaatgtgataaggagttagaaattg

SEQ ID NO: 428372 - DNA, 25 bp, Artificial
  probe
  misc_feature (1)..(25): SEQ ID NO: 6044; WAN024988; Start 77; Stop 101
gtgataaggagttagaaattgaaac

SEQ ID NO: 428373 - DNA, 25 bp, Artificial
  probe
  misc_feature (1)..(25): SEQ ID NO: 6044; WAN024988; Start 89; Stop 113
tagaaattgaaacaataggattccc

SEQ ID NO: 428374 - DNA, 25 bp, Artificial
  probe
  misc_feature (1)..(25): SEQ ID NO: 6044; WAN024988; Start 84; Stop 108
ggagttagaaattgaaacaatagga

SEQ ID NO: 428375 - DNA, 25 bp, Artificial
  probe
  misc_feature (1)..(25): SEQ ID NO: 6044; WAN024988; Start 83; Stop 107
aggagttagaaattgaaacaatagg

SEQ ID NO: 428376 - DNA, 25 bp, Artificial
  probe
  misc_feature (1)..(25): SEQ ID NO: 6044; WAN024988; Start 90; Stop 114
agaaattgaaacaataggattcccc

SEQ ID NO: 428377 - DNA, 25 bp, Artificial
  probe
  misc_feature (1)..(25): SEQ ID NO: 6044; WAN024988; Start 79; Stop 103
gataaggagttagaaattgaaacaa

SEQ ID NO: 428378 - DNA, 25 bp, Artificial
  probe
  misc_feature (1)..(25): SEQ ID NO: 6044; WAN024988; Start 70; Stop 94
ttcgaatgtgataaggagttagaaa

SEQ ID NO: 428379 - DNA, 25 bp, Artificial
  probe
  misc_feature (1)..(25): SEQ ID NO: 6044; WAN024988; Start 34; Stop 58
agcaactatagatagagaaatgaaa

SEQ ID NO: 428380 - DNA, 25 bp, Artificial
  probe
  misc_feature (1)..(25): SEQ ID NO: 6044; WAN024988; Start 33; Stop 57
aagcaactatagatagagaaatgaa

SEQ ID NO: 428381 - DNA, 25 bp, Artificial
  probe
  misc_feature (1)..(25): SEQ ID NO: 6044; WAN024988; Start 2; Stop 26
tagctttattagaccatgcttattt

SEQ ID NO: 428382 - DNA, 25 bp, Artificial
  probe
  misc_feature (1)..(25): SEQ ID NO: 6044; WAN024988; Start 88; Stop 112
ttagaaattgaaacaataggattcc

SEQ ID NO: 428383 - DNA, 25 bp, Artificial
  probe
  misc_feature (1)..(25): SEQ ID NO: 6044; WAN024988; Start 1; Stop 25
atagctttattagaccatgcttatt

SEQ ID NO: 428384 - DNA, 25 bp, Artificial
  probe
  misc_feature (1)..(25): SEQ ID NO: 6044; WAN024988; Start 82; Stop 106
aaggagttagaaattgaaacaatag

SEQ ID NO: 428385 - DNA, 25 bp, Artificial
  probe
  misc_feature (1)..(25): SEQ ID NO: 6044; WAN024988; Start 85; Stop 109
gagttagaaattgaaacaataggat

SEQ ID NO: 428386 - DNA, 25 bp, Artificial
  probe
  misc_feature (1)..(25): SEQ ID NO: 6044; WAN024988; Start 29; Stop 53
aactaagcaactatagatagagaaa

SEQ ID NO: 428387 - DNA, 25 bp, Artificial
  probe
  misc_feature (1)..(25): SEQ ID NO: 6044; WAN024988; Start 28; Stop 52
aaactaagcaactatagatagagaa

SEQ ID NO: 428388 - DNA, 25 bp, Artificial
  probe
  misc_feature (1)..(25): SEQ ID NO: 6044; WAN024988; Start 4; Stop 28
gctttattagaccatgcttatttta

SEQ ID NO: 428389 - DNA, 25 bp, Artificial
  probe
  misc_feature (1)..(25): SEQ ID NO: 6044; WAN024988; Start 3; Stop 27
agctttattagaccatgcttatttt

SEQ ID NO: 428390 - DNA, 25 bp, Artificial
  probe
  misc_feature (1)..(25): SEQ ID NO: 6044; WAN024988; Start 11; Stop 35
tagaccatgcttattttaaactaag

SEQ ID NO: 428391 - DNA, 25 bp, Artificial
  probe
  misc_feature (1)..(25): SEQ ID NO: 6045; WAN02497B; Start 98; Stop 122
agcctcatatccgttattgtgattc

SEQ ID NO: 428392 - DNA, 25 bp, Artificial
  probe
  misc_feature (1)..(25): SEQ ID NO: 6045; WAN02497B; Start 99; Stop 123
gcctcatatccgttattgtgattca

SEQ ID NO: 428393 - DNA, 25 bp, Artificial
  probe
  misc_feature (1)..(25): SEQ ID NO: 6045; WAN02497B; Start 97; Stop 121
cagcctcatatccgttattgtgatt

SEQ ID NO: 428394 - DNA, 25 bp, Artificial
  probe
  misc_feature (1)..(25): SEQ ID NO: 6045; WAN02497B; Start 100; Stop 124
cctcatatccgttattgtgattcat

SEQ ID NO: 428395 - DNA, 25 bp, Artificial
  probe
  misc_feature (1)..(25): SEQ ID NO: 6045; WAN02497B; Start 30; Stop 54
aatgattaccagaccagtcctatcg

SEQ ID NO: 428396 - DNA, 25 bp, Artificial
  probe
  misc_feature (1)..(25): SEQ ID NO: 6045; WAN02497B; Start 104; Stop 128
atatccgttattgtgattcatgcca

SEQ ID NO: 428397 - DNA, 25 bp, Artificial
  probe
  misc_feature (1)..(25): SEQ ID NO: 6045; WAN02497B; Start 103; Stop 127
catatccgttattgtgattcatgcc

SEQ ID NO: 428398 - DNA, 25 bp, Artificial
  probe
  misc_feature (1)..(25): SEQ ID NO: 6045; WAN02497B; Start 102; Stop 126
tcatatccgttattgtgattcatgc

SEQ ID NO: 428399 - DNA, 25 bp, Artificial
  probe
  misc_feature (1)..(25): SEQ ID NO: 6045; WAN02497B; Start 31; Stop 55
atgattaccagaccagtcctatcgt

SEQ ID NO: 428400 - DNA, 25 bp, Artificial
  probe
  misc_feature (1)..(25): SEQ ID NO: 6045; WAN02497B; Start 57; Stop 81
ttacaaacaataacccacaatgagg

SEQ ID NO: 428401 - DNA, 25 bp, Artificial
  probe
  misc_feature (1)..(25): SEQ ID NO: 6045; WAN02497B; Start 32; Stop 56
tgattaccagaccagtcctatcgtt

SEQ ID NO: 428402 - DNA, 25 bp, Artificial
  probe
  misc_feature (1)..(25): SEQ ID NO: 6045; WAN02497B; Start 96; Stop 120
ccagcctcatatccgttattgtgat

SEQ ID NO: 428403 - DNA, 25 bp, Artificial
  probe
  misc_feature (1)..(25): SEQ ID NO: 6045; WAN02497B; Start 29; Stop 53
aaatgattaccagaccagtcctatc

SEQ ID NO: 428404 - DNA, 25 bp, Artificial
  probe
  misc_feature (1)..(25): SEQ ID NO: 6045; WAN02497B; Start 101; Stop 125
ctcatatccgttattgtgattcatg

SEQ ID NO: 428405 - DNA, 25 bp, Artificial
  probe
  misc_feature (1)..(25): SEQ ID NO: 6045; WAN02497B; Start 105; Stop 129
tatccgttattgtgattcatgccac

SEQ ID NO: 428406 - DNA, 25 bp, Artificial
  probe
  misc_feature (1)..(25): SEQ ID NO: 6045; WAN02497B; Start 58; Stop 82
tacaaacaataacccacaatgaggc

SEQ ID NO: 428407 - DNA, 25 bp, Artificial
  probe
  misc_feature (1)..(25): SEQ ID NO: 6045; WAN02497B; Start 56; Stop 80
tttacaaacaataacccacaatgag

SEQ ID NO: 428408 - DNA, 25 bp, Artificial
  probe
  misc_feature (1)..(25): SEQ ID NO: 6045; WAN02497B; Start 136; Stop 160
atgattcctgattaacatcacctca

SEQ ID NO: 428409 - DNA, 25 bp, Artificial
  probe
  misc_feature (1)..(25): SEQ ID NO: 6045; WAN02497B; Start 33; Stop 57
gattaccagaccagtcctatcgttt

SEQ ID NO: 428410 - DNA, 25 bp, Artificial
  probe
  misc_feature (1)..(25): SEQ ID NO: 6045; WAN02497B; Start 132; Stop 156
caccatgattcctgattaacatcac

SEQ ID NO: 428411 - DNA, 25 bp, Artificial
  probe
  misc_feature (1)..(25): SEQ ID NO: 6045; WAN02497B; Start 131; Stop 155
tcaccatgattcctgattaacatca

SEQ ID NO: 428412 - DNA, 25 bp, Artificial
  probe
  misc_feature (1)..(25): SEQ ID NO: 6045; WAN02497B; Start 128; Stop 152
acatcaccatgattcctgattaaca

SEQ ID NO: 428413 - DNA, 25 bp, Artificial
  probe
  misc_feature (1)..(25): SEQ ID NO: 6045; WAN02497B; Start 127; Stop 151
cacatcaccatgattcctgattaac

SEQ ID NO: 428414 - DNA, 25 bp, Artificial
  probe
  misc_feature (1)..(25): SEQ ID NO: 6045; WAN02497B; Start 135; Stop 159
catgattcctgattaacatcacctc

SEQ ID NO: 428415 - DNA, 25 bp, Artificial
  probe
  misc_feature (1)..(25): SEQ ID NO: 6045; WAN02497B; Start 134; Stop 158
ccatgattcctgattaacatcacct

SEQ ID NO: 428416 - DNA, 25 bp, Artificial
  probe
  misc_feature (1)..(25): SEQ ID NO: 6045; WAN02497B; Start 133; Stop 157
accatgattcctgattaacatcacc

SEQ ID NO: 428417 - DNA, 25 bp, Artificial
  probe
  misc_feature (1)..(25): SEQ ID NO: 6045; WAN02497B; Start 129; Stop 153
catcaccatgattcctgattaacat

SEQ ID NO: 428418 - DNA, 25 bp, Artificial
  probe
  misc_feature (1)..(25): SEQ ID NO: 6045; WAN02497B; Start 126; Stop 150
ccacatcaccatgattcctgattaa

SEQ ID NO: 428419 - DNA, 25 bp, Artificial
  probe
  misc_feature (1)..(25): SEQ ID NO: 6045; WAN02497B; Start 130; Stop 154
atcaccatgattcctgattaacatc

SEQ ID NO: 428420 - DNA, 25 bp, Artificial
  probe
  misc_feature (1)..(25): SEQ ID NO: 6045; WAN02497B; Start 60; Stop 84
caaacaataacccacaatgaggctg

SEQ ID NO: 428421 - DNA, 25 bp, Artificial
  probe
  misc_feature (1)..(25): SEQ ID NO: 6045; WAN02497B; Start 59; Stop 83
acaaacaataacccacaatgaggct

SEQ ID NO: 428422 - DNA, 25 bp, Artificial
  probe
  misc_feature (1)..(25): SEQ ID NO: 6045; WAN02497B; Start 6; Stop 30
aatcccagtcctgtccattcctaaa

SEQ ID NO: 428423 - DNA, 25 bp, Artificial
  probe
  misc_feature (1)..(25): SEQ ID NO: 6045; WAN02497B; Start 139; Stop 163
attcctgattaacatcacctcagag

SEQ ID NO: 428424 - DNA, 25 bp, Artificial
  probe
  misc_feature (1)..(25): SEQ ID NO: 6046; WAN024BJA; Start 4; Stop 28
aatgatttgggtttatggctggtta

SEQ ID NO: 428425 - DNA, 25 bp, Artificial
  probe
  misc_feature (1)..(25): SEQ ID NO: 6046; WAN024BJA; Start 5; Stop 29
atgatttgggtttatggctggttaa

SEQ ID NO: 428426 - DNA, 25 bp, Artificial
  probe
  misc_feature (1)..(25): SEQ ID NO: 6046; WAN024BJA; Start 7; Stop 31
gatttgggtttatggctggttaaag

SEQ ID NO: 428427 - DNA, 25 bp, Artificial
  probe
  misc_feature (1)..(25): SEQ ID NO: 6046; WAN024BJA; Start 6; Stop 30
tgatttgggtttatggctggttaaa

SEQ ID NO: 428428 - DNA, 25 bp, Artificial
  probe
  misc_feature (1)..(25): SEQ ID NO: 6046; WAN024BJA; Start 1; Stop 25
atgaatgatttgggtttatggctgg

SEQ ID NO: 428429 - DNA, 25 bp, Artificial
  probe
  misc_feature (1)..(25): SEQ ID NO: 6046; WAN024BJA; Start 3; Stop 27
gaatgatttgggtttatggctggtt

SEQ ID NO: 428430 - DNA, 25 bp, Artificial
  probe
  misc_feature (1)..(25): SEQ ID NO: 6046; WAN024BJA; Start 2; Stop 26
tgaatgatttgggtttatggctggt

SEQ ID NO: 428431 - DNA, 25 bp, Artificial
  probe
  misc_feature (1)..(25): SEQ ID NO: 6046; WAN024BJA; Start 58; Stop 82
ccaccaagtaaaaggaataaaacca

SEQ ID NO: 428432 - DNA, 25 bp, Artificial
  probe
  misc_feature (1)..(25): SEQ ID NO: 6046; WAN024BJA; Start 57; Stop 81
accaccaagtaaaaggaataaaacc

SEQ ID NO: 428433 - DNA, 25 bp, Artificial
  probe
  misc_feature (1)..(25): SEQ ID NO: 6046; WAN024BJA; Start 52; Stop 76
gctaaaccaccaagtaaaaggaata

SEQ ID NO: 428434 - DNA, 25 bp, Artificial
  probe
  misc_feature (1)..(25): SEQ ID NO: 6046; WAN024BJA; Start 45; Stop 69
caggagagctaaaccaccaagtaaa

SEQ ID NO: 428435 - DNA, 25 bp, Artificial
  probe
  misc_feature (1)..(25): SEQ ID NO: 6046; WAN024BJA; Start 59; Stop 83
caccaagtaaaaggaataaaaccaa

SEQ ID NO: 428436 - DNA, 25 bp, Artificial
  probe
  misc_feature (1)..(25): SEQ ID NO: 6046; WAN024BJA; Start 56; Stop 80
aaccaccaagtaaaaggaataaaac

SEQ ID NO: 428437 - DNA, 25 bp, Artificial
  probe
  misc_feature (1)..(25): SEQ ID NO: 6046; WAN024BJA; Start 8; Stop 32
atttgggtttatggctggttaaagc

SEQ ID NO: 428438 - DNA, 25 bp, Artificial
  probe
  misc_feature (1)..(25): SEQ ID NO: 6046; WAN024BJA; Start 60; Stop 84
accaagtaaaaggaataaaaccaag

SEQ ID NO: 428439 - DNA, 25 bp, Artificial
  probe
  misc_feature (1)..(25): SEQ ID NO: 6046; WAN024BJA; Start 12; Stop 36
gggtttatggctggttaaagctaaa

SEQ ID NO: 428440 - DNA, 25 bp, Artificial
  probe
  misc_feature (1)..(25): SEQ ID NO: 6046; WAN024BJA; Start 61; Stop 85
ccaagtaaaaggaataaaaccaaga

SEQ ID NO: 428441 - DNA, 25 bp, Artificial
  probe
  misc_feature (1)..(25): SEQ ID NO: 6046; WAN024BJA; Start 44; Stop 68
acaggagagctaaaccaccaagtaa

SEQ ID NO: 428442 - DNA, 25 bp, Artificial
  probe
  misc_feature (1)..(25): SEQ ID NO: 6046; WAN024BJA; Start 43; Stop 67
aacaggagagctaaaccaccaagta

SEQ ID NO: 428443 - DNA, 25 bp, Artificial
  probe
  misc_feature (1)..(25): SEQ ID NO: 6046; WAN024BJA; Start 55; Stop 79
aaaccaccaagtaaaaggaataaaa

SEQ ID NO: 428444 - DNA, 25 bp, Artificial
  probe
  misc_feature (1)..(25): SEQ ID NO: 6046; WAN024BJA; Start 51; Stop 75
agctaaaccaccaagtaaaaggaat

SEQ ID NO: 428445 - DNA, 25 bp, Artificial
  probe
  misc_feature (1)..(25): SEQ ID NO: 6046; WAN024BJA; Start 34; Stop 58
aaaagagaaaacaggagagctaaac

SEQ ID NO: 428446 - DNA, 25 bp, Artificial
  probe
  misc_feature (1)..(25): SEQ ID NO: 6046; WAN024BJA; Start 28; Stop 52
aaagctaaaagagaaaacaggagag

SEQ ID NO: 428447 - DNA, 25 bp, Artificial
  probe
  misc_feature (1)..(25): SEQ ID NO: 6046; WAN024BJA; Start 35; Stop 59
aaagagaaaacaggagagctaaacc

SEQ ID NO: 428448 - DNA, 25 bp, Artificial
  probe
  misc_feature (1)..(25): SEQ ID NO: 6046; WAN024BJA; Start 50; Stop 74
gagctaaaccaccaagtaaaaggaa

SEQ ID NO: 428449 - DNA, 25 bp, Artificial
  probe
  misc_feature (1)..(25): SEQ ID NO: 6046; WAN024BJA; Start 53; Stop 77
ctaaaccaccaagtaaaaggaataa

SEQ ID NO: 428450 - DNA, 25 bp, Artificial
  probe
  misc_feature (1)..(25): SEQ ID NO: 6046; WAN024BJA; Start 48; Stop 72
gagagctaaaccaccaagtaaaagg

SEQ ID NO: 428451 - DNA, 25 bp, Artificial
  probe
  misc_feature (1)..(25): SEQ ID NO: 6046; WAN024BJA; Start 47; Stop 71
ggagagctaaaccaccaagtaaaag

SEQ ID NO: 428452 - DNA, 25 bp, Artificial
  probe
  misc_feature (1)..(25): SEQ ID NO: 6046; WAN024BJA; Start 32; Stop 56
ctaaaagagaaaacaggagagctaa

SEQ ID NO: 428453 - DNA, 25 bp, Artificial
  probe
  misc_feature (1)..(25): SEQ ID NO: 6046; WAN024BJA; Start 11; Stop 35
tgggtttatggctggttaaagctaa

SEQ ID NO: 428454 - DNA, 25 bp, Artificial
  probe
  misc_feature (1)..(25): SEQ ID NO: 6046; WAN024BJA; Start 10; Stop 34
ttgggtttatggctggttaaagcta

SEQ ID NO: 428455 - DNA, 25 bp, Artificial
  probe
  misc_feature (1)..(25): SEQ ID NO: 6046; WAN024BJA; Start 24; Stop 48
ggttaaagctaaaagagaaaacagg

SEQ ID NO: 428456 - DNA, 25 bp, Artificial
  probe
  misc_feature (1)..(25): SEQ ID NO: 6046; WAN024BJA; Start 49; Stop 73
agagctaaaccaccaagtaaaagga

SEQ ID NO: 428457 - DNA, 25 bp, Artificial
  probe
  misc_feature (1)..(25): SEQ ID NO: 6047; WAN024BJ9; Start 93; Stop 117
attacttggtctgtatcaatcggaa

SEQ ID NO: 428458 - DNA, 25 bp, Artificial
  probe
  misc_feature (1)..(25): SEQ ID NO: 6047; WAN024BJ9; Start 92; Stop 116
tattacttggtctgtatcaatcgga

SEQ ID NO: 428459 - DNA, 25 bp, Artificial
  probe
  misc_feature (1)..(25): SEQ ID NO: 6047; WAN024BJ9; Start 91; Stop 115
gtattacttggtctgtatcaatcgg

SEQ ID NO: 428460 - DNA, 25 bp, Artificial
  probe
  misc_feature (1)..(25): SEQ ID NO: 6047; WAN024BJ9; Start 90; Stop 114
tgtattacttggtctgtatcaatcg

SEQ ID NO: 428461 - DNA, 25 bp, Artificial
  probe
  misc_feature (1)..(25): SEQ ID NO: 6047; WAN024BJ9; Start 119; Stop 143
aatttcccatagcaaacaacatact

SEQ ID NO: 428462 - DNA, 25 bp, Artificial
  probe
  misc_feature (1)..(25): SEQ ID NO: 6047; WAN024BJ9; Start 94; Stop 118
ttacttggtctgtatcaatcggaaa

SEQ ID NO: 428463 - DNA, 25 bp, Artificial
  probe
  misc_feature (1)..(25): SEQ ID NO: 6047; WAN024BJ9; Start 224; Stop 248
cgaatttgaaagagttctggcaata

SEQ ID NO: 428464 - DNA, 25 bp, Artificial
  probe
  misc_feature (1)..(25): SEQ ID NO: 6047; WAN024BJ9; Start 120; Stop 144
atttcccatagcaaacaacatacta

SEQ ID NO: 428465 - DNA, 25 bp, Artificial
  probe
  misc_feature (1)..(25): SEQ ID NO: 6047; WAN024BJ9; Start 244; Stop 268
caatatgctaagaagaagacgatta

SEQ ID NO: 428466 - DNA, 25 bp, Artificial
  probe
  misc_feature (1)..(25): SEQ ID NO: 6047; WAN024BJ9; Start 145; Stop 169
tcactgttgatagcacaaatctaca

SEQ ID NO: 428467 - DNA, 25 bp, Artificial
  probe
  misc_feature (1)..(25): SEQ ID NO: 6047; WAN024BJ9; Start 124; Stop 148
cccatagcaaacaacatactatcac

SEQ ID NO: 428468 - DNA, 25 bp, Artificial
  probe
  misc_feature (1)..(25): SEQ ID NO: 6047; WAN024BJ9; Start 123; Stop 147
tcccatagcaaacaacatactatca

SEQ ID NO: 428469 - DNA, 25 bp, Artificial
  probe
  misc_feature (1)..(25): SEQ ID NO: 6047; WAN024BJ9; Start 146; Stop 170
cactgttgatagcacaaatctacat

SEQ ID NO: 428470 - DNA, 25 bp, Artificial
  probe
  misc_feature (1)..(25): SEQ ID NO: 6047; WAN024BJ9; Start 238; Stop 262
ttctggcaatatgctaagaagaaga

SEQ ID NO: 428471 - DNA, 25 bp, Artificial
  probe
  misc_feature (1)..(25): SEQ ID NO: 6047; WAN024BJ9; Start 237; Stop 261
gttctggcaatatgctaagaagaag

SEQ ID NO: 428472 - DNA, 25 bp, Artificial
  probe
  misc_feature (1)..(25): SEQ ID NO: 6047; WAN024BJ9; Start 236; Stop 260
agttctggcaatatgctaagaagaa

SEQ ID NO: 428473 - DNA, 25 bp, Artificial
  probe
  misc_feature (1)..(25): SEQ ID NO: 6047; WAN024BJ9; Start 233; Stop 257
aagagttctggcaatatgctaagaa

SEQ ID NO: 428474 - DNA, 25 bp, Artificial
  probe
  misc_feature (1)..(25): SEQ ID NO: 6047; WAN024BJ9; Start 125; Stop 149
ccatagcaaacaacatactatcact

SEQ ID NO: 428475 - DNA, 25 bp, Artificial
  probe
  misc_feature (1)..(25): SEQ ID NO: 6047; WAN024BJ9; Start 122; Stop 146
ttcccatagcaaacaacatactatc

SEQ ID NO: 428476 - DNA, 25 bp, Artificial
  probe
  misc_feature (1)..(25): SEQ ID NO: 6047; WAN024BJ9; Start 243; Stop 267
gcaatatgctaagaagaagacgatt

SEQ ID NO: 428477 - DNA, 25 bp, Artificial
  probe
  misc_feature (1)..(25): SEQ ID NO: 6047; WAN024BJ9; Start 226; Stop 250
aatttgaaagagttctggcaatatg

SEQ ID NO: 428478 - DNA, 25 bp, Artificial
  probe
  misc_feature (1)..(25): SEQ ID NO: 6047; WAN024BJ9; Start 239; Stop 263
tctggcaatatgctaagaagaagac

SEQ ID NO: 428479 - DNA, 25 bp, Artificial
  probe
  misc_feature (1)..(25): SEQ ID NO: 6047; WAN024BJ9; Start 235; Stop 259
gagttctggcaatatgctaagaaga

SEQ ID NO: 428480 - DNA, 25 bp, Artificial
  probe
  misc_feature (1)..(25): SEQ ID NO: 6047; WAN024BJ9; Start 234; Stop 258
agagttctggcaatatgctaagaag

SEQ ID NO: 428481 - DNA, 25 bp, Artificial
  probe
  misc_feature (1)..(25): SEQ ID NO: 6047; WAN024BJ9; Start 242; Stop 266
ggcaatatgctaagaagaagacgat

SEQ ID NO: 428482 - DNA, 25 bp, Artificial
  probe
  misc_feature (1)..(25): SEQ ID NO: 6047; WAN024BJ9; Start 225; Stop 249
gaatttgaaagagttctggcaatat

SEQ ID NO: 428483 - DNA, 25 bp, Artificial
  probe
  misc_feature (1)..(25): SEQ ID NO: 6047; WAN024BJ9; Start 121; Stop 145
tttcccatagcaaacaacatactat

SEQ ID NO: 428484 - DNA, 25 bp, Artificial
  probe
  misc_feature (1)..(25): SEQ ID NO: 6047; WAN024BJ9; Start 89; Stop 113
atgtattacttggtctgtatcaatc

SEQ ID NO: 428485 - DNA, 25 bp, Artificial
  probe
  misc_feature (1)..(25): SEQ ID NO: 6047; WAN024BJ9; Start 127; Stop 151
atagcaaacaacatactatcactgt

SEQ ID NO: 428486 - DNA, 25 bp, Artificial
  probe
  misc_feature (1)..(25): SEQ ID NO: 6047; WAN024BJ9; Start 147; Stop 171
actgttgatagcacaaatctacata

SEQ ID NO: 428487 - DNA, 25 bp, Artificial
  probe
  misc_feature (1)..(25): SEQ ID NO: 6047; WAN024BJ9; Start 126; Stop 150
catagcaaacaacatactatcactg

SEQ ID NO: 428488 - DNA, 25 bp, Artificial
  probe
  misc_feature (1)..(25): SEQ ID NO: 6047; WAN024BJ9; Start 218; Stop 242
ctgtgtcgaatttgaaagagttctg

SEQ ID NO: 428489 - DNA, 25 bp, Artificial
  probe
  misc_feature (1)..(25): SEQ ID NO: 6047; WAN024BJ9; Start 88; Stop 112
catgtattacttggtctgtatcaat

SEQ ID NO: 428490 - DNA, 25 bp, Artificial
  probe
  misc_feature (1)..(25): SEQ ID NO: 6048; WAN0249CW; Start 15; Stop 39
acgatatgtgcaaaggtctattaac

SEQ ID NO: 428491 - DNA, 25 bp, Artificial
  probe
  misc_feature (1)..(25): SEQ ID NO: 6048; WAN0249CW; Start 16; Stop 40
cgatatgtgcaaaggtctattaact

SEQ ID NO: 428492 - DNA, 25 bp, Artificial
  probe
  misc_feature (1)..(25): SEQ ID NO: 6048; WAN0249CW; Start 1; Stop 25
atgaatgttttgagacgatatgtgc

SEQ ID NO: 428493 - DNA, 25 bp, Artificial
  probe
  misc_feature (1)..(25): SEQ ID NO: 6048; WAN0249CW; Start 14; Stop 38
gacgatatgtgcaaaggtctattaa

SEQ ID NO: 428494 - DNA, 25 bp, Artificial
  probe
  misc_feature (1)..(25): SEQ ID NO: 6048; WAN0249CW; Start 55; Stop 79
atgtgagtcaaaagaagttgtaaaa

SEQ ID NO: 428495 - DNA, 25 bp, Artificial
  probe
  misc_feature (1)..(25): SEQ ID NO: 6048; WAN0249CW; Start 54; Stop 78
aatgtgagtcaaaagaagttgtaaa

SEQ ID NO: 428496 - DNA, 25 bp, Artificial
  probe
  misc_feature (1)..(25): SEQ ID NO: 6048; WAN0249CW; Start 51; Stop 75
tttaatgtgagtcaaaagaagttgt

SEQ ID NO: 428497 - DNA, 25 bp, Artificial
  probe
  misc_feature (1)..(25): SEQ ID NO: 6048; WAN0249CW; Start 21; Stop 45
tgtgcaaaggtctattaactattag

SEQ ID NO: 428498 - DNA, 25 bp, Artificial
  probe
  misc_feature (1)..(25): SEQ ID NO: 6048; WAN0249CW; Start 49; Stop 73
agtttaatgtgagtcaaaagaagtt

SEQ ID NO: 428499 - DNA, 25 bp, Artificial
  probe
  misc_feature (1)..(25): SEQ ID NO: 6048; WAN0249CW; Start 50; Stop 74
gtttaatgtgagtcaaaagaagttg

SEQ ID NO: 428500 - DNA, 25 bp, Artificial
  probe
  misc_feature (1)..(25): SEQ ID NO: 6048; WAN0249CW; Start 17; Stop 41
gatatgtgcaaaggtctattaacta

SEQ ID NO: 428501 - DNA, 25 bp, Artificial
  probe
  misc_feature (1)..(25): SEQ ID NO: 6048; WAN0249CW; Start 3; Stop 27
gaatgttttgagacgatatgtgcaa

SEQ ID NO: 428502 - DNA, 25 bp, Artificial
  probe
  misc_feature (1)..(25): SEQ ID NO: 6048; WAN0249CW; Start 2; Stop 26
tgaatgttttgagacgatatgtgca

SEQ ID NO: 428503 - DNA, 25 bp, Artificial
  probe
  misc_feature (1)..(25): SEQ ID NO: 6048; WAN0249CW; Start 53; Stop 77
taatgtgagtcaaaagaagttgtaa

SEQ ID NO: 428504 - DNA, 25 bp, Artificial
  probe
  misc_feature (1)..(25): SEQ ID NO: 6048; WAN0249CW; Start 52; Stop 76
ttaatgtgagtcaaaagaagttgta

SEQ ID NO: 428505 - DNA, 25 bp, Artificial
  probe
  misc_feature (1)..(25): SEQ ID NO: 6048; WAN0249CW; Start 13; Stop 37
agacgatatgtgcaaaggtctatta

SEQ ID NO: 428506 - DNA, 25 bp, Artificial
  probe
  misc_feature (1)..(25): SEQ ID NO: 6048; WAN0249CW; Start 12; Stop 36
gagacgatatgtgcaaaggtctatt

SEQ ID NO: 428507 - DNA, 25 bp, Artificial
  probe
  misc_feature (1)..(25): SEQ ID NO: 6048; WAN0249CW; Start 48; Stop 72
tagtttaatgtgagtcaaaagaagt

SEQ ID NO: 428508 - DNA, 25 bp, Artificial
  probe
  misc_feature (1)..(25): SEQ ID NO: 6048; WAN0249CW; Start 20; Stop 44
atgtgcaaaggtctattaactatta

SEQ ID NO: 428509 - DNA, 25 bp, Artificial
  probe
  misc_feature (1)..(25): SEQ ID NO: 6048; WAN0249CW; Start 19; Stop 43
tatgtgcaaaggtctattaactatt

SEQ ID NO: 428510 - DNA, 25 bp, Artificial
  probe
  misc_feature (1)..(25): SEQ ID NO: 6048; WAN0249CW; Start 11; Stop 35
tgagacgatatgtgcaaaggtctat

SEQ ID NO: 428511 - DNA, 25 bp, Artificial
  probe
  misc_feature (1)..(25): SEQ ID NO: 6048; WAN0249CW; Start 22; Stop 46
gtgcaaaggtctattaactattaga

SEQ ID NO: 428512 - DNA, 25 bp, Artificial
  probe
  misc_feature (1)..(25): SEQ ID NO: 6048; WAN0249CW; Start 18; Stop 42
atatgtgcaaaggtctattaactat

SEQ ID NO: 428513 - DNA, 25 bp, Artificial
  probe
  misc_feature (1)..(25): SEQ ID NO: 6048; WAN0249CW; Start 10; Stop 34
ttgagacgatatgtgcaaaggtcta

SEQ ID NO: 428514 - DNA, 25 bp, Artificial
  probe
  misc_feature (1)..(25): SEQ ID NO: 6048; WAN0249CW; Start 4; Stop 28
aatgttttgagacgatatgtgcaaa

SEQ ID NO: 428515 - DNA, 25 bp, Artificial
  probe
  misc_feature (1)..(25): SEQ ID NO: 6048; WAN0249CW; Start 5; Stop 29
atgttttgagacgatatgtgcaaag

SEQ ID NO: 428516 - DNA, 25 bp, Artificial
  probe
  misc_feature (1)..(25): SEQ ID NO: 6048; WAN0249CW; Start 9; Stop 33
tttgagacgatatgtgcaaaggtct

SEQ ID NO: 428517 - DNA, 25 bp, Artificial
  probe
  misc_feature (1)..(25): SEQ ID NO: 6048; WAN0249CW; Start 47; Stop 71
atagtttaatgtgagtcaaaagaag

SEQ ID NO: 428518 - DNA, 25 bp, Artificial
  probe
  misc_feature (1)..(25): SEQ ID NO: 6048; WAN0249CW; Start 45; Stop 69
gaatagtttaatgtgagtcaaaaga

SEQ ID NO: 428519 - DNA, 25 bp, Artificial
  probe
  misc_feature (1)..(25): SEQ ID NO: 6048; WAN0249CW; Start 44; Stop 68
agaatagtttaatgtgagtcaaaag

SEQ ID NO: 428520 - DNA, 25 bp, Artificial
  probe
  misc_feature (1)..(25): SEQ ID NO: 6048; WAN0249CW; Start 23; Stop 47
tgcaaaggtctattaactattagaa

SEQ ID NO: 428521 - DNA, 25 bp, Artificial
  probe
  misc_feature (1)..(25): SEQ ID NO: 6048; WAN0249CW; Start 8; Stop 32
ttttgagacgatatgtgcaaaggtc

SEQ ID NO: 428522 - DNA, 25 bp, Artificial
  probe
  misc_feature (1)..(25): SEQ ID NO: 6048; WAN0249CW; Start 7; Stop 31
gttttgagacgatatgtgcaaaggt

SEQ ID NO: 428523 - DNA, 25 bp, Artificial
  probe
  misc_feature (1)..(25): SEQ ID NO: 6049; WAN02497A; Start 7; Stop 31
ttcaaacgaaatatgtcagtgcttt

SEQ ID NO: 428524 - DNA, 25 bp, Artificial
  probe
  misc_feature (1)..(25): SEQ ID NO: 6049; WAN02497A; Start 6; Stop 30
attcaaacgaaatatgtcagtgctt

SEQ ID NO: 428525 - DNA, 25 bp, Artificial
  probe
  misc_feature (1)..(25): SEQ ID NO: 6049; WAN02497A; Start 5; Stop 29
gattcaaacgaaatatgtcagtgct

SEQ ID NO: 428526 - DNA, 25 bp, Artificial
  probe
  misc_feature (1)..(25): SEQ ID NO: 6049; WAN02497A; Start 4; Stop 28
agattcaaacgaaatatgtcagtgc

SEQ ID NO: 428527 - DNA, 25 bp, Artificial
  probe
  misc_feature (1)..(25): SEQ ID NO: 6049; WAN02497A; Start 3; Stop 27
gagattcaaacgaaatatgtcagtg

SEQ ID NO: 428528 - DNA, 25 bp, Artificial
  probe
  misc_feature (1)..(25): SEQ ID NO: 6049; WAN02497A; Start 2; Stop 26
tgagattcaaacgaaatatgtcagt

SEQ ID NO: 428529 - DNA, 25 bp, Artificial
  probe
  misc_feature (1)..(25): SEQ ID NO: 6049; WAN02497A; Start 1; Stop 25
atgagattcaaacgaaatatgtcag

SEQ ID NO: 428530 - DNA, 25 bp, Artificial
  probe
  misc_feature (1)..(25): SEQ ID NO: 6049; WAN02497A; Start 10; Stop 34
aaacgaaatatgtcagtgctttggc

SEQ ID NO: 428531 - DNA, 25 bp, Artificial
  probe
  misc_feature (1)..(25): SEQ ID NO: 6049; WAN02497A; Start 8; Stop 32
tcaaacgaaatatgtcagtgctttg

SEQ ID NO: 428532 - DNA, 25 bp, Artificial
  probe
  misc_feature (1)..(25): SEQ ID NO: 6049; WAN02497A; Start 9; Stop 33
caaacgaaatatgtcagtgctttgg

SEQ ID NO: 428533 - DNA, 25 bp, Artificial
  probe
  misc_feature (1)..(25): SEQ ID NO: 6049; WAN02497A; Start 14; Stop 38
gaaatatgtcagtgctttggcattc

SEQ ID NO: 428534 - DNA, 25 bp, Artificial
  probe
  misc_feature (1)..(25): SEQ ID NO: 6049; WAN02497A; Start 17; Stop 41
atatgtcagtgctttggcattccta

SEQ ID NO: 428535 - DNA, 25 bp, Artificial
  probe
  misc_feature (1)..(25): SEQ ID NO: 6049; WAN02497A; Start 15; Stop 39
aaatatgtcagtgctttggcattcc

SEQ ID NO: 428536 - DNA, 25 bp, Artificial
  probe
  misc_feature (1)..(25): SEQ ID NO: 6049; WAN02497A; Start 13; Stop 37
cgaaatatgtcagtgctttggcatt

SEQ ID NO: 428537 - DNA, 25 bp, Artificial
  probe
  misc_feature (1)..(25): SEQ ID NO: 6049; WAN02497A; Start 18; Stop 42
tatgtcagtgctttggcattcctag

SEQ ID NO: 428538 - DNA, 25 bp, Artificial
  probe
  misc_feature (1)..(25): SEQ ID NO: 6049; WAN02497A; Start 16; Stop 40
aatatgtcagtgctttggcattcct

SEQ ID NO: 428539 - DNA, 25 bp, Artificial
  probe
  misc_feature (1)..(25): SEQ ID NO: 6049; WAN02497A; Start 12; Stop 36
acgaaatatgtcagtgctttggcat

SEQ ID NO: 428540 - DNA, 25 bp, Artificial
  probe
  misc_feature (1)..(25): SEQ ID NO: 6049; WAN02497A; Start 11; Stop 35
aacgaaatatgtcagtgctttggca

SEQ ID NO: 428541 - DNA, 25 bp, Artificial
  probe
  misc_feature (1)..(25): SEQ ID NO: 6049; WAN02497A; Start 26; Stop 50
tgctttggcattcctagccttcata

SEQ ID NO: 428542 - DNA, 25 bp, Artificial
  probe
  misc_feature (1)..(25): SEQ ID NO: 6050; WAN0249AT; Start 28; Stop 52
ttagcattggatttccatacagact

SEQ ID NO: 428543 - DNA, 25 bp, Artificial
  probe
  misc_feature (1)..(25): SEQ ID NO: 6050; WAN0249AT; Start 29; Stop 53
tagcattggatttccatacagactc

SEQ ID NO: 428544 - DNA, 25 bp, Artificial
  probe
  misc_feature (1)..(25): SEQ ID NO: 6050; WAN0249AT; Start 41; Stop 65
tccatacagactcacagagttagtt

SEQ ID NO: 428545 - DNA, 25 bp, Artificial
  probe
  misc_feature (1)..(25): SEQ ID NO: 6050; WAN0249AT; Start 40; Stop 64
ttccatacagactcacagagttagt

SEQ ID NO: 428546 - DNA, 25 bp, Artificial
  probe
  misc_feature (1)..(25): SEQ ID NO: 6050; WAN0249AT; Start 33; Stop 57
attggatttccatacagactcacag

SEQ ID NO: 428547 - DNA, 25 bp, Artificial
  probe
  misc_feature (1)..(25): SEQ ID NO: 6050; WAN0249AT; Start 27; Stop 51
tttagcattggatttccatacagac

SEQ ID NO: 428548 - DNA, 25 bp, Artificial
  probe
  misc_feature (1)..(25): SEQ ID NO: 6050; WAN0249AT; Start 42; Stop 66
ccatacagactcacagagttagtta

SEQ ID NO: 428549 - DNA, 25 bp, Artificial
  probe
  misc_feature (1)..(25): SEQ ID NO: 6050; WAN0249AT; Start 32; Stop 56
cattggatttccatacagactcaca

SEQ ID NO: 428550 - DNA, 25 bp, Artificial
  probe
  misc_feature (1)..(25): SEQ ID NO: 6050; WAN0249AT; Start 34; Stop 58
ttggatttccatacagactcacaga

SEQ ID NO: 428551 - DNA, 25 bp, Artificial
  probe
  misc_feature (1)..(25): SEQ ID NO: 6050; WAN0249AT; Start 26; Stop 50
atttagcattggatttccatacaga

SEQ ID NO: 428552 - DNA, 25 bp, Artificial
  probe
  misc_feature (1)..(25): SEQ ID NO: 6050; WAN0249AT; Start 43; Stop 67
catacagactcacagagttagttag

SEQ ID NO: 428553 - DNA, 25 bp, Artificial
  probe
  misc_feature (1)..(25): SEQ ID NO: 6050; WAN0249AT; Start 35; Stop 59
tggatttccatacagactcacagag

SEQ ID NO: 428554 - DNA, 25 bp, Artificial
  probe
  misc_feature (1)..(25): SEQ ID NO: 6050; WAN0249AT; Start 31; Stop 55
gcattggatttccatacagactcac

SEQ ID NO: 428555 - DNA, 25 bp, Artificial
  probe
  misc_feature (1)..(25): SEQ ID NO: 6050; WAN0249AT; Start 30; Stop 54
agcattggatttccatacagactca

SEQ ID NO: 428556 - DNA, 25 bp, Artificial
  probe
  misc_feature (1)..(25): SEQ ID NO: 6050; WAN0249AT; Start 25; Stop 49
aatttagcattggatttccatacag

SEQ ID NO: 428557 - DNA, 25 bp, Artificial
  probe
  misc_feature (1)..(25): SEQ ID NO: 6050; WAN0249AT; Start 39; Stop 63
tttccatacagactcacagagttag

SEQ ID NO: 428558 - DNA, 25 bp, Artificial
  probe
  misc_feature (1)..(25): SEQ ID NO: 6050; WAN0249AT; Start 37; Stop 61
gatttccatacagactcacagagtt

SEQ ID NO: 428559 - DNA, 25 bp, Artificial
  probe
  misc_feature (1)..(25): SEQ ID NO: 6050; WAN0249AT; Start 24; Stop 48
aaatttagcattggatttccataca

SEQ ID NO: 428560 - DNA, 25 bp, Artificial
  probe
  misc_feature (1)..(25): SEQ ID NO: 6050; WAN0249AT; Start 38; Stop 62
atttccatacagactcacagagtta

SEQ ID NO: 428561 - DNA, 25 bp, Artificial
  probe
  misc_feature (1)..(25): SEQ ID NO: 6050; WAN0249AT; Start 36; Stop 60
ggatttccatacagactcacagagt

SEQ ID NO: 428562 - DNA, 25 bp, Artificial
  probe
  misc_feature (1)..(25): SEQ ID NO: 6050; WAN0249AT; Start 20; Stop 44
tgataaatttagcattggatttcca

SEQ ID NO: 428563 - DNA, 25 bp, Artificial
  probe
  misc_feature (1)..(25): SEQ ID NO: 6050; WAN0249AT; Start 19; Stop 43
ttgataaatttagcattggatttcc

SEQ ID NO: 428564 - DNA, 25 bp, Artificial
  probe
  misc_feature (1)..(25): SEQ ID NO: 6050; WAN0249AT; Start 9; Stop 33
gttggaaatcttgataaatttagca

SEQ ID NO: 428565 - DNA, 25 bp, Artificial
  probe
  misc_feature (1)..(25): SEQ ID NO: 6050; WAN0249AT; Start 8; Stop 32
tgttggaaatcttgataaatttagc

SEQ ID NO: 428566 - DNA, 25 bp, Artificial
  probe
  misc_feature (1)..(25): SEQ ID NO: 6050; WAN0249AT; Start 21; Stop 45
gataaatttagcattggatttccat

SEQ ID NO: 428567 - DNA, 25 bp, Artificial
  probe
  misc_feature (1)..(25): SEQ ID NO: 6050; WAN0249AT; Start 2; Stop 26
tgagattgttggaaatcttgataaa

SEQ ID NO: 428568 - DNA, 25 bp, Artificial
  probe
  misc_feature (1)..(25): SEQ ID NO: 6050; WAN0249AT; Start 1; Stop 25
atgagattgttggaaatcttgataa

SEQ ID NO: 428569 - DNA, 25 bp, Artificial
  probe
  misc_feature (1)..(25): SEQ ID NO: 6050; WAN0249AT; Start 23; Stop 47
taaatttagcattggatttccatac

SEQ ID NO: 428570 - DNA, 25 bp, Artificial
  probe
  misc_feature (1)..(25): SEQ ID NO: 6050; WAN0249AT; Start 16; Stop 40
atcttgataaatttagcattggatt

SEQ ID NO: 428571 - DNA, 25 bp, Artificial
  probe
  misc_feature (1)..(25): SEQ ID NO: 6050; WAN0249AT; Start 15; Stop 39
aatcttgataaatttagcattggat

SEQ ID NO: 428572 - DNA, 25 bp, Artificial
  probe
  misc_feature (1)..(25): SEQ ID NO: 6050; WAN0249AT; Start 17; Stop 41
tcttgataaatttagcattggattt

SEQ ID NO: 428573 - DNA, 25 bp, Artificial
  probe
  misc_feature (1)..(25): SEQ ID NO: 6050; WAN0249AT; Start 14; Stop 38
aaatcttgataaatttagcattgga

SEQ ID NO: 428574 - DNA, 25 bp, Artificial
  probe
  misc_feature (1)..(25): SEQ ID NO: 6050; WAN0249AT; Start 11; Stop 35
tggaaatcttgataaatttagcatt

SEQ ID NO: 428575 - DNA, 25 bp, Artificial
  probe
  misc_feature (1)..(25): SEQ ID NO: 6051; WAN02498N; Start 97; Stop 121
tctttcgtttcataacagaacaaca

SEQ ID NO: 428576 - DNA, 25 bp, Artificial
  probe
  misc_feature (1)..(25): SEQ ID NO: 6051; WAN02498N; Start 98; Stop 122
ctttcgtttcataacagaacaacaa

SEQ ID NO: 428577 - DNA, 25 bp, Artificial
  probe
  misc_feature (1)..(25): SEQ ID NO: 6051; WAN02498N; Start 99; Stop 123
tttcgtttcataacagaacaacaaa

SEQ ID NO: 428578 - DNA, 25 bp, Artificial
  probe
  misc_feature (1)..(25): SEQ ID NO: 6051; WAN02498N; Start 91; Stop 115
ccaatttctttcgtttcataacaga

SEQ ID NO: 428579 - DNA, 25 bp, Artificial
  probe
  misc_feature (1)..(25): SEQ ID NO: 6051; WAN02498N; Start 90; Stop 114
tccaatttctttcgtttcataacag

SEQ ID NO: 428580 - DNA, 25 bp, Artificial
  probe
  misc_feature (1)..(25): SEQ ID NO: 6051; WAN02498N; Start 84; Stop 108
ctagtttccaatttctttcgtttca

SEQ ID NO: 428581 - DNA, 25 bp, Artificial
  probe
  misc_feature (1)..(25): SEQ ID NO: 6051; WAN02498N; Start 86; Stop 110
agtttccaatttctttcgtttcata

SEQ ID NO: 428582 - DNA, 25 bp, Artificial
  probe
  misc_feature (1)..(25): SEQ ID NO: 6051; WAN02498N; Start 85; Stop 109
tagtttccaatttctttcgtttcat

SEQ ID NO: 428583 - DNA, 25 bp, Artificial
  probe
  misc_feature (1)..(25): SEQ ID NO: 6051; WAN02498N; Start 89; Stop 113
ttccaatttctttcgtttcataaca

SEQ ID NO: 428584 - DNA, 25 bp, Artificial
  probe
  misc_feature (1)..(25): SEQ ID NO: 6051; WAN02498N; Start 87; Stop 111
gtttccaatttctttcgtttcataa

SEQ ID NO: 428585 - DNA, 25 bp, Artificial
  probe
  misc_feature (1)..(25): SEQ ID NO: 6051; WAN02498N; Start 101; Stop 125
tcgtttcataacagaacaacaaaca

SEQ ID NO: 428586 - DNA, 25 bp, Artificial
  probe
  misc_feature (1)..(25): SEQ ID NO: 6051; WAN02498N; Start 88; Stop 112
tttccaatttctttcgtttcataac

SEQ ID NO: 428587 - DNA, 25 bp, Artificial
  probe
  misc_feature (1)..(25): SEQ ID NO: 6051; WAN02498N; Start 102; Stop 126
cgtttcataacagaacaacaaacat

SEQ ID NO: 428588 - DNA, 25 bp, Artificial
  probe
  misc_feature (1)..(25): SEQ ID NO: 6051; WAN02498N; Start 100; Stop 124
ttcgtttcataacagaacaacaaac

SEQ ID NO: 428589 - DNA, 25 bp, Artificial
  probe
  misc_feature (1)..(25): SEQ ID NO: 6051; WAN02498N; Start 96; Stop 120
ttctttcgtttcataacagaacaac

SEQ ID NO: 428590 - DNA, 25 bp, Artificial
  probe
  misc_feature (1)..(25): SEQ ID NO: 6051; WAN02498N; Start 95; Stop 119
tttctttcgtttcataacagaacaa

SEQ ID NO: 428591 - DNA, 25 bp, Artificial
  probe
  misc_feature (1)..(25): SEQ ID NO: 6051; WAN02498N; Start 94; Stop 118
atttctttcgtttcataacagaaca

SEQ ID NO: 428592 - DNA, 25 bp, Artificial
  probe
  misc_feature (1)..(25): SEQ ID NO: 6051; WAN02498N; Start 83; Stop 107
actagtttccaatttctttcgtttc

SEQ ID NO: 428593 - DNA, 25 bp, Artificial
  probe
  misc_feature (1)..(25): SEQ ID NO: 6051; WAN02498N; Start 105; Stop 129
ttcataacagaacaacaaacataaa

SEQ ID NO: 428594 - DNA, 25 bp, Artificial
  probe
  misc_feature (1)..(25): SEQ ID NO: 6051; WAN02498N; Start 104; Stop 128
tttcataacagaacaacaaacataa

SEQ ID NO: 428595 - DNA, 25 bp, Artificial
  probe
  misc_feature (1)..(25): SEQ ID NO: 6051; WAN02498N; Start 93; Stop 117
aatttctttcgtttcataacagaac

SEQ ID NO: 428596 - DNA, 25 bp, Artificial
  probe
  misc_feature (1)..(25): SEQ ID NO: 6051; WAN02498N; Start 92; Stop 116
caatttctttcgtttcataacagaa

SEQ ID NO: 428597 - DNA, 25 bp, Artificial
  probe
  misc_feature (1)..(25): SEQ ID NO: 6051; WAN02498N; Start 374; Stop 398
tatgagataaatcaggtcacctatt

SEQ ID NO: 428598 - DNA, 25 bp, Artificial
  probe
  misc_feature (1)..(25): SEQ ID NO: 6051; WAN02498N; Start 373; Stop 397
ttatgagataaatcaggtcacctat

SEQ ID NO: 428599 - DNA, 25 bp, Artificial
  probe
  misc_feature (1)..(25): SEQ ID NO: 6051; WAN02498N; Start 103; Stop 127
gtttcataacagaacaacaaacata

SEQ ID NO: 428600 - DNA, 25 bp, Artificial
  probe
  misc_feature (1)..(25): SEQ ID NO: 6051; WAN02498N; Start 372; Stop 396
tttatgagataaatcaggtcaccta

SEQ ID NO: 428601 - DNA, 25 bp, Artificial
  probe
  misc_feature (1)..(25): SEQ ID NO: 6051; WAN02498N; Start 1; Stop 25
atgagctccttagttgaagtaaacg

SEQ ID NO: 428602 - DNA, 25 bp, Artificial
  probe
  misc_feature (1)..(25): SEQ ID NO: 6051; WAN02498N; Start 3; Stop 27
gagctccttagttgaagtaaacgtt

SEQ ID NO: 428603 - DNA, 25 bp, Artificial
  probe
  misc_feature (1)..(25): SEQ ID NO: 6051; WAN02498N; Start 230; Stop 254
tttggttttattatttcttttcgga

SEQ ID NO: 428604 - DNA, 25 bp, Artificial
  probe
  misc_feature (1)..(25): SEQ ID NO: 6051; WAN02498N; Start 106; Stop 130
tcataacagaacaacaaacataaaa

SEQ ID NO: 428605 - DNA, 25 bp, Artificial
  probe
  misc_feature (1)..(25): SEQ ID NO: 6051; WAN02498N; Start 231; Stop 255
ttggttttattatttcttttcggaa

SEQ ID NO: 428606 - DNA, 25 bp, Artificial
  probe
  misc_feature (1)..(25): SEQ ID NO: 6051; WAN02498N; Start 2; Stop 26
tgagctccttagttgaagtaaacgt

SEQ ID NO: 428607 - DNA, 25 bp, Artificial
  probe
  misc_feature (1)..(25): SEQ ID NO: 6051; WAN02498N; Start 371; Stop 395
atttatgagataaatcaggtcacct

SEQ ID NO: 428608 - DNA, 25 bp, Artificial
  probe
  misc_feature (1)..(25): SEQ ID NO: 6052; WAN024BJI; Start 202; Stop 226
gatacgaatggcattgaagaggata

SEQ ID NO: 428609 - DNA, 25 bp, Artificial
  probe
  misc_feature (1)..(25): SEQ ID NO: 6052; WAN024BJI; Start 203; Stop 227
atacgaatggcattgaagaggatac

SEQ ID NO: 428610 - DNA, 25 bp, Artificial
  probe
  misc_feature (1)..(25): SEQ ID NO: 6052; WAN024BJI; Start 67; Stop 91
ttattcttcatctggtgtgaggatc

SEQ ID NO: 428611 - DNA, 25 bp, Artificial
  probe
  misc_feature (1)..(25): SEQ ID NO: 6052; WAN024BJI; Start 68; Stop 92
tattcttcatctggtgtgaggatca

SEQ ID NO: 428612 - DNA, 25 bp, Artificial
  probe
  misc_feature (1)..(25): SEQ ID NO: 6052; WAN024BJI; Start 69; Stop 93
attcttcatctggtgtgaggatcat

SEQ ID NO: 428613 - DNA, 25 bp, Artificial
  probe
  misc_feature (1)..(25): SEQ ID NO: 6052; WAN024BJI; Start 61; Stop 85
cttgctttattcttcatctggtgtg

SEQ ID NO: 428614 - DNA, 25 bp, Artificial
  probe
  misc_feature (1)..(25): SEQ ID NO: 6052; WAN024BJI; Start 60; Stop 84
tcttgctttattcttcatctggtgt

SEQ ID NO: 428615 - DNA, 25 bp, Artificial
  probe
  misc_feature (1)..(25): SEQ ID NO: 6052; WAN024BJI; Start 59; Stop 83
ttcttgctttattcttcatctggtg

SEQ ID NO: 428616 - DNA, 25 bp, Artificial
  probe
  misc_feature (1)..(25): SEQ ID NO: 6052; WAN024BJI; Start 70; Stop 94
ttcttcatctggtgtgaggatcatc

SEQ ID NO: 428617 - DNA, 25 bp, Artificial
  probe
  misc_feature (1)..(25): SEQ ID NO: 6052; WAN024BJI; Start 58; Stop 82
tttcttgctttattcttcatctggt

SEQ ID NO: 428618 - DNA, 25 bp, Artificial
  probe
  misc_feature (1)..(25): SEQ ID NO: 6052; WAN024BJI; Start 204; Stop 228
tacgaatggcattgaagaggatacg

SEQ ID NO: 428619 - DNA, 25 bp, Artificial
  probe
  misc_feature (1)..(25): SEQ ID NO: 6052; WAN024BJI; Start 66; Stop 90
tttattcttcatctggtgtgaggat

SEQ ID NO: 428620 - DNA, 25 bp, Artificial
  probe
  misc_feature (1)..(25): SEQ ID NO: 6052; WAN024BJI; Start 65; Stop 89
ctttattcttcatctggtgtgagga

SEQ ID NO: 428621 - DNA, 25 bp, Artificial
  probe
  misc_feature (1)..(25): SEQ ID NO: 6052; WAN024BJI; Start 62; Stop 86
ttgctttattcttcatctggtgtga

SEQ ID NO: 428622 - DNA, 25 bp, Artificial
  probe
  misc_feature (1)..(25): SEQ ID NO: 6052; WAN024BJI; Start 201; Stop 225
cgatacgaatggcattgaagaggat

SEQ ID NO: 428623 - DNA, 25 bp, Artificial
  probe
  misc_feature (1)..(25): SEQ ID NO: 6052; WAN024BJI; Start 63; Stop 87
tgctttattcttcatctggtgtgag

SEQ ID NO: 428624 - DNA, 25 bp, Artificial
  probe
  misc_feature (1)..(25): SEQ ID NO: 6052; WAN024BJI; Start 64; Stop 88
gctttattcttcatctggtgtgagg

SEQ ID NO: 428625 - DNA, 25 bp, Artificial
  probe
  misc_feature (1)..(25): SEQ ID NO: 6052; WAN024BJI; Start 207; Stop 231
gaatggcattgaagaggatacgctg

SEQ ID NO: 428626 - DNA, 25 bp, Artificial
  probe
  misc_feature (1)..(25): SEQ ID NO: 6052; WAN024BJI; Start 254; Stop 278
gactctctcatgtagacaaagcctc

SEQ ID NO: 428627 - DNA, 25 bp, Artificial
  probe
  misc_feature (1)..(25): SEQ ID NO: 6052; WAN024BJI; Start 252; Stop 276
cagactctctcatgtagacaaagcc

SEQ ID NO: 428628 - DNA, 25 bp, Artificial
  probe
  misc_feature (1)..(25): SEQ ID NO: 6052; WAN024BJI; Start 251; Stop 275
ccagactctctcatgtagacaaagc

SEQ ID NO: 428629 - DNA, 25 bp, Artificial
  probe
  misc_feature (1)..(25): SEQ ID NO: 6052; WAN024BJI; Start 250; Stop 274
gccagactctctcatgtagacaaag

SEQ ID NO: 428630 - DNA, 25 bp, Artificial
  probe
  misc_feature (1)..(25): SEQ ID NO: 6052; WAN024BJI; Start 52; Stop 76
ggctgttttcttgctttattcttca

SEQ ID NO: 428631 - DNA, 25 bp, Artificial
  probe
  misc_feature (1)..(25): SEQ ID NO: 6052; WAN024BJI; Start 253; Stop 277
agactctctcatgtagacaaagcct

SEQ ID NO: 428632 - DNA, 25 bp, Artificial
  probe
  misc_feature (1)..(25): SEQ ID NO: 6052; WAN024BJI; Start 71; Stop 95
tcttcatctggtgtgaggatcatcg

SEQ ID NO: 428633 - DNA, 25 bp, Artificial
  probe
  misc_feature (1)..(25): SEQ ID NO: 6052; WAN024BJI; Start 53; Stop 77
gctgttttcttgctttattcttcat

SEQ ID NO: 428634 - DNA, 25 bp, Artificial
  probe
  misc_feature (1)..(25): SEQ ID NO: 6052; WAN024BJI; Start 51; Stop 75
gggctgttttcttgctttattcttc

SEQ ID NO: 428635 - DNA, 25 bp, Artificial
  probe
  misc_feature (1)..(25): SEQ ID NO: 6052; WAN024BJI; Start 114; Stop 138
gttcggtattttcatagaggaaggg

SEQ ID NO: 428636 - DNA, 25 bp, Artificial
  probe
  misc_feature (1)..(25): SEQ ID NO: 6052; WAN024BJI; Start 113; Stop 137
cgttcggtattttcatagaggaagg

SEQ ID NO: 428637 - DNA, 25 bp, Artificial
  probe
  misc_feature (1)..(25): SEQ ID NO: 6052; WAN024BJI; Start 121; Stop 145
attttcatagaggaaggggcgaata

SEQ ID NO: 428638 - DNA, 25 bp, Artificial
  probe
  misc_feature (1)..(25): SEQ ID NO: 6052; WAN024BJI; Start 120; Stop 144
tattttcatagaggaaggggcgaat

SEQ ID NO: 428639 - DNA, 25 bp, Artificial
  probe
  misc_feature (1)..(25): SEQ ID NO: 6052; WAN024BJI; Start 57; Stop 81
ttttcttgctttattcttcatctgg

SEQ ID NO: 428640 - DNA, 25 bp, Artificial
  probe
  misc_feature (1)..(25): SEQ ID NO: 6052; WAN024BJI; Start 115; Stop 139
ttcggtattttcatagaggaagggg

SEQ ID NO: 428641 - DNA, 25 bp, Artificial
  probe
  misc_feature (1)..(25): SEQ ID NO: 6053; WAN0249CN; Start 1; Stop 25
atgatatgaagactaggaatgccaa

SEQ ID NO: 428642 - DNA, 25 bp, Artificial
  probe
  misc_feature (1)..(25): SEQ ID NO: 6053; WAN0249CN; Start 2; Stop 26
tgatatgaagactaggaatgccaaa

SEQ ID NO: 428643 - DNA, 25 bp, Artificial
  probe
  misc_feature (1)..(25): SEQ ID NO: 6053; WAN0249CN; Start 26; Stop 50
aacactgacatatttcgtttaaagc

SEQ ID NO: 428644 - DNA, 25 bp, Artificial
  probe
  misc_feature (1)..(25): SEQ ID NO: 6053; WAN0249CN; Start 17; Stop 41
gaatgccaaaacactgacatatttc

SEQ ID NO: 428645 - DNA, 25 bp, Artificial
  probe
  misc_feature (1)..(25): SEQ ID NO: 6053; WAN0249CN; Start 16; Stop 40
ggaatgccaaaacactgacatattt

SEQ ID NO: 428646 - DNA, 25 bp, Artificial
  probe
  misc_feature (1)..(25): SEQ ID NO: 6053; WAN0249CN; Start 14; Stop 38
taggaatgccaaaacactgacatat

SEQ ID NO: 428647 - DNA, 25 bp, Artificial
  probe
  misc_feature (1)..(25): SEQ ID NO: 6053; WAN0249CN; Start 5; Stop 29
tatgaagactaggaatgccaaaaca

SEQ ID NO: 428648 - DNA, 25 bp, Artificial
  probe
  misc_feature (1)..(25): SEQ ID NO: 6053; WAN0249CN; Start 18; Stop 42
aatgccaaaacactgacatatttcg

SEQ ID NO: 428649 - DNA, 25 bp, Artificial
  probe
  misc_feature (1)..(25): SEQ ID NO: 6053; WAN0249CN; Start 15; Stop 39
aggaatgccaaaacactgacatatt

SEQ ID NO: 428650 - DNA, 25 bp, Artificial
  probe
  misc_feature (1)..(25): SEQ ID NO: 6053; WAN0249CN; Start 4; Stop 28
atatgaagactaggaatgccaaaac

SEQ ID NO: 428651 - DNA, 25 bp, Artificial
  probe
  misc_feature (1)..(25): SEQ ID NO: 6053; WAN0249CN; Start 3; Stop 27
gatatgaagactaggaatgccaaaa

SEQ ID NO: 428652 - DNA, 25 bp, Artificial
  probe
  misc_feature (1)..(25): SEQ ID NO: 6053; WAN0249CN; Start 13; Stop 37
ctaggaatgccaaaacactgacata

SEQ ID NO: 428653 - DNA, 25 bp, Artificial
  probe
  misc_feature (1)..(25): SEQ ID NO: 6053; WAN0249CN; Start 19; Stop 43
atgccaaaacactgacatatttcgt

SEQ ID NO: 428654 - DNA, 25 bp, Artificial
  probe
  misc_feature (1)..(25): SEQ ID NO: 6053; WAN0249CN; Start 6; Stop 30
atgaagactaggaatgccaaaacac

SEQ ID NO: 428655 - DNA, 25 bp, Artificial
  probe
  misc_feature (1)..(25): SEQ ID NO: 6053; WAN0249CN; Start 20; Stop 44
tgccaaaacactgacatatttcgtt

SEQ ID NO: 428656 - DNA, 25 bp, Artificial
  probe
  misc_feature (1)..(25): SEQ ID NO: 6053; WAN0249CN; Start 8; Stop 32
gaagactaggaatgccaaaacactg

SEQ ID NO: 428657 - DNA, 25 bp, Artificial
  probe
  misc_feature (1)..(25): SEQ ID NO: 6053; WAN0249CN; Start 9; Stop 33
aagactaggaatgccaaaacactga

SEQ ID NO: 428658 - DNA, 25 bp, Artificial
  probe
  misc_feature (1)..(25): SEQ ID NO: 6053; WAN0249CN; Start 7; Stop 31
tgaagactaggaatgccaaaacact

SEQ ID NO: 428659 - DNA, 25 bp, Artificial
  probe
  misc_feature (1)..(25): SEQ ID NO: 6053; WAN0249CN; Start 12; Stop 36
actaggaatgccaaaacactgacat

SEQ ID NO: 428660 - DNA, 25 bp, Artificial
  probe
  misc_feature (1)..(25): SEQ ID NO: 6053; WAN0249CN; Start 10; Stop 34
agactaggaatgccaaaacactgac

SEQ ID NO: 428661 - DNA, 25 bp, Artificial
  probe
  misc_feature (1)..(25): SEQ ID NO: 6053; WAN0249CN; Start 21; Stop 45
gccaaaacactgacatatttcgttt

SEQ ID NO: 428662 - DNA, 25 bp, Artificial
  probe
  misc_feature (1)..(25): SEQ ID NO: 6053; WAN0249CN; Start 11; Stop 35
gactaggaatgccaaaacactgaca

SEQ ID NO: 428663 - DNA, 25 bp, Artificial
  probe
  misc_feature (1)..(25): SEQ ID NO: 6053; WAN0249CN; Start 22; Stop 46
ccaaaacactgacatatttcgttta

SEQ ID NO: 428664 - DNA, 25 bp, Artificial
  probe
  misc_feature (1)..(25): SEQ ID NO: 6053; WAN0249CN; Start 25; Stop 49
aaacactgacatatttcgtttaaag

SEQ ID NO: 428665 - DNA, 25 bp, Artificial
  probe
  misc_feature (1)..(25): SEQ ID NO: 6053; WAN0249CN; Start 23; Stop 47
caaaacactgacatatttcgtttaa

SEQ ID NO: 428666 - DNA, 25 bp, Artificial
  probe
  misc_feature (1)..(25): SEQ ID NO: 6053; WAN0249CN; Start 24; Stop 48
aaaacactgacatatttcgtttaaa

SEQ ID NO: 428667 - DNA, 25 bp, Artificial
  probe
  misc_feature (1)..(25): SEQ ID NO: 6054; WAN024BJK; Start 10; Stop 34
agtggaatctctgtttcaatggttt

SEQ ID NO: 428668 - DNA, 25 bp, Artificial
  probe
  misc_feature (1)..(25): SEQ ID NO: 6054; WAN024BJK; Start 180; Stop 204
gattgtttctcctagtccatccaaa

SEQ ID NO: 428669 - DNA, 25 bp, Artificial
  probe
  misc_feature (1)..(25): SEQ ID NO: 6054; WAN024BJK; Start 185; Stop 209
tttctcctagtccatccaaaccttt

SEQ ID NO: 428670 - DNA, 25 bp, Artificial
  probe
  misc_feature (1)..(25): SEQ ID NO: 6054; WAN024BJK; Start 186; Stop 210
ttctcctagtccatccaaacctttc

SEQ ID NO: 428671 - DNA, 25 bp, Artificial
  probe
  misc_feature (1)..(25): SEQ ID NO: 6054; WAN024BJK; Start 9; Stop 33
cagtggaatctctgtttcaatggtt

SEQ ID NO: 428672 - DNA, 25 bp, Artificial
  probe
  misc_feature (1)..(25): SEQ ID NO: 6054; WAN024BJK; Start 188; Stop 212
ctcctagtccatccaaacctttctc

SEQ ID NO: 428673 - DNA, 25 bp, Artificial
  probe
  misc_feature (1)..(25): SEQ ID NO: 6054; WAN024BJK; Start 6; Stop 30
gaccagtggaatctctgtttcaatg

SEQ ID NO: 428674 - DNA, 25 bp, Artificial
  probe
  misc_feature (1)..(25): SEQ ID NO: 6054; WAN024BJK; Start 33; Stop 57
tttcaaggtttcaactaaagcctgg

SEQ ID NO: 428675 - DNA, 25 bp, Artificial
  probe
  misc_feature (1)..(25): SEQ ID NO: 6054; WAN024BJK; Start 187; Stop 211
tctcctagtccatccaaacctttct

SEQ ID NO: 428676 - DNA, 25 bp, Artificial
  probe
  misc_feature (1)..(25): SEQ ID NO: 6054; WAN024BJK; Start 1; Stop 25
atgatgaccagtggaatctctgttt

SEQ ID NO: 428677 - DNA, 25 bp, Artificial
  probe
  misc_feature (1)..(25): SEQ ID NO: 6054; WAN024BJK; Start 89; Stop 113
cagcttcttcgataacaggtccatc

SEQ ID NO: 428678 - DNA, 25 bp, Artificial
  probe
  misc_feature (1)..(25): SEQ ID NO: 6054; WAN024BJK; Start 5; Stop 29
tgaccagtggaatctctgtttcaat

SEQ ID NO: 428679 - DNA, 25 bp, Artificial
  probe
  misc_feature (1)..(25): SEQ ID NO: 6054; WAN024BJK; Start 4; Stop 28
atgaccagtggaatctctgtttcaa

SEQ ID NO: 428680 - DNA, 25 bp, Artificial
  probe
  misc_feature (1)..(25): SEQ ID NO: 6054; WAN024BJK; Start 39; Stop 63
ggtttcaactaaagcctgggtagag

SEQ ID NO: 428681 - DNA, 25 bp, Artificial
  probe
  misc_feature (1)..(25): SEQ ID NO: 6054; WAN024BJK; Start 90; Stop 114
agcttcttcgataacaggtccatct

SEQ ID NO: 428682 - DNA, 25 bp, Artificial
  probe
  misc_feature (1)..(25): SEQ ID NO: 6054; WAN024BJK; Start 173; Stop 197
gaaagtggattgtttctcctagtcc

SEQ ID NO: 428683 - DNA, 25 bp, Artificial
  probe
  misc_feature (1)..(25): SEQ ID NO: 6054; WAN024BJK; Start 181; Stop 205
attgtttctcctagtccatccaaac

SEQ ID NO: 428684 - DNA, 25 bp, Artificial
  probe
  misc_feature (1)..(25): SEQ ID NO: 6054; WAN024BJK; Start 21; Stop 45
tgtttcaatggttttcaaggtttca

SEQ ID NO: 428685 - DNA, 25 bp, Artificial
  probe
  misc_feature (1)..(25): SEQ ID NO: 6054; WAN024BJK; Start 20; Stop 44
ctgtttcaatggttttcaaggtttc

SEQ ID NO: 428686 - DNA, 25 bp, Artificial
  probe
  misc_feature (1)..(25): SEQ ID NO: 6054; WAN024BJK; Start 19; Stop 43
tctgtttcaatggttttcaaggttt

SEQ ID NO: 428687 - DNA, 25 bp, Artificial
  probe
  misc_feature (1)..(25): SEQ ID NO: 6054; WAN024BJK; Start 16; Stop 40
atctctgtttcaatggttttcaagg

SEQ ID NO: 428688 - DNA, 25 bp, Artificial
  probe
  misc_feature (1)..(25): SEQ ID NO: 6054; WAN024BJK; Start 3; Stop 27
gatgaccagtggaatctctgtttca

SEQ ID NO: 428689 - DNA, 25 bp, Artificial
  probe
  misc_feature (1)..(25): SEQ ID NO: 6054; WAN024BJK; Start 2; Stop 26
tgatgaccagtggaatctctgtttc

SEQ ID NO: 428690 - DNA, 25 bp, Artificial
  probe
  misc_feature (1)..(25): SEQ ID NO: 6054; WAN024BJK; Start 18; Stop 42
ctctgtttcaatggttttcaaggtt

SEQ ID NO: 428691 - DNA, 25 bp, Artificial
  probe
  misc_feature (1)..(25): SEQ ID NO: 6054; WAN024BJK; Start 191; Stop 215
ctagtccatccaaacctttctcgtg

SEQ ID NO: 428692 - DNA, 25 bp, Artificial
  probe
  misc_feature (1)..(25): SEQ ID NO: 6054; WAN024BJK; Start 22; Stop 46
gtttcaatggttttcaaggtttcaa

SEQ ID NO: 428693 - DNA, 25 bp, Artificial
  probe
  misc_feature (1)..(25): SEQ ID NO: 6054; WAN024BJK; Start 37; Stop 61
aaggtttcaactaaagcctgggtag

SEQ ID NO: 428694 - DNA, 25 bp, Artificial
  probe
  misc_feature (1)..(25): SEQ ID NO: 6054; WAN024BJK; Start 13; Stop 37
ggaatctctgtttcaatggttttca

SEQ ID NO: 428695 - DNA, 25 bp, Artificial
  probe
  misc_feature (1)..(25): SEQ ID NO: 6054; WAN024BJK; Start 12; Stop 36
tggaatctctgtttcaatggttttc

SEQ ID NO: 428696 - DNA, 25 bp, Artificial
  probe
  misc_feature (1)..(25): SEQ ID NO: 6054; WAN024BJK; Start 11; Stop 35
gtggaatctctgtttcaatggtttt

SEQ ID NO: 428697 - DNA, 25 bp, Artificial
  probe
  misc_feature (1)..(25): SEQ ID NO: 6054; WAN024BJK; Start 17; Stop 41
tctctgtttcaatggttttcaaggt

SEQ ID NO: 428698 - DNA, 25 bp, Artificial
  probe
  misc_feature (1)..(25): SEQ ID NO: 6054; WAN024BJK; Start 92; Stop 116
cttcttcgataacaggtccatctgc

SEQ ID NO: 428699 - DNA, 25 bp, Artificial
  probe
  misc_feature (1)..(25): SEQ ID NO: 6054; WAN024BJK; Start 91; Stop 115
gcttcttcgataacaggtccatctg

SEQ ID NO: 428700 - DNA, 25 bp, Artificial
  probe
  misc_feature (1)..(25): SEQ ID NO: 6055; WAN024BJH; Start 219; Stop 243
atatcccaatcttatgaactgcacc

SEQ ID NO: 428701 - DNA, 25 bp, Artificial
  probe
  misc_feature (1)..(25): SEQ ID NO: 6055; WAN024BJH; Start 218; Stop 242
aatatcccaatcttatgaactgcac

SEQ ID NO: 428702 - DNA, 25 bp, Artificial
  probe
  misc_feature (1)..(25): SEQ ID NO: 6055; WAN024BJH; Start 217; Stop 241
aaatatcccaatcttatgaactgca

SEQ ID NO: 428703 - DNA, 25 bp, Artificial
  probe
  misc_feature (1)..(25): SEQ ID NO: 6055; WAN024BJH; Start 239; Stop 263
gcaccccaaaagttagatttattct

SEQ ID NO: 428704 - DNA, 25 bp, Artificial
  probe
  misc_feature (1)..(25): SEQ ID NO: 6055; WAN024BJH; Start 220; Stop 244
tatcccaatcttatgaactgcaccc

SEQ ID NO: 428705 - DNA, 25 bp, Artificial
  probe
  misc_feature (1)..(25): SEQ ID NO: 6055; WAN024BJH; Start 216; Stop 240
aaaatatcccaatcttatgaactgc

SEQ ID NO: 428706 - DNA, 25 bp, Artificial
  probe
  misc_feature (1)..(25): SEQ ID NO: 6055; WAN024BJH; Start 238; Stop 262
tgcaccccaaaagttagatttattc

SEQ ID NO: 428707 - DNA, 25 bp, Artificial
  probe
  misc_feature (1)..(25): SEQ ID NO: 6055; WAN024BJH; Start 237; Stop 261
ctgcaccccaaaagttagatttatt

SEQ ID NO: 428708 - DNA, 25 bp, Artificial
  probe
  misc_feature (1)..(25): SEQ ID NO: 6055; WAN024BJH; Start 236; Stop 260
actgcaccccaaaagttagatttat

SEQ ID NO: 428709 - DNA, 25 bp, Artificial
  probe
  misc_feature (1)..(25): SEQ ID NO: 6055; WAN024BJH; Start 226; Stop 250
aatcttatgaactgcaccccaaaag

SEQ ID NO: 428710 - DNA, 25 bp, Artificial
  probe
  misc_feature (1)..(25): SEQ ID NO: 6055; WAN024BJH; Start 225; Stop 249
caatcttatgaactgcaccccaaaa

SEQ ID NO: 428711 - DNA, 25 bp, Artificial
  probe
  misc_feature (1)..(25): SEQ ID NO: 6055; WAN024BJH; Start 146; Stop 170
tttatgtagatgagaaacccttaag

SEQ ID NO: 428712 - DNA, 25 bp, Artificial
  probe
  misc_feature (1)..(25): SEQ ID NO: 6055; WAN024BJH; Start 227; Stop 251
atcttatgaactgcaccccaaaagt

SEQ ID NO: 428713 - DNA, 25 bp, Artificial
  probe
  misc_feature (1)..(25): SEQ ID NO: 6055; WAN024BJH; Start 145; Stop 169
ttttatgtagatgagaaacccttaa

SEQ ID NO: 428714 - DNA, 25 bp, Artificial
  probe
  misc_feature (1)..(25): SEQ ID NO: 6055; WAN024BJH; Start 235; Stop 259
aactgcaccccaaaagttagattta

SEQ ID NO: 428715 - DNA, 25 bp, Artificial
  probe
  misc_feature (1)..(25): SEQ ID NO: 6055; WAN024BJH; Start 224; Stop 248
ccaatcttatgaactgcaccccaaa

SEQ ID NO: 428716 - DNA, 25 bp, Artificial
  probe
  misc_feature (1)..(25): SEQ ID NO: 6055; WAN024BJH; Start 230; Stop 254
ttatgaactgcaccccaaaagttag

SEQ ID NO: 428717 - DNA, 25 bp, Artificial
  probe
  misc_feature (1)..(25): SEQ ID NO: 6055; WAN024BJH; Start 229; Stop 253
cttatgaactgcaccccaaaagtta

SEQ ID NO: 428718 - DNA, 25 bp, Artificial
  probe
  misc_feature (1)..(25): SEQ ID NO: 6055; WAN024BJH; Start 267; Stop 291
taacttttggggtgcagttcatttt

SEQ ID NO: 428719 - DNA, 25 bp, Artificial
  probe
  misc_feature (1)..(25): SEQ ID NO: 6055; WAN024BJH; Start 234; Stop 258
gaactgcaccccaaaagttagattt

SEQ ID NO: 428720 - DNA, 25 bp, Artificial
  probe
  misc_feature (1)..(25): SEQ ID NO: 6055; WAN024BJH; Start 266; Stop 290
ctaacttttggggtgcagttcattt

SEQ ID NO: 428721 - DNA, 25 bp, Artificial
  probe
  misc_feature (1)..(25): SEQ ID NO: 6055; WAN024BJH; Start 231; Stop 255
tatgaactgcaccccaaaagttaga

SEQ ID NO: 428722 - DNA, 25 bp, Artificial
  probe
  misc_feature (1)..(25): SEQ ID NO: 6055; WAN024BJH; Start 232; Stop 256
atgaactgcaccccaaaagttagat

SEQ ID NO: 428723 - DNA, 25 bp, Artificial
  probe
  misc_feature (1)..(25): SEQ ID NO: 6055; WAN024BJH; Start 233; Stop 257
tgaactgcaccccaaaagttagatt

SEQ ID NO: 428724 - DNA, 25 bp, Artificial
  probe
  misc_feature (1)..(25): SEQ ID NO: 6055; WAN024BJH; Start 228; Stop 252
tcttatgaactgcaccccaaaagtt

SEQ ID NO: 428725 - DNA, 25 bp, Artificial
  probe
  misc_feature (1)..(25): SEQ ID NO: 6055; WAN024BJH; Start 268; Stop 292
aacttttggggtgcagttcattttg

SEQ ID NO: 428726 - DNA, 25 bp, Artificial
  probe
  misc_feature (1)..(25): SEQ ID NO: 6055; WAN024BJH; Start 221; Stop 245
atcccaatcttatgaactgcacccc

SEQ ID NO: 428727 - DNA, 25 bp, Artificial
  probe
  misc_feature (1)..(25): SEQ ID NO: 6055; WAN024BJH; Start 223; Stop 247
cccaatcttatgaactgcaccccaa

SEQ ID NO: 428728 - DNA, 25 bp, Artificial
  probe
  misc_feature (1)..(25): SEQ ID NO: 6056; WAN02495V; Start 22; Stop 46
aatttctaactccttatcacattcg

SEQ ID NO: 428729 - DNA, 25 bp, Artificial
  probe
  misc_feature (1)..(25): SEQ ID NO: 6056; WAN02495V; Start 23; Stop 47
atttctaactccttatcacattcga

SEQ ID NO: 428730 - DNA, 25 bp, Artificial
  probe
  misc_feature (1)..(25): SEQ ID NO: 6056; WAN02495V; Start 18; Stop 42
tttcaatttctaactccttatcaca

SEQ ID NO: 428731 - DNA, 25 bp, Artificial
  probe
  misc_feature (1)..(25): SEQ ID NO: 6056; WAN02495V; Start 16; Stop 40
tgtttcaatttctaactccttatca

SEQ ID NO: 428732 - DNA, 25 bp, Artificial
  probe
  misc_feature (1)..(25): SEQ ID NO: 6056; WAN02495V; Start 20; Stop 44
tcaatttctaactccttatcacatt

SEQ ID NO: 428733 - DNA, 25 bp, Artificial
  probe
  misc_feature (1)..(25): SEQ ID NO: 6056; WAN02495V; Start 19; Stop 43
ttcaatttctaactccttatcacat

SEQ ID NO: 428734 - DNA, 25 bp, Artificial
  probe
  misc_feature (1)..(25): SEQ ID NO: 6056; WAN02495V; Start 21; Stop 45
caatttctaactccttatcacattc

SEQ ID NO: 428735 - DNA, 25 bp, Artificial
  probe
  misc_feature (1)..(25): SEQ ID NO: 6056; WAN02495V; Start 17; Stop 41
gtttcaatttctaactccttatcac

SEQ ID NO: 428736 - DNA, 25 bp, Artificial
  probe
  misc_feature (1)..(25): SEQ ID NO: 6056; WAN02495V; Start 11; Stop 35
cctattgtttcaatttctaactcct

SEQ ID NO: 428737 - DNA, 25 bp, Artificial
  probe
  misc_feature (1)..(25): SEQ ID NO: 6056; WAN02495V; Start 10; Stop 34
tcctattgtttcaatttctaactcc

SEQ ID NO: 428738 - DNA, 25 bp, Artificial
  probe
  misc_feature (1)..(25): SEQ ID NO: 6056; WAN02495V; Start 5; Stop 29
gggaatcctattgtttcaatttcta

SEQ ID NO: 428739 - DNA, 25 bp, Artificial
  probe
  misc_feature (1)..(25): SEQ ID NO: 6056; WAN02495V; Start 4; Stop 28
ggggaatcctattgtttcaatttct

SEQ ID NO: 428740 - DNA, 25 bp, Artificial
  probe
  misc_feature (1)..(25): SEQ ID NO: 6056; WAN02495V; Start 15; Stop 39
ttgtttcaatttctaactccttatc

SEQ ID NO: 428741 - DNA, 25 bp, Artificial
  probe
  misc_feature (1)..(25): SEQ ID NO: 6056; WAN02495V; Start 24; Stop 48
tttctaactccttatcacattcgaa

SEQ ID NO: 428742 - DNA, 25 bp, Artificial
  probe
  misc_feature (1)..(25): SEQ ID NO: 6056; WAN02495V; Start 61; Stop 85
ttcatttctctatctatagttgctt

SEQ ID NO: 428743 - DNA, 25 bp, Artificial
  probe
  misc_feature (1)..(25): SEQ ID NO: 6056; WAN02495V; Start 60; Stop 84
tttcatttctctatctatagttgct

SEQ ID NO: 428744 - DNA, 25 bp, Artificial
  probe
  misc_feature (1)..(25): SEQ ID NO: 6056; WAN02495V; Start 92; Stop 116
aaataagcatggtctaataaagcta

SEQ ID NO: 428745 - DNA, 25 bp, Artificial
  probe
  misc_feature (1)..(25): SEQ ID NO: 6056; WAN02495V; Start 6; Stop 30
ggaatcctattgtttcaatttctaa

SEQ ID NO: 428746 - DNA, 25 bp, Artificial
  probe
  misc_feature (1)..(25): SEQ ID NO: 6056; WAN02495V; Start 93; Stop 117
aataagcatggtctaataaagctat

SEQ ID NO: 428747 - DNA, 25 bp, Artificial
  probe
  misc_feature (1)..(25): SEQ ID NO: 6056; WAN02495V; Start 12; Stop 36
ctattgtttcaatttctaactcctt

SEQ ID NO: 428748 - DNA, 25 bp, Artificial
  probe
  misc_feature (1)..(25): SEQ ID NO: 6056; WAN02495V; Start 9; Stop 33
atcctattgtttcaatttctaactc

SEQ ID NO: 428749 - DNA, 25 bp, Artificial
  probe
  misc_feature (1)..(25): SEQ ID NO: 6056; WAN02495V; Start 66; Stop 90
ttctctatctatagttgcttagttt

SEQ ID NO: 428750 - DNA, 25 bp, Artificial
  probe
  misc_feature (1)..(25): SEQ ID NO: 6056; WAN02495V; Start 65; Stop 89
tttctctatctatagttgcttagtt

SEQ ID NO: 428751 - DNA, 25 bp, Artificial
  probe
  misc_feature (1)..(25): SEQ ID NO: 6056; WAN02495V; Start 90; Stop 114
taaaataagcatggtctaataaagc

SEQ ID NO: 428752 - DNA, 25 bp, Artificial
  probe
  misc_feature (1)..(25): SEQ ID NO: 6056; WAN02495V; Start 91; Stop 115
aaaataagcatggtctaataaagct

SEQ ID NO: 428753 - DNA, 25 bp, Artificial
  probe
  misc_feature (1)..(25): SEQ ID NO: 6056; WAN02495V; Start 83; Stop 107
cttagtttaaaataagcatggtcta

SEQ ID NO: 428754 - DNA, 25 bp, Artificial
  probe
  misc_feature (1)..(25): SEQ ID NO: 6057; WAN024BJC; Start 83; Stop 107
ctcgctatttaattgatgacgttct

SEQ ID NO: 428755 - DNA, 25 bp, Artificial
  probe
  misc_feature (1)..(25): SEQ ID NO: 6057; WAN024BJC; Start 82; Stop 106
tctcgctatttaattgatgacgttc

SEQ ID NO: 428756 - DNA, 25 bp, Artificial
  probe
  misc_feature (1)..(25): SEQ ID NO: 6057; WAN024BJC; Start 84; Stop 108
tcgctatttaattgatgacgttcta

SEQ ID NO: 428757 - DNA, 25 bp, Artificial
  probe
  misc_feature (1)..(25): SEQ ID NO: 6057; WAN024BJC; Start 85; Stop 109
cgctatttaattgatgacgttctaa

SEQ ID NO: 428758 - DNA, 25 bp, Artificial
  probe
  misc_feature (1)..(25): SEQ ID NO: 6057; WAN024BJC; Start 86; Stop 110
gctatttaattgatgacgttctaac

SEQ ID NO: 428759 - DNA, 25 bp, Artificial
  probe
  misc_feature (1)..(25): SEQ ID NO: 6057; WAN024BJC; Start 87; Stop 111
ctatttaattgatgacgttctaact

SEQ ID NO: 428760 - DNA, 25 bp, Artificial
  probe
  misc_feature (1)..(25): SEQ ID NO: 6058; WAN0249A7; Start 1; Stop 25
atggtatgtgatgaaggtagagcat

SEQ ID NO: 428761 - DNA, 25 bp, Artificial
  probe
  misc_feature (1)..(25): SEQ ID NO: 6058; WAN0249A7; Start 38; Stop 62
gtgctccttattctagtcagatacg

SEQ ID NO: 428762 - DNA, 25 bp, Artificial
  probe
  misc_feature (1)..(25): SEQ ID NO: 6058; WAN0249A7; Start 37; Stop 61
agtgctccttattctagtcagatac

SEQ ID NO: 428763 - DNA, 25 bp, Artificial
  probe
  misc_feature (1)..(25): SEQ ID NO: 6058; WAN0249A7; Start 36; Stop 60
aagtgctccttattctagtcagata

SEQ ID NO: 428764 - DNA, 25 bp, Artificial
  probe
  misc_feature (1)..(25): SEQ ID NO: 6058; WAN0249A7; Start 41; Stop 65
ctccttattctagtcagatacgtgg

SEQ ID NO: 428765 - DNA, 25 bp, Artificial
  probe
  misc_feature (1)..(25): SEQ ID NO: 6058; WAN0249A7; Start 40; Stop 64
gctccttattctagtcagatacgtg

SEQ ID NO: 428766 - DNA, 25 bp, Artificial
  probe
  misc_feature (1)..(25): SEQ ID NO: 6058; WAN0249A7; Start 43; Stop 67
ccttattctagtcagatacgtggaa

SEQ ID NO: 428767 - DNA, 25 bp, Artificial
  probe
  misc_feature (1)..(25): SEQ ID NO: 6058; WAN0249A7; Start 39; Stop 63
tgctccttattctagtcagatacgt

SEQ ID NO: 428768 - DNA, 25 bp, Artificial
  probe
  misc_feature (1)..(25): SEQ ID NO: 6058; WAN0249A7; Start 34; Stop 58
gaaagtgctccttattctagtcaga

SEQ ID NO: 428769 - DNA, 25 bp, Artificial
  probe
  misc_feature (1)..(25): SEQ ID NO: 6058; WAN0249A7; Start 35; Stop 59
aaagtgctccttattctagtcagat

SEQ ID NO: 428770 - DNA, 25 bp, Artificial
  probe
  misc_feature (1)..(25): SEQ ID NO: 6058; WAN0249A7; Start 77; Stop 101
tgatagtagggaataaggagaagaa

SEQ ID NO: 428771 - DNA, 25 bp, Artificial
  probe
  misc_feature (1)..(25): SEQ ID NO: 6058; WAN0249A7; Start 42; Stop 66
tccttattctagtcagatacgtgga

SEQ ID NO: 428772 - DNA, 25 bp, Artificial
  probe
  misc_feature (1)..(25): SEQ ID NO: 6058; WAN0249A7; Start 76; Stop 100
atgatagtagggaataaggagaaga

SEQ ID NO: 428773 - DNA, 25 bp, Artificial
  probe
  misc_feature (1)..(25): SEQ ID NO: 6058; WAN0249A7; Start 12; Stop 36
tgaaggtagagcatcaattgtagaa

SEQ ID NO: 428774 - DNA, 25 bp, Artificial
  probe
  misc_feature (1)..(25): SEQ ID NO: 6058; WAN0249A7; Start 11; Stop 35
atgaaggtagagcatcaattgtaga

SEQ ID NO: 428775 - DNA, 25 bp, Artificial
  probe
  misc_feature (1)..(25): SEQ ID NO: 6058; WAN0249A7; Start 2; Stop 26
tggtatgtgatgaaggtagagcatc

SEQ ID NO: 428776 - DNA, 25 bp, Artificial
  probe
  misc_feature (1)..(25): SEQ ID NO: 6058; WAN0249A7; Start 33; Stop 57
agaaagtgctccttattctagtcag

SEQ ID NO: 428777 - DNA, 25 bp, Artificial
  probe
  misc_feature (1)..(25): SEQ ID NO: 6058; WAN0249A7; Start 78; Stop 102
gatagtagggaataaggagaagaat

SEQ ID NO: 428778 - DNA, 25 bp, Artificial
  probe
  misc_feature (1)..(25): SEQ ID NO: 6058; WAN0249A7; Start 44; Stop 68
cttattctagtcagatacgtggaaa

SEQ ID NO: 428779 - DNA, 25 bp, Artificial
  probe
  misc_feature (1)..(25): SEQ ID NO: 6058; WAN0249A7; Start 81; Stop 105
agtagggaataaggagaagaataat

SEQ ID NO: 428780 - DNA, 25 bp, Artificial
  probe
  misc_feature (1)..(25): SEQ ID NO: 6058; WAN0249A7; Start 75; Stop 99
tatgatagtagggaataaggagaag

SEQ ID NO: 428781 - DNA, 25 bp, Artificial
  probe
  misc_feature (1)..(25): SEQ ID NO: 6058; WAN0249A7; Start 72; Stop 96
tgatatgatagtagggaataaggag

SEQ ID NO: 428782 - DNA, 25 bp, Artificial
  probe
  misc_feature (1)..(25): SEQ ID NO: 6058; WAN0249A7; Start 27; Stop 51
aattgtagaaagtgctccttattct

SEQ ID NO: 428783 - DNA, 25 bp, Artificial
  probe
  misc_feature (1)..(25): SEQ ID NO: 6058; WAN0249A7; Start 16; Stop 40
ggtagagcatcaattgtagaaagtg

SEQ ID NO: 428784 - DNA, 25 bp, Artificial
  probe
  misc_feature (1)..(25): SEQ ID NO: 6058; WAN0249A7; Start 15; Stop 39
aggtagagcatcaattgtagaaagt

SEQ ID NO: 428785 - DNA, 25 bp, Artificial
  probe
  misc_feature (1)..(25): SEQ ID NO: 6058; WAN0249A7; Start 73; Stop 97
gatatgatagtagggaataaggaga

SEQ ID NO: 428786 - DNA, 25 bp, Artificial
  probe
  misc_feature (1)..(25): SEQ ID NO: 6058; WAN0249A7; Start 13; Stop 37
gaaggtagagcatcaattgtagaaa

SEQ ID NO: 428787 - DNA, 25 bp, Artificial
  probe
  misc_feature (1)..(25): SEQ ID NO: 6058; WAN0249A7; Start 14; Stop 38
aaggtagagcatcaattgtagaaag

SEQ ID NO: 428788 - DNA, 25 bp, Artificial
  probe
  misc_feature (1)..(25): SEQ ID NO: 6058; WAN0249A7; Start 23; Stop 47
catcaattgtagaaagtgctcctta

SEQ ID NO: 428789 - DNA, 25 bp, Artificial
  probe
  misc_feature (1)..(25): SEQ ID NO: 6058; WAN0249A7; Start 71; Stop 95
ttgatatgatagtagggaataagga

SEQ ID NO: 428790 - DNA, 25 bp, Artificial
  probe
  misc_feature (1)..(25): SEQ ID NO: 6058; WAN0249A7; Start 25; Stop 49
tcaattgtagaaagtgctccttatt

SEQ ID NO: 428791 - DNA, 25 bp, Artificial
  probe
  misc_feature (1)..(25): SEQ ID NO: 6058; WAN0249A7; Start 80; Stop 104
tagtagggaataaggagaagaataa

SEQ ID NO: 428792 - DNA, 25 bp, Artificial
  probe
  misc_feature (1)..(25): SEQ ID NO: 6058; WAN0249A7; Start 10; Stop 34
gatgaaggtagagcatcaattgtag

SEQ ID NO: 428793 - DNA, 25 bp, Artificial
  probe
  misc_feature (1)..(25): SEQ ID NO: 6059; WAN024C2X; Start 22; Stop 46
cacttgttgatgctgaagctgaagc

SEQ ID NO: 428794 - DNA, 25 bp, Artificial
  probe
  misc_feature (1)..(25): SEQ ID NO: 6059; WAN024C2X; Start 21; Stop 45
gcacttgttgatgctgaagctgaag

SEQ ID NO: 428795 - DNA, 25 bp, Artificial
  probe
  misc_feature (1)..(25): SEQ ID NO: 6060; WAN02498C; Start 32; Stop 56
taaagcactctgatgtttgaacaac

SEQ ID NO: 428796 - DNA, 25 bp, Artificial
  probe
  misc_feature (1)..(25): SEQ ID NO: 6060; WAN02498C; Start 31; Stop 55
ataaagcactctgatgtttgaacaa

SEQ ID NO: 428797 - DNA, 25 bp, Artificial
  probe
  misc_feature (1)..(25): SEQ ID NO: 6060; WAN02498C; Start 36; Stop 60
gcactctgatgtttgaacaactttc

SEQ ID NO: 428798 - DNA, 25 bp, Artificial
  probe
  misc_feature (1)..(25): SEQ ID NO: 6060; WAN02498C; Start 30; Stop 54
tataaagcactctgatgtttgaaca

SEQ ID NO: 428799 - DNA, 25 bp, Artificial
  probe
  misc_feature (1)..(25): SEQ ID NO: 6060; WAN02498C; Start 35; Stop 59
agcactctgatgtttgaacaacttt

SEQ ID NO: 428800 - DNA, 25 bp, Artificial
  probe
  misc_feature (1)..(25): SEQ ID NO: 6060; WAN02498C; Start 34; Stop 58
aagcactctgatgtttgaacaactt

SEQ ID NO: 428801 - DNA, 25 bp, Artificial
  probe
  misc_feature (1)..(25): SEQ ID NO: 6060; WAN02498C; Start 33; Stop 57
aaagcactctgatgtttgaacaact

SEQ ID NO: 428802 - DNA, 25 bp, Artificial
  probe
  misc_feature (1)..(25): SEQ ID NO: 6060; WAN02498C; Start 29; Stop 53
ttataaagcactctgatgtttgaac

SEQ ID NO: 428803 - DNA, 25 bp, Artificial
  probe
  misc_feature (1)..(25): SEQ ID NO: 6060; WAN02498C; Start 37; Stop 61
cactctgatgtttgaacaactttca

SEQ ID NO: 428804 - DNA, 25 bp, Artificial
  probe
  misc_feature (1)..(25): SEQ ID NO: 6060; WAN02498C; Start 38; Stop 62
actctgatgtttgaacaactttcat

SEQ ID NO: 428805 - DNA, 25 bp, Artificial
  probe
  misc_feature (1)..(25): SEQ ID NO: 6060; WAN02498C; Start 39; Stop 63
ctctgatgtttgaacaactttcata

SEQ ID NO: 428806 - DNA, 25 bp, Artificial
  probe
  misc_feature (1)..(25): SEQ ID NO: 6060; WAN02498C; Start 40; Stop 64
tctgatgtttgaacaactttcatat

SEQ ID NO: 428807 - DNA, 25 bp, Artificial
  probe
  misc_feature (1)..(25): SEQ ID NO: 6060; WAN02498C; Start 28; Stop 52
tttataaagcactctgatgtttgaa

SEQ ID NO: 428808 - DNA, 25 bp, Artificial
  probe
  misc_feature (1)..(25): SEQ ID NO: 6060; WAN02498C; Start 41; Stop 65
ctgatgtttgaacaactttcatata

SEQ ID NO: 428809 - DNA, 25 bp, Artificial
  probe
  misc_feature (1)..(25): SEQ ID NO: 6060; WAN02498C; Start 27; Stop 51
ttttataaagcactctgatgtttga

SEQ ID NO: 428810 - DNA, 25 bp, Artificial
  probe
  misc_feature (1)..(25): SEQ ID NO: 6060; WAN02498C; Start 42; Stop 66
tgatgtttgaacaactttcatatat

SEQ ID NO: 428811 - DNA, 25 bp, Artificial
  probe
  misc_feature (1)..(25): SEQ ID NO: 6060; WAN02498C; Start 26; Stop 50
attttataaagcactctgatgtttg

SEQ ID NO: 428812 - DNA, 25 bp, Artificial
  probe
  misc_feature (1)..(25): SEQ ID NO: 6060; WAN02498C; Start 60; Stop 84
catatatgatgaacggagaaatttt

SEQ ID NO: 428813 - DNA, 25 bp, Artificial
  probe
  misc_feature (1)..(25): SEQ ID NO: 6060; WAN02498C; Start 25; Stop 49
tattttataaagcactctgatgttt

SEQ ID NO: 428814 - DNA, 25 bp, Artificial
  probe
  misc_feature (1)..(25): SEQ ID NO: 6060; WAN02498C; Start 43; Stop 67
gatgtttgaacaactttcatatatg

SEQ ID NO: 428815 - DNA, 25 bp, Artificial
  probe
  misc_feature (1)..(25): SEQ ID NO: 6061; WAN02497T; Start 216; Stop 240
taacatctcaacaagtaagtgtgga

SEQ ID NO: 428816 - DNA, 25 bp, Artificial
  probe
  misc_feature (1)..(25): SEQ ID NO: 6061; WAN02497T; Start 237; Stop 261
tggacttcagactaattacagcatt

SEQ ID NO: 428817 - DNA, 25 bp, Artificial
  probe
  misc_feature (1)..(25): SEQ ID NO: 6061; WAN02497T; Start 236; Stop 260
gtggacttcagactaattacagcat

SEQ ID NO: 428818 - DNA, 25 bp, Artificial
  probe
  misc_feature (1)..(25): SEQ ID NO: 6061; WAN02497T; Start 215; Stop 239
ataacatctcaacaagtaagtgtgg

SEQ ID NO: 428819 - DNA, 25 bp, Artificial
  probe
  misc_feature (1)..(25): SEQ ID NO: 6061; WAN02497T; Start 217; Stop 241
aacatctcaacaagtaagtgtggac

SEQ ID NO: 428820 - DNA, 25 bp, Artificial
  probe
  misc_feature (1)..(25): SEQ ID NO: 6061; WAN02497T; Start 218; Stop 242
acatctcaacaagtaagtgtggact

SEQ ID NO: 428821 - DNA, 25 bp, Artificial
  probe
  misc_feature (1)..(25): SEQ ID NO: 6061; WAN02497T; Start 233; Stop 257
agtgtggacttcagactaattacag

SEQ ID NO: 428822 - DNA, 25 bp, Artificial
  probe
  misc_feature (1)..(25): SEQ ID NO: 6061; WAN02497T; Start 214; Stop 238
gataacatctcaacaagtaagtgtg

SEQ ID NO: 428823 - DNA, 25 bp, Artificial
  probe
  misc_feature (1)..(25): SEQ ID NO: 6061; WAN02497T; Start 234; Stop 258
gtgtggacttcagactaattacagc

SEQ ID NO: 428824 - DNA, 25 bp, Artificial
  probe
  misc_feature (1)..(25): SEQ ID NO: 6061; WAN02497T; Start 235; Stop 259
tgtggacttcagactaattacagca

SEQ ID NO: 428825 - DNA, 25 bp, Artificial
  probe
  misc_feature (1)..(25): SEQ ID NO: 6061; WAN02497T; Start 227; Stop 251
caagtaagtgtggacttcagactaa

SEQ ID NO: 428826 - DNA, 25 bp, Artificial
  probe
  misc_feature (1)..(25): SEQ ID NO: 6061; WAN02497T; Start 238; Stop 262
ggacttcagactaattacagcattt

SEQ ID NO: 428827 - DNA, 25 bp, Artificial
  probe
  misc_feature (1)..(25): SEQ ID NO: 6061; WAN02497T; Start 229; Stop 253
agtaagtgtggacttcagactaatt

SEQ ID NO: 428828 - DNA, 25 bp, Artificial
  probe
  misc_feature (1)..(25): SEQ ID NO: 6061; WAN02497T; Start 228; Stop 252
aagtaagtgtggacttcagactaat

SEQ ID NO: 428829 - DNA, 25 bp, Artificial
  probe
  misc_feature (1)..(25): SEQ ID NO: 6061; WAN02497T; Start 220; Stop 244
atctcaacaagtaagtgtggacttc

SEQ ID NO: 428830 - DNA, 25 bp, Artificial
  probe
  misc_feature (1)..(25): SEQ ID NO: 6061; WAN02497T; Start 219; Stop 243
catctcaacaagtaagtgtggactt

SEQ ID NO: 428831 - DNA, 25 bp, Artificial
  probe
  misc_feature (1)..(25): SEQ ID NO: 6061; WAN02497T; Start 213; Stop 237
agataacatctcaacaagtaagtgt

SEQ ID NO: 428832 - DNA, 25 bp, Artificial
  probe
  misc_feature (1)..(25): SEQ ID NO: 6061; WAN02497T; Start 226; Stop 250
acaagtaagtgtggacttcagacta

SEQ ID NO: 428833 - DNA, 25 bp, Artificial
  probe
  misc_feature (1)..(25): SEQ ID NO: 6061; WAN02497T; Start 232; Stop 256
aagtgtggacttcagactaattaca

SEQ ID NO: 428834 - DNA, 25 bp, Artificial
  probe
  misc_feature (1)..(25): SEQ ID NO: 6061; WAN02497T; Start 222; Stop 246
ctcaacaagtaagtgtggacttcag

SEQ ID NO: 428835 - DNA, 25 bp, Artificial
  probe
  misc_feature (1)..(25): SEQ ID NO: 6061; WAN02497T; Start 224; Stop 248
caacaagtaagtgtggacttcagac

SEQ ID NO: 428836 - DNA, 25 bp, Artificial
  probe
  misc_feature (1)..(25): SEQ ID NO: 6061; WAN02497T; Start 225; Stop 249
aacaagtaagtgtggacttcagact

SEQ ID NO: 428837 - DNA, 25 bp, Artificial
  probe
  misc_feature (1)..(25): SEQ ID NO: 6061; WAN02497T; Start 223; Stop 247
tcaacaagtaagtgtggacttcaga

SEQ ID NO: 428838 - DNA, 25 bp, Artificial
  probe
  misc_feature (1)..(25): SEQ ID NO: 6061; WAN02497T; Start 221; Stop 245
tctcaacaagtaagtgtggacttca

SEQ ID NO: 428839 - DNA, 25 bp, Artificial
  probe
  misc_feature (1)..(25): SEQ ID NO: 6061; WAN02497T; Start 231; Stop 255
taagtgtggacttcagactaattac

SEQ ID NO: 428840 - DNA, 25 bp, Artificial
  probe
  misc_feature (1)..(25): SEQ ID NO: 6061; WAN02497T; Start 230; Stop 254
gtaagtgtggacttcagactaatta

SEQ ID NO: 428841 - DNA, 25 bp, Artificial
  probe
  misc_feature (1)..(25): SEQ ID NO: 6061; WAN02497T; Start 265; Stop 289
taaattagattaccgcttatgcttt

SEQ ID NO: 428842 - DNA, 25 bp, Artificial
  probe
  misc_feature (1)..(25): SEQ ID NO: 6061; WAN02497T; Start 264; Stop 288
ttaaattagattaccgcttatgctt

SEQ ID NO: 428843 - DNA, 25 bp, Artificial
  probe
  misc_feature (1)..(25): SEQ ID NO: 6061; WAN02497T; Start 278; Stop 302
cgcttatgcttttaatgggctataa

SEQ ID NO: 428844 - DNA, 25 bp, Artificial
  probe
  misc_feature (1)..(25): SEQ ID NO: 6061; WAN02497T; Start 271; Stop 295
agattaccgcttatgcttttaatgg

SEQ ID NO: 428845 - DNA, 25 bp, Artificial
  probe
  misc_feature (1)..(25): SEQ ID NO: 6061; WAN02497T; Start 272; Stop 296
gattaccgcttatgcttttaatggg

SEQ ID NO: 428846 - DNA, 25 bp, Artificial
  probe
  misc_feature (1)..(25): SEQ ID NO: 6061; WAN02497T; Start 277; Stop 301
ccgcttatgcttttaatgggctata

SEQ ID NO: 428847 - DNA, 25 bp, Artificial
  probe
  misc_feature (1)..(25): SEQ ID NO: 6061; WAN02497T; Start 263; Stop 287
tttaaattagattaccgcttatgct

SEQ ID NO: 428848 - DNA, 25 bp, Artificial
  probe
  misc_feature (1)..(25): SEQ ID NO: 6062; WAN024985; Start 6; Stop 30
cacctcctttcaatatatagtatca

SEQ ID NO: 428849 - DNA, 25 bp, Artificial
  probe
  misc_feature (1)..(25): SEQ ID NO: 6062; WAN024985; Start 5; Stop 29
tcacctcctttcaatatatagtatc

SEQ ID NO: 428850 - DNA, 25 bp, Artificial
  probe
  misc_feature (1)..(25): SEQ ID NO: 6062; WAN024985; Start 9; Stop 33
ctcctttcaatatatagtatcatgc

SEQ ID NO: 428851 - DNA, 25 bp, Artificial
  probe
  misc_feature (1)..(25): SEQ ID NO: 6062; WAN024985; Start 15; Stop 39
tcaatatatagtatcatgcaaatgc

SEQ ID NO: 428852 - DNA, 25 bp, Artificial
  probe
  misc_feature (1)..(25): SEQ ID NO: 6062; WAN024985; Start 10; Stop 34
tcctttcaatatatagtatcatgca

SEQ ID NO: 428853 - DNA, 25 bp, Artificial
  probe
  misc_feature (1)..(25): SEQ ID NO: 6062; WAN024985; Start 16; Stop 40
caatatatagtatcatgcaaatgct

SEQ ID NO: 428854 - DNA, 25 bp, Artificial
  probe
  misc_feature (1)..(25): SEQ ID NO: 6063; WAN0249BG; Start 92; Stop 116
gcacattatcatacaaccttgaatt

SEQ ID NO: 428855 - DNA, 25 bp, Artificial
  probe
  misc_feature (1)..(25): SEQ ID NO: 6063; WAN0249BG; Start 88; Stop 112
ttctgcacattatcatacaaccttg

SEQ ID NO: 428856 - DNA, 25 bp, Artificial
  probe
  misc_feature (1)..(25): SEQ ID NO: 6063; WAN0249BG; Start 87; Stop 111
cttctgcacattatcatacaacctt

SEQ ID NO: 428857 - DNA, 25 bp, Artificial
  probe
  misc_feature (1)..(25): SEQ ID NO: 6063; WAN0249BG; Start 86; Stop 110
ccttctgcacattatcatacaacct

SEQ ID NO: 428858 - DNA, 25 bp, Artificial
  probe
  misc_feature (1)..(25): SEQ ID NO: 6063; WAN0249BG; Start 89; Stop 113
tctgcacattatcatacaaccttga

SEQ ID NO: 428859 - DNA, 25 bp, Artificial
  probe
  misc_feature (1)..(25): SEQ ID NO: 6063; WAN0249BG; Start 90; Stop 114
ctgcacattatcatacaaccttgaa

SEQ ID NO: 428860 - DNA, 25 bp, Artificial
  probe
  misc_feature (1)..(25): SEQ ID NO: 6063; WAN0249BG; Start 91; Stop 115
tgcacattatcatacaaccttgaat

SEQ ID NO: 428861 - DNA, 25 bp, Artificial
  probe
  misc_feature (1)..(25): SEQ ID NO: 6063; WAN0249BG; Start 69; Stop 93
aacaactattccatatgccttctgc

SEQ ID NO: 428862 - DNA, 25 bp, Artificial
  probe
  misc_feature (1)..(25): SEQ ID NO: 6063; WAN0249BG; Start 85; Stop 109
gccttctgcacattatcatacaacc

SEQ ID NO: 428863 - DNA, 25 bp, Artificial
  probe
  misc_feature (1)..(25): SEQ ID NO: 6063; WAN0249BG; Start 96; Stop 120
attatcatacaaccttgaatttccc

SEQ ID NO: 428864 - DNA, 25 bp, Artificial
  probe
  misc_feature (1)..(25): SEQ ID NO: 6063; WAN0249BG; Start 82; Stop 106
tatgccttctgcacattatcataca

SEQ ID NO: 428865 - DNA, 25 bp, Artificial
  probe
  misc_feature (1)..(25): SEQ ID NO: 6063; WAN0249BG; Start 83; Stop 107
atgccttctgcacattatcatacaa

SEQ ID NO: 428866 - DNA, 25 bp, Artificial
  probe
  misc_feature (1)..(25): SEQ ID NO: 6063; WAN0249BG; Start 68; Stop 92
aaacaactattccatatgccttctg

SEQ ID NO: 428867 - DNA, 25 bp, Artificial
  probe
  misc_feature (1)..(25): SEQ ID NO: 6063; WAN0249BG; Start 81; Stop 105
atatgccttctgcacattatcatac

SEQ ID NO: 428868 - DNA, 25 bp, Artificial
  probe
  misc_feature (1)..(25): SEQ ID NO: 6063; WAN0249BG; Start 75; Stop 99
tattccatatgccttctgcacatta

SEQ ID NO: 428869 - DNA, 25 bp, Artificial
  probe
  misc_feature (1)..(25): SEQ ID NO: 6063; WAN0249BG; Start 84; Stop 108
tgccttctgcacattatcatacaac

SEQ ID NO: 428870 - DNA, 25 bp, Artificial
  probe
  misc_feature (1)..(25): SEQ ID NO: 6063; WAN0249BG; Start 76; Stop 100
attccatatgccttctgcacattat

SEQ ID NO: 428871 - DNA, 25 bp, Artificial
  probe
  misc_feature (1)..(25): SEQ ID NO: 6063; WAN0249BG; Start 80; Stop 104
catatgccttctgcacattatcata

SEQ ID NO: 428872 - DNA, 25 bp, Artificial
  probe
  misc_feature (1)..(25): SEQ ID NO: 6063; WAN0249BG; Start 98; Stop 122
tatcatacaaccttgaatttcccca

SEQ ID NO: 428873 - DNA, 25 bp, Artificial
  probe
  misc_feature (1)..(25): SEQ ID NO: 6063; WAN0249BG; Start 99; Stop 123
atcatacaaccttgaatttccccat

SEQ ID NO: 428874 - DNA, 25 bp, Artificial
  probe
  misc_feature (1)..(25): SEQ ID NO: 6063; WAN0249BG; Start 77; Stop 101
ttccatatgccttctgcacattatc

SEQ ID NO: 428875 - DNA, 25 bp, Artificial
  probe
  misc_feature (1)..(25): SEQ ID NO: 6063; WAN0249BG; Start 74; Stop 98
ctattccatatgccttctgcacatt

SEQ ID NO: 428876 - DNA, 25 bp, Artificial
  probe
  misc_feature (1)..(25): SEQ ID NO: 6063; WAN0249BG; Start 79; Stop 103
ccatatgccttctgcacattatcat

SEQ ID NO: 428877 - DNA, 25 bp, Artificial
  probe
  misc_feature (1)..(25): SEQ ID NO: 6063; WAN0249BG; Start 100; Stop 124
tcatacaaccttgaatttccccatc

SEQ ID NO: 428878 - DNA, 25 bp, Artificial
  probe
  misc_feature (1)..(25): SEQ ID NO: 6063; WAN0249BG; Start 97; Stop 121
ttatcatacaaccttgaatttcccc

SEQ ID NO: 428879 - DNA, 25 bp, Artificial
  probe
  misc_feature (1)..(25): SEQ ID NO: 6063; WAN0249BG; Start 95; Stop 119
cattatcatacaaccttgaatttcc

SEQ ID NO: 428880 - DNA, 25 bp, Artificial
  probe
  misc_feature (1)..(25): SEQ ID NO: 6063; WAN0249BG; Start 101; Stop 125
catacaaccttgaatttccccatcc

SEQ ID NO: 428881 - DNA, 25 bp, Artificial
  probe
  misc_feature (1)..(25): SEQ ID NO: 6063; WAN0249BG; Start 105; Stop 129
caaccttgaatttccccatccattt

SEQ ID NO: 428882 - DNA, 25 bp, Artificial
  probe
  misc_feature (1)..(25): SEQ ID NO: 6063; WAN0249BG; Start 103; Stop 127
tacaaccttgaatttccccatccat

SEQ ID NO: 428883 - DNA, 25 bp, Artificial
  probe
  misc_feature (1)..(25): SEQ ID NO: 6063; WAN0249BG; Start 102; Stop 126
atacaaccttgaatttccccatcca

SEQ ID NO: 428884 - DNA, 25 bp, Artificial
  probe
  misc_feature (1)..(25): SEQ ID NO: 6063; WAN0249BG; Start 71; Stop 95
caactattccatatgccttctgcac

SEQ ID NO: 428885 - DNA, 25 bp, Artificial
  probe
  misc_feature (1)..(25): SEQ ID NO: 6063; WAN0249BG; Start 78; Stop 102
tccatatgccttctgcacattatca

SEQ ID NO: 428886 - DNA, 25 bp, Artificial
  probe
  misc_feature (1)..(25): SEQ ID NO: 6063; WAN0249BG; Start 73; Stop 97
actattccatatgccttctgcacat

SEQ ID NO: 428887 - DNA, 25 bp, Artificial
  probe
  misc_feature (1)..(25): SEQ ID NO: 6064; WAN02497Q; Start 81; Stop 105
atgctctaccttcatcacataccat

SEQ ID NO: 428888 - DNA, 25 bp, Artificial
  probe
  misc_feature (1)..(25): SEQ ID NO: 6064; WAN02497Q; Start 44; Stop 68
cgtatctgactagaataaggagcac

SEQ ID NO: 428889 - DNA, 25 bp, Artificial
  probe
  misc_feature (1)..(25): SEQ ID NO: 6064; WAN02497Q; Start 45; Stop 69
gtatctgactagaataaggagcact

SEQ ID NO: 428890 - DNA, 25 bp, Artificial
  probe
  misc_feature (1)..(25): SEQ ID NO: 6064; WAN02497Q; Start 46; Stop 70
tatctgactagaataaggagcactt

SEQ ID NO: 428891 - DNA, 25 bp, Artificial
  probe
  misc_feature (1)..(25): SEQ ID NO: 6064; WAN02497Q; Start 41; Stop 65
ccacgtatctgactagaataaggag

SEQ ID NO: 428892 - DNA, 25 bp, Artificial
  probe
  misc_feature (1)..(25): SEQ ID NO: 6064; WAN02497Q; Start 42; Stop 66
cacgtatctgactagaataaggagc

SEQ ID NO: 428893 - DNA, 25 bp, Artificial
  probe
  misc_feature (1)..(25): SEQ ID NO: 6064; WAN02497Q; Start 43; Stop 67
acgtatctgactagaataaggagca

SEQ ID NO: 428894 - DNA, 25 bp, Artificial
  probe
  misc_feature (1)..(25): SEQ ID NO: 6064; WAN02497Q; Start 39; Stop 63
ttccacgtatctgactagaataagg

SEQ ID NO: 428895 - DNA, 25 bp, Artificial
  probe
  misc_feature (1)..(25): SEQ ID NO: 6064; WAN02497Q; Start 48; Stop 72
tctgactagaataaggagcactttc

SEQ ID NO: 428896 - DNA, 25 bp, Artificial
  probe
  misc_feature (1)..(25): SEQ ID NO: 6064; WAN02497Q; Start 47; Stop 71
atctgactagaataaggagcacttt

SEQ ID NO: 428897 - DNA, 25 bp, Artificial
  probe
  misc_feature (1)..(25): SEQ ID NO: 6064; WAN02497Q; Start 5; Stop 29
ttcttctccttattccctactatca

SEQ ID NO: 428898 - DNA, 25 bp, Artificial
  probe
  misc_feature (1)..(25): SEQ ID NO: 6064; WAN02497Q; Start 40; Stop 64
tccacgtatctgactagaataagga

SEQ ID NO: 428899 - DNA, 25 bp, Artificial
  probe
  misc_feature (1)..(25): SEQ ID NO: 6064; WAN02497Q; Start 6; Stop 30
tcttctccttattccctactatcat

SEQ ID NO: 428900 - DNA, 25 bp, Artificial
  probe
  misc_feature (1)..(25): SEQ ID NO: 6064; WAN02497Q; Start 70; Stop 94
ttctacaattgatgctctaccttca

SEQ ID NO: 428901 - DNA, 25 bp, Artificial
  probe
  misc_feature (1)..(25): SEQ ID NO: 6064; WAN02497Q; Start 71; Stop 95
tctacaattgatgctctaccttcat

SEQ ID NO: 428902 - DNA, 25 bp, Artificial
  probe
  misc_feature (1)..(25): SEQ ID NO: 6064; WAN02497Q; Start 80; Stop 104
gatgctctaccttcatcacatacca

SEQ ID NO: 428903 - DNA, 25 bp, Artificial
  probe
  misc_feature (1)..(25): SEQ ID NO: 6064; WAN02497Q; Start 49; Stop 73
ctgactagaataaggagcactttct

SEQ ID NO: 428904 - DNA, 25 bp, Artificial
  probe
  misc_feature (1)..(25): SEQ ID NO: 6064; WAN02497Q; Start 4; Stop 28
attcttctccttattccctactatc

SEQ ID NO: 428905 - DNA, 25 bp, Artificial
  probe
  misc_feature (1)..(25): SEQ ID NO: 6064; WAN02497Q; Start 38; Stop 62
tttccacgtatctgactagaataag

SEQ ID NO: 428906 - DNA, 25 bp, Artificial
  probe
  misc_feature (1)..(25): SEQ ID NO: 6064; WAN02497Q; Start 7; Stop 31
cttctccttattccctactatcata

SEQ ID NO: 428907 - DNA, 25 bp, Artificial
  probe
  misc_feature (1)..(25): SEQ ID NO: 6064; WAN02497Q; Start 1; Stop 25
attattcttctccttattccctact

SEQ ID NO: 428908 - DNA, 25 bp, Artificial
  probe
  misc_feature (1)..(25): SEQ ID NO: 6064; WAN02497Q; Start 10; Stop 34
ctccttattccctactatcatatca

SEQ ID NO: 428909 - DNA, 25 bp, Artificial
  probe
  misc_feature (1)..(25): SEQ ID NO: 6064; WAN02497Q; Start 55; Stop 79
agaataaggagcactttctacaatt

SEQ ID NO: 428910 - DNA, 25 bp, Artificial
  probe
  misc_feature (1)..(25): SEQ ID NO: 6064; WAN02497Q; Start 67; Stop 91
actttctacaattgatgctctacct

SEQ ID NO: 428911 - DNA, 25 bp, Artificial
  probe
  misc_feature (1)..(25): SEQ ID NO: 6064; WAN02497Q; Start 66; Stop 90
cactttctacaattgatgctctacc

SEQ ID NO: 428912 - DNA, 25 bp, Artificial
  probe
  misc_feature (1)..(25): SEQ ID NO: 6064; WAN02497Q; Start 9; Stop 33
tctccttattccctactatcatatc

SEQ ID NO: 428913 - DNA, 25 bp, Artificial
  probe
  misc_feature (1)..(25): SEQ ID NO: 6064; WAN02497Q; Start 69; Stop 93
tttctacaattgatgctctaccttc

SEQ ID NO: 428914 - DNA, 25 bp, Artificial
  probe
  misc_feature (1)..(25): SEQ ID NO: 6064; WAN02497Q; Start 68; Stop 92
ctttctacaattgatgctctacctt

SEQ ID NO: 428915 - DNA, 25 bp, Artificial
  probe
  misc_feature (1)..(25): SEQ ID NO: 6064; WAN02497Q; Start 59; Stop 83
taaggagcactttctacaattgatg

SEQ ID NO: 428916 - DNA, 25 bp, Artificial
  probe
  misc_feature (1)..(25): SEQ ID NO: 6064; WAN02497Q; Start 11; Stop 35
tccttattccctactatcatatcaa

SEQ ID NO: 428917 - DNA, 25 bp, Artificial
  probe
  misc_feature (1)..(25): SEQ ID NO: 6064; WAN02497Q; Start 57; Stop 81
aataaggagcactttctacaattga

SEQ ID NO: 428918 - DNA, 25 bp, Artificial
  probe
  misc_feature (1)..(25): SEQ ID NO: 6064; WAN02497Q; Start 2; Stop 26
ttattcttctccttattccctacta

SEQ ID NO: 428919 - DNA, 25 bp, Artificial
  probe
  misc_feature (1)..(25): SEQ ID NO: 6064; WAN02497Q; Start 72; Stop 96
ctacaattgatgctctaccttcatc

SEQ ID NO: 428920 - DNA, 25 bp, Artificial
  probe
  misc_feature (1)..(25): SEQ ID NO: 6065; WAN0249CT; Start 18; Stop 42
tttaggcttgacaaaggatgagtat

SEQ ID NO: 428921 - DNA, 25 bp, Artificial
  probe
  misc_feature (1)..(25): SEQ ID NO: 6065; WAN0249CT; Start 17; Stop 41
atttaggcttgacaaaggatgagta

SEQ ID NO: 428922 - DNA, 25 bp, Artificial
  probe
  misc_feature (1)..(25): SEQ ID NO: 6065; WAN0249CT; Start 20; Stop 44
taggcttgacaaaggatgagtatag

SEQ ID NO: 428923 - DNA, 25 bp, Artificial
  probe
  misc_feature (1)..(25): SEQ ID NO: 6065; WAN0249CT; Start 24; Stop 48
cttgacaaaggatgagtataggagt

SEQ ID NO: 428924 - DNA, 25 bp, Artificial
  probe
  misc_feature (1)..(25): SEQ ID NO: 6065; WAN0249CT; Start 23; Stop 47
gcttgacaaaggatgagtataggag

SEQ ID NO: 428925 - DNA, 25 bp, Artificial
  probe
  misc_feature (1)..(25): SEQ ID NO: 6065; WAN0249CT; Start 19; Stop 43
ttaggcttgacaaaggatgagtata

SEQ ID NO: 428926 - DNA, 25 bp, Artificial
  probe
  misc_feature (1)..(25): SEQ ID NO: 6065; WAN0249CT; Start 16; Stop 40
aatttaggcttgacaaaggatgagt

SEQ ID NO: 428927 - DNA, 25 bp, Artificial
  probe
  misc_feature (1)..(25): SEQ ID NO: 6065; WAN0249CT; Start 15; Stop 39
caatttaggcttgacaaaggatgag

SEQ ID NO: 428928 - DNA, 25 bp, Artificial
  probe
  misc_feature (1)..(25): SEQ ID NO: 6065; WAN0249CT; Start 25; Stop 49
ttgacaaaggatgagtataggagta

SEQ ID NO: 428929 - DNA, 25 bp, Artificial
  probe
  misc_feature (1)..(25): SEQ ID NO: 6065; WAN0249CT; Start 26; Stop 50
tgacaaaggatgagtataggagtat

SEQ ID NO: 428930 - DNA, 25 bp, Artificial
  probe
  misc_feature (1)..(25): SEQ ID NO: 6065; WAN0249CT; Start 22; Stop 46
ggcttgacaaaggatgagtatagga

SEQ ID NO: 428931 - DNA, 25 bp, Artificial
  probe
  misc_feature (1)..(25): SEQ ID NO: 6065; WAN0249CT; Start 21; Stop 45
aggcttgacaaaggatgagtatagg

SEQ ID NO: 428932 - DNA, 25 bp, Artificial
  probe
  misc_feature (1)..(25): SEQ ID NO: 6065; WAN0249CT; Start 27; Stop 51
gacaaaggatgagtataggagtatt

SEQ ID NO: 428933 - DNA, 25 bp, Artificial
  probe
  misc_feature (1)..(25): SEQ ID NO: 6065; WAN0249CT; Start 13; Stop 37
ttcaatttaggcttgacaaaggatg

SEQ ID NO: 428934 - DNA, 25 bp, Artificial
  probe
  misc_feature (1)..(25): SEQ ID NO: 6065; WAN0249CT; Start 14; Stop 38
tcaatttaggcttgacaaaggatga

SEQ ID NO: 428935 - DNA, 25 bp, Artificial
  probe
  misc_feature (1)..(25): SEQ ID NO: 6065; WAN0249CT; Start 12; Stop 36
tttcaatttaggcttgacaaaggat

SEQ ID NO: 428936 - DNA, 25 bp, Artificial
  probe
  misc_feature (1)..(25): SEQ ID NO: 6065; WAN0249CT; Start 28; Stop 52
acaaaggatgagtataggagtatta

SEQ ID NO: 428937 - DNA, 25 bp, Artificial
  probe
  misc_feature (1)..(25): SEQ ID NO: 6065; WAN0249CT; Start 68; Stop 92
agaataaacataaagaaggctttgt

SEQ ID NO: 428938 - DNA, 25 bp, Artificial
  probe
  misc_feature (1)..(25): SEQ ID NO: 6065; WAN0249CT; Start 67; Stop 91
aagaataaacataaagaaggctttg

SEQ ID NO: 428939 - DNA, 25 bp, Artificial
  probe
  misc_feature (1)..(25): SEQ ID NO: 6065; WAN0249CT; Start 29; Stop 53
caaaggatgagtataggagtattat

SEQ ID NO: 428940 - DNA, 25 bp, Artificial
  probe
  misc_feature (1)..(25): SEQ ID NO: 6065; WAN0249CT; Start 11; Stop 35
ttttcaatttaggcttgacaaagga

SEQ ID NO: 428941 - DNA, 25 bp, Artificial
  probe
  misc_feature (1)..(25): SEQ ID NO: 6065; WAN0249CT; Start 74; Stop 98
aacataaagaaggctttgttatgaa

SEQ ID NO: 428942 - DNA, 25 bp, Artificial
  probe
  misc_feature (1)..(25): SEQ ID NO: 6065; WAN0249CT; Start 73; Stop 97
aaacataaagaaggctttgttatga

SEQ ID NO: 428943 - DNA, 25 bp, Artificial
  probe
  misc_feature (1)..(25): SEQ ID NO: 6065; WAN0249CT; Start 75; Stop 99
acataaagaaggctttgttatgaat

SEQ ID NO: 428944 - DNA, 25 bp, Artificial
  probe
  misc_feature (1)..(25): SEQ ID NO: 6065; WAN0249CT; Start 69; Stop 93
gaataaacataaagaaggctttgtt

SEQ ID NO: 428945 - DNA, 25 bp, Artificial
  probe
  misc_feature (1)..(25): SEQ ID NO: 6065; WAN0249CT; Start 78; Stop 102
taaagaaggctttgttatgaataag

SEQ ID NO: 428946 - DNA, 25 bp, Artificial
  probe
  misc_feature (1)..(25): SEQ ID NO: 6065; WAN0249CT; Start 66; Stop 90
aaagaataaacataaagaaggcttt

SEQ ID NO: 428947 - DNA, 25 bp, Artificial
  probe
  misc_feature (1)..(25): SEQ ID NO: 6065; WAN0249CT; Start 65; Stop 89
aaaagaataaacataaagaaggctt

SEQ ID NO: 428948 - DNA, 25 bp, Artificial
  probe
  misc_feature (1)..(25): SEQ ID NO: 6065; WAN0249CT; Start 72; Stop 96
taaacataaagaaggctttgttatg

SEQ ID NO: 428949 - DNA, 25 bp, Artificial
  probe
  misc_feature (1)..(25): SEQ ID NO: 6065; WAN0249CT; Start 77; Stop 101
ataaagaaggctttgttatgaataa

SEQ ID NO: 428950 - DNA, 25 bp, Artificial
  probe
  misc_feature (1)..(25): SEQ ID NO: 6065; WAN0249CT; Start 70; Stop 94
aataaacataaagaaggctttgtta

SEQ ID NO: 428951 - DNA, 25 bp, Artificial
  probe
  misc_feature (1)..(25): SEQ ID NO: 6065; WAN0249CT; Start 76; Stop 100
cataaagaaggctttgttatgaata

SEQ ID NO: 428952 - DNA, 25 bp, Artificial
  probe
  misc_feature (1)..(25): SEQ ID NO: 6065; WAN0249CT; Start 71; Stop 95
ataaacataaagaaggctttgttat

SEQ ID NO: 428953 - DNA, 25 bp, Artificial
  probe
  misc_feature (1)..(25): SEQ ID NO: 6066; WAN02498Q; Start 96; Stop 120
acaatcccctatattatgcgttctt

SEQ ID NO: 428954 - DNA, 25 bp, Artificial
  probe
  misc_feature (1)..(25): SEQ ID NO: 6066; WAN02498Q; Start 95; Stop 119
gacaatcccctatattatgcgttct

SEQ ID NO: 428955 - DNA, 25 bp, Artificial
  probe
  misc_feature (1)..(25): SEQ ID NO: 6066; WAN02498Q; Start 94; Stop 118
agacaatcccctatattatgcgttc

SEQ ID NO: 428956 - DNA, 25 bp, Artificial
  probe
  misc_feature (1)..(25): SEQ ID NO: 6066; WAN02498Q; Start 93; Stop 117
gagacaatcccctatattatgcgtt

SEQ ID NO: 428957 - DNA, 25 bp, Artificial
  probe
  misc_feature (1)..(25): SEQ ID NO: 6066; WAN02498Q; Start 97; Stop 121
caatcccctatattatgcgttcttt

SEQ ID NO: 428958 - DNA, 25 bp, Artificial
  probe
  misc_feature (1)..(25): SEQ ID NO: 6066; WAN02498Q; Start 98; Stop 122
aatcccctatattatgcgttctttt

SEQ ID NO: 428959 - DNA, 25 bp, Artificial
  probe
  misc_feature (1)..(25): SEQ ID NO: 6066; WAN02498Q; Start 100; Stop 124
tcccctatattatgcgttcttttaa

SEQ ID NO: 428960 - DNA, 25 bp, Artificial
  probe
  misc_feature (1)..(25): SEQ ID NO: 6066; WAN02498Q; Start 99; Stop 123
atcccctatattatgcgttctttta

SEQ ID NO: 428961 - DNA, 25 bp, Artificial
  probe
  misc_feature (1)..(25): SEQ ID NO: 6066; WAN02498Q; Start 90; Stop 114
atggagacaatcccctatattatgc

SEQ ID NO: 428962 - DNA, 25 bp, Artificial
  probe
  misc_feature (1)..(25): SEQ ID NO: 6066; WAN02498Q; Start 40; Stop 64
attttatctgatgattgcccaaatt

SEQ ID NO: 428963 - DNA, 25 bp, Artificial
  probe
  misc_feature (1)..(25): SEQ ID NO: 6066; WAN02498Q; Start 39; Stop 63
aattttatctgatgattgcccaaat

SEQ ID NO: 428964 - DNA, 25 bp, Artificial
  probe
  misc_feature (1)..(25): SEQ ID NO: 6066; WAN02498Q; Start 92; Stop 116
ggagacaatcccctatattatgcgt

SEQ ID NO: 428965 - DNA, 25 bp, Artificial
  probe
  misc_feature (1)..(25): SEQ ID NO: 6066; WAN02498Q; Start 91; Stop 115
tggagacaatcccctatattatgcg

SEQ ID NO: 428966 - DNA, 25 bp, Artificial
  probe
  misc_feature (1)..(25): SEQ ID NO: 6066; WAN02498Q; Start 36; Stop 60
ctcaattttatctgatgattgccca

SEQ ID NO: 428967 - DNA, 25 bp, Artificial
  probe
  misc_feature (1)..(25): SEQ ID NO: 6066; WAN02498Q; Start 35; Stop 59
tctcaattttatctgatgattgccc

SEQ ID NO: 428968 - DNA, 25 bp, Artificial
  probe
  misc_feature (1)..(25): SEQ ID NO: 6066; WAN02498Q; Start 37; Stop 61
tcaattttatctgatgattgcccaa

SEQ ID NO: 428969 - DNA, 25 bp, Artificial
  probe
  misc_feature (1)..(25): SEQ ID NO: 6066; WAN02498Q; Start 101; Stop 125
cccctatattatgcgttcttttaat

SEQ ID NO: 428970 - DNA, 25 bp, Artificial
  probe
  misc_feature (1)..(25): SEQ ID NO: 6066; WAN02498Q; Start 38; Stop 62
caattttatctgatgattgcccaaa

SEQ ID NO: 428971 - DNA, 25 bp, Artificial
  probe
  misc_feature (1)..(25): SEQ ID NO: 6066; WAN02498Q; Start 34; Stop 58
gtctcaattttatctgatgattgcc

SEQ ID NO: 428972 - DNA, 25 bp, Artificial
  probe
  misc_feature (1)..(25): SEQ ID NO: 6066; WAN02498Q; Start 42; Stop 66
tttatctgatgattgcccaaatttt

SEQ ID NO: 428973 - DNA, 25 bp, Artificial
  probe
  misc_feature (1)..(25): SEQ ID NO: 6066; WAN02498Q; Start 41; Stop 65
ttttatctgatgattgcccaaattt

SEQ ID NO: 428974 - DNA, 25 bp, Artificial
  probe
  misc_feature (1)..(25): SEQ ID NO: 6066; WAN02498Q; Start 33; Stop 57
agtctcaattttatctgatgattgc

SEQ ID NO: 428975 - DNA, 25 bp, Artificial
  probe
  misc_feature (1)..(25): SEQ ID NO: 6066; WAN02498Q; Start 89; Stop 113
tatggagacaatcccctatattatg

SEQ ID NO: 428976 - DNA, 25 bp, Artificial
  probe
  misc_feature (1)..(25): SEQ ID NO: 6066; WAN02498Q; Start 88; Stop 112
ttatggagacaatcccctatattat

SEQ ID NO: 428977 - DNA, 25 bp, Artificial
  probe
  misc_feature (1)..(25): SEQ ID NO: 6066; WAN02498Q; Start 87; Stop 111
attatggagacaatcccctatatta

SEQ ID NO: 428978 - DNA, 25 bp, Artificial
  probe
  misc_feature (1)..(25): SEQ ID NO: 6066; WAN02498Q; Start 86; Stop 110
tattatggagacaatcccctatatt

SEQ ID NO: 428979 - DNA, 25 bp, Artificial
  probe
  misc_feature (1)..(25): SEQ ID NO: 6066; WAN02498Q; Start 85; Stop 109
atattatggagacaatcccctatat

SEQ ID NO: 428980 - DNA, 25 bp, Artificial
  probe
  misc_feature (1)..(25): SEQ ID NO: 6066; WAN02498Q; Start 84; Stop 108
aatattatggagacaatcccctata

SEQ ID NO: 428981 - DNA, 25 bp, Artificial
  probe
  misc_feature (1)..(25): SEQ ID NO: 6066; WAN02498Q; Start 83; Stop 107
taatattatggagacaatcccctat

SEQ ID NO: 428982 - DNA, 25 bp, Artificial
  probe
  misc_feature (1)..(25): SEQ ID NO: 6066; WAN02498Q; Start 26; Stop 50
tcgatatagtctcaattttatctga

SEQ ID NO: 428983 - DNA, 25 bp, Artificial
  probe
  misc_feature (1)..(25): SEQ ID NO: 6066; WAN02498Q; Start 24; Stop 48
actcgatatagtctcaattttatct

SEQ ID NO: 428984 - DNA, 25 bp, Artificial
  probe
  misc_feature (1)..(25): SEQ ID NO: 6066; WAN02498Q; Start 25; Stop 49
ctcgatatagtctcaattttatctg

SEQ ID NO: 428985 - DNA, 25 bp, Artificial
  probe
  misc_feature (1)..(25): SEQ ID NO: 6066; WAN02498Q; Start 112; Stop 136
tgcgttcttttaatatcaaagactt

SEQ ID NO: 428986 - DNA, 25 bp, Artificial
  probe
  misc_feature (1)..(25): SEQ ID NO: 6068; WAN02496R; Start 26; Stop 50
acattcttactgattataccacatt

SEQ ID NO: 428987 - DNA, 25 bp, Artificial
  probe
  misc_feature (1)..(25): SEQ ID NO: 6068; WAN02496R; Start 25; Stop 49
aacattcttactgattataccacat

SEQ ID NO: 428988 - DNA, 25 bp, Artificial
  probe
  misc_feature (1)..(25): SEQ ID NO: 6068; WAN02496R; Start 34; Stop 58
actgattataccacatttacgttga

SEQ ID NO: 428989 - DNA, 25 bp, Artificial
  probe
  misc_feature (1)..(25): SEQ ID NO: 6068; WAN02496R; Start 30; Stop 54
tcttactgattataccacatttacg

SEQ ID NO: 428990 - DNA, 25 bp, Artificial
  probe
  misc_feature (1)..(25): SEQ ID NO: 6068; WAN02496R; Start 24; Stop 48
taacattcttactgattataccaca

SEQ ID NO: 428991 - DNA, 25 bp, Artificial
  probe
  misc_feature (1)..(25): SEQ ID NO: 6068; WAN02496R; Start 35; Stop 59
ctgattataccacatttacgttgaa

SEQ ID NO: 428992 - DNA, 25 bp, Artificial
  probe
  misc_feature (1)..(25): SEQ ID NO: 6068; WAN02496R; Start 36; Stop 60
tgattataccacatttacgttgaaa

SEQ ID NO: 428993 - DNA, 25 bp, Artificial
  probe
  misc_feature (1)..(25): SEQ ID NO: 6068; WAN02496R; Start 33; Stop 57
tactgattataccacatttacgttg

SEQ ID NO: 428994 - DNA, 25 bp, Artificial
  probe
  misc_feature (1)..(25): SEQ ID NO: 6068; WAN02496R; Start 31; Stop 55
cttactgattataccacatttacgt

SEQ ID NO: 428995 - DNA, 25 bp, Artificial
  probe
  misc_feature (1)..(25): SEQ ID NO: 6068; WAN02496R; Start 32; Stop 56
ttactgattataccacatttacgtt

SEQ ID NO: 428996 - DNA, 25 bp, Artificial
  probe
  misc_feature (1)..(25): SEQ ID NO: 6068; WAN02496R; Start 43; Stop 67
accacatttacgttgaaaattcttc

SEQ ID NO: 428997 - DNA, 25 bp, Artificial
  probe
  misc_feature (1)..(25): SEQ ID NO: 6068; WAN02496R; Start 27; Stop 51
cattcttactgattataccacattt

SEQ ID NO: 428998 - DNA, 25 bp, Artificial
  probe
  misc_feature (1)..(25): SEQ ID NO: 6068; WAN02496R; Start 44; Stop 68
ccacatttacgttgaaaattcttct

SEQ ID NO: 428999 - DNA, 25 bp, Artificial
  probe
  misc_feature (1)..(25): SEQ ID NO: 6068; WAN02496R; Start 42; Stop 66
taccacatttacgttgaaaattctt

SEQ ID NO: 429000 - DNA, 25 bp, Artificial
  probe
  misc_feature (1)..(25): SEQ ID NO: 6068; WAN02496R; Start 41; Stop 65
ataccacatttacgttgaaaattct

SEQ ID NO: 429001 - DNA, 25 bp, Artificial
  probe
  misc_feature (1)..(25): SEQ ID NO: 6068; WAN02496R; Start 37; Stop 61
gattataccacatttacgttgaaaa

SEQ ID NO: 429002 - DNA, 25 bp, Artificial
  probe
  misc_feature (1)..(25): SEQ ID NO: 6068; WAN02496R; Start 45; Stop 69
cacatttacgttgaaaattcttcta

SEQ ID NO: 429003 - DNA, 25 bp, Artificial
  probe
  misc_feature (1)..(25): SEQ ID NO: 6068; WAN02496R; Start 40; Stop 64
tataccacatttacgttgaaaattc

SEQ ID NO: 429004 - DNA, 25 bp, Artificial
  probe
  misc_feature (1)..(25): SEQ ID NO: 6068; WAN02496R; Start 39; Stop 63
ttataccacatttacgttgaaaatt

SEQ ID NO: 429005 - DNA, 25 bp, Artificial
  probe
  misc_feature (1)..(25): SEQ ID NO: 6068; WAN02496R; Start 46; Stop 70
acatttacgttgaaaattcttctat

SEQ ID NO: 429006 - DNA, 25 bp, Artificial
  probe
  misc_feature (1)..(25): SEQ ID NO: 6068; WAN02496R; Start 38; Stop 62
attataccacatttacgttgaaaat

SEQ ID NO: 429007 - DNA, 25 bp, Artificial
  probe
  misc_feature (1)..(25): SEQ ID NO: 6069; WAN02499V; Start 24; Stop 48
aacgagatgattaattcttagtaga

SEQ ID NO: 429008 - DNA, 25 bp, Artificial
  probe
  misc_feature (1)..(25): SEQ ID NO: 6069; WAN02499V; Start 25; Stop 49
acgagatgattaattcttagtagaa

SEQ ID NO: 429009 - DNA, 25 bp, Artificial
  probe
  misc_feature (1)..(25): SEQ ID NO: 6069; WAN02499V; Start 26; Stop 50
cgagatgattaattcttagtagaac

SEQ ID NO: 429010 - DNA, 25 bp, Artificial
  probe
  misc_feature (1)..(25): SEQ ID NO: 6069; WAN02499V; Start 21; Stop 45
caaaacgagatgattaattcttagt

SEQ ID NO: 429011 - DNA, 25 bp, Artificial
  probe
  misc_feature (1)..(25): SEQ ID NO: 6069; WAN02499V; Start 20; Stop 44
tcaaaacgagatgattaattcttag

SEQ ID NO: 429012 - DNA, 25 bp, Artificial
  probe
  misc_feature (1)..(25): SEQ ID NO: 6069; WAN02499V; Start 18; Stop 42
aatcaaaacgagatgattaattctt

SEQ ID NO: 429013 - DNA, 25 bp, Artificial
  probe
  misc_feature (1)..(25): SEQ ID NO: 6069; WAN02499V; Start 17; Stop 41
aaatcaaaacgagatgattaattct

SEQ ID NO: 429014 - DNA, 25 bp, Artificial
  probe
  misc_feature (1)..(25): SEQ ID NO: 6071; WAN0249BP; Start 46; Stop 70
tttgttgattatattataacagcgc

SEQ ID NO: 429015 - DNA, 25 bp, Artificial
  probe
  misc_feature (1)..(25): SEQ ID NO: 6071; WAN0249BP; Start 9; Stop 33
tttaaacaagcttctagcctatttt

SEQ ID NO: 429016 - DNA, 25 bp, Artificial
  probe
  misc_feature (1)..(25): SEQ ID NO: 6071; WAN0249BP; Start 8; Stop 32
ttttaaacaagcttctagcctattt

SEQ ID NO: 429017 - DNA, 25 bp, Artificial
  probe
  misc_feature (1)..(25): SEQ ID NO: 6072; WAN0249CC; Start 76; Stop 100
cgcataatatcaagttttcacacct

SEQ ID NO: 429018 - DNA, 25 bp, Artificial
  probe
  misc_feature (1)..(25): SEQ ID NO: 6072; WAN0249CC; Start 75; Stop 99
acgcataatatcaagttttcacacc

SEQ ID NO: 429019 - DNA, 25 bp, Artificial
  probe
  misc_feature (1)..(25): SEQ ID NO: 6072; WAN0249CC; Start 55; Stop 79
gtaaatcttcccatagtaaaacgca

SEQ ID NO: 429020 - DNA, 25 bp, Artificial
  probe
  misc_feature (1)..(25): SEQ ID NO: 6072; WAN0249CC; Start 54; Stop 78
agtaaatcttcccatagtaaaacgc

SEQ ID NO: 429021 - DNA, 25 bp, Artificial
  probe
  misc_feature (1)..(25): SEQ ID NO: 6072; WAN0249CC; Start 77; Stop 101
gcataatatcaagttttcacacctg

SEQ ID NO: 429022 - DNA, 25 bp, Artificial
  probe
  misc_feature (1)..(25): SEQ ID NO: 6072; WAN0249CC; Start 58; Stop 82
aatcttcccatagtaaaacgcataa

SEQ ID NO: 429023 - DNA, 25 bp, Artificial
  probe
  misc_feature (1)..(25): SEQ ID NO: 6072; WAN0249CC; Start 57; Stop 81
aaatcttcccatagtaaaacgcata

SEQ ID NO: 429024 - DNA, 25 bp, Artificial
  probe
  misc_feature (1)..(25): SEQ ID NO: 6072; WAN0249CC; Start 56; Stop 80
taaatcttcccatagtaaaacgcat

SEQ ID NO: 429025 - DNA, 25 bp, Artificial
  probe
  misc_feature (1)..(25): SEQ ID NO: 6072; WAN0249CC; Start 87; Stop 111
aagttttcacacctgatattatgcg

SEQ ID NO: 429026 - DNA, 25 bp, Artificial
  probe
  misc_feature (1)..(25): SEQ ID NO: 6072; WAN0249CC; Start 89; Stop 113
gttttcacacctgatattatgcgtt

SEQ ID NO: 429027 - DNA, 25 bp, Artificial
  probe
  misc_feature (1)..(25): SEQ ID NO: 6072; WAN0249CC; Start 91; Stop 115
tttcacacctgatattatgcgtttt

SEQ ID NO: 429028 - DNA, 25 bp, Artificial
  probe
  misc_feature (1)..(25): SEQ ID NO: 6072; WAN0249CC; Start 90; Stop 114
ttttcacacctgatattatgcgttt

SEQ ID NO: 429029 - DNA, 25 bp, Artificial
  probe
  misc_feature (1)..(25): SEQ ID NO: 6072; WAN0249CC; Start 59; Stop 83
atcttcccatagtaaaacgcataat

SEQ ID NO: 429030 - DNA, 25 bp, Artificial
  probe
  misc_feature (1)..(25): SEQ ID NO: 6072; WAN0249CC; Start 88; Stop 112
agttttcacacctgatattatgcgt

SEQ ID NO: 429031 - DNA, 25 bp, Artificial
  probe
  misc_feature (1)..(25): SEQ ID NO: 6072; WAN0249CC; Start 74; Stop 98
aacgcataatatcaagttttcacac

SEQ ID NO: 429032 - DNA, 25 bp, Artificial
  probe
  misc_feature (1)..(25): SEQ ID NO: 6072; WAN0249CC; Start 86; Stop 110
caagttttcacacctgatattatgc

SEQ ID NO: 429033 - DNA, 25 bp, Artificial
  probe
  misc_feature (1)..(25): SEQ ID NO: 6072; WAN0249CC; Start 60; Stop 84
tcttcccatagtaaaacgcataata

SEQ ID NO: 429034 - DNA, 25 bp, Artificial
  probe
  misc_feature (1)..(25): SEQ ID NO: 6072; WAN0249CC; Start 63; Stop 87
tcccatagtaaaacgcataatatca

SEQ ID NO: 429035 - DNA, 25 bp, Artificial
  probe
  misc_feature (1)..(25): SEQ ID NO: 6072; WAN0249CC; Start 64; Stop 88
cccatagtaaaacgcataatatcaa

SEQ ID NO: 429036 - DNA, 25 bp, Artificial
  probe
  misc_feature (1)..(25): SEQ ID NO: 6072; WAN0249CC; Start 62; Stop 86
ttcccatagtaaaacgcataatatc

SEQ ID NO: 429037 - DNA, 25 bp, Artificial
  probe
  misc_feature (1)..(25): SEQ ID NO: 6072; WAN0249CC; Start 61; Stop 85
cttcccatagtaaaacgcataatat

SEQ ID NO: 429038 - DNA, 25 bp, Artificial
  probe
  misc_feature (1)..(25): SEQ ID NO: 6072; WAN0249CC; Start 85; Stop 109
tcaagttttcacacctgatattatg

SEQ ID NO: 429039 - DNA, 25 bp, Artificial
  probe
  misc_feature (1)..(25): SEQ ID NO: 6072; WAN0249CC; Start 78; Stop 102
cataatatcaagttttcacacctga

SEQ ID NO: 429040 - DNA, 25 bp, Artificial
  probe
  misc_feature (1)..(25): SEQ ID NO: 6072; WAN0249CC; Start 53; Stop 77
aagtaaatcttcccatagtaaaacg

SEQ ID NO: 429041 - DNA, 25 bp, Artificial
  probe
  misc_feature (1)..(25): SEQ ID NO: 6072; WAN0249CC; Start 73; Stop 97
aaacgcataatatcaagttttcaca

SEQ ID NO: 429042 - DNA, 25 bp, Artificial
  probe
  misc_feature (1)..(25): SEQ ID NO: 6072; WAN0249CC; Start 65; Stop 89
ccatagtaaaacgcataatatcaag

SEQ ID NO: 429043 - DNA, 25 bp, Artificial
  probe
  misc_feature (1)..(25): SEQ ID NO: 6072; WAN0249CC; Start 7; Stop 31
aacatagcagataggtggggcaaaa

SEQ ID NO: 429044 - DNA, 25 bp, Artificial
  probe
  misc_feature (1)..(25): SEQ ID NO: 6072; WAN0249CC; Start 66; Stop 90
catagtaaaacgcataatatcaagt

SEQ ID NO: 429045 - DNA, 25 bp, Artificial
  probe
  misc_feature (1)..(25): SEQ ID NO: 6072; WAN0249CC; Start 50; Stop 74
aagaagtaaatcttcccatagtaaa

SEQ ID NO: 429046 - DNA, 25 bp, Artificial
  probe
  misc_feature (1)..(25): SEQ ID NO: 6072; WAN0249CC; Start 49; Stop 73
aaagaagtaaatcttcccatagtaa

SEQ ID NO: 429047 - DNA, 25 bp, Artificial
  probe
  misc_feature (1)..(25): SEQ ID NO: 6072; WAN0249CC; Start 6; Stop 30
caacatagcagataggtggggcaaa

SEQ ID NO: 429048 - DNA, 25 bp, Artificial
  probe
  misc_feature (1)..(25): SEQ ID NO: 6072; WAN0249CC; Start 84; Stop 108
atcaagttttcacacctgatattat

SEQ ID NO: 429049 - DNA, 25 bp, Artificial
  probe
  misc_feature (1)..(25): SEQ ID NO: 6072; WAN0249CC; Start 79; Stop 103
ataatatcaagttttcacacctgat

SEQ ID NO: 429050 - DNA, 25 bp, Artificial
  probe
  misc_feature (1)..(25): SEQ ID NO: 6073; WAN02497G; Start 14; Stop 38
tctactaagaattaatcatctcgtt

SEQ ID NO: 429051 - DNA, 25 bp, Artificial
  probe
  misc_feature (1)..(25): SEQ ID NO: 6073; WAN02497G; Start 13; Stop 37
ttctactaagaattaatcatctcgt

SEQ ID NO: 429052 - DNA, 25 bp, Artificial
  probe
  misc_feature (1)..(25): SEQ ID NO: 6073; WAN02497G; Start 12; Stop 36
gttctactaagaattaatcatctcg

SEQ ID NO: 429053 - DNA, 25 bp, Artificial
  probe
  misc_feature (1)..(25): SEQ ID NO: 6073; WAN02497G; Start 17; Stop 41
actaagaattaatcatctcgttttg

SEQ ID NO: 429054 - DNA, 25 bp, Artificial
  probe
  misc_feature (1)..(25): SEQ ID NO: 6073; WAN02497G; Start 18; Stop 42
ctaagaattaatcatctcgttttga

SEQ ID NO: 429055 - DNA, 25 bp, Artificial
  probe
  misc_feature (1)..(25): SEQ ID NO: 6073; WAN02497G; Start 21; Stop 45
agaattaatcatctcgttttgattt

SEQ ID NO: 429056 - DNA, 25 bp, Artificial
  probe
  misc_feature (1)..(25): SEQ ID NO: 6073; WAN02497G; Start 20; Stop 44
aagaattaatcatctcgttttgatt

SEQ ID NO: 429057 - DNA, 25 bp, Artificial
  probe
  misc_feature (1)..(25): SEQ ID NO: 6074; WAN0249CB; Start 22; Stop 46
tacaaaatcaacctcgctctcttat

SEQ ID NO: 429058 - DNA, 25 bp, Artificial
  probe
  misc_feature (1)..(25): SEQ ID NO: 6074; WAN0249CB; Start 21; Stop 45
ttacaaaatcaacctcgctctctta

SEQ ID NO: 429059 - DNA, 25 bp, Artificial
  probe
  misc_feature (1)..(25): SEQ ID NO: 6074; WAN0249CB; Start 23; Stop 47
acaaaatcaacctcgctctcttatt

SEQ ID NO: 429060 - DNA, 25 bp, Artificial
  probe
  misc_feature (1)..(25): SEQ ID NO: 6074; WAN0249CB; Start 20; Stop 44
tttacaaaatcaacctcgctctctt

SEQ ID NO: 429061 - DNA, 25 bp, Artificial
  probe
  misc_feature (1)..(25): SEQ ID NO: 6074; WAN0249CB; Start 24; Stop 48
caaaatcaacctcgctctcttattt

SEQ ID NO: 429062 - DNA, 25 bp, Artificial
  probe
  misc_feature (1)..(25): SEQ ID NO: 6074; WAN0249CB; Start 18; Stop 42
tatttacaaaatcaacctcgctctc

SEQ ID NO: 429063 - DNA, 25 bp, Artificial
  probe
  misc_feature (1)..(25): SEQ ID NO: 6074; WAN0249CB; Start 19; Stop 43
atttacaaaatcaacctcgctctct

SEQ ID NO: 429064 - DNA, 25 bp, Artificial
  probe
  misc_feature (1)..(25): SEQ ID NO: 6074; WAN0249CB; Start 17; Stop 41
atatttacaaaatcaacctcgctct

SEQ ID NO: 429065 - DNA, 25 bp, Artificial
  probe
  misc_feature (1)..(25): SEQ ID NO: 6074; WAN0249CB; Start 16; Stop 40
aatatttacaaaatcaacctcgctc

SEQ ID NO: 429066 - DNA, 25 bp, Artificial
  probe
  misc_feature (1)..(25): SEQ ID NO: 6074; WAN0249CB; Start 25; Stop 49
aaaatcaacctcgctctcttatttt

SEQ ID NO: 429067 - DNA, 25 bp, Artificial
  probe
  misc_feature (1)..(25): SEQ ID NO: 6074; WAN0249CB; Start 15; Stop 39
aaatatttacaaaatcaacctcgct

SEQ ID NO: 429068 - DNA, 25 bp, Artificial
  probe
  misc_feature (1)..(25): SEQ ID NO: 6074; WAN0249CB; Start 14; Stop 38
aaaatatttacaaaatcaacctcgc

SEQ ID NO: 429069 - DNA, 25 bp, Artificial
  probe
  misc_feature (1)..(25): SEQ ID NO: 6075; WAN02497X; Start 261; Stop 285
acttaactgttggagtagtcatggt

SEQ ID NO: 429070 - DNA, 25 bp, Artificial
  probe
  misc_feature (1)..(25): SEQ ID NO: 6075; WAN02497X; Start 211; Stop 235
ttgctatgttgtttctaatggttcc

SEQ ID NO: 429071 - DNA, 25 bp, Artificial
  probe
  misc_feature (1)..(25): SEQ ID NO: 6075; WAN02497X; Start 208; Stop 232
actttgctatgttgtttctaatggt

SEQ ID NO: 429072 - DNA, 25 bp, Artificial
  probe
  misc_feature (1)..(25): SEQ ID NO: 6075; WAN02497X; Start 212; Stop 236
tgctatgttgtttctaatggttcca

SEQ ID NO: 429073 - DNA, 25 bp, Artificial
  probe
  misc_feature (1)..(25): SEQ ID NO: 6075; WAN02497X; Start 213; Stop 237
gctatgttgtttctaatggttccaa

SEQ ID NO: 429074 - DNA, 25 bp, Artificial
  probe
  misc_feature (1)..(25): SEQ ID NO: 6075; WAN02497X; Start 210; Stop 234
tttgctatgttgtttctaatggttc

SEQ ID NO: 429075 - DNA, 25 bp, Artificial
  probe
  misc_feature (1)..(25): SEQ ID NO: 6075; WAN02497X; Start 209; Stop 233
ctttgctatgttgtttctaatggtt

SEQ ID NO: 429076 - DNA, 25 bp, Artificial
  probe
  misc_feature (1)..(25): SEQ ID NO: 6075; WAN02497X; Start 207; Stop 231
aactttgctatgttgtttctaatgg

SEQ ID NO: 429077 - DNA, 25 bp, Artificial
  probe
  misc_feature (1)..(25): SEQ ID NO: 6075; WAN02497X; Start 255; Stop 279
aatttgacttaactgttggagtagt

SEQ ID NO: 429078 - DNA, 25 bp, Artificial
  probe
  misc_feature (1)..(25): SEQ ID NO: 6075; WAN02497X; Start 214; Stop 238
ctatgttgtttctaatggttccaaa

SEQ ID NO: 429079 - DNA, 25 bp, Artificial
  probe
  misc_feature (1)..(25): SEQ ID NO: 6075; WAN02497X; Start 260; Stop 284
gacttaactgttggagtagtcatgg

SEQ ID NO: 429080 - DNA, 25 bp, Artificial
  probe
  misc_feature (1)..(25): SEQ ID NO: 6075; WAN02497X; Start 17; Stop 41
aagattagccacacataaattaagt

SEQ ID NO: 429081 - DNA, 25 bp, Artificial
  probe
  misc_feature (1)..(25): SEQ ID NO: 6075; WAN02497X; Start 187; Stop 211
tacggacaaagccttattttaactt

SEQ ID NO: 429082 - DNA, 25 bp, Artificial
  probe
  misc_feature (1)..(25): SEQ ID NO: 6075; WAN02497X; Start 186; Stop 210
gtacggacaaagccttattttaact

SEQ ID NO: 429083 - DNA, 25 bp, Artificial
  probe
  misc_feature (1)..(25): SEQ ID NO: 6075; WAN02497X; Start 254; Stop 278
aaatttgacttaactgttggagtag

SEQ ID NO: 429084 - DNA, 25 bp, Artificial
  probe
  misc_feature (1)..(25): SEQ ID NO: 6075; WAN02497X; Start 206; Stop 230
taactttgctatgttgtttctaatg

SEQ ID NO: 429085 - DNA, 25 bp, Artificial
  probe
  misc_feature (1)..(25): SEQ ID NO: 6075; WAN02497X; Start 185; Stop 209
tgtacggacaaagccttattttaac

SEQ ID NO: 429086 - DNA, 25 bp, Artificial
  probe
  misc_feature (1)..(25): SEQ ID NO: 6075; WAN02497X; Start 184; Stop 208
gtgtacggacaaagccttattttaa

SEQ ID NO: 429087 - DNA, 25 bp, Artificial
  probe
  misc_feature (1)..(25): SEQ ID NO: 6075; WAN02497X; Start 183; Stop 207
tgtgtacggacaaagccttatttta

SEQ ID NO: 429088 - DNA, 25 bp, Artificial
  probe
  misc_feature (1)..(25): SEQ ID NO: 6075; WAN02497X; Start 18; Stop 42
agattagccacacataaattaagta

SEQ ID NO: 429089 - DNA, 25 bp, Artificial
  probe
  misc_feature (1)..(25): SEQ ID NO: 6075; WAN02497X; Start 252; Stop 276
ttaaatttgacttaactgttggagt

SEQ ID NO: 429090 - DNA, 25 bp, Artificial
  probe
  misc_feature (1)..(25): SEQ ID NO: 6075; WAN02497X; Start 16; Stop 40
aaagattagccacacataaattaag

SEQ ID NO: 429091 - DNA, 25 bp, Artificial
  probe
  misc_feature (1)..(25): SEQ ID NO: 6075; WAN02497X; Start 24; Stop 48
gccacacataaattaagtaaattct

SEQ ID NO: 429092 - DNA, 25 bp, Artificial
  probe
  misc_feature (1)..(25): SEQ ID NO: 6075; WAN02497X; Start 23; Stop 47
agccacacataaattaagtaaattc

SEQ ID NO: 429093 - DNA, 25 bp, Artificial
  probe
  misc_feature (1)..(25): SEQ ID NO: 6075; WAN02497X; Start 74; Stop 98
aaactaatgaaaacgctatacttgt

SEQ ID NO: 429094 - DNA, 25 bp, Artificial
  probe
  misc_feature (1)..(25): SEQ ID NO: 6075; WAN02497X; Start 216; Stop 240
atgttgtttctaatggttccaaaat

SEQ ID NO: 429095 - DNA, 25 bp, Artificial
  probe
  misc_feature (1)..(25): SEQ ID NO: 6075; WAN02497X; Start 197; Stop 221
gccttattttaactttgctatgttg

SEQ ID NO: 429096 - DNA, 25 bp, Artificial
  probe
  misc_feature (1)..(25): SEQ ID NO: 6075; WAN02497X; Start 81; Stop 105
tgaaaacgctatacttgtatttgtt

SEQ ID NO: 429097 - DNA, 25 bp, Artificial
  probe
  misc_feature (1)..(25): SEQ ID NO: 6075; WAN02497X; Start 80; Stop 104
atgaaaacgctatacttgtatttgt

SEQ ID NO: 429098 - DNA, 25 bp, Artificial
  probe
  misc_feature (1)..(25): SEQ ID NO: 6075; WAN02497X; Start 181; Stop 205
gttgtgtacggacaaagccttattt

SEQ ID NO: 429099 - DNA, 25 bp, Artificial
  probe
  misc_feature (1)..(25): SEQ ID NO: 6075; WAN02497X; Start 204; Stop 228
tttaactttgctatgttgtttctaa

SEQ ID NO: 429100 - DNA, 25 bp, Artificial
  probe
  misc_feature (1)..(25): SEQ ID NO: 6075; WAN02497X; Start 188; Stop 212
acggacaaagccttattttaacttt

SEQ ID NO: 429101 - DNA, 25 bp, Artificial
  probe
  misc_feature (1)..(25): SEQ ID NO: 6075; WAN02497X; Start 256; Stop 280
atttgacttaactgttggagtagtc

SEQ ID NO: 429102 - DNA, 25 bp, Artificial
  probe
  misc_feature (1)..(25): SEQ ID NO: 6076; WAN02497J; Start 10; Stop 34
gcatcctcagtaatccagaacaatt

SEQ ID NO: 429103 - DNA, 25 bp, Artificial
  probe
  misc_feature (1)..(25): SEQ ID NO: 6076; WAN02497J; Start 79; Stop 103
tacatgccgactatctgaacaataa

SEQ ID NO: 429104 - DNA, 25 bp, Artificial
  probe
  misc_feature (1)..(25): SEQ ID NO: 6076; WAN02497J; Start 78; Stop 102
ttacatgccgactatctgaacaata

SEQ ID NO: 429105 - DNA, 25 bp, Artificial
  probe
  misc_feature (1)..(25): SEQ ID NO: 6076; WAN02497J; Start 9; Stop 33
ggcatcctcagtaatccagaacaat

SEQ ID NO: 429106 - DNA, 25 bp, Artificial
  probe
  misc_feature (1)..(25): SEQ ID NO: 6076; WAN02497J; Start 109; Stop 133
aaagcattagaaagccgacataaag

SEQ ID NO: 429107 - DNA, 25 bp, Artificial
  probe
  misc_feature (1)..(25): SEQ ID NO: 6076; WAN02497J; Start 111; Stop 135
agcattagaaagccgacataaagaa

SEQ ID NO: 429108 - DNA, 25 bp, Artificial
  probe
  misc_feature (1)..(25): SEQ ID NO: 6076; WAN02497J; Start 110; Stop 134
aagcattagaaagccgacataaaga

SEQ ID NO: 429109 - DNA, 25 bp, Artificial
  probe
  misc_feature (1)..(25): SEQ ID NO: 6076; WAN02497J; Start 12; Stop 36
atcctcagtaatccagaacaatttg

SEQ ID NO: 429110 - DNA, 25 bp, Artificial
  probe
  misc_feature (1)..(25): SEQ ID NO: 6076; WAN02497J; Start 11; Stop 35
catcctcagtaatccagaacaattt

SEQ ID NO: 429111 - DNA, 25 bp, Artificial
  probe
  misc_feature (1)..(25): SEQ ID NO: 6076; WAN02497J; Start 80; Stop 104
acatgccgactatctgaacaataaa

SEQ ID NO: 429112 - DNA, 25 bp, Artificial
  probe
  misc_feature (1)..(25): SEQ ID NO: 6076; WAN02497J; Start 77; Stop 101
tttacatgccgactatctgaacaat

SEQ ID NO: 429113 - DNA, 25 bp, Artificial
  probe
  misc_feature (1)..(25): SEQ ID NO: 6076; WAN02497J; Start 76; Stop 100
ctttacatgccgactatctgaacaa

SEQ ID NO: 429114 - DNA, 25 bp, Artificial
  probe
  misc_feature (1)..(25): SEQ ID NO: 6076; WAN02497J; Start 60; Stop 84
ggaaacatcaacaagcctttacatg

SEQ ID NO: 429115 - DNA, 25 bp, Artificial
  probe
  misc_feature (1)..(25): SEQ ID NO: 6076; WAN02497J; Start 13; Stop 37
tcctcagtaatccagaacaatttgt

SEQ ID NO: 429116 - DNA, 25 bp, Artificial
  probe
  misc_feature (1)..(25): SEQ ID NO: 6076; WAN02497J; Start 59; Stop 83
aggaaacatcaacaagcctttacat

SEQ ID NO: 429117 - DNA, 25 bp, Artificial
  probe
  misc_feature (1)..(25): SEQ ID NO: 6076; WAN02497J; Start 61; Stop 85
gaaacatcaacaagcctttacatgc

SEQ ID NO: 429118 - DNA, 25 bp, Artificial
  probe
  misc_feature (1)..(25): SEQ ID NO: 6076; WAN02497J; Start 1; Stop 25
caaagtttggcatcctcagtaatcc

SEQ ID NO: 429119 - DNA, 25 bp, Artificial
  probe
  misc_feature (1)..(25): SEQ ID NO: 6076; WAN02497J; Start 75; Stop 99
cctttacatgccgactatctgaaca

SEQ ID NO: 429120 - DNA, 25 bp, Artificial
  probe
  misc_feature (1)..(25): SEQ ID NO: 6076; WAN02497J; Start 108; Stop 132
aaaagcattagaaagccgacataaa

SEQ ID NO: 429121 - DNA, 25 bp, Artificial
  probe
  misc_feature (1)..(25): SEQ ID NO: 6076; WAN02497J; Start 107; Stop 131
gaaaagcattagaaagccgacataa

SEQ ID NO: 429122 - DNA, 25 bp, Artificial
  probe
  misc_feature (1)..(25): SEQ ID NO: 6076; WAN02497J; Start 83; Stop 107
tgccgactatctgaacaataaaatg

SEQ ID NO: 429123 - DNA, 25 bp, Artificial
  probe
  misc_feature (1)..(25): SEQ ID NO: 6076; WAN02497J; Start 84; Stop 108
gccgactatctgaacaataaaatga

SEQ ID NO: 429124 - DNA, 25 bp, Artificial
  probe
  misc_feature (1)..(25): SEQ ID NO: 6076; WAN02497J; Start 62; Stop 86
aaacatcaacaagcctttacatgcc

SEQ ID NO: 429125 - DNA, 25 bp, Artificial
  probe
  misc_feature (1)..(25): SEQ ID NO: 6076; WAN02497J; Start 106; Stop 130
tgaaaagcattagaaagccgacata

SEQ ID NO: 429126 - DNA, 25 bp, Artificial
  probe
  misc_feature (1)..(25): SEQ ID NO: 6076; WAN02497J; Start 82; Stop 106
atgccgactatctgaacaataaaat

SEQ ID NO: 429127 - DNA, 25 bp, Artificial
  probe
  misc_feature (1)..(25): SEQ ID NO: 6076; WAN02497J; Start 2; Stop 26
aaagtttggcatcctcagtaatcca

SEQ ID NO: 429128 - DNA, 25 bp, Artificial
  probe
  misc_feature (1)..(25): SEQ ID NO: 6076; WAN02497J; Start 8; Stop 32
tggcatcctcagtaatccagaacaa

SEQ ID NO: 429129 - DNA, 25 bp, Artificial
  probe
  misc_feature (1)..(25): SEQ ID NO: 6076; WAN02497J; Start 7; Stop 31
ttggcatcctcagtaatccagaaca

SEQ ID NO: 429130 - DNA, 25 bp, Artificial
  probe
  misc_feature (1)..(25): SEQ ID NO: 6076; WAN02497J; Start 50; Stop 74
cgacacaaaaggaaacatcaacaag

SEQ ID NO: 429131 - DNA, 25 bp, Artificial
  probe
  misc_feature (1)..(25): SEQ ID NO: 6076; WAN02497J; Start 6; Stop 30
tttggcatcctcagtaatccagaac

SEQ ID NO: 429132 - DNA, 25 bp, Artificial
  probe
  misc_feature (1)..(25): SEQ ID NO: 6076; WAN02497J; Start 5; Stop 29
gtttggcatcctcagtaatccagaa

SEQ ID NO: 429133 - DNA, 25 bp, Artificial
  probe
  misc_feature (1)..(25): SEQ ID NO: 6076; WAN02497J; Start 3; Stop 27
aagtttggcatcctcagtaatccag

SEQ ID NO: 429134 - DNA, 25 bp, Artificial
  probe
  misc_feature (1)..(25): SEQ ID NO: 6076; WAN02497J; Start 51; Stop 75
gacacaaaaggaaacatcaacaagc

SEQ ID NO: 429135 - DNA, 25 bp, Artificial
  probe
  misc_feature (1)..(25): SEQ ID NO: 6077; WAN02499F; Start 20; Stop 44
agttttaggtcgcttgataatatgc

SEQ ID NO: 429136 - DNA, 25 bp, Artificial
  probe
  misc_feature (1)..(25): SEQ ID NO: 6077; WAN02499F; Start 7; Stop 31
ttatagagcccaaagttttaggtcg

SEQ ID NO: 429137 - DNA, 25 bp, Artificial
  probe
  misc_feature (1)..(25): SEQ ID NO: 6077; WAN02499F; Start 16; Stop 40
ccaaagttttaggtcgcttgataat

SEQ ID NO: 429138 - DNA, 25 bp, Artificial
  probe
  misc_feature (1)..(25): SEQ ID NO: 6077; WAN02499F; Start 6; Stop 30
attatagagcccaaagttttaggtc

SEQ ID NO: 429139 - DNA, 25 bp, Artificial
  probe
  misc_feature (1)..(25): SEQ ID NO: 6077; WAN02499F; Start 15; Stop 39
cccaaagttttaggtcgcttgataa

SEQ ID NO: 429140 - DNA, 25 bp, Artificial
  probe
  misc_feature (1)..(25): SEQ ID NO: 6077; WAN02499F; Start 8; Stop 32
tatagagcccaaagttttaggtcgc

SEQ ID NO: 429141 - DNA, 25 bp, Artificial
  probe
  misc_feature (1)..(25): SEQ ID NO: 6077; WAN02499F; Start 5; Stop 29
tattatagagcccaaagttttaggt

SEQ ID NO: 429142 - DNA, 25 bp, Artificial
  probe
  misc_feature (1)..(25): SEQ ID NO: 6077; WAN02499F; Start 48; Stop 72
ttttgaattttatagactgctcgtt

SEQ ID NO: 429143 - DNA, 25 bp, Artificial
  probe
  misc_feature (1)..(25): SEQ ID NO: 6077; WAN02499F; Start 17; Stop 41
caaagttttaggtcgcttgataata

SEQ ID NO: 429144 - DNA, 25 bp, Artificial
  probe
  misc_feature (1)..(25): SEQ ID NO: 6077; WAN02499F; Start 19; Stop 43
aagttttaggtcgcttgataatatg

SEQ ID NO: 429145 - DNA, 25 bp, Artificial
  probe
  misc_feature (1)..(25): SEQ ID NO: 6077; WAN02499F; Start 18; Stop 42
aaagttttaggtcgcttgataatat

SEQ ID NO: 429146 - DNA, 25 bp, Artificial
  probe
  misc_feature (1)..(25): SEQ ID NO: 6077; WAN02499F; Start 4; Stop 28
atattatagagcccaaagttttagg

SEQ ID NO: 429147 - DNA, 25 bp, Artificial
  probe
  misc_feature (1)..(25): SEQ ID NO: 6077; WAN02499F; Start 14; Stop 38
gcccaaagttttaggtcgcttgata

SEQ ID NO: 429148 - DNA, 25 bp, Artificial
  probe
  misc_feature (1)..(25): SEQ ID NO: 6077; WAN02499F; Start 24; Stop 48
ttaggtcgcttgataatatgcgttt

SEQ ID NO: 429149 - DNA, 25 bp, Artificial
  probe
  misc_feature (1)..(25): SEQ ID NO: 6077; WAN02499F; Start 23; Stop 47
tttaggtcgcttgataatatgcgtt

SEQ ID NO: 429150 - DNA, 25 bp, Artificial
  probe
  misc_feature (1)..(25): SEQ ID NO: 6077; WAN02499F; Start 1; Stop 25
caaatattatagagcccaaagtttt

SEQ ID NO: 429151 - DNA, 25 bp, Artificial
  probe
  misc_feature (1)..(25): SEQ ID NO: 6077; WAN02499F; Start 9; Stop 33
atagagcccaaagttttaggtcgct

SEQ ID NO: 429152 - DNA, 25 bp, Artificial
  probe
  misc_feature (1)..(25): SEQ ID NO: 6077; WAN02499F; Start 10; Stop 34
tagagcccaaagttttaggtcgctt

SEQ ID NO: 429153 - DNA, 25 bp, Artificial
  probe
  misc_feature (1)..(25): SEQ ID NO: 6077; WAN02499F; Start 21; Stop 45
gttttaggtcgcttgataatatgcg

SEQ ID NO: 429154 - DNA, 25 bp, Artificial
  probe
  misc_feature (1)..(25): SEQ ID NO: 6077; WAN02499F; Start 25; Stop 49
taggtcgcttgataatatgcgtttt

SEQ ID NO: 429155 - DNA, 25 bp, Artificial
  probe
  misc_feature (1)..(25): SEQ ID NO: 6077; WAN02499F; Start 22; Stop 46
ttttaggtcgcttgataatatgcgt

SEQ ID NO: 429156 - DNA, 25 bp, Artificial
  probe
  misc_feature (1)..(25): SEQ ID NO: 6077; WAN02499F; Start 13; Stop 37
agcccaaagttttaggtcgcttgat

SEQ ID NO: 429157 - DNA, 25 bp, Artificial
  probe
  misc_feature (1)..(25): SEQ ID NO: 6078; WAN02498X; Start 12; Stop 36
acccctttgtaaataatctcctctt

SEQ ID NO: 429158 - DNA, 25 bp, Artificial
  probe
  misc_feature (1)..(25): SEQ ID NO: 6078; WAN02498X; Start 11; Stop 35
aacccctttgtaaataatctcctct

SEQ ID NO: 429159 - DNA, 25 bp, Artificial
  probe
  misc_feature (1)..(25): SEQ ID NO: 6078; WAN02498X; Start 10; Stop 34
aaacccctttgtaaataatctcctc

SEQ ID NO: 429160 - DNA, 25 bp, Artificial
  probe
  misc_feature (1)..(25): SEQ ID NO: 6078; WAN02498X; Start 13; Stop 37
cccctttgtaaataatctcctctta

SEQ ID NO: 429161 - DNA, 25 bp, Artificial
  probe
  misc_feature (1)..(25): SEQ ID NO: 6078; WAN02498X; Start 14; Stop 38
ccctttgtaaataatctcctcttat

SEQ ID NO: 429162 - DNA, 25 bp, Artificial
  probe
  misc_feature (1)..(25): SEQ ID NO: 6078; WAN02498X; Start 43; Stop 67
tcaaaattagaggaaaatgacaact

SEQ ID NO: 429163 - DNA, 25 bp, Artificial
  probe
  misc_feature (1)..(25): SEQ ID NO: 6078; WAN02498X; Start 9; Stop 33
caaacccctttgtaaataatctcct

SEQ ID NO: 429164 - DNA, 25 bp, Artificial
  probe
  misc_feature (1)..(25): SEQ ID NO: 6078; WAN02498X; Start 44; Stop 68
caaaattagaggaaaatgacaactt

SEQ ID NO: 429165 - DNA, 25 bp, Artificial
  probe
  misc_feature (1)..(25): SEQ ID NO: 6078; WAN02498X; Start 42; Stop 66
atcaaaattagaggaaaatgacaac

SEQ ID NO: 429166 - DNA, 25 bp, Artificial
  probe
  misc_feature (1)..(25): SEQ ID NO: 6078; WAN02498X; Start 46; Stop 70
aaattagaggaaaatgacaacttaa

SEQ ID NO: 429167 - DNA, 25 bp, Artificial
  probe
  misc_feature (1)..(25): SEQ ID NO: 6078; WAN02498X; Start 45; Stop 69
aaaattagaggaaaatgacaactta

SEQ ID NO: 429168 - DNA, 25 bp, Artificial
  probe
  misc_feature (1)..(25): SEQ ID NO: 6078; WAN02498X; Start 49; Stop 73
ttagaggaaaatgacaacttaattt

SEQ ID NO: 429169 - DNA, 25 bp, Artificial
  probe
  misc_feature (1)..(25): SEQ ID NO: 6079; WAN0249C7; Start 86; Stop 110
actttcagaacattacccatagatt

SEQ ID NO: 429170 - DNA, 25 bp, Artificial
  probe
  misc_feature (1)..(25): SEQ ID NO: 6079; WAN0249C7; Start 84; Stop 108
gtactttcagaacattacccataga

SEQ ID NO: 429171 - DNA, 25 bp, Artificial
  probe
  misc_feature (1)..(25): SEQ ID NO: 6079; WAN0249C7; Start 85; Stop 109
tactttcagaacattacccatagat

SEQ ID NO: 429172 - DNA, 25 bp, Artificial
  probe
  misc_feature (1)..(25): SEQ ID NO: 6079; WAN0249C7; Start 87; Stop 111
ctttcagaacattacccatagattt

SEQ ID NO: 429173 - DNA, 25 bp, Artificial
  probe
  misc_feature (1)..(25): SEQ ID NO: 6079; WAN0249C7; Start 204; Stop 228
tctaataattatactcgtggtgtca

SEQ ID NO: 429174 - DNA, 25 bp, Artificial
  probe
  misc_feature (1)..(25): SEQ ID NO: 6079; WAN0249C7; Start 205; Stop 229
ctaataattatactcgtggtgtcag

SEQ ID NO: 429175 - DNA, 25 bp, Artificial
  probe
  misc_feature (1)..(25): SEQ ID NO: 6079; WAN0249C7; Start 1; Stop 25
caccatttgttaagcgttttctaca

SEQ ID NO: 429176 - DNA, 25 bp, Artificial
  probe
  misc_feature (1)..(25): SEQ ID NO: 6079; WAN0249C7; Start 83; Stop 107
agtactttcagaacattacccatag

SEQ ID NO: 429177 - DNA, 25 bp, Artificial
  probe
  misc_feature (1)..(25): SEQ ID NO: 6079; WAN0249C7; Start 203; Stop 227
ttctaataattatactcgtggtgtc

SEQ ID NO: 429178 - DNA, 25 bp, Artificial
  probe
  misc_feature (1)..(25): SEQ ID NO: 6079; WAN0249C7; Start 200; Stop 224
cgtttctaataattatactcgtggt

SEQ ID NO: 429179 - DNA, 25 bp, Artificial
  probe
  misc_feature (1)..(25): SEQ ID NO: 6079; WAN0249C7; Start 88; Stop 112
tttcagaacattacccatagatttt

SEQ ID NO: 429180 - DNA, 25 bp, Artificial
  probe
  misc_feature (1)..(25): SEQ ID NO: 6079; WAN0249C7; Start 196; Stop 220
tccacgtttctaataattatactcg

SEQ ID NO: 429181 - DNA, 25 bp, Artificial
  probe
  misc_feature (1)..(25): SEQ ID NO: 6079; WAN0249C7; Start 2; Stop 26
accatttgttaagcgttttctacaa

SEQ ID NO: 429182 - DNA, 25 bp, Artificial
  probe
  misc_feature (1)..(25): SEQ ID NO: 6079; WAN0249C7; Start 6; Stop 30
tttgttaagcgttttctacaattcg

SEQ ID NO: 429183 - DNA, 25 bp, Artificial
  probe
  misc_feature (1)..(25): SEQ ID NO: 6079; WAN0249C7; Start 3; Stop 27
ccatttgttaagcgttttctacaat

SEQ ID NO: 429184 - DNA, 25 bp, Artificial
  probe
  misc_feature (1)..(25): SEQ ID NO: 6079; WAN0249C7; Start 182; Stop 206
aaatttaataagattccacgtttct

SEQ ID NO: 429185 - DNA, 25 bp, Artificial
  probe
  misc_feature (1)..(25): SEQ ID NO: 6079; WAN0249C7; Start 202; Stop 226
tttctaataattatactcgtggtgt

SEQ ID NO: 429186 - DNA, 25 bp, Artificial
  probe
  misc_feature (1)..(25): SEQ ID NO: 6079; WAN0249C7; Start 201; Stop 225
gtttctaataattatactcgtggtg

SEQ ID NO: 429187 - DNA, 25 bp, Artificial
  probe
  misc_feature (1)..(25): SEQ ID NO: 6079; WAN0249C7; Start 199; Stop 223
acgtttctaataattatactcgtgg

SEQ ID NO: 429188 - DNA, 25 bp, Artificial
  probe
  misc_feature (1)..(25): SEQ ID NO: 6079; WAN0249C7; Start 197; Stop 221
ccacgtttctaataattatactcgt

SEQ ID NO: 429189 - DNA, 25 bp, Artificial
  probe
  misc_feature (1)..(25): SEQ ID NO: 6079; WAN0249C7; Start 4; Stop 28
catttgttaagcgttttctacaatt

SEQ ID NO: 429190 - DNA, 25 bp, Artificial
  probe
  misc_feature (1)..(25): SEQ ID NO: 6079; WAN0249C7; Start 63; Stop 87
tatttctctcctaacctaaaagtac

SEQ ID NO: 429191 - DNA, 25 bp, Artificial
  probe
  misc_feature (1)..(25): SEQ ID NO: 6079; WAN0249C7; Start 64; Stop 88
atttctctcctaacctaaaagtact

SEQ ID NO: 429192 - DNA, 25 bp, Artificial
  probe
  misc_feature (1)..(25): SEQ ID NO: 6079; WAN0249C7; Start 5; Stop 29
atttgttaagcgttttctacaattc

SEQ ID NO: 429193 - DNA, 25 bp, Artificial
  probe
  misc_feature (1)..(25): SEQ ID NO: 6079; WAN0249C7; Start 7; Stop 31
ttgttaagcgttttctacaattcgc

SEQ ID NO: 429194 - DNA, 25 bp, Artificial
  probe
  misc_feature (1)..(25): SEQ ID NO: 6079; WAN0249C7; Start 181; Stop 205
aaaatttaataagattccacgtttc

SEQ ID NO: 429195 - DNA, 25 bp, Artificial
  probe
  misc_feature (1)..(25): SEQ ID NO: 6080; WAN02498T; Start 16; Stop 40
tattttcttgcctgctgaactcatc

SEQ ID NO: 429196 - DNA, 25 bp, Artificial
  probe
  misc_feature (1)..(25): SEQ ID NO: 6080; WAN02498T; Start 15; Stop 39
ctattttcttgcctgctgaactcat

SEQ ID NO: 429197 - DNA, 25 bp, Artificial
  probe
  misc_feature (1)..(25): SEQ ID NO: 6080; WAN02498T; Start 28; Stop 52
tgctgaactcatcgatttaatacct

SEQ ID NO: 429198 - DNA, 25 bp, Artificial
  probe
  misc_feature (1)..(25): SEQ ID NO: 6080; WAN02498T; Start 27; Stop 51
ctgctgaactcatcgatttaatacc

SEQ ID NO: 429199 - DNA, 25 bp, Artificial
  probe
  misc_feature (1)..(25): SEQ ID NO: 6080; WAN02498T; Start 26; Stop 50
cctgctgaactcatcgatttaatac

SEQ ID NO: 429200 - DNA, 25 bp, Artificial
  probe
  misc_feature (1)..(25): SEQ ID NO: 6080; WAN02498T; Start 29; Stop 53
gctgaactcatcgatttaatacctt

SEQ ID NO: 429201 - DNA, 25 bp, Artificial
  probe
  misc_feature (1)..(25): SEQ ID NO: 6080; WAN02498T; Start 25; Stop 49
gcctgctgaactcatcgatttaata

SEQ ID NO: 429202 - DNA, 25 bp, Artificial
  probe
  misc_feature (1)..(25): SEQ ID NO: 6080; WAN02498T; Start 135; Stop 159
agcgtatttaattgaactatttgat

SEQ ID NO: 429203 - DNA, 25 bp, Artificial
  probe
  misc_feature (1)..(25): SEQ ID NO: 6080; WAN02498T; Start 5; Stop 29
cgtaaaggtgctattttcttgcctg

SEQ ID NO: 429204 - DNA, 25 bp, Artificial
  probe
  misc_feature (1)..(25): SEQ ID NO: 6080; WAN02498T; Start 63; Stop 87
ccctctagtatattgtaattgtttg

SEQ ID NO: 429205 - DNA, 25 bp, Artificial
  probe
  misc_feature (1)..(25): SEQ ID NO: 6080; WAN02498T; Start 7; Stop 31
taaaggtgctattttcttgcctgct

SEQ ID NO: 429206 - DNA, 25 bp, Artificial
  probe
  misc_feature (1)..(25): SEQ ID NO: 6080; WAN02498T; Start 6; Stop 30
gtaaaggtgctattttcttgcctgc

SEQ ID NO: 429207 - DNA, 25 bp, Artificial
  probe
  misc_feature (1)..(25): SEQ ID NO: 6080; WAN02498T; Start 30; Stop 54
ctgaactcatcgatttaataccttt

SEQ ID NO: 429208 - DNA, 25 bp, Artificial
  probe
  misc_feature (1)..(25): SEQ ID NO: 6080; WAN02498T; Start 24; Stop 48
tgcctgctgaactcatcgatttaat

SEQ ID NO: 429209 - DNA, 25 bp, Artificial
  probe
  misc_feature (1)..(25): SEQ ID NO: 6080; WAN02498T; Start 13; Stop 37
tgctattttcttgcctgctgaactc

SEQ ID NO: 429210 - DNA, 25 bp, Artificial
  probe
  misc_feature (1)..(25): SEQ ID NO: 6080; WAN02498T; Start 23; Stop 47
ttgcctgctgaactcatcgatttaa

SEQ ID NO: 429211 - DNA, 25 bp, Artificial
  probe
  misc_feature (1)..(25): SEQ ID NO: 6080; WAN02498T; Start 14; Stop 38
gctattttcttgcctgctgaactca

SEQ ID NO: 429212 - DNA, 25 bp, Artificial
  probe
  misc_feature (1)..(25): SEQ ID NO: 6080; WAN02498T; Start 62; Stop 86
cccctctagtatattgtaattgttt

SEQ ID NO: 429213 - DNA, 25 bp, Artificial
  probe
  misc_feature (1)..(25): SEQ ID NO: 6080; WAN02498T; Start 12; Stop 36
gtgctattttcttgcctgctgaact

SEQ ID NO: 429214 - DNA, 25 bp, Artificial
  probe
  misc_feature (1)..(25): SEQ ID NO: 6080; WAN02498T; Start 17; Stop 41
attttcttgcctgctgaactcatcg

SEQ ID NO: 429215 - DNA, 25 bp, Artificial
  probe
  misc_feature (1)..(25): SEQ ID NO: 6080; WAN02498T; Start 4; Stop 28
ccgtaaaggtgctattttcttgcct

SEQ ID NO: 429216 - DNA, 25 bp, Artificial
  probe
  misc_feature (1)..(25): SEQ ID NO: 6080; WAN02498T; Start 22; Stop 46
cttgcctgctgaactcatcgattta

SEQ ID NO: 429217 - DNA, 25 bp, Artificial
  probe
  misc_feature (1)..(25): SEQ ID NO: 6080; WAN02498T; Start 3; Stop 27
cccgtaaaggtgctattttcttgcc

SEQ ID NO: 429218 - DNA, 25 bp, Artificial
  probe
  misc_feature (1)..(25): SEQ ID NO: 6080; WAN02498T; Start 2; Stop 26
acccgtaaaggtgctattttcttgc

SEQ ID NO: 429219 - DNA, 25 bp, Artificial
  probe
  misc_feature (1)..(25): SEQ ID NO: 6080; WAN02498T; Start 20; Stop 44
ttcttgcctgctgaactcatcgatt

SEQ ID NO: 429220 - DNA, 25 bp, Artificial
  probe
  misc_feature (1)..(25): SEQ ID NO: 6080; WAN02498T; Start 8; Stop 32
aaaggtgctattttcttgcctgctg

SEQ ID NO: 429221 - DNA, 25 bp, Artificial
  probe
  misc_feature (1)..(25): SEQ ID NO: 6080; WAN02498T; Start 11; Stop 35
ggtgctattttcttgcctgctgaac

SEQ ID NO: 429222 - DNA, 25 bp, Artificial
  probe
  misc_feature (1)..(25): SEQ ID NO: 6080; WAN02498T; Start 31; Stop 55
tgaactcatcgatttaatacctttt

SEQ ID NO: 429223 - DNA, 25 bp, Artificial
  probe
  misc_feature (1)..(25): SEQ ID NO: 6080; WAN02498T; Start 21; Stop 45
tcttgcctgctgaactcatcgattt

SEQ ID NO: 429224 - DNA, 25 bp, Artificial
  probe
  misc_feature (1)..(25): SEQ ID NO: 6080; WAN02498T; Start 19; Stop 43
tttcttgcctgctgaactcatcgat

SEQ ID NO: 429225 - DNA, 25 bp, Artificial
  probe
  misc_feature (1)..(25): SEQ ID NO: 6080; WAN02498T; Start 10; Stop 34
aggtgctattttcttgcctgctgaa

SEQ ID NO: 429226 - DNA, 25 bp, Artificial
  probe
  misc_feature (1)..(25): SEQ ID NO: 6080; WAN02498T; Start 9; Stop 33
aaggtgctattttcttgcctgctga

SEQ ID NO: 429227 - DNA, 25 bp, Artificial
  probe
  misc_feature (1)..(25): SEQ ID NO: 6080; WAN02498T; Start 18; Stop 42
ttttcttgcctgctgaactcatcga

SEQ ID NO: 429228 - DNA, 25 bp, Artificial
  probe
  misc_feature (1)..(25): SEQ ID NO: 6081; WAN0249BO; Start 23; Stop 47
aaaatcgagcatcaaaccaagggag

SEQ ID NO: 429229 - DNA, 25 bp, Artificial
  probe
  misc_feature (1)..(25): SEQ ID NO: 6082; WAN0249BE; Start 63; Stop 87
aaatcggaacaaatcacttagagaa

SEQ ID NO: 429230 - DNA, 25 bp, Artificial
  probe
  misc_feature (1)..(25): SEQ ID NO: 6082; WAN0249BE; Start 64; Stop 88
aatcggaacaaatcacttagagaat

SEQ ID NO: 429231 - DNA, 25 bp, Artificial
  probe
  misc_feature (1)..(25): SEQ ID NO: 6082; WAN0249BE; Start 65; Stop 89
atcggaacaaatcacttagagaatt

SEQ ID NO: 429232 - DNA, 25 bp, Artificial
  probe
  misc_feature (1)..(25): SEQ ID NO: 6082; WAN0249BE; Start 20; Stop 44
tgtcaattagcccgtcgtcttattt

SEQ ID NO: 429233 - DNA, 25 bp, Artificial
  probe
  misc_feature (1)..(25): SEQ ID NO: 6082; WAN0249BE; Start 19; Stop 43
ttgtcaattagcccgtcgtcttatt

SEQ ID NO: 429234 - DNA, 25 bp, Artificial
  probe
  misc_feature (1)..(25): SEQ ID NO: 6082; WAN0249BE; Start 18; Stop 42
attgtcaattagcccgtcgtcttat

SEQ ID NO: 429235 - DNA, 25 bp, Artificial
  probe
  misc_feature (1)..(25): SEQ ID NO: 6082; WAN0249BE; Start 11; Stop 35
caagatgattgtcaattagcccgtc

SEQ ID NO: 429236 - DNA, 25 bp, Artificial
  probe
  misc_feature (1)..(25): SEQ ID NO: 6082; WAN0249BE; Start 97; Stop 121
atttctagcactgtttgagacgttt

SEQ ID NO: 429237 - DNA, 25 bp, Artificial
  probe
  misc_feature (1)..(25): SEQ ID NO: 6082; WAN0249BE; Start 96; Stop 120
aatttctagcactgtttgagacgtt

SEQ ID NO: 429238 - DNA, 25 bp, Artificial
  probe
  misc_feature (1)..(25): SEQ ID NO: 6082; WAN0249BE; Start 74; Stop 98
aatcacttagagaattccagtcaat

SEQ ID NO: 429239 - DNA, 25 bp, Artificial
  probe
  misc_feature (1)..(25): SEQ ID NO: 6082; WAN0249BE; Start 17; Stop 41
gattgtcaattagcccgtcgtctta

SEQ ID NO: 429240 - DNA, 25 bp, Artificial
  probe
  misc_feature (1)..(25): SEQ ID NO: 6082; WAN0249BE; Start 75; Stop 99
atcacttagagaattccagtcaatt

SEQ ID NO: 429241 - DNA, 25 bp, Artificial
  probe
  misc_feature (1)..(25): SEQ ID NO: 6082; WAN0249BE; Start 98; Stop 122
tttctagcactgtttgagacgtttc

SEQ ID NO: 429242 - DNA, 25 bp, Artificial
  probe
  misc_feature (1)..(25): SEQ ID NO: 6082; WAN0249BE; Start 95; Stop 119
caatttctagcactgtttgagacgt

SEQ ID NO: 429243 - DNA, 25 bp, Artificial
  probe
  misc_feature (1)..(25): SEQ ID NO: 6082; WAN0249BE; Start 62; Stop 86
aaaatcggaacaaatcacttagaga

SEQ ID NO: 429244 - DNA, 25 bp, Artificial
  probe
  misc_feature (1)..(25): SEQ ID NO: 6082; WAN0249BE; Start 93; Stop 117
gtcaatttctagcactgtttgagac

SEQ ID NO: 429245 - DNA, 25 bp, Artificial
  probe
  misc_feature (1)..(25): SEQ ID NO: 6082; WAN0249BE; Start 92; Stop 116
agtcaatttctagcactgtttgaga

SEQ ID NO: 429246 - DNA, 25 bp, Artificial
  probe
  misc_feature (1)..(25): SEQ ID NO: 6082; WAN0249BE; Start 66; Stop 90
tcggaacaaatcacttagagaattc

SEQ ID NO: 429247 - DNA, 25 bp, Artificial
  probe
  misc_feature (1)..(25): SEQ ID NO: 6082; WAN0249BE; Start 49; Stop 73
gatggaatgaaataaaatcggaaca

SEQ ID NO: 429248 - DNA, 25 bp, Artificial
  probe
  misc_feature (1)..(25): SEQ ID NO: 6082; WAN0249BE; Start 48; Stop 72
tgatggaatgaaataaaatcggaac

SEQ ID NO: 429249 - DNA, 25 bp, Artificial
  probe
  misc_feature (1)..(25): SEQ ID NO: 6082; WAN0249BE; Start 21; Stop 45
gtcaattagcccgtcgtcttatttt

SEQ ID NO: 429250 - DNA, 25 bp, Artificial
  probe
  misc_feature (1)..(25): SEQ ID NO: 6082; WAN0249BE; Start 72; Stop 96
caaatcacttagagaattccagtca

SEQ ID NO: 429251 - DNA, 25 bp, Artificial
  probe
  misc_feature (1)..(25): SEQ ID NO: 6082; WAN0249BE; Start 71; Stop 95
acaaatcacttagagaattccagtc

SEQ ID NO: 429252 - DNA, 25 bp, Artificial
  probe
  misc_feature (1)..(25): SEQ ID NO: 6082; WAN0249BE; Start 51; Stop 75
tggaatgaaataaaatcggaacaaa

SEQ ID NO: 429253 - DNA, 25 bp, Artificial
  probe
  misc_feature (1)..(25): SEQ ID NO: 6082; WAN0249BE; Start 94; Stop 118
tcaatttctagcactgtttgagacg

SEQ ID NO: 429254 - DNA, 25 bp, Artificial
  probe
  misc_feature (1)..(25): SEQ ID NO: 6082; WAN0249BE; Start 12; Stop 36
aagatgattgtcaattagcccgtcg

SEQ ID NO: 429255 - DNA, 25 bp, Artificial
  probe
  misc_feature (1)..(25): SEQ ID NO: 6082; WAN0249BE; Start 8; Stop 32
aaacaagatgattgtcaattagccc

SEQ ID NO: 429256 - DNA, 25 bp, Artificial
  probe
  misc_feature (1)..(25): SEQ ID NO: 6082; WAN0249BE; Start 50; Stop 74
atggaatgaaataaaatcggaacaa

SEQ ID NO: 429257 - DNA, 25 bp, Artificial
  probe
  misc_feature (1)..(25): SEQ ID NO: 6082; WAN0249BE; Start 7; Stop 31
caaacaagatgattgtcaattagcc

SEQ ID NO: 429258 - DNA, 25 bp, Artificial
  probe
  misc_feature (1)..(25): SEQ ID NO: 6082; WAN0249BE; Start 70; Stop 94
aacaaatcacttagagaattccagt

SEQ ID NO: 429259 - DNA, 25 bp, Artificial
  probe
  misc_feature (1)..(25): SEQ ID NO: 6082; WAN0249BE; Start 99; Stop 123
ttctagcactgtttgagacgtttca

SEQ ID NO: 429260 - DNA, 25 bp, Artificial
  probe
  misc_feature (1)..(25): SEQ ID NO: 6082; WAN0249BE; Start 69; Stop 93
gaacaaatcacttagagaattccag

SEQ ID NO: 429261 - DNA, 25 bp, Artificial
  probe
  misc_feature (1)..(25): SEQ ID NO: 6082; WAN0249BE; Start 73; Stop 97
aaatcacttagagaattccagtcaa

SEQ ID NO: 429262 - DNA, 25 bp, Artificial
  probe
  misc_feature (1)..(25): SEQ ID NO: 6083; WAN024973; Start 60; Stop 84
tgttatgtagtacctaatctaagga

SEQ ID NO: 429263 - DNA, 25 bp, Artificial
  probe
  misc_feature (1)..(25): SEQ ID NO: 6083; WAN024973; Start 59; Stop 83
ttgttatgtagtacctaatctaagg

SEQ ID NO: 429264 - DNA, 25 bp, Artificial
  probe
  misc_feature (1)..(25): SEQ ID NO: 6083; WAN024973; Start 2; Stop 26
attacctgagaagaaagttgcaatg

SEQ ID NO: 429265 - DNA, 25 bp, Artificial
  probe
  misc_feature (1)..(25): SEQ ID NO: 6083; WAN024973; Start 1; Stop 25
cattacctgagaagaaagttgcaat

SEQ ID NO: 429266 - DNA, 25 bp, Artificial
  probe
  misc_feature (1)..(25): SEQ ID NO: 6083; WAN024973; Start 8; Stop 32
tgagaagaaagttgcaatgttgttt

SEQ ID NO: 429267 - DNA, 25 bp, Artificial
  probe
  misc_feature (1)..(25): SEQ ID NO: 6083; WAN024973; Start 7; Stop 31
ctgagaagaaagttgcaatgttgtt

SEQ ID NO: 429268 - DNA, 25 bp, Artificial
  probe
  misc_feature (1)..(25): SEQ ID NO: 6083; WAN024973; Start 4; Stop 28
tacctgagaagaaagttgcaatgtt

SEQ ID NO: 429269 - DNA, 25 bp, Artificial
  probe
  misc_feature (1)..(25): SEQ ID NO: 6083; WAN024973; Start 3; Stop 27
ttacctgagaagaaagttgcaatgt

SEQ ID NO: 429270 - DNA, 25 bp, Artificial
  probe
  misc_feature (1)..(25): SEQ ID NO: 6083; WAN024973; Start 31; Stop 55
ttttggtgcgggtttgaatttaaaa

SEQ ID NO: 429271 - DNA, 25 bp, Artificial
  probe
  misc_feature (1)..(25): SEQ ID NO: 6083; WAN024973; Start 61; Stop 85
gttatgtagtacctaatctaaggaa

SEQ ID NO: 429272 - DNA, 25 bp, Artificial
  probe
  misc_feature (1)..(25): SEQ ID NO: 6083; WAN024973; Start 6; Stop 30
cctgagaagaaagttgcaatgttgt

SEQ ID NO: 429273 - DNA, 25 bp, Artificial
  probe
  misc_feature (1)..(25): SEQ ID NO: 6083; WAN024973; Start 5; Stop 29
acctgagaagaaagttgcaatgttg

SEQ ID NO: 429274 - DNA, 25 bp, Artificial
  probe
  misc_feature (1)..(25): SEQ ID NO: 6083; WAN024973; Start 9; Stop 33
gagaagaaagttgcaatgttgtttt

SEQ ID NO: 429275 - DNA, 25 bp, Artificial
  probe
  misc_feature (1)..(25): SEQ ID NO: 6084; WAN0249AS; Start 8; Stop 32
aggtggctataattgatttagactt

SEQ ID NO: 429276 - DNA, 25 bp, Artificial
  probe
  misc_feature (1)..(25): SEQ ID NO: 6084; WAN0249AS; Start 9; Stop 33
ggtggctataattgatttagacttt

SEQ ID NO: 429277 - DNA, 25 bp, Artificial
  probe
  misc_feature (1)..(25): SEQ ID NO: 6084; WAN0249AS; Start 7; Stop 31
taggtggctataattgatttagact

SEQ ID NO: 429278 - DNA, 25 bp, Artificial
  probe
  misc_feature (1)..(25): SEQ ID NO: 6084; WAN0249AS; Start 1; Stop 25
ccctattaggtggctataattgatt

SEQ ID NO: 429279 - DNA, 25 bp, Artificial
  probe
  misc_feature (1)..(25): SEQ ID NO: 6084; WAN0249AS; Start 6; Stop 30
ttaggtggctataattgatttagac

SEQ ID NO: 429280 - DNA, 25 bp, Artificial
  probe
  misc_feature (1)..(25): SEQ ID NO: 6084; WAN0249AS; Start 10; Stop 34
gtggctataattgatttagactttc

SEQ ID NO: 429281 - DNA, 25 bp, Artificial
  probe
  misc_feature (1)..(25): SEQ ID NO: 6084; WAN0249AS; Start 11; Stop 35
tggctataattgatttagactttct

SEQ ID NO: 429282 - DNA, 25 bp, Artificial
  probe
  misc_feature (1)..(25): SEQ ID NO: 6084; WAN0249AS; Start 2; Stop 26
cctattaggtggctataattgattt

SEQ ID NO: 429283 - DNA, 25 bp, Artificial
  probe
  misc_feature (1)..(25): SEQ ID NO: 6084; WAN0249AS; Start 5; Stop 29
attaggtggctataattgatttaga

SEQ ID NO: 429284 - DNA, 25 bp, Artificial
  probe
  misc_feature (1)..(25): SEQ ID NO: 6085; WAN0249AM; Start 91; Stop 115
ggtatcctatcctgcacgactaatt

SEQ ID NO: 429285 - DNA, 25 bp, Artificial
  probe
  misc_feature (1)..(25): SEQ ID NO: 6085; WAN0249AM; Start 81; Stop 105
gtttatgaagggtatcctatcctgc

SEQ ID NO: 429286 - DNA, 25 bp, Artificial
  probe
  misc_feature (1)..(25): SEQ ID NO: 6085; WAN0249AM; Start 164; Stop 188
gcatttaacgatagtatgtttgtca

SEQ ID NO: 429287 - DNA, 25 bp, Artificial
  probe
  misc_feature (1)..(25): SEQ ID NO: 6085; WAN0249AM; Start 162; Stop 186
cagcatttaacgatagtatgtttgt

SEQ ID NO: 429288 - DNA, 25 bp, Artificial
  probe
  misc_feature (1)..(25): SEQ ID NO: 6085; WAN0249AM; Start 80; Stop 104
agtttatgaagggtatcctatcctg

SEQ ID NO: 429289 - DNA, 25 bp, Artificial
  probe
  misc_feature (1)..(25): SEQ ID NO: 6085; WAN0249AM; Start 163; Stop 187
agcatttaacgatagtatgtttgtc

SEQ ID NO: 429290 - DNA, 25 bp, Artificial
  probe
  misc_feature (1)..(25): SEQ ID NO: 6085; WAN0249AM; Start 161; Stop 185
tcagcatttaacgatagtatgtttg

SEQ ID NO: 429291 - DNA, 25 bp, Artificial
  probe
  misc_feature (1)..(25): SEQ ID NO: 6085; WAN0249AM; Start 92; Stop 116
gtatcctatcctgcacgactaattt

SEQ ID NO: 429292 - DNA, 25 bp, Artificial
  probe
  misc_feature (1)..(25): SEQ ID NO: 6085; WAN0249AM; Start 79; Stop 103
aagtttatgaagggtatcctatcct

SEQ ID NO: 429293 - DNA, 25 bp, Artificial
  probe
  misc_feature (1)..(25): SEQ ID NO: 6085; WAN0249AM; Start 160; Stop 184
atcagcatttaacgatagtatgttt

SEQ ID NO: 429294 - DNA, 25 bp, Artificial
  probe
  misc_feature (1)..(25): SEQ ID NO: 6085; WAN0249AM; Start 159; Stop 183
aatcagcatttaacgatagtatgtt

SEQ ID NO: 429295 - DNA, 25 bp, Artificial
  probe
  misc_feature (1)..(25): SEQ ID NO: 6085; WAN0249AM; Start 82; Stop 106
tttatgaagggtatcctatcctgca

SEQ ID NO: 429296 - DNA, 25 bp, Artificial
  probe
  misc_feature (1)..(25): SEQ ID NO: 6085; WAN0249AM; Start 158; Stop 182
aaatcagcatttaacgatagtatgt

SEQ ID NO: 429297 - DNA, 25 bp, Artificial
  probe
  misc_feature (1)..(25): SEQ ID NO: 6085; WAN0249AM; Start 78; Stop 102
taagtttatgaagggtatcctatcc

SEQ ID NO: 429298 - DNA, 25 bp, Artificial
  probe
  misc_feature (1)..(25): SEQ ID NO: 6085; WAN0249AM; Start 83; Stop 107
ttatgaagggtatcctatcctgcac

SEQ ID NO: 429299 - DNA, 25 bp, Artificial
  probe
  misc_feature (1)..(25): SEQ ID NO: 6085; WAN0249AM; Start 90; Stop 114
gggtatcctatcctgcacgactaat

SEQ ID NO: 429300 - DNA, 25 bp, Artificial
  probe
  misc_feature (1)..(25): SEQ ID NO: 6085; WAN0249AM; Start 93; Stop 117
tatcctatcctgcacgactaatttt

SEQ ID NO: 429301 - DNA, 25 bp, Artificial
  probe
  misc_feature (1)..(25): SEQ ID NO: 6085; WAN0249AM; Start 165; Stop 189
catttaacgatagtatgtttgtcat

SEQ ID NO: 429302 - DNA, 25 bp, Artificial
  probe
  misc_feature (1)..(25): SEQ ID NO: 6085; WAN0249AM; Start 94; Stop 118
atcctatcctgcacgactaattttg

SEQ ID NO: 429303 - DNA, 25 bp, Artificial
  probe
  misc_feature (1)..(25): SEQ ID NO: 6085; WAN0249AM; Start 98; Stop 122
tatcctgcacgactaattttgagtt

SEQ ID NO: 429304 - DNA, 25 bp, Artificial
  probe
  misc_feature (1)..(25): SEQ ID NO: 6085; WAN0249AM; Start 96; Stop 120
cctatcctgcacgactaattttgag

SEQ ID NO: 429305 - DNA, 25 bp, Artificial
  probe
  misc_feature (1)..(25): SEQ ID NO: 6085; WAN0249AM; Start 97; Stop 121
ctatcctgcacgactaattttgagt

SEQ ID NO: 429306 - DNA, 25 bp, Artificial
  probe
  misc_feature (1)..(25): SEQ ID NO: 6085; WAN0249AM; Start 95; Stop 119
tcctatcctgcacgactaattttga

SEQ ID NO: 429307 - DNA, 25 bp, Artificial
  probe
  misc_feature (1)..(25): SEQ ID NO: 6085; WAN0249AM; Start 84; Stop 108
tatgaagggtatcctatcctgcacg

SEQ ID NO: 429308 - DNA, 25 bp, Artificial
  probe
  misc_feature (1)..(25): SEQ ID NO: 6085; WAN0249AM; Start 99; Stop 123
atcctgcacgactaattttgagttc

SEQ ID NO: 429309 - DNA, 25 bp, Artificial
  probe
  misc_feature (1)..(25): SEQ ID NO: 6085; WAN0249AM; Start 142; Stop 166
actcaaaatttcgattaaatcagca

SEQ ID NO: 429310 - DNA, 25 bp, Artificial
  probe
  misc_feature (1)..(25): SEQ ID NO: 6085; WAN0249AM; Start 77; Stop 101
ataagtttatgaagggtatcctatc

SEQ ID NO: 429311 - DNA, 25 bp, Artificial
  probe
  misc_feature (1)..(25): SEQ ID NO: 6085; WAN0249AM; Start 89; Stop 113
agggtatcctatcctgcacgactaa

SEQ ID NO: 429312 - DNA, 25 bp, Artificial
  probe
  misc_feature (1)..(25): SEQ ID NO: 6085; WAN0249AM; Start 88; Stop 112
aagggtatcctatcctgcacgacta

SEQ ID NO: 429313 - DNA, 25 bp, Artificial
  probe
  misc_feature (1)..(25): SEQ ID NO: 6085; WAN0249AM; Start 141; Stop 165
aactcaaaatttcgattaaatcagc

SEQ ID NO: 429314 - DNA, 25 bp, Artificial
  probe
  misc_feature (1)..(25): SEQ ID NO: 6085; WAN0249AM; Start 143; Stop 167
ctcaaaatttcgattaaatcagcat

SEQ ID NO: 429315 - DNA, 25 bp, Artificial
  probe
  misc_feature (1)..(25): SEQ ID NO: 6085; WAN0249AM; Start 157; Stop 181
taaatcagcatttaacgatagtatg

SEQ ID NO: 429316 - DNA, 25 bp, Artificial
  probe
  misc_feature (1)..(25): SEQ ID NO: 6085; WAN0249AM; Start 150; Stop 174
tttcgattaaatcagcatttaacga

SEQ ID NO: 429317 - DNA, 25 bp, Artificial
  probe
  misc_feature (1)..(25): SEQ ID NO: 6086; WAN0249A5; Start 46; Stop 70
ttcgcttagccttctagtctgattt

SEQ ID NO: 429318 - DNA, 25 bp, Artificial
  probe
  misc_feature (1)..(25): SEQ ID NO: 6086; WAN0249A5; Start 45; Stop 69
tttcgcttagccttctagtctgatt

SEQ ID NO: 429319 - DNA, 25 bp, Artificial
  probe
  misc_feature (1)..(25): SEQ ID NO: 6086; WAN0249A5; Start 50; Stop 74
cttagccttctagtctgatttcgat

SEQ ID NO: 429320 - DNA, 25 bp, Artificial
  probe
  misc_feature (1)..(25): SEQ ID NO: 6086; WAN0249A5; Start 52; Stop 76
tagccttctagtctgatttcgattt

SEQ ID NO: 429321 - DNA, 25 bp, Artificial
  probe
  misc_feature (1)..(25): SEQ ID NO: 6086; WAN0249A5; Start 51; Stop 75
ttagccttctagtctgatttcgatt

SEQ ID NO: 429322 - DNA, 25 bp, Artificial
  probe
  misc_feature (1)..(25): SEQ ID NO: 6086; WAN0249A5; Start 44; Stop 68
ctttcgcttagccttctagtctgat

SEQ ID NO: 429323 - DNA, 25 bp, Artificial
  probe
  misc_feature (1)..(25): SEQ ID NO: 6086; WAN0249A5; Start 47; Stop 71
tcgcttagccttctagtctgatttc

SEQ ID NO: 429324 - DNA, 25 bp, Artificial
  probe
  misc_feature (1)..(25): SEQ ID NO: 6086; WAN0249A5; Start 30; Stop 54
taactcaagttatgctttcgcttag

SEQ ID NO: 429325 - DNA, 25 bp, Artificial
  probe
  misc_feature (1)..(25): SEQ ID NO: 6086; WAN0249A5; Start 29; Stop 53
ctaactcaagttatgctttcgctta

SEQ ID NO: 429326 - DNA, 25 bp, Artificial
  probe
  misc_feature (1)..(25): SEQ ID NO: 6086; WAN0249A5; Start 19; Stop 43
actatgggagctaactcaagttatg

SEQ ID NO: 429327 - DNA, 25 bp, Artificial
  probe
  misc_feature (1)..(25): SEQ ID NO: 6086; WAN0249A5; Start 49; Stop 73
gcttagccttctagtctgatttcga

SEQ ID NO: 429328 - DNA, 25 bp, Artificial
  probe
  misc_feature (1)..(25): SEQ ID NO: 6086; WAN0249A5; Start 20; Stop 44
ctatgggagctaactcaagttatgc

SEQ ID NO: 429329 - DNA, 25 bp, Artificial
  probe
  misc_feature (1)..(25): SEQ ID NO: 6086; WAN0249A5; Start 48; Stop 72
cgcttagccttctagtctgatttcg

SEQ ID NO: 429330 - DNA, 25 bp, Artificial
  probe
  misc_feature (1)..(25): SEQ ID NO: 6086; WAN0249A5; Start 38; Stop 62
gttatgctttcgcttagccttctag

SEQ ID NO: 429331 - DNA, 25 bp, Artificial
  probe
  misc_feature (1)..(25): SEQ ID NO: 6086; WAN0249A5; Start 28; Stop 52
gctaactcaagttatgctttcgctt

SEQ ID NO: 429332 - DNA, 25 bp, Artificial
  probe
  misc_feature (1)..(25): SEQ ID NO: 6086; WAN0249A5; Start 39; Stop 63
ttatgctttcgcttagccttctagt

SEQ ID NO: 429333 - DNA, 25 bp, Artificial
  probe
  misc_feature (1)..(25): SEQ ID NO: 6086; WAN0249A5; Start 37; Stop 61
agttatgctttcgcttagccttcta

SEQ ID NO: 429334 - DNA, 25 bp, Artificial
  probe
  misc_feature (1)..(25): SEQ ID NO: 6086; WAN0249A5; Start 31; Stop 55
aactcaagttatgctttcgcttagc

SEQ ID NO: 429335 - DNA, 25 bp, Artificial
  probe
  misc_feature (1)..(25): SEQ ID NO: 6086; WAN0249A5; Start 21; Stop 45
tatgggagctaactcaagttatgct

SEQ ID NO: 429336 - DNA, 25 bp, Artificial
  probe
  misc_feature (1)..(25): SEQ ID NO: 6086; WAN0249A5; Start 40; Stop 64
tatgctttcgcttagccttctagtc

SEQ ID NO: 429337 - DNA, 25 bp, Artificial
  probe
  misc_feature (1)..(25): SEQ ID NO: 6086; WAN0249A5; Start 17; Stop 41
gaactatgggagctaactcaagtta

SEQ ID NO: 429338 - DNA, 25 bp, Artificial
  probe
  misc_feature (1)..(25): SEQ ID NO: 6086; WAN0249A5; Start 18; Stop 42
aactatgggagctaactcaagttat

SEQ ID NO: 429339 - DNA, 25 bp, Artificial
  probe
  misc_feature (1)..(25): SEQ ID NO: 6086; WAN0249A5; Start 24; Stop 48
gggagctaactcaagttatgctttc

SEQ ID NO: 429340 - DNA, 25 bp, Artificial
  probe
  misc_feature (1)..(25): SEQ ID NO: 6086; WAN0249A5; Start 53; Stop 77
agccttctagtctgatttcgatttt

SEQ ID NO: 429341 - DNA, 25 bp, Artificial
  probe
  misc_feature (1)..(25): SEQ ID NO: 6086; WAN0249A5; Start 35; Stop 59
caagttatgctttcgcttagccttc

SEQ ID NO: 429342 - DNA, 25 bp, Artificial
  probe
  misc_feature (1)..(25): SEQ ID NO: 6086; WAN0249A5; Start 36; Stop 60
aagttatgctttcgcttagccttct

SEQ ID NO: 429343 - DNA, 25 bp, Artificial
  probe
  misc_feature (1)..(25): SEQ ID NO: 6086; WAN0249A5; Start 25; Stop 49
ggagctaactcaagttatgctttcg

SEQ ID NO: 429344 - DNA, 25 bp, Artificial
  probe
  misc_feature (1)..(25): SEQ ID NO: 6086; WAN0249A5; Start 22; Stop 46
atgggagctaactcaagttatgctt

SEQ ID NO: 429345 - DNA, 25 bp, Artificial
  probe
  misc_feature (1)..(25): SEQ ID NO: 6086; WAN0249A5; Start 23; Stop 47
tgggagctaactcaagttatgcttt

SEQ ID NO: 429346 - DNA, 25 bp, Artificial
  probe
  misc_feature (1)..(25): SEQ ID NO: 6086; WAN0249A5; Start 34; Stop 58
tcaagttatgctttcgcttagcctt

SEQ ID NO: 429347 - DNA, 25 bp, Artificial
  probe
  misc_feature (1)..(25): SEQ ID NO: 6086; WAN0249A5; Start 26; Stop 50
gagctaactcaagttatgctttcgc

SEQ ID NO: 429348 - DNA, 25 bp, Artificial
  probe
  misc_feature (1)..(25): SEQ ID NO: 6086; WAN0249A5; Start 16; Stop 40
cgaactatgggagctaactcaagtt

SEQ ID NO: 429349 - DNA, 25 bp, Artificial
  probe
  misc_feature (1)..(25): SEQ ID NO: 6086; WAN0249A5; Start 33; Stop 57
ctcaagttatgctttcgcttagcct

SEQ ID NO: 429350 - DNA, 25 bp, Artificial
  probe
  misc_feature (1)..(25): SEQ ID NO: 6087; WAN02497F; Start 70; Stop 94
cttctttgattaagcgagtgttcta

SEQ ID NO: 429351 - DNA, 25 bp, Artificial
  probe
  misc_feature (1)..(25): SEQ ID NO: 6087; WAN02497F; Start 71; Stop 95
ttctttgattaagcgagtgttctaa

SEQ ID NO: 429352 - DNA, 25 bp, Artificial
  probe
  misc_feature (1)..(25): SEQ ID NO: 6087; WAN02497F; Start 69; Stop 93
acttctttgattaagcgagtgttct

SEQ ID NO: 429353 - DNA, 25 bp, Artificial
  probe
  misc_feature (1)..(25): SEQ ID NO: 6087; WAN02497F; Start 72; Stop 96
tctttgattaagcgagtgttctaat

SEQ ID NO: 429354 - DNA, 25 bp, Artificial
  probe
  misc_feature (1)..(25): SEQ ID NO: 6087; WAN02497F; Start 42; Stop 66
aatcgtcaggtcaagtacaacaaag

SEQ ID NO: 429355 - DNA, 25 bp, Artificial
  probe
  misc_feature (1)..(25): SEQ ID NO: 6087; WAN02497F; Start 64; Stop 88
aagtcacttctttgattaagcgagt

SEQ ID NO: 429356 - DNA, 25 bp, Artificial
  probe
  misc_feature (1)..(25): SEQ ID NO: 6087; WAN02497F; Start 40; Stop 64
ccaatcgtcaggtcaagtacaacaa

SEQ ID NO: 429357 - DNA, 25 bp, Artificial
  probe
  misc_feature (1)..(25): SEQ ID NO: 6087; WAN02497F; Start 41; Stop 65
caatcgtcaggtcaagtacaacaaa

SEQ ID NO: 429358 - DNA, 25 bp, Artificial
  probe
  misc_feature (1)..(25): SEQ ID NO: 6087; WAN02497F; Start 46; Stop 70
gtcaggtcaagtacaacaaagtcac

SEQ ID NO: 429359 - DNA, 25 bp, Artificial
  probe
  misc_feature (1)..(25): SEQ ID NO: 6087; WAN02497F; Start 47; Stop 71
tcaggtcaagtacaacaaagtcact

SEQ ID NO: 429360 - DNA, 25 bp, Artificial
  probe
  misc_feature (1)..(25): SEQ ID NO: 6087; WAN02497F; Start 43; Stop 67
atcgtcaggtcaagtacaacaaagt

SEQ ID NO: 429361 - DNA, 25 bp, Artificial
  probe
  misc_feature (1)..(25): SEQ ID NO: 6087; WAN02497F; Start 73; Stop 97
ctttgattaagcgagtgttctaata

SEQ ID NO: 429362 - DNA, 25 bp, Artificial
  probe
  misc_feature (1)..(25): SEQ ID NO: 6087; WAN02497F; Start 63; Stop 87
aaagtcacttctttgattaagcgag

SEQ ID NO: 429363 - DNA, 25 bp, Artificial
  probe
  misc_feature (1)..(25): SEQ ID NO: 6087; WAN02497F; Start 76; Stop 100
tgattaagcgagtgttctaatataa

SEQ ID NO: 429364 - DNA, 25 bp, Artificial
  probe
  misc_feature (1)..(25): SEQ ID NO: 6087; WAN02497F; Start 75; Stop 99
ttgattaagcgagtgttctaatata

SEQ ID NO: 429365 - DNA, 25 bp, Artificial
  probe
  misc_feature (1)..(25): SEQ ID NO: 6087; WAN02497F; Start 44; Stop 68
tcgtcaggtcaagtacaacaaagtc

SEQ ID NO: 429366 - DNA, 25 bp, Artificial
  probe
  misc_feature (1)..(25): SEQ ID NO: 6087; WAN02497F; Start 45; Stop 69
cgtcaggtcaagtacaacaaagtca

SEQ ID NO: 429367 - DNA, 25 bp, Artificial
  probe
  misc_feature (1)..(25): SEQ ID NO: 6087; WAN02497F; Start 74; Stop 98
tttgattaagcgagtgttctaatat

SEQ ID NO: 429368 - DNA, 25 bp, Artificial
  probe
  misc_feature (1)..(25): SEQ ID NO: 6087; WAN02497F; Start 51; Stop 75
gtcaagtacaacaaagtcacttctt

SEQ ID NO: 429369 - DNA, 25 bp, Artificial
  probe
  misc_feature (1)..(25): SEQ ID NO: 6087; WAN02497F; Start 52; Stop 76
tcaagtacaacaaagtcacttcttt

SEQ ID NO: 429370 - DNA, 25 bp, Artificial
  probe
  misc_feature (1)..(25): SEQ ID NO: 6087; WAN02497F; Start 50; Stop 74
ggtcaagtacaacaaagtcacttct

SEQ ID NO: 429371 - DNA, 25 bp, Artificial
  probe
  misc_feature (1)..(25): SEQ ID NO: 6087; WAN02497F; Start 49; Stop 73
aggtcaagtacaacaaagtcacttc

SEQ ID NO: 429372 - DNA, 25 bp, Artificial
  probe
  misc_feature (1)..(25): SEQ ID NO: 6087; WAN02497F; Start 48; Stop 72
caggtcaagtacaacaaagtcactt

SEQ ID NO: 429373 - DNA, 25 bp, Artificial
  probe
  misc_feature (1)..(25): SEQ ID NO: 6087; WAN02497F; Start 20; Stop 44
ttcacatgcttttaatctccccaat

SEQ ID NO: 429374 - DNA, 25 bp, Artificial
  probe
  misc_feature (1)..(25): SEQ ID NO: 6087; WAN02497F; Start 18; Stop 42
atttcacatgcttttaatctcccca

SEQ ID NO: 429375 - DNA, 25 bp, Artificial
  probe
  misc_feature (1)..(25): SEQ ID NO: 6087; WAN02497F; Start 19; Stop 43
tttcacatgcttttaatctccccaa

SEQ ID NO: 429376 - DNA, 25 bp, Artificial
  probe
  misc_feature (1)..(25): SEQ ID NO: 6087; WAN02497F; Start 21; Stop 45
tcacatgcttttaatctccccaatc

SEQ ID NO: 429377 - DNA, 25 bp, Artificial
  probe
  misc_feature (1)..(25): SEQ ID NO: 6087; WAN02497F; Start 29; Stop 53
ttttaatctccccaatcgtcaggtc

SEQ ID NO: 429378 - DNA, 25 bp, Artificial
  probe
  misc_feature (1)..(25): SEQ ID NO: 6087; WAN02497F; Start 28; Stop 52
cttttaatctccccaatcgtcaggt

SEQ ID NO: 429379 - DNA, 25 bp, Artificial
  probe
  misc_feature (1)..(25): SEQ ID NO: 6087; WAN02497F; Start 25; Stop 49
atgcttttaatctccccaatcgtca

SEQ ID NO: 429380 - DNA, 25 bp, Artificial
  probe
  misc_feature (1)..(25): SEQ ID NO: 6087; WAN02497F; Start 24; Stop 48
catgcttttaatctccccaatcgtc

SEQ ID NO: 429381 - DNA, 25 bp, Artificial
  probe
  misc_feature (1)..(25): SEQ ID NO: 6087; WAN02497F; Start 17; Stop 41
gatttcacatgcttttaatctcccc

SEQ ID NO: 429382 - DNA, 25 bp, Artificial
  probe
  misc_feature (1)..(25): SEQ ID NO: 6087; WAN02497F; Start 22; Stop 46
cacatgcttttaatctccccaatcg

SEQ ID NO: 429383 - DNA, 25 bp, Artificial
  probe
  misc_feature (1)..(25): SEQ ID NO: 6088; WAN0249AW; Start 21; Stop 45
ttactgcaatacttacttaatcaca

SEQ ID NO: 429384 - DNA, 25 bp, Artificial
  probe
  misc_feature (1)..(25): SEQ ID NO: 6088; WAN0249AW; Start 23; Stop 47
actgcaatacttacttaatcacata

SEQ ID NO: 429385 - DNA, 25 bp, Artificial
  probe
  misc_feature (1)..(25): SEQ ID NO: 6088; WAN0249AW; Start 22; Stop 46
tactgcaatacttacttaatcacat

SEQ ID NO: 429386 - DNA, 25 bp, Artificial
  probe
  misc_feature (1)..(25): SEQ ID NO: 6088; WAN0249AW; Start 24; Stop 48
ctgcaatacttacttaatcacataa

SEQ ID NO: 429387 - DNA, 25 bp, Artificial
  probe
  misc_feature (1)..(25): SEQ ID NO: 6088; WAN0249AW; Start 20; Stop 44
attactgcaatacttacttaatcac

SEQ ID NO: 429388 - DNA, 25 bp, Artificial
  probe
  misc_feature (1)..(25): SEQ ID NO: 6089; WAN0249B5; Start 64; Stop 88
agatactctaaagacttaggtgtac

SEQ ID NO: 429389 - DNA, 25 bp, Artificial
  probe
  misc_feature (1)..(25): SEQ ID NO: 6089; WAN0249B5; Start 63; Stop 87
tagatactctaaagacttaggtgta

SEQ ID NO: 429390 - DNA, 25 bp, Artificial
  probe
  misc_feature (1)..(25): SEQ ID NO: 6089; WAN0249B5; Start 65; Stop 89
gatactctaaagacttaggtgtaca

SEQ ID NO: 429391 - DNA, 25 bp, Artificial
  probe
  misc_feature (1)..(25): SEQ ID NO: 6089; WAN0249B5; Start 62; Stop 86
ttagatactctaaagacttaggtgt

SEQ ID NO: 429392 - DNA, 25 bp, Artificial
  probe
  misc_feature (1)..(25): SEQ ID NO: 6089; WAN0249B5; Start 1; Stop 25
cgtatgttaaactttctacgttatt

SEQ ID NO: 429393 - DNA, 25 bp, Artificial
  probe
  misc_feature (1)..(25): SEQ ID NO: 6090; WAN024983; Start 6; Stop 30
cctcctgatatttcaaacgacacta

SEQ ID NO: 429394 - DNA, 25 bp, Artificial
  probe
  misc_feature (1)..(25): SEQ ID NO: 6090; WAN024983; Start 3; Stop 27
tttcctcctgatatttcaaacgaca

SEQ ID NO: 429395 - DNA, 25 bp, Artificial
  probe
  misc_feature (1)..(25): SEQ ID NO: 6090; WAN024983; Start 9; Stop 33
cctgatatttcaaacgacactatga

SEQ ID NO: 429396 - DNA, 25 bp, Artificial
  probe
  misc_feature (1)..(25): SEQ ID NO: 6090; WAN024983; Start 8; Stop 32
tcctgatatttcaaacgacactatg

SEQ ID NO: 429397 - DNA, 25 bp, Artificial
  probe
  misc_feature (1)..(25): SEQ ID NO: 6090; WAN024983; Start 4; Stop 28
ttcctcctgatatttcaaacgacac

SEQ ID NO: 429398 - DNA, 25 bp, Artificial
  probe
  misc_feature (1)..(25): SEQ ID NO: 6090; WAN024983; Start 7; Stop 31
ctcctgatatttcaaacgacactat

SEQ ID NO: 429399 - DNA, 25 bp, Artificial
  probe
  misc_feature (1)..(25): SEQ ID NO: 6090; WAN024983; Start 5; Stop 29
tcctcctgatatttcaaacgacact

SEQ ID NO: 429400 - DNA, 25 bp, Artificial
  probe
  misc_feature (1)..(25): SEQ ID NO: 6090; WAN024983; Start 18; Stop 42
tcaaacgacactatgatactacttt

SEQ ID NO: 429401 - DNA, 25 bp, Artificial
  probe
  misc_feature (1)..(25): SEQ ID NO: 6090; WAN024983; Start 17; Stop 41
ttcaaacgacactatgatactactt

SEQ ID NO: 429402 - DNA, 25 bp, Artificial
  probe
  misc_feature (1)..(25): SEQ ID NO: 6090; WAN024983; Start 16; Stop 40
tttcaaacgacactatgatactact

SEQ ID NO: 429403 - DNA, 25 bp, Artificial
  probe
  misc_feature (1)..(25): SEQ ID NO: 6090; WAN024983; Start 43; Stop 67
ttataggactgatgcaaggagaaag

SEQ ID NO: 429404 - DNA, 25 bp, Artificial
  probe
  misc_feature (1)..(25): SEQ ID NO: 6090; WAN024983; Start 42; Stop 66
tttataggactgatgcaaggagaaa

SEQ ID NO: 429405 - DNA, 25 bp, Artificial
  probe
  misc_feature (1)..(25): SEQ ID NO: 6090; WAN024983; Start 10; Stop 34
ctgatatttcaaacgacactatgat

SEQ ID NO: 429406 - DNA, 25 bp, Artificial
  probe
  misc_feature (1)..(25): SEQ ID NO: 6090; WAN024983; Start 2; Stop 26
gtttcctcctgatatttcaaacgac

SEQ ID NO: 429407 - DNA, 25 bp, Artificial
  probe
  misc_feature (1)..(25): SEQ ID NO: 6090; WAN024983; Start 15; Stop 39
atttcaaacgacactatgatactac

SEQ ID NO: 429408 - DNA, 25 bp, Artificial
  probe
  misc_feature (1)..(25): SEQ ID NO: 6090; WAN024983; Start 44; Stop 68
tataggactgatgcaaggagaaagc

SEQ ID NO: 429409 - DNA, 25 bp, Artificial
  probe
  misc_feature (1)..(25): SEQ ID NO: 6090; WAN024983; Start 13; Stop 37
atatttcaaacgacactatgatact

SEQ ID NO: 429410 - DNA, 25 bp, Artificial
  probe
  misc_feature (1)..(25): SEQ ID NO: 6090; WAN024983; Start 11; Stop 35
tgatatttcaaacgacactatgata

SEQ ID NO: 429411 - DNA, 25 bp, Artificial
  probe
  misc_feature (1)..(25): SEQ ID NO: 6090; WAN024983; Start 12; Stop 36
gatatttcaaacgacactatgatac

SEQ ID NO: 429412 - DNA, 25 bp, Artificial
  probe
  misc_feature (1)..(25): SEQ ID NO: 6090; WAN024983; Start 41; Stop 65
ttttataggactgatgcaaggagaa

SEQ ID NO: 429413 - DNA, 25 bp, Artificial
  probe
  misc_feature (1)..(25): SEQ ID NO: 6090; WAN024983; Start 19; Stop 43
caaacgacactatgatactactttt

SEQ ID NO: 429414 - DNA, 25 bp, Artificial
  probe
  misc_feature (1)..(25): SEQ ID NO: 6090; WAN024983; Start 45; Stop 69
ataggactgatgcaaggagaaagct

SEQ ID NO: 429415 - DNA, 25 bp, Artificial
  probe
  misc_feature (1)..(25): SEQ ID NO: 6090; WAN024983; Start 14; Stop 38
tatttcaaacgacactatgatacta

SEQ ID NO: 429416 - DNA, 25 bp, Artificial
  probe
  misc_feature (1)..(25): SEQ ID NO: 6090; WAN024983; Start 46; Stop 70
taggactgatgcaaggagaaagctc

SEQ ID NO: 429417 - DNA, 25 bp, Artificial
  probe
  misc_feature (1)..(25): SEQ ID NO: 6091; WAN024979; Start 111; Stop 135
gtcactaccgtccgtcattacttag

SEQ ID NO: 429418 - DNA, 25 bp, Artificial
  probe
  misc_feature (1)..(25): SEQ ID NO: 6091; WAN024979; Start 112; Stop 136
tcactaccgtccgtcattacttagg

SEQ ID NO: 429419 - DNA, 25 bp, Artificial
  probe
  misc_feature (1)..(25): SEQ ID NO: 6091; WAN024979; Start 74; Stop 98
cttaggttcaaagtttaggtatgga

SEQ ID NO: 429420 - DNA, 25 bp, Artificial
  probe
  misc_feature (1)..(25): SEQ ID NO: 6091; WAN024979; Start 114; Stop 138
actaccgtccgtcattacttaggaa

SEQ ID NO: 429421 - DNA, 25 bp, Artificial
  probe
  misc_feature (1)..(25): SEQ ID NO: 6091; WAN024979; Start 75; Stop 99
ttaggttcaaagtttaggtatggaa

SEQ ID NO: 429422 - DNA, 25 bp, Artificial
  probe
  misc_feature (1)..(25): SEQ ID NO: 6091; WAN024979; Start 2; Stop 26
taaatcgaagactttctgccgtaat

SEQ ID NO: 429423 - DNA, 25 bp, Artificial
  probe
  misc_feature (1)..(25): SEQ ID NO: 6091; WAN024979; Start 1; Stop 25
ctaaatcgaagactttctgccgtaa

SEQ ID NO: 429424 - DNA, 25 bp, Artificial
  probe
  misc_feature (1)..(25): SEQ ID NO: 6091; WAN024979; Start 113; Stop 137
cactaccgtccgtcattacttagga

SEQ ID NO: 429425 - DNA, 25 bp, Artificial
  probe
  misc_feature (1)..(25): SEQ ID NO: 6091; WAN024979; Start 116; Stop 140
taccgtccgtcattacttaggaaag

SEQ ID NO: 429426 - DNA, 25 bp, Artificial
  probe
  misc_feature (1)..(25): SEQ ID NO: 6091; WAN024979; Start 115; Stop 139
ctaccgtccgtcattacttaggaaa

SEQ ID NO: 429427 - DNA, 25 bp, Artificial
  probe
  misc_feature (1)..(25): SEQ ID NO: 6091; WAN024979; Start 3; Stop 27
aaatcgaagactttctgccgtaatg

SEQ ID NO: 429428 - DNA, 25 bp, Artificial
  probe
  misc_feature (1)..(25): SEQ ID NO: 6091; WAN024979; Start 110; Stop 134
ggtcactaccgtccgtcattactta

SEQ ID NO: 429429 - DNA, 25 bp, Artificial
  probe
  misc_feature (1)..(25): SEQ ID NO: 6091; WAN024979; Start 120; Stop 144
gtccgtcattacttaggaaagtctt

SEQ ID NO: 429430 - DNA, 25 bp, Artificial
  probe
  misc_feature (1)..(25): SEQ ID NO: 6091; WAN024979; Start 5; Stop 29
atcgaagactttctgccgtaatgaa

SEQ ID NO: 429431 - DNA, 25 bp, Artificial
  probe
  misc_feature (1)..(25): SEQ ID NO: 6091; WAN024979; Start 4; Stop 28
aatcgaagactttctgccgtaatga

SEQ ID NO: 429432 - DNA, 25 bp, Artificial
  probe
  misc_feature (1)..(25): SEQ ID NO: 6091; WAN024979; Start 121; Stop 145
tccgtcattacttaggaaagtctta

SEQ ID NO: 429433 - DNA, 25 bp, Artificial
  probe
  misc_feature (1)..(25): SEQ ID NO: 6091; WAN024979; Start 73; Stop 97
acttaggttcaaagtttaggtatgg

SEQ ID NO: 429434 - DNA, 25 bp, Artificial
  probe
  misc_feature (1)..(25): SEQ ID NO: 6091; WAN024979; Start 122; Stop 146
ccgtcattacttaggaaagtcttaa

SEQ ID NO: 429435 - DNA, 25 bp, Artificial
  probe
  misc_feature (1)..(25): SEQ ID NO: 6091; WAN024979; Start 77; Stop 101
aggttcaaagtttaggtatggaact

SEQ ID NO: 429436 - DNA, 25 bp, Artificial
  probe
  misc_feature (1)..(25): SEQ ID NO: 6091; WAN024979; Start 119; Stop 143
cgtccgtcattacttaggaaagtct

SEQ ID NO: 429437 - DNA, 25 bp, Artificial
  probe
  misc_feature (1)..(25): SEQ ID NO: 6091; WAN024979; Start 76; Stop 100
taggttcaaagtttaggtatggaac

SEQ ID NO: 429438 - DNA, 25 bp, Artificial
  probe
  misc_feature (1)..(25): SEQ ID NO: 6091; WAN024979; Start 17; Stop 41
ctgccgtaatgaaaacacctgaaac

SEQ ID NO: 429439 - DNA, 25 bp, Artificial
  probe
  misc_feature (1)..(25): SEQ ID NO: 6091; WAN024979; Start 23; Stop 47
taatgaaaacacctgaaacagcttg

SEQ ID NO: 429440 - DNA, 25 bp, Artificial
  probe
  misc_feature (1)..(25): SEQ ID NO: 6091; WAN024979; Start 22; Stop 46
gtaatgaaaacacctgaaacagctt

SEQ ID NO: 429441 - DNA, 25 bp, Artificial
  probe
  misc_feature (1)..(25): SEQ ID NO: 6091; WAN024979; Start 16; Stop 40
tctgccgtaatgaaaacacctgaaa

SEQ ID NO: 429442 - DNA, 25 bp, Artificial
  probe
  misc_feature (1)..(25): SEQ ID NO: 6091; WAN024979; Start 8; Stop 32
gaagactttctgccgtaatgaaaac

SEQ ID NO: 429443 - DNA, 25 bp, Artificial
  probe
  misc_feature (1)..(25): SEQ ID NO: 6091; WAN024979; Start 6; Stop 30
tcgaagactttctgccgtaatgaaa

SEQ ID NO: 429444 - DNA, 25 bp, Artificial
  probe
  misc_feature (1)..(25): SEQ ID NO: 6091; WAN024979; Start 118; Stop 142
ccgtccgtcattacttaggaaagtc

SEQ ID NO: 429445 - DNA, 25 bp, Artificial
  probe
  misc_feature (1)..(25): SEQ ID NO: 6091; WAN024979; Start 60; Stop 84
cggaaactttaaaacttaggttcaa

SEQ ID NO: 429446 - DNA, 25 bp, Artificial
  probe
  misc_feature (1)..(25): SEQ ID NO: 6091; WAN024979; Start 15; Stop 39
ttctgccgtaatgaaaacacctgaa

SEQ ID NO: 429447 - DNA, 25 bp, Artificial
  probe
  misc_feature (1)..(25): SEQ ID NO: 6091; WAN024979; Start 9; Stop 33
aagactttctgccgtaatgaaaaca

SEQ ID NO: 429448 - DNA, 25 bp, Artificial
  probe
  misc_feature (1)..(25): SEQ ID NO: 6091; WAN024979; Start 123; Stop 147
cgtcattacttaggaaagtcttaaa

SEQ ID NO: 429449 - DNA, 25 bp, Artificial
  probe
  misc_feature (1)..(25): SEQ ID NO: 6091; WAN024979; Start 109; Stop 133
aggtcactaccgtccgtcattactt

SEQ ID NO: 429450 - DNA, 25 bp, Artificial
  probe
  misc_feature (1)..(25): SEQ ID NO: 6092; WAN0249C5; Start 16; Stop 40
agtctgtatggaaatccaatgctaa

SEQ ID NO: 429451 - DNA, 25 bp, Artificial
  probe
  misc_feature (1)..(25): SEQ ID NO: 6092; WAN0249C5; Start 15; Stop 39
gagtctgtatggaaatccaatgcta

SEQ ID NO: 429452 - DNA, 25 bp, Artificial
  probe
  misc_feature (1)..(25): SEQ ID NO: 6092; WAN0249C5; Start 17; Stop 41
gtctgtatggaaatccaatgctaaa

SEQ ID NO: 429453 - DNA, 25 bp, Artificial
  probe
  misc_feature (1)..(25): SEQ ID NO: 6092; WAN0249C5; Start 11; Stop 35
ctgtgagtctgtatggaaatccaat

SEQ ID NO: 429454 - DNA, 25 bp, Artificial
  probe
  misc_feature (1)..(25): SEQ ID NO: 6092; WAN0249C5; Start 4; Stop 28
actaactctgtgagtctgtatggaa

SEQ ID NO: 429455 - DNA, 25 bp, Artificial
  probe
  misc_feature (1)..(25): SEQ ID NO: 6092; WAN0249C5; Start 3; Stop 27
aactaactctgtgagtctgtatgga

SEQ ID NO: 429456 - DNA, 25 bp, Artificial
  probe
  misc_feature (1)..(25): SEQ ID NO: 6092; WAN0249C5; Start 2; Stop 26
taactaactctgtgagtctgtatgg

SEQ ID NO: 429457 - DNA, 25 bp, Artificial
  probe
  misc_feature (1)..(25): SEQ ID NO: 6092; WAN0249C5; Start 12; Stop 36
tgtgagtctgtatggaaatccaatg

SEQ ID NO: 429458 - DNA, 25 bp, Artificial
  probe
  misc_feature (1)..(25): SEQ ID NO: 6092; WAN0249C5; Start 10; Stop 34
tctgtgagtctgtatggaaatccaa

SEQ ID NO: 429459 - DNA, 25 bp, Artificial
  probe
  misc_feature (1)..(25): SEQ ID NO: 6092; WAN0249C5; Start 18; Stop 42
tctgtatggaaatccaatgctaaat

SEQ ID NO: 429460 - DNA, 25 bp, Artificial
  probe
  misc_feature (1)..(25): SEQ ID NO: 6092; WAN0249C5; Start 9; Stop 33
ctctgtgagtctgtatggaaatcca

SEQ ID NO: 429461 - DNA, 25 bp, Artificial
  probe
  misc_feature (1)..(25): SEQ ID NO: 6092; WAN0249C5; Start 1; Stop 25
ctaactaactctgtgagtctgtatg

SEQ ID NO: 429462 - DNA, 25 bp, Artificial
  probe
  misc_feature (1)..(25): SEQ ID NO: 6092; WAN0249C5; Start 13; Stop 37
gtgagtctgtatggaaatccaatgc

SEQ ID NO: 429463 - DNA, 25 bp, Artificial
  probe
  misc_feature (1)..(25): SEQ ID NO: 6092; WAN0249C5; Start 14; Stop 38
tgagtctgtatggaaatccaatgct

SEQ ID NO: 429464 - DNA, 25 bp, Artificial
  probe
  misc_feature (1)..(25): SEQ ID NO: 6092; WAN0249C5; Start 19; Stop 43
ctgtatggaaatccaatgctaaatt

SEQ ID NO: 429465 - DNA, 25 bp, Artificial
  probe
  misc_feature (1)..(25): SEQ ID NO: 6092; WAN0249C5; Start 5; Stop 29
ctaactctgtgagtctgtatggaaa

SEQ ID NO: 429466 - DNA, 25 bp, Artificial
  probe
  misc_feature (1)..(25): SEQ ID NO: 6092; WAN0249C5; Start 7; Stop 31
aactctgtgagtctgtatggaaatc

SEQ ID NO: 429467 - DNA, 25 bp, Artificial
  probe
  misc_feature (1)..(25): SEQ ID NO: 6092; WAN0249C5; Start 20; Stop 44
tgtatggaaatccaatgctaaattt

SEQ ID NO: 429468 - DNA, 25 bp, Artificial
  probe
  misc_feature (1)..(25): SEQ ID NO: 6092; WAN0249C5; Start 6; Stop 30
taactctgtgagtctgtatggaaat

SEQ ID NO: 429469 - DNA, 25 bp, Artificial
  probe
  misc_feature (1)..(25): SEQ ID NO: 6092; WAN0249C5; Start 8; Stop 32
actctgtgagtctgtatggaaatcc

SEQ ID NO: 429470 - DNA, 25 bp, Artificial
  probe
  misc_feature (1)..(25): SEQ ID NO: 6092; WAN0249C5; Start 24; Stop 48
tggaaatccaatgctaaatttatca

SEQ ID NO: 429471 - DNA, 25 bp, Artificial
  probe
  misc_feature (1)..(25): SEQ ID NO: 6092; WAN0249C5; Start 36; Stop 60
gctaaatttatcaagatttccaaca

SEQ ID NO: 429472 - DNA, 25 bp, Artificial
  probe
  misc_feature (1)..(25): SEQ ID NO: 6092; WAN0249C5; Start 35; Stop 59
tgctaaatttatcaagatttccaac

SEQ ID NO: 429473 - DNA, 25 bp, Artificial
  probe
  misc_feature (1)..(25): SEQ ID NO: 6092; WAN0249C5; Start 25; Stop 49
ggaaatccaatgctaaatttatcaa

SEQ ID NO: 429474 - DNA, 25 bp, Artificial
  probe
  misc_feature (1)..(25): SEQ ID NO: 6092; WAN0249C5; Start 23; Stop 47
atggaaatccaatgctaaatttatc

SEQ ID NO: 429475 - DNA, 25 bp, Artificial
  probe
  misc_feature (1)..(25): SEQ ID NO: 6092; WAN0249C5; Start 42; Stop 66
tttatcaagatttccaacaatctca

SEQ ID NO: 429476 - DNA, 25 bp, Artificial
  probe
  misc_feature (1)..(25): SEQ ID NO: 6092; WAN0249C5; Start 43; Stop 67
ttatcaagatttccaacaatctcat

SEQ ID NO: 429477 - DNA, 25 bp, Artificial
  probe
  misc_feature (1)..(25): SEQ ID NO: 6092; WAN0249C5; Start 29; Stop 53
atccaatgctaaatttatcaagatt

SEQ ID NO: 429478 - DNA, 25 bp, Artificial
  probe
  misc_feature (1)..(25): SEQ ID NO: 6092; WAN0249C5; Start 28; Stop 52
aatccaatgctaaatttatcaagat

SEQ ID NO: 429479 - DNA, 25 bp, Artificial
  probe
  misc_feature (1)..(25): SEQ ID NO: 6092; WAN0249C5; Start 21; Stop 45
gtatggaaatccaatgctaaattta

SEQ ID NO: 429480 - DNA, 25 bp, Artificial
  probe
  misc_feature (1)..(25): SEQ ID NO: 6092; WAN0249C5; Start 34; Stop 58
atgctaaatttatcaagatttccaa

SEQ ID NO: 429481 - DNA, 25 bp, Artificial
  probe
  misc_feature (1)..(25): SEQ ID NO: 6092; WAN0249C5; Start 33; Stop 57
aatgctaaatttatcaagatttcca

SEQ ID NO: 429482 - DNA, 25 bp, Artificial
  probe
  misc_feature (1)..(25): SEQ ID NO: 6092; WAN0249C5; Start 30; Stop 54
tccaatgctaaatttatcaagattt

SEQ ID NO: 429483 - DNA, 25 bp, Artificial
  probe
  misc_feature (1)..(25): SEQ ID NO: 6093; WAN0249B3; Start 245; Stop 269
gatgtccagattactactaaccagc

SEQ ID NO: 429484 - DNA, 25 bp, Artificial
  probe
  misc_feature (1)..(25): SEQ ID NO: 6093; WAN0249B3; Start 244; Stop 268
tgatgtccagattactactaaccag

SEQ ID NO: 429485 - DNA, 25 bp, Artificial
  probe
  misc_feature (1)..(25): SEQ ID NO: 6093; WAN0249B3; Start 246; Stop 270
atgtccagattactactaaccagca

SEQ ID NO: 429486 - DNA, 25 bp, Artificial
  probe
  misc_feature (1)..(25): SEQ ID NO: 6093; WAN0249B3; Start 247; Stop 271
tgtccagattactactaaccagcaa

SEQ ID NO: 429487 - DNA, 25 bp, Artificial
  probe
  misc_feature (1)..(25): SEQ ID NO: 6093; WAN0249B3; Start 243; Stop 267
atgatgtccagattactactaacca

SEQ ID NO: 429488 - DNA, 25 bp, Artificial
  probe
  misc_feature (1)..(25): SEQ ID NO: 6093; WAN0249B3; Start 242; Stop 266
aatgatgtccagattactactaacc

SEQ ID NO: 429489 - DNA, 25 bp, Artificial
  probe
  misc_feature (1)..(25): SEQ ID NO: 6093; WAN0249B3; Start 331; Stop 355
gttgaataatagccactccctactt

SEQ ID NO: 429490 - DNA, 25 bp, Artificial
  probe
  misc_feature (1)..(25): SEQ ID NO: 6093; WAN0249B3; Start 248; Stop 272
gtccagattactactaaccagcaaa

SEQ ID NO: 429491 - DNA, 25 bp, Artificial
  probe
  misc_feature (1)..(25): SEQ ID NO: 6093; WAN0249B3; Start 249; Stop 273
tccagattactactaaccagcaaat

SEQ ID NO: 429492 - DNA, 25 bp, Artificial
  probe
  misc_feature (1)..(25): SEQ ID NO: 6093; WAN0249B3; Start 364; Stop 388
aattatccgttgcattaacagatgt

SEQ ID NO: 429493 - DNA, 25 bp, Artificial
  probe
  misc_feature (1)..(25): SEQ ID NO: 6093; WAN0249B3; Start 188; Stop 212
aaatcagcagtaatccagtaacaaa

SEQ ID NO: 429494 - DNA, 25 bp, Artificial
  probe
  misc_feature (1)..(25): SEQ ID NO: 6093; WAN0249B3; Start 332; Stop 356
ttgaataatagccactccctactta

SEQ ID NO: 429495 - DNA, 25 bp, Artificial
  probe
  misc_feature (1)..(25): SEQ ID NO: 6093; WAN0249B3; Start 340; Stop 364
tagccactccctacttatcaataaa

SEQ ID NO: 429496 - DNA, 25 bp, Artificial
  probe
  misc_feature (1)..(25): SEQ ID NO: 6093; WAN0249B3; Start 250; Stop 274
ccagattactactaaccagcaaatt

SEQ ID NO: 429497 - DNA, 25 bp, Artificial
  probe
  misc_feature (1)..(25): SEQ ID NO: 6093; WAN0249B3; Start 338; Stop 362
aatagccactccctacttatcaata

SEQ ID NO: 429498 - DNA, 25 bp, Artificial
  probe
  misc_feature (1)..(25): SEQ ID NO: 6093; WAN0249B3; Start 337; Stop 361
taatagccactccctacttatcaat

SEQ ID NO: 429499 - DNA, 25 bp, Artificial
  probe
  misc_feature (1)..(25): SEQ ID NO: 6093; WAN0249B3; Start 329; Stop 353
aagttgaataatagccactccctac

SEQ ID NO: 429500 - DNA, 25 bp, Artificial
  probe
  misc_feature (1)..(25): SEQ ID NO: 6093; WAN0249B3; Start 366; Stop 390
ttatccgttgcattaacagatgtat

SEQ ID NO: 429501 - DNA, 25 bp, Artificial
  probe
  misc_feature (1)..(25): SEQ ID NO: 6093; WAN0249B3; Start 365; Stop 389
attatccgttgcattaacagatgta

SEQ ID NO: 429502 - DNA, 25 bp, Artificial
  probe
  misc_feature (1)..(25): SEQ ID NO: 6093; WAN0249B3; Start 41; Stop 65
aaatcattcaaagtgtcctaactgg

SEQ ID NO: 429503 - DNA, 25 bp, Artificial
  probe
  misc_feature (1)..(25): SEQ ID NO: 6093; WAN0249B3; Start 339; Stop 363
atagccactccctacttatcaataa

SEQ ID NO: 429504 - DNA, 25 bp, Artificial
  probe
  misc_feature (1)..(25): SEQ ID NO: 6093; WAN0249B3; Start 328; Stop 352
aaagttgaataatagccactcccta

SEQ ID NO: 429505 - DNA, 25 bp, Artificial
  probe
  misc_feature (1)..(25): SEQ ID NO: 6093; WAN0249B3; Start 330; Stop 354
agttgaataatagccactccctact

SEQ ID NO: 429506 - DNA, 25 bp, Artificial
  probe
  misc_feature (1)..(25): SEQ ID NO: 6093; WAN0249B3; Start 368; Stop 392
atccgttgcattaacagatgtatat

SEQ ID NO: 429507 - DNA, 25 bp, Artificial
  probe
  misc_feature (1)..(25): SEQ ID NO: 6093; WAN0249B3; Start 477; Stop 501
taattggagtcctttatgatgcttt

SEQ ID NO: 429508 - DNA, 25 bp, Artificial
  probe
  misc_feature (1)..(25): SEQ ID NO: 6093; WAN0249B3; Start 476; Stop 500
ttaattggagtcctttatgatgctt

SEQ ID NO: 429509 - DNA, 25 bp, Artificial
  probe
  misc_feature (1)..(25): SEQ ID NO: 6093; WAN0249B3; Start 336; Stop 360
ataatagccactccctacttatcaa

SEQ ID NO: 429510 - DNA, 25 bp, Artificial
  probe
  misc_feature (1)..(25): SEQ ID NO: 6093; WAN0249B3; Start 335; Stop 359
aataatagccactccctacttatca

SEQ ID NO: 429511 - DNA, 25 bp, Artificial
  probe
  misc_feature (1)..(25): SEQ ID NO: 6093; WAN0249B3; Start 333; Stop 357
tgaataatagccactccctacttat

SEQ ID NO: 429512 - DNA, 25 bp, Artificial
  probe
  misc_feature (1)..(25): SEQ ID NO: 6093; WAN0249B3; Start 369; Stop 393
tccgttgcattaacagatgtatata

SEQ ID NO: 429513 - DNA, 25 bp, Artificial
  probe
  misc_feature (1)..(25): SEQ ID NO: 6093; WAN0249B3; Start 367; Stop 391
tatccgttgcattaacagatgtata

SEQ ID NO: 429514 - DNA, 25 bp, Artificial
  probe
  misc_feature (1)..(25): SEQ ID NO: 6093; WAN0249B3; Start 252; Stop 276
agattactactaaccagcaaattga

SEQ ID NO: 429515 - DNA, 25 bp, Artificial
  probe
  misc_feature (1)..(25): SEQ ID NO: 6093; WAN0249B3; Start 251; Stop 275
cagattactactaaccagcaaattg

SEQ ID NO: 429516 - DNA, 25 bp, Artificial
  probe
  misc_feature (1)..(25): SEQ ID NO: 6094; WAN02499R; Start 33; Stop 57
ttgttagtgaacggattaactcagt

SEQ ID NO: 429517 - DNA, 25 bp, Artificial
  probe
  misc_feature (1)..(25): SEQ ID NO: 6094; WAN02499R; Start 39; Stop 63
gtgaacggattaactcagtgagata

SEQ ID NO: 429518 - DNA, 25 bp, Artificial
  probe
  misc_feature (1)..(25): SEQ ID NO: 6094; WAN02499R; Start 36; Stop 60
ttagtgaacggattaactcagtgag

SEQ ID NO: 429519 - DNA, 25 bp, Artificial
  probe
  misc_feature (1)..(25): SEQ ID NO: 6094; WAN02499R; Start 40; Stop 64
tgaacggattaactcagtgagataa

SEQ ID NO: 429520 - DNA, 25 bp, Artificial
  probe
  misc_feature (1)..(25): SEQ ID NO: 6094; WAN02499R; Start 35; Stop 59
gttagtgaacggattaactcagtga

SEQ ID NO: 429521 - DNA, 25 bp, Artificial
  probe
  misc_feature (1)..(25): SEQ ID NO: 6094; WAN02499R; Start 34; Stop 58
tgttagtgaacggattaactcagtg

SEQ ID NO: 429522 - DNA, 25 bp, Artificial
  probe
  misc_feature (1)..(25): SEQ ID NO: 6094; WAN02499R; Start 37; Stop 61
tagtgaacggattaactcagtgaga

SEQ ID NO: 429523 - DNA, 25 bp, Artificial
  probe
  misc_feature (1)..(25): SEQ ID NO: 6094; WAN02499R; Start 38; Stop 62
agtgaacggattaactcagtgagat

SEQ ID NO: 429524 - DNA, 25 bp, Artificial
  probe
  misc_feature (1)..(25): SEQ ID NO: 6094; WAN02499R; Start 75; Stop 99
aacataagtaatccgtttcttcgtg

SEQ ID NO: 429525 - DNA, 25 bp, Artificial
  probe
  misc_feature (1)..(25): SEQ ID NO: 6094; WAN02499R; Start 74; Stop 98
gaacataagtaatccgtttcttcgt

SEQ ID NO: 429526 - DNA, 25 bp, Artificial
  probe
  misc_feature (1)..(25): SEQ ID NO: 6094; WAN02499R; Start 77; Stop 101
cataagtaatccgtttcttcgtgta

SEQ ID NO: 429527 - DNA, 25 bp, Artificial
  probe
  misc_feature (1)..(25): SEQ ID NO: 6094; WAN02499R; Start 76; Stop 100
acataagtaatccgtttcttcgtgt

SEQ ID NO: 429528 - DNA, 25 bp, Artificial
  probe
  misc_feature (1)..(25): SEQ ID NO: 6094; WAN02499R; Start 78; Stop 102
ataagtaatccgtttcttcgtgtat

SEQ ID NO: 429529 - DNA, 25 bp, Artificial
  probe
  misc_feature (1)..(25): SEQ ID NO: 6094; WAN02499R; Start 31; Stop 55
gtttgttagtgaacggattaactca

SEQ ID NO: 429530 - DNA, 25 bp, Artificial
  probe
  misc_feature (1)..(25): SEQ ID NO: 6094; WAN02499R; Start 79; Stop 103
taagtaatccgtttcttcgtgtata

SEQ ID NO: 429531 - DNA, 25 bp, Artificial
  probe
  misc_feature (1)..(25): SEQ ID NO: 6094; WAN02499R; Start 32; Stop 56
tttgttagtgaacggattaactcag

SEQ ID NO: 429532 - DNA, 25 bp, Artificial
  probe
  misc_feature (1)..(25): SEQ ID NO: 6094; WAN02499R; Start 41; Stop 65
gaacggattaactcagtgagataaa

SEQ ID NO: 429533 - DNA, 25 bp, Artificial
  probe
  misc_feature (1)..(25): SEQ ID NO: 6094; WAN02499R; Start 43; Stop 67
acggattaactcagtgagataaatt

SEQ ID NO: 429534 - DNA, 25 bp, Artificial
  probe
  misc_feature (1)..(25): SEQ ID NO: 6094; WAN02499R; Start 42; Stop 66
aacggattaactcagtgagataaat

SEQ ID NO: 429535 - DNA, 25 bp, Artificial
  probe
  misc_feature (1)..(25): SEQ ID NO: 6094; WAN02499R; Start 80; Stop 104
aagtaatccgtttcttcgtgtatac

SEQ ID NO: 429536 - DNA, 25 bp, Artificial
  probe
  misc_feature (1)..(25): SEQ ID NO: 6094; WAN02499R; Start 73; Stop 97
agaacataagtaatccgtttcttcg

SEQ ID NO: 429537 - DNA, 25 bp, Artificial
  probe
  misc_feature (1)..(25): SEQ ID NO: 6094; WAN02499R; Start 69; Stop 93
tatcagaacataagtaatccgtttc

SEQ ID NO: 429538 - DNA, 25 bp, Artificial
  probe
  misc_feature (1)..(25): SEQ ID NO: 6094; WAN02499R; Start 103; Stop 127
acagattgaaagtacctatgaatca

SEQ ID NO: 429539 - DNA, 25 bp, Artificial
  probe
  misc_feature (1)..(25): SEQ ID NO: 6094; WAN02499R; Start 71; Stop 95
tcagaacataagtaatccgtttctt

SEQ ID NO: 429540 - DNA, 25 bp, Artificial
  probe
  misc_feature (1)..(25): SEQ ID NO: 6094; WAN02499R; Start 121; Stop 145
tgaatcatagaaggattaacttgtt

SEQ ID NO: 429541 - DNA, 25 bp, Artificial
  probe
  misc_feature (1)..(25): SEQ ID NO: 6094; WAN02499R; Start 72; Stop 96
cagaacataagtaatccgtttcttc

SEQ ID NO: 429542 - DNA, 25 bp, Artificial
  probe
  misc_feature (1)..(25): SEQ ID NO: 6094; WAN02499R; Start 70; Stop 94
atcagaacataagtaatccgtttct

SEQ ID NO: 429543 - DNA, 25 bp, Artificial
  probe
  misc_feature (1)..(25): SEQ ID NO: 6094; WAN02499R; Start 68; Stop 92
ttatcagaacataagtaatccgttt

SEQ ID NO: 429544 - DNA, 25 bp, Artificial
  probe
  misc_feature (1)..(25): SEQ ID NO: 6094; WAN02499R; Start 67; Stop 91
tttatcagaacataagtaatccgtt

SEQ ID NO: 429545 - DNA, 25 bp, Artificial
  probe
  misc_feature (1)..(25): SEQ ID NO: 6094; WAN02499R; Start 120; Stop 144
atgaatcatagaaggattaacttgt

SEQ ID NO: 429546 - DNA, 25 bp, Artificial
  probe
  misc_feature (1)..(25): SEQ ID NO: 6094; WAN02499R; Start 122; Stop 146
gaatcatagaaggattaacttgttc

SEQ ID NO: 429547 - DNA, 25 bp, Artificial
  probe
  misc_feature (1)..(25): SEQ ID NO: 6094; WAN02499R; Start 44; Stop 68
cggattaactcagtgagataaattt

SEQ ID NO: 429548 - DNA, 25 bp, Artificial
  probe
  misc_feature (1)..(25): SEQ ID NO: 6094; WAN02499R; Start 2; Stop 26
tataacgcacttttatacgcttttg

SEQ ID NO: 429549 - DNA, 25 bp, Artificial
  probe
  misc_feature (1)..(25): SEQ ID NO: 6095; WAN02496Q; Start 40; Stop 64
ctctaaagctggatatgataggttt

SEQ ID NO: 429550 - DNA, 25 bp, Artificial
  probe
  misc_feature (1)..(25): SEQ ID NO: 6095; WAN02496Q; Start 39; Stop 63
gctctaaagctggatatgataggtt

SEQ ID NO: 429551 - DNA, 25 bp, Artificial
  probe
  misc_feature (1)..(25): SEQ ID NO: 6095; WAN02496Q; Start 23; Stop 47
aaagcctatcacacaagctctaaag

SEQ ID NO: 429552 - DNA, 25 bp, Artificial
  probe
  misc_feature (1)..(25): SEQ ID NO: 6095; WAN02496Q; Start 41; Stop 65
tctaaagctggatatgataggtttt

SEQ ID NO: 429553 - DNA, 25 bp, Artificial
  probe
  misc_feature (1)..(25): SEQ ID NO: 6095; WAN02496Q; Start 24; Stop 48
aagcctatcacacaagctctaaagc

SEQ ID NO: 429554 - DNA, 25 bp, Artificial
  probe
  misc_feature (1)..(25): SEQ ID NO: 6095; WAN02496Q; Start 22; Stop 46
aaaagcctatcacacaagctctaaa

SEQ ID NO: 429555 - DNA, 25 bp, Artificial
  probe
  misc_feature (1)..(25): SEQ ID NO: 6095; WAN02496Q; Start 37; Stop 61
aagctctaaagctggatatgatagg

SEQ ID NO: 429556 - DNA, 25 bp, Artificial
  probe
  misc_feature (1)..(25): SEQ ID NO: 6095; WAN02496Q; Start 38; Stop 62
agctctaaagctggatatgataggt

SEQ ID NO: 429557 - DNA, 25 bp, Artificial
  probe
  misc_feature (1)..(25): SEQ ID NO: 6095; WAN02496Q; Start 35; Stop 59
acaagctctaaagctggatatgata

SEQ ID NO: 429558 - DNA, 25 bp, Artificial
  probe
  misc_feature (1)..(25): SEQ ID NO: 6095; WAN02496Q; Start 34; Stop 58
cacaagctctaaagctggatatgat

SEQ ID NO: 429559 - DNA, 25 bp, Artificial
  probe
  misc_feature (1)..(25): SEQ ID NO: 6095; WAN02496Q; Start 36; Stop 60
caagctctaaagctggatatgatag

SEQ ID NO: 429560 - DNA, 25 bp, Artificial
  probe
  misc_feature (1)..(25): SEQ ID NO: 6095; WAN02496Q; Start 33; Stop 57
acacaagctctaaagctggatatga

SEQ ID NO: 429561 - DNA, 25 bp, Artificial
  probe
  misc_feature (1)..(25): SEQ ID NO: 6095; WAN02496Q; Start 32; Stop 56
cacacaagctctaaagctggatatg

SEQ ID NO: 429562 - DNA, 25 bp, Artificial
  probe
  misc_feature (1)..(25): SEQ ID NO: 6095; WAN02496Q; Start 31; Stop 55
tcacacaagctctaaagctggatat

SEQ ID NO: 429563 - DNA, 25 bp, Artificial
  probe
  misc_feature (1)..(25): SEQ ID NO: 6095; WAN02496Q; Start 30; Stop 54
atcacacaagctctaaagctggata

SEQ ID NO: 429564 - DNA, 25 bp, Artificial
  probe
  misc_feature (1)..(25): SEQ ID NO: 6095; WAN02496Q; Start 29; Stop 53
tatcacacaagctctaaagctggat

SEQ ID NO: 429565 - DNA, 25 bp, Artificial
  probe
  misc_feature (1)..(25): SEQ ID NO: 6095; WAN02496Q; Start 28; Stop 52
ctatcacacaagctctaaagctgga

SEQ ID NO: 429566 - DNA, 25 bp, Artificial
  probe
  misc_feature (1)..(25): SEQ ID NO: 6095; WAN02496Q; Start 27; Stop 51
cctatcacacaagctctaaagctgg

SEQ ID NO: 429567 - DNA, 25 bp, Artificial
  probe
  misc_feature (1)..(25): SEQ ID NO: 6095; WAN02496Q; Start 26; Stop 50
gcctatcacacaagctctaaagctg

SEQ ID NO: 429568 - DNA, 25 bp, Artificial
  probe
  misc_feature (1)..(25): SEQ ID NO: 6095; WAN02496Q; Start 25; Stop 49
agcctatcacacaagctctaaagct

SEQ ID NO: 429569 - DNA, 25 bp, Artificial
  probe
  misc_feature (1)..(25): SEQ ID NO: 6096; WAN0249BQ; Start 21; Stop 45
aaactaggctattaacaagaaaggg

SEQ ID NO: 429570 - DNA, 25 bp, Artificial
  probe
  misc_feature (1)..(25): SEQ ID NO: 6096; WAN0249BQ; Start 20; Stop 44
caaactaggctattaacaagaaagg

SEQ ID NO: 429571 - DNA, 25 bp, Artificial
  probe
  misc_feature (1)..(25): SEQ ID NO: 6096; WAN0249BQ; Start 19; Stop 43
tcaaactaggctattaacaagaaag

SEQ ID NO: 429572 - DNA, 25 bp, Artificial
  probe
  misc_feature (1)..(25): SEQ ID NO: 6096; WAN0249BQ; Start 58; Stop 82
aaacattttccttccaccttctttt

SEQ ID NO: 429573 - DNA, 25 bp, Artificial
  probe
  misc_feature (1)..(25): SEQ ID NO: 6096; WAN0249BQ; Start 57; Stop 81
caaacattttccttccaccttcttt

SEQ ID NO: 429574 - DNA, 25 bp, Artificial
  probe
  misc_feature (1)..(25): SEQ ID NO: 6096; WAN0249BQ; Start 28; Stop 52
gctattaacaagaaaggggaaggta

SEQ ID NO: 429575 - DNA, 25 bp, Artificial
  probe
  misc_feature (1)..(25): SEQ ID NO: 6096; WAN0249BQ; Start 25; Stop 49
taggctattaacaagaaaggggaag

SEQ ID NO: 429576 - DNA, 25 bp, Artificial
  probe
  misc_feature (1)..(25): SEQ ID NO: 6096; WAN0249BQ; Start 30; Stop 54
tattaacaagaaaggggaaggtagt

SEQ ID NO: 429577 - DNA, 25 bp, Artificial
  probe
  misc_feature (1)..(25): SEQ ID NO: 6096; WAN0249BQ; Start 50; Stop 74
gtagttccaaacattttccttccac

SEQ ID NO: 429578 - DNA, 25 bp, Artificial
  probe
  misc_feature (1)..(25): SEQ ID NO: 6096; WAN0249BQ; Start 32; Stop 56
ttaacaagaaaggggaaggtagttc

SEQ ID NO: 429579 - DNA, 25 bp, Artificial
  probe
  misc_feature (1)..(25): SEQ ID NO: 6096; WAN0249BQ; Start 31; Stop 55
attaacaagaaaggggaaggtagtt

SEQ ID NO: 429580 - DNA, 25 bp, Artificial
  probe
  misc_feature (1)..(25): SEQ ID NO: 6096; WAN0249BQ; Start 24; Stop 48
ctaggctattaacaagaaaggggaa

SEQ ID NO: 429581 - DNA, 25 bp, Artificial
  probe
  misc_feature (1)..(25): SEQ ID NO: 6096; WAN0249BQ; Start 22; Stop 46
aactaggctattaacaagaaagggg

SEQ ID NO: 429582 - DNA, 25 bp, Artificial
  probe
  misc_feature (1)..(25): SEQ ID NO: 6096; WAN0249BQ; Start 29; Stop 53
ctattaacaagaaaggggaaggtag

SEQ ID NO: 429583 - DNA, 25 bp, Artificial
  probe
  misc_feature (1)..(25): SEQ ID NO: 6096; WAN0249BQ; Start 23; Stop 47
actaggctattaacaagaaagggga

SEQ ID NO: 429584 - DNA, 25 bp, Artificial
  probe
  misc_feature (1)..(25): SEQ ID NO: 6096; WAN0249BQ; Start 56; Stop 80
ccaaacattttccttccaccttctt

SEQ ID NO: 429585 - DNA, 25 bp, Artificial
  probe
  misc_feature (1)..(25): SEQ ID NO: 6096; WAN0249BQ; Start 54; Stop 78
ttccaaacattttccttccaccttc

SEQ ID NO: 429586 - DNA, 25 bp, Artificial
  probe
  misc_feature (1)..(25): SEQ ID NO: 6096; WAN0249BQ; Start 51; Stop 75
tagttccaaacattttccttccacc

SEQ ID NO: 429587 - DNA, 25 bp, Artificial
  probe
  misc_feature (1)..(25): SEQ ID NO: 6096; WAN0249BQ; Start 49; Stop 73
ggtagttccaaacattttccttcca

SEQ ID NO: 429588 - DNA, 25 bp, Artificial
  probe
  misc_feature (1)..(25): SEQ ID NO: 6096; WAN0249BQ; Start 18; Stop 42
atcaaactaggctattaacaagaaa

SEQ ID NO: 429589 - DNA, 25 bp, Artificial
  probe
  misc_feature (1)..(25): SEQ ID NO: 6096; WAN0249BQ; Start 26; Stop 50
aggctattaacaagaaaggggaagg

SEQ ID NO: 429590 - DNA, 25 bp, Artificial
  probe
  misc_feature (1)..(25): SEQ ID NO: 6096; WAN0249BQ; Start 53; Stop 77
gttccaaacattttccttccacctt

SEQ ID NO: 429591 - DNA, 25 bp, Artificial
  probe
  misc_feature (1)..(25): SEQ ID NO: 6096; WAN0249BQ; Start 27; Stop 51
ggctattaacaagaaaggggaaggt

SEQ ID NO: 429592 - DNA, 25 bp, Artificial
  probe
  misc_feature (1)..(25): SEQ ID NO: 6096; WAN0249BQ; Start 48; Stop 72
aggtagttccaaacattttccttcc

SEQ ID NO: 429593 - DNA, 25 bp, Artificial
  probe
  misc_feature (1)..(25): SEQ ID NO: 6096; WAN0249BQ; Start 55; Stop 79
tccaaacattttccttccaccttct

SEQ ID NO: 429594 - DNA, 25 bp, Artificial
  probe
  misc_feature (1)..(25): SEQ ID NO: 6096; WAN0249BQ; Start 52; Stop 76
agttccaaacattttccttccacct

SEQ ID NO: 429595 - DNA, 25 bp, Artificial
  probe
  misc_feature (1)..(25): SEQ ID NO: 6096; WAN0249BQ; Start 17; Stop 41
tatcaaactaggctattaacaagaa

SEQ ID NO: 429596 - DNA, 25 bp, Artificial
  probe
  misc_feature (1)..(25): SEQ ID NO: 6096; WAN0249BQ; Start 16; Stop 40
atatcaaactaggctattaacaaga

SEQ ID NO: 429597 - DNA, 25 bp, Artificial
  probe
  misc_feature (1)..(25): SEQ ID NO: 6096; WAN0249BQ; Start 47; Stop 71
aaggtagttccaaacattttccttc

SEQ ID NO: 429598 - DNA, 25 bp, Artificial
  probe
  misc_feature (1)..(25): SEQ ID NO: 6096; WAN0249BQ; Start 46; Stop 70
gaaggtagttccaaacattttcctt

SEQ ID NO: 429599 - DNA, 25 bp, Artificial
  probe
  misc_feature (1)..(25): SEQ ID NO: 6096; WAN0249BQ; Start 45; Stop 69
ggaaggtagttccaaacattttcct

SEQ ID NO: 429600 - DNA, 25 bp, Artificial
  probe
  misc_feature (1)..(25): SEQ ID NO: 6096; WAN0249BQ; Start 33; Stop 57
taacaagaaaggggaaggtagttcc

SEQ ID NO: 429601 - DNA, 25 bp, Artificial
  probe
  misc_feature (1)..(25): SEQ ID NO: 6096; WAN0249BQ; Start 44; Stop 68
gggaaggtagttccaaacattttcc

SEQ ID NO: 429602 - DNA, 25 bp, Artificial
  probe
  misc_feature (1)..(25): SEQ ID NO: 6097; WAN02496F; Start 154; Stop 178
atgagttcagcaggcaagaaaatag

SEQ ID NO: 429603 - DNA, 25 bp, Artificial
  probe
  misc_feature (1)..(25): SEQ ID NO: 6097; WAN02496F; Start 153; Stop 177
gatgagttcagcaggcaagaaaata

SEQ ID NO: 429604 - DNA, 25 bp, Artificial
  probe
  misc_feature (1)..(25): SEQ ID NO: 6097; WAN02496F; Start 143; Stop 167
gtattaaatcgatgagttcagcagg

SEQ ID NO: 429605 - DNA, 25 bp, Artificial
  probe
  misc_feature (1)..(25): SEQ ID NO: 6097; WAN02496F; Start 142; Stop 166
ggtattaaatcgatgagttcagcag

SEQ ID NO: 429606 - DNA, 25 bp, Artificial
  probe
  misc_feature (1)..(25): SEQ ID NO: 6097; WAN02496F; Start 141; Stop 165
aggtattaaatcgatgagttcagca

SEQ ID NO: 429607 - DNA, 25 bp, Artificial
  probe
  misc_feature (1)..(25): SEQ ID NO: 6097; WAN02496F; Start 140; Stop 164
aaggtattaaatcgatgagttcagc

SEQ ID NO: 429608 - DNA, 25 bp, Artificial
  probe
  misc_feature (1)..(25): SEQ ID NO: 6097; WAN02496F; Start 144; Stop 168
tattaaatcgatgagttcagcaggc

SEQ ID NO: 429609 - DNA, 25 bp, Artificial
  probe
  misc_feature (1)..(25): SEQ ID NO: 6097; WAN02496F; Start 34; Stop 58
atcaaatagttcaattaaatacgct

SEQ ID NO: 429610 - DNA, 25 bp, Artificial
  probe
  misc_feature (1)..(25): SEQ ID NO: 6097; WAN02496F; Start 164; Stop 188
caggcaagaaaatagcacctttacg

SEQ ID NO: 429611 - DNA, 25 bp, Artificial
  probe
  misc_feature (1)..(25): SEQ ID NO: 6097; WAN02496F; Start 106; Stop 130
caaacaattacaatatactagaggg

SEQ ID NO: 429612 - DNA, 25 bp, Artificial
  probe
  misc_feature (1)..(25): SEQ ID NO: 6097; WAN02496F; Start 163; Stop 187
gcaggcaagaaaatagcacctttac

SEQ ID NO: 429613 - DNA, 25 bp, Artificial
  probe
  misc_feature (1)..(25): SEQ ID NO: 6097; WAN02496F; Start 162; Stop 186
agcaggcaagaaaatagcaccttta

SEQ ID NO: 429614 - DNA, 25 bp, Artificial
  probe
  misc_feature (1)..(25): SEQ ID NO: 6097; WAN02496F; Start 145; Stop 169
attaaatcgatgagttcagcaggca

SEQ ID NO: 429615 - DNA, 25 bp, Artificial
  probe
  misc_feature (1)..(25): SEQ ID NO: 6097; WAN02496F; Start 139; Stop 163
aaaggtattaaatcgatgagttcag

SEQ ID NO: 429616 - DNA, 25 bp, Artificial
  probe
  misc_feature (1)..(25): SEQ ID NO: 6097; WAN02496F; Start 156; Stop 180
gagttcagcaggcaagaaaatagca

SEQ ID NO: 429617 - DNA, 25 bp, Artificial
  probe
  misc_feature (1)..(25): SEQ ID NO: 6097; WAN02496F; Start 155; Stop 179
tgagttcagcaggcaagaaaatagc

SEQ ID NO: 429618 - DNA, 25 bp, Artificial
  probe
  misc_feature (1)..(25): SEQ ID NO: 6097; WAN02496F; Start 146; Stop 170
ttaaatcgatgagttcagcaggcaa

SEQ ID NO: 429619 - DNA, 25 bp, Artificial
  probe
  misc_feature (1)..(25): SEQ ID NO: 6097; WAN02496F; Start 157; Stop 181
agttcagcaggcaagaaaatagcac

SEQ ID NO: 429620 - DNA, 25 bp, Artificial
  probe
  misc_feature (1)..(25): SEQ ID NO: 6097; WAN02496F; Start 107; Stop 131
aaacaattacaatatactagagggg

SEQ ID NO: 429621 - DNA, 25 bp, Artificial
  probe
  misc_feature (1)..(25): SEQ ID NO: 6097; WAN02496F; Start 152; Stop 176
cgatgagttcagcaggcaagaaaat

SEQ ID NO: 429622 - DNA, 25 bp, Artificial
  probe
  misc_feature (1)..(25): SEQ ID NO: 6097; WAN02496F; Start 165; Stop 189
aggcaagaaaatagcacctttacgg

SEQ ID NO: 429623 - DNA, 25 bp, Artificial
  probe
  misc_feature (1)..(25): SEQ ID NO: 6097; WAN02496F; Start 147; Stop 171
taaatcgatgagttcagcaggcaag

SEQ ID NO: 429624 - DNA, 25 bp, Artificial
  probe
  misc_feature (1)..(25): SEQ ID NO: 6097; WAN02496F; Start 166; Stop 190
ggcaagaaaatagcacctttacggg

SEQ ID NO: 429625 - DNA, 25 bp, Artificial
  probe
  misc_feature (1)..(25): SEQ ID NO: 6097; WAN02496F; Start 167; Stop 191
gcaagaaaatagcacctttacgggt

SEQ ID NO: 429626 - DNA, 25 bp, Artificial
  probe
  misc_feature (1)..(25): SEQ ID NO: 6097; WAN02496F; Start 149; Stop 173
aatcgatgagttcagcaggcaagaa

SEQ ID NO: 429627 - DNA, 25 bp, Artificial
  probe
  misc_feature (1)..(25): SEQ ID NO: 6097; WAN02496F; Start 161; Stop 185
cagcaggcaagaaaatagcaccttt

SEQ ID NO: 429628 - DNA, 25 bp, Artificial
  probe
  misc_feature (1)..(25): SEQ ID NO: 6097; WAN02496F; Start 158; Stop 182
gttcagcaggcaagaaaatagcacc

SEQ ID NO: 429629 - DNA, 25 bp, Artificial
  probe
  misc_feature (1)..(25): SEQ ID NO: 6097; WAN02496F; Start 138; Stop 162
aaaaggtattaaatcgatgagttca

SEQ ID NO: 429630 - DNA, 25 bp, Artificial
  probe
  misc_feature (1)..(25): SEQ ID NO: 6097; WAN02496F; Start 148; Stop 172
aaatcgatgagttcagcaggcaaga

SEQ ID NO: 429631 - DNA, 25 bp, Artificial
  probe
  misc_feature (1)..(25): SEQ ID NO: 6097; WAN02496F; Start 150; Stop 174
atcgatgagttcagcaggcaagaaa

SEQ ID NO: 429632 - DNA, 25 bp, Artificial
  probe
  misc_feature (1)..(25): SEQ ID NO: 6097; WAN02496F; Start 160; Stop 184
tcagcaggcaagaaaatagcacctt

SEQ ID NO: 429633 - DNA, 25 bp, Artificial
  probe
  misc_feature (1)..(25): SEQ ID NO: 6097; WAN02496F; Start 159; Stop 183
ttcagcaggcaagaaaatagcacct

SEQ ID NO: 429634 - DNA, 25 bp, Artificial
  probe
  misc_feature (1)..(25): SEQ ID NO: 6097; WAN02496F; Start 151; Stop 175
tcgatgagttcagcaggcaagaaaa

SEQ ID NO: 429635 - DNA, 25 bp, Artificial
  probe
  misc_feature (1)..(25): SEQ ID NO: 6098; WAN0249AV; Start 120; Stop 144
aatctatgggtaatgttctgaaagt

SEQ ID NO: 429636 - DNA, 25 bp, Artificial
  probe
  misc_feature (1)..(25): SEQ ID NO: 6098; WAN0249AV; Start 122; Stop 146
tctatgggtaatgttctgaaagtac

SEQ ID NO: 429637 - DNA, 25 bp, Artificial
  probe
  misc_feature (1)..(25): SEQ ID NO: 6098; WAN0249AV; Start 121; Stop 145
atctatgggtaatgttctgaaagta

SEQ ID NO: 429638 - DNA, 25 bp, Artificial
  probe
  misc_feature (1)..(25): SEQ ID NO: 6098; WAN0249AV; Start 119; Stop 143
aaatctatgggtaatgttctgaaag

SEQ ID NO: 429639 - DNA, 25 bp, Artificial
  probe
  misc_feature (1)..(25): SEQ ID NO: 6098; WAN0249AV; Start 2; Stop 26
tgacaccacgagtataattattaga

SEQ ID NO: 429640 - DNA, 25 bp, Artificial
  probe
  misc_feature (1)..(25): SEQ ID NO: 6098; WAN0249AV; Start 1; Stop 25
ctgacaccacgagtataattattag

SEQ ID NO: 429641 - DNA, 25 bp, Artificial
  probe
  misc_feature (1)..(25): SEQ ID NO: 6098; WAN0249AV; Start 205; Stop 229
tgtagaaaacgcttaacaaatggtg

SEQ ID NO: 429642 - DNA, 25 bp, Artificial
  probe
  misc_feature (1)..(25): SEQ ID NO: 6098; WAN0249AV; Start 123; Stop 147
ctatgggtaatgttctgaaagtact

SEQ ID NO: 429643 - DNA, 25 bp, Artificial
  probe
  misc_feature (1)..(25): SEQ ID NO: 6098; WAN0249AV; Start 3; Stop 27
gacaccacgagtataattattagaa

SEQ ID NO: 429644 - DNA, 25 bp, Artificial
  probe
  misc_feature (1)..(25): SEQ ID NO: 6098; WAN0249AV; Start 6; Stop 30
accacgagtataattattagaaacg

SEQ ID NO: 429645 - DNA, 25 bp, Artificial
  probe
  misc_feature (1)..(25): SEQ ID NO: 6098; WAN0249AV; Start 118; Stop 142
aaaatctatgggtaatgttctgaaa

SEQ ID NO: 429646 - DNA, 25 bp, Artificial
  probe
  misc_feature (1)..(25): SEQ ID NO: 6098; WAN0249AV; Start 10; Stop 34
cgagtataattattagaaacgtgga

SEQ ID NO: 429647 - DNA, 25 bp, Artificial
  probe
  misc_feature (1)..(25): SEQ ID NO: 6098; WAN0249AV; Start 204; Stop 228
ttgtagaaaacgcttaacaaatggt

SEQ ID NO: 429648 - DNA, 25 bp, Artificial
  probe
  misc_feature (1)..(25): SEQ ID NO: 6098; WAN0249AV; Start 200; Stop 224
cgaattgtagaaaacgcttaacaaa

SEQ ID NO: 429649 - DNA, 25 bp, Artificial
  probe
  misc_feature (1)..(25): SEQ ID NO: 6098; WAN0249AV; Start 203; Stop 227
attgtagaaaacgcttaacaaatgg

SEQ ID NO: 429650 - DNA, 25 bp, Artificial
  probe
  misc_feature (1)..(25): SEQ ID NO: 6098; WAN0249AV; Start 24; Stop 48
agaaacgtggaatcttattaaattt

SEQ ID NO: 429651 - DNA, 25 bp, Artificial
  probe
  misc_feature (1)..(25): SEQ ID NO: 6098; WAN0249AV; Start 4; Stop 28
acaccacgagtataattattagaaa

SEQ ID NO: 429652 - DNA, 25 bp, Artificial
  probe
  misc_feature (1)..(25): SEQ ID NO: 6098; WAN0249AV; Start 5; Stop 29
caccacgagtataattattagaaac

SEQ ID NO: 429653 - DNA, 25 bp, Artificial
  probe
  misc_feature (1)..(25): SEQ ID NO: 6098; WAN0249AV; Start 9; Stop 33
acgagtataattattagaaacgtgg

SEQ ID NO: 429654 - DNA, 25 bp, Artificial
  probe
  misc_feature (1)..(25): SEQ ID NO: 6098; WAN0249AV; Start 7; Stop 31
ccacgagtataattattagaaacgt

SEQ ID NO: 429655 - DNA, 25 bp, Artificial
  probe
  misc_feature (1)..(25): SEQ ID NO: 6098; WAN0249AV; Start 202; Stop 226
aattgtagaaaacgcttaacaaatg

SEQ ID NO: 429656 - DNA, 25 bp, Artificial
  probe
  misc_feature (1)..(25): SEQ ID NO: 6098; WAN0249AV; Start 143; Stop 167
gtacttttaggttaggagagaaata

SEQ ID NO: 429657 - DNA, 25 bp, Artificial
  probe
  misc_feature (1)..(25): SEQ ID NO: 6098; WAN0249AV; Start 201; Stop 225
gaattgtagaaaacgcttaacaaat

SEQ ID NO: 429658 - DNA, 25 bp, Artificial
  probe
  misc_feature (1)..(25): SEQ ID NO: 6098; WAN0249AV; Start 142; Stop 166
agtacttttaggttaggagagaaat

SEQ ID NO: 429659 - DNA, 25 bp, Artificial
  probe
  misc_feature (1)..(25): SEQ ID NO: 6098; WAN0249AV; Start 199; Stop 223
gcgaattgtagaaaacgcttaacaa

SEQ ID NO: 429660 - DNA, 25 bp, Artificial
  probe
  misc_feature (1)..(25): SEQ ID NO: 6098; WAN0249AV; Start 25; Stop 49
gaaacgtggaatcttattaaatttt

SEQ ID NO: 429661 - DNA, 25 bp, Artificial
  probe
  misc_feature (1)..(25): SEQ ID NO: 6099; WAN02497N; Start 5; Stop 29
ccacctcctagcttttgcatattat

SEQ ID NO: 429662 - DNA, 25 bp, Artificial
  probe
  misc_feature (1)..(25): SEQ ID NO: 6099; WAN02497N; Start 6; Stop 30
cacctcctagcttttgcatattata

SEQ ID NO: 429663 - DNA, 25 bp, Artificial
  probe
  misc_feature (1)..(25): SEQ ID NO: 6099; WAN02497N; Start 4; Stop 28
accacctcctagcttttgcatatta

SEQ ID NO: 429664 - DNA, 25 bp, Artificial
  probe
  misc_feature (1)..(25): SEQ ID NO: 6099; WAN02497N; Start 7; Stop 31
acctcctagcttttgcatattatat

SEQ ID NO: 429665 - DNA, 25 bp, Artificial
  probe
  misc_feature (1)..(25): SEQ ID NO: 6099; WAN02497N; Start 8; Stop 32
cctcctagcttttgcatattatatc

SEQ ID NO: 429666 - DNA, 25 bp, Artificial
  probe
  misc_feature (1)..(25): SEQ ID NO: 6099; WAN02497N; Start 3; Stop 27
gaccacctcctagcttttgcatatt

SEQ ID NO: 429667 - DNA, 25 bp, Artificial
  probe
  misc_feature (1)..(25): SEQ ID NO: 6099; WAN02497N; Start 9; Stop 33
ctcctagcttttgcatattatatca

SEQ ID NO: 429668 - DNA, 25 bp, Artificial
  probe
  misc_feature (1)..(25): SEQ ID NO: 6099; WAN02497N; Start 2; Stop 26
tgaccacctcctagcttttgcatat

SEQ ID NO: 429669 - DNA, 25 bp, Artificial
  probe
  misc_feature (1)..(25): SEQ ID NO: 6099; WAN02497N; Start 10; Stop 34
tcctagcttttgcatattatatcat

SEQ ID NO: 429670 - DNA, 25 bp, Artificial
  probe
  misc_feature (1)..(25): SEQ ID NO: 6099; WAN02497N; Start 1; Stop 25
ctgaccacctcctagcttttgcata

SEQ ID NO: 429671 - DNA, 25 bp, Artificial
  probe
  misc_feature (1)..(25): SEQ ID NO: 6099; WAN02497N; Start 11; Stop 35
cctagcttttgcatattatatcatt

SEQ ID NO: 429672 - DNA, 25 bp, Artificial
  probe
  misc_feature (1)..(25): SEQ ID NO: 6099; WAN02497N; Start 40; Stop 64
acaatcatttgtcaaaatattctga

SEQ ID NO: 429673 - DNA, 25 bp, Artificial
  probe
  misc_feature (1)..(25): SEQ ID NO: 6100; WAN02496S; Start 1; Stop 25
ctgatttcctcctttgaagtattat

SEQ ID NO: 429674 - DNA, 25 bp, Artificial
  probe
  misc_feature (1)..(25): SEQ ID NO: 6100; WAN02496S; Start 34; Stop 58
attaccgtaattacaatggcagaat

SEQ ID NO: 429675 - DNA, 25 bp, Artificial
  probe
  misc_feature (1)..(25): SEQ ID NO: 6100; WAN02496S; Start 35; Stop 59
ttaccgtaattacaatggcagaata

SEQ ID NO: 429676 - DNA, 25 bp, Artificial
  probe
  misc_feature (1)..(25): SEQ ID NO: 6100; WAN02496S; Start 5; Stop 29
tttcctcctttgaagtattataaca

SEQ ID NO: 429677 - DNA, 25 bp, Artificial
  probe
  misc_feature (1)..(25): SEQ ID NO: 6100; WAN02496S; Start 33; Stop 57
cattaccgtaattacaatggcagaa

SEQ ID NO: 429678 - DNA, 25 bp, Artificial
  probe
  misc_feature (1)..(25): SEQ ID NO: 6100; WAN02496S; Start 32; Stop 56
tcattaccgtaattacaatggcaga

SEQ ID NO: 429679 - DNA, 25 bp, Artificial
  probe
  misc_feature (1)..(25): SEQ ID NO: 6100; WAN02496S; Start 2; Stop 26
tgatttcctcctttgaagtattata

SEQ ID NO: 429680 - DNA, 25 bp, Artificial
  probe
  misc_feature (1)..(25): SEQ ID NO: 6100; WAN02496S; Start 31; Stop 55
atcattaccgtaattacaatggcag

SEQ ID NO: 429681 - DNA, 25 bp, Artificial
  probe
  misc_feature (1)..(25): SEQ ID NO: 6100; WAN02496S; Start 6; Stop 30
ttcctcctttgaagtattataacaa

SEQ ID NO: 429682 - DNA, 25 bp, Artificial
  probe
  misc_feature (1)..(25): SEQ ID NO: 6100; WAN02496S; Start 30; Stop 54
aatcattaccgtaattacaatggca

SEQ ID NO: 429683 - DNA, 25 bp, Artificial
  probe
  misc_feature (1)..(25): SEQ ID NO: 6100; WAN02496S; Start 7; Stop 31
tcctcctttgaagtattataacaaa

SEQ ID NO: 429684 - DNA, 25 bp, Artificial
  probe
  misc_feature (1)..(25): SEQ ID NO: 6100; WAN02496S; Start 29; Stop 53
aaatcattaccgtaattacaatggc

SEQ ID NO: 429685 - DNA, 25 bp, Artificial
  probe
  misc_feature (1)..(25): SEQ ID NO: 6100; WAN02496S; Start 8; Stop 32
cctcctttgaagtattataacaaat

SEQ ID NO: 429686 - DNA, 25 bp, Artificial
  probe
  misc_feature (1)..(25): SEQ ID NO: 6100; WAN02496S; Start 28; Stop 52
caaatcattaccgtaattacaatgg

SEQ ID NO: 429687 - DNA, 25 bp, Artificial
  probe
  misc_feature (1)..(25): SEQ ID NO: 6100; WAN02496S; Start 26; Stop 50
aacaaatcattaccgtaattacaat

SEQ ID NO: 429688 - DNA, 25 bp, Artificial
  probe
  misc_feature (1)..(25): SEQ ID NO: 6100; WAN02496S; Start 27; Stop 51
acaaatcattaccgtaattacaatg

SEQ ID NO: 429689 - DNA, 25 bp, Artificial
  probe
  misc_feature (1)..(25): SEQ ID NO: 6100; WAN02496S; Start 25; Stop 49
taacaaatcattaccgtaattacaa

SEQ ID NO: 429690 - DNA, 25 bp, Artificial
  probe
  misc_feature (1)..(25): SEQ ID NO: 6102; WAN0249BI; Start 62; Stop 86
tactcatcctttgtcaagcctaaat

SEQ ID NO: 429691 - DNA, 25 bp, Artificial
  probe
  misc_feature (1)..(25): SEQ ID NO: 6102; WAN0249BI; Start 61; Stop 85
atactcatcctttgtcaagcctaaa

SEQ ID NO: 429692 - DNA, 25 bp, Artificial
  probe
  misc_feature (1)..(25): SEQ ID NO: 6102; WAN0249BI; Start 59; Stop 83
ctatactcatcctttgtcaagccta

SEQ ID NO: 429693 - DNA, 25 bp, Artificial
  probe
  misc_feature (1)..(25): SEQ ID NO: 6102; WAN0249BI; Start 55; Stop 79
actcctatactcatcctttgtcaag

SEQ ID NO: 429694 - DNA, 25 bp, Artificial
  probe
  misc_feature (1)..(25): SEQ ID NO: 6102; WAN0249BI; Start 56; Stop 80
ctcctatactcatcctttgtcaagc

SEQ ID NO: 429695 - DNA, 25 bp, Artificial
  probe
  misc_feature (1)..(25): SEQ ID NO: 6102; WAN0249BI; Start 60; Stop 84
tatactcatcctttgtcaagcctaa

SEQ ID NO: 429696 - DNA, 25 bp, Artificial
  probe
  misc_feature (1)..(25): SEQ ID NO: 6102; WAN0249BI; Start 63; Stop 87
actcatcctttgtcaagcctaaatt

SEQ ID NO: 429697 - DNA, 25 bp, Artificial
  probe
  misc_feature (1)..(25): SEQ ID NO: 6102; WAN0249BI; Start 64; Stop 88
ctcatcctttgtcaagcctaaattg

SEQ ID NO: 429698 - DNA, 25 bp, Artificial
  probe
  misc_feature (1)..(25): SEQ ID NO: 6102; WAN0249BI; Start 54; Stop 78
tactcctatactcatcctttgtcaa

SEQ ID NO: 429699 - DNA, 25 bp, Artificial
  probe
  misc_feature (1)..(25): SEQ ID NO: 6102; WAN0249BI; Start 53; Stop 77
atactcctatactcatcctttgtca

SEQ ID NO: 429700 - DNA, 25 bp, Artificial
  probe
  misc_feature (1)..(25): SEQ ID NO: 6102; WAN0249BI; Start 58; Stop 82
cctatactcatcctttgtcaagcct

SEQ ID NO: 429701 - DNA, 25 bp, Artificial
  probe
  misc_feature (1)..(25): SEQ ID NO: 6102; WAN0249BI; Start 57; Stop 81
tcctatactcatcctttgtcaagcc

SEQ ID NO: 429702 - DNA, 25 bp, Artificial
  probe
  misc_feature (1)..(25): SEQ ID NO: 6102; WAN0249BI; Start 52; Stop 76
aatactcctatactcatcctttgtc

SEQ ID NO: 429703 - DNA, 25 bp, Artificial
  probe
  misc_feature (1)..(25): SEQ ID NO: 6102; WAN0249BI; Start 66; Stop 90
catcctttgtcaagcctaaattgaa

SEQ ID NO: 429704 - DNA, 25 bp, Artificial
  probe
  misc_feature (1)..(25): SEQ ID NO: 6102; WAN0249BI; Start 67; Stop 91
atcctttgtcaagcctaaattgaaa

SEQ ID NO: 429705 - DNA, 25 bp, Artificial
  probe
  misc_feature (1)..(25): SEQ ID NO: 6102; WAN0249BI; Start 65; Stop 89
tcatcctttgtcaagcctaaattga

SEQ ID NO: 429706 - DNA, 25 bp, Artificial
  probe
  misc_feature (1)..(25): SEQ ID NO: 6102; WAN0249BI; Start 51; Stop 75
taatactcctatactcatcctttgt

SEQ ID NO: 429707 - DNA, 25 bp, Artificial
  probe
  misc_feature (1)..(25): SEQ ID NO: 6102; WAN0249BI; Start 11; Stop 35
acaaagccttctttatgtttattct

SEQ ID NO: 429708 - DNA, 25 bp, Artificial
  probe
  misc_feature (1)..(25): SEQ ID NO: 6102; WAN0249BI; Start 12; Stop 36
caaagccttctttatgtttattctt

SEQ ID NO: 429709 - DNA, 25 bp, Artificial
  probe
  misc_feature (1)..(25): SEQ ID NO: 6102; WAN0249BI; Start 50; Stop 74
ataatactcctatactcatcctttg

SEQ ID NO: 429710 - DNA, 25 bp, Artificial
  probe
  misc_feature (1)..(25): SEQ ID NO: 6102; WAN0249BI; Start 68; Stop 92
tcctttgtcaagcctaaattgaaaa

SEQ ID NO: 429711 - DNA, 25 bp, Artificial
  probe
  misc_feature (1)..(25): SEQ ID NO: 6102; WAN0249BI; Start 6; Stop 30
tcataacaaagccttctttatgttt

SEQ ID NO: 429712 - DNA, 25 bp, Artificial
  probe
  misc_feature (1)..(25): SEQ ID NO: 6102; WAN0249BI; Start 5; Stop 29
ttcataacaaagccttctttatgtt

SEQ ID NO: 429713 - DNA, 25 bp, Artificial
  probe
  misc_feature (1)..(25): SEQ ID NO: 6102; WAN0249BI; Start 4; Stop 28
attcataacaaagccttctttatgt

SEQ ID NO: 429714 - DNA, 25 bp, Artificial
  probe
  misc_feature (1)..(25): SEQ ID NO: 6102; WAN0249BI; Start 10; Stop 34
aacaaagccttctttatgtttattc

SEQ ID NO: 429715 - DNA, 25 bp, Artificial
  probe
  misc_feature (1)..(25): SEQ ID NO: 6102; WAN0249BI; Start 13; Stop 37
aaagccttctttatgtttattcttt

SEQ ID NO: 429716 - DNA, 25 bp, Artificial
  probe
  misc_feature (1)..(25): SEQ ID NO: 6102; WAN0249BI; Start 1; Stop 25
cttattcataacaaagccttcttta

SEQ ID NO: 429717 - DNA, 25 bp, Artificial
  probe
  misc_feature (1)..(25): SEQ ID NO: 6102; WAN0249BI; Start 14; Stop 38
aagccttctttatgtttattctttt

SEQ ID NO: 429718 - DNA, 25 bp, Artificial
  probe
  misc_feature (1)..(25): SEQ ID NO: 6102; WAN0249BI; Start 7; Stop 31
cataacaaagccttctttatgttta

SEQ ID NO: 429719 - DNA, 25 bp, Artificial
  probe
  misc_feature (1)..(25): SEQ ID NO: 6102; WAN0249BI; Start 2; Stop 26
ttattcataacaaagccttctttat

SEQ ID NO: 429720 - DNA, 25 bp, Artificial
  probe
  misc_feature (1)..(25): SEQ ID NO: 6102; WAN0249BI; Start 9; Stop 33
taacaaagccttctttatgtttatt

SEQ ID NO: 429721 - DNA, 25 bp, Artificial
  probe
  misc_feature (1)..(25): SEQ ID NO: 6102; WAN0249BI; Start 3; Stop 27
tattcataacaaagccttctttatg

SEQ ID NO: 429722 - DNA, 25 bp, Artificial
  probe
  misc_feature (1)..(25): SEQ ID NO: 6102; WAN0249BI; Start 8; Stop 32
ataacaaagccttctttatgtttat

SEQ ID NO: 429723 - DNA, 25 bp, Artificial
  probe
  misc_feature (1)..(25): SEQ ID NO: 6103; WAN02496B; Start 75; Stop 99
agaaatagagatgggactgggataa

SEQ ID NO: 429724 - DNA, 25 bp, Artificial
  probe
  misc_feature (1)..(25): SEQ ID NO: 6103; WAN02496B; Start 74; Stop 98
aagaaatagagatgggactgggata

SEQ ID NO: 429725 - DNA, 25 bp, Artificial
  probe
  misc_feature (1)..(25): SEQ ID NO: 6103; WAN02496B; Start 77; Stop 101
aaatagagatgggactgggataatg

SEQ ID NO: 429726 - DNA, 25 bp, Artificial
  probe
  misc_feature (1)..(25): SEQ ID NO: 6103; WAN02496B; Start 72; Stop 96
taaagaaatagagatgggactggga

SEQ ID NO: 429727 - DNA, 25 bp, Artificial
  probe
  misc_feature (1)..(25): SEQ ID NO: 6103; WAN02496B; Start 71; Stop 95
ataaagaaatagagatgggactggg

SEQ ID NO: 429728 - DNA, 25 bp, Artificial
  probe
  misc_feature (1)..(25): SEQ ID NO: 6103; WAN02496B; Start 76; Stop 100
gaaatagagatgggactgggataat

SEQ ID NO: 429729 - DNA, 25 bp, Artificial
  probe
  misc_feature (1)..(25): SEQ ID NO: 6103; WAN02496B; Start 73; Stop 97
aaagaaatagagatgggactgggat

SEQ ID NO: 429730 - DNA, 25 bp, Artificial
  probe
  misc_feature (1)..(25): SEQ ID NO: 6103; WAN02496B; Start 78; Stop 102
aatagagatgggactgggataatgc

SEQ ID NO: 429731 - DNA, 25 bp, Artificial
  probe
  misc_feature (1)..(25): SEQ ID NO: 6103; WAN02496B; Start 49; Stop 73
gttctgtgatacaactcattgaata

SEQ ID NO: 429732 - DNA, 25 bp, Artificial
  probe
  misc_feature (1)..(25): SEQ ID NO: 6103; WAN02496B; Start 70; Stop 94
aataaagaaatagagatgggactgg

SEQ ID NO: 429733 - DNA, 25 bp, Artificial
  probe
  misc_feature (1)..(25): SEQ ID NO: 6103; WAN02496B; Start 47; Stop 71
aagttctgtgatacaactcattgaa

SEQ ID NO: 429734 - DNA, 25 bp, Artificial
  probe
  misc_feature (1)..(25): SEQ ID NO: 6103; WAN02496B; Start 48; Stop 72
agttctgtgatacaactcattgaat

SEQ ID NO: 429735 - DNA, 25 bp, Artificial
  probe
  misc_feature (1)..(25): SEQ ID NO: 6103; WAN02496B; Start 68; Stop 92
tgaataaagaaatagagatgggact

SEQ ID NO: 429736 - DNA, 25 bp, Artificial
  probe
  misc_feature (1)..(25): SEQ ID NO: 6103; WAN02496B; Start 50; Stop 74
ttctgtgatacaactcattgaataa

SEQ ID NO: 429737 - DNA, 25 bp, Artificial
  probe
  misc_feature (1)..(25): SEQ ID NO: 6103; WAN02496B; Start 69; Stop 93
gaataaagaaatagagatgggactg

SEQ ID NO: 429738 - DNA, 25 bp, Artificial
  probe
  misc_feature (1)..(25): SEQ ID NO: 6103; WAN02496B; Start 79; Stop 103
atagagatgggactgggataatgcc

SEQ ID NO: 429739 - DNA, 25 bp, Artificial
  probe
  misc_feature (1)..(25): SEQ ID NO: 6103; WAN02496B; Start 67; Stop 91
ttgaataaagaaatagagatgggac

SEQ ID NO: 429740 - DNA, 25 bp, Artificial
  probe
  misc_feature (1)..(25): SEQ ID NO: 6103; WAN02496B; Start 46; Stop 70
aaagttctgtgatacaactcattga

SEQ ID NO: 429741 - DNA, 25 bp, Artificial
  probe
  misc_feature (1)..(25): SEQ ID NO: 6103; WAN02496B; Start 53; Stop 77
tgtgatacaactcattgaataaaga

SEQ ID NO: 429742 - DNA, 25 bp, Artificial
  probe
  misc_feature (1)..(25): SEQ ID NO: 6103; WAN02496B; Start 51; Stop 75
tctgtgatacaactcattgaataaa

SEQ ID NO: 429743 - DNA, 25 bp, Artificial
  probe
  misc_feature (1)..(25): SEQ ID NO: 6103; WAN02496B; Start 42; Stop 66
ttctaaagttctgtgatacaactca

SEQ ID NO: 429744 - DNA, 25 bp, Artificial
  probe
  misc_feature (1)..(25): SEQ ID NO: 6103; WAN02496B; Start 52; Stop 76
ctgtgatacaactcattgaataaag

SEQ ID NO: 429745 - DNA, 25 bp, Artificial
  probe
  misc_feature (1)..(25): SEQ ID NO: 6103; WAN02496B; Start 43; Stop 67
tctaaagttctgtgatacaactcat

SEQ ID NO: 429746 - DNA, 25 bp, Artificial
  probe
  misc_feature (1)..(25): SEQ ID NO: 6103; WAN02496B; Start 66; Stop 90
attgaataaagaaatagagatggga

SEQ ID NO: 429747 - DNA, 25 bp, Artificial
  probe
  misc_feature (1)..(25): SEQ ID NO: 6103; WAN02496B; Start 65; Stop 89
cattgaataaagaaatagagatggg

SEQ ID NO: 429748 - DNA, 25 bp, Artificial
  probe
  misc_feature (1)..(25): SEQ ID NO: 6103; WAN02496B; Start 45; Stop 69
taaagttctgtgatacaactcattg

SEQ ID NO: 429749 - DNA, 25 bp, Artificial
  probe
  misc_feature (1)..(25): SEQ ID NO: 6103; WAN02496B; Start 54; Stop 78
gtgatacaactcattgaataaagaa

SEQ ID NO: 429750 - DNA, 25 bp, Artificial
  probe
  misc_feature (1)..(25): SEQ ID NO: 6103; WAN02496B; Start 44; Stop 68
ctaaagttctgtgatacaactcatt

SEQ ID NO: 429751 - DNA, 25 bp, Artificial
  probe
  misc_feature (1)..(25): SEQ ID NO: 6103; WAN02496B; Start 41; Stop 65
tttctaaagttctgtgatacaactc

SEQ ID NO: 429752 - DNA, 25 bp, Artificial
  probe
  misc_feature (1)..(25): SEQ ID NO: 6103; WAN02496B; Start 39; Stop 63
aatttctaaagttctgtgatacaac

SEQ ID NO: 429753 - DNA, 25 bp, Artificial
  probe
  misc_feature (1)..(25): SEQ ID NO: 6103; WAN02496B; Start 40; Stop 64
atttctaaagttctgtgatacaact

SEQ ID NO: 429754 - DNA, 25 bp, Artificial
  probe
  misc_feature (1)..(25): SEQ ID NO: 6103; WAN02496B; Start 55; Stop 79
tgatacaactcattgaataaagaaa

SEQ ID NO: 429755 - DNA, 25 bp, Artificial
  probe
  misc_feature (1)..(25): SEQ ID NO: 6103; WAN02496B; Start 80; Stop 104
tagagatgggactgggataatgccc

SEQ ID NO: 429756 - DNA, 25 bp, Artificial
  probe
  misc_feature (1)..(25): SEQ ID NO: 6103; WAN02496B; Start 8; Stop 32
aaaacagaatagtaaattcttgtca

SEQ ID NO: 429757 - DNA, 25 bp, Artificial
  probe
  misc_feature (1)..(25): SEQ ID NO: 6104; WAN024996; Start 12; Stop 36
aaacctatcatatccagctttagag

SEQ ID NO: 429758 - DNA, 25 bp, Artificial
  probe
  misc_feature (1)..(25): SEQ ID NO: 6104; WAN024996; Start 13; Stop 37
aacctatcatatccagctttagagc

SEQ ID NO: 429759 - DNA, 25 bp, Artificial
  probe
  misc_feature (1)..(25): SEQ ID NO: 6104; WAN024996; Start 29; Stop 53
ctttagagcttgtgtgataggcttt

SEQ ID NO: 429760 - DNA, 25 bp, Artificial
  probe
  misc_feature (1)..(25): SEQ ID NO: 6104; WAN024996; Start 11; Stop 35
aaaacctatcatatccagctttaga

SEQ ID NO: 429761 - DNA, 25 bp, Artificial
  probe
  misc_feature (1)..(25): SEQ ID NO: 6104; WAN024996; Start 28; Stop 52
gctttagagcttgtgtgataggctt

SEQ ID NO: 429762 - DNA, 25 bp, Artificial
  probe
  misc_feature (1)..(25): SEQ ID NO: 6104; WAN024996; Start 30; Stop 54
tttagagcttgtgtgataggctttt

SEQ ID NO: 429763 - DNA, 25 bp, Artificial
  probe
  misc_feature (1)..(25): SEQ ID NO: 6104; WAN024996; Start 15; Stop 39
cctatcatatccagctttagagctt

SEQ ID NO: 429764 - DNA, 25 bp, Artificial
  probe
  misc_feature (1)..(25): SEQ ID NO: 6104; WAN024996; Start 14; Stop 38
acctatcatatccagctttagagct

SEQ ID NO: 429765 - DNA, 25 bp, Artificial
  probe
  misc_feature (1)..(25): SEQ ID NO: 6104; WAN024996; Start 18; Stop 42
atcatatccagctttagagcttgtg

SEQ ID NO: 429766 - DNA, 25 bp, Artificial
  probe
  misc_feature (1)..(25): SEQ ID NO: 6104; WAN024996; Start 17; Stop 41
tatcatatccagctttagagcttgt

SEQ ID NO: 429767 - DNA, 25 bp, Artificial
  probe
  misc_feature (1)..(25): SEQ ID NO: 6104; WAN024996; Start 16; Stop 40
ctatcatatccagctttagagcttg

SEQ ID NO: 429768 - DNA, 25 bp, Artificial
  probe
  misc_feature (1)..(25): SEQ ID NO: 6104; WAN024996; Start 23; Stop 47
atccagctttagagcttgtgtgata

SEQ ID NO: 429769 - DNA, 25 bp, Artificial
  probe
  misc_feature (1)..(25): SEQ ID NO: 6104; WAN024996; Start 22; Stop 46
tatccagctttagagcttgtgtgat

SEQ ID NO: 429770 - DNA, 25 bp, Artificial
  probe
  misc_feature (1)..(25): SEQ ID NO: 6104; WAN024996; Start 21; Stop 45
atatccagctttagagcttgtgtga

SEQ ID NO: 429771 - DNA, 25 bp, Artificial
  probe
  misc_feature (1)..(25): SEQ ID NO: 6104; WAN024996; Start 20; Stop 44
catatccagctttagagcttgtgtg

SEQ ID NO: 429772 - DNA, 25 bp, Artificial
  probe
  misc_feature (1)..(25): SEQ ID NO: 6104; WAN024996; Start 19; Stop 43
tcatatccagctttagagcttgtgt

SEQ ID NO: 429773 - DNA, 25 bp, Artificial
  probe
  misc_feature (1)..(25): SEQ ID NO: 6104; WAN024996; Start 24; Stop 48
tccagctttagagcttgtgtgatag

SEQ ID NO: 429774 - DNA, 25 bp, Artificial
  probe
  misc_feature (1)..(25): SEQ ID NO: 6104; WAN024996; Start 25; Stop 49
ccagctttagagcttgtgtgatagg

SEQ ID NO: 429775 - DNA, 25 bp, Artificial
  probe
  misc_feature (1)..(25): SEQ ID NO: 6104; WAN024996; Start 26; Stop 50
cagctttagagcttgtgtgataggc

SEQ ID NO: 429776 - DNA, 25 bp, Artificial
  probe
  misc_feature (1)..(25): SEQ ID NO: 6104; WAN024996; Start 27; Stop 51
agctttagagcttgtgtgataggct

SEQ ID NO: 429777 - DNA, 25 bp, Artificial
  probe
  misc_feature (1)..(25): SEQ ID NO: 6105; WAN024964; Start 35; Stop 59
gactagcagatgtagtgatagacac

SEQ ID NO: 429778 - DNA, 25 bp, Artificial
  probe
  misc_feature (1)..(25): SEQ ID NO: 6105; WAN024964; Start 34; Stop 58
agactagcagatgtagtgatagaca

SEQ ID NO: 429779 - DNA, 25 bp, Artificial
  probe
  misc_feature (1)..(25): SEQ ID NO: 6105; WAN024964; Start 33; Stop 57
cagactagcagatgtagtgatagac

SEQ ID NO: 429780 - DNA, 25 bp, Artificial
  probe
  misc_feature (1)..(25): SEQ ID NO: 6105; WAN024964; Start 32; Stop 56
tcagactagcagatgtagtgataga

SEQ ID NO: 429781 - DNA, 25 bp, Artificial
  probe
  misc_feature (1)..(25): SEQ ID NO: 6105; WAN024964; Start 31; Stop 55
gtcagactagcagatgtagtgatag

SEQ ID NO: 429782 - DNA, 25 bp, Artificial
  probe
  misc_feature (1)..(25): SEQ ID NO: 6105; WAN024964; Start 30; Stop 54
tgtcagactagcagatgtagtgata

SEQ ID NO: 429783 - DNA, 25 bp, Artificial
  probe
  misc_feature (1)..(25): SEQ ID NO: 6105; WAN024964; Start 217; Stop 241
aacacagcatccacagattgactta

SEQ ID NO: 429784 - DNA, 25 bp, Artificial
  probe
  misc_feature (1)..(25): SEQ ID NO: 6105; WAN024964; Start 226; Stop 250
tccacagattgacttaggatattgt

SEQ ID NO: 429785 - DNA, 25 bp, Artificial
  probe
  misc_feature (1)..(25): SEQ ID NO: 6105; WAN024964; Start 3; Stop 27
aaccaattacaatgaagatacagct

SEQ ID NO: 429786 - DNA, 25 bp, Artificial
  probe
  misc_feature (1)..(25): SEQ ID NO: 6105; WAN024964; Start 227; Stop 251
ccacagattgacttaggatattgta

SEQ ID NO: 429787 - DNA, 25 bp, Artificial
  probe
  misc_feature (1)..(25): SEQ ID NO: 6105; WAN024964; Start 208; Stop 232
taatcaataaacacagcatccacag

SEQ ID NO: 429788 - DNA, 25 bp, Artificial
  probe
  misc_feature (1)..(25): SEQ ID NO: 6105; WAN024964; Start 29; Stop 53
ttgtcagactagcagatgtagtgat

SEQ ID NO: 429789 - DNA, 25 bp, Artificial
  probe
  misc_feature (1)..(25): SEQ ID NO: 6105; WAN024964; Start 218; Stop 242
acacagcatccacagattgacttag

SEQ ID NO: 429790 - DNA, 25 bp, Artificial
  probe
  misc_feature (1)..(25): SEQ ID NO: 6105; WAN024964; Start 210; Stop 234
atcaataaacacagcatccacagat

SEQ ID NO: 429791 - DNA, 25 bp, Artificial
  probe
  misc_feature (1)..(25): SEQ ID NO: 6105; WAN024964; Start 207; Stop 231
ttaatcaataaacacagcatccaca

SEQ ID NO: 429792 - DNA, 25 bp, Artificial
  probe
  misc_feature (1)..(25): SEQ ID NO: 6105; WAN024964; Start 209; Stop 233
aatcaataaacacagcatccacaga

SEQ ID NO: 429793 - DNA, 25 bp, Artificial
  probe
  misc_feature (1)..(25): SEQ ID NO: 6105; WAN024964; Start 213; Stop 237
aataaacacagcatccacagattga

SEQ ID NO: 429794 - DNA, 25 bp, Artificial
  probe
  misc_feature (1)..(25): SEQ ID NO: 6105; WAN024964; Start 211; Stop 235
tcaataaacacagcatccacagatt

SEQ ID NO: 429795 - DNA, 25 bp, Artificial
  probe
  misc_feature (1)..(25): SEQ ID NO: 6105; WAN024964; Start 28; Stop 52
gttgtcagactagcagatgtagtga

SEQ ID NO: 429796 - DNA, 25 bp, Artificial
  probe
  misc_feature (1)..(25): SEQ ID NO: 6105; WAN024964; Start 26; Stop 50
ctgttgtcagactagcagatgtagt

SEQ ID NO: 429797 - DNA, 25 bp, Artificial
  probe
  misc_feature (1)..(25): SEQ ID NO: 6105; WAN024964; Start 214; Stop 238
ataaacacagcatccacagattgac

SEQ ID NO: 429798 - DNA, 25 bp, Artificial
  probe
  misc_feature (1)..(25): SEQ ID NO: 6105; WAN024964; Start 27; Stop 51
tgttgtcagactagcagatgtagtg

SEQ ID NO: 429799 - DNA, 25 bp, Artificial
  probe
  misc_feature (1)..(25): SEQ ID NO: 6105; WAN024964; Start 219; Stop 243
cacagcatccacagattgacttagg

SEQ ID NO: 429800 - DNA, 25 bp, Artificial
  probe
  misc_feature (1)..(25): SEQ ID NO: 6105; WAN024964; Start 206; Stop 230
tttaatcaataaacacagcatccac

SEQ ID NO: 429801 - DNA, 25 bp, Artificial
  probe
  misc_feature (1)..(25): SEQ ID NO: 6105; WAN024964; Start 2; Stop 26
aaaccaattacaatgaagatacagc

SEQ ID NO: 429802 - DNA, 25 bp, Artificial
  probe
  misc_feature (1)..(25): SEQ ID NO: 6105; WAN024964; Start 205; Stop 229
ctttaatcaataaacacagcatcca

SEQ ID NO: 429803 - DNA, 25 bp, Artificial
  probe
  misc_feature (1)..(25): SEQ ID NO: 6105; WAN024964; Start 215; Stop 239
taaacacagcatccacagattgact

SEQ ID NO: 429804 - DNA, 25 bp, Artificial
  probe
  misc_feature (1)..(25): SEQ ID NO: 6105; WAN024964; Start 204; Stop 228
tctttaatcaataaacacagcatcc

SEQ ID NO: 429805 - DNA, 25 bp, Artificial
  probe
  misc_feature (1)..(25): SEQ ID NO: 6105; WAN024964; Start 51; Stop 75
gatagacactaatcagatgattggt

SEQ ID NO: 429806 - DNA, 25 bp, Artificial
  probe
  misc_feature (1)..(25): SEQ ID NO: 6105; WAN024964; Start 136; Stop 160
acacaatagagtataccctgaaacg

SEQ ID NO: 429807 - DNA, 25 bp, Artificial
  probe
  misc_feature (1)..(25): SEQ ID NO: 6105; WAN024964; Start 228; Stop 252
cacagattgacttaggatattgtaa

SEQ ID NO: 429808 - DNA, 25 bp, Artificial
  probe
  misc_feature (1)..(25): SEQ ID NO: 6105; WAN024964; Start 223; Stop 247
gcatccacagattgacttaggatat

SEQ ID NO: 429809 - DNA, 25 bp, Artificial
  probe
  misc_feature (1)..(25): SEQ ID NO: 6105; WAN024964; Start 137; Stop 161
cacaatagagtataccctgaaacgg

SEQ ID NO: 429810 - DNA, 25 bp, Artificial
  probe
  misc_feature (1)..(25): SEQ ID NO: 6106; WAN02495W; Start 6; Stop 30
gtgaatatagagaaacagaccgagt

SEQ ID NO: 429811 - DNA, 25 bp, Artificial
  probe
  misc_feature (1)..(25): SEQ ID NO: 6106; WAN02495W; Start 1; Stop 25
gaagggtgaatatagagaaacagac

SEQ ID NO: 429812 - DNA, 25 bp, Artificial
  probe
  misc_feature (1)..(25): SEQ ID NO: 6106; WAN02495W; Start 7; Stop 31
tgaatatagagaaacagaccgagta

SEQ ID NO: 429813 - DNA, 25 bp, Artificial
  probe
  misc_feature (1)..(25): SEQ ID NO: 6106; WAN02495W; Start 10; Stop 34
atatagagaaacagaccgagtaact

SEQ ID NO: 429814 - DNA, 25 bp, Artificial
  probe
  misc_feature (1)..(25): SEQ ID NO: 6106; WAN02495W; Start 9; Stop 33
aatatagagaaacagaccgagtaac

SEQ ID NO: 429815 - DNA, 25 bp, Artificial
  probe
  misc_feature (1)..(25): SEQ ID NO: 6106; WAN02495W; Start 35; Stop 59
cggttcaaattaatcaaatcaggga

SEQ ID NO: 429816 - DNA, 25 bp, Artificial
  probe
  misc_feature (1)..(25): SEQ ID NO: 6106; WAN02495W; Start 34; Stop 58
tcggttcaaattaatcaaatcaggg

SEQ ID NO: 429817 - DNA, 25 bp, Artificial
  probe
  misc_feature (1)..(25): SEQ ID NO: 6106; WAN02495W; Start 39; Stop 63
tcaaattaatcaaatcagggaagca

SEQ ID NO: 429818 - DNA, 25 bp, Artificial
  probe
  misc_feature (1)..(25): SEQ ID NO: 6106; WAN02495W; Start 8; Stop 32
gaatatagagaaacagaccgagtaa

SEQ ID NO: 429819 - DNA, 25 bp, Artificial
  probe
  misc_feature (1)..(25): SEQ ID NO: 6106; WAN02495W; Start 44; Stop 68
ttaatcaaatcagggaagcattggc

SEQ ID NO: 429820 - DNA, 25 bp, Artificial
  probe
  misc_feature (1)..(25): SEQ ID NO: 6106; WAN02495W; Start 43; Stop 67
attaatcaaatcagggaagcattgg

SEQ ID NO: 429821 - DNA, 25 bp, Artificial
  probe
  misc_feature (1)..(25): SEQ ID NO: 6106; WAN02495W; Start 33; Stop 57
ctcggttcaaattaatcaaatcagg

SEQ ID NO: 429822 - DNA, 25 bp, Artificial
  probe
  misc_feature (1)..(25): SEQ ID NO: 6106; WAN02495W; Start 11; Stop 35
tatagagaaacagaccgagtaactc

SEQ ID NO: 429823 - DNA, 25 bp, Artificial
  probe
  misc_feature (1)..(25): SEQ ID NO: 6106; WAN02495W; Start 2; Stop 26
aagggtgaatatagagaaacagacc

SEQ ID NO: 429824 - DNA, 25 bp, Artificial
  probe
  misc_feature (1)..(25): SEQ ID NO: 6106; WAN02495W; Start 5; Stop 29
ggtgaatatagagaaacagaccgag

SEQ ID NO: 429825 - DNA, 25 bp, Artificial
  probe
  misc_feature (1)..(25): SEQ ID NO: 6106; WAN02495W; Start 40; Stop 64
caaattaatcaaatcagggaagcat

SEQ ID NO: 429826 - DNA, 25 bp, Artificial
  probe
  misc_feature (1)..(25): SEQ ID NO: 6106; WAN02495W; Start 32; Stop 56
actcggttcaaattaatcaaatcag

SEQ ID NO: 429827 - DNA, 25 bp, Artificial
  probe
  misc_feature (1)..(25): SEQ ID NO: 6106; WAN02495W; Start 38; Stop 62
ttcaaattaatcaaatcagggaagc

SEQ ID NO: 429828 - DNA, 25 bp, Artificial
  probe
  misc_feature (1)..(25): SEQ ID NO: 6106; WAN02495W; Start 42; Stop 66
aattaatcaaatcagggaagcattg

SEQ ID NO: 429829 - DNA, 25 bp, Artificial
  probe
  misc_feature (1)..(25): SEQ ID NO: 6106; WAN02495W; Start 36; Stop 60
ggttcaaattaatcaaatcagggaa

SEQ ID NO: 429830 - DNA, 25 bp, Artificial
  probe
  misc_feature (1)..(25): SEQ ID NO: 6106; WAN02495W; Start 4; Stop 28
gggtgaatatagagaaacagaccga

SEQ ID NO: 429831 - DNA, 25 bp, Artificial
  probe
  misc_feature (1)..(25): SEQ ID NO: 6106; WAN02495W; Start 3; Stop 27
agggtgaatatagagaaacagaccg

SEQ ID NO: 429832 - DNA, 25 bp, Artificial
  probe
  misc_feature (1)..(25): SEQ ID NO: 6106; WAN02495W; Start 41; Stop 65
aaattaatcaaatcagggaagcatt

SEQ ID NO: 429833 - DNA, 25 bp, Artificial
  probe
  misc_feature (1)..(25): SEQ ID NO: 6106; WAN02495W; Start 31; Stop 55
aactcggttcaaattaatcaaatca

SEQ ID NO: 429834 - DNA, 25 bp, Artificial
  probe
  misc_feature (1)..(25): SEQ ID NO: 6106; WAN02495W; Start 27; Stop 51
gagtaactcggttcaaattaatcaa

SEQ ID NO: 429835 - DNA, 25 bp, Artificial
  probe
  misc_feature (1)..(25): SEQ ID NO: 6106; WAN02495W; Start 28; Stop 52
agtaactcggttcaaattaatcaaa

SEQ ID NO: 429836 - DNA, 25 bp, Artificial
  probe
  misc_feature (1)..(25): SEQ ID NO: 6106; WAN02495W; Start 37; Stop 61
gttcaaattaatcaaatcagggaag

SEQ ID NO: 429837 - DNA, 25 bp, Artificial
  probe
  misc_feature (1)..(25): SEQ ID NO: 6106; WAN02495W; Start 46; Stop 70
aatcaaatcagggaagcattggcta

SEQ ID NO: 429838 - DNA, 25 bp, Artificial
  probe
  misc_feature (1)..(25): SEQ ID NO: 6106; WAN02495W; Start 45; Stop 69
taatcaaatcagggaagcattggct

SEQ ID NO: 429839 - DNA, 25 bp, Artificial
  probe
  misc_feature (1)..(25): SEQ ID NO: 6106; WAN02495W; Start 29; Stop 53
gtaactcggttcaaattaatcaaat

SEQ ID NO: 429840 - DNA, 25 bp, Artificial
  probe
  misc_feature (1)..(25): SEQ ID NO: 6106; WAN02495W; Start 30; Stop 54
taactcggttcaaattaatcaaatc

SEQ ID NO: 429841 - DNA, 25 bp, Artificial
  probe
  misc_feature (1)..(25): SEQ ID NO: 6106; WAN02495W; Start 47; Stop 71
atcaaatcagggaagcattggctac

SEQ ID NO: 429842 - DNA, 25 bp, Artificial
  probe
  misc_feature (1)..(25): SEQ ID NO: 6107; WAN0249B4; Start 326; Stop 350
tatgagattactgacatgcgatgaa

SEQ ID NO: 429843 - DNA, 25 bp, Artificial
  probe
  misc_feature (1)..(25): SEQ ID NO: 6107; WAN0249B4; Start 325; Stop 349
ttatgagattactgacatgcgatga

SEQ ID NO: 429844 - DNA, 25 bp, Artificial
  probe
  misc_feature (1)..(25): SEQ ID NO: 6107; WAN0249B4; Start 324; Stop 348
cttatgagattactgacatgcgatg

SEQ ID NO: 429845 - DNA, 25 bp, Artificial
  probe
  misc_feature (1)..(25): SEQ ID NO: 6107; WAN0249B4; Start 323; Stop 347
ccttatgagattactgacatgcgat

SEQ ID NO: 429846 - DNA, 25 bp, Artificial
  probe
  misc_feature (1)..(25): SEQ ID NO: 6107; WAN0249B4; Start 321; Stop 345
ttccttatgagattactgacatgcg

SEQ ID NO: 429847 - DNA, 25 bp, Artificial
  probe
  misc_feature (1)..(25): SEQ ID NO: 6107; WAN0249B4; Start 320; Stop 344
attccttatgagattactgacatgc

SEQ ID NO: 429848 - DNA, 25 bp, Artificial
  probe
  misc_feature (1)..(25): SEQ ID NO: 6107; WAN0249B4; Start 322; Stop 346
tccttatgagattactgacatgcga

SEQ ID NO: 429849 - DNA, 25 bp, Artificial
  probe
  misc_feature (1)..(25): SEQ ID NO: 6107; WAN0249B4; Start 331; Stop 355
gattactgacatgcgatgaaactta

SEQ ID NO: 429850 - DNA, 25 bp, Artificial
  probe
  misc_feature (1)..(25): SEQ ID NO: 6107; WAN0249B4; Start 327; Stop 351
atgagattactgacatgcgatgaaa

SEQ ID NO: 429851 - DNA, 25 bp, Artificial
  probe
  misc_feature (1)..(25): SEQ ID NO: 6107; WAN0249B4; Start 356; Stop 380
agttatatggcaatgaagagtttct

SEQ ID NO: 429852 - DNA, 25 bp, Artificial
  probe
  misc_feature (1)..(25): SEQ ID NO: 6107; WAN0249B4; Start 330; Stop 354
agattactgacatgcgatgaaactt

SEQ ID NO: 429853 - DNA, 25 bp, Artificial
  probe
  misc_feature (1)..(25): SEQ ID NO: 6107; WAN0249B4; Start 353; Stop 377
ttaagttatatggcaatgaagagtt

SEQ ID NO: 429854 - DNA, 25 bp, Artificial
  probe
  misc_feature (1)..(25): SEQ ID NO: 6107; WAN0249B4; Start 332; Stop 356
attactgacatgcgatgaaacttaa

SEQ ID NO: 429855 - DNA, 25 bp, Artificial
  probe
  misc_feature (1)..(25): SEQ ID NO: 6107; WAN0249B4; Start 329; Stop 353
gagattactgacatgcgatgaaact

SEQ ID NO: 429856 - DNA, 25 bp, Artificial
  probe
  misc_feature (1)..(25): SEQ ID NO: 6107; WAN0249B4; Start 65; Stop 89
tgatcctcatcttagttcattcata

SEQ ID NO: 429857 - DNA, 25 bp, Artificial
  probe
  misc_feature (1)..(25): SEQ ID NO: 6107; WAN0249B4; Start 328; Stop 352
tgagattactgacatgcgatgaaac

SEQ ID NO: 429858 - DNA, 25 bp, Artificial
  probe
  misc_feature (1)..(25): SEQ ID NO: 6107; WAN0249B4; Start 357; Stop 381
gttatatggcaatgaagagtttctc

SEQ ID NO: 429859 - DNA, 25 bp, Artificial
  probe
  misc_feature (1)..(25): SEQ ID NO: 6107; WAN0249B4; Start 355; Stop 379
aagttatatggcaatgaagagtttc

SEQ ID NO: 429860 - DNA, 25 bp, Artificial
  probe
  misc_feature (1)..(25): SEQ ID NO: 6107; WAN0249B4; Start 319; Stop 343
aattccttatgagattactgacatg

SEQ ID NO: 429861 - DNA, 25 bp, Artificial
  probe
  misc_feature (1)..(25): SEQ ID NO: 6107; WAN0249B4; Start 66; Stop 90
gatcctcatcttagttcattcataa

SEQ ID NO: 429862 - DNA, 25 bp, Artificial
  probe
  misc_feature (1)..(25): SEQ ID NO: 6107; WAN0249B4; Start 64; Stop 88
atgatcctcatcttagttcattcat

SEQ ID NO: 429863 - DNA, 25 bp, Artificial
  probe
  misc_feature (1)..(25): SEQ ID NO: 6107; WAN0249B4; Start 225; Stop 249
tgtcataattacagtgtcgaaatgt

SEQ ID NO: 429864 - DNA, 25 bp, Artificial
  probe
  misc_feature (1)..(25): SEQ ID NO: 6107; WAN0249B4; Start 317; Stop 341
ctaattccttatgagattactgaca

SEQ ID NO: 429865 - DNA, 25 bp, Artificial
  probe
  misc_feature (1)..(25): SEQ ID NO: 6107; WAN0249B4; Start 316; Stop 340
actaattccttatgagattactgac

SEQ ID NO: 429866 - DNA, 25 bp, Artificial
  probe
  misc_feature (1)..(25): SEQ ID NO: 6107; WAN0249B4; Start 333; Stop 357
ttactgacatgcgatgaaacttaag

SEQ ID NO: 429867 - DNA, 25 bp, Artificial
  probe
  misc_feature (1)..(25): SEQ ID NO: 6107; WAN0249B4; Start 201; Stop 225
gagccaactatcccaaaatacttct

SEQ ID NO: 429868 - DNA, 25 bp, Artificial
  probe
  misc_feature (1)..(25): SEQ ID NO: 6107; WAN0249B4; Start 204; Stop 228
ccaactatcccaaaatacttctgtc

SEQ ID NO: 429869 - DNA, 25 bp, Artificial
  probe
  misc_feature (1)..(25): SEQ ID NO: 6107; WAN0249B4; Start 202; Stop 226
agccaactatcccaaaatacttctg

SEQ ID NO: 429870 - DNA, 25 bp, Artificial
  probe
  misc_feature (1)..(25): SEQ ID NO: 6107; WAN0249B4; Start 200; Stop 224
tgagccaactatcccaaaatacttc

SEQ ID NO: 429871 - DNA, 25 bp, Artificial
  probe
  misc_feature (1)..(25): SEQ ID NO: 6107; WAN0249B4; Start 203; Stop 227
gccaactatcccaaaatacttctgt

SEQ ID NO: 429872 - DNA, 25 bp, Artificial
  probe
  misc_feature (1)..(25): SEQ ID NO: 6107; WAN0249B4; Start 354; Stop 378
taagttatatggcaatgaagagttt

SEQ ID NO: 429873 - DNA, 25 bp, Artificial
  probe
  misc_feature (1)..(25): SEQ ID NO: 6107; WAN0249B4; Start 205; Stop 229
caactatcccaaaatacttctgtca

SEQ ID NO: 429874 - DNA, 25 bp, Artificial
  probe
  misc_feature (1)..(25): SEQ ID NO: 6107; WAN0249B4; Start 352; Stop 376
cttaagttatatggcaatgaagagt

SEQ ID NO: 429875 - DNA, 25 bp, Artificial
  probe
  misc_feature (1)..(25): SEQ ID NO: 6109; WAN02495X; Start 1; Stop 25
gacaacctgtaaagttaggctaaac

SEQ ID NO: 429876 - DNA, 25 bp, Artificial
  probe
  misc_feature (1)..(25): SEQ ID NO: 6109; WAN02495X; Start 2; Stop 26
acaacctgtaaagttaggctaaact

SEQ ID NO: 429877 - DNA, 25 bp, Artificial
  probe
  misc_feature (1)..(25): SEQ ID NO: 6109; WAN02495X; Start 3; Stop 27
caacctgtaaagttaggctaaacta

SEQ ID NO: 429878 - DNA, 25 bp, Artificial
  probe
  misc_feature (1)..(25): SEQ ID NO: 6109; WAN02495X; Start 4; Stop 28
aacctgtaaagttaggctaaactaa

SEQ ID NO: 429879 - DNA, 25 bp, Artificial
  probe
  misc_feature (1)..(25): SEQ ID NO: 6109; WAN02495X; Start 20; Stop 44
ctaaactaactcgcgcacataaatc

SEQ ID NO: 429880 - DNA, 25 bp, Artificial
  probe
  misc_feature (1)..(25): SEQ ID NO: 6109; WAN02495X; Start 21; Stop 45
taaactaactcgcgcacataaatca

SEQ ID NO: 429881 - DNA, 25 bp, Artificial
  probe
  misc_feature (1)..(25): SEQ ID NO: 6109; WAN02495X; Start 22; Stop 46
aaactaactcgcgcacataaatcaa

SEQ ID NO: 429882 - DNA, 25 bp, Artificial
  probe
  misc_feature (1)..(25): SEQ ID NO: 6109; WAN02495X; Start 23; Stop 47
aactaactcgcgcacataaatcaag

SEQ ID NO: 429883 - DNA, 25 bp, Artificial
  probe
  misc_feature (1)..(25): SEQ ID NO: 6109; WAN02495X; Start 19; Stop 43
gctaaactaactcgcgcacataaat

SEQ ID NO: 429884 - DNA, 25 bp, Artificial
  probe
  misc_feature (1)..(25): SEQ ID NO: 6109; WAN02495X; Start 5; Stop 29
acctgtaaagttaggctaaactaac

SEQ ID NO: 429885 - DNA, 25 bp, Artificial
  probe
  misc_feature (1)..(25): SEQ ID NO: 6109; WAN02495X; Start 25; Stop 49
ctaactcgcgcacataaatcaagga

SEQ ID NO: 429886 - DNA, 25 bp, Artificial
  probe
  misc_feature (1)..(25): SEQ ID NO: 6109; WAN02495X; Start 24; Stop 48
actaactcgcgcacataaatcaagg

SEQ ID NO: 429887 - DNA, 25 bp, Artificial
  probe
  misc_feature (1)..(25): SEQ ID NO: 6109; WAN02495X; Start 26; Stop 50
taactcgcgcacataaatcaaggag

SEQ ID NO: 429888 - DNA, 25 bp, Artificial
  probe
  misc_feature (1)..(25): SEQ ID NO: 6109; WAN02495X; Start 18; Stop 42
ggctaaactaactcgcgcacataaa

SEQ ID NO: 429889 - DNA, 25 bp, Artificial
  probe
  misc_feature (1)..(25): SEQ ID NO: 6109; WAN02495X; Start 16; Stop 40
taggctaaactaactcgcgcacata

SEQ ID NO: 429890 - DNA, 25 bp, Artificial
  probe
  misc_feature (1)..(25): SEQ ID NO: 6109; WAN02495X; Start 29; Stop 53
ctcgcgcacataaatcaaggagaaa

SEQ ID NO: 429891 - DNA, 25 bp, Artificial
  probe
  misc_feature (1)..(25): SEQ ID NO: 6109; WAN02495X; Start 17; Stop 41
aggctaaactaactcgcgcacataa

SEQ ID NO: 429892 - DNA, 25 bp, Artificial
  probe
  misc_feature (1)..(25): SEQ ID NO: 6109; WAN02495X; Start 30; Stop 54
tcgcgcacataaatcaaggagaaaa

SEQ ID NO: 429893 - DNA, 25 bp, Artificial
  probe
  misc_feature (1)..(25): SEQ ID NO: 6109; WAN02495X; Start 15; Stop 39
ttaggctaaactaactcgcgcacat

SEQ ID NO: 429894 - DNA, 25 bp, Artificial
  probe
  misc_feature (1)..(25): SEQ ID NO: 6109; WAN02495X; Start 28; Stop 52
actcgcgcacataaatcaaggagaa

SEQ ID NO: 429895 - DNA, 25 bp, Artificial
  probe
  misc_feature (1)..(25): SEQ ID NO: 6109; WAN02495X; Start 27; Stop 51
aactcgcgcacataaatcaaggaga

SEQ ID NO: 429896 - DNA, 25 bp, Artificial
  probe
  misc_feature (1)..(25): SEQ ID NO: 6110; WAN0249BY; Start 5; Stop 29
gctcgttctccagaaatattcatta

SEQ ID NO: 429897 - DNA, 25 bp, Artificial
  probe
  misc_feature (1)..(25): SEQ ID NO: 6110; WAN0249BY; Start 4; Stop 28
agctcgttctccagaaatattcatt

SEQ ID NO: 429898 - DNA, 25 bp, Artificial
  probe
  misc_feature (1)..(25): SEQ ID NO: 6110; WAN0249BY; Start 3; Stop 27
cagctcgttctccagaaatattcat

SEQ ID NO: 429899 - DNA, 25 bp, Artificial
  probe
  misc_feature (1)..(25): SEQ ID NO: 6110; WAN0249BY; Start 1; Stop 25
gacagctcgttctccagaaatattc

SEQ ID NO: 429900 - DNA, 25 bp, Artificial
  probe
  misc_feature (1)..(25): SEQ ID NO: 6110; WAN0249BY; Start 2; Stop 26
acagctcgttctccagaaatattca

SEQ ID NO: 429901 - DNA, 25 bp, Artificial
  probe
  misc_feature (1)..(25): SEQ ID NO: 6110; WAN0249BY; Start 8; Stop 32
cgttctccagaaatattcattaact

SEQ ID NO: 429902 - DNA, 25 bp, Artificial
  probe
  misc_feature (1)..(25): SEQ ID NO: 6110; WAN0249BY; Start 7; Stop 31
tcgttctccagaaatattcattaac

SEQ ID NO: 429903 - DNA, 25 bp, Artificial
  probe
  misc_feature (1)..(25): SEQ ID NO: 6110; WAN0249BY; Start 6; Stop 30
ctcgttctccagaaatattcattaa

SEQ ID NO: 429904 - DNA, 25 bp, Artificial
  probe
  misc_feature (1)..(25): SEQ ID NO: 6110; WAN0249BY; Start 9; Stop 33
gttctccagaaatattcattaactt

SEQ ID NO: 429905 - DNA, 25 bp, Artificial
  probe
  misc_feature (1)..(25): SEQ ID NO: 6110; WAN0249BY; Start 12; Stop 36
ctccagaaatattcattaactttca

SEQ ID NO: 429906 - DNA, 25 bp, Artificial
  probe
  misc_feature (1)..(25): SEQ ID NO: 6110; WAN0249BY; Start 42; Stop 66
atacttttcctttcgattttcaaaa

SEQ ID NO: 429907 - DNA, 25 bp, Artificial
  probe
  misc_feature (1)..(25): SEQ ID NO: 6110; WAN0249BY; Start 11; Stop 35
tctccagaaatattcattaactttc

SEQ ID NO: 429908 - DNA, 25 bp, Artificial
  probe
  misc_feature (1)..(25): SEQ ID NO: 6110; WAN0249BY; Start 41; Stop 65
tatacttttcctttcgattttcaaa

SEQ ID NO: 429909 - DNA, 25 bp, Artificial
  probe
  misc_feature (1)..(25): SEQ ID NO: 6110; WAN0249BY; Start 40; Stop 64
ttatacttttcctttcgattttcaa

SEQ ID NO: 429910 - DNA, 25 bp, Artificial
  probe
  misc_feature (1)..(25): SEQ ID NO: 6110; WAN0249BY; Start 39; Stop 63
tttatacttttcctttcgattttca

SEQ ID NO: 429911 - DNA, 25 bp, Artificial
  probe
  misc_feature (1)..(25): SEQ ID NO: 6111; WAN0249AF; Start 6; Stop 30
ctcccttggtttgatgctcgatttt

SEQ ID NO: 429912 - DNA, 25 bp, Artificial
  probe
  misc_feature (1)..(25): SEQ ID NO: 6112; WAN024966; Start 23; Stop 47
aaattccagaaagcatagagcaaat

SEQ ID NO: 429913 - DNA, 25 bp, Artificial
  probe
  misc_feature (1)..(25): SEQ ID NO: 6112; WAN024966; Start 20; Stop 44
gataaattccagaaagcatagagca

SEQ ID NO: 429914 - DNA, 25 bp, Artificial
  probe
  misc_feature (1)..(25): SEQ ID NO: 6112; WAN024966; Start 19; Stop 43
tgataaattccagaaagcatagagc

SEQ ID NO: 429915 - DNA, 25 bp, Artificial
  probe
  misc_feature (1)..(25): SEQ ID NO: 6112; WAN024966; Start 25; Stop 49
attccagaaagcatagagcaaattc

SEQ ID NO: 429916 - DNA, 25 bp, Artificial
  probe
  misc_feature (1)..(25): SEQ ID NO: 6112; WAN024966; Start 22; Stop 46
taaattccagaaagcatagagcaaa

SEQ ID NO: 429917 - DNA, 25 bp, Artificial
  probe
  misc_feature (1)..(25): SEQ ID NO: 6112; WAN024966; Start 44; Stop 68
aaattcgtggttcgtctgactaaat

SEQ ID NO: 429918 - DNA, 25 bp, Artificial
  probe
  misc_feature (1)..(25): SEQ ID NO: 6112; WAN024966; Start 66; Stop 90
aatttcttatctgaacaccaccttc

SEQ ID NO: 429919 - DNA, 25 bp, Artificial
  probe
  misc_feature (1)..(25): SEQ ID NO: 6112; WAN024966; Start 271; Stop 295
ttcgccagaggtgcttatattactg

SEQ ID NO: 429920 - DNA, 25 bp, Artificial
  probe
  misc_feature (1)..(25): SEQ ID NO: 6112; WAN024966; Start 21; Stop 45
ataaattccagaaagcatagagcaa

SEQ ID NO: 429921 - DNA, 25 bp, Artificial
  probe
  misc_feature (1)..(25): SEQ ID NO: 6112; WAN024966; Start 278; Stop 302
gaggtgcttatattactgggaagtt

SEQ ID NO: 429922 - DNA, 25 bp, Artificial
  probe
  misc_feature (1)..(25): SEQ ID NO: 6112; WAN024966; Start 280; Stop 304
ggtgcttatattactgggaagttga

SEQ ID NO: 429923 - DNA, 25 bp, Artificial
  probe
  misc_feature (1)..(25): SEQ ID NO: 6112; WAN024966; Start 279; Stop 303
aggtgcttatattactgggaagttg

SEQ ID NO: 429924 - DNA, 25 bp, Artificial
  probe
  misc_feature (1)..(25): SEQ ID NO: 6112; WAN024966; Start 277; Stop 301
agaggtgcttatattactgggaagt

SEQ ID NO: 429925 - DNA, 25 bp, Artificial
  probe
  misc_feature (1)..(25): SEQ ID NO: 6112; WAN024966; Start 269; Stop 293
ctttcgccagaggtgcttatattac

SEQ ID NO: 429926 - DNA, 25 bp, Artificial
  probe
  misc_feature (1)..(25): SEQ ID NO: 6112; WAN024966; Start 270; Stop 294
tttcgccagaggtgcttatattact

SEQ ID NO: 429927 - DNA, 25 bp, Artificial
  probe
  misc_feature (1)..(25): SEQ ID NO: 6112; WAN024966; Start 281; Stop 305
gtgcttatattactgggaagttgaa

SEQ ID NO: 429928 - DNA, 25 bp, Artificial
  probe
  misc_feature (1)..(25): SEQ ID NO: 6112; WAN024966; Start 24; Stop 48
aattccagaaagcatagagcaaatt

SEQ ID NO: 429929 - DNA, 25 bp, Artificial
  probe
  misc_feature (1)..(25): SEQ ID NO: 6112; WAN024966; Start 268; Stop 292
tctttcgccagaggtgcttatatta

SEQ ID NO: 429930 - DNA, 25 bp, Artificial
  probe
  misc_feature (1)..(25): SEQ ID NO: 6112; WAN024966; Start 43; Stop 67
caaattcgtggttcgtctgactaaa

SEQ ID NO: 429931 - DNA, 25 bp, Artificial
  probe
  misc_feature (1)..(25): SEQ ID NO: 6112; WAN024966; Start 282; Stop 306
tgcttatattactgggaagttgaag

SEQ ID NO: 429932 - DNA, 25 bp, Artificial
  probe
  misc_feature (1)..(25): SEQ ID NO: 6112; WAN024966; Start 276; Stop 300
cagaggtgcttatattactgggaag

SEQ ID NO: 429933 - DNA, 25 bp, Artificial
  probe
  misc_feature (1)..(25): SEQ ID NO: 6112; WAN024966; Start 45; Stop 69
aattcgtggttcgtctgactaaatt

SEQ ID NO: 429934 - DNA, 25 bp, Artificial
  probe
  misc_feature (1)..(25): SEQ ID NO: 6112; WAN024966; Start 283; Stop 307
gcttatattactgggaagttgaaga

SEQ ID NO: 429935 - DNA, 25 bp, Artificial
  probe
  misc_feature (1)..(25): SEQ ID NO: 6112; WAN024966; Start 26; Stop 50
ttccagaaagcatagagcaaattcg

SEQ ID NO: 429936 - DNA, 25 bp, Artificial
  probe
  misc_feature (1)..(25): SEQ ID NO: 6112; WAN024966; Start 8; Stop 32
tcctcctgttatgataaattccaga

SEQ ID NO: 429937 - DNA, 25 bp, Artificial
  probe
  misc_feature (1)..(25): SEQ ID NO: 6112; WAN024966; Start 32; Stop 56
aaagcatagagcaaattcgtggttc

SEQ ID NO: 429938 - DNA, 25 bp, Artificial
  probe
  misc_feature (1)..(25): SEQ ID NO: 6112; WAN024966; Start 267; Stop 291
ttctttcgccagaggtgcttatatt

SEQ ID NO: 429939 - DNA, 25 bp, Artificial
  probe
  misc_feature (1)..(25): SEQ ID NO: 6112; WAN024966; Start 31; Stop 55
gaaagcatagagcaaattcgtggtt

SEQ ID NO: 429940 - DNA, 25 bp, Artificial
  probe
  misc_feature (1)..(25): SEQ ID NO: 6112; WAN024966; Start 235; Stop 259
tggattcacttattactttaggaca

SEQ ID NO: 429941 - DNA, 25 bp, Artificial
  probe
  misc_feature (1)..(25): SEQ ID NO: 6112; WAN024966; Start 12; Stop 36
cctgttatgataaattccagaaagc

SEQ ID NO: 429942 - DNA, 25 bp, Artificial
  probe
  misc_feature (1)..(25): SEQ ID NO: 6112; WAN024966; Start 9; Stop 33
cctcctgttatgataaattccagaa

SEQ ID NO: 429943 - DNA, 25 bp, Artificial
  probe
  misc_feature (1)..(25): SEQ ID NO: 6112; WAN024966; Start 7; Stop 31
atcctcctgttatgataaattccag

SEQ ID NO: 429944 - DNA, 25 bp, Artificial
  probe
  misc_feature (1)..(25): SEQ ID NO: 6112; WAN024966; Start 50; Stop 74
gtggttcgtctgactaaatttctta

SEQ ID NO: 429945 - DNA, 25 bp, Artificial
  probe
  misc_feature (1)..(25): SEQ ID NO: 6115; WAN0249CK; Start 52; Stop 76
tgttcttgtcaaaccatatctgaaa

SEQ ID NO: 429946 - DNA, 25 bp, Artificial
  probe
  misc_feature (1)..(25): SEQ ID NO: 6115; WAN0249CK; Start 49; Stop 73
gaatgttcttgtcaaaccatatctg

SEQ ID NO: 429947 - DNA, 25 bp, Artificial
  probe
  misc_feature (1)..(25): SEQ ID NO: 6115; WAN0249CK; Start 51; Stop 75
atgttcttgtcaaaccatatctgaa

SEQ ID NO: 429948 - DNA, 25 bp, Artificial
  probe
  misc_feature (1)..(25): SEQ ID NO: 6115; WAN0249CK; Start 50; Stop 74
aatgttcttgtcaaaccatatctga

SEQ ID NO: 429949 - DNA, 25 bp, Artificial
  probe
  misc_feature (1)..(25): SEQ ID NO: 6115; WAN0249CK; Start 48; Stop 72
agaatgttcttgtcaaaccatatct

SEQ ID NO: 429950 - DNA, 25 bp, Artificial
  probe
  misc_feature (1)..(25): SEQ ID NO: 6115; WAN0249CK; Start 26; Stop 50
tataacacgattctacagtgaaaga

SEQ ID NO: 429951 - DNA, 25 bp, Artificial
  probe
  misc_feature (1)..(25): SEQ ID NO: 6115; WAN0249CK; Start 27; Stop 51
ataacacgattctacagtgaaagaa

SEQ ID NO: 429952 - DNA, 25 bp, Artificial
  probe
  misc_feature (1)..(25): SEQ ID NO: 6115; WAN0249CK; Start 42; Stop 66
agtgaaagaatgttcttgtcaaacc

SEQ ID NO: 429953 - DNA, 25 bp, Artificial
  probe
  misc_feature (1)..(25): SEQ ID NO: 6115; WAN0249CK; Start 44; Stop 68
tgaaagaatgttcttgtcaaaccat

SEQ ID NO: 429954 - DNA, 25 bp, Artificial
  probe
  misc_feature (1)..(25): SEQ ID NO: 6115; WAN0249CK; Start 43; Stop 67
gtgaaagaatgttcttgtcaaacca

SEQ ID NO: 429955 - DNA, 25 bp, Artificial
  probe
  misc_feature (1)..(25): SEQ ID NO: 6115; WAN0249CK; Start 40; Stop 64
acagtgaaagaatgttcttgtcaaa

SEQ ID NO: 429956 - DNA, 25 bp, Artificial
  probe
  misc_feature (1)..(25): SEQ ID NO: 6115; WAN0249CK; Start 41; Stop 65
cagtgaaagaatgttcttgtcaaac

SEQ ID NO: 429957 - DNA, 25 bp, Artificial
  probe
  misc_feature (1)..(25): SEQ ID NO: 6115; WAN0249CK; Start 38; Stop 62
ctacagtgaaagaatgttcttgtca

SEQ ID NO: 429958 - DNA, 25 bp, Artificial
  probe
  misc_feature (1)..(25): SEQ ID NO: 6115; WAN0249CK; Start 37; Stop 61
tctacagtgaaagaatgttcttgtc

SEQ ID NO: 429959 - DNA, 25 bp, Artificial
  probe
  misc_feature (1)..(25): SEQ ID NO: 6115; WAN0249CK; Start 39; Stop 63
tacagtgaaagaatgttcttgtcaa

SEQ ID NO: 429960 - DNA, 25 bp, Artificial
  probe
  misc_feature (1)..(25): SEQ ID NO: 6115; WAN0249CK; Start 36; Stop 60
ttctacagtgaaagaatgttcttgt

SEQ ID NO: 429961 - DNA, 25 bp, Artificial
  probe
  misc_feature (1)..(25): SEQ ID NO: 6115; WAN0249CK; Start 25; Stop 49
ttataacacgattctacagtgaaag

SEQ ID NO: 429962 - DNA, 25 bp, Artificial
  probe
  misc_feature (1)..(25): SEQ ID NO: 6115; WAN0249CK; Start 53; Stop 77
gttcttgtcaaaccatatctgaaaa

SEQ ID NO: 429963 - DNA, 25 bp, Artificial
  probe
  misc_feature (1)..(25): SEQ ID NO: 6115; WAN0249CK; Start 45; Stop 69
gaaagaatgttcttgtcaaaccata

SEQ ID NO: 429964 - DNA, 25 bp, Artificial
  probe
  misc_feature (1)..(25): SEQ ID NO: 6115; WAN0249CK; Start 47; Stop 71
aagaatgttcttgtcaaaccatatc

SEQ ID NO: 429965 - DNA, 25 bp, Artificial
  probe
  misc_feature (1)..(25): SEQ ID NO: 6115; WAN0249CK; Start 24; Stop 48
tttataacacgattctacagtgaaa

SEQ ID NO: 429966 - DNA, 25 bp, Artificial
  probe
  misc_feature (1)..(25): SEQ ID NO: 6115; WAN0249CK; Start 46; Stop 70
aaagaatgttcttgtcaaaccatat

SEQ ID NO: 429967 - DNA, 25 bp, Artificial
  probe
  misc_feature (1)..(25): SEQ ID NO: 6115; WAN0249CK; Start 31; Stop 55
cacgattctacagtgaaagaatgtt

SEQ ID NO: 429968 - DNA, 25 bp, Artificial
  probe
  misc_feature (1)..(25): SEQ ID NO: 6115; WAN0249CK; Start 29; Stop 53
aacacgattctacagtgaaagaatg

SEQ ID NO: 429969 - DNA, 25 bp, Artificial
  probe
  misc_feature (1)..(25): SEQ ID NO: 6115; WAN0249CK; Start 30; Stop 54
acacgattctacagtgaaagaatgt

SEQ ID NO: 429970 - DNA, 25 bp, Artificial
  probe
  misc_feature (1)..(25): SEQ ID NO: 6115; WAN0249CK; Start 32; Stop 56
acgattctacagtgaaagaatgttc

SEQ ID NO: 429971 - DNA, 25 bp, Artificial
  probe
  misc_feature (1)..(25): SEQ ID NO: 6115; WAN0249CK; Start 33; Stop 57
cgattctacagtgaaagaatgttct

SEQ ID NO: 429972 - DNA, 25 bp, Artificial
  probe
  misc_feature (1)..(25): SEQ ID NO: 6115; WAN0249CK; Start 28; Stop 52
taacacgattctacagtgaaagaat

SEQ ID NO: 429973 - DNA, 25 bp, Artificial
  probe
  misc_feature (1)..(25): SEQ ID NO: 6115; WAN0249CK; Start 23; Stop 47
ttttataacacgattctacagtgaa

SEQ ID NO: 429974 - DNA, 25 bp, Artificial
  probe
  misc_feature (1)..(25): SEQ ID NO: 6115; WAN0249CK; Start 20; Stop 44
agattttataacacgattctacagt

SEQ ID NO: 429975 - DNA, 25 bp, Artificial
  probe
  misc_feature (1)..(25): SEQ ID NO: 6115; WAN0249CK; Start 35; Stop 59
attctacagtgaaagaatgttcttg

SEQ ID NO: 429976 - DNA, 25 bp, Artificial
  probe
  misc_feature (1)..(25): SEQ ID NO: 6115; WAN0249CK; Start 22; Stop 46
attttataacacgattctacagtga

SEQ ID NO: 429977 - DNA, 25 bp, Artificial
  probe
  misc_feature (1)..(25): SEQ ID NO: 6115; WAN0249CK; Start 34; Stop 58
gattctacagtgaaagaatgttctt

SEQ ID NO: 429978 - DNA, 25 bp, Artificial
  probe
  misc_feature (1)..(25): SEQ ID NO: 6116; WAN0249AL; Start 37; Stop 61
acgctattctaaggtctatattggt

SEQ ID NO: 429979 - DNA, 25 bp, Artificial
  probe
  misc_feature (1)..(25): SEQ ID NO: 6116; WAN0249AL; Start 36; Stop 60
cacgctattctaaggtctatattgg

SEQ ID NO: 429980 - DNA, 25 bp, Artificial
  probe
  misc_feature (1)..(25): SEQ ID NO: 6116; WAN0249AL; Start 62; Stop 86
ttagttctgttgatctggattgctt

SEQ ID NO: 429981 - DNA, 25 bp, Artificial
  probe
  misc_feature (1)..(25): SEQ ID NO: 6116; WAN0249AL; Start 35; Stop 59
acacgctattctaaggtctatattg

SEQ ID NO: 429982 - DNA, 25 bp, Artificial
  probe
  misc_feature (1)..(25): SEQ ID NO: 6116; WAN0249AL; Start 38; Stop 62
cgctattctaaggtctatattggtt

SEQ ID NO: 429983 - DNA, 25 bp, Artificial
  probe
  misc_feature (1)..(25): SEQ ID NO: 6116; WAN0249AL; Start 74; Stop 98
atctggattgctttcttctttcttc

SEQ ID NO: 429984 - DNA, 25 bp, Artificial
  probe
  misc_feature (1)..(25): SEQ ID NO: 6116; WAN0249AL; Start 30; Stop 54
ttattacacgctattctaaggtcta

SEQ ID NO: 429985 - DNA, 25 bp, Artificial
  probe
  misc_feature (1)..(25): SEQ ID NO: 6116; WAN0249AL; Start 71; Stop 95
ttgatctggattgctttcttctttc

SEQ ID NO: 429986 - DNA, 25 bp, Artificial
  probe
  misc_feature (1)..(25): SEQ ID NO: 6116; WAN0249AL; Start 70; Stop 94
gttgatctggattgctttcttcttt

SEQ ID NO: 429987 - DNA, 25 bp, Artificial
  probe
  misc_feature (1)..(25): SEQ ID NO: 6116; WAN0249AL; Start 59; Stop 83
ggtttagttctgttgatctggattg

SEQ ID NO: 429988 - DNA, 25 bp, Artificial
  probe
  misc_feature (1)..(25): SEQ ID NO: 6116; WAN0249AL; Start 58; Stop 82
tggtttagttctgttgatctggatt

SEQ ID NO: 429989 - DNA, 25 bp, Artificial
  probe
  misc_feature (1)..(25): SEQ ID NO: 6116; WAN0249AL; Start 57; Stop 81
ttggtttagttctgttgatctggat

SEQ ID NO: 429990 - DNA, 25 bp, Artificial
  probe
  misc_feature (1)..(25): SEQ ID NO: 6116; WAN0249AL; Start 56; Stop 80
attggtttagttctgttgatctgga

SEQ ID NO: 429991 - DNA, 25 bp, Artificial
  probe
  misc_feature (1)..(25): SEQ ID NO: 6116; WAN0249AL; Start 72; Stop 96
tgatctggattgctttcttctttct

SEQ ID NO: 429992 - DNA, 25 bp, Artificial
  probe
  misc_feature (1)..(25): SEQ ID NO: 6116; WAN0249AL; Start 63; Stop 87
tagttctgttgatctggattgcttt

SEQ ID NO: 429993 - DNA, 25 bp, Artificial
  probe
  misc_feature (1)..(25): SEQ ID NO: 6116; WAN0249AL; Start 61; Stop 85
tttagttctgttgatctggattgct

SEQ ID NO: 429994 - DNA, 25 bp, Artificial
  probe
  misc_feature (1)..(25): SEQ ID NO: 6116; WAN0249AL; Start 60; Stop 84
gtttagttctgttgatctggattgc

SEQ ID NO: 429995 - DNA, 25 bp, Artificial
  probe
  misc_feature (1)..(25): SEQ ID NO: 6116; WAN0249AL; Start 73; Stop 97
gatctggattgctttcttctttctt

SEQ ID NO: 429996 - DNA, 25 bp, Artificial
  probe
  misc_feature (1)..(25): SEQ ID NO: 6116; WAN0249AL; Start 32; Stop 56
attacacgctattctaaggtctata

SEQ ID NO: 429997 - DNA, 25 bp, Artificial
  probe
  misc_feature (1)..(25): SEQ ID NO: 6116; WAN0249AL; Start 31; Stop 55
tattacacgctattctaaggtctat

SEQ ID NO: 429998 - DNA, 25 bp, Artificial
  probe
  misc_feature (1)..(25): SEQ ID NO: 6116; WAN0249AL; Start 34; Stop 58
tacacgctattctaaggtctatatt

SEQ ID NO: 429999 - DNA, 25 bp, Artificial
  probe
  misc_feature (1)..(25): SEQ ID NO: 6116; WAN0249AL; Start 33; Stop 57
ttacacgctattctaaggtctatat

SEQ ID NO: 430000 - DNA, 25 bp, Artificial
  probe
  misc_feature (1)..(25): SEQ ID NO: 6116; WAN0249AL; Start 69; Stop 93
tgttgatctggattgctttcttctt

SEQ ID NO: 430001 - DNA, 25 bp, Artificial
  probe
  misc_feature (1)..(25): SEQ ID NO: 6116; WAN0249AL; Start 66; Stop 90
ttctgttgatctggattgctttctt

SEQ ID NO: 430002 - DNA, 25 bp, Artificial
  probe
  misc_feature (1)..(25): SEQ ID NO: 6116; WAN0249AL; Start 55; Stop 79
tattggtttagttctgttgatctgg

SEQ ID NO: 430003 - DNA, 25 bp, Artificial
  probe
  misc_feature (1)..(25): SEQ ID NO: 6116; WAN0249AL; Start 68; Stop 92
ctgttgatctggattgctttcttct

SEQ ID NO: 430004 - DNA, 25 bp, Artificial
  probe
  misc_feature (1)..(25): SEQ ID NO: 6116; WAN0249AL; Start 67; Stop 91
tctgttgatctggattgctttcttc

SEQ ID NO: 430005 - DNA, 25 bp, Artificial
  probe
  misc_feature (1)..(25): SEQ ID NO: 6116; WAN0249AL; Start 65; Stop 89
gttctgttgatctggattgctttct

SEQ ID NO: 430006 - DNA, 25 bp, Artificial
  probe
  misc_feature (1)..(25): SEQ ID NO: 6116; WAN0249AL; Start 64; Stop 88
agttctgttgatctggattgctttc

SEQ ID NO: 430007 - DNA, 25 bp, Artificial
  probe
  misc_feature (1)..(25): SEQ ID NO: 6116; WAN0249AL; Start 29; Stop 53
tttattacacgctattctaaggtct

SEQ ID NO: 430008 - DNA, 25 bp, Artificial
  probe
  misc_feature (1)..(25): SEQ ID NO: 6116; WAN0249AL; Start 49; Stop 73
ggtctatattggtttagttctgttg

SEQ ID NO: 430009 - DNA, 25 bp, Artificial
  probe
  misc_feature (1)..(25): SEQ ID NO: 6116; WAN0249AL; Start 48; Stop 72
aggtctatattggtttagttctgtt

SEQ ID NO: 430010 - DNA, 25 bp, Artificial
  probe
  misc_feature (1)..(25): SEQ ID NO: 6116; WAN0249AL; Start 47; Stop 71
aaggtctatattggtttagttctgt

SEQ ID NO: 430011 - DNA, 25 bp, Artificial
  probe
  misc_feature (1)..(25): SEQ ID NO: 6117; WAN024994; Start 224; Stop 248
atgaaagcgtagaatagaggtgttt

SEQ ID NO: 430012 - DNA, 25 bp, Artificial
  probe
  misc_feature (1)..(25): SEQ ID NO: 6117; WAN024994; Start 223; Stop 247
tatgaaagcgtagaatagaggtgtt

SEQ ID NO: 430013 - DNA, 25 bp, Artificial
  probe
  misc_feature (1)..(25): SEQ ID NO: 6117; WAN024994; Start 219; Stop 243
gcaatatgaaagcgtagaatagagg

SEQ ID NO: 430014 - DNA, 25 bp, Artificial
  probe
  misc_feature (1)..(25): SEQ ID NO: 6117; WAN024994; Start 216; Stop 240
gcagcaatatgaaagcgtagaatag

SEQ ID NO: 430015 - DNA, 25 bp, Artificial
  probe
  misc_feature (1)..(25): SEQ ID NO: 6117; WAN024994; Start 222; Stop 246
atatgaaagcgtagaatagaggtgt

SEQ ID NO: 430016 - DNA, 25 bp, Artificial
  probe
  misc_feature (1)..(25): SEQ ID NO: 6117; WAN024994; Start 217; Stop 241
cagcaatatgaaagcgtagaataga

SEQ ID NO: 430017 - DNA, 25 bp, Artificial
  probe
  misc_feature (1)..(25): SEQ ID NO: 6117; WAN024994; Start 231; Stop 255
cgtagaatagaggtgtttccaatgt

SEQ ID NO: 430018 - DNA, 25 bp, Artificial
  probe
  misc_feature (1)..(25): SEQ ID NO: 6117; WAN024994; Start 218; Stop 242
agcaatatgaaagcgtagaatagag

SEQ ID NO: 430019 - DNA, 25 bp, Artificial
  probe
  misc_feature (1)..(25): SEQ ID NO: 6117; WAN024994; Start 221; Stop 245
aatatgaaagcgtagaatagaggtg

SEQ ID NO: 430020 - DNA, 25 bp, Artificial
  probe
  misc_feature (1)..(25): SEQ ID NO: 6117; WAN024994; Start 220; Stop 244
caatatgaaagcgtagaatagaggt

SEQ ID NO: 430021 - DNA, 25 bp, Artificial
  probe
  misc_feature (1)..(25): SEQ ID NO: 6117; WAN024994; Start 230; Stop 254
gcgtagaatagaggtgtttccaatg

SEQ ID NO: 430022 - DNA, 25 bp, Artificial
  probe
  misc_feature (1)..(25): SEQ ID NO: 6117; WAN024994; Start 229; Stop 253
agcgtagaatagaggtgtttccaat

SEQ ID NO: 430023 - DNA, 25 bp, Artificial
  probe
  misc_feature (1)..(25): SEQ ID NO: 6117; WAN024994; Start 232; Stop 256
gtagaatagaggtgtttccaatgta

SEQ ID NO: 430024 - DNA, 25 bp, Artificial
  probe
  misc_feature (1)..(25): SEQ ID NO: 6117; WAN024994; Start 228; Stop 252
aagcgtagaatagaggtgtttccaa

SEQ ID NO: 430025 - DNA, 25 bp, Artificial
  probe
  misc_feature (1)..(25): SEQ ID NO: 6117; WAN024994; Start 227; Stop 251
aaagcgtagaatagaggtgtttcca

SEQ ID NO: 430026 - DNA, 25 bp, Artificial
  probe
  misc_feature (1)..(25): SEQ ID NO: 6117; WAN024994; Start 233; Stop 257
tagaatagaggtgtttccaatgtac

SEQ ID NO: 430027 - DNA, 25 bp, Artificial
  probe
  misc_feature (1)..(25): SEQ ID NO: 6117; WAN024994; Start 215; Stop 239
tgcagcaatatgaaagcgtagaata

SEQ ID NO: 430028 - DNA, 25 bp, Artificial
  probe
  misc_feature (1)..(25): SEQ ID NO: 6117; WAN024994; Start 225; Stop 249
tgaaagcgtagaatagaggtgtttc

SEQ ID NO: 430029 - DNA, 25 bp, Artificial
  probe
  misc_feature (1)..(25): SEQ ID NO: 6117; WAN024994; Start 214; Stop 238
atgcagcaatatgaaagcgtagaat

SEQ ID NO: 430030 - DNA, 25 bp, Artificial
  probe
  misc_feature (1)..(25): SEQ ID NO: 6117; WAN024994; Start 202; Stop 226
tttgaaagtgtcatgcagcaatatg

SEQ ID NO: 430031 - DNA, 25 bp, Artificial
  probe
  misc_feature (1)..(25): SEQ ID NO: 6117; WAN024994; Start 226; Stop 250
gaaagcgtagaatagaggtgtttcc

SEQ ID NO: 430032 - DNA, 25 bp, Artificial
  probe
  misc_feature (1)..(25): SEQ ID NO: 6117; WAN024994; Start 87; Stop 111
ctagttcctataagtacagaaacct

SEQ ID NO: 430033 - DNA, 25 bp, Artificial
  probe
  misc_feature (1)..(25): SEQ ID NO: 6117; WAN024994; Start 56; Stop 80
agatattttatgatgggcgaagttt

SEQ ID NO: 430034 - DNA, 25 bp, Artificial
  probe
  misc_feature (1)..(25): SEQ ID NO: 6117; WAN024994; Start 213; Stop 237
catgcagcaatatgaaagcgtagaa

SEQ ID NO: 430035 - DNA, 25 bp, Artificial
  probe
  misc_feature (1)..(25): SEQ ID NO: 6117; WAN024994; Start 57; Stop 81
gatattttatgatgggcgaagtttt

SEQ ID NO: 430036 - DNA, 25 bp, Artificial
  probe
  misc_feature (1)..(25): SEQ ID NO: 6117; WAN024994; Start 55; Stop 79
tagatattttatgatgggcgaagtt

SEQ ID NO: 430037 - DNA, 25 bp, Artificial
  probe
  misc_feature (1)..(25): SEQ ID NO: 6117; WAN024994; Start 191; Stop 215
agcaatttgattttgaaagtgtcat

SEQ ID NO: 430038 - DNA, 25 bp, Artificial
  probe
  misc_feature (1)..(25): SEQ ID NO: 6117; WAN024994; Start 54; Stop 78
atagatattttatgatgggcgaagt

SEQ ID NO: 430039 - DNA, 25 bp, Artificial
  probe
  misc_feature (1)..(25): SEQ ID NO: 6117; WAN024994; Start 89; Stop 113
agttcctataagtacagaaacctat

SEQ ID NO: 430040 - DNA, 25 bp, Artificial
  probe
  misc_feature (1)..(25): SEQ ID NO: 6117; WAN024994; Start 190; Stop 214
tagcaatttgattttgaaagtgtca

SEQ ID NO: 430041 - DNA, 25 bp, Artificial
  probe
  misc_feature (1)..(25): SEQ ID NO: 6117; WAN024994; Start 206; Stop 230
aaagtgtcatgcagcaatatgaaag

SEQ ID NO: 430042 - DNA, 25 bp, Artificial
  probe
  misc_feature (1)..(25): SEQ ID NO: 6117; WAN024994; Start 205; Stop 229
gaaagtgtcatgcagcaatatgaaa

SEQ ID NO: 430043 - DNA, 25 bp, Artificial
  probe
  misc_feature (1)..(25): SEQ ID NO: 6117; WAN024994; Start 193; Stop 217
caatttgattttgaaagtgtcatgc

SEQ ID NO: 430044 - DNA, 25 bp, Artificial
  probe
  misc_feature (1)..(25): SEQ ID NO: 6118; WAN02495R; Start 44; Stop 68
tgtcgtttgaaatatcaggaggaaa

SEQ ID NO: 430045 - DNA, 25 bp, Artificial
  probe
  misc_feature (1)..(25): SEQ ID NO: 6118; WAN02495R; Start 41; Stop 65
tagtgtcgtttgaaatatcaggagg

SEQ ID NO: 430046 - DNA, 25 bp, Artificial
  probe
  misc_feature (1)..(25): SEQ ID NO: 6118; WAN02495R; Start 39; Stop 63
catagtgtcgtttgaaatatcagga

SEQ ID NO: 430047 - DNA, 25 bp, Artificial
  probe
  misc_feature (1)..(25): SEQ ID NO: 6118; WAN02495R; Start 38; Stop 62
tcatagtgtcgtttgaaatatcagg

SEQ ID NO: 430048 - DNA, 25 bp, Artificial
  probe
  misc_feature (1)..(25): SEQ ID NO: 6118; WAN02495R; Start 43; Stop 67
gtgtcgtttgaaatatcaggaggaa

SEQ ID NO: 430049 - DNA, 25 bp, Artificial
  probe
  misc_feature (1)..(25): SEQ ID NO: 6118; WAN02495R; Start 40; Stop 64
atagtgtcgtttgaaatatcaggag

SEQ ID NO: 430050 - DNA, 25 bp, Artificial
  probe
  misc_feature (1)..(25): SEQ ID NO: 6118; WAN02495R; Start 42; Stop 66
agtgtcgtttgaaatatcaggagga

SEQ ID NO: 430051 - DNA, 25 bp, Artificial
  probe
  misc_feature (1)..(25): SEQ ID NO: 6118; WAN02495R; Start 31; Stop 55
agtagtatcatagtgtcgtttgaaa

SEQ ID NO: 430052 - DNA, 25 bp, Artificial
  probe
  misc_feature (1)..(25): SEQ ID NO: 6118; WAN02495R; Start 30; Stop 54
aagtagtatcatagtgtcgtttgaa

SEQ ID NO: 430053 - DNA, 25 bp, Artificial
  probe
  misc_feature (1)..(25): SEQ ID NO: 6118; WAN02495R; Start 29; Stop 53
aaagtagtatcatagtgtcgtttga

SEQ ID NO: 430054 - DNA, 25 bp, Artificial
  probe
  misc_feature (1)..(25): SEQ ID NO: 6118; WAN02495R; Start 4; Stop 28
ctttctccttgcatcagtcctataa

SEQ ID NO: 430055 - DNA, 25 bp, Artificial
  probe
  misc_feature (1)..(25): SEQ ID NO: 6118; WAN02495R; Start 5; Stop 29
tttctccttgcatcagtcctataaa

SEQ ID NO: 430056 - DNA, 25 bp, Artificial
  probe
  misc_feature (1)..(25): SEQ ID NO: 6118; WAN02495R; Start 37; Stop 61
atcatagtgtcgtttgaaatatcag

SEQ ID NO: 430057 - DNA, 25 bp, Artificial
  probe
  misc_feature (1)..(25): SEQ ID NO: 6118; WAN02495R; Start 45; Stop 69
gtcgtttgaaatatcaggaggaaac

SEQ ID NO: 430058 - DNA, 25 bp, Artificial
  probe
  misc_feature (1)..(25): SEQ ID NO: 6118; WAN02495R; Start 32; Stop 56
gtagtatcatagtgtcgtttgaaat

SEQ ID NO: 430059 - DNA, 25 bp, Artificial
  probe
  misc_feature (1)..(25): SEQ ID NO: 6118; WAN02495R; Start 3; Stop 27
gctttctccttgcatcagtcctata

SEQ ID NO: 430060 - DNA, 25 bp, Artificial
  probe
  misc_feature (1)..(25): SEQ ID NO: 6118; WAN02495R; Start 36; Stop 60
tatcatagtgtcgtttgaaatatca

SEQ ID NO: 430061 - DNA, 25 bp, Artificial
  probe
  misc_feature (1)..(25): SEQ ID NO: 6118; WAN02495R; Start 34; Stop 58
agtatcatagtgtcgtttgaaatat

SEQ ID NO: 430062 - DNA, 25 bp, Artificial
  probe
  misc_feature (1)..(25): SEQ ID NO: 6118; WAN02495R; Start 35; Stop 59
gtatcatagtgtcgtttgaaatatc

SEQ ID NO: 430063 - DNA, 25 bp, Artificial
  probe
  misc_feature (1)..(25): SEQ ID NO: 6118; WAN02495R; Start 6; Stop 30
ttctccttgcatcagtcctataaaa

SEQ ID NO: 430064 - DNA, 25 bp, Artificial
  probe
  misc_feature (1)..(25): SEQ ID NO: 6118; WAN02495R; Start 28; Stop 52
aaaagtagtatcatagtgtcgtttg

SEQ ID NO: 430065 - DNA, 25 bp, Artificial
  probe
  misc_feature (1)..(25): SEQ ID NO: 6118; WAN02495R; Start 2; Stop 26
agctttctccttgcatcagtcctat

SEQ ID NO: 430066 - DNA, 25 bp, Artificial
  probe
  misc_feature (1)..(25): SEQ ID NO: 6118; WAN02495R; Start 33; Stop 57
tagtatcatagtgtcgtttgaaata

SEQ ID NO: 430067 - DNA, 25 bp, Artificial
  probe
  misc_feature (1)..(25): SEQ ID NO: 6118; WAN02495R; Start 1; Stop 25
gagctttctccttgcatcagtccta

SEQ ID NO: 430068 - DNA, 25 bp, Artificial
  probe
  misc_feature (1)..(25): SEQ ID NO: 6119; WAN0249B7; Start 1; Stop 25
gagtcctatcttgtcatagtgatgc

SEQ ID NO: 430069 - DNA, 25 bp, Artificial
  probe
  misc_feature (1)..(25): SEQ ID NO: 6119; WAN0249B7; Start 88; Stop 112
tcctccttacaatgatagtataacc

SEQ ID NO: 430070 - DNA, 25 bp, Artificial
  probe
  misc_feature (1)..(25): SEQ ID NO: 6119; WAN0249B7; Start 3; Stop 27
gtcctatcttgtcatagtgatgcag

SEQ ID NO: 430071 - DNA, 25 bp, Artificial
  probe
  misc_feature (1)..(25): SEQ ID NO: 6119; WAN0249B7; Start 76; Stop 100
tggtacatgatttcctccttacaat

SEQ ID NO: 430072 - DNA, 25 bp, Artificial
  probe
  misc_feature (1)..(25): SEQ ID NO: 6119; WAN0249B7; Start 2; Stop 26
agtcctatcttgtcatagtgatgca

SEQ ID NO: 430073 - DNA, 25 bp, Artificial
  probe
  misc_feature (1)..(25): SEQ ID NO: 6119; WAN0249B7; Start 89; Stop 113
cctccttacaatgatagtataaccc

SEQ ID NO: 430074 - DNA, 25 bp, Artificial
  probe
  misc_feature (1)..(25): SEQ ID NO: 6119; WAN0249B7; Start 75; Stop 99
atggtacatgatttcctccttacaa

SEQ ID NO: 430075 - DNA, 25 bp, Artificial
  probe
  misc_feature (1)..(25): SEQ ID NO: 6119; WAN0249B7; Start 77; Stop 101
ggtacatgatttcctccttacaatg

SEQ ID NO: 430076 - DNA, 25 bp, Artificial
  probe
  misc_feature (1)..(25): SEQ ID NO: 6119; WAN0249B7; Start 74; Stop 98
tatggtacatgatttcctccttaca

SEQ ID NO: 430077 - DNA, 25 bp, Artificial
  probe
  misc_feature (1)..(25): SEQ ID NO: 6119; WAN0249B7; Start 78; Stop 102
gtacatgatttcctccttacaatga

SEQ ID NO: 430078 - DNA, 25 bp, Artificial
  probe
  misc_feature (1)..(25): SEQ ID NO: 6119; WAN0249B7; Start 82; Stop 106
atgatttcctccttacaatgatagt

SEQ ID NO: 430079 - DNA, 25 bp, Artificial
  probe
  misc_feature (1)..(25): SEQ ID NO: 6119; WAN0249B7; Start 4; Stop 28
tcctatcttgtcatagtgatgcagg

SEQ ID NO: 430080 - DNA, 25 bp, Artificial
  probe
  misc_feature (1)..(25): SEQ ID NO: 6119; WAN0249B7; Start 73; Stop 97
atatggtacatgatttcctccttac

SEQ ID NO: 430081 - DNA, 25 bp, Artificial
  probe
  misc_feature (1)..(25): SEQ ID NO: 6119; WAN0249B7; Start 83; Stop 107
tgatttcctccttacaatgatagta

SEQ ID NO: 430082 - DNA, 25 bp, Artificial
  probe
  misc_feature (1)..(25): SEQ ID NO: 6119; WAN0249B7; Start 80; Stop 104
acatgatttcctccttacaatgata

SEQ ID NO: 430083 - DNA, 25 bp, Artificial
  probe
  misc_feature (1)..(25): SEQ ID NO: 6119; WAN0249B7; Start 79; Stop 103
tacatgatttcctccttacaatgat

SEQ ID NO: 430084 - DNA, 25 bp, Artificial
  probe
  misc_feature (1)..(25): SEQ ID NO: 6119; WAN0249B7; Start 99; Stop 123
atgatagtataacccctccccttag

SEQ ID NO: 430085 - DNA, 25 bp, Artificial
  probe
  misc_feature (1)..(25): SEQ ID NO: 6119; WAN0249B7; Start 98; Stop 122
aatgatagtataacccctcccctta

SEQ ID NO: 430086 - DNA, 25 bp, Artificial
  probe
  misc_feature (1)..(25): SEQ ID NO: 6119; WAN0249B7; Start 95; Stop 119
tacaatgatagtataacccctcccc

SEQ ID NO: 430087 - DNA, 25 bp, Artificial
  probe
  misc_feature (1)..(25): SEQ ID NO: 6119; WAN0249B7; Start 81; Stop 105
catgatttcctccttacaatgatag

SEQ ID NO: 430088 - DNA, 25 bp, Artificial
  probe
  misc_feature (1)..(25): SEQ ID NO: 6119; WAN0249B7; Start 87; Stop 111
ttcctccttacaatgatagtataac

SEQ ID NO: 430089 - DNA, 25 bp, Artificial
  probe
  misc_feature (1)..(25): SEQ ID NO: 6119; WAN0249B7; Start 97; Stop 121
caatgatagtataacccctcccctt

SEQ ID NO: 430090 - DNA, 25 bp, Artificial
  probe
  misc_feature (1)..(25): SEQ ID NO: 6119; WAN0249B7; Start 94; Stop 118
ttacaatgatagtataacccctccc

SEQ ID NO: 430091 - DNA, 25 bp, Artificial
  probe
  misc_feature (1)..(25): SEQ ID NO: 6119; WAN0249B7; Start 71; Stop 95
ttatatggtacatgatttcctcctt

SEQ ID NO: 430092 - DNA, 25 bp, Artificial
  probe
  misc_feature (1)..(25): SEQ ID NO: 6119; WAN0249B7; Start 70; Stop 94
tttatatggtacatgatttcctcct

SEQ ID NO: 430093 - DNA, 25 bp, Artificial
  probe
  misc_feature (1)..(25): SEQ ID NO: 6119; WAN0249B7; Start 91; Stop 115
tccttacaatgatagtataacccct

SEQ ID NO: 430094 - DNA, 25 bp, Artificial
  probe
  misc_feature (1)..(25): SEQ ID NO: 6119; WAN0249B7; Start 96; Stop 120
acaatgatagtataacccctcccct

SEQ ID NO: 430095 - DNA, 25 bp, Artificial
  probe
  misc_feature (1)..(25): SEQ ID NO: 6119; WAN0249B7; Start 93; Stop 117
cttacaatgatagtataacccctcc

SEQ ID NO: 430096 - DNA, 25 bp, Artificial
  probe
  misc_feature (1)..(25): SEQ ID NO: 6119; WAN0249B7; Start 92; Stop 116
ccttacaatgatagtataacccctc

SEQ ID NO: 430097 - DNA, 25 bp, Artificial
  probe
  misc_feature (1)..(25): SEQ ID NO: 6119; WAN0249B7; Start 90; Stop 114
ctccttacaatgatagtataacccc

SEQ ID NO: 430098 - DNA, 25 bp, Artificial
  probe
  misc_feature (1)..(25): SEQ ID NO: 6119; WAN0249B7; Start 72; Stop 96
tatatggtacatgatttcctcctta

SEQ ID NO: 430099 - DNA, 25 bp, Artificial
  probe
  misc_feature (1)..(25): SEQ ID NO: 6119; WAN0249B7; Start 84; Stop 108
gatttcctccttacaatgatagtat

SEQ ID NO: 430100 - DNA, 25 bp, Artificial
  probe
  misc_feature (1)..(25): SEQ ID NO: 6119; WAN0249B7; Start 60; Stop 84
cgcagcttcttttatatggtacatg

SEQ ID NO: 430101 - DNA, 25 bp, Artificial
  probe
  misc_feature (1)..(25): SEQ ID NO: 6120; WAN02498F; Start 1; Stop 25
gatacacctcctttatgaatccatt

SEQ ID NO: 430102 - DNA, 25 bp, Artificial
  probe
  misc_feature (1)..(25): SEQ ID NO: 6120; WAN02498F; Start 9; Stop 33
tcctttatgaatccattatatcgct

SEQ ID NO: 430103 - DNA, 25 bp, Artificial
  probe
  misc_feature (1)..(25): SEQ ID NO: 6120; WAN02498F; Start 8; Stop 32
ctcctttatgaatccattatatcgc

SEQ ID NO: 430104 - DNA, 25 bp, Artificial
  probe
  misc_feature (1)..(25): SEQ ID NO: 6120; WAN02498F; Start 4; Stop 28
acacctcctttatgaatccattata

SEQ ID NO: 430105 - DNA, 25 bp, Artificial
  probe
  misc_feature (1)..(25): SEQ ID NO: 6120; WAN02498F; Start 3; Stop 27
tacacctcctttatgaatccattat

SEQ ID NO: 430106 - DNA, 25 bp, Artificial
  probe
  misc_feature (1)..(25): SEQ ID NO: 6120; WAN02498F; Start 2; Stop 26
atacacctcctttatgaatccatta

SEQ ID NO: 430107 - DNA, 25 bp, Artificial
  probe
  misc_feature (1)..(25): SEQ ID NO: 6120; WAN02498F; Start 10; Stop 34
cctttatgaatccattatatcgctt

SEQ ID NO: 430108 - DNA, 25 bp, Artificial
  probe
  misc_feature (1)..(25): SEQ ID NO: 6120; WAN02498F; Start 7; Stop 31
cctcctttatgaatccattatatcg

SEQ ID NO: 430109 - DNA, 25 bp, Artificial
  probe
  misc_feature (1)..(25): SEQ ID NO: 6120; WAN02498F; Start 5; Stop 29
cacctcctttatgaatccattatat

SEQ ID NO: 430110 - DNA, 25 bp, Artificial
  probe
  misc_feature (1)..(25): SEQ ID NO: 6120; WAN02498F; Start 6; Stop 30
acctcctttatgaatccattatatc

SEQ ID NO: 430111 - DNA, 25 bp, Artificial
  probe
  misc_feature (1)..(25): SEQ ID NO: 6120; WAN02498F; Start 12; Stop 36
tttatgaatccattatatcgctttc

SEQ ID NO: 430112 - DNA, 25 bp, Artificial
  probe
  misc_feature (1)..(25): SEQ ID NO: 6120; WAN02498F; Start 11; Stop 35
ctttatgaatccattatatcgcttt

SEQ ID NO: 430113 - DNA, 25 bp, Artificial
  probe
  misc_feature (1)..(25): SEQ ID NO: 6120; WAN02498F; Start 15; Stop 39
atgaatccattatatcgctttcaaa

SEQ ID NO: 430114 - DNA, 25 bp, Artificial
  probe
  misc_feature (1)..(25): SEQ ID NO: 6120; WAN02498F; Start 14; Stop 38
tatgaatccattatatcgctttcaa

SEQ ID NO: 430115 - DNA, 25 bp, Artificial
  probe
  misc_feature (1)..(25): SEQ ID NO: 6120; WAN02498F; Start 13; Stop 37
ttatgaatccattatatcgctttca

SEQ ID NO: 430116 - DNA, 25 bp, Artificial
  probe
  misc_feature (1)..(25): SEQ ID NO: 6120; WAN02498F; Start 16; Stop 40
tgaatccattatatcgctttcaaaa

SEQ ID NO: 430117 - DNA, 25 bp, Artificial
  probe
  misc_feature (1)..(25): SEQ ID NO: 6121; WAN02496P; Start 6; Stop 30
ttcctctttctgctaggttagacta

SEQ ID NO: 430118 - DNA, 25 bp, Artificial
  probe
  misc_feature (1)..(25): SEQ ID NO: 6121; WAN02496P; Start 5; Stop 29
tttcctctttctgctaggttagact

SEQ ID NO: 430119 - DNA, 25 bp, Artificial
  probe
  misc_feature (1)..(25): SEQ ID NO: 6121; WAN02496P; Start 25; Stop 49
agactagtatatcacggataggctc

SEQ ID NO: 430120 - DNA, 25 bp, Artificial
  probe
  misc_feature (1)..(25): SEQ ID NO: 6121; WAN02496P; Start 7; Stop 31
tcctctttctgctaggttagactag

SEQ ID NO: 430121 - DNA, 25 bp, Artificial
  probe
  misc_feature (1)..(25): SEQ ID NO: 6121; WAN02496P; Start 24; Stop 48
tagactagtatatcacggataggct

SEQ ID NO: 430122 - DNA, 25 bp, Artificial
  probe
  misc_feature (1)..(25): SEQ ID NO: 6121; WAN02496P; Start 23; Stop 47
ttagactagtatatcacggataggc

SEQ ID NO: 430123 - DNA, 25 bp, Artificial
  probe
  misc_feature (1)..(25): SEQ ID NO: 6121; WAN02496P; Start 26; Stop 50
gactagtatatcacggataggctcg

SEQ ID NO: 430124 - DNA, 25 bp, Artificial
  probe
  misc_feature (1)..(25): SEQ ID NO: 6121; WAN02496P; Start 28; Stop 52
ctagtatatcacggataggctcggc

SEQ ID NO: 430125 - DNA, 25 bp, Artificial
  probe
  misc_feature (1)..(25): SEQ ID NO: 6121; WAN02496P; Start 17; Stop 41
gctaggttagactagtatatcacgg

SEQ ID NO: 430126 - DNA, 25 bp, Artificial
  probe
  misc_feature (1)..(25): SEQ ID NO: 6121; WAN02496P; Start 29; Stop 53
tagtatatcacggataggctcggct

SEQ ID NO: 430127 - DNA, 25 bp, Artificial
  probe
  misc_feature (1)..(25): SEQ ID NO: 6121; WAN02496P; Start 19; Stop 43
taggttagactagtatatcacggat

SEQ ID NO: 430128 - DNA, 25 bp, Artificial
  probe
  misc_feature (1)..(25): SEQ ID NO: 6121; WAN02496P; Start 16; Stop 40
tgctaggttagactagtatatcacg

SEQ ID NO: 430129 - DNA, 25 bp, Artificial
  probe
  misc_feature (1)..(25): SEQ ID NO: 6121; WAN02496P; Start 27; Stop 51
actagtatatcacggataggctcgg

SEQ ID NO: 430130 - DNA, 25 bp, Artificial
  probe
  misc_feature (1)..(25): SEQ ID NO: 6121; WAN02496P; Start 20; Stop 44
aggttagactagtatatcacggata

SEQ ID NO: 430131 - DNA, 25 bp, Artificial
  probe
  misc_feature (1)..(25): SEQ ID NO: 6121; WAN02496P; Start 18; Stop 42
ctaggttagactagtatatcacgga

SEQ ID NO: 430132 - DNA, 25 bp, Artificial
  probe
  misc_feature (1)..(25): SEQ ID NO: 6121; WAN02496P; Start 22; Stop 46
gttagactagtatatcacggatagg

SEQ ID NO: 430133 - DNA, 25 bp, Artificial
  probe
  misc_feature (1)..(25): SEQ ID NO: 6121; WAN02496P; Start 21; Stop 45
ggttagactagtatatcacggatag

SEQ ID NO: 430134 - DNA, 25 bp, Artificial
  probe
  misc_feature (1)..(25): SEQ ID NO: 6121; WAN02496P; Start 30; Stop 54
agtatatcacggataggctcggctt

SEQ ID NO: 430135 - DNA, 25 bp, Artificial
  probe
  misc_feature (1)..(25): SEQ ID NO: 6121; WAN02496P; Start 32; Stop 56
tatatcacggataggctcggctttc

SEQ ID NO: 430136 - DNA, 25 bp, Artificial
  probe
  misc_feature (1)..(25): SEQ ID NO: 6121; WAN02496P; Start 15; Stop 39
ctgctaggttagactagtatatcac

SEQ ID NO: 430137 - DNA, 25 bp, Artificial
  probe
  misc_feature (1)..(25): SEQ ID NO: 6121; WAN02496P; Start 14; Stop 38
tctgctaggttagactagtatatca

SEQ ID NO: 430138 - DNA, 25 bp, Artificial
  probe
  misc_feature (1)..(25): SEQ ID NO: 6121; WAN02496P; Start 31; Stop 55
gtatatcacggataggctcggcttt

SEQ ID NO: 430139 - DNA, 25 bp, Artificial
  probe
  misc_feature (1)..(25): SEQ ID NO: 6121; WAN02496P; Start 8; Stop 32
cctctttctgctaggttagactagt

SEQ ID NO: 430140 - DNA, 25 bp, Artificial
  probe
  misc_feature (1)..(25): SEQ ID NO: 6121; WAN02496P; Start 9; Stop 33
ctctttctgctaggttagactagta

SEQ ID NO: 430141 - DNA, 25 bp, Artificial
  probe
  misc_feature (1)..(25): SEQ ID NO: 6121; WAN02496P; Start 10; Stop 34
tctttctgctaggttagactagtat

SEQ ID NO: 430142 - DNA, 25 bp, Artificial
  probe
  misc_feature (1)..(25): SEQ ID NO: 6121; WAN02496P; Start 13; Stop 37
ttctgctaggttagactagtatatc

SEQ ID NO: 430143 - DNA, 25 bp, Artificial
  probe
  misc_feature (1)..(25): SEQ ID NO: 6121; WAN02496P; Start 11; Stop 35
ctttctgctaggttagactagtata

SEQ ID NO: 430144 - DNA, 25 bp, Artificial
  probe
  misc_feature (1)..(25): SEQ ID NO: 6121; WAN02496P; Start 12; Stop 36
tttctgctaggttagactagtatat

SEQ ID NO: 430145 - DNA, 25 bp, Artificial
  probe
  misc_feature (1)..(25): SEQ ID NO: 6122; WAN02497Z; Start 23; Stop 47
agatttctagtgtaattaactccac

SEQ ID NO: 430146 - DNA, 25 bp, Artificial
  probe
  misc_feature (1)..(25): SEQ ID NO: 6122; WAN02497Z; Start 22; Stop 46
aagatttctagtgtaattaactcca

SEQ ID NO: 430147 - DNA, 25 bp, Artificial
  probe
  misc_feature (1)..(25): SEQ ID NO: 6122; WAN02497Z; Start 21; Stop 45
gaagatttctagtgtaattaactcc

SEQ ID NO: 430148 - DNA, 25 bp, Artificial
  probe
  misc_feature (1)..(25): SEQ ID NO: 6122; WAN02497Z; Start 24; Stop 48
gatttctagtgtaattaactccact

SEQ ID NO: 430149 - DNA, 25 bp, Artificial
  probe
  misc_feature (1)..(25): SEQ ID NO: 6123; WAN024978; Start 110; Stop 134
actatcttcttaaaggtagcagtac

SEQ ID NO: 430150 - DNA, 25 bp, Artificial
  probe
  misc_feature (1)..(25): SEQ ID NO: 6123; WAN024978; Start 105; Stop 129
cgtctactatcttcttaaaggtagc

SEQ ID NO: 430151 - DNA, 25 bp, Artificial
  probe
  misc_feature (1)..(25): SEQ ID NO: 6123; WAN024978; Start 108; Stop 132
ctactatcttcttaaaggtagcagt

SEQ ID NO: 430152 - DNA, 25 bp, Artificial
  probe
  misc_feature (1)..(25): SEQ ID NO: 6123; WAN024978; Start 106; Stop 130
gtctactatcttcttaaaggtagca

SEQ ID NO: 430153 - DNA, 25 bp, Artificial
  probe
  misc_feature (1)..(25): SEQ ID NO: 6123; WAN024978; Start 107; Stop 131
tctactatcttcttaaaggtagcag

SEQ ID NO: 430154 - DNA, 25 bp, Artificial
  probe
  misc_feature (1)..(25): SEQ ID NO: 6123; WAN024978; Start 111; Stop 135
ctatcttcttaaaggtagcagtacc

SEQ ID NO: 430155 - DNA, 25 bp, Artificial
  probe
  misc_feature (1)..(25): SEQ ID NO: 6123; WAN024978; Start 102; Stop 126
atacgtctactatcttcttaaaggt

SEQ ID NO: 430156 - DNA, 25 bp, Artificial
  probe
  misc_feature (1)..(25): SEQ ID NO: 6123; WAN024978; Start 33; Stop 57
accaaagtcttaaattcaataaaca

SEQ ID NO: 430157 - DNA, 25 bp, Artificial
  probe
  misc_feature (1)..(25): SEQ ID NO: 6123; WAN024978; Start 109; Stop 133
tactatcttcttaaaggtagcagta

SEQ ID NO: 430158 - DNA, 25 bp, Artificial
  probe
  misc_feature (1)..(25): SEQ ID NO: 6123; WAN024978; Start 28; Stop 52
ttgttaccaaagtcttaaattcaat

SEQ ID NO: 430159 - DNA, 25 bp, Artificial
  probe
  misc_feature (1)..(25): SEQ ID NO: 6123; WAN024978; Start 104; Stop 128
acgtctactatcttcttaaaggtag

SEQ ID NO: 430160 - DNA, 25 bp, Artificial
  probe
  misc_feature (1)..(25): SEQ ID NO: 6123; WAN024978; Start 103; Stop 127
tacgtctactatcttcttaaaggta

SEQ ID NO: 430161 - DNA, 25 bp, Artificial
  probe
  misc_feature (1)..(25): SEQ ID NO: 6123; WAN024978; Start 27; Stop 51
tttgttaccaaagtcttaaattcaa

SEQ ID NO: 430162 - DNA, 25 bp, Artificial
  probe
  misc_feature (1)..(25): SEQ ID NO: 6123; WAN024978; Start 22; Stop 46
ttcaatttgttaccaaagtcttaaa

SEQ ID NO: 430163 - DNA, 25 bp, Artificial
  probe
  misc_feature (1)..(25): SEQ ID NO: 6123; WAN024978; Start 21; Stop 45
tttcaatttgttaccaaagtcttaa

SEQ ID NO: 430164 - DNA, 25 bp, Artificial
  probe
  misc_feature (1)..(25): SEQ ID NO: 6123; WAN024978; Start 26; Stop 50
atttgttaccaaagtcttaaattca

SEQ ID NO: 430165 - DNA, 25 bp, Artificial
  probe
  misc_feature (1)..(25): SEQ ID NO: 6123; WAN024978; Start 23; Stop 47
tcaatttgttaccaaagtcttaaat

SEQ ID NO: 430166 - DNA, 25 bp, Artificial
  probe
  misc_feature (1)..(25): SEQ ID NO: 6123; WAN024978; Start 101; Stop 125
tatacgtctactatcttcttaaagg

SEQ ID NO: 430167 - DNA, 25 bp, Artificial
  probe
  misc_feature (1)..(25): SEQ ID NO: 6123; WAN024978; Start 19; Stop 43
attttcaatttgttaccaaagtctt

SEQ ID NO: 430168 - DNA, 25 bp, Artificial
  probe
  misc_feature (1)..(25): SEQ ID NO: 6123; WAN024978; Start 20; Stop 44
ttttcaatttgttaccaaagtctta

SEQ ID NO: 430169 - DNA, 25 bp, Artificial
  probe
  misc_feature (1)..(25): SEQ ID NO: 6123; WAN024978; Start 24; Stop 48
caatttgttaccaaagtcttaaatt

SEQ ID NO: 430170 - DNA, 25 bp, Artificial
  probe
  misc_feature (1)..(25): SEQ ID NO: 6123; WAN024978; Start 18; Stop 42
tattttcaatttgttaccaaagtct

SEQ ID NO: 430171 - DNA, 25 bp, Artificial
  probe
  misc_feature (1)..(25): SEQ ID NO: 6123; WAN024978; Start 17; Stop 41
ttattttcaatttgttaccaaagtc

SEQ ID NO: 430172 - DNA, 25 bp, Artificial
  probe
  misc_feature (1)..(25): SEQ ID NO: 6124; WAN0249C6; Start 143; Stop 167
taatcaagacggagtggattcaatt

SEQ ID NO: 430173 - DNA, 25 bp, Artificial
  probe
  misc_feature (1)..(25): SEQ ID NO: 6124; WAN0249C6; Start 142; Stop 166
ctaatcaagacggagtggattcaat

SEQ ID NO: 430174 - DNA, 25 bp, Artificial
  probe
  misc_feature (1)..(25): SEQ ID NO: 6124; WAN0249C6; Start 125; Stop 149
ctacttacacaggcacgctaatcaa

SEQ ID NO: 430175 - DNA, 25 bp, Artificial
  probe
  misc_feature (1)..(25): SEQ ID NO: 6124; WAN0249C6; Start 126; Stop 150
tacttacacaggcacgctaatcaag

SEQ ID NO: 430176 - DNA, 25 bp, Artificial
  probe
  misc_feature (1)..(25): SEQ ID NO: 6124; WAN0249C6; Start 11; Stop 35
tttatctagtttgtcgcatcgtttg

SEQ ID NO: 430177 - DNA, 25 bp, Artificial
  probe
  misc_feature (1)..(25): SEQ ID NO: 6124; WAN0249C6; Start 10; Stop 34
ctttatctagtttgtcgcatcgttt

SEQ ID NO: 430178 - DNA, 25 bp, Artificial
  probe
  misc_feature (1)..(25): SEQ ID NO: 6124; WAN0249C6; Start 46; Stop 70
cgataaactccgtgtctgttagaaa

SEQ ID NO: 430179 - DNA, 25 bp, Artificial
  probe
  misc_feature (1)..(25): SEQ ID NO: 6124; WAN0249C6; Start 111; Stop 135
aatactctcagtccctacttacaca

SEQ ID NO: 430180 - DNA, 25 bp, Artificial
  probe
  misc_feature (1)..(25): SEQ ID NO: 6124; WAN0249C6; Start 12; Stop 36
ttatctagtttgtcgcatcgtttga

SEQ ID NO: 430181 - DNA, 25 bp, Artificial
  probe
  misc_feature (1)..(25): SEQ ID NO: 6124; WAN0249C6; Start 112; Stop 136
atactctcagtccctacttacacag

SEQ ID NO: 430182 - DNA, 25 bp, Artificial
  probe
  misc_feature (1)..(25): SEQ ID NO: 6124; WAN0249C6; Start 110; Stop 134
aaatactctcagtccctacttacac

SEQ ID NO: 430183 - DNA, 25 bp, Artificial
  probe
  misc_feature (1)..(25): SEQ ID NO: 6124; WAN0249C6; Start 13; Stop 37
tatctagtttgtcgcatcgtttgag

SEQ ID NO: 430184 - DNA, 25 bp, Artificial
  probe
  misc_feature (1)..(25): SEQ ID NO: 6124; WAN0249C6; Start 109; Stop 133
gaaatactctcagtccctacttaca

SEQ ID NO: 430185 - DNA, 25 bp, Artificial
  probe
  misc_feature (1)..(25): SEQ ID NO: 6124; WAN0249C6; Start 9; Stop 33
cctttatctagtttgtcgcatcgtt

SEQ ID NO: 430186 - DNA, 25 bp, Artificial
  probe
  misc_feature (1)..(25): SEQ ID NO: 6124; WAN0249C6; Start 6; Stop 30
actcctttatctagtttgtcgcatc

SEQ ID NO: 430187 - DNA, 25 bp, Artificial
  probe
  misc_feature (1)..(25): SEQ ID NO: 6124; WAN0249C6; Start 7; Stop 31
ctcctttatctagtttgtcgcatcg

SEQ ID NO: 430188 - DNA, 25 bp, Artificial
  probe
  misc_feature (1)..(25): SEQ ID NO: 6124; WAN0249C6; Start 108; Stop 132
ggaaatactctcagtccctacttac

SEQ ID NO: 430189 - DNA, 25 bp, Artificial
  probe
  misc_feature (1)..(25): SEQ ID NO: 6124; WAN0249C6; Start 8; Stop 32
tcctttatctagtttgtcgcatcgt

SEQ ID NO: 430190 - DNA, 25 bp, Artificial
  probe
  misc_feature (1)..(25): SEQ ID NO: 6124; WAN0249C6; Start 141; Stop 165
gctaatcaagacggagtggattcaa

SEQ ID NO: 430191 - DNA, 25 bp, Artificial
  probe
  misc_feature (1)..(25): SEQ ID NO: 6124; WAN0249C6; Start 144; Stop 168
aatcaagacggagtggattcaattt

SEQ ID NO: 430192 - DNA, 25 bp, Artificial
  probe
  misc_feature (1)..(25): SEQ ID NO: 6124; WAN0249C6; Start 128; Stop 152
cttacacaggcacgctaatcaagac

SEQ ID NO: 430193 - DNA, 25 bp, Artificial
  probe
  misc_feature (1)..(25): SEQ ID NO: 6124; WAN0249C6; Start 14; Stop 38
atctagtttgtcgcatcgtttgagt

SEQ ID NO: 430194 - DNA, 25 bp, Artificial
  probe
  misc_feature (1)..(25): SEQ ID NO: 6124; WAN0249C6; Start 113; Stop 137
tactctcagtccctacttacacagg

SEQ ID NO: 430195 - DNA, 25 bp, Artificial
  probe
  misc_feature (1)..(25): SEQ ID NO: 6124; WAN0249C6; Start 99; Stop 123
ccttcacagggaaatactctcagtc

SEQ ID NO: 430196 - DNA, 25 bp, Artificial
  probe
  misc_feature (1)..(25): SEQ ID NO: 6124; WAN0249C6; Start 127; Stop 151
acttacacaggcacgctaatcaaga

SEQ ID NO: 430197 - DNA, 25 bp, Artificial
  probe
  misc_feature (1)..(25): SEQ ID NO: 6124; WAN0249C6; Start 100; Stop 124
cttcacagggaaatactctcagtcc

SEQ ID NO: 430198 - DNA, 25 bp, Artificial
  probe
  misc_feature (1)..(25): SEQ ID NO: 6124; WAN0249C6; Start 17; Stop 41
tagtttgtcgcatcgtttgagtctg

SEQ ID NO: 430199 - DNA, 25 bp, Artificial
  probe
  misc_feature (1)..(25): SEQ ID NO: 6124; WAN0249C6; Start 152; Stop 176
cggagtggattcaattttcaaagaa

SEQ ID NO: 430200 - DNA, 25 bp, Artificial
  probe
  misc_feature (1)..(25): SEQ ID NO: 6124; WAN0249C6; Start 150; Stop 174
gacggagtggattcaattttcaaag

SEQ ID NO: 430201 - DNA, 25 bp, Artificial
  probe
  misc_feature (1)..(25): SEQ ID NO: 6124; WAN0249C6; Start 16; Stop 40
ctagtttgtcgcatcgtttgagtct

SEQ ID NO: 430202 - DNA, 25 bp, Artificial
  probe
  misc_feature (1)..(25): SEQ ID NO: 6124; WAN0249C6; Start 15; Stop 39
tctagtttgtcgcatcgtttgagtc

SEQ ID NO: 430203 - DNA, 25 bp, Artificial
  probe
  misc_feature (1)..(25): SEQ ID NO: 6124; WAN0249C6; Start 157; Stop 181
tggattcaattttcaaagaacaggt

SEQ ID NO: 430204 - DNA, 25 bp, Artificial
  probe
  misc_feature (1)..(25): SEQ ID NO: 6124; WAN0249C6; Start 5; Stop 29
aactcctttatctagtttgtcgcat

SEQ ID NO: 430205 - DNA, 25 bp, Artificial
  probe
  misc_feature (1)..(25): SEQ ID NO: 6125; WAN0249A9; Start 30; Stop 54
ttcttgtaaggatgaggagtcagat

SEQ ID NO: 430206 - DNA, 25 bp, Artificial
  probe
  misc_feature (1)..(25): SEQ ID NO: 6125; WAN0249A9; Start 32; Stop 56
cttgtaaggatgaggagtcagatga

SEQ ID NO: 430207 - DNA, 25 bp, Artificial
  probe
  misc_feature (1)..(25): SEQ ID NO: 6125; WAN0249A9; Start 31; Stop 55
tcttgtaaggatgaggagtcagatg

SEQ ID NO: 430208 - DNA, 25 bp, Artificial
  probe
  misc_feature (1)..(25): SEQ ID NO: 6125; WAN0249A9; Start 23; Stop 47
gtagtgtttcttgtaaggatgagga

SEQ ID NO: 430209 - DNA, 25 bp, Artificial
  probe
  misc_feature (1)..(25): SEQ ID NO: 6125; WAN0249A9; Start 22; Stop 46
agtagtgtttcttgtaaggatgagg

SEQ ID NO: 430210 - DNA, 25 bp, Artificial
  probe
  misc_feature (1)..(25): SEQ ID NO: 6125; WAN0249A9; Start 17; Stop 41
tgttgagtagtgtttcttgtaagga

SEQ ID NO: 430211 - DNA, 25 bp, Artificial
  probe
  misc_feature (1)..(25): SEQ ID NO: 6125; WAN0249A9; Start 24; Stop 48
tagtgtttcttgtaaggatgaggag

SEQ ID NO: 430212 - DNA, 25 bp, Artificial
  probe
  misc_feature (1)..(25): SEQ ID NO: 6125; WAN0249A9; Start 20; Stop 44
tgagtagtgtttcttgtaaggatga

SEQ ID NO: 430213 - DNA, 25 bp, Artificial
  probe
  misc_feature (1)..(25): SEQ ID NO: 6125; WAN0249A9; Start 16; Stop 40
ttgttgagtagtgtttcttgtaagg

SEQ ID NO: 430214 - DNA, 25 bp, Artificial
  probe
  misc_feature (1)..(25): SEQ ID NO: 6125; WAN0249A9; Start 26; Stop 50
gtgtttcttgtaaggatgaggagtc

SEQ ID NO: 430215 - DNA, 25 bp, Artificial
  probe
  misc_feature (1)..(25): SEQ ID NO: 6125; WAN0249A9; Start 21; Stop 45
gagtagtgtttcttgtaaggatgag

SEQ ID NO: 430216 - DNA, 25 bp, Artificial
  probe
  misc_feature (1)..(25): SEQ ID NO: 6125; WAN0249A9; Start 25; Stop 49
agtgtttcttgtaaggatgaggagt

SEQ ID NO: 430217 - DNA, 25 bp, Artificial
  probe
  misc_feature (1)..(25): SEQ ID NO: 6125; WAN0249A9; Start 19; Stop 43
ttgagtagtgtttcttgtaaggatg

SEQ ID NO: 430218 - DNA, 25 bp, Artificial
  probe
  misc_feature (1)..(25): SEQ ID NO: 6125; WAN0249A9; Start 18; Stop 42
gttgagtagtgtttcttgtaaggat

SEQ ID NO: 430219 - DNA, 25 bp, Artificial
  probe
  misc_feature (1)..(25): SEQ ID NO: 6125; WAN0249A9; Start 35; Stop 59
gtaaggatgaggagtcagatgacaa

SEQ ID NO: 430220 - DNA, 25 bp, Artificial
  probe
  misc_feature (1)..(25): SEQ ID NO: 6125; WAN0249A9; Start 33; Stop 57
ttgtaaggatgaggagtcagatgac

SEQ ID NO: 430221 - DNA, 25 bp, Artificial
  probe
  misc_feature (1)..(25): SEQ ID NO: 6125; WAN0249A9; Start 29; Stop 53
tttcttgtaaggatgaggagtcaga

SEQ ID NO: 430222 - DNA, 25 bp, Artificial
  probe
  misc_feature (1)..(25): SEQ ID NO: 6125; WAN0249A9; Start 28; Stop 52
gtttcttgtaaggatgaggagtcag

SEQ ID NO: 430223 - DNA, 25 bp, Artificial
  probe
  misc_feature (1)..(25): SEQ ID NO: 6125; WAN0249A9; Start 12; Stop 36
ttcattgttgagtagtgtttcttgt

SEQ ID NO: 430224 - DNA, 25 bp, Artificial
  probe
  misc_feature (1)..(25): SEQ ID NO: 6125; WAN0249A9; Start 9; Stop 33
agtttcattgttgagtagtgtttct

SEQ ID NO: 430225 - DNA, 25 bp, Artificial
  probe
  misc_feature (1)..(25): SEQ ID NO: 6125; WAN0249A9; Start 7; Stop 31
agagtttcattgttgagtagtgttt

SEQ ID NO: 430226 - DNA, 25 bp, Artificial
  probe
  misc_feature (1)..(25): SEQ ID NO: 6125; WAN0249A9; Start 5; Stop 29
gtagagtttcattgttgagtagtgt

SEQ ID NO: 430227 - DNA, 25 bp, Artificial
  probe
  misc_feature (1)..(25): SEQ ID NO: 6125; WAN0249A9; Start 4; Stop 28
tgtagagtttcattgttgagtagtg

SEQ ID NO: 430228 - DNA, 25 bp, Artificial
  probe
  misc_feature (1)..(25): SEQ ID NO: 6125; WAN0249A9; Start 27; Stop 51
tgtttcttgtaaggatgaggagtca

SEQ ID NO: 430229 - DNA, 25 bp, Artificial
  probe
  misc_feature (1)..(25): SEQ ID NO: 6125; WAN0249A9; Start 8; Stop 32
gagtttcattgttgagtagtgtttc

SEQ ID NO: 430230 - DNA, 25 bp, Artificial
  probe
  misc_feature (1)..(25): SEQ ID NO: 6125; WAN0249A9; Start 14; Stop 38
cattgttgagtagtgtttcttgtaa

SEQ ID NO: 430231 - DNA, 25 bp, Artificial
  probe
  misc_feature (1)..(25): SEQ ID NO: 6125; WAN0249A9; Start 13; Stop 37
tcattgttgagtagtgtttcttgta

SEQ ID NO: 430232 - DNA, 25 bp, Artificial
  probe
  misc_feature (1)..(25): SEQ ID NO: 6125; WAN0249A9; Start 11; Stop 35
tttcattgttgagtagtgtttcttg

SEQ ID NO: 430233 - DNA, 25 bp, Artificial
  probe
  misc_feature (1)..(25): SEQ ID NO: 6125; WAN0249A9; Start 10; Stop 34
gtttcattgttgagtagtgtttctt

SEQ ID NO: 430234 - DNA, 25 bp, Artificial
  probe
  misc_feature (1)..(25): SEQ ID NO: 6125; WAN0249A9; Start 34; Stop 58
tgtaaggatgaggagtcagatgaca

SEQ ID NO: 430235 - DNA, 25 bp, Artificial
  probe
  misc_feature (1)..(25): SEQ ID NO: 6125; WAN0249A9; Start 6; Stop 30
tagagtttcattgttgagtagtgtt

SEQ ID NO: 430236 - DNA, 25 bp, Artificial
  probe
  misc_feature (1)..(25): SEQ ID NO: 6125; WAN0249A9; Start 3; Stop 27
ttgtagagtttcattgttgagtagt

SEQ ID NO: 430237 - DNA, 25 bp, Artificial
  probe
  misc_feature (1)..(25): SEQ ID NO: 6125; WAN0249A9; Start 15; Stop 39
attgttgagtagtgtttcttgtaag

SEQ ID NO: 430238 - DNA, 25 bp, Artificial
  probe
  misc_feature (1)..(25): SEQ ID NO: 6126; WAN02497C; Start 27; Stop 51
aatcaactgtgagcaatgtaatgaa

SEQ ID NO: 430239 - DNA, 25 bp, Artificial
  probe
  misc_feature (1)..(25): SEQ ID NO: 6126; WAN02497C; Start 29; Stop 53
tcaactgtgagcaatgtaatgaatt

SEQ ID NO: 430240 - DNA, 25 bp, Artificial
  probe
  misc_feature (1)..(25): SEQ ID NO: 6126; WAN02497C; Start 28; Stop 52
atcaactgtgagcaatgtaatgaat

SEQ ID NO: 430241 - DNA, 25 bp, Artificial
  probe
  misc_feature (1)..(25): SEQ ID NO: 6126; WAN02497C; Start 158; Stop 182
aatctcttcttgagtgctacttctt

SEQ ID NO: 430242 - DNA, 25 bp, Artificial
  probe
  misc_feature (1)..(25): SEQ ID NO: 6126; WAN02497C; Start 160; Stop 184
tctcttcttgagtgctacttcttaa

SEQ ID NO: 430243 - DNA, 25 bp, Artificial
  probe
  misc_feature (1)..(25): SEQ ID NO: 6126; WAN02497C; Start 159; Stop 183
atctcttcttgagtgctacttctta

SEQ ID NO: 430244 - DNA, 25 bp, Artificial
  probe
  misc_feature (1)..(25): SEQ ID NO: 6126; WAN02497C; Start 30; Stop 54
caactgtgagcaatgtaatgaatta

SEQ ID NO: 430245 - DNA, 25 bp, Artificial
  probe
  misc_feature (1)..(25): SEQ ID NO: 6126; WAN02497C; Start 26; Stop 50
aaatcaactgtgagcaatgtaatga

SEQ ID NO: 430246 - DNA, 25 bp, Artificial
  probe
  misc_feature (1)..(25): SEQ ID NO: 6126; WAN02497C; Start 157; Stop 181
aaatctcttcttgagtgctacttct

SEQ ID NO: 430247 - DNA, 25 bp, Artificial
  probe
  misc_feature (1)..(25): SEQ ID NO: 6126; WAN02497C; Start 31; Stop 55
aactgtgagcaatgtaatgaattac

SEQ ID NO: 430248 - DNA, 25 bp, Artificial
  probe
  misc_feature (1)..(25): SEQ ID NO: 6126; WAN02497C; Start 153; Stop 177
acttaaatctcttcttgagtgctac

SEQ ID NO: 430249 - DNA, 25 bp, Artificial
  probe
  misc_feature (1)..(25): SEQ ID NO: 6126; WAN02497C; Start 151; Stop 175
aaacttaaatctcttcttgagtgct

SEQ ID NO: 430250 - DNA, 25 bp, Artificial
  probe
  misc_feature (1)..(25): SEQ ID NO: 6126; WAN02497C; Start 161; Stop 185
ctcttcttgagtgctacttcttaaa

SEQ ID NO: 430251 - DNA, 25 bp, Artificial
  probe
  misc_feature (1)..(25): SEQ ID NO: 6126; WAN02497C; Start 104; Stop 128
ccctttcaatgatagtttacttacg

SEQ ID NO: 430252 - DNA, 25 bp, Artificial
  probe
  misc_feature (1)..(25): SEQ ID NO: 6126; WAN02497C; Start 156; Stop 180
taaatctcttcttgagtgctacttc

SEQ ID NO: 430253 - DNA, 25 bp, Artificial
  probe
  misc_feature (1)..(25): SEQ ID NO: 6126; WAN02497C; Start 154; Stop 178
cttaaatctcttcttgagtgctact

SEQ ID NO: 430254 - DNA, 25 bp, Artificial
  probe
  misc_feature (1)..(25): SEQ ID NO: 6126; WAN02497C; Start 155; Stop 179
ttaaatctcttcttgagtgctactt

SEQ ID NO: 430255 - DNA, 25 bp, Artificial
  probe
  misc_feature (1)..(25): SEQ ID NO: 6126; WAN02497C; Start 152; Stop 176
aacttaaatctcttcttgagtgcta

SEQ ID NO: 430256 - DNA, 25 bp, Artificial
  probe
  misc_feature (1)..(25): SEQ ID NO: 6126; WAN02497C; Start 150; Stop 174
taaacttaaatctcttcttgagtgc

SEQ ID NO: 430257 - DNA, 25 bp, Artificial
  probe
  misc_feature (1)..(25): SEQ ID NO: 6126; WAN02497C; Start 105; Stop 129
cctttcaatgatagtttacttacga

SEQ ID NO: 430258 - DNA, 25 bp, Artificial
  probe
  misc_feature (1)..(25): SEQ ID NO: 6126; WAN02497C; Start 135; Stop 159
acaggtttcaccaagtaaacttaaa

SEQ ID NO: 430259 - DNA, 25 bp, Artificial
  probe
  misc_feature (1)..(25): SEQ ID NO: 6126; WAN02497C; Start 134; Stop 158
aacaggtttcaccaagtaaacttaa

SEQ ID NO: 430260 - DNA, 25 bp, Artificial
  probe
  misc_feature (1)..(25): SEQ ID NO: 6126; WAN02497C; Start 133; Stop 157
aaacaggtttcaccaagtaaactta

SEQ ID NO: 430261 - DNA, 25 bp, Artificial
  probe
  misc_feature (1)..(25): SEQ ID NO: 6126; WAN02497C; Start 97; Stop 121
acatctcccctttcaatgatagttt

SEQ ID NO: 430262 - DNA, 25 bp, Artificial
  probe
  misc_feature (1)..(25): SEQ ID NO: 6126; WAN02497C; Start 95; Stop 119
aaacatctcccctttcaatgatagt

SEQ ID NO: 430263 - DNA, 25 bp, Artificial
  probe
  misc_feature (1)..(25): SEQ ID NO: 6126; WAN02497C; Start 143; Stop 167
caccaagtaaacttaaatctcttct

SEQ ID NO: 430264 - DNA, 25 bp, Artificial
  probe
  misc_feature (1)..(25): SEQ ID NO: 6126; WAN02497C; Start 142; Stop 166
tcaccaagtaaacttaaatctcttc

SEQ ID NO: 430265 - DNA, 25 bp, Artificial
  probe
  misc_feature (1)..(25): SEQ ID NO: 6126; WAN02497C; Start 100; Stop 124
tctcccctttcaatgatagtttact

SEQ ID NO: 430266 - DNA, 25 bp, Artificial
  probe
  misc_feature (1)..(25): SEQ ID NO: 6126; WAN02497C; Start 96; Stop 120
aacatctcccctttcaatgatagtt

SEQ ID NO: 430267 - DNA, 25 bp, Artificial
  probe
  misc_feature (1)..(25): SEQ ID NO: 6126; WAN02497C; Start 94; Stop 118
aaaacatctcccctttcaatgatag

SEQ ID NO: 430268 - DNA, 25 bp, Artificial
  probe
  misc_feature (1)..(25): SEQ ID NO: 6126; WAN02497C; Start 21; Stop 45
tcttaaaatcaactgtgagcaatgt

SEQ ID NO: 430269 - DNA, 25 bp, Artificial
  probe
  misc_feature (1)..(25): SEQ ID NO: 6126; WAN02497C; Start 101; Stop 125
ctcccctttcaatgatagtttactt

SEQ ID NO: 430270 - DNA, 25 bp, Artificial
  probe
  misc_feature (1)..(25): SEQ ID NO: 6126; WAN02497C; Start 25; Stop 49
aaaatcaactgtgagcaatgtaatg

SEQ ID NO: 430271 - DNA, 25 bp, Artificial
  probe
  misc_feature (1)..(25): SEQ ID NO: 6127; WAN024987; Start 60; Stop 84
attataactggtggtgctctcaatt

SEQ ID NO: 430272 - DNA, 25 bp, Artificial
  probe
  misc_feature (1)..(25): SEQ ID NO: 6127; WAN024987; Start 58; Stop 82
ctattataactggtggtgctctcaa

SEQ ID NO: 430273 - DNA, 25 bp, Artificial
  probe
  misc_feature (1)..(25): SEQ ID NO: 6127; WAN024987; Start 59; Stop 83
tattataactggtggtgctctcaat

SEQ ID NO: 430274 - DNA, 25 bp, Artificial
  probe
  misc_feature (1)..(25): SEQ ID NO: 6127; WAN024987; Start 56; Stop 80
tactattataactggtggtgctctc

SEQ ID NO: 430275 - DNA, 25 bp, Artificial
  probe
  misc_feature (1)..(25): SEQ ID NO: 6127; WAN024987; Start 61; Stop 85
ttataactggtggtgctctcaattc

SEQ ID NO: 430276 - DNA, 25 bp, Artificial
  probe
  misc_feature (1)..(25): SEQ ID NO: 6127; WAN024987; Start 57; Stop 81
actattataactggtggtgctctca

SEQ ID NO: 430277 - DNA, 25 bp, Artificial
  probe
  misc_feature (1)..(25): SEQ ID NO: 6127; WAN024987; Start 55; Stop 79
atactattataactggtggtgctct

SEQ ID NO: 430278 - DNA, 25 bp, Artificial
  probe
  misc_feature (1)..(25): SEQ ID NO: 6127; WAN024987; Start 62; Stop 86
tataactggtggtgctctcaattcc

SEQ ID NO: 430279 - DNA, 25 bp, Artificial
  probe
  misc_feature (1)..(25): SEQ ID NO: 6127; WAN024987; Start 219; Stop 243
taccgaaatccagataaagtgtcaa

SEQ ID NO: 430280 - DNA, 25 bp, Artificial
  probe
  misc_feature (1)..(25): SEQ ID NO: 6127; WAN024987; Start 218; Stop 242
ataccgaaatccagataaagtgtca

SEQ ID NO: 430281 - DNA, 25 bp, Artificial
  probe
  misc_feature (1)..(25): SEQ ID NO: 6127; WAN024987; Start 220; Stop 244
accgaaatccagataaagtgtcaat

SEQ ID NO: 430282 - DNA, 25 bp, Artificial
  probe
  misc_feature (1)..(25): SEQ ID NO: 6127; WAN024987; Start 74; Stop 98
tgctctcaattccatttatctacct

SEQ ID NO: 430283 - DNA, 25 bp, Artificial
  probe
  misc_feature (1)..(25): SEQ ID NO: 6127; WAN024987; Start 73; Stop 97
gtgctctcaattccatttatctacc

SEQ ID NO: 430284 - DNA, 25 bp, Artificial
  probe
  misc_feature (1)..(25): SEQ ID NO: 6127; WAN024987; Start 72; Stop 96
ggtgctctcaattccatttatctac

SEQ ID NO: 430285 - DNA, 25 bp, Artificial
  probe
  misc_feature (1)..(25): SEQ ID NO: 6127; WAN024987; Start 221; Stop 245
ccgaaatccagataaagtgtcaata

SEQ ID NO: 430286 - DNA, 25 bp, Artificial
  probe
  misc_feature (1)..(25): SEQ ID NO: 6127; WAN024987; Start 75; Stop 99
gctctcaattccatttatctacctc

SEQ ID NO: 430287 - DNA, 25 bp, Artificial
  probe
  misc_feature (1)..(25): SEQ ID NO: 6127; WAN024987; Start 54; Stop 78
tatactattataactggtggtgctc

SEQ ID NO: 430288 - DNA, 25 bp, Artificial
  probe
  misc_feature (1)..(25): SEQ ID NO: 6127; WAN024987; Start 217; Stop 241
tataccgaaatccagataaagtgtc

SEQ ID NO: 430289 - DNA, 25 bp, Artificial
  probe
  misc_feature (1)..(25): SEQ ID NO: 6127; WAN024987; Start 160; Stop 184
tctttgattaacacataaggacgaa

SEQ ID NO: 430290 - DNA, 25 bp, Artificial
  probe
  misc_feature (1)..(25): SEQ ID NO: 6127; WAN024987; Start 156; Stop 180
ttcgtctttgattaacacataagga

SEQ ID NO: 430291 - DNA, 25 bp, Artificial
  probe
  misc_feature (1)..(25): SEQ ID NO: 6127; WAN024987; Start 222; Stop 246
cgaaatccagataaagtgtcaatac

SEQ ID NO: 430292 - DNA, 25 bp, Artificial
  probe
  misc_feature (1)..(25): SEQ ID NO: 6127; WAN024987; Start 209; Stop 233
aagcatattataccgaaatccagat

SEQ ID NO: 430293 - DNA, 25 bp, Artificial
  probe
  misc_feature (1)..(25): SEQ ID NO: 6127; WAN024987; Start 159; Stop 183
gtctttgattaacacataaggacga

SEQ ID NO: 430294 - DNA, 25 bp, Artificial
  probe
  misc_feature (1)..(25): SEQ ID NO: 6127; WAN024987; Start 157; Stop 181
tcgtctttgattaacacataaggac

SEQ ID NO: 430295 - DNA, 25 bp, Artificial
  probe
  misc_feature (1)..(25): SEQ ID NO: 6127; WAN024987; Start 161; Stop 185
ctttgattaacacataaggacgaaa

SEQ ID NO: 430296 - DNA, 25 bp, Artificial
  probe
  misc_feature (1)..(25): SEQ ID NO: 6127; WAN024987; Start 216; Stop 240
ttataccgaaatccagataaagtgt

SEQ ID NO: 430297 - DNA, 25 bp, Artificial
  probe
  misc_feature (1)..(25): SEQ ID NO: 6127; WAN024987; Start 155; Stop 179
attcgtctttgattaacacataagg

SEQ ID NO: 430298 - DNA, 25 bp, Artificial
  probe
  misc_feature (1)..(25): SEQ ID NO: 6127; WAN024987; Start 78; Stop 102
ctcaattccatttatctacctctct

SEQ ID NO: 430299 - DNA, 25 bp, Artificial
  probe
  misc_feature (1)..(25): SEQ ID NO: 6127; WAN024987; Start 77; Stop 101
tctcaattccatttatctacctctc

SEQ ID NO: 430300 - DNA, 25 bp, Artificial
  probe
  misc_feature (1)..(25): SEQ ID NO: 6127; WAN024987; Start 76; Stop 100
ctctcaattccatttatctacctct

SEQ ID NO: 430301 - DNA, 25 bp, Artificial
  probe
  misc_feature (1)..(25): SEQ ID NO: 6127; WAN024987; Start 208; Stop 232
taagcatattataccgaaatccaga

SEQ ID NO: 430302 - DNA, 25 bp, Artificial
  probe
  misc_feature (1)..(25): SEQ ID NO: 6127; WAN024987; Start 206; Stop 230
tctaagcatattataccgaaatcca

SEQ ID NO: 430303 - DNA, 25 bp, Artificial
  probe
  misc_feature (1)..(25): SEQ ID NO: 6127; WAN024987; Start 71; Stop 95
tggtgctctcaattccatttatcta

SEQ ID NO: 430304 - DNA, 25 bp, Artificial
  probe
  misc_feature (1)..(25): SEQ ID NO: 6129; WAN0249AI; Start 6; Stop 30
gaaaggaaagggttgtctgaatttg

SEQ ID NO: 430305 - DNA, 25 bp, Artificial
  probe
  misc_feature (1)..(25): SEQ ID NO: 6129; WAN0249AI; Start 5; Stop 29
agaaaggaaagggttgtctgaattt

SEQ ID NO: 430306 - DNA, 25 bp, Artificial
  probe
  misc_feature (1)..(25): SEQ ID NO: 6129; WAN0249AI; Start 70; Stop 94
tggtgtaagttggtacaagtgattg

SEQ ID NO: 430307 - DNA, 25 bp, Artificial
  probe
  misc_feature (1)..(25): SEQ ID NO: 6129; WAN0249AI; Start 69; Stop 93
gtggtgtaagttggtacaagtgatt

SEQ ID NO: 430308 - DNA, 25 bp, Artificial
  probe
  misc_feature (1)..(25): SEQ ID NO: 6129; WAN0249AI; Start 7; Stop 31
aaaggaaagggttgtctgaatttgg

SEQ ID NO: 430309 - DNA, 25 bp, Artificial
  probe
  misc_feature (1)..(25): SEQ ID NO: 6129; WAN0249AI; Start 68; Stop 92
tgtggtgtaagttggtacaagtgat

SEQ ID NO: 430310 - DNA, 25 bp, Artificial
  probe
  misc_feature (1)..(25): SEQ ID NO: 6129; WAN0249AI; Start 67; Stop 91
ctgtggtgtaagttggtacaagtga

SEQ ID NO: 430311 - DNA, 25 bp, Artificial
  probe
  misc_feature (1)..(25): SEQ ID NO: 6129; WAN0249AI; Start 71; Stop 95
ggtgtaagttggtacaagtgattgt

SEQ ID NO: 430312 - DNA, 25 bp, Artificial
  probe
  misc_feature (1)..(25): SEQ ID NO: 6129; WAN0249AI; Start 8; Stop 32
aaggaaagggttgtctgaatttggg

SEQ ID NO: 430313 - DNA, 25 bp, Artificial
  probe
  misc_feature (1)..(25): SEQ ID NO: 6129; WAN0249AI; Start 50; Stop 74
atagagaatacttttcgctgtggtg

SEQ ID NO: 430314 - DNA, 25 bp, Artificial
  probe
  misc_feature (1)..(25): SEQ ID NO: 6129; WAN0249AI; Start 49; Stop 73
catagagaatacttttcgctgtggt

SEQ ID NO: 430315 - DNA, 25 bp, Artificial
  probe
  misc_feature (1)..(25): SEQ ID NO: 6129; WAN0249AI; Start 54; Stop 78
agaatacttttcgctgtggtgtaag

SEQ ID NO: 430316 - DNA, 25 bp, Artificial
  probe
  misc_feature (1)..(25): SEQ ID NO: 6129; WAN0249AI; Start 53; Stop 77
gagaatacttttcgctgtggtgtaa

SEQ ID NO: 430317 - DNA, 25 bp, Artificial
  probe
  misc_feature (1)..(25): SEQ ID NO: 6129; WAN0249AI; Start 47; Stop 71
cccatagagaatacttttcgctgtg

SEQ ID NO: 430318 - DNA, 25 bp, Artificial
  probe
  misc_feature (1)..(25): SEQ ID NO: 6129; WAN0249AI; Start 52; Stop 76
agagaatacttttcgctgtggtgta

SEQ ID NO: 430319 - DNA, 25 bp, Artificial
  probe
  misc_feature (1)..(25): SEQ ID NO: 6129; WAN0249AI; Start 51; Stop 75
tagagaatacttttcgctgtggtgt

SEQ ID NO: 430320 - DNA, 25 bp, Artificial
  probe
  misc_feature (1)..(25): SEQ ID NO: 6129; WAN0249AI; Start 66; Stop 90
gctgtggtgtaagttggtacaagtg

SEQ ID NO: 430321 - DNA, 25 bp, Artificial
  probe
  misc_feature (1)..(25): SEQ ID NO: 6129; WAN0249AI; Start 46; Stop 70
ccccatagagaatacttttcgctgt

SEQ ID NO: 430322 - DNA, 25 bp, Artificial
  probe
  misc_feature (1)..(25): SEQ ID NO: 6129; WAN0249AI; Start 117; Stop 141
accttaggctcaaattttagtcatg

SEQ ID NO: 430323 - DNA, 25 bp, Artificial
  probe
  misc_feature (1)..(25): SEQ ID NO: 6129; WAN0249AI; Start 72; Stop 96
gtgtaagttggtacaagtgattgta

SEQ ID NO: 430324 - DNA, 25 bp, Artificial
  probe
  misc_feature (1)..(25): SEQ ID NO: 6129; WAN0249AI; Start 85; Stop 109
caagtgattgtaccaactgcggaaa

SEQ ID NO: 430325 - DNA, 25 bp, Artificial
  probe
  misc_feature (1)..(25): SEQ ID NO: 6129; WAN0249AI; Start 48; Stop 72
ccatagagaatacttttcgctgtgg

SEQ ID NO: 430326 - DNA, 25 bp, Artificial
  probe
  misc_feature (1)..(25): SEQ ID NO: 6129; WAN0249AI; Start 4; Stop 28
cagaaaggaaagggttgtctgaatt

SEQ ID NO: 430327 - DNA, 25 bp, Artificial
  probe
  misc_feature (1)..(25): SEQ ID NO: 6129; WAN0249AI; Start 88; Stop 112
gtgattgtaccaactgcggaaaatt

SEQ ID NO: 430328 - DNA, 25 bp, Artificial
  probe
  misc_feature (1)..(25): SEQ ID NO: 6129; WAN0249AI; Start 99; Stop 123
aactgcggaaaatttgagaccttag

SEQ ID NO: 430329 - DNA, 25 bp, Artificial
  probe
  misc_feature (1)..(25): SEQ ID NO: 6129; WAN0249AI; Start 115; Stop 139
agaccttaggctcaaattttagtca

SEQ ID NO: 430330 - DNA, 25 bp, Artificial
  probe
  misc_feature (1)..(25): SEQ ID NO: 6129; WAN0249AI; Start 114; Stop 138
gagaccttaggctcaaattttagtc

SEQ ID NO: 430331 - DNA, 25 bp, Artificial
  probe
  misc_feature (1)..(25): SEQ ID NO: 6129; WAN0249AI; Start 90; Stop 114
gattgtaccaactgcggaaaatttg

SEQ ID NO: 430332 - DNA, 25 bp, Artificial
  probe
  misc_feature (1)..(25): SEQ ID NO: 6129; WAN0249AI; Start 63; Stop 87
ttcgctgtggtgtaagttggtacaa

SEQ ID NO: 430333 - DNA, 25 bp, Artificial
  probe
  misc_feature (1)..(25): SEQ ID NO: 6129; WAN0249AI; Start 43; Stop 67
gagccccatagagaatacttttcgc

SEQ ID NO: 430334 - DNA, 25 bp, Artificial
  probe
  misc_feature (1)..(25): SEQ ID NO: 6129; WAN0249AI; Start 41; Stop 65
gcgagccccatagagaatacttttc

SEQ ID NO: 430335 - DNA, 25 bp, Artificial
  probe
  misc_feature (1)..(25): SEQ ID NO: 6129; WAN0249AI; Start 116; Stop 140
gaccttaggctcaaattttagtcat

SEQ ID NO: 430336 - DNA, 25 bp, Artificial
  probe
  misc_feature (1)..(25): SEQ ID NO: 6129; WAN0249AI; Start 91; Stop 115
attgtaccaactgcggaaaatttga

SEQ ID NO: 430337 - DNA, 25 bp, Artificial
  probe
  misc_feature (1)..(25): SEQ ID NO: 6130; WAN02498A; Start 65; Stop 89
actcggtctgtttctctatattcac

SEQ ID NO: 430338 - DNA, 25 bp, Artificial
  probe
  misc_feature (1)..(25): SEQ ID NO: 6130; WAN02498A; Start 70; Stop 94
gtctgtttctctatattcacccttc

SEQ ID NO: 430339 - DNA, 25 bp, Artificial
  probe
  misc_feature (1)..(25): SEQ ID NO: 6130; WAN02498A; Start 64; Stop 88
tactcggtctgtttctctatattca

SEQ ID NO: 430340 - DNA, 25 bp, Artificial
  probe
  misc_feature (1)..(25): SEQ ID NO: 6130; WAN02498A; Start 61; Stop 85
agttactcggtctgtttctctatat

SEQ ID NO: 430341 - DNA, 25 bp, Artificial
  probe
  misc_feature (1)..(25): SEQ ID NO: 6130; WAN02498A; Start 62; Stop 86
gttactcggtctgtttctctatatt

SEQ ID NO: 430342 - DNA, 25 bp, Artificial
  probe
  misc_feature (1)..(25): SEQ ID NO: 6130; WAN02498A; Start 37; Stop 61
ccctgatttgattaatttgaaccga

SEQ ID NO: 430343 - DNA, 25 bp, Artificial
  probe
  misc_feature (1)..(25): SEQ ID NO: 6130; WAN02498A; Start 36; Stop 60
tccctgatttgattaatttgaaccg

SEQ ID NO: 430344 - DNA, 25 bp, Artificial
  probe
  misc_feature (1)..(25): SEQ ID NO: 6130; WAN02498A; Start 32; Stop 56
tgcttccctgatttgattaatttga

SEQ ID NO: 430345 - DNA, 25 bp, Artificial
  probe
  misc_feature (1)..(25): SEQ ID NO: 6130; WAN02498A; Start 63; Stop 87
ttactcggtctgtttctctatattc

SEQ ID NO: 430346 - DNA, 25 bp, Artificial
  probe
  misc_feature (1)..(25): SEQ ID NO: 6130; WAN02498A; Start 38; Stop 62
cctgatttgattaatttgaaccgag

SEQ ID NO: 430347 - DNA, 25 bp, Artificial
  probe
  misc_feature (1)..(25): SEQ ID NO: 6130; WAN02498A; Start 28; Stop 52
ccaatgcttccctgatttgattaat

SEQ ID NO: 430348 - DNA, 25 bp, Artificial
  probe
  misc_feature (1)..(25): SEQ ID NO: 6130; WAN02498A; Start 27; Stop 51
gccaatgcttccctgatttgattaa

SEQ ID NO: 430349 - DNA, 25 bp, Artificial
  probe
  misc_feature (1)..(25): SEQ ID NO: 6130; WAN02498A; Start 60; Stop 84
gagttactcggtctgtttctctata

SEQ ID NO: 430350 - DNA, 25 bp, Artificial
  probe
  misc_feature (1)..(25): SEQ ID NO: 6130; WAN02498A; Start 69; Stop 93
ggtctgtttctctatattcaccctt

SEQ ID NO: 430351 - DNA, 25 bp, Artificial
  probe
  misc_feature (1)..(25): SEQ ID NO: 6130; WAN02498A; Start 66; Stop 90
ctcggtctgtttctctatattcacc

SEQ ID NO: 430352 - DNA, 25 bp, Artificial
  probe
  misc_feature (1)..(25): SEQ ID NO: 6130; WAN02498A; Start 31; Stop 55
atgcttccctgatttgattaatttg

SEQ ID NO: 430353 - DNA, 25 bp, Artificial
  probe
  misc_feature (1)..(25): SEQ ID NO: 6130; WAN02498A; Start 39; Stop 63
ctgatttgattaatttgaaccgagt

SEQ ID NO: 430354 - DNA, 25 bp, Artificial
  probe
  misc_feature (1)..(25): SEQ ID NO: 6130; WAN02498A; Start 33; Stop 57
gcttccctgatttgattaatttgaa

SEQ ID NO: 430355 - DNA, 25 bp, Artificial
  probe
  misc_feature (1)..(25): SEQ ID NO: 6130; WAN02498A; Start 29; Stop 53
caatgcttccctgatttgattaatt

SEQ ID NO: 430356 - DNA, 25 bp, Artificial
  probe
  misc_feature (1)..(25): SEQ ID NO: 6130; WAN02498A; Start 68; Stop 92
cggtctgtttctctatattcaccct

SEQ ID NO: 430357 - DNA, 25 bp, Artificial
  probe
  misc_feature (1)..(25): SEQ ID NO: 6130; WAN02498A; Start 67; Stop 91
tcggtctgtttctctatattcaccc

SEQ ID NO: 430358 - DNA, 25 bp, Artificial
  probe
  misc_feature (1)..(25): SEQ ID NO: 6130; WAN02498A; Start 35; Stop 59
ttccctgatttgattaatttgaacc

SEQ ID NO: 430359 - DNA, 25 bp, Artificial
  probe
  misc_feature (1)..(25): SEQ ID NO: 6130; WAN02498A; Start 30; Stop 54
aatgcttccctgatttgattaattt

SEQ ID NO: 430360 - DNA, 25 bp, Artificial
  probe
  misc_feature (1)..(25): SEQ ID NO: 6130; WAN02498A; Start 40; Stop 64
tgatttgattaatttgaaccgagtt

SEQ ID NO: 430361 - DNA, 25 bp, Artificial
  probe
  misc_feature (1)..(25): SEQ ID NO: 6130; WAN02498A; Start 44; Stop 68
ttgattaatttgaaccgagttactc

SEQ ID NO: 430362 - DNA, 25 bp, Artificial
  probe
  misc_feature (1)..(25): SEQ ID NO: 6130; WAN02498A; Start 43; Stop 67
tttgattaatttgaaccgagttact

SEQ ID NO: 430363 - DNA, 25 bp, Artificial
  probe
  misc_feature (1)..(25): SEQ ID NO: 6130; WAN02498A; Start 34; Stop 58
cttccctgatttgattaatttgaac

SEQ ID NO: 430364 - DNA, 25 bp, Artificial
  probe
  misc_feature (1)..(25): SEQ ID NO: 6130; WAN02498A; Start 26; Stop 50
agccaatgcttccctgatttgatta

SEQ ID NO: 430365 - DNA, 25 bp, Artificial
  probe
  misc_feature (1)..(25): SEQ ID NO: 6130; WAN02498A; Start 25; Stop 49
tagccaatgcttccctgatttgatt

SEQ ID NO: 430366 - DNA, 25 bp, Artificial
  probe
  misc_feature (1)..(25): SEQ ID NO: 6130; WAN02498A; Start 42; Stop 66
atttgattaatttgaaccgagttac

SEQ ID NO: 430367 - DNA, 25 bp, Artificial
  probe
  misc_feature (1)..(25): SEQ ID NO: 6130; WAN02498A; Start 41; Stop 65
gatttgattaatttgaaccgagtta

SEQ ID NO: 430368 - DNA, 25 bp, Artificial
  probe
  misc_feature (1)..(25): SEQ ID NO: 6130; WAN02498A; Start 24; Stop 48
gtagccaatgcttccctgatttgat

SEQ ID NO: 430369 - DNA, 25 bp, Artificial
  probe
  misc_feature (1)..(25): SEQ ID NO: 6131; WAN02497H; Start 36; Stop 60
aactctctcgacaatacatgataca

SEQ ID NO: 430370 - DNA, 25 bp, Artificial
  probe
  misc_feature (1)..(25): SEQ ID NO: 6131; WAN02497H; Start 37; Stop 61
actctctcgacaatacatgatacat

SEQ ID NO: 430371 - DNA, 25 bp, Artificial
  probe
  misc_feature (1)..(25): SEQ ID NO: 6131; WAN02497H; Start 38; Stop 62
ctctctcgacaatacatgatacatt

SEQ ID NO: 430372 - DNA, 25 bp, Artificial
  probe
  misc_feature (1)..(25): SEQ ID NO: 6131; WAN02497H; Start 35; Stop 59
taactctctcgacaatacatgatac

SEQ ID NO: 430373 - DNA, 25 bp, Artificial
  probe
  misc_feature (1)..(25): SEQ ID NO: 6131; WAN02497H; Start 33; Stop 57
gttaactctctcgacaatacatgat

SEQ ID NO: 430374 - DNA, 25 bp, Artificial
  probe
  misc_feature (1)..(25): SEQ ID NO: 6131; WAN02497H; Start 34; Stop 58
ttaactctctcgacaatacatgata

SEQ ID NO: 430375 - DNA, 25 bp, Artificial
  probe
  misc_feature (1)..(25): SEQ ID NO: 6131; WAN02497H; Start 39; Stop 63
tctctcgacaatacatgatacatta

SEQ ID NO: 430376 - DNA, 25 bp, Artificial
  probe
  misc_feature (1)..(25): SEQ ID NO: 6131; WAN02497H; Start 40; Stop 64
ctctcgacaatacatgatacattat

SEQ ID NO: 430377 - DNA, 25 bp, Artificial
  probe
  misc_feature (1)..(25): SEQ ID NO: 6131; WAN02497H; Start 3; Stop 27
cccctccttattttatatgctgttt

SEQ ID NO: 430378 - DNA, 25 bp, Artificial
  probe
  misc_feature (1)..(25): SEQ ID NO: 6131; WAN02497H; Start 4; Stop 28
ccctccttattttatatgctgtttt

SEQ ID NO: 430379 - DNA, 25 bp, Artificial
  probe
  misc_feature (1)..(25): SEQ ID NO: 6131; WAN02497H; Start 41; Stop 65
tctcgacaatacatgatacattata

SEQ ID NO: 430380 - DNA, 25 bp, Artificial
  probe
  misc_feature (1)..(25): SEQ ID NO: 6131; WAN02497H; Start 5; Stop 29
cctccttattttatatgctgtttta

SEQ ID NO: 430381 - DNA, 25 bp, Artificial
  probe
  misc_feature (1)..(25): SEQ ID NO: 6132; WAN02496Y; Start 1; Stop 25
gctctgctcctttaccacttactag

SEQ ID NO: 430382 - DNA, 25 bp, Artificial
  probe
  misc_feature (1)..(25): SEQ ID NO: 6132; WAN02496Y; Start 2; Stop 26
ctctgctcctttaccacttactagt

SEQ ID NO: 430383 - DNA, 25 bp, Artificial
  probe
  misc_feature (1)..(25): SEQ ID NO: 6132; WAN02496Y; Start 24; Stop 48
agtatcagtatagcaaaattctcct

SEQ ID NO: 430384 - DNA, 25 bp, Artificial
  probe
  misc_feature (1)..(25): SEQ ID NO: 6132; WAN02496Y; Start 25; Stop 49
gtatcagtatagcaaaattctcctc

SEQ ID NO: 430385 - DNA, 25 bp, Artificial
  probe
  misc_feature (1)..(25): SEQ ID NO: 6132; WAN02496Y; Start 27; Stop 51
atcagtatagcaaaattctcctcta

SEQ ID NO: 430386 - DNA, 25 bp, Artificial
  probe
  misc_feature (1)..(25): SEQ ID NO: 6132; WAN02496Y; Start 26; Stop 50
tatcagtatagcaaaattctcctct

SEQ ID NO: 430387 - DNA, 25 bp, Artificial
  probe
  misc_feature (1)..(25): SEQ ID NO: 6132; WAN02496Y; Start 14; Stop 38
accacttactagtatcagtatagca

SEQ ID NO: 430388 - DNA, 25 bp, Artificial
  probe
  misc_feature (1)..(25): SEQ ID NO: 6132; WAN02496Y; Start 3; Stop 27
tctgctcctttaccacttactagta

SEQ ID NO: 430389 - DNA, 25 bp, Artificial
  probe
  misc_feature (1)..(25): SEQ ID NO: 6132; WAN02496Y; Start 6; Stop 30
gctcctttaccacttactagtatca

SEQ ID NO: 430390 - DNA, 25 bp, Artificial
  probe
  misc_feature (1)..(25): SEQ ID NO: 6132; WAN02496Y; Start 5; Stop 29
tgctcctttaccacttactagtatc

SEQ ID NO: 430391 - DNA, 25 bp, Artificial
  probe
  misc_feature (1)..(25): SEQ ID NO: 6132; WAN02496Y; Start 4; Stop 28
ctgctcctttaccacttactagtat

SEQ ID NO: 430392 - DNA, 25 bp, Artificial
  probe
  misc_feature (1)..(25): SEQ ID NO: 6132; WAN02496Y; Start 23; Stop 47
tagtatcagtatagcaaaattctcc

SEQ ID NO: 430393 - DNA, 25 bp, Artificial
  probe
  misc_feature (1)..(25): SEQ ID NO: 6132; WAN02496Y; Start 15; Stop 39
ccacttactagtatcagtatagcaa

SEQ ID NO: 430394 - DNA, 25 bp, Artificial
  probe
  misc_feature (1)..(25): SEQ ID NO: 6132; WAN02496Y; Start 8; Stop 32
tcctttaccacttactagtatcagt

SEQ ID NO: 430395 - DNA, 25 bp, Artificial
  probe
  misc_feature (1)..(25): SEQ ID NO: 6132; WAN02496Y; Start 7; Stop 31
ctcctttaccacttactagtatcag

SEQ ID NO: 430396 - DNA, 25 bp, Artificial
  probe
  misc_feature (1)..(25): SEQ ID NO: 6132; WAN02496Y; Start 13; Stop 37
taccacttactagtatcagtatagc

SEQ ID NO: 430397 - DNA, 25 bp, Artificial
  probe
  misc_feature (1)..(25): SEQ ID NO: 6132; WAN02496Y; Start 22; Stop 46
ctagtatcagtatagcaaaattctc

SEQ ID NO: 430398 - DNA, 25 bp, Artificial
  probe
  misc_feature (1)..(25): SEQ ID NO: 6132; WAN02496Y; Start 9; Stop 33
cctttaccacttactagtatcagta

SEQ ID NO: 430399 - DNA, 25 bp, Artificial
  probe
  misc_feature (1)..(25): SEQ ID NO: 6132; WAN02496Y; Start 16; Stop 40
cacttactagtatcagtatagcaaa

SEQ ID NO: 430400 - DNA, 25 bp, Artificial
  probe
  misc_feature (1)..(25): SEQ ID NO: 6132; WAN02496Y; Start 21; Stop 45
actagtatcagtatagcaaaattct

SEQ ID NO: 430401 - DNA, 25 bp, Artificial
  probe
  misc_feature (1)..(25): SEQ ID NO: 6132; WAN02496Y; Start 10; Stop 34
ctttaccacttactagtatcagtat

SEQ ID NO: 430402 - DNA, 25 bp, Artificial
  probe
  misc_feature (1)..(25): SEQ ID NO: 6132; WAN02496Y; Start 17; Stop 41
acttactagtatcagtatagcaaaa

SEQ ID NO: 430403 - DNA, 25 bp, Artificial
  probe
  misc_feature (1)..(25): SEQ ID NO: 6133; WAN024ASV; Start 27; Stop 51
taaggttgtagatggaactgacgaa

SEQ ID NO: 430404 - DNA, 25 bp, Artificial
  probe
  misc_feature (1)..(25): SEQ ID NO: 6133; WAN024ASV; Start 26; Stop 50
ttaaggttgtagatggaactgacga

SEQ ID NO: 430405 - DNA, 25 bp, Artificial
  probe
  misc_feature (1)..(25): SEQ ID NO: 6133; WAN024ASV; Start 25; Stop 49
tttaaggttgtagatggaactgacg

SEQ ID NO: 430406 - DNA, 25 bp, Artificial
  probe
  misc_feature (1)..(25): SEQ ID NO: 6133; WAN024ASV; Start 19; Stop 43
cactgttttaaggttgtagatggaa

SEQ ID NO: 430407 - DNA, 25 bp, Artificial
  probe
  misc_feature (1)..(25): SEQ ID NO: 6133; WAN024ASV; Start 22; Stop 46
tgttttaaggttgtagatggaactg

SEQ ID NO: 430408 - DNA, 25 bp, Artificial
  probe
  misc_feature (1)..(25): SEQ ID NO: 6133; WAN024ASV; Start 20; Stop 44
actgttttaaggttgtagatggaac

SEQ ID NO: 430409 - DNA, 25 bp, Artificial
  probe
  misc_feature (1)..(25): SEQ ID NO: 6133; WAN024ASV; Start 24; Stop 48
ttttaaggttgtagatggaactgac

SEQ ID NO: 430410 - DNA, 25 bp, Artificial
  probe
  misc_feature (1)..(25): SEQ ID NO: 6133; WAN024ASV; Start 23; Stop 47
gttttaaggttgtagatggaactga

SEQ ID NO: 430411 - DNA, 25 bp, Artificial
  probe
  misc_feature (1)..(25): SEQ ID NO: 6133; WAN024ASV; Start 21; Stop 45
ctgttttaaggttgtagatggaact

SEQ ID NO: 430412 - DNA, 25 bp, Artificial
  probe
  misc_feature (1)..(25): SEQ ID NO: 6133; WAN024ASV; Start 18; Stop 42
acactgttttaaggttgtagatgga

SEQ ID NO: 430413 - DNA, 25 bp, Artificial
  probe
  misc_feature (1)..(25): SEQ ID NO: 6133; WAN024ASV; Start 17; Stop 41
aacactgttttaaggttgtagatgg

SEQ ID NO: 430414 - DNA, 25 bp, Artificial
  probe
  misc_feature (1)..(25): SEQ ID NO: 6133; WAN024ASV; Start 16; Stop 40
aaacactgttttaaggttgtagatg

SEQ ID NO: 430415 - DNA, 25 bp, Artificial
  probe
  misc_feature (1)..(25): SEQ ID NO: 6133; WAN024ASV; Start 14; Stop 38
caaaacactgttttaaggttgtaga

SEQ ID NO: 430416 - DNA, 25 bp, Artificial
  probe
  misc_feature (1)..(25): SEQ ID NO: 6133; WAN024ASV; Start 13; Stop 37
tcaaaacactgttttaaggttgtag

SEQ ID NO: 430417 - DNA, 25 bp, Artificial
  probe
  misc_feature (1)..(25): SEQ ID NO: 6133; WAN024ASV; Start 12; Stop 36
ctcaaaacactgttttaaggttgta

SEQ ID NO: 430418 - DNA, 25 bp, Artificial
  probe
  misc_feature (1)..(25): SEQ ID NO: 6133; WAN024ASV; Start 8; Stop 32
gcagctcaaaacactgttttaaggt

SEQ ID NO: 430419 - DNA, 25 bp, Artificial
  probe
  misc_feature (1)..(25): SEQ ID NO: 6133; WAN024ASV; Start 15; Stop 39
aaaacactgttttaaggttgtagat

SEQ ID NO: 430420 - DNA, 25 bp, Artificial
  probe
  misc_feature (1)..(25): SEQ ID NO: 6133; WAN024ASV; Start 7; Stop 31
ggcagctcaaaacactgttttaagg

SEQ ID NO: 430421 - DNA, 25 bp, Artificial
  probe
  misc_feature (1)..(25): SEQ ID NO: 6133; WAN024ASV; Start 6; Stop 30
gggcagctcaaaacactgttttaag

SEQ ID NO: 430422 - DNA, 25 bp, Artificial
  probe
  misc_feature (1)..(25): SEQ ID NO: 6133; WAN024ASV; Start 5; Stop 29
cgggcagctcaaaacactgttttaa

SEQ ID NO: 430423 - DNA, 25 bp, Artificial
  probe
  misc_feature (1)..(25): SEQ ID NO: 6134; WAN0249BC; Start 26; Stop 50
ttggcattcctagtcttcatatcat

SEQ ID NO: 430424 - DNA, 25 bp, Artificial
  probe
  misc_feature (1)..(25): SEQ ID NO: 6134; WAN0249BC; Start 25; Stop 49
tttggcattcctagtcttcatatca

SEQ ID NO: 430425 - DNA, 25 bp, Artificial
  probe
  misc_feature (1)..(25): SEQ ID NO: 6134; WAN0249BC; Start 1; Stop 25
gctttaaacgaaatatgtcagtgtt

SEQ ID NO: 430426 - DNA, 25 bp, Artificial
  probe
  misc_feature (1)..(25): SEQ ID NO: 6134; WAN0249BC; Start 13; Stop 37
atatgtcagtgttttggcattccta

SEQ ID NO: 430427 - DNA, 25 bp, Artificial
  probe
  misc_feature (1)..(25): SEQ ID NO: 6134; WAN0249BC; Start 11; Stop 35
aaatatgtcagtgttttggcattcc

SEQ ID NO: 430428 - DNA, 25 bp, Artificial
  probe
  misc_feature (1)..(25): SEQ ID NO: 6134; WAN0249BC; Start 10; Stop 34
gaaatatgtcagtgttttggcattc

SEQ ID NO: 430429 - DNA, 25 bp, Artificial
  probe
  misc_feature (1)..(25): SEQ ID NO: 6134; WAN0249BC; Start 22; Stop 46
tgttttggcattcctagtcttcata

SEQ ID NO: 430430 - DNA, 25 bp, Artificial
  probe
  misc_feature (1)..(25): SEQ ID NO: 6134; WAN0249BC; Start 9; Stop 33
cgaaatatgtcagtgttttggcatt

SEQ ID NO: 430431 - DNA, 25 bp, Artificial
  probe
  misc_feature (1)..(25): SEQ ID NO: 6134; WAN0249BC; Start 12; Stop 36
aatatgtcagtgttttggcattcct

SEQ ID NO: 430432 - DNA, 25 bp, Artificial
  probe
  misc_feature (1)..(25): SEQ ID NO: 6134; WAN0249BC; Start 23; Stop 47
gttttggcattcctagtcttcatat

SEQ ID NO: 430433 - DNA, 25 bp, Artificial
  probe
  misc_feature (1)..(25): SEQ ID NO: 6134; WAN0249BC; Start 24; Stop 48
ttttggcattcctagtcttcatatc

SEQ ID NO: 430434 - DNA, 25 bp, Artificial
  probe
  misc_feature (1)..(25): SEQ ID NO: 6134; WAN0249BC; Start 14; Stop 38
tatgtcagtgttttggcattcctag

SEQ ID NO: 430435 - DNA, 25 bp, Artificial
  probe
  misc_feature (1)..(25): SEQ ID NO: 6134; WAN0249BC; Start 21; Stop 45
gtgttttggcattcctagtcttcat

SEQ ID NO: 430436 - DNA, 25 bp, Artificial
  probe
  misc_feature (1)..(25): SEQ ID NO: 6134; WAN0249BC; Start 8; Stop 32
acgaaatatgtcagtgttttggcat

SEQ ID NO: 430437 - DNA, 25 bp, Artificial
  probe
  misc_feature (1)..(25): SEQ ID NO: 6134; WAN0249BC; Start 7; Stop 31
aacgaaatatgtcagtgttttggca

SEQ ID NO: 430438 - DNA, 25 bp, Artificial
  probe
  misc_feature (1)..(25): SEQ ID NO: 6134; WAN0249BC; Start 19; Stop 43
cagtgttttggcattcctagtcttc

SEQ ID NO: 430439 - DNA, 25 bp, Artificial
  probe
  misc_feature (1)..(25): SEQ ID NO: 6134; WAN0249BC; Start 20; Stop 44
agtgttttggcattcctagtcttca

SEQ ID NO: 430440 - DNA, 25 bp, Artificial
  probe
  misc_feature (1)..(25): SEQ ID NO: 6134; WAN0249BC; Start 18; Stop 42
tcagtgttttggcattcctagtctt

SEQ ID NO: 430441 - DNA, 25 bp, Artificial
  probe
  misc_feature (1)..(25): SEQ ID NO: 6134; WAN0249BC; Start 15; Stop 39
atgtcagtgttttggcattcctagt
